United States Patent Application Publication US 2021/0199660 A1 - sequence listing, part 55

SEQ ID NO: 789222 - DNA, 120 bp, Artificial Sequence
  ENSG00000266173_20 (sequence is synthesized)
cagaataggcttgggcctggcggggagacgctgaagcggagttgccgggcgagagaggcgggctcctgctttccccttcctccccaccccctaggacttccaggtttaagtttttgaaac

SEQ ID NO: 789223 - DNA, 120 bp, Artificial Sequence
  ENSG00000266173_21 (sequence is synthesized)
ctatccagtaaagaatacccatagagtagtagccttgccaccttttgaagaaccatagatccatgtttaaagccctatctctctgcagcatttttactgtggatctgtgtgtgtttatat

SEQ ID NO: 789224 - DNA, 120 bp, Artificial Sequence
  ENSG00000266173_22 (sequence is synthesized)
gtagccccgcaggcactttttgctgtaatgacttttaagtggtttctattaataaatgtagtcctaagtacaataattgctgttctgaatgtgggtgtgtcttctgctaaaacacaaaat

SEQ ID NO: 789225 - DNA, 120 bp, Artificial Sequence
  ENSG00000266173_23 (sequence is synthesized)
agctgtgggttgtcacatcattcatggcatacggtgagtgggaaagggttcttggtagaaaggggttattgggactctgttgtcagattgcctgtgttttcctcctccattacctttcac

SEQ ID NO: 789226 - DNA, 120 bp, Artificial Sequence
  ENSG00000266173_24 (sequence is synthesized)
tttctattcttctggctttactatttttgttttctgaaaagcagtgtattttggcagatgttgtaggtggttttctacgtgagggtcggaatgatacggaagtgagggatgtaggaagta

SEQ ID NO: 789227 - DNA, 120 bp, Artificial Sequence
  ENSG00000266173_25 (sequence is synthesized)
aggcaggtagtgcagcctccactcctgagaagagtttgcagacagaggctgaccagagacacaaaatttaccaccagcttgtctgatagagaagaaataagaagaaagtggcttatttca

SEQ ID NO: 789228 - DNA, 120 bp, Artificial Sequence
  ENSG00000266173_26 (sequence is synthesized)
tgaatatcagtcatacaacattaaatgagtcgatgatacttttaagtgtagacgtttaactgcttatgaccccccgtgaggttgtgagttttcaaaatcaagttgtaattactaggacac

SEQ ID NO: 789229 - DNA, 120 bp, Artificial Sequence
  ENSG00000266173_27 (sequence is synthesized)
ttttttctaagtaatatcattagttttaattgaagacattttgaacatgaaagattttattatacttcaaaacttcgtcagataaaatgatttcaaaaacaatactagatttagcttctt

SEQ ID NO: 789230 - DNA, 120 bp, Artificial Sequence
  ENSG00000266173_28 (sequence is synthesized)
tacaaattcccattatttcatgagtttcttattttctttattatcaagtacctaatttctaaatgcagttgtaattattttagaattttgtaacagtgtataagtgctatgagatattat

SEQ ID NO: 789231 - DNA, 120 bp, Artificial Sequence
  ENSG00000266173_29 (sequence is synthesized)
gagtataccactttctttacatattaaagcataatttatgttttttgatgcagtgcatataatttttatgaagttttcaatttaggatattacttcttttttgatttggaaaaaatagtt

SEQ ID NO: 789232 - DNA, 120 bp, Artificial Sequence
  ENSG00000266173_30 (sequence is synthesized)
ataggtaagggcagaagatgctatagttccaattcacagtctgtatcatgcaacttatttctgaatgttacttaatcttttttctaatgtttatgcatataagaacaatttatattagaa

SEQ ID NO: 789233 - DNA, 120 bp, Artificial Sequence
  ENSG00000266173_31 (sequence is synthesized)
agagtaaacttcactgttaattaagaggaaaaaaggaatctctccatagcctgaactctgcccagtggaaagaatgcccccaagccaaagtgtaacaccagtccttaagggaaatacaat

SEQ ID NO: 789234 - DNA, 120 bp, Artificial Sequence
  ENSG00000266173_32 (sequence is synthesized)
cttgattccattgcttttaaatatgagctccttgtctgcttcaacgtagcctaattcaggtgaaacgaaaccactgatcagaatgacagaaatctaatactcgtttgaaataggccagta

SEQ ID NO: 789235 - DNA, 120 bp, Artificial Sequence
  ENSG00000266173_33 (sequence is synthesized)
tggataaagaatatgcaacttgttgtgtgccattttacaaactaacagggtcttgtgaataactactgtttcatctctgttttctgtgttatgaattccagtaatagttttcaaattgac

SEQ ID NO: 789236 - DNA, 120 bp, Artificial Sequence
  ENSG00000266173_34 (sequence is synthesized)
atcagtgatccaaggcatctgtaatgtagaacgagtaagatggaaccaatatagggaaggcaaaaacagtcttcattattacagccagtactatctatttctcatctgtcaaatttaaga

SEQ ID NO: 789237 - DNA, 120 bp, Artificial Sequence
  ENSG00000266173_35 (sequence is synthesized)
attattcatcaaataggcaaagaggagtggagaaaggaatcttgtttttagttcaagattctgttaaaaacttttccatagaaatgattcctaactgtactgcatgattctgttttcata

SEQ ID NO: 789238 - DNA, 120 bp, Artificial Sequence
  ENSG00000266173_36 (sequence is synthesized)
tgtcttttccttcaagaagtcccacccagtgggggatagtgacctcactctttgtttacttcctgtggcaaacctggtggtaagggaggccagcttggggaggggagcccgggagcaggg

SEQ ID NO: 789239 - DNA, 120 bp, Artificial Sequence
  ENSG00000266173_37 (sequence is synthesized)
gtgcaaatggaggcccacacgctacatgtctatttaaaacatatacattaagctaactagtttttataaatgcataaaatatgttctgtcctcctacttggataaatatacctggaaggt

SEQ ID NO: 789240 - DNA, 120 bp, Artificial Sequence
  ENSG00000266173_38 (sequence is synthesized)
cagtttctaatttagaattcccacagttcttaaccgcattccagctgacacctttggaacccccattctgtaagttcagcttctgttcatgaccctccagatgcctgtcctttggccacc

SEQ ID NO: 789241 - DNA, 120 bp, Artificial Sequence
  ENSG00000266173_39 (sequence is synthesized)
cctaggatccaagggtgcacagtcagtggcacagtctacccttgggaaaacagacccagggaagaggcttatgcaagcctcattaaatccagaaaatggatttggggtcatttgggcaag

SEQ ID NO: 789242 - DNA, 120 bp, Artificial Sequence
  ENSG00000266173_40 (sequence is synthesized)
gattacctgggtcccagctacttggagtgtggtctggaactgggaggggcaggatgcaggctctaattaagccacttccggaacccacaggctgcttgcccggtggtaggggcagctgga

SEQ ID NO: 789243 - DNA, 120 bp, Artificial Sequence
  ENSG00000266173_41 (sequence is synthesized)
gggtggccagagtgcagccccccagagcaggggcccagggaagtcctgggaggaggcagccttgagttggaaggcagacagcagtcacctgtgtggaggaggaactaggacactcttctc

SEQ ID NO: 789244 - DNA, 120 bp, Artificial Sequence
  ENSG00000266173_42 (sequence is synthesized)
ggcagacagcagcatgtgcagagacccagagtctagaaaaaacagatctggagaacagcaaggaggtgtaaatggtataaatggccaaggtgcagtgcttcttggggactgccaggtgac

SEQ ID NO: 789245 - DNA, 120 bp, Artificial Sequence
  ENSG00000266173_43 (sequence is synthesized)
aggcacagaaggaagcaagggtacattgtgaagggctttgatgccactttagagcactggttcctgtcctaaagcctgtggagcagtgctgaggattctaagcacaggagtgacagcata

SEQ ID NO: 789246 - DNA, 120 bp, Artificial Sequence
  ENSG00000266173_44 (sequence is synthesized)
agatggctcatttacaaagaccaccccggcagatggattagatccagtagctcagttaggtgggtatggaagtctatgtgaggaatctaggagatctcagtaaaataattcagtgacaga

SEQ ID NO: 789247 - DNA, 120 bp, Artificial Sequence
  ENSG00000266173_45 (sequence is synthesized)
ggatgctcaggaaagaaaaggtgactgaggaggaacaagaagtccaggcctagaagcagcaccatccactagaatttgctgcagcgaaggagggcttctgtggctgcactgtctagcgtg

SEQ ID NO: 789248 - DNA, 120 bp, Artificial Sequence
  ENSG00000266173_46 (sequence is synthesized)
ggagccatgagactgtgtggctgtcgagcatttagaaggtgaccagtgagactgtgggactgaattttaaacctcatttaaatcgaaatagccacaagtggctagtggctatcacgttag

SEQ ID NO: 789249 - DNA, 120 bp, Artificial Sequence
  ENSG00000266173_47 (sequence is synthesized)
tgcagctctagagcaatttccaggtttctggcttggacagcttatgcggtcatgaggacttccacgaggacagcagtcccaggtggggctggttttatatgtgttgagttggggtacttt

SEQ ID NO: 789250 - DNA, 120 bp, Artificial Sequence
  ENSG00000266173_48 (sequence is synthesized)
ggaacagccacccagcctggcctccccttgggcatcttgctcccgtgtggcctgctgcagcgacagcccaggctgtggcactgcagggactgcctctcagacctcatcggatccacctga

SEQ ID NO: 789251 - DNA, 120 bp, Artificial Sequence
  ENSG00000266173_49 (sequence is synthesized)
gcatggcagacggctgggcttcaaagcaggttcatctgactgctccttccctctagggtgaagactctacggtaaaaggaatttgatgccttggaaagggagagcggaaactgtgagccc

SEQ ID NO: 789252 - DNA, 120 bp, Artificial Sequence
  ENSG00000266173_50 (sequence is synthesized)
tgctttccagccatggcgaaagcgggtacttttgtgcaacccctctcctttcacgttggcctggctagggcggagctgccacgccagtgaccagcgtttctttgggaaaattggacttac

SEQ ID NO: 789253 - DNA, 120 bp, Artificial Sequence
  ENSG00000266173_51 (sequence is synthesized)
cagggtgtgaagggacttacctcccaaaggttctgcaggggaatctggagctacacacaggagggatcagctcctgggtgtgtcagaggccagcctggggagctctggccactgcttccc

SEQ ID NO: 789254 - DNA, 120 bp, Artificial Sequence
  ENSG00000266173_52 (sequence is synthesized)
atgagctgagggagagggagaggggacccgaggctgaggcataagtggcaggatttcgggaagctggggacacggcagtgatgctgcggtctctcctcccctttccctccaggcccagtg

SEQ ID NO: 789255 - DNA, 120 bp, Artificial Sequence
  ENSG00000266173_53 (sequence is synthesized)
ccagcaccctcctgaaccactctttcttcaagcaggtatcgtagccccttcgttctggttctggttctagttctggttctaacaactcacaatccctttagctttctctcccctcccttt

SEQ ID NO: 789256 - DNA, 120 bp, Artificial Sequence
  ENSG00000266173_54 (sequence is synthesized)
gaatgagagaaactaccccgcttccgaagcccctgaaagacactgctccttcctctcatggagttggctccgacagcccgtctgccaccaggccatggttccttgccccatggtgtcctg

SEQ ID NO: 789257 - DNA, 120 bp, Artificial Sequence
  ENSG00000266173_55 (sequence is synthesized)
ttctttagcccgtgggaatgaaaagatcatgggcagaaagcctcagttcaaactttgcttaaatcattttcattttttaagcatttgccagcggtgttccaggcactgggggaatacatc

SEQ ID NO: 789258 - DNA, 120 bp, Artificial Sequence
  ENSG00000266173_56 (sequence is synthesized)
cacccagaaagtgccaggtccccctattgtccatgctgccatctttgtgttgagcggcatccttcagtgccatttggttctgacttcagcttcatcattgcttccagggcgagctgcatg

SEQ ID NO: 789259 - DNA, 120 bp, Artificial Sequence
  ENSG00000266173_57 (sequence is synthesized)
ccacttccaccttttccactcttcaaatgatcacatttgcatattgggaacagtgtatttgtgaagagactctcaggccttccagggaccaccccccccccccacccgctacagcccagg

SEQ ID NO: 789260 - DNA, 120 bp, Artificial Sequence
  ENSG00000266173_58 (sequence is synthesized)
gctgcttgctaactccaggaacagaaatgttttttgggtgcctgcaggggatttgggcgccggagatgggggttggggataaggaagagagctcgagggaggggcagtgggtttaagttt

SEQ ID NO: 789261 - DNA, 120 bp, Artificial Sequence
  ENSG00000266173_59 (sequence is synthesized)
aactgagaaccgctctcggcgcggcggcggctgctagggcctgccgcagccgcggccactcggaaagggcgggacttccccgcagggcggggtggggcggagcgctctatcagtcctccc

SEQ ID NO: 789262 - DNA, 120 bp, Artificial Sequence
  ENSG00000266173_60 (sequence is synthesized)
cagcgtttgaccttttgggatcttgtggtgaggaccttaaaaataggatcctaatgcatcaggaaattcatgagaacccctacctctccacctgcttctcttttccaaacatgctttcat

SEQ ID NO: 789263 - DNA, 120 bp, Artificial Sequence
  ENSG00000266173_61 (sequence is synthesized)
tctctagacatcccttctccaagtgagaatttcatagcttttagcaaatgcattgattgttggaaaggacaagcagattaacatttgatgggaacaggtccttgtctcctcatttgtaga

SEQ ID NO: 789264 - DNA, 120 bp, Artificial Sequence
  ENSG00000266173_62 (sequence is synthesized)
caaccctaacacttgctctgatattagtgctgattactaccctgaatgtagtgttttgtttctcttcaaatagtgctggcactgagtcgggatttgtgtgtgtgtttagatgccagtctc

SEQ ID NO: 789265 - DNA, 120 bp, Artificial Sequence
  ENSG00000266173_63 (sequence is synthesized)
taggcggcctttcccatgattacagtgggtagctatgcccctgagccttcaggtaaagtgaagtttgactgaagttaatgaagccagagtttaaaatcaaggatctggattcttgctgaa

SEQ ID NO: 789266 - DNA, 120 bp, Artificial Sequence
  ENSG00000266173_64 (sequence is synthesized)
gcccaggagttcgaggccacggtgagccaggaactcaccactgcactttagcctgagcgacaaagagataacccatatcttaaaaacaacagcaacaaaacaacaaacaaaccagataca

SEQ ID NO: 789267 - DNA, 120 bp, Artificial Sequence
  ENSG00000266173_65 (sequence is synthesized)
ctcgtttttgttagtgaaaagtggagataagatctgtcccggctacttgactgagctatggaggaatcatgtgcaatttggaagtgctctggaaagtatactctggtcatcttacagacc

SEQ ID NO: 789268 - DNA, 120 bp, Artificial Sequence
  ENSG00000266173_66 (sequence is synthesized)
ggcggagccaagacggtcggggctgcttgctaactccaggaacaggtacctgcctggcggggtgcctggtttaagtttttgaaactgaagtaggcctacacagtaggaactcatgtcatt

SEQ ID NO: 789269 - DNA, 120 bp, Artificial Sequence
  ENSG00000266173_67 (sequence is synthesized)
tgggatatgtacacaggagagagctggccaggtggagtgtgtgaagaccaaaaatttgtagcaggaggggctcctgctctcgacatgacaccctccccgcttccccaggagtgtcaaagc

SEQ ID NO: 789270 - DNA, 120 bp, Artificial Sequence
  ENSG00000266173_68 (sequence is synthesized)
aaggaaagcaaggctgtctgataacgtgaccaggagcctagtttactttggctgggcagtctctctgaaaaggacatttaagttgagacatcagtgatgttgaggagaccaatgatgcga

SEQ ID NO: 789271 - DNA, 120 bp, Artificial Sequence
  ENSG00000266173_69 (sequence is synthesized)
caccctgtggctgggaccaggatggacagaaagggagtttgggaagaatgacagaggaagcaacctacagcatctcaggcaactactctgtgtgggcccaggccacctgctgctgtgggg

SEQ ID NO: 789272 - DNA, 120 bp, Artificial Sequence
  ENSG00000266173_70 (sequence is synthesized)
cagaagaggacatgggagagatggtgcccctggagcacaccactggcttcaaacaagattggagcaaaagattctcctgctggctttgaagaagctgccatgttgtgagagggccccatg

SEQ ID NO: 789273 - DNA, 120 bp, Artificial Sequence
  ENSG00000266173_71 (sequence is synthesized)
gcaaggaactgcaggtggcctctaggaagggaactcagagaagcccttgggtgacattcagaagaaaagaggaaccacagtcctacagccacaaaaaaactgaattctggcaacaaccat

SEQ ID NO: 789274 - DNA, 120 bp, Artificial Sequence
  ENSG00000266173_72 (sequence is synthesized)
ctgagcttagaaaagagcctcaaactcaagaaaggcaggcagcctggctgacaccttgatcgcagtcttgtgtgaccctcagcagaggacccatttgagtcatgcctggactcctcaccc

SEQ ID NO: 789275 - DNA, 120 bp, Artificial Sequence
  ENSG00000266173_73 (sequence is synthesized)
agggaaactggaaaatgataaatgtatattgttttaagcctctaggtttgtggtaatttgttatggagcaatagataactaatacaactgtctaccatcataaatgatcagcctaaccaa

SEQ ID NO: 789276 - DNA, 120 bp, Artificial Sequence
  ENSG00000266173_74 (sequence is synthesized)
gagaaggtcaaaagcacatacagaatttggcttaagaacagaaagttatttcagttgtcctttgttttgttcattttcactaggacaagcagagcgccaaaatgcctttgctttatttac

SEQ ID NO: 789277 - DNA, 120 bp, Artificial Sequence
  ENSG00000266173_75 (sequence is synthesized)
atttagaatcaaatatatctgactttagagaatcaggttgggtaatggtccttcatacacgtgttgctattttaaaactttttgcccttttttgaaaaaacatgttttctagttcccaca

SEQ ID NO: 789278 - DNA, 120 bp, Artificial Sequence
  ENSG00000266173_76 (sequence is synthesized)
ctcactgggaaatggccaaccatctctgtaactatataatcaattgtttattcacaaaatataaggaactggcctattcataataacattgtgtgttgatgccaagtaaatgtatgacca

SEQ ID NO: 789279 - DNA, 120 bp, Artificial Sequence
  ENSG00000266173_77 (sequence is synthesized)
cttaagagatttggaactatttggaggtaagtacagtatggcatttagccatcacttcaggatataaaaatcactacttttttgttgactaaatcaatctatagcaattggcaattctaa

SEQ ID NO: 789280 - DNA, 120 bp, Artificial Sequence
  ENSG00000266173_78 (sequence is synthesized)
gggcaagtgtaacctacagttgttggatttctttggttcctttttgaatttatggtttcccaaagatttgaagactaacatggcaattttccttggcctgtcttgattgttagaaagcca

SEQ ID NO: 789281 - DNA, 120 bp, Artificial Sequence
  ENSG00000266173_79 (sequence is synthesized)
gtatttacttaaaagcatatatgttttcttttgtccaggtgaaatacatatttttaaaggaagaaaactatttaaaagtctgtagccttgatttaaaaaataattgtcaagacaaaggaa

SEQ ID NO: 789282 - DNA, 120 bp, Artificial Sequence
  ENSG00000266173_80 (sequence is synthesized)
gcaatgatatgaaagttctggttttattgatgaatctagttgactcattttttcatggtagaaattatgagatttaagagaactaaggaaaaatctttcagaacaaaaatatgaacttcc

SEQ ID NO: 789283 - DNA, 120 bp, Artificial Sequence
  ENSG00000266173_81 (sequence is synthesized)
tattgtaaaacctgactgttgatttcagaagtaaactttgacaggcctaggcattaccctttggccattttcaaagtgagcctttttgggaactgtcatcttaatttagggcaacaaaaa

SEQ ID NO: 789284 - DNA, 120 bp, Artificial Sequence
  ENSG00000266173_82 (sequence is synthesized)
ttattttcaataaaaataatagtagagccccattctttgtgtctgaattctaagatactcttttaggatcctatagtttaagaaacagattaccggccgggtatggtggctcacgcctgt

SEQ ID NO: 789285 - DNA, 120 bp, Artificial Sequence
  ENSG00000266173_83 (sequence is synthesized)
taggattacagggcgagctgcatgtctccaaactcttcaaccatcccaatatcgtgccatatcgagccacttttattgcagacaatgagctgtgggttgtcacatcattcatggcatacg

SEQ ID NO: 789286 - DNA, 120 bp, Artificial Sequence
  ENSG00000266173_84 (sequence is synthesized)
tactcccctcccagcaaccggtctggcggcggcgcggcagtaaaactgaggaggcggagccaagacggtcggggctgcttgctaactccaggaacagacttaaaatttataagctgatga

SEQ ID NO: 789287 - DNA, 80 bp, Artificial Sequence
  ENSG00000266265_0 (sequence is synthesized)
ggcggcggcagcaggcggcaggcggcgagcacccggcctcctgcttctcgctccgaggctgcgggacggacgctcccggg

SEQ ID NO: 789288 - DNA, 120 bp, Artificial Sequence
  ENSG00000266265_1 (sequence is synthesized)
gctcgccggcggccgggcggtcccagcatgtcggccgccgtggcgtgcctggactacttcgccgccgagtgcctggtgtccatgtccgcgggcgccgtggttcaccgccgcccgccggac

SEQ ID NO: 789289 - DNA, 80 bp, Artificial Sequence
  ENSG00000266265_2 (sequence is synthesized)
cgccggaccccgagggcgcgggtggagccgctggctcggaggtgggtgcggcgccgccggagtccgctctgccgggtccg

SEQ ID NO: 789290 - DNA, 120 bp, Artificial Sequence
  ENSG00000266265_3 (sequence is synthesized)
gccccggcgcgggcggcgccgcgccccacctgctggctgcaagcgtctgggcggacttgcgcggcagctctggcgagggctcctgggagaactcgggggaagctccacgcgcctcgtccg

SEQ ID NO: 789291 - DNA, 120 bp, Artificial Sequence
  ENSG00000266265_4 (sequence is synthesized)
gcttctccgacccgatcccgtgctccgtccagaccccgtgctccgagctggctcccgcctccggcgccgcggcggtctgcgctcccgagagctcctccgatgcgcccgccgtcccaagcg

SEQ ID NO: 789292 - DNA, 120 bp, Artificial Sequence
  ENSG00000266265_5 (sequence is synthesized)
cgcctgctgccccgggcgcaccagcagcctctggtgggttctctggaggggccctaggggcaggccccgcccccgccgcggatcaggcgccccggaggaggtctgtcacacctgctgcca

SEQ ID NO: 789293 - DNA, 120 bp, Artificial Sequence
  ENSG00000266265_6 (sequence is synthesized)
agcgccaccaatgccccttcccgggctgcaccaaagcctattacaagtcgtcgcacctcaagtcccaccagcgcacccacacgggtgagcgccctttctcctgcgactggctcgactgcg

SEQ ID NO: 789294 - DNA, 120 bp, Artificial Sequence
  ENSG00000266265_7 (sequence is synthesized)
acaagaagtttacgcgttccgacgagctggcccgccactacaggacgcacacgggcgagaagcgcttctcctgccccctctgccccaagcagttctcccggagcgaccacctgaccaagc

SEQ ID NO: 789295 - DNA, 120 bp, Artificial Sequence
  ENSG00000266265_8 (sequence is synthesized)
atgctcgccgccacccaacctatcatccagatatgatcgagtaccggggacgtcgtcgaactccccgcatcgacccgccactcaccagcgaggtggaaagctccgcctccggctccggtc

SEQ ID NO: 789296 - DNA, 120 bp, Artificial Sequence
  ENSG00000266265_9 (sequence is synthesized)
ccggcccggcgcccagcttcaccacctgcctgtaggacagtcattgctgtcagtcttaccctcaaggatgatcccccaggccgttgtccctgctttctctctgcccatccttctttccca

SEQ ID NO: 789297 - DNA, 120 bp, Artificial Sequence
  ENSG00000266265_10 (sequence is synthesized)
gagtcattacaccaaggcacagactggttcctctgctctgagggtgggtccaggcagacatgtggactctggggaggtactgggggccggaaaatagcgggaattcttgcaacgtgtata

SEQ ID NO: 789298 - DNA, 120 bp, Artificial Sequence
  ENSG00000266265_11 (sequence is synthesized)
tcatcctaaaagtgggggttgcctcaagacagcccccaggaactgataagaagggatgaactcccgtactctccagagtactgaagattctcccctccctggaaccagggatgtgaaact

SEQ ID NO: 789299 - DNA, 120 bp, Artificial Sequence
  ENSG00000266265_12 (sequence is synthesized)
cagggcggaccttggagagggtgtcaggggtggcagtcttggaaatgtccaggactgggatggtgagaggcctttggaaacagaaatgatttctatttctgtaaacagcaatgtttacta

SEQ ID NO: 789300 - DNA, 120 bp, Artificial Sequence
  ENSG00000266265_13 (sequence is synthesized)
atttatttttagcatcttttaaatagggatcccaggttgatgggaggcttatgccctccaatcccccaattgccccagctacctctgctaggagaggccacataagctccatgtagatgt

SEQ ID NO: 789301 - DNA, 120 bp, Artificial Sequence
  ENSG00000266265_14 (sequence is synthesized)
gtggctgggagatacttcttgatgtctggggtgtgagtctgtttgcaggtcctgttgcatgatttggaaccctgcgcttgcgtcgtagcccttctccccatttggattcctacttgagga

SEQ ID NO: 789302 - DNA, 120 bp, Artificial Sequence
  ENSG00000266265_15 (sequence is synthesized)
tggtaacttcctggctcactctcacgctgagattggttaaacaatttgaaaactaccgtaaaggcaccagcaagaaaagggtggtccagactagttcccccttcactcagagagaaaact

SEQ ID NO: 789303 - DNA, 120 bp, Artificial Sequence
  ENSG00000266265_16 (sequence is synthesized)
caagcgaccttaagtttgggcggggcccgaaacaagaccgctcataaccattgataactttcagggaaatagaggcgtgtggacacagctgccccaccttatgtaatctcaggagtggta

SEQ ID NO: 789304 - DNA, 120 bp, Artificial Sequence
  ENSG00000266265_17 (sequence is synthesized)
gattctgttaatttcctaatggctaactagggggttatttccctcagagtctgcagattttcgtttctgaaacaggtgagttggtgggtgggagagggaagggtaacagactggtttctt

SEQ ID NO: 789305 - DNA, 120 bp, Artificial Sequence
  ENSG00000266265_18 (sequence is synthesized)
ccaaggagctggctgccttggatttgaggaaggagtagcaaggtgatagctattatgaaataggaggaactttctcctctgaccatatagtccctccaagttatatcctcagggcccctt

SEQ ID NO: 789306 - DNA, 120 bp, Artificial Sequence
  ENSG00000266265_19 (sequence is synthesized)
tcccgataagaaggaatcagacatcaacagtatttgttttttctatatgtgtctctgctgctgtggatgaaatcactgaccactctgcttgtgtatgtatgaatgtgtatatatgtgacc

SEQ ID NO: 789307 - DNA, 120 bp, Artificial Sequence
  ENSG00000266265_20 (sequence is synthesized)
ctttctttagagatgaggctgaaaggcatttcctgccctgggagatcccctctggccccctcctgaatattttgcaatagtccatcactgacacttggggaagatgctgtaatctcatag

SEQ ID NO: 789308 - DNA, 120 bp, Artificial Sequence
  ENSG00000266265_21 (sequence is synthesized)
gaccctaacgggcatctggttaaacaaattgctttcccctattttgcagatgaggatactgaagactagataagctcaaagtcatatgctaggttgctgggaagagccatgactagaact

SEQ ID NO: 789309 - DNA, 120 bp, Artificial Sequence
  ENSG00000266265_22 (sequence is synthesized)
taggtgtctggcctgctaagtgactctttccctcacacttgattacccccatctcttcctcctctctgggatcttagtccctccctcgctccctattctgtattgcttctgtgtaccttc

SEQ ID NO: 789310 - DNA, 120 bp, Artificial Sequence
  ENSG00000266265_23 (sequence is synthesized)
acatgttgattgaaccctttgcctattgtgtttgacccaaaagcccttttcttaactggttacgttccctcccttcacaccatgtggacataaagtgagaatgactttttggcatcctag

SEQ ID NO: 789311 - DNA, 120 bp, Artificial Sequence
  ENSG00000266338_0 (sequence is synthesized)
gggaccctgaggagccagctggcgcaggctatgggctgggcggcggttgagacagcggcggtatcgggaggggtaggtgagggtcgcgaggctgcgtgagcatctgagtgaacgcggtgc

SEQ ID NO: 789312 - DNA, 120 bp, Artificial Sequence
  ENSG00000266338_1 (sequence is synthesized)
ttttgggaacgcgggacgggcgacctgtggcgccaggagcgggccgaggcgtggcgcacggatgccgtctggatgggaagttacggtttacagcgaagtccacccagcgtttccgaggtg

SEQ ID NO: 789313 - DNA, 120 bp, Artificial Sequence
  ENSG00000266338_2 (sequence is synthesized)
aaggcgccgcgccaggccgggcgggcggcaatctgaaagcaaatcctgtttagatgcaggcgaaggttcctggtgacccaggctctcaccttaccgtcccttaccgtcctcctgagggtg

SEQ ID NO: 789314 - DNA, 120 bp, Artificial Sequence
  ENSG00000266338_3 (sequence is synthesized)
tcctggagcttcagtgctgtgtgttcttggcctccacgctggggctgccaccaactcccactgtccagggcttccagtggactctccgaggtactgatgtagaaacttccccattcggtg

SEQ ID NO: 789315 - DNA, 120 bp, Artificial Sequence
  ENSG00000266338_4 (sequence is synthesized)
attcggtgcaccaagagcaacctcacacggtgtgggctgaatgaagagctgccagatcccacaggtggcaagggctctggaacagccacataaagcccttgaagataaggatggtcaaac

SEQ ID NO: 789316 - DNA, 120 bp, Artificial Sequence
  ENSG00000266338_5 (sequence is synthesized)
atcatacctggagaaactcagatcttggtaagatttactggttgggaatccaaagttaatgccaagaagcagccgccagttgggatcaaatgtgagcctatggatcaagacggttacctg

SEQ ID NO: 789317 - DNA, 82 bp, Artificial Sequence
  ENSG00000266338_6 (sequence is synthesized)
cttatcagagtctgcgctactgacagtgctttcagctctgagttgaggcacctcgaaccttgtttttgtggtgaaggatcct

SEQ ID NO: 789318 - DNA, 64 bp, Artificial Sequence
  ENSG00000266338_7 (sequence is synthesized)
gttcagaaacctcaaagagatatgaagagtgcaaagatctcataaaatttatgctgaggaatga

SEQ ID NO: 789319 - DNA, 60 bp, Artificial Sequence
  ENSG00000266338_8 (sequence is synthesized)
gccatcacttgttcaaatagccatggcccttatgactccaaccagccacatactcatgtt

SEQ ID NO: 789320 - DNA, 120 bp, Artificial Sequence
  ENSG00000266338_9 (sequence is synthesized)
gaagaaggggaagaaaagaaggggaagatgacaacccaccatgccccaggctctacggcgtgctgatggaagtggaagagcctgaagtcttacaggactcactggatagatgttattcga

SEQ ID NO: 789321 - DNA, 84 bp, Artificial Sequence
  ENSG00000266338_10 (sequence is synthesized)
agcatatcagcttcgccctttacgtggacaataggttttttactttgacggtgacaagtctccacctggtgttccagatgggag

SEQ ID NO: 789322 - DNA, 120 bp, Artificial Sequence
  ENSG00000266338_11 (sequence is synthesized)
ttgacggtgacaagtctccacctggtgttccagatgggagtcatattcccacaataagcagctcttactaagccgagagatgtcattcctgcaggcaggacctataggcacgagaagatt

SEQ ID NO: 789323 - DNA, 120 bp, Artificial Sequence
  ENSG00000266338_12 (sequence is synthesized)
gaagcccagacataggatgggtcagtgagcatggctctattcctattctcaaaccatgccattggcaacctgtgctcaatctgaagacaatggacccatgttaggtgtgacacgttcaca

SEQ ID NO: 789324 - DNA, 120 bp, Artificial Sequence
  ENSG00000266338_13 (sequence is synthesized)
gtgtgacacgttcacataactgtgcagaacatgccgggagtgatcagtcagacattttaatttgaaccacgtatctctgggtagctacaaaattcctcagggatttcattttgcaggcat

SEQ ID NO: 789325 - DNA, 79 bp, Artificial Sequence
  ENSG00000266338_14 (sequence is synthesized)
atctctgggtagctacaaaattcctcagggatttcattttgcaggcatgtctctgagcttctatacctgctcaaggtca

SEQ ID NO: 789326 - DNA, 80 bp, Artificial Sequence
  ENSG00000266338_15 (sequence is synthesized)
tgctgttgcaaaaagaagaattttaatctatacaattaaaaccttttgcctatcactctggacttctggattgtttttta

SEQ ID NO: 789327 - DNA, 120 bp, Artificial Sequence; identical to SEQ ID NO: 490657
  ENSG00000266338_16 (sequence is synthesized)

SEQ ID NO: 789328 - DNA, 120 bp, Artificial Sequence
  ENSG00000266338_17 (sequence is synthesized)
acgttgaaggtggggactccaccgatgctcttcatatgaagatccacggtcaattccccatcctgcagcagtgagtccaggaccacagtatatttctggccccccagtgtcagtccattc

SEQ ID NO: 789329 - DNA, 120 bp, Artificial Sequence
  ENSG00000266338_18 (sequence is synthesized)
atgacaaagtttgaccagtctttgccaaccaggacaccaacctcagctggcgtgatgttgaggaaggttttccctgggatggcggcccagatggaagaaaatataacctgttgggaaact

SEQ ID NO: 789330 - DNA, 120 bp, Artificial Sequence
  ENSG00000266338_19 (sequence is synthesized)
gagcaacctcacacggtgtgggctgaatgaagagctgccagatcccacagaaatgtgattgataacagtaaagccacactactcaagtgcctgaaatacccctcattgtcttcttcaggt

SEQ ID NO: 789331 - DNA, 120 bp, Artificial Sequence
  ENSG00000266338_20 (sequence is synthesized)
caagtccaggatgcacatgaggagcgtttgtagcagtcactgaatcacctcatgactagcggggcaggcctctaattcaccgcaggatttccgatctcactctgttgcccaggctggagt

SEQ ID NO: 789332 - DNA, 120 bp, Artificial Sequence
  ENSG00000266412_0 (sequence is synthesized)
ctttgggccgtaggttagtgtggggccgtgtctcagtccacccaaggtctcctcggatcgcctggagaggcactcggacctgttatgtctggacacattgcttcaacatagaacgcacat

SEQ ID NO: 789333 - DNA, 120 bp, Artificial Sequence
  ENSG00000266412_1 (sequence is synthesized)
gaacaatgtggaggtctaggctggaatgggggcccagttgaccacttttgctctagctggagcagtgaggagaatgaataccttccaagaccagagtggcagctccagtaatagagaacc

SEQ ID NO: 789334 - DNA, 120 bp, Artificial Sequence
  ENSG00000266412_2 (sequence is synthesized)
ccttttgaggtgtagtgatgcacggagggacttggagcttgctattggtggagttctccgggctgaacagcaaattaaagataacttgcgagaggtcaaagctcagattcacagttgcat

SEQ ID NO: 789335 - DNA, 120 bp, Artificial Sequence
  ENSG00000266412_3 (sequence is synthesized)
aagccgtcacctggaatgtcttagaagccgtgaggtatggctgtatgaacaggtggaccttatttatcagcttaaagaggagacacttcaacagcaggctcagcagctctactcgttatt

SEQ ID NO: 789336 - DNA, 120 bp, Artificial Sequence
  ENSG00000266412_4 (sequence is synthesized)
gggccagttcaattgtcttactcatcaactggagtgtacccaaaacaaagatctagccaatcaagtctctgtgtgcctggagagactgggcagtttgacccttaagcctgaagattcaac

SEQ ID NO: 789337 - DNA, 120 bp, Artificial Sequence
  ENSG00000266412_5 (sequence is synthesized)
tgtcctgctctttgaagctgacacaattactctgcgccagaccatcaccacatttgggtctctcaaaaccattcaaattcctgagcacttgatggctcatgctagttcagcaaatattgg

SEQ ID NO: 789338 - DNA, 120 bp, Artificial Sequence
  ENSG00000266412_6 (sequence is synthesized)
gcccttcctggagaagagaggctgtatctccatgccagagcagaagtcagcatccggtattgtagctgtccctttcagcgaatggctccttggaagcaaacctgccagtggttatcaagc

SEQ ID NO: 789339 - DNA, 120 bp, Artificial Sequence
  ENSG00000266412_7 (sequence is synthesized)
tccttacatacccagcaccgacccccaggactggcttacccaaaagcagaccttggagaacagtcagacttcttccagagcctgcaatttcttcaataatgtcgggggaaacctaaaggg

SEQ ID NO: 789340 - DNA, 120 bp, Artificial Sequence
  ENSG00000266412_8 (sequence is synthesized)
cttagaaaactggctcctcaagagtgaaaaatcaagttatcaaaagtgtaacagccattccactactagttctttctccattgaaatggaaaaggttggagatcaagagcttcctgatca

SEQ ID NO: 789341 - DNA, 120 bp, Artificial Sequence
  ENSG00000266412_9 (sequence is synthesized)
agtgactccccaggaatcccataagctgcggaagcctgagaatggcagtcgtgaaaccagtgagaagtttaagctcttattccagtcctataatgtgaatgattggcttgtcaagactga

SEQ ID NO: 789342 - DNA, 120 bp, Artificial Sequence
  ENSG00000266412_10 (sequence is synthesized)
ctcctgtaccaactgtcagggaaaccagcccaaaggtgtggagattgaaaacctgggcaatctgaagtgcctgaatgaccacttggaggccaagaaaccattgtccacccccagcatggt

SEQ ID NO: 789343 - DNA, 120 bp, Artificial Sequence
  ENSG00000266412_11 (sequence is synthesized)
tacagaggattggcttgtccagaaccatcaggacccatgtaaggtagaggaggtgtgcagagccaatgagccctgcacaagctttgcagagtgtgtgtgtgatgagaattgtgagaagga

SEQ ID NO: 789344 - DNA, 120 bp, Artificial Sequence
  ENSG00000266412_12 (sequence is synthesized)
ggctctgtataagtggcttctgaagaaagaaggaaaggataaaaatgggatgcctgtggaacccaaacctgagcctgagaagcataaagattccctgaatatgtggctctgtcctagaaa

SEQ ID NO: 789345 - DNA, 120 bp, Artificial Sequence
  ENSG00000266412_13 (sequence is synthesized)
agaagtaatagaacaaactaaagcaccaaaggcaatgactccttctagaattgctgattccttccaagtcataaagaacagccccttgtcggagtggcttatcaggcccccatacaaaga

SEQ ID NO: 789346 - DNA, 120 bp, Artificial Sequence
  ENSG00000266412_14 (sequence is synthesized)
aggaagtcccaaggaagtgcctggtactgaagacagagctggcaaacagaagtttaaaagccccatgaatacttcctggtgttcctttaacacagctgactgggtcctgccaggaaagaa

SEQ ID NO: 789347 - DNA, 120 bp, Artificial Sequence
  ENSG00000266412_15 (sequence is synthesized)
gatgggcaacctcagccagttatcttctggagaagacaagtggctgcttcgaaagaaggcccaggaagtattacttaattcacctctacaggaggaacataacttccccccagaccatta

SEQ ID NO: 789348 - DNA, 120 bp, Artificial Sequence
  ENSG00000266412_16 (sequence is synthesized)
tggcctccctgcagtttgtgatctctttgcctgtatgcagcttaaagttgataaagagaagtggttatatcgaactcctctacaggcatacttcaaaatgaactttcaagatgtaaccgt

SEQ ID NO: 789349 - DNA, 120 bp, Artificial Sequence
  ENSG00000266412_17 (sequence is synthesized)
tgggaattttcagatcccatgtggattctagtagtttatatacctacctcgaagatgtgaaggaatggacaagagttgagcagcctttctgctgattatcacacatcatgagctgagtga

SEQ ID NO: 789350 - DNA, 120 bp, Artificial Sequence
  ENSG00000266412_18 (sequence is synthesized)
ctgcagcttgccaaatctttgtgtttctgggtctgaccaattagcttagttcttctcctgcctaattttgaactagtaaagcaaagtgagtcatcagattatgagttactgtttaaaaga

SEQ ID NO: 789351 - DNA, 120 bp, Artificial Sequence
  ENSG00000266412_19 (sequence is synthesized)
agagggcagtcaagggcttctggctgacccgagcggagatctcgcgagactgtcagacgtatggcgagaggtgtgggaggaagattgtgttgtcgcgagaactctgcctttgggccgtag

SEQ ID NO: 789352 - DNA, 120 bp, Artificial Sequence
  ENSG00000266412_20 (sequence is synthesized)
gttagtgtggggccgtgtctcagtccacccaaggtctcctcggatcgcctggagaggcactcggacctggagcagtgaggagaatgaataccttccaagaccagagtggcagctccagta

SEQ ID NO: 789353 - DNA, 120 bp, Artificial Sequence
  ENSG00000266412_21 (sequence is synthesized)
aaatgctgtttattcatgctgaggtgattcagttccctccttcttacagaagtattttaattcaccccacactagaaatgcagcatctttgtggacgtctttttcacaagcctccaaggc

SEQ ID NO: 789354 - DNA, 120 bp, Artificial Sequence
  ENSG00000266412_22 (sequence is synthesized)
tccttagattgggtcgttactaaaagtacattaaaacactcttgtttatcgaagtatattgatgtattctaaagctagtaaacttccctaacgtttaattgccctacagatgcttctctt

SEQ ID NO: 789355 - DNA, 120 bp, Artificial Sequence
  ENSG00000266412_23 (sequence is synthesized)
gctgtgggttttcttttgttagtggtctgaaataattattttcctgttctattaatacatagtgtattttgcacaaaaaaattaacctggtcaatagtgattaccaaaatatatattaat

SEQ ID NO: 789356 - DNA, 120 bp, Artificial Sequence
  ENSG00000266412_24 (sequence is synthesized)
aatcttggcaatttttgacattaattatgaaacattttagcccacgttagttctacattattcttcacttaaactcagctactgcaaattttgtctttctgtaaatgttattaaaatatc

SEQ ID NO: 789357 - DNA, 120 bp, Artificial Sequence
  ENSG00000266412_25 (sequence is synthesized)
cagtgagctctttagaaggactcagtattatttcaagactatttttgaggtaattctagccttttaaaatattctacagacctacggggcttaaaagaaccccagtaccgactaagcaaa

SEQ ID NO: 789358 - DNA, 120 bp, Artificial Sequence
  ENSG00000266412_26 (sequence is synthesized)
taggcaaaagacatgttggaaatgtagtatagtacttgaaacagtcactatcatagggataattggtgcatcctgtgtaaatggaagctgagcttgacacctggtgcttttaagtaggga

SEQ ID NO: 789359 - DNA, 120 bp, Artificial Sequence
  ENSG00000266412_27 (sequence is synthesized)
taaagtcatcctctcactgcaagcacagcatacctgtacctccaaaagtgacgttttagtgaacaggccgttttcaacacttgtgccttggggtgttcattgaagctttgtgaaaactac

SEQ ID NO: 789360 - DNA, 120 bp, Artificial Sequence
  ENSG00000266412_28 (sequence is synthesized)
tgatgttttctcagtctccttaaagttacgtccatgctttaaaatgtctgtgtaggagagaagtggggtttataatgttttctctaagatatctttgctgctttccagactttgaaacta

SEQ ID NO: 789361 - DNA, 120 bp, Artificial Sequence
  ENSG00000266412_29 (sequence is synthesized)
ttaagcttcttaactgcctcttaccggaaatacttctggggaaacttcatggtcccaaaatgtcattgccatacagcttcactagagttctttgaaccacagctgaaaagagctttgtat

SEQ ID NO: 789362 - DNA, 120 bp, Artificial Sequence
  ENSG00000266412_30 (sequence is synthesized)
tattttttaattccctccccagatatcatttaggagtattatataaaggtggtgggcaaaaacaatgtaaggagcctttccagttatcttgagttgcagctctgtagtttcttgaggcca

SEQ ID NO: 789363 - DNA, 120 bp, Artificial Sequence
  ENSG00000266412_31 (sequence is synthesized)
aacacactgtattttacaagtcaaaatataatttacattaatcactatgttaatgagtatgtaaaacattcttttgcattgatgaattttgtatctgcttccattaaaagcataacagcc

SEQ ID NO: 789364 - DNA, 120 bp, Artificial Sequence
  ENSG00000266412_32 (sequence is synthesized)
attgattcaattttacactgtgccaggcattgtggcattccacacaaatggtgagaagctaaaagtgagaaatttggcacaggtgaagaaggctgggtaacacatttgaaagactgctaa

SEQ ID NO: 789365 - DNA, 120 bp, Artificial Sequence
  ENSG00000266412_33 (sequence is synthesized)
acaggtcttgcatgactggcctaagtgcaaagtgaagcagcccatcacgctccagctctccaaatcggagccggcatttcacccatgtgatacaggagcagtgaggagaatgaatacctt

SEQ ID NO: 789366 - DNA, 120 bp, Artificial Sequence
  ENSG00000266412_34 (sequence is synthesized)
ctggagttgccgtgtgacgcgtgggcgggacgaggcccgggctcggggacctttcgcactcgggtcaggggtaaagcagcctgtcgcttgccgggcagctggtgagtcggtgacctggcc

SEQ ID NO: 789367 - DNA, 120 bp, Artificial Sequence
  ENSG00000266472_0 (sequence is synthesized)
ggggaaaggaaggctggcttggcgagagggcaggtttgcgggctttcgcccccttttccaaagaccaacaaagagtccttccccaactcccaactcaaccccttttggaactatgtgtgg

SEQ ID NO: 789368 - DNA, 120 bp, Artificial Sequence
  ENSG00000266472_1 (sequence is synthesized)
tggttgggaccctgtggcgcatccttgtcgctcgtgtccttctcatgcccggcgacgcgtctttgtggtaacgccctgctgccatctcttttcttctctatgcgaggatttggactggca

SEQ ID NO: 789369 - DNA, 120 bp, Artificial Sequence
  ENSG00000266472_2 (sequence is synthesized)
gtgagaataagagacaacgattcacgtctactttctaggatgacttccatgtgctccatctcgcgcgtccctgagcatgttgaatttccaaatcctaaataagccgcgcggtgtagtttg

SEQ ID NO: 789370 - DNA, 120 bp, Artificial Sequence
  ENSG00000266472_3 (sequence is synthesized)
tattatgttgcgtttctctttctgctttcctcgccctttctccatcatcctttaggctctacagagtgaaggtttaaatccaaggtcatggcaaaacatctgaagttcatcgccaggact

SEQ ID NO: 789371 - DNA, 120 bp, Artificial Sequence
  ENSG00000266472_4 (sequence is synthesized)
gtgatggtacaggaagggaacgtggaaagcgcatacaggaccctaaacagaatcctcactatggatgggctcattgaggacattaagcatcggcggtattatgagaagccatgctgccgg

SEQ ID NO: 789372 - DNA, 120 bp, Artificial Sequence
  ENSG00000266472_5 (sequence is synthesized)
cgacagagggaaagctatgaaaggtgccggcggatctacaacatggaaatggctcgcaagatcaacttcttgatgcgaaagaatcgggcagatccgtggcagggctgctgaggcctgtgg

SEQ ID NO: 789373 - DNA, 120 bp, Artificial Sequence
  ENSG00000266472_6 (sequence is synthesized)
ctcatccagttttctctccatctcttttctttgtacaatcccatttcctattaccattctctgcaataaactcaaatcacatgtctgcaagaaggcctccaaatatagaaacaatcccat

SEQ ID NO: 789374 - DNA, 120 bp, Artificial Sequence
  ENSG00000266472_7 (sequence is synthesized)
tagtcagcagtggaccctgtcttttattaagtgaaagaagaaactgagtctgaaagtactctaggagtagaatggtatttgccagggactggaggagggggcagtgaggagttattgttt

SEQ ID NO: 789375 - DNA, 120 bp, Artificial Sequence
  ENSG00000266472_8 (sequence is synthesized)
aggagggggcagtgaggagttattgtttaatgggtacagagtttcagtttgggcagatgaaaaagttcaggagacgatggcctggcatggtggctcacgcctgttatcccaacactttgg

SEQ ID NO: 789376 - DNA, 120 bp, Artificial Sequence
  ENSG00000266472_9 (sequence is synthesized)
atgaatggtgatggcggttgctcaaaaagttgaatgtacttaatgccactgaactatacccttaaatggtcacgatggtaaattttgtgttttactacaataaaaacttttttgaaagtc

SEQ ID NO: 789377 - DNA, 120 bp, Artificial Sequence
  ENSG00000266472_10 (sequence is synthesized)
aggtgtagagtccaggcccggggaagagaggcagtcaacagaggccagaaaggacgttgctatggtttccacgcacgttgtctccctcggcctgtttctttgcgcggcgctggcgattcc

SEQ ID NO: 789378 - DNA, 80 bp, Artificial Sequence
  ENSG00000266524_0 (sequence is synthesized)
acacacgggcgcacgcacacggcagccgggccagggacgaccctgtcagctgcagccccagaggtccggggcgcgcagcc

SEQ ID NO: 789379 - DNA, 120 bp, Artificial Sequence
  ENSG00000266524_1 (sequence is synthesized)
ctcgaagcagccgggccgggcgcgcagtgggctacaaactttcgcggcgcgagtccgccaaggcagcgcgccgactcgggctcggctcggctctgcgctgctccggacggctgtgaccgc

SEQ ID NO: 789380 - DNA, 120 bp, Artificial Sequence
  ENSG00000266524_2 (sequence is synthesized)
cggtacccacggaccgcgcgcccgggtgcctgctccgctaagcccctcgccccgcgcggacctcggtatccagcgccctgctgcccgggctctccccgcgcgccctactgccgcgaggtc

SEQ ID NO: 789381 - DNA, 120 bp, Artificial Sequence
  ENSG00000266524_3 (sequence is synthesized)
cgccctactgccgcgaggtcagtccgcagcctccggtgcgccagcgctcgccttcctcctcctggacttcggccctttgccgccctcaccacgccatggctcatgtccccgctcggacca

SEQ ID NO: 789382 - DNA, 120 bp, Artificial Sequence
  ENSG00000266524_4 (sequence is synthesized)
gcccgggacccgggccccagctgctgctgctgctgctgccgttgtttctgctgttgctccgggatgtggccggcagccacagggcccccgcctggtccgcactgcccgcggccgccgacg

SEQ ID NO: 789383 - DNA, 120 bp, Artificial Sequence
  ENSG00000266524_5 (sequence is synthesized)
gcctgcagggggacagggatctccagcggcaccctggggacgcggccgccacgttgggccccagcgcccaggacatggtcgctgtccacatgcacaggctctatgagaagtacagccggc

SEQ ID NO: 789384 - DNA, 120 bp, Artificial Sequence
  ENSG00000266524_6 (sequence is synthesized)
agggcgcgcggccgggagggggcaacacggtccgcagcttcagggccaggctggaagtggtcgaccagaaggccgtgtatttcttcaacctgacttccatgcaagactcggaaatgatcc

SEQ ID NO: 789385 - DNA, 120 bp, Artificial Sequence
  ENSG00000266524_7 (sequence is synthesized)
ttacggccactttccacttctactcagagccgcctcggtggcctcgagcgctcgaggtgctatgcaagccgcgggccaagaacgcttcaggccgcccgctgcccctgggcccgcccacac

SEQ ID NO: 789386 - DNA, 120 bp, Artificial Sequence
  ENSG00000266524_8 (sequence is synthesized)
gccagcacctgctcttccgcagcctctcgcagaacacggccacacaggggctactccgcggggccatggccctggcgcccccaccgcgcggcctgtggcaggccaaggacatctccccca

SEQ ID NO: 789387 - DNA, 120 bp, Artificial Sequence
  ENSG00000266524_9 (sequence is synthesized)
tcgtcaaggcggcccgccgggatggcgagctgctcctctccgcccagctggattctgaggagagggacccgggggtgccccggcccagcccctatgcgccctacatcctagtctatgcca

SEQ ID NO: 789388 - DNA, 120 bp, Artificial Sequence
  ENSG00000266524_10 (sequence is synthesized)
acgatctggccatctcggagcccaacagcgtggcagtgacgctgcagagatacgaccccttccctgccggagaccccgagccccgcgcagcccccaacaactcagcggacccccgcgtgc

SEQ ID NO: 789389 - DNA, 120 bp, Artificial Sequence
  ENSG00000266524_11 (sequence is synthesized)
cgagctgccggggctggatgagaggccgccgcgcgcccacgcacagcacttccacaagcaccagctgtggcccagccccttccgggcgctgaaaccccggccagggcgcaaagaccgcag

SEQ ID NO: 789390 - DNA, 120 bp, Artificial Sequence
  ENSG00000266524_12 (sequence is synthesized)
gaagaagggccaggaggtgttcatggccgcctcgcaggtgctggactttgacgagaagacgatgcagaaagcccggaggaagcagtgggatgagccgagggtgtgctcccggaggtacct

SEQ ID NO: 789391 - DNA, 120 bp, Artificial Sequence
  ENSG00000266524_13 (sequence is synthesized)
gaaggtggacttcgcagacatcggctggaatgaatggataatctcaccgaaatcttttgatgcctactactgcgcgggagcatgtgagttccccatgcctaagatcgttcgtccatccaa

SEQ ID NO: 789392 - DNA, 120 bp, Artificial Sequence
  ENSG00000266524_14 (sequence is synthesized)
ccatgccaccatccagagcattgtcagggctgtgggcatcatccctggcatcccagagccctgctgtgttcccgataagatgaactcccttggggtcctcttcctggatgagaatcggaa

SEQ ID NO: 789393 - DNA, 120 bp, Artificial Sequence
  ENSG00000266524_15 (sequence is synthesized)
tgtggttctgaaggtgtaccccaacatgtccgtggacacctgtgcctgccggtgagaccactccagggtggaaagaagccacgcccagcagagctgccttctcggagccttctgcaacca

SEQ ID NO: 789394 - DNA, 120 bp, Artificial Sequence
  ENSG00000266524_16 (sequence is synthesized)
ggacttgtggtgcagctgcagacacagagcacagctcatgggcaacatcactggggcccagagagagctgtccgccagtgcatcattagggggtctttcattgctagtgactagcccctt

SEQ ID NO: 789395 - DNA, 120 bp, Artificial Sequence
  ENSG00000266524_17 (sequence is synthesized)
aaatgccagcctgagtacctgaaggaatctgggaattagccctggcctgaaagtggcccatcattcatacccactgttctgaaggcttgaaaacaaaacatatccacaacattggcttga

SEQ ID NO: 789396 - DNA, 120 bp, Artificial Sequence
  ENSG00000266524_18 (sequence is synthesized)
tgtgatcatcatctcataactgagcaagaagactatgcaaatcttagggcgctcgctccctgcacacggaaagaactctgtttaaatgctcagttcagaacactttgggccacatagtga

SEQ ID NO: 789397 - DNA, 120 bp, Artificial Sequence
  ENSG00000266524_19 (sequence is synthesized)
ttttggaaaacaggataatcgtggtgtaaatgagtgtttcctttcaaagtccactgcagagcttttatccatatggtatgcacatgtagccaatattggtttctttttcttaatatatat

SEQ ID NO: 789398 - DNA, 120 bp, Artificial Sequence
  ENSG00000266524_20 (sequence is synthesized)
attttattttaaaacaacaaaaagggagggcgttgacaccattccccacagagatagtcatgctgagtgtgggttgtttaaacatgcatattgaaataacacatatagtaacgtgggaat

SEQ ID NO: 789399 - DNA, 120 bp, Artificial Sequence
  ENSG00000266524_21 (sequence is synthesized)
actaaaaaataaccaagattttatatttttgtaaattatactttctatactgtagattgtgtatgttatgtgtttttatggaaagctaataaattaaaggtacagtggtatcttgaaaaa

SEQ ID NO: 789400 - DNA, 120 bp, Artificial Sequence
  ENSG00000266714_0 (sequence is synthesized)
atgggcaggaaccagcgcaaagcgccccagcgcctggagaggcccgggaggccggcctcaggggagcaggagtcggggtcggccagcgcggatggcgcgcccagccgggaacgccgttcc

SEQ ID NO: 789401 - DNA, 120 bp, Artificial Sequence
  ENSG00000266714_1 (sequence is synthesized)
ttccgaccgcgggcaggcggacagggcgaaaccggcggccgagcctgccaccgccgggggccagggaacccctggtggccgcaggaagcccactgcagaggggaacggcggctgcagacg

SEQ ID NO: 789402 - DNA, 120 bp, Artificial Sequence
  ENSG00000266714_2 (sequence is synthesized)
ggggctgggctgtccccgaaagcccaggagaggcaaagcaacgcgcagcgtcagggacgcgggcccaggggcggccgcggggggcgcctggaggagggaagcctctccggaggagaagag

SEQ ID NO: 789403 - DNA, 120 bp, Artificial Sequence
  ENSG00000266714_3 (sequence is synthesized)
ctgggcggccgccgtaggaggaagcggaaagataaggggccctcggctcggcggggccgccggacgcccaggagcctcaatggggacacgtcgggtggggacggaggcagctcctgtccg

SEQ ID NO: 789404 - DNA, 120 bp, Artificial Sequence
  ENSG00000266714_4 (sequence is synthesized)
gacagcgaaacccgcgaggcccaggagagcggcagccagcgcggcacagcccgggagctgcggcccacgccggagcctacggacatgggctcggaagggacaaaaaccgggccggagtca

SEQ ID NO: 789405 - DNA, 120 bp, Artificial Sequence
  ENSG00000266714_5 (sequence is synthesized)
gcgctggagccaagcagcgacggcctggacagcgactggccccacgcagatacccggggccgggaagggtcgtcggggacggggcccctgggagccagcgagcattccggcggggactcc

SEQ ID NO: 789406 - DNA, 120 bp, Artificial Sequence
  ENSG00000266714_6 (sequence is synthesized)
gactcgagtccgctggggaccggacctggacggggctctcgggcagctatggcctccaggaccttcgaggacagctcgcgggctcctcgggacactgggccggccaaggacgcgagcgac

SEQ ID NO: 789407 - DNA, 120 bp, Artificial Sequence
  ENSG00000266714_7 (sequence is synthesized)
aaccgggcgcagcggggcgccgagccagaaacaatgcaggcctcgacggcccgggctccgcgccaccaggtcggaaaggcggtggggcaggtgccagcggcggcaggcgagggcgaagcg

SEQ ID NO: 789408 - DNA, 80 bp, Artificial Sequence
  ENSG00000266714_8 (sequence is synthesized)
ggagccgcagcaggagcggggccggaggacccagccccgctggcggccctcctggtggtccgcaggctcctcgcgaggcc

SEQ ID NO: 789409 - DNA, 80 bp, Artificial Sequence
  ENSG00000266714_9 (sequence is synthesized)
gctggcctcaaggagcggctcctgagtgtagcgcgagccctgggcctcctgcgctggctgcggcggcggctgcggctgcg

SEQ ID NO: 789410 - DNA, 120 bp, Artificial Sequence
  ENSG00000266714_10 (sequence is synthesized)
cgggcgagcgaggggtggggccgccggaaaccggacgaggggcggggtcatgggagaggaagcaaggggcggggccgcgggaaagcggatgaagggcggggccacgagcgaggggacgag

SEQ ID NO: 789411 - DNA, 120 bp, Artificial Sequence
  ENSG00000266714_11 (sequence is synthesized)
ggtcggggccgcgggaaagcggacgaagggcggggccacgagcgagggtacgaggggcggggctgcgggaaagcggacgaggggcggggtcacgagagaggtgacgagggccgggaccac

SEQ ID NO: 789412 - DNA, 120 bp, Artificial Sequence
  ENSG00000266714_12 (sequence is synthesized)
cagagagggtacgaggggtggggccgtgagcccgggctgcggcaccgtctagcgttgcgcctggctggcttagcagggctggggggtatgccgagggcttcccctggtggccgctccccg

SEQ ID NO: 789413 - DNA, 120 bp, Artificial Sequence
  ENSG00000266714_13 (sequence is synthesized)
caggtcccgacaagcccagtccccggcgacccttttgatcaggaggacgagactccagatcccaagttcgcggtcgtgttccccaggatccacagggcagggcgggcgtcgagcagccgc

SEQ ID NO: 789414 - DNA, 120 bp, Artificial Sequence
  ENSG00000266714_14 (sequence is synthesized)
agctctgaagaagcgtccgcagatgcccccacgggggaaggccgaggttggcctcgtgcaggggtgggggggcacagtgaggggtgcaggacgagtggggaaggggtgtccgggcttcgt

SEQ ID NO: 789415 - DNA, 120 bp, Artificial Sequence
  ENSG00000266714_15 (sequence is synthesized)
cgcggctccctccttgccccgactgcacccgacgggccttccctcgacgagagcggctccagcagtgaggcggagttggagaccctcaatgacgagcccccggtgcgctgggcgcagggc

SEQ ID NO: 789416 - DNA, 120 bp, Artificial Sequence
  ENSG00000266714_16 (sequence is synthesized)
tcaggcccccacgagggtcctaggcttggcgccgccgtgctgctaccccgactctccttggagacccgcctgcagcaggagggagacccgggcctccgtgggtccctgagggagctgtgg

SEQ ID NO: 789417 - DNA, 120 bp, Artificial Sequence
  ENSG00000266714_17 (sequence is synthesized)
gaacccgaggatgaggacgaggcggtgctggagagggacctggagctgagcctccggccgggcctggaggcgccacccttccccggtgccaagggcaggagcctcggagacggcctggaa

SEQ ID NO: 789418 - DNA, 120 bp, Artificial Sequence
  ENSG00000266714_18 (sequence is synthesized)
gacatggaggacctggcgcggttgcggctggtgtgtgacagctctgtgctgctgtgcctcaagaagagatttcacctgggccgtatctatacctttggggggcctgtcttgcttgttctg

SEQ ID NO: 789419 - DNA, 120 bp, Artificial Sequence
  ENSG00000266714_19 (sequence is synthesized)
aacccccaccggtccttgcctcttttttcacctgaggtccaggcaagctaccaccccaggaaggccctcagcaccactccacacatctttgccatcgtggcatcagcctatgacctggct

SEQ ID NO: 789420 - DNA, 120 bp, Artificial Sequence
  ENSG00000266714_20 (sequence is synthesized)
cagaatactgggcaggacccatgcatcctcctgtgtgggcacagtggctcagggaagacggaagccgccaaaaagatcatgcagttcctaagcagcctggagcaggatcagacggggaac

SEQ ID NO: 789421 - DNA, 120 bp, Artificial Sequence
  ENSG00000266714_21 (sequence is synthesized)
cgagagtgtcaggtggaggatatgctgcctatactcagcagctttggccatgccaagaccatcctcaatgccaatgccagccgcttcggccaggtcttctgcctctacctacagcaaggg

SEQ ID NO: 789422 - DNA, 120 bp, Artificial Sequence
  ENSG00000266714_22 (sequence is synthesized)
gtcatcgtgggagcctctgtgtctcattatctacttgagacctccagggtggtgtttcaggcccaggctgagcggagcttccatgttttttacaagctgctggcagggctggactccata

SEQ ID NO: 789423 - DNA, 120 bp, Artificial Sequence
  ENSG00000266714_23 (sequence is synthesized)
gagcgggagcggctctccctgcagggaccggagacttactactacctcaaccagggccaggcctgcaggctgcaaggcaaggaggatgcccaggactttgaggggctgctgaaggcactg

SEQ ID NO: 789424 - DNA, 120 bp, Artificial Sequence
  ENSG00000266714_24 (sequence is synthesized)
caggggctcggcttgtgcccagaggagttgaatgccgtctgggctgtgctggccgccatcctgcagctgggcaacatctgcttctcctcctcagagcgagagtcccaggaggtggctgct

SEQ ID NO: 789425 - DNA, 120 bp, Artificial Sequence
  ENSG00000266714_25 (sequence is synthesized)
gtgtctagctgggctgagatccacacagcagcccgactgctgcgggtaccaccagagtgcctggagggggctgtcaccaggagggtcacggagacgccctatggccaggtctcgcgatcc

SEQ ID NO: 789426 - DNA, 120 bp, Artificial Sequence
  ENSG00000266714_26 (sequence is synthesized)
ctgcccgtggaaagtgcctttgatgccagggacgccctggccaaggcactgtattcccgcctcttccaccggcttctgaggagaaccaatgcacggctggcaccaccaggggagggaggc

SEQ ID NO: 789427 - DNA, 120 bp, Artificial Sequence
  ENSG00000266714_27 (sequence is synthesized)
agcattggcaccgtcactgtcgtggatgcctacggctttgaggccctgcgggtgaatggcctggagcaactgtgcaacaacctcgccagcgagcgcctacagctcttctccagccagatg

SEQ ID NO: 789428 - DNA, 120 bp, Artificial Sequence
  ENSG00000266714_28 (sequence is synthesized)
ctgctggcccaggaggaggaggagtgtcggcgggagttgctgtcctgggtgcctgtccctcagcctccgagggagtcctgcctagacctcctggtagatcagccccacagcctcctgagt

SEQ ID NO: 789429 - DNA, 120 bp, Artificial Sequence
  ENSG00000266714_29 (sequence is synthesized)
atcctggacgcccagacatggctgtcccaggccacggaccacaccttcctccagaagagccactatcaccatggtgaccaccccagctatgccaagccccggctgcccctgcccgtgttc

SEQ ID NO: 789430 - DNA, 120 bp, Artificial Sequence
  ENSG00000266714_30 (sequence is synthesized)
accgtgcgacattatgcagggactgtcacctaccaggttcacaagtttttaaacagaaaccgggatcagctggaccctgctgtggtggagatgcttggccagagccagctccagctggtg

SEQ ID NO: 789431 - DNA, 120 bp, Artificial Sequence
  ENSG00000266714_31 (sequence is synthesized)
ggcagcctgttccaggaggcagagccccagtccaggggagggcgaggcagacccacgctggcctctcgcttccagcaggccctggaggacctcatagcccggctgggcaggagccatgtc

SEQ ID NO: 789432 - DNA, 120 bp, Artificial Sequence
  ENSG00000266714_32 (sequence is synthesized)
tatttcatccagtgcctcacccctaaccctggaaagcttccaggcctctttgacgtgggacatgtgacagagcaactgcaccaggcagccatactggaggccgtgggcacccgcagtgcc

SEQ ID NO: 789433 - DNA, 120 bp, Artificial Sequence
  ENSG00000266714_33 (sequence is synthesized)
aacttccccgtgcgtgtgccctttgaggccttcctggccagcttccaggccctggggtcagaagggcaggaagacctctctgaccgggagaagtgtggtgccgtcctgagccaggtgctg

SEQ ID NO: 789434 - DNA, 120 bp, Artificial Sequence
  ENSG00000266714_34 (sequence is synthesized)
ggggccgaatcacctctctatcaccttggagccaccaaggtcctgctgcaggagcagggctggcagcggctggaggagctccgggaccagcagcgctcccaggccctggtcgacctgcac

SEQ ID NO: 789435 - DNA, 120 bp, Artificial Sequence
  ENSG00000266714_35 (sequence is synthesized)
cgcagcttccacacctgcatctcccgccagcgcgtcctgccccggatgcaggctcgcatgcgtgggttccaggccaggtctgcaggcgttggagccagggctgaagtgggtgggcctgtc

SEQ ID NO: 789436 - DNA, 120 bp, Artificial Sequence
  ENSG00000266714_36 (sequence is synthesized)
ttcacacattcctccaacagctgttggctgaccgtctgcctcatctacccttgggccagatgctggaagcggtacctccggcggcgggcagctttgggacagctgaacaccatcctgctg

SEQ ID NO: 789437 - DNA, 120 bp, Artificial Sequence
  ENSG00000266714_37 (sequence is synthesized)
gtggcccagcccctgctccagaggcggcagagactgcagcttgggcgttggcagggctggcatagcagcgaaagggccttggagagagtgccaagcatggagctggggcgcttggagatc

SEQ ID NO: 789438 - DNA, 120 bp, Artificial Sequence
  ENSG00000266714_38 (sequence is synthesized)
ccggctgagctggccgtcatgctgaagacggcggaaagccatcgggacgccctggctgggagcatcaccgagtgcctgccgcctgaggttcctgcccggcccagcctgactctcccagca

SEQ ID NO: 789439 - DNA, 120 bp, Artificial Sequence
  ENSG00000266714_39 (sequence is synthesized)
gacattgacctgttccctttctccagcttcgtcgccatcggctttcaggaaccgtccctgcccaggccagggcagccactggcgaagcccctaacccagctggatggagacaaccctcag

SEQ ID NO: 789440 - DNA, 120 bp, Artificial Sequence
  ENSG00000266714_40 (sequence is synthesized)
gtgccggccagggctgcggaatgagctctttagccagctggtggcccagctatggcagaacccagatgaacagcagagccagcgtggctgggccctcatggctgttttgctcagcgcctt

SEQ ID NO: 789441 - DNA, 120 bp, Artificial Sequence
  ENSG00000266714_41 (sequence is synthesized)
tcccccactgcctgtcctacagaagccactgctcaagttcgtgtctgaccaggcccccaggggcatggcagcgctgtgccagcacaagctgctgggggccttggagcagtcgcagctggc

SEQ ID NO: 789442 - DNA, 120 bp, Artificial Sequence
  ENSG00000266714_42 (sequence is synthesized)
ctcgggggccactcgggcccaccccccgacccagctggagtggctggccggatggcggcggggccgcatggcgctggatgtgttcaccttcagcgaggagtgctactcggccgaggtgga

SEQ ID NO: 789443 - DNA, 120 bp, Artificial Sequence
  ENSG00000266714_43 (sequence is synthesized)
gtcttggaccaccggggagcagctggctgggtggatcctgcagagcagggacgcatggcaggacttggctggctgcgactttgtgctggacctgatcagccagactgaggacctggggga

SEQ ID NO: 789444 - DNA, 120 bp, Artificial Sequence
  ENSG00000266714_44 (sequence is synthesized)
cccagctcgcccccgcagctaccccatcactcctcttggctcagccgaggccattccccttgcccctggcattcaggccccctcactgcccccaggaccccctccaggtccagccccaac

SEQ ID NO: 789445 - DNA, 120 bp, Artificial Sequence
  ENSG00000266714_45 (sequence is synthesized)
gctgcccagcagggaccacacaggggaggtccagaggtcagggagcctggacggcttcctggaccagatcttccagccagtgatatcctccggcctcagcgatctggaacaaagctgggc

SEQ ID NO: 789446 - DNA, 120 bp, Artificial Sequence
  ENSG00000266714_46 (sequence is synthesized)
tctgagcagccgcatgaagggagggggcgccattgggcccacacagcagggctaccccatggtgtacccaggaatgattcagatgcctgcataccagccaggcatggtccctgcacccat

SEQ ID NO: 789447 - DNA, 120 bp, Artificial Sequence
  ENSG00000266714_47 (sequence is synthesized)
gcccatgatgccagcaatgggcacagtccctgccatgccagccatggtggtgccgccgcagccaccgcttcccagcctggatgcagggcagctggccgtccagcagcagaactttatcca

SEQ ID NO: 789448 - DNA, 120 bp, Artificial Sequence
  ENSG00000266714_48 (sequence is synthesized)
gcagcaggcgctaatcctggcccagcagatgacagcccaggccatgtccctgtccctggagcagcagatgcagcagcggcagcagcaggctcgggcctccgaggctgcgtcccaggcctc

SEQ ID NO: 789449 - DNA, 120 bp, Artificial Sequence
  ENSG00000266714_49 (sequence is synthesized)
accctcagccgtcacctccaagcccaggaagccccccacacccccggagaagccacagcgtgacctgggatcagagggtggctgcctgagggagacctccgaggaggctgaagacaggcc

SEQ ID NO: 789450 - DNA, 120 bp, Artificial Sequence
  ENSG00000266714_50 (sequence is synthesized)
ctatcagcccaagagcttccagcagaaacggaactatttccagaggatggggcagccacagatcacagtgaggacgatgaagcccccggccaaggtccacatcccccagggggaagcgca

SEQ ID NO: 789451 - DNA, 120 bp, Artificial Sequence
  ENSG00000266714_51 (sequence is synthesized)
aggaggaggaggaggaggaggaggagcaggaggagcaagaagtggaaacaagagcagtgccgtcccctcctcctccccccatcgtgaagaagccattgaagcaaggtggggccaaagctc

SEQ ID NO: 789452 - DNA, 120 bp, Artificial Sequence
  ENSG00000266714_52 (sequence is synthesized)
caaagctccaaaagaggctgaggctgagccagccaaggagacagcggccaagggccatggccaagggccagcccaaggcagggggactgtggtgcgcagctcagactccaagcccaagcg

SEQ ID NO: 789453 - DNA, 120 bp, Artificial Sequence
  ENSG00000266714_53 (sequence is synthesized)
gccacaacccagcagggaaattggcaacatcatccgcatgtaccagagccgcccgggccccgtgcctgtgcccgtgcagccatccaggcctcccaaagctttcctgaggaaaatcgaccc

SEQ ID NO: 789454 - DNA, 120 bp, Artificial Sequence
  ENSG00000266714_54 (sequence is synthesized)
caaggacgaggctctggccaagctgggtatcaacggtgcccactcgtccccgccgatgctgtcccccagcccaggaaagggccccccgccagctgtggctcctcgacccaaggccccgct

SEQ ID NO: 789455 - DNA, 120 bp, Artificial Sequence
  ENSG00000266714_55 (sequence is synthesized)
acagcttgggccctctagctccatcaaggaaaagcaggggccccttctggacctgtttggccagaagctgcctattgcccacacacccccacctccaccagcgccaccactgcctctgcc

SEQ ID NO: 789456 - DNA, 120 bp, Artificial Sequence
  ENSG00000266714_56 (sequence is synthesized)
cgaggacccagggaccctttcagcagagcgtcgttgcttgacacagcccgtggaggaccagggggtctccacccagctactcgcgccctctggcagcgtgtgcttctcctacaccggcac

SEQ ID NO: 789457 - DNA, 120 bp, Artificial Sequence
  ENSG00000266714_57 (sequence is synthesized)
gccctggaagttgttcctacgcaaggaggtgttctacccacgggagaacttcagccatccctactacctgaggctcctctgtgagcagatcctacgggacaccttctccgagtcctgtat

SEQ ID NO: 789458 - DNA, 120 bp, Artificial Sequence
  ENSG00000266714_58 (sequence is synthesized)
ccggatttcccagaatgagcggcggaaaatgaaagacctgctgggaggcttggaggtggacctggattctctcaccaccaccgaagacagcgtcaagaagcgcatcgtggtggccgctcg

SEQ ID NO: 789459 - DNA, 120 bp, Artificial Sequence
  ENSG00000266714_59 (sequence is synthesized)
ggacaactgggccaattacttctcccgcttctttcctgtctcgggcgagagtggcagcgacgtgcagctgttagccgtgtcccaccgtgcgctagcccacgaccctgggctagaggtggg

SEQ ID NO: 789460 - DNA, 120 bp, Artificial Sequence
  ENSG00000266714_60 (sequence is synthesized)
ggcaggtggcaaggtgacctcagttcatgcccgatccctgcgcagctttgcggaggtgctgggtgtggagtgccggggcggctccaccctggagctgtcactgaagagcgagcagctggt

SEQ ID NO: 789461 - DNA, 120 bp, Artificial Sequence
  ENSG00000266714_61 (sequence is synthesized)
gctgcacacagcccgggcaagggccatcgaggcgctggttgagctattcctgaatgagcttaagaaggactccggctatgtcatcgccctgcgcagctacatcactgacaactgcagcct

SEQ ID NO: 789462 - DNA, 120 bp, Artificial Sequence
  ENSG00000266714_62 (sequence is synthesized)
cctcagcttccaccgtggggacctcatcaagctgctgccggtggccaccctggagccaggctggcagtttggctctgccgggggccgttccggactctttcctgccgacatagtgcagcc

SEQ ID NO: 789463 - DNA, 120 bp, Artificial Sequence
  ENSG00000266714_63 (sequence is synthesized)
ggctgccgctcccgacttttccttctccaaggagcagaggagtggctggcacaagggtcagctgtccaacggggaaccagggctggctcggtgggacagggcctcagagcgccctgccca

SEQ ID NO: 789464 - DNA, 120 bp, Artificial Sequence
  ENSG00000266714_64 (sequence is synthesized)
cccttggagccaggcacacagtgacgactcggaggccaccagcctgtcctctgtggcctatgcctttctgcccgactcccacagctacaccatgcaggaattcgcccggcgttacttccg

SEQ ID NO: 789465 - DNA, 120 bp, Artificial Sequence
  ENSG00000266714_65 (sequence is synthesized)
gaggtcccaggccttgctgggccagactgatggaggtgccgcaggaaaggacacggacagcctggtgcagtacaccaaggctcccatccaggagtcgctcctcagcctcagtgatgatgt

SEQ ID NO: 789466 - DNA, 120 bp, Artificial Sequence
  ENSG00000266714_66 (sequence is synthesized)
gagcaagctggctgtagccagcttcctggccctgatgcggtttatgggtgaccagtccaagccccggggcaaggatgagatggatctgctctatgaactgctgaagctgtgccagcagga

SEQ ID NO: 789467 - DNA, 120 bp, Artificial Sequence
  ENSG00000266714_67 (sequence is synthesized)
gaagctgagggatgagatttactgccaggttatcaagcaggtcacgggacacccccggccggaacactgcactcgaggctggagcttcctcagccttctcacaggcttcttccccccgtc

SEQ ID NO: 789468 - DNA, 120 bp, Artificial Sequence
  ENSG00000266714_68 (sequence is synthesized)
gaccaggctgatgccctacctgaccaagtttctgcaggattcaggccccagccaagagctggcccggagcagccaggagcacctccagcgcacagtcaaatatggggggcgccggcggat

SEQ ID NO: 789469 - DNA, 120 bp, Artificial Sequence
  ENSG00000266714_69 (sequence is synthesized)
gcccccaccgggtgaaatgaaggctttcctggtagcagcagaagtgcaggaggagctgtgccggcaaatgggtatcacggagcctcaggaagtgcaggaattcgccctcttcctcatcaa

SEQ ID NO: 789470 - DNA, 120 bp, Artificial Sequence
  ENSG00000266714_70 (sequence is synthesized)
agagaagagccagctggtgcggcccctgcagcccgccgaatacctcaacagcgtggtagtggaccaggacgtgagcctgcacagccggcggctccactgggagaccccactgcacttcga

SEQ ID NO: 789471 - DNA, 120 bp, Artificial Sequence
  ENSG00000266714_71 (sequence is synthesized)
taactccacctacatcagcacccactacagccaggtgctgtgggactaccttcaggggaagctgccagtcagcgccaaggcagacgcgcagctcgccaggctggccgccctgcagcacct

SEQ ID NO: 789472 - DNA, 120 bp, Artificial Sequence
  ENSG00000266714_72 (sequence is synthesized)
cagcaaggccaacaggaataccccctcagggcaggacctgctagcttacgtgccaaagcagctgcaacggcaggtgaacacggcctccatcaagaacctgatgggtcaggagctgagacg

SEQ ID NO: 789473 - DNA, 120 bp, Artificial Sequence
  ENSG00000266714_73 (sequence is synthesized)
gctggaaggacacagcccccaggaagcacagatcagcttcattgctgacctgggggaccaagcagagcaggttccagggccccagcagtcagatttcctgcctgcaccctctccacccgc

SEQ ID NO: 789474 - DNA, 120 bp, Artificial Sequence
  ENSG00000266714_74 (sequence is synthesized)
agaggccatgagccagctgcccctcttcggctacaccgtctatggggtgctgcgagtgagcatgcaggccctgtccggacccactctcctggggctcaaccgccagcatctcatcctcat

SEQ ID NO: 789475 - DNA, 120 bp, Artificial Sequence
  ENSG00000266714_75 (sequence is synthesized)
ggaccccagctcccagagcctgtactgccgcattgccctgaagagcctgcagcggctccacctgctaagccctctggaggagaaggggccccctggcctggaagtcaactatggctcagc

SEQ ID NO: 789476 - DNA, 120 bp, Artificial Sequence
  ENSG00000266714_76 (sequence is synthesized)
tgacaacccccagaccatctggtttgagctgccacaggcccaggagctgctatacaccactgtcttcctgatagacagcagtgcctcttgcactgagtggcccagcatcaactgagagga

SEQ ID NO: 789477 - DNA, 120 bp, Artificial Sequence
  ENSG00000266714_77 (sequence is synthesized)
gtgcaggccggggagagaagaggatgaggcctcccccggcccaagtctcacccacatggtctgccttggatgctatcagatcactgttctagaacctgcctcagcacagcccagccggcc

SEQ ID NO: 789478 - DNA, 120 bp, Artificial Sequence
  ENSG00000266714_78 (sequence is synthesized)
cacatgcaggccatgaggcaggggctgctatcacgtcaccagcaggcaaagaaaacagccagaccctctccaggacggcctggggccaaagcgggctgcaggaactcggctggggcacct

SEQ ID NO: 789479 - DNA, 120 bp, Artificial Sequence
  ENSG00000266714_79 (sequence is synthesized)
gaggttgcccagtctgagggagatgcccacccgaccccaggctccgcccaggccccacattagcacaagcccaggcatgggagaaacagctgctgaggaaataaaactccctggagaaaa

SEQ ID NO: 789480 - DNA, 120 bp, Artificial Sequence
  ENSG00000266714_80 (sequence is synthesized)
aaatgctggtgtgtaggagactacagagtgctgggctgccctgaaaagtgggtagatccccactgtgtagatgagaaagctgagacatagagcttctccactctcccaatgtctgtgcct

SEQ ID NO: 789481 - DNA, 120 bp, Artificial Sequence
  ENSG00000266714_81 (sequence is synthesized)
gacatggaggacctggcgcggttgcggttagcgggcgcggtgccaaagctgccatccccggctcacagctcctcatatccaccctgccctcatctttatgaattgcgtgtagacccttat

SEQ ID NO: 789482 - DNA, 120 bp, Artificial Sequence
  ENSG00000266714_82 (sequence is synthesized)
aacctgggtgtctggtccccttatctccttgagctctgcctggctctgtcccagtctgccaactccgggaagctcactggtggttcctggaccccagggccctcacccgcttctactccc

SEQ ID NO: 789483 - DNA, 120 bp, Artificial Sequence
  ENSG00000266714_83 (sequence is synthesized)
actcaagggttgtgggttgtgtggagtctggggttggaaggcagtccatgggtccagaggatgctatgtgctgtgtggggccttggatacccaggagcctcagtttccccatgagtcgag

SEQ ID NO: 789484 - DNA, 120 bp, Artificial Sequence
  ENSG00000266714_84 (sequence is synthesized)
agtgtggtcttgctggggactggacctgtccatggggtggaatggaaagtccagtggcagacccaaggctaggtaaagggctggaaacaccaaggcagcctttcaggtcacctggggaga

SEQ ID NO: 789485 - DNA, 120 bp, Artificial Sequence
  ENSG00000266714_85 (sequence is synthesized)
agctggggatgccagagacggggcctcccaggctggttgggaagtcagattcagatggtagagcagccagtgatcttcccagagagtaactcgagggctgagaatgaagtgaagacagtg

SEQ ID NO: 789486 - DNA, 120 bp, Artificial Sequence
  ENSG00000266714_86 (sequence is synthesized)
cgagggagtcctgcctagacctcctggtagatcagccccacagcctcctgagtatcctggacgcccagacatggctgtcccagacggagtttggttcttgttgcccaggctggagtgcaa

SEQ ID NO: 789487 - DNA, 120 bp, Artificial Sequence
  ENSG00000266714_87 (sequence is synthesized)
agaagacccacgagcctcacggacgccagggaaagtttagggcccaaaatggaggcaggagatggtgccatggaaggagtaaggcagctggaggttgggagagccgggcccttggaaggc

SEQ ID NO: 789488 - DNA, 120 bp, Artificial Sequence
  ENSG00000266714_88 (sequence is synthesized)
ccaccgtgggctgcgactgctcaaggtgacccaaggccccggcctccgccccgaccagctgaagattctctgctcatacagctttgcggaggtgctgggtgtggagtgccggggcggctc

SEQ ID NO: 789489 - DNA, 120 bp, Artificial Sequence
  ENSG00000266714_89 (sequence is synthesized)
gaccaccctgctgtccgtctcctgtggctgcccctctgcccgctcctgatggctcgccttgtctctccagcaagactgtgcactccttgcaggcaggggctgggctggatgctgctcttg

SEQ ID NO: 789490 - DNA, 120 bp, Artificial Sequence
  ENSG00000266714_90 (sequence is synthesized)
tgtcccacgtggtacttagttcaaggctgccccagcagatgcttaataaacagctcttcactttcctggcttctggtcttgctcctttggtgtctggctggggagggatggggctggggc

SEQ ID NO: 789491 - DNA, 120 bp, Artificial Sequence
  ENSG00000266714_91 (sequence is synthesized)
cctgcagagcaggtcagaaaagaaatgcccatgctggagcccttgtggaagtggagggccgtgagaggcctggaggcgcctccccggggctggtctgtgtcactgcactccagggacgca

SEQ ID NO: 789492 - DNA, 120 bp, Artificial Sequence
  ENSG00000266714_92 (sequence is synthesized)
tctatgcattttgagagtgaggcatcagatggcaggtgaaggccctgcacagcaacagcatgagccggggccagccccagcacagccccagctatgtgccctgtttcttatcgtgcctgc

SEQ ID NO: 789493 - DNA, 120 bp, Artificial Sequence
  ENSG00000266714_93 (sequence is synthesized)
agagcaggttgtggggagctgggcagggcctggggctccggtggctctgcacgcggttaacagtctttcctgtttcctggtcagtgccgtcccctcctcctccccccatcgtgaagaagc

SEQ ID NO: 789494 - DNA, 120 bp, Artificial Sequence
  ENSG00000266714_94 (sequence is synthesized)
atccaggtgggcccccacggggaggtggccagggctgtcccgctcctcggggaatcaccctatgaacttagtgacctcttgcttctcccacgaggcctcccaaagctttcctgaggaaaa

SEQ ID NO: 789495 - DNA, 120 bp, Artificial Sequence
  ENSG00000266714_95 (sequence is synthesized)
cacggacagcctggtgcagtacaccaaggtgggagagaggcagggaggggtctggcccgtagatctgccctctgacccccacggccccccagacccatggcctcctctctttggccacag

SEQ ID NO: 789496 - DNA, 120 bp, Artificial Sequence
  ENSG00000266714_96 (sequence is synthesized)
gccctggctgacatggtcatagaagacccacgagcctcacggacgccagggaaagtttagggcccaaaatggaggcaggagatggtgccatggaaggagcttgacacagcccgtggagga

SEQ ID NO: 789497 - DNA, 120 bp, Artificial Sequence
  ENSG00000266714_97 (sequence is synthesized)
gccaattacttctcccgcttctttcctgtctcggtcagtggcgctggggtagggagtagggatgccaggcccccagcctggatcctggggtgcatgggcacagaccacaagcaggagagc

SEQ ID NO: 789498 - DNA, 120 bp, Artificial Sequence
  ENSG00000266714_98 (sequence is synthesized)
tgcataccagccaggcatggtccctgcacccatgcccatgatgccagcaatgggcacagtccctgccatgccagccaccgcttcccagcctggatgcagggcagctggccgtccagcagc

SEQ ID NO: 789499 - DNA, 120 bp, Artificial Sequence
  ENSG00000266714_99 (sequence is synthesized)
actatctttccacatttatgggggtctctccaggctagctgtcacttctgggtggcacatcccacttcctgggttcactggggtggtcctatgtgcccctccctggagaccctaccaacc

SEQ ID NO: 789500 - DNA, 120 bp, Artificial Sequence
  ENSG00000266714_100 (sequence is synthesized)
aacacatccttagctcctcccactgcagtgggcacagtggctcagggaagacggaagccgccaaaaagatcatgcagttcctaagcagcctggagcaggatcagacggggaaccgagagt

SEQ ID NO: 789501 - DNA, 120 bp, Artificial Sequence
  ENSG00000266714_101 (sequence is synthesized)
agccaggagaggggtggtctccaggcctctggcgtctcctggggtcagctgcaggcactgccctttctgatgggactgacgcctccctggacctgcccctagctgggatgcctgctggtg

SEQ ID NO: 789502 - DNA, 120 bp, Artificial Sequence
  ENSG00000266714_102 (sequence is synthesized)
ggggctactgctgcccagggatgcttgaacacccctccctgtacaggtggaggatatgctgcctatactcagcagctttggccatgccaagaccatcctcaatgccaatgccagccgctt

SEQ ID NO: 789503 - DNA, 120 bp, Artificial Sequence
  ENSG00000266714_103 (sequence is synthesized)
ttcctcttcctccccgggctaggcggtgaaccctctctggagccctgcagagtgggactgaggggctgggctctgtttgcattccccctgctccctccacactctgatgagagcttgttt

SEQ ID NO: 789504 - DNA, 120 bp, Artificial Sequence
  ENSG00000266714_104 (sequence is synthesized)
gcaagctaccaccccaggaaggccctcagcaccactccgtatgtgactctgccccactgaccctctgctcacctcccaggcagcccagtccctgcatgtccccttgactgaggtcccggg

SEQ ID NO: 789505 - DNA, 120 bp, Artificial Sequence
  ENSG00000266714_105 (sequence is synthesized)
gcctgtgagcacctctgctacacctcggagggtcccaggtccccatgtctggcaaccttctcatctccctcagacacatctttgccatcgtggcatcagcctatgacctggctcagaata

SEQ ID NO: 789506 - DNA, 120 bp, Artificial Sequence
  ENSG00000266714_106 (sequence is synthesized)
gtgctgctgtgcctcaagaagagatttcacctgggccgtatctatacacatctttgccatcgtggcatcagcctatgacctggctcagaatactgggcaggacccatgcatcctcctgtg

SEQ ID NO: 789507 - DNA, 120 bp, Artificial Sequence
  ENSG00000266826_0 (sequence is synthesized)
gggagtcgtatcccgagcatggaggttactgagaccgttatttcttcatggcctgcctagcttaagcagtagctggaaaagaaacggaaacagagagacaaagtttgacgaagacccgga

SEQ ID NO: 789508 - DNA, 120 bp, Artificial Sequence
  ENSG00000266826_1 (sequence is synthesized)
gtggagcagcgattcagacccggcacaaccgactccgttgccttcccctatgccgcccccaacgccaccgcctccctgactgccctgccgtgcagcgcccgattcagactggttgttaga

SEQ ID NO: 789509 - DNA, 120 bp, Artificial Sequence
  ENSG00000266826_2 (sequence is synthesized)
aatctacgccagaatctttacgtgtgtccagaaaggaaaggaatcaacatttcgcatcagccttcccaagatggcagctgctgaagacgagttcctgccgccgccgcggctccccgagct

SEQ ID NO: 789510 - DNA, 120 bp, Artificial Sequence
  ENSG00000266826_3 (sequence is synthesized)
gttcgattccagcaaacagcttctggacgaagtcgaaggagcgactgaacccaccggttcccgaatagtccaggaaaaggtgttcaagggcctcgacctccttgacaaggttgccaaaat

SEQ ID NO: 789511 - DNA, 120 bp, Artificial Sequence
  ENSG00000266826_4 (sequence is synthesized)
gttatcgcagcttgacttgttcagccgaaatgaagatttggaggagattacttccaccgacctgaagtacctgatggtgccagcgtttcaaggagccctcaccatgaaacaagtcaaccc

SEQ ID NO: 789512 - DNA, 120 bp, Artificial Sequence
  ENSG00000266826_5 (sequence is synthesized)
ccgtaagcgtctagatcatttgcagcaggctcgcgaacactttataaaatacttaactcagtgccattactatcgtgtggccgagtttgagctgccccaaaccaagaccaactcagctga

SEQ ID NO: 789513 - DNA, 120 bp, Artificial Sequence
  ENSG00000266826_6 (sequence is synthesized)
atggcatctcaaagacaggctaaaatagagcgatacaagcagaagaaggtgttggagcataagttgtctacaatgaaatctgctgtggaaagtggtcaagcagataatgagcgtgttcgt

SEQ ID NO: 789514 - DNA, 120 bp, Artificial Sequence
  ENSG00000266826_7 (sequence is synthesized)
gaatattatcttcttcaccttcagaggtggattgatatcagcttagaagagattgagagcattgatcaggaaataaagatcctgggagagaaagactcttcaagagaggcatccacttct

SEQ ID NO: 789515 - DNA, 120 bp, Artificial Sequence
  ENSG00000266826_8 (sequence is synthesized)
aactcatgtcaccagaagaggcctccaatgaaacccttcattctcactcggaacatggcgcaagccaaagtatttggcgctggctatccaagtctggcttccatgacagtgagtgactgg

SEQ ID NO: 789516 - DNA, 120 bp, Artificial Sequence
  ENSG00000266826_9 (sequence is synthesized)
tatgatcaacatcagaaacatggagtgttaccagatcagggaatagccaaggcaacaccagaagaattcagaaaagccactcagcaacaggaagatcaagaaaaggaggaagaggatgat

SEQ ID NO: 789517 - DNA, 120 bp, Artificial Sequence
  ENSG00000266826_10 (sequence is synthesized)
gaacaaacactccaaagagctcgagagtgggatgactggaaggacacccaccctaggggctacggcaaccgacagaacatgggctaatcttcccacaacaccgcaggactgcagggtgca

SEQ ID NO: 789518 - DNA, 120 bp, Artificial Sequence
  ENSG00000266826_11 (sequence is synthesized)
caccttccccgccaaggaaaaccatgcagccttcccctccctgagctcccctacagctgtgtaaaacgaaggcaaagatgcttaatgttgctttgagttcaataaagtgttaaattatta

SEQ ID NO: 789519 - DNA, 120 bp, Artificial Sequence
  ENSG00000266964_0 (sequence is synthesized)
ctgggccagggggtccaaagtgctcagcccccggggcacagcaggacgtttgggggccttctttcagcaggggacagcccgattggggacaatggcgtctcttggccacatcttggtttt

SEQ ID NO: 789520 - DNA, 120 bp, Artificial Sequence
  ENSG00000266964_1 (sequence is synthesized)
ctgtgtgggtctcctcaccatggccaaggcagaaagtccaaaggaacacgacccgttcacttacgactaccagtccctgcagatcggaggcctcgtcatcgccgggatcctcttcatcct

SEQ ID NO: 789521 - DNA, 120 bp, Artificial Sequence
  ENSG00000266964_2 (sequence is synthesized)
tccacccgcaggcggtagaaacacctggagcgatggaatccggccaggactcccctggcacctgacatctcccacgctccacctgcgcgcccaccgccccctccgccgccccttccccag

SEQ ID NO: 789522 - DNA, 120 bp, Artificial Sequence
  ENSG00000266964_3 (sequence is synthesized)
ccctgcccccgcagactccccctgccgccaagacttccaataaaacgtgcgttcctctcgacagcactttgtcggtctcggtccctcagcgcgaaacgccagcgccactgggccccagca

SEQ ID NO: 789523 - DNA, 120 bp, Artificial Sequence
  ENSG00000266964_4 (sequence is synthesized)
agggaggagacggggtgacctttcccacaggggcagcctgtggcgatgtggcagctgggcctcaccccggcagggctgtgcgtgaccccctgagtgggggaaggcaggctgttgccatgg

SEQ ID NO: 789524 - DNA, 120 bp, Artificial Sequence
  ENSG00000266964_5 (sequence is synthesized)
aggaaggaaaggcgggagagggagggggccaagtgccagagttgaagggcggcgaggggtggggctggacgtcccccctcgcctctcacccttttcaccctcacaggactcccctggcac

SEQ ID NO: 789525 - DNA, 120 bp, Artificial Sequence
  ENSG00000266964_6 (sequence is synthesized)
gtgaggcagcgcctcctctgccctgccaggctggggatacccgtttctctagcttggagccaccaagatagaggacaaacacttctgtgattcagtccccagactgtctctgacttaatc

SEQ ID NO: 789526 - DNA, 120 bp, Artificial Sequence
  ENSG00000266964_7 (sequence is synthesized)
tgtgtagggctggttgcgtcactgcgtgggggcaccggaggcccagaggaggagtattggatgcctgacggtgtttacaccccacgtcctgctccaaccagcagtttggggagaggacaa

SEQ ID NO: 789527 - DNA, 120 bp, Artificial Sequence
  ENSG00000266964_8 (sequence is synthesized)
ggccaacccaagagggagggagtgtggttgaggcagtgggttctgcagggtgggatgtgggtgactcctccctgccctgctggtgcgtgtgcaccctggcagggtgtggagttgggacac

SEQ ID NO: 789528 - DNA, 120 bp, Artificial Sequence
  ENSG00000266964_9 (sequence is synthesized)
gctcccgccctctaccccgcctctccctggccccacctctctctggccccgcctctccctggccccgcctctccctagcccccctctccctggccccgcttctccctggtcccgcccctc

SEQ ID NO: 789529 - DNA, 120 bp, Artificial Sequence
  ENSG00000266964_10 (sequence is synthesized)
ggcgagctggagctacagcgccgcttggcgcccgccgggagggagcctcagcttctcctacctctccacgcccacaggcagaagatgccggtgcaagttcaaccagcagcagaggactgg

SEQ ID NO: 789530 - DNA, 120 bp, Artificial Sequence
  ENSG00000266964_11 (sequence is synthesized)
gcatctcgtggcccatcctctgcttcttcccgtcttctctcccccctgtcctcctcctccctgtcccctccctccctttcctatacacccctttcctctccctggtaccccactttcctc

SEQ ID NO: 789531 - DNA, 120 bp, Artificial Sequence
  ENSG00000266964_12 (sequence is synthesized)
ctcccatatctgctcccccttaattatcttacttccccccttctgcctgctggtcctttctccctgttccctccttcccaatttacccctctcctattctccctcctgtcttccctgccc

SEQ ID NO: 789532 - DNA, 120 bp, Artificial Sequence
  ENSG00000266967_0 (sequence is synthesized)
acacgcctgcaggtatggcgttctggtgtcagcgtgacagttatgcccgagagttcaccaccaccgtggtctcctgctgtcccgcggagctgcagactgaagggagcaacggcaagaaag

SEQ ID NO: 789533 - DNA, 120 bp, Artificial Sequence
  ENSG00000266967_1 (sequence is synthesized)
aagtgctgagcggtttccaagtggtgctggaagacacagtgcttttccctgagggcgggggacagcctgatgaccgtggtacaatcaatgacatctctgtgctgagagtgactcgccgtg

SEQ ID NO: 789534 - DNA, 120 bp, Artificial Sequence
  ENSG00000266967_2 (sequence is synthesized)
gggaacaggctgatcatttcacccagacacccctggatccaggaagccaggttctggtccgggtagattgggagcggaggtttgaccacatgcagcagcattcagggcagcatctcatca

SEQ ID NO: 789535 - DNA, 120 bp, Artificial Sequence
  ENSG00000266967_3 (sequence is synthesized)
cggcagttgctgaccatctatttaagctgaagacaacatcatgggagttagggagatttcggagtgcgattgagctggacaccccctctatgactgcagagcaagtagctgccattgagc

SEQ ID NO: 789536 - DNA, 120 bp, Artificial Sequence
  ENSG00000266967_4 (sequence is synthesized)
agagcgtcaatgaaaaaatcagagatcggctgcctgtgaatgtccgagaactgagcctggatgatcctgaggtggagcaggtgagtggccggggtttgcctgatgatcatgctgggccca

SEQ ID NO: 789537 - DNA, 120 bp, Artificial Sequence
  ENSG00000266967_5 (sequence is synthesized)
ttcgggttgttaacatcgagggcgttgattccaacatgtgctgtgggacccatgtgagcaatctcagtgaccttcaggtcattaagattctgggcactgagaaggggaaaaagaacagaa

SEQ ID NO: 789538 - DNA, 120 bp, Artificial Sequence
  ENSG00000266967_6 (sequence is synthesized)
ccaacctgatatttctgtctgggaaccgggtgctgaagtggatggagagaagtcatggaactgaaaaagcactgactgctctgcttaagtgtggagcagaggatcatgtggaagcagtga

SEQ ID NO: 789539 - DNA, 120 bp, Artificial Sequence
  ENSG00000266967_7 (sequence is synthesized)
aaaagctccagaactccaccaagatcctgcagaagaataacctgaatctgctcagagacctggctgtgcacattgcccatagcctcaggaacagtccagactggggaggtgtggtcatat

SEQ ID NO: 789540 - DNA, 120 bp, Artificial Sequence
  ENSG00000266967_8 (sequence is synthesized)
tacacaggaaggagggtgattcagagttcatgaatatcattgccaatgagattgggtcagaggagaccctcctgttcttaactgtgggcgatgagaaaggtggtggactcttcttactgg

SEQ ID NO: 789541 - DNA, 120 bp, Artificial Sequence
  ENSG00000266967_9 (sequence is synthesized)
cagggccacctgcgtctgtggagaccctggggcccagggtggctgaggtcctggaaggcaaaggagcagggaagaaaggccgttttcagggcaaggccaccaagatgagccggcggatgg

SEQ ID NO: 789542 - DNA, 120 bp, Artificial Sequence
  ENSG00000266967_10 (sequence is synthesized)
aggcgcaggcgcttctccaggactacatcagcacgcagagtgctaaggagtgagggcttagggcactcacctcctgtttccacaggaatcttttggtcaataaaatagattgactcagaa

SEQ ID NO: 789543 - DNA, 120 bp, Artificial Sequence
  ENSG00000266967_11 (sequence is synthesized)
ccaggatcagcagtcttctgctgccttcttaatgtttcacctaagttcccatagttgctctcaaaaagtttcttggccctcgtgggccagtgtggaggggctgtatcatcattcatcagg

SEQ ID NO: 789544 - DNA, 120 bp, Artificial Sequence
  ENSG00000266967_12 (sequence is synthesized)
agcgtcacttggtggtttagggggaaataatctattcttaagattgaagagagtgcaggatttggggggttgactctacatccttcagtatcagagcttatctccttgtcttacctccta

SEQ ID NO: 789545 - DNA, 120 bp, Artificial Sequence
  ENSG00000266967_13 (sequence is synthesized)
attacctcccatttctgagattttcgacataatctcttacctctgggagataagatgcaatcgtaaatgataaagtgcggccaggcgtggtggcccacatctgtaatcccagcactttgg

SEQ ID NO: 789546 - DNA, 120 bp, Artificial Sequence
  ENSG00000266967_14 (sequence is synthesized)
aaaaaaaaaaaaaaaaaaaagatcaagtgctttggatagtaaatcagaaccacgaaaagtggttaattcctttgtatgttttctcccagttgcctaagagacctcctcagaatatctcct

SEQ ID NO: 789547 - DNA, 120 bp, Artificial Sequence
  ENSG00000266967_15 (sequence is synthesized)
cagtgcttttccctgagggcgggggacaggctggagcgcagcggcgtgatctcggcttactgcaatctccgtctgccaggttcaagcaattcccctgcctcagtctcccgagtagctagg

SEQ ID NO: 789548 - DNA, 120 bp, Artificial Sequence
  ENSG00000266967_16 (sequence is synthesized)
tcctgaggtggagcaggtaagggtagagccagagggatggtttctgcggaatgattcctcatcagattcagacagtccctcccctctccttgagtccaggtgagtggccggggtttgcct

SEQ ID NO: 789549 - DNA, 120 bp, Artificial Sequence
  ENSG00000266967_17 (sequence is synthesized)
agggggataatcgaggagtcctaagtgaaatctccccttcactgtttcagagctgaggaacagataggtttctcctgccttcaggttctaggatccgctgtggtttatgcatgtgcacac

SEQ ID NO: 789550 - DNA, 120 bp, Artificial Sequence
  ENSG00000266967_18 (sequence is synthesized)
gtgtgtgtgtgtgttacccccttgcctcatgtaggtcattaagattctgggcactgagaaggggaaaaagaacagaaccaacctgatatttctgtctgggaaccgggtgctgaagtggat

SEQ ID NO: 789551 - DNA, 120 bp, Artificial Sequence
  ENSG00000266967_19 (sequence is synthesized)
gactgcagggaggcaccatagcaagaaggaaattattgatttatgtccccaacatcagaaacgactgggaagctgcgcaggtctcctctgacctttctctttcaggtgtggagcagagga

SEQ ID NO: 789552 - DNA, 120 bp, Artificial Sequence
  ENSG00000266967_20 (sequence is synthesized)
tcatgtggaagcagtgaaaaagctccagaactccaccaagatcctgcagaaggtgatttattccatggagggtagagagggcatgggccctgcctaggataggctctgcagacttggtct

SEQ ID NO: 789553 - DNA, 120 bp, Artificial Sequence
  ENSG00000266967_21 (sequence is synthesized)
aaaaaaaaaaaaaaaaaaaaggaagttaagttcaagtccagccccttataagttacattgccatggcaagttatttgatctctctaggcttcagtttcctcatctgtgaaatggtatcat

SEQ ID NO: 789554 - DNA, 120 bp, Artificial Sequence
  ENSG00000266967_22 (sequence is synthesized)
taggcttcagtttcctcatctgtgaaatggtatcataaggcctcttgcagaattctcattgtgattttcaataaagtatctaaagtgtattacccagtgcttagcaggtcttcaacaagg

SEQ ID NO: 789555 - DNA, 120 bp, Artificial Sequence
  ENSG00000266967_23 (sequence is synthesized)
cagcctgtatctttctttaggactgtcccctacctcctttactctctaacagatttctgcttatcctggtgaatcctatttaagggagatggaaacaaacctggaggttgattacaaact

SEQ ID NO: 789556 - DNA, 120 bp, Artificial Sequence
  ENSG00000266967_24 (sequence is synthesized)
gcagaggctgagaagggcagcttgctggctttcagccagtactctctcttggctaagggatatgggactttatgtgtacataggcagcaaggccagcctcagaaggaggggccaggcttc

SEQ ID NO: 789557 - DNA, 120 bp, Artificial Sequence
  ENSG00000266967_25 (sequence is synthesized)
ggatgggggacataacaccggagcagttgccatgtatggggatgctgtgatgactgagacgtagtttgggttctctaggagttaaccttttggaaaagacagactattcagaatcagctg

SEQ ID NO: 789558 - DNA, 120 bp, Artificial Sequence
  ENSG00000266967_26 (sequence is synthesized)
taattcaggaaggatatcctaaatgttataacagcaacatgaacaactgaagtaaaaaaaagtattagaataactgctggatttaggtattatcaacttcccactcgatatctccatctg

SEQ ID NO: 789559 - DNA, 120 bp, Artificial Sequence
  ENSG00000267041_0 (sequence is synthesized)
gtgccgatttagctgccgccgcgccttggagtcctgaggaacttggctaggctggccccgagcggaaccagagaatgctgaggctctaaccatggaatattcggaatgtcccattctatg

SEQ ID NO: 789560 - DNA, 120 bp, Artificial Sequence
  ENSG00000267041_1 (sequence is synthesized)
aaggaggtttgctggctgcaacaggaatattcatgaacatggaggggttggtcatgttccaggatctgtctatagacttctctcaggaggaatgggagtgcctggacgctgctcagaagg

SEQ ID NO: 789561 - DNA, 120 bp, Artificial Sequence
  ENSG00000267041_2 (sequence is synthesized)
acttatacagagatgtaatgatggagaactacagcagcctggtctcactaggtctctctatcccaaagcctgatgtgatttccttactggagcaagggaaagagccctggatggtttcaa

SEQ ID NO: 789562 - DNA, 120 bp, Artificial Sequence
  ENSG00000267041_3 (sequence is synthesized)
gggacgtgctgggaggatggtgccgagactcggagtttagatgtaagaccaaagattcatgtttgccaaaagaaatctatgaagtaacatcatctcagtgggtgagaatggaaaaatgtc

SEQ ID NO: 789563 - DNA, 120 bp, Artificial Sequence
  ENSG00000267041_4 (sequence is synthesized)
atagccttgtgggctccagtgtcagagatgactgggaatgcaaaggccagtttcagcaccaagatataaatcaggagcgatatttggaaaaagcaataatgacttatgaaacaacaccaa

SEQ ID NO: 789564 - DNA, 120 bp, Artificial Sequence
  ENSG00000267041_5 (sequence is synthesized)
ctttctgcctacagacatctctcactctgcatcatcggattcatcctggagagaaactgtataaatccacagaatgtatggcttttaagtatggctcagaacttacacaacagcaagaaa

SEQ ID NO: 789565 - DNA, 120 bp, Artificial Sequence
  ENSG00000267041_6 (sequence is synthesized)
cccatactggtgaaaaactctataaatgtaaggagtgtgggaaggcctttcatcacttttcctatcttgttaaacatcagagaattcatactggggaaaagccctgtgcatgtaaagaat

SEQ ID NO: 789566 - DNA, 120 bp, Artificial Sequence
  ENSG00000267041_7 (sequence is synthesized)
atggaaaagcttttatttctggctcacatcttattcaacaccagaaaatgtatacagatgagagacctcatgagtgtcaggaatccgtgaaggcctttagaccgtctgcacatcttattc

SEQ ID NO: 789567 - DNA, 120 bp, Artificial Sequence
  ENSG00000267041_8 (sequence is synthesized)
aacattggagaattcatactggtgacaaaccttatgaatgtaaagaatgtgggaaatcttttacttctggctcaacactaaatcaacatcagcaaattcacactggtgagaaaccctatc

SEQ ID NO: 789568 - DNA, 120 bp, Artificial Sequence
  ENSG00000267041_9 (sequence is synthesized)
attgtaagcaatgtggaaaatcttttactgttggctcaacactaattcgacaccagcaaattcacactggtgagaaaccgtatgattgtaaggaatgtggaaaatcttttgcttcaggct

SEQ ID NO: 789569 - DNA, 120 bp, Artificial Sequence
  ENSG00000267041_10 (sequence is synthesized)
cagcactaattcgacatcagcgaattcacactggtgagaaaccctatgactgtaaggaatgtggaaaatcttttacttttcactcagctctaattcgacatcagcgaattcacactggtg

SEQ ID NO: 789570 - DNA, 120 bp, Artificial Sequence
  ENSG00000267041_11 (sequence is synthesized)
agaaaccctatgattgtaaggaatgtgggaaatcttttacttttcgctcagggttaattggacaccaggcaattcacactggtgagaaaccctatgattgtaaagaatgtggaaaatctt

SEQ ID NO: 789571 - DNA, 120 bp, Artificial Sequence
  ENSG00000267041_12 (sequence is synthesized)
ttactgctggctcaacactaattcaacatcagcgaattcacactggtgagaaaccctatgattgtaaggagtgtgggaaatcttttgcttcgggctcagcactacttcaacatcagcgga

SEQ ID NO: 789572 - DNA, 120 bp, Artificial Sequence
  ENSG00000267041_13 (sequence is synthesized)
ttcacactggtgagaaaccctattgttgtaaggaatgtggaaaatcttttacttttcgctcaacacgcaatcgacaccagcgaatccacactggtgagaaaccctataattgtaaagaat

SEQ ID NO: 789573 - DNA, 120 bp, Artificial Sequence
  ENSG00000267041_14 (sequence is synthesized)
gtggaaaatcttttgcttctggctcagcactacttcaacatcagcgaattcacactggtgagaaaccctatcattgtaaggaatgtggaaaatcttttacttttcgctcagggctaattg

SEQ ID NO: 789574 - DNA, 120 bp, Artificial Sequence
  ENSG00000267041_15 (sequence is synthesized)
gacatcaggcagttcacactggtgagaaaccctatgattgtaaagaatgtggaaaatcttttacttctcgctcagcactaattcaacatcagcgaattcacactggtgagaaaccctatc

SEQ ID NO: 789575 - DNA, 120 bp, Artificial Sequence
  ENSG00000267041_16 (sequence is synthesized)
actgtaaggaatgtggaaaatcttttactgttggctcaacactacttcaacatcagcaaattcacactggtgagaaaccttatgattgtaaggaatgtgggaaggcctttagacttcgtt

SEQ ID NO: 789576 - DNA, 120 bp, Artificial Sequence
  ENSG00000267041_17 (sequence is synthesized)
tacgacttactcaacatcaacaaatccatactggtgagaaaccttatcaatgtcaggaatgtgggaaagcctttgtcagtgtctcaggactcacccaacatcacagaattcacactggtg

SEQ ID NO: 789577 - DNA, 120 bp, Artificial Sequence
  ENSG00000267041_18 (sequence is synthesized)
agaaaccctatgaatgtccggactgtgggaaggcctttagacagcgtacataccttaatcaacatcggagaattcatactggtgagaaaccttatgaatgtaaagaatgtgggaaatctt

SEQ ID NO: 789578 - DNA, 120 bp, Artificial Sequence
  ENSG00000267041_19 (sequence is synthesized)
ttactttctgctcaggactaattcaacatcagcaaaatcacactgatgagaaaccctatgatggtaaggaatgtgggaaatcttttacttctcactcaacactaattcaacatcagcaaa

SEQ ID NO: 789579 - DNA, 120 bp, Artificial Sequence
  ENSG00000267041_20 (sequence is synthesized)
ttcacactggtgagaaaccctatgattgtaaggaatgtgggaaatcttttacttctcactcaacactaattcaacatcagcaaatacacactggtgagaagctctatgattgtaaggaat

SEQ ID NO: 789580 - DNA, 120 bp, Artificial Sequence
  ENSG00000267041_21 (sequence is synthesized)
gtgggaaatcttttacttctcattcaacactaattcaacatcagccacttcacactggtgagaaaccttatcattgcaaggaatgtgggaaatcttttactcttcgctcagcactaattc

SEQ ID NO: 789581 - DNA, 120 bp, Artificial Sequence
  ENSG00000267041_22 (sequence is synthesized)
aacatcggccagttcacactggtgagaaacgctacagttgtaaagaatgtgggaaatcttttacttctcgctcaacactaattgaacatcagcgaattcacactggtgagaaaccctatc

SEQ ID NO: 789582 - DNA, 120 bp, Artificial Sequence
  ENSG00000267041_23 (sequence is synthesized)
attgtaaggaatgtggaaaatcttttgcttttcgctcagcaataatccaacatcggcgaattcacactggtgagaaaccctatgattgtaaggaatgtggcaaggcctttagacgtcgtt

SEQ ID NO: 789583 - DNA, 120 bp, Artificial Sequence
  ENSG00000267041_24 (sequence is synthesized)
caaaacttactcaacatcaacgaatccatactggtgagaaaccttatcgatgtcatgaatgtggaaaagcctttgtccgtttctcaggactcaccaaacatcacagtattcacactggcg

SEQ ID NO: 789584 - DNA, 120 bp, Artificial Sequence
  ENSG00000267041_25 (sequence is synthesized)
agaaaccctatgaatgtaagacatgtgggaagtccttcagacagcgtacacaccttactctacatcagagaattcataccggtgacagaccttatgaatgtaaagaatgtgggaaatctt

SEQ ID NO: 789585 - DNA, 120 bp, Artificial Sequence
  ENSG00000267041_26 (sequence is synthesized)
ttacttgcggctcagaactaattcgacatcagcgaactcacactggtgagaaaccttatgattgtaaggaatgtgggaaggcctttagatgtccttcacaacttagtcaacataaacgaa

SEQ ID NO: 789586 - DNA, 120 bp, Artificial Sequence
  ENSG00000267041_27 (sequence is synthesized)
tccatactggtgagaaaacttatcaatgtccggaatgtgggaaagcctttttctatgcctcaggactcagccgacatcagagtgttcacactggcgagaaaccctatgaatgtaagacat

SEQ ID NO: 789587 - DNA, 120 bp, Artificial Sequence
  ENSG00000267041_28 (sequence is synthesized)
gtgggaaggcctttaaacagcttacacagcttactcgacatcagagaattcatgacctaacataattaatgtaggaaactgttctcatgccatttgtcatggatcatcagcagattccat

SEQ ID NO: 789588 - DNA, 120 bp, Artificial Sequence
  ENSG00000267041_29 (sequence is synthesized)
tcatgccatttgtcatggatcatcagcagattccatatgtgggtcaaatacaatggatgtgtattacttcatattcactttttccagaattacgacttttttttttttttttgagacgga

SEQ ID NO: 789589 - DNA, 82 bp, Artificial Sequence
  ENSG00000267041_30 (sequence is synthesized)
aaaattaggacatttaatactgaaagaaattgataatgaatgtagatgagttttctatcatgattcaaagcttattgaagtt

SEQ ID NO: 789590 - DNA, 120 bp, Artificial Sequence
  ENSG00000267041_31 (sequence is synthesized)
agttatacaaattcatattagagaatgtggtcaatgacaaaagacaaccatttactacctacgtgacattaggctagttatgtaaattctctgtgccaaaattactaattgataaaatgt

SEQ ID NO: 789591 - DNA, 75 bp, Artificial Sequence
  ENSG00000267041_32 (sequence is synthesized)
tgtaaattctctgtgccaaaattactaattgataaaatgttgatggcaatagttgtttttgtgtattttttgttt

SEQ ID NO: 789592 - DNA, 120 bp, Artificial Sequence
  ENSG00000267041_33 (sequence is synthesized)
actatatttttcatgtttgactactgactttgttttaagcttcgccttccctgtctatttccctgtctactttagcccataactgcaaaggtggctaagaaagtccttgctggaaagaaa

SEQ ID NO: 789593 - DNA, 120 bp, Artificial Sequence
  ENSG00000267041_34 (sequence is synthesized)
aagaaagtccttgctggaaagaaagcaagcaaaactaaagtctgtgcgcaccttctcctttggatccagtgggcaatttatattagaaattccaagccgggcgtggtggctcacgcctgt

SEQ ID NO: 789594 - DNA, 120 bp, Artificial Sequence
  ENSG00000267041_35 (sequence is synthesized)
cctgggaggcggatgttgcagtgagccagtcagtggagcagtcagaacacacacagtgtttatcaattaagtttgtagtcagaacacacaccatgtttatcaattaagtttgctgtctta

SEQ ID NO: 789595 - DNA, 120 bp, Artificial Sequence
  ENSG00000267041_36 (sequence is synthesized)
caccatgtttatcaattaagtttgctgtcttatatggacacagtttgtgatgccctaaaacaagtagtggtgcctaagataatcataggccaccataacagatataacaacaatgagaaa

SEQ ID NO: 789596 - DNA, 120 bp, Artificial Sequence
  ENSG00000267041_37 (sequence is synthesized)
gttgaaatattgttgggatcatccaaatatgacacagatacaaagtgagcacatgctggtgaataaatggagccaatagacttgttcactgcatggttacgtcagaggcgtgtaaaccag

SEQ ID NO: 789597 - DNA, 120 bp, Artificial Sequence
  ENSG00000267041_38 (sequence is synthesized)
agcaacttcttcttgaataggagctgtgtaaagtaacactgaaacctactggactgcattcctagacagataagtcattctaagtcacaagatgagatatgaggtcagcataagatacag

SEQ ID NO: 789598 - DNA, 120 bp, Artificial Sequence
  ENSG00000267041_39 (sequence is synthesized)
gtcataaagaccttgctgagaaaacatcttgcagtaaagaagtcggccaaatccaagatggtgacaagagtgacctctggtcgtcctcactgctatactcccagcagcaccatgacaccc

SEQ ID NO: 789599 - DNA, 120 bp, Artificial Sequence
  ENSG00000267041_40 (sequence is synthesized)
agctaagtttttattttttatttcagtagagttggagtcttgctttgttacccaggctggtcttgaattcctgtcttcaagcaatcttcccaccttatgaatataaagaatggcccacct

SEQ ID NO: 789600 - DNA, 88 bp, Artificial Sequence
  ENSG00000267041_41 (sequence is synthesized)
gcaatcttcccaccttatgaatataaagaatggcccaccttgtcctctcaaagtgctgggattacaatcatgagccactgcacctggg

SEQ ID NO: 789601 - DNA, 73 bp, Artificial Sequence
  ENSG00000267041_42 (sequence is synthesized)
ccgcctcccaggttcaagcgattctcttgagactaatttttgtattatttagtagagacggggtttctccatg

SEQ ID NO: 789602 - DNA, 120 bp, Artificial Sequence
  ENSG00000267041_43 (sequence is synthesized)
tctccatgttggtcaggctggtctctgaactctgggcaggactaatttagataaggtagtcaggaaaggcatttcttacaaggtggtatttgcatgaatgtagacatatggttgcatttt

SEQ ID NO: 789603 - DNA, 120 bp, Artificial Sequence
  ENSG00000267041_44 (sequence is synthesized)
tagacatatggttgcattttattatatgtaaattacacttcaataaagttgatgaaaaaaatcttacctcatcgtctatgcacttcggattgttgtatttcattctatttaaattacact

SEQ ID NO: 789604 - DNA, 120 bp, Artificial Sequence
  ENSG00000267041_45 (sequence is synthesized)
tgcgtttaaaaaatttaacacttctctaaaacatatctgttgatttgtacttttactaatatgcttatggatgatttatatacacacacacacacacacatatcttttaagaaggttatt

SEQ ID NO: 789605 - DNA, 76 bp, Artificial Sequence
  ENSG00000267041_46 (sequence is synthesized)
tacacacacacacacacacatatcttttaagaaggttattttaaggttaatcaattgaggctttgtctcaattgat

SEQ ID NO: 789606 - DNA, 79 bp, Artificial Sequence
  ENSG00000267041_47 (sequence is synthesized)
tcaattgattcttttgtctcaatttgtagtcagttgaggtttgtctcaatttatggaaacaaatcaaatgtttgttctc

SEQ ID NO: 789607 - DNA, 120 bp, Artificial Sequence
  ENSG00000267041_48 (sequence is synthesized)
tttgtctcaatttatggaaacaaatcaaatgtttgttctcaaattcttactctgtcatttattattctccatgtttttgtaactgcttccttggagatatttaaacataaatatatacag

SEQ ID NO: 789608 - DNA, 120 bp, Artificial Sequence
  ENSG00000267041_49 (sequence is synthesized)
ggagatatttaaacataaatatatacagagagggtgaagatggaggagtgctttttacagttcacagttgtctttttcatgtgtgacaggtttttgctgtgttgcccaggctggagtgca

SEQ ID NO: 789609 - DNA, 120 bp, Artificial Sequence
  ENSG00000267041_50 (sequence is synthesized)
tgcaatgccacaatcttggctcactgcagcctcaacttcccgggctcaatcgatcccccacctcagcctcccgagtagcaaggactacaggcgcacaccaccacacctagctaatttttg

SEQ ID NO: 789610 - DNA, 87 bp, Artificial Sequence
  ENSG00000267041_51 (sequence is synthesized)
gcacctcagcctccttcagccaatactcttaacgtttttacttttcacttttaaaaattaactctttttatgaaaaaagtagaattt

SEQ ID NO: 789611 - DNA, 120 bp, Artificial Sequence
  ENSG00000267041_52 (sequence is synthesized)
cttttaaaaattaactctttttatgaaaaaagtagaattttttaaagagcagagaaaagcacaatgaagacagaaagatcacctgtatattcttattgaccaaagatgatctatttgggg

SEQ ID NO: 789612 - DNA, 67 bp, Artificial Sequence
  ENSG00000267041_53 (sequence is synthesized)
acctgtatattcttattgaccaaagatgatctatttggggtaaatccttttttttttttttgagacg

SEQ ID NO: 789613 - DNA, 120 bp, Artificial Sequence
  ENSG00000267041_54 (sequence is synthesized)
ctcccaaagtgctgggattacaggcaggatccacgtgcccggccggtaaatccttttaatagaggagtttcaatatttctcctctgccatagtattagaaagaaaagaatcattattgac

SEQ ID NO: 789614 - DNA, 120 bp, Artificial Sequence
  ENSG00000267041_55 (sequence is synthesized)
aagaatcattattgacatctttacgacattgagtttttctcttgtacctggtgtgtctttatttcagtaggtattcttttatgtgctttagtaagtctttatatttttagcataaaagtg

SEQ ID NO: 789615 - DNA, 120 bp, Artificial Sequence
  ENSG00000267041_56 (sequence is synthesized)
tacacatttcttgttttacttatttctagatacttaatggcttttgtttataatatgattgggatattttttctgttgtgtaattgattactattactatgtactaaactgttggttttt

SEQ ID NO: 789616 - DNA, 120 bp, Artificial Sequence
  ENSG00000267041_57 (sequence is synthesized)
gtctaaggattgtaacattgatgaactactttagtagatgaaatggtttcttcatgagattgaattgtctaaagagatgttggtattatttgtaaataaaagtatttgcctattcctttc

SEQ ID NO: 789617 - DNA, 81 bp, Artificial Sequence
  ENSG00000267041_58 (sequence is synthesized)
cctggatggtttcaagggacgtgctgggaggatggtgccgagacaggatgaagaaagcctgaaagaaatctattacaatgg

SEQ ID NO: 789618 - DNA, 120 bp, Artificial Sequence
  ENSG00000267060_0 (sequence is synthesized)
aggacaataatgttttattgagcgcctattgtgaatcagacactgagcagtaagcgtcggagaaacaggtgaatgataccggggaaaagtcattccctgtgtgtagcgtctagggcagcc

SEQ ID NO: 789619 - DNA, 120 bp, Artificial Sequence
  ENSG00000267060_1 (sequence is synthesized)
tttgccctggttccagcagatgggttgtctcttcatagtctatgcatttctgaagaccccacggtgaagggctgcaaggatgaagctgtcccagagtatctccagagtgcagatcccttg

SEQ ID NO: 789620 - DNA, 120 bp, Artificial Sequence
  ENSG00000267060_2 (sequence is synthesized)
gctgccaggtcatgttctctcttcctctcaactgctctcccgaccatataaggagaggcagctgctgggggcgtccccaggatctaaagatagcggcccctgcctggaactctaaatgcc

SEQ ID NO: 789621 - DNA, 120 bp, Artificial Sequence
  ENSG00000267060_3 (sequence is synthesized)
accctggagcgggagccgcaatggcacgctgcaagaatgccgatggagtggagttgtacaatgagattgagttctatgccaaagtgaactccaaggactcccaggataagcgctcttccc

SEQ ID NO: 789622 - DNA, 120 bp, Artificial Sequence
  ENSG00000267060_4 (sequence is synthesized)
gctctattacttgttttgtgagaaaatggaaggaaaaggtggcctggccgcggcttaccaaggaggatatcaagccagtgtggctgtctgtggactttgataactggagagactgggaag

SEQ ID NO: 789623 - DNA, 120 bp, Artificial Sequence
  ENSG00000267060_5 (sequence is synthesized)
gggatgaagagatggagctggctcatgtggaacattatgcagagcttttgaagaaggtcagcaccaagagacctccacctgccatggatgatttggatgatgattctgacagtgctgatg

SEQ ID NO: 789624 - DNA, 120 bp, Artificial Sequence
  ENSG00000267060_6 (sequence is synthesized)
atgcaacaagtaattaactttctgtgacgcaaagctgggaaggcagctgtggctattttccagttgttctagaaagctagcgcctaggcctttgtcagcgctttggctgtgcaccaagtt

SEQ ID NO: 789625 - DNA, 120 bp, Artificial Sequence
  ENSG00000267060_7 (sequence is synthesized)
gggtcggggaggggtagactggtagggcttctgatttcttactgattggtttctaatctctgtgtttaggccacttgattatttgagtatgtgtgtgtatgtggcaaaacaaaagccaaa

SEQ ID NO: 789626 - DNA, 120 bp, Artificial Sequence
  ENSG00000267060_8 (sequence is synthesized)
gaagaatgcagattatagaaatctctactatgtgtgcatatggggcaaagcaaaaagccaaagaagaaacagattataataaatctctaggaactgttctctgtctgtttccttcttgta

SEQ ID NO: 789627 - DNA, 120 bp, Artificial Sequence
  ENSG00000267060_9 (sequence is synthesized)
cttattcctcctggtggcaagcctcttctccctctagtaaccaagctggggtgcttcctcttgcccagatttgtgctctgatttcttacagctaattctgtcatctctagaaccagccac

SEQ ID NO: 789628 - DNA, 87 bp, Artificial Sequence
  ENSG00000267060_10 (sequence is synthesized)
atttcttacagctaattctgtcatctctagaaccagccacttcagcttcctgcacactctagaaatctctttatacttttttttttt

SEQ ID NO: 789629 - DNA, 88 bp, Artificial Sequence
  ENSG00000267060_11 (sequence is synthesized)
tgtatgagccaccacacccggccctctttatacttttaaaactgattgttactctagttaatgtctatgtttatttgtccaacagcta

SEQ ID NO: 789630 - DNA, 120 bp, Artificial Sequence
  ENSG00000267060_12 (sequence is synthesized)
ttactctagttaatgtctatgtttatttgtccaacagctattctatttgtccataaacttttttgagtgcctaatatgtacagttgactgtaacttaaacaaaataaatgcattgcctat

SEQ ID NO: 789631 - DNA, 120 bp, Artificial Sequence
  ENSG00000267060_13 (sequence is synthesized)
gccaccctggagcgggagccgcaatggcacggcagcacgcccggaccttgtggtacgacaggcccaggtatgtgttcatggagttttgtgttgaggacagcaccgatgtccacgtgctta

SEQ ID NO: 789632 - DNA, 120 bp, Artificial Sequence
  ENSG00000267060_14 (sequence is synthesized)
tccaagtcttctgggcgctccaggttctgtgaggccccacgggagccccggacccctggtctctgtaactgtggggtgagggaaggtgtgacctgaatgttctccctgacctcctagttt

SEQ ID NO: 789633 - DNA, 120 bp, Artificial Sequence
  ENSG00000267060_15 (sequence is synthesized)
cctagtcttgcacgttctattcttcccaggttcacattcaccacacccacccactcctgtcattcccttccctttcaccccttctgtctcatttagctccactttgaaaaaactgtggca

SEQ ID NO: 789634 - DNA, 120 bp, Artificial Sequence
  ENSG00000267060_16 (sequence is synthesized)
tcaaaggtccctgggtagtcccttcccaaatgacctcagtcttccctctcccacccctatgaagccacacctcaacttctcttcaggcagcacgcccggaccttgtggtacgacaggccc

SEQ ID NO: 789635 - DNA, 120 bp, Artificial Sequence
  ENSG00000267060_17 (sequence is synthesized)
cctggccggagggtaggacttctgagattttcagactctatcatgcctagctttgtgtgtagattggcaggttcctggtcaaaggagtgcagttgggaggactagggacctactgaccct

SEQ ID NO: 789636 - DNA, 120 bp, Artificial Sequence
  ENSG00000267127_0 (sequence is synthesized)
cctcccgctctgcgccgtcgccccgcccacacgccgccaccctcgcgtcagttgtcgctccgcgcctgcgcccgttgtctccctgctcgctccgggtcccggcgccgcgccatgtgggct

SEQ ID NO: 789637 - DNA, 120 bp, Artificial Sequence
  ENSG00000267127_1 (sequence is synthesized)
gcggcgggcgggctgtggcgctcccgcgcgggtctccgggccctgttccgtagccgcgatgctgcgctatttccaggctgcgagcggggacttcactgctctgctgtctcctgcaagaac

SEQ ID NO: 789638 - DNA, 120 bp, Artificial Sequence
  ENSG00000267127_2 (sequence is synthesized)
tggctcaagaaatttgcctcgaaaaccaagtggatgaagacctgatcattgaagttcaccagttatttttctcaagaatgtgaataacaatgggatttgcactcattatatttttagaat

SEQ ID NO: 789639 - DNA, 120 bp, Artificial Sequence
  ENSG00000267127_3 (sequence is synthesized)
ggcttcgcataattttcatgcatcctgtggacgatgaacacaaatgcagctgtggccgtgcctggcctgtgtgtgttgaacgcgttcctgccgtgcgggagccacctacccagcggagcc

SEQ ID NO: 789640 - DNA, 120 bp, Artificial Sequence
  ENSG00000267127_4 (sequence is synthesized)
gatcactgtggttaacctgagcatgttggagaccaaggagaggctgatgttaatgttggatttttgtgaaaatgattcctttcaaagaaagacctgtgacagttgagcgtgtgctgcatc

SEQ ID NO: 789641 - DNA, 120 bp, Artificial Sequence
  ENSG00000267127_5 (sequence is synthesized)
tgagatgctggctggggagcccaggcagtcgacgggagaggagcgctcactgtcttactggaaacaagctgtttggagaacaacctgtttttactctccttttgcaagcaaaacactccc

SEQ ID NO: 789642 - DNA, 120 bp, Artificial Sequence
  ENSG00000267127_6 (sequence is synthesized)
actgagcaatagcgtttatggcagcatttagcggacacagaagcacatctgaaagtggagagagacgcgtttccccattgctggccgagtcccaccactttgctcagctatgaacacctg

SEQ ID NO: 789643 - DNA, 120 bp, Artificial Sequence
  ENSG00000267127_7 (sequence is synthesized)
acatctcgtttcattttcatgcaaaatctggagataattattatccacaattctaaggccttaggcccctccgcatgagcctgccattaccacttcattcccttgcacctgaaagactcc

SEQ ID NO: 789644 - DNA, 120 bp, Artificial Sequence
  ENSG00000267127_8 (sequence is synthesized)
ctctcatgcacatatcttgacctgagcacagaccggacgccagcggagggcaggagcaagcaggacacactgtggctgaggaggggaccctgggcttgtgggcctcggagaggcagagca

SEQ ID NO: 789645 - DNA, 120 bp, Artificial Sequence
  ENSG00000267127_9 (sequence is synthesized)
ggggaggcagatgagactgcacacagctttttgtttgacatatcctaagccccctgcacacgccactcaaggtcttctctgtgccccatctggtgcaggaggcctgtctgtctgtgaaat

SEQ ID NO: 789646 - DNA, 120 bp, Artificial Sequence
  ENSG00000267127_10 (sequence is synthesized)
tgcttttagcaatagctgtggatcaccactgagagggtgaatatacaaatgaacaatgggcagaccgtctatgatggcaaaacttggacctccaaccttgaggccaaagcacatcatgtg

SEQ ID NO: 789647 - DNA, 120 bp, Artificial Sequence
  ENSG00000267127_11 (sequence is synthesized)
tgcttccaactaagaaagtcagatattctccccaaaccaaccccataggatgcccgctgccaggtggcccacccccagcttccccctgacaacagcctccacccagggcatacccaacca

SEQ ID NO: 789648 - DNA, 120 bp, Artificial Sequence
  ENSG00000267127_12 (sequence is synthesized)
gagccttcccatcttctaatgggaagcttcccctccccaccccaccttcaaggctctgccacgcgcagggacagtgtagccttcttggctacagcttcgagtgagcagcctctgccatcc

SEQ ID NO: 789649 - DNA, 120 bp, Artificial Sequence
  ENSG00000267127_13 (sequence is synthesized)
tcgctgatgtccccggttaccgtgaaggctcctccaggacactgtctgcactgcctgtcgtccagaccccacctctgcccaggcaccctggccttaatgctgcagcccacagggcaccca

SEQ ID NO: 789650 - DNA, 120 bp, Artificial Sequence
  ENSG00000267127_14 (sequence is synthesized)
gctggtgactgaggcctgttctgagcccctcgctggcacattcctggacttctcagtttggtgccagggcctcattcctgcttcccatttgctctgttacaggggaattagtcccttcct

SEQ ID NO: 789651 - DNA, 120 bp, Artificial Sequence
  ENSG00000267127_15 (sequence is synthesized)
ttactcttttgtgctgtgctttctaaacgtggtgtttgtcataataagaagcatgaggggcacatggatcagcctcacagacaggtgagtctgtagctcttaccagacccttgttcacat

SEQ ID NO: 789652 - DNA, 120 bp, Artificial Sequence
  ENSG00000267127_16 (sequence is synthesized)
ccatgaacttggctgtggatcaccagggaaactgggtgaggttctgccatccaggggttttgtcctgagaacttggcttttagaacattctctctggttttttgcttgggggtgggggtc

SEQ ID NO: 789653 - DNA, 120 bp, Artificial Sequence
  ENSG00000267127_17 (sequence is synthesized)
tggtgcagggtgctgggtctgtgtttggaggaggccagcccgtaggctgggggcctgagacactgtgcactggcgtgatgcgtctgccgcccatcaccagcttgcaggggcatccacggc

SEQ ID NO: 789654 - DNA, 120 bp, Artificial Sequence
  ENSG00000267127_18 (sequence is synthesized)
tgaatcctctgctcttccaggaaagacttatgcttctcatggtcctagttctcatgctgatctttctacttggcaaaattcaccaagggtgacttgggtttttggtggcaactctgggaa

SEQ ID NO: 789655 - DNA, 120 bp, Artificial Sequence
  ENSG00000267127_19 (sequence is synthesized)
catttggcttgaaaaattgttcatttaagagattctttagagaagaaaatgagtaagattccctaggcctaaatgcagaggcctccaaatgaatttctgaataaaaaagtatttcgctaa

SEQ ID NO: 789656 - DNA, 120 bp, Artificial Sequence
  ENSG00000267127_20 (sequence is synthesized)
aaggaagaccatgcgcgcctgagggccctgaacggcctcctctataaggcactgacagacctgctgtgtacccctgaagtgagtcaggagctgtatgaccttaacgtggagctctccaag

SEQ ID NO: 789657 - DNA, 120 bp, Artificial Sequence
  ENSG00000267127_21 (sequence is synthesized)
tttaaaatgcagttgtaaactttccccttaaacaattcagaaagcagcagtcttatgtggtcttttagaaaacaaactcaaatggaagagtgtccttgtatattaatgaacaaaatttac

SEQ ID NO: 789658 - DNA, 120 bp, Artificial Sequence
  ENSG00000267127_22 (sequence is synthesized)
ttctgaatgtgagtttgtttttggtgcttggaaccagcacttcatggaagagaacagcaaaaagtgagcagcagagagatggtggtccaaggagttaaaagttattttaatcacagcggg

SEQ ID NO: 789659 - DNA, 120 bp, Artificial Sequence
  ENSG00000267127_23 (sequence is synthesized)
caacttgggaagagtttcatggtgtcagaagtctatatgacaggaagggaagagagtacctcaaaggaggaaggaaggagagaagatgtggtaggtgaagttgtaatgtgatttaatgat

SEQ ID NO: 789660 - DNA, 120 bp, Artificial Sequence
  ENSG00000267127_24 (sequence is synthesized)
ggctgagaacttgtacaaaacccagaaaatgaagataaattagatatgaaggaagaaaaaggtcaaagatgagattgtaaaactgtgatacagactggctgaaattggagtttgggtctt

SEQ ID NO: 789661 - DNA, 120 bp, Artificial Sequence
  ENSG00000267127_25 (sequence is synthesized)
cagatgaaaaagggaaggaagagggccaagccccgcctggagcaggacagctccctcaagagttacctgtcaggcgaggaggttgaagatgacctggacctgcaagataacttcaggtta

SEQ ID NO: 789662 - DNA, 120 bp, Artificial Sequence
  ENSG00000267127_26 (sequence is synthesized)
tgctgtcagtgttgggttgtatgttcctggtgatgtccacaatgatgagctgaagaaaggggtgtctgttgggcttctccctgtgaacttactcttaagtatttactttttgaaacaaat

SEQ ID NO: 789663 - DNA, 120 bp, Artificial Sequence
  ENSG00000267127_27 (sequence is synthesized)
gaaaacagagacacaagacaccaaaacctctgggatacgataaaagcagtgctaaaacggaagcttataccattaaatgcctacttcaaacatacaaaagatcacaaattaacaacctaa

SEQ ID NO: 789664 - DNA, 120 bp, Artificial Sequence
  ENSG00000267127_28 (sequence is synthesized)
agagcacttgttggtggcatgagctgaaatgaaatggtggggcgtcacctgtgtgacctcagccaggcccatggcctgtggctgactctggggtggcaccgtgctggcaggtggggcaca

SEQ ID NO: 789665 - DNA, 120 bp, Artificial Sequence
  ENSG00000267206_0 (sequence is synthesized)
actgcacatcctgggcctgcggcgcagtgtagacctgggaggatgggcggcctgctgctggctgcttttctggctttggtctcggtgcccagggcccaggccgtgtggttgggaagactg

SEQ ID NO: 789666 - DNA, 120 bp, Artificial Sequence
  ENSG00000267206_1 (sequence is synthesized)
gaccctgagcagcttcttgggccctggtacgtgcttgcggtggcctcccgggaaaagggctttgccatggagaaggacatgaagaacgtcgtgggggtggtggtgaccctcactccagaa

SEQ ID NO: 789667 - DNA, 120 bp, Artificial Sequence
  ENSG00000267206_2 (sequence is synthesized)
ggcgtgctggagctctgggtgctggccaccaacttcagagactatgccatcatcttcactcagctggagttcggggacgagcccttcaacaccgtggagctgtacagtctgacggagaca

SEQ ID NO: 789668 - DNA, 120 bp, Artificial Sequence
  ENSG00000267206_3 (sequence is synthesized)
gccagccaggaggccatggggctcttcaccaagtggagcaggagcctgggcttcctgtcacagtagcaggcccagctgcagaaggacctcacctgtgctcacaagatccttctgtgagtg

SEQ ID NO: 789669 - DNA, 120 bp, Artificial Sequence
  ENSG00000267206_4 (sequence is synthesized)
ctgcgtccccagtagggatggcgcccacagggtcctgtgacctcggccagtgtccacccacctcgctcagcggctcccggggcccagcaccagctcagaataaagcgattccacagcaaa

SEQ ID NO: 789670 - DNA, 120 bp, Artificial Sequence
  ENSG00000267206_5 (sequence is synthesized)
gaatccctgtgagtctgacggccacggcctcacccaggccgttcttccctgcagcatccccaggccccctgcgggcagggacggagggctgactccgctcccgagagccaggaggctaca

SEQ ID NO: 789671 - DNA, 120 bp, Artificial Sequence
  ENSG00000267206_6 (sequence is synthesized)
ggttctggtcttgggattgctgcccatcctgagggtgaagagaagcccctggacagaggattggaaccttgttcccagcaggctcagacaccagtgaggtccagccaaggtccccatagc

SEQ ID NO: 789672 - DNA, 120 bp, Artificial Sequence
  ENSG00000267206_7 (sequence is synthesized)
ctctggcctcactgctggctggcctggcctggactcctgagctccgtctcctctcaccgggccccggggtcttgaccctgagtgggtgacaggccccttcttttccaggctgggagggtg

SEQ ID NO: 789673 - DNA, 120 bp, Artificial Sequence
  ENSG00000267206_8 (sequence is synthesized)
gtcacagtagcaggcccagctgcagaaggaccgtgagtgtccaccggagcagcctcgggggaggcttggggcaagttctggagcccacagggcgtgatggggtgacagagaccctggggt

SEQ ID NO: 789674 - DNA, 120 bp, Artificial Sequence
  ENSG00000267206_9 (sequence is synthesized)
ggtcttcacctgcccctgcccaaagtcaggcctgggggtcttgtccccacggcaggcgagtcttgtgggtggggccctggggtgctggggggctcagtcctttttcacagccagtcttgc

SEQ ID NO: 789675 - DNA, 120 bp, Artificial Sequence
  ENSG00000267206_10 (sequence is synthesized)
ctccccttctagtcacctgtgctcacaagatccttctggtaagccgccatcctgagcctcaccctgggctctcttgggggaagggggtgggggaggccaccctacgcacagtgggtggga

SEQ ID NO: 789676 - DNA, 120 bp, Artificial Sequence
  ENSG00000267206_11 (sequence is synthesized)
ggaccctctgcccaagcccacggggttcatggctccactgtctctaaggcagctgagggtgtggaggagcctccatggtgggctgggccccctcacactcctcttggttttcagtgagtg

SEQ ID NO: 789677 - DNA, 120 bp, Artificial Sequence
  ENSG00000267221_0 (sequence is synthesized)
gcggccagagcgtccaccgcccaagatggtggctcctgtgtctcctctcccaccggcagagcaggaataaactctccaggcttagatggatgggccctgttagcctggcgggctgccccc

SEQ ID NO: 789678 - DNA, 120 bp, Artificial Sequence
  ENSG00000267221_1 (sequence is synthesized)
agcctgcctccccatcaactctccttgtcaagggaggtgcctgtgtgtgggggaggcaggggggcaagagcattcaggtgggggttgggggttccttgctgagagagcaagaatggtgcc

SEQ ID NO: 789679 - DNA, 120 bp, Artificial Sequence
  ENSG00000267221_2 (sequence is synthesized)
cccagggaagaaaccagcgggagaggcctccaactccaacaagaagtgtaagcgttacttcaacgagcactggaaagaggagtttacctggctggactttgactatgagcggaagctgat

SEQ ID NO: 789680 - DNA, 120 bp, Artificial Sequence
  ENSG00000267221_3 (sequence is synthesized)
gttctgcctcgagtgccgccaggccctggtacggaacaagcatggcaaagccgaaaacgccttcactgtgggcacagacaacttccagcgccacgccctgctgcgccacgtgacctcagg

SEQ ID NO: 789681 - DNA, 120 bp, Artificial Sequence
  ENSG00000267221_4 (sequence is synthesized)
agcccaccgccaggctctggctgtcaaccagggccagcccccttttgagggccaggctgaaggtggaggggcctgcccaggcctggctacgacccctgcctccaggggcgtcaaggtgga

SEQ ID NO: 789682 - DNA, 120 bp, Artificial Sequence
  ENSG00000267221_5 (sequence is synthesized)
gttagacccggccaaagtggctgtgctgactactgtgtactgcatggcaaaggaggatgtgcccaatgaccgctgctctgccctgctcgagctgcagaggttcaacctgtgccaggcact

SEQ ID NO: 789683 - DNA, 120 bp, Artificial Sequence
  ENSG00000267221_6 (sequence is synthesized)
gctgggcacagagcatggcgattactacagtcccaggagggtgagggacatgcaggtggccattgccagtgtcttgcacacagaggcctgccagcgcctgaaggcatccccatatgtggg

SEQ ID NO: 789684 - DNA, 120 bp, Artificial Sequence
  ENSG00000267221_7 (sequence is synthesized)
gctggtgttggacgagaccagagactggccggagtcacacagcctggccctgtttgccacttcagtgtccccctgtgatggccagcccgccaccaccttcctgggcagtgtggagctaca

SEQ ID NO: 789685 - DNA, 120 bp, Artificial Sequence
  ENSG00000267221_8 (sequence is synthesized)
ggagggcgaggccactgctggccagctcttggacatcctgcaggctttcggcgtatctgcacccaagctggcctggctcagctcaagcctccccagtgagcgcctggggagtgtgggccc

SEQ ID NO: 789686 - DNA, 120 bp, Artificial Sequence
  ENSG00000267221_9 (sequence is synthesized)
acagctccgggccacttgcccactgctggcagagctgcattgtctccctggccggacagatcctgagcccccggcctacttgggtcaatatgagagcatattggatgccctattccgcct

SEQ ID NO: 789687 - DNA, 120 bp, Artificial Sequence
  ENSG00000267221_10 (sequence is synthesized)
ccatggtggccctagttcccacttggtccctgagctccgggcagcactggaccttgcagctattgacttggcagggcctcggccagtgccctgggcctccctgctgcctgtagtggaagc

SEQ ID NO: 789688 - DNA, 120 bp, Artificial Sequence
  ENSG00000267221_11 (sequence is synthesized)
agtggccgaggcctggcctggcctggtgcccaccctggaggctgcagcccttgcctcacctgtggcggggtcactggccctggccctgcgccagttcaccttcgtggccttcacccacct

SEQ ID NO: 789689 - DNA, 120 bp, Artificial Sequence
  ENSG00000267221_12 (sequence is synthesized)
gctgctggatgccctgccctctgtgcagaagctctcccttgtcctgcaggcagaagagccggacttggccttgctgcagcctctggtgatggcggctgcggcctccctccaagctcagcg

SEQ ID NO: 789690 - DNA, 120 bp, Artificial Sequence
  ENSG00000267221_13 (sequence is synthesized)
cggctcaggtggggcccgcctccagggcttcctgcaggaactggcatccatggaccctgacgccagcagcggacgctgcacctaccgcggcgtggagctgctcggttactccgaggctgc

SEQ ID NO: 789691 - DNA, 120 bp, Artificial Sequence
  ENSG00000267221_14 (sequence is synthesized)
ggtccggggcttggagtggctccggggatccttcctggactccatgcggaagggcctacaggactcctaccccgggccttcgctggacgccgtggccgccttcgcagcgatcttcgaccc

SEQ ID NO: 789692 - DNA, 120 bp, Artificial Sequence
  ENSG00000267221_15 (sequence is synthesized)
caggcgccggaggagctgggcacgcatggcgagggggcgctgcgggtgctgctgcgcggctttgctcctgccgtggtgcgccagcgggcgctgggcgacttcgcgctgtttaagcgcgta

SEQ ID NO: 789693 - DNA, 120 bp, Artificial Sequence
  ENSG00000267221_16 (sequence is synthesized)
gtattcggccttgggcggctcggcccgcgggccctgtgcacccagctggcgtgcgcgcactcggagctgcacgagctcttccccgacttcgccgccctagccgccttggctttggcgctg

SEQ ID NO: 789694 - DNA, 120 bp, Artificial Sequence
  ENSG00000267221_17 (sequence is synthesized)
cccgcgggcgctggcctgctggacaaggtcggccgcagccgggagctgcggtggtgggggcagagtggggccggggaaggccgggggggccacatggtgaagatcgcagtggatgggccc

SEQ ID NO: 789695 - DNA, 120 bp, Artificial Sequence
  ENSG00000267221_18 (sequence is synthesized)
ccgctgcacgagtttgacttcgggttggctgtggagttcttagagagtgggtggggagagggcttcctggggtcgcagctcacctgagggtggcctccttccctcggcccatccagcctg

SEQ ID NO: 789696 - DNA, 120 bp, Artificial Sequence
  ENSG00000267221_19 (sequence is synthesized)
gggccctgggcactgtaagggccaacctagacttgaccatgctgcacccaagatgatctgctgactgcagcctcccaggggcctgaggccatccacccgcccttctggagcttcccacca

SEQ ID NO: 789697 - DNA, 120 bp, Artificial Sequence
  ENSG00000267221_20 (sequence is synthesized)
accccccccaccctgtgggctgtggaggaagggactggctcaagaggggcctgggcgggtgggcagagatgctaggatctggggtaccctaaatcattcctggcctttacacagttagat

SEQ ID NO: 789698 - DNA, 120 bp, Artificial Sequence
  ENSG00000267221_21 (sequence is synthesized)
gaggagtagctcacccttttcccttctggactcggggcaagtttgggtccccccaaagatgggagtttttggcttggggaaggaagactaggtcttggaaattgagtggctgagggaacg

SEQ ID NO: 789699 - DNA, 63 bp, Artificial Sequence
  ENSG00000267221_22 (sequence is synthesized)
aggaagactaggtcttggaaattgagtggctgagggaacggacactggtccttggtccttggc

SEQ ID NO: 789700 - DNA, 120 bp, Artificial Sequence
  ENSG00000267221_23 (sequence is synthesized)
cccactcctggcagtgtctcttctcttcagctatgactggggagtagatgaccgtgcttgtttctgacacacagcacagtgtcctctctgtacacaagctggtggttcaagggccaatgg

SEQ ID NO: 789701 - DNA, 120 bp, Artificial Sequence
  ENSG00000267221_24 (sequence is synthesized)
ttccagagagatagtggttcccttccttccctcctcaccaataggcagcctcaggccttttctgtgtataactgtgtatatagacataaaaacctacaaatgtgaaataaatctatgcta

SEQ ID NO: 789702 - DNA, 120 bp, Artificial Sequence
  ENSG00000267221_25 (sequence is synthesized)
tctttcatagtgttaccacacaaacatctaaaaggactacttttggttttgcaatgacagggtcgaaaaaagccccagatgggctggatttttttttttttctgatattttcttcctcaa

SEQ ID NO: 789703 - DNA, 120 bp, Artificial Sequence
  ENSG00000267221_26 (sequence is synthesized)
agtccagttgctctccaagttcctacccctcccctgcccttgcctcagacctttaagaccaaagactgcaaaaccacagtgctgtacctgccacctccaaggactggcgtcgaggcccaa

SEQ ID NO: 789704 - DNA, 120 bp, Artificial Sequence
  ENSG00000267221_27 (sequence is synthesized)
cccaggaatgttggcttatttacctcctgggggaagcagtttaggcctcatcagagctggggagcacatcccttcagagcccatgggtttcccattccctcctgtcagccctggccatga

SEQ ID NO: 789705 - DNA, 120 bp, Artificial Sequence
  ENSG00000267221_28 (sequence is synthesized)
aatcctggggatctggagggagggaggatagttagagagtgagaggggcgagggctagccttttcctaatacccctgggtttgagtttaatttgcaataaaatggaatcccagcacatca

SEQ ID NO: 789706 - DNA, 120 bp, Artificial Sequence
  ENSG00000267368_0 (sequence is synthesized)
gacaggggagcctctggggctgcagacactgcagacggacggacagacagatggacaacagctggaggcttggcccggccatagggctctctgcgggacagtcccagctgctagtgtcgc

SEQ ID NO: 789707 - DNA, 120 bp, Artificial Sequence
  ENSG00000267368_1 (sequence is synthesized)
tgttgctgctactgacccgtgtccagcctgggacagacgtggctgccccagagcacatcagctatgtgccccagctctcaaacgacaccttggcggggaggctcaccctgtccaccttca

SEQ ID NO: 789708 - DNA, 120 bp, Artificial Sequence
  ENSG00000267368_2 (sequence is synthesized)
cgctggagcagcctctaggccagttcagcagccacaacatctctgacttggataccatctggctggtggtggccctcagcaacgccacccagagcttcacggccccacggacaaaccagg

SEQ ID NO: 789709 - DNA, 120 bp, Artificial Sequence
  ENSG00000267368_3 (sequence is synthesized)
acatccctgctcctgccaacttctcccagaggggctactatctcacactgagggccaaccgggtgctgtaccagaccagaggccagctccatgtcctccgcgtcggcaatgatacccact

SEQ ID NO: 789710 - DNA, 120 bp, Artificial Sequence
  ENSG00000267368_4 (sequence is synthesized)
gccaaccaacaaaaattggctgcaaccatcccctaccaggacccggcccctacagggtgaagttcctggtgatgaatgacgaaggacccgtggctgaaaccaagtggtccagcgacactc

SEQ ID NO: 789711 - DNA, 120 bp, Artificial Sequence
  ENSG00000267368_5 (sequence is synthesized)
tcgggctgtccccggcccccagagcccgggcaccgtggtcatcatcgccatcctgtctatcctcctggccgtcctcctcacggtcctcctggctgtgctcatatacacctgcttcaacag

SEQ ID NO: 789712 - DNA, 120 bp, Artificial Sequence
  ENSG00000267368_6 (sequence is synthesized)
ctgcaggagcacttccctatcaggcccagaggaggcagggagtgtgagaagatacaccacgcacctcgcgttcagcactcctgccgagggggcttcctgaggggttccagaggggcccac

SEQ ID NO: 789713 - DNA, 120 bp, Artificial Sequence
  ENSG00000267368_7 (sequence is synthesized)
gggcccacgtgtccctccacctcctccctggcccaggctgcagagcctgagctgggacacgccctgaagcttctggaccctgagagagattgtttcttttctttactatttttttttttt

SEQ ID NO: 789714 - DNA, 120 bp, Artificial Sequence
  ENSG00000267368_8 (sequence is synthesized)
ttacaggcgtgagccatcaagtctggcgagagagattgtttctagatgagggtgggggcgggtgtccttagcccaaagcttgtgccagtctctatcggaaataaatgcccccaaaacctc

SEQ ID NO: 789715 - DNA, 120 bp, Artificial Sequence
  ENSG00000267467_0 (sequence is synthesized)
agagttgagcacagagggacagaggcacggaacccccagaaatgtccctcctcagaaacaggctccaggccctgcctgccctgtgcctctgcgtgctggtcctggcctgcattggggcat

SEQ ID NO: 789716 - DNA, 120 bp, Artificial Sequence
  ENSG00000267467_1 (sequence is synthesized)
gccagccagaggcccaggaaggaaccctgagccccccaccaaagctaaagatgagtcgctggagcctggtgaggggcaggatgaaggagctgctggagacagtggtgaacaggaccagag

SEQ ID NO: 789717 - DNA, 120 bp, Artificial Sequence
  ENSG00000267467_2 (sequence is synthesized)
ctggagcccgagcaccttccggggcttcatgcagacctactatgacgaccacctgagggacctgggtccgctcaccaaggcctggttcctcgaatccaaagacagcctcttgaagaagac

SEQ ID NO: 789718 - DNA, 120 bp, Artificial Sequence
  ENSG00000267467_3 (sequence is synthesized)
gacagcctcttgaagaagacccacagcctgtgccccaggcttgtctgtggggacaaggaccagggttaaaatgttcataaaagccaggtgtggttgtggcgggtgcctgtagtcccagct

SEQ ID NO: 789719 - DNA, 74 bp, Artificial Sequence
  ENSG00000267467_4 (sequence is synthesized)
agagatctcttgggggtaaaacaaaaagaaaaaaaaaagttcatacttctccaataaataaagtctcacctgtg

SEQ ID NO: 789720 - DNA, 75 bp, Artificial Sequence
  ENSG00000267467_5 (sequence is synthesized)
tgaacaggaccagagacgggtggcaatggttctggtgagggtgtgctgggctgggtggtgggaggagtctcaggg

SEQ ID NO: 789721 - DNA, 120 bp, Artificial Sequence
  ENSG00000267508_0 (sequence is synthesized)
gacgctggggtgagtcccgtctgtaccgcgcccctcttggaggcgtagccaggagtaggagtgtaggatgtgcagctgtgacccgtccctgtggactgaagtaggaggagtggaagaggg

SEQ ID NO: 789722 - DNA, 120 bp, Artificial Sequence
  ENSG00000267508_1 (sequence is synthesized)
gactggtaaccaatgataaggcctcgtaggtgggttctgcttttccagaatcctgccctttccaaaaggaagacggtatgattaagttccaggaaagggtgacattcaaggatgtggctg

SEQ ID NO: 789723 - DNA, 120 bp, Artificial Sequence
  ENSG00000267508_2 (sequence is synthesized)
ttgtcttcaccaaggaagagctggcactattggataaagcccagataaacctgtaccaagatgtgatgctggaaaacttcaggaacctcatgttagtgagagacgggattaaaaacaaca

SEQ ID NO: 789724 - DNA, 120 bp, Artificial Sequence
  ENSG00000267508_3 (sequence is synthesized)
ttttgaatcttcaggcaaaggggttaagttacctttcgcaagaagtgcttcattgctggcagatttggaaacaaaggatccgggatttaactgtgagtcaggattatatcgtgaaccttc

SEQ ID NO: 789725 - DNA, 120 bp, Artificial Sequence
  ENSG00000267508_4 (sequence is synthesized)
aagaagagtgttccccacatttagaagatgtttccctcagtgaagagtgggcaggcatttctcttcagatttctgaaaatgaaaactatgtagtaaatgccattatcaaaaatcaagata

SEQ ID NO: 789726 - DNA, 120 bp, Artificial Sequence
  ENSG00000267508_5 (sequence is synthesized)
tcacagcatggcaaagcctgacacaggttcttaccccagaatcgtggaggaaagccaacataatgaccgagccccagaactctcagggaagatataagggaatttacatggaagagaaat

SEQ ID NO: 789727 - DNA, 120 bp, Artificial Sequence
  ENSG00000267508_6 (sequence is synthesized)
tgtacagacgtgctcagcatgatgacagcctcagttggacctcatgtgatcatcatgagtcccaagaatgtaaaggagaggaccctggtagacatcccagctgtgggaaaaacttgggta

SEQ ID NO: 789728 - DNA, 120 bp, Artificial Sequence
  ENSG00000267508_7 (sequence is synthesized)
tgaaatcaacggttgaaaaacgtaatgcggcccatgtattaccacagcctttcccatgtaataactgtggggtggcctttgcagatgatacagatcctcatgtccatcacagcactcacc

SEQ ID NO: 789729 - DNA, 120 bp, Artificial Sequence
  ENSG00000267508_8 (sequence is synthesized)
taggagaaaaatcttataaatgtgaccagtatggaaagaactttagtcagagccaagatcttatcgttcattgtaaaactcactctggcaagactccctatgaattccacgaatggccta

SEQ ID NO: 789730 - DNA, 120 bp, Artificial Sequence
  ENSG00000267508_9 (sequence is synthesized)
tgggctgcaaacagagctcagaccttcccagatatcagaaagtctcctcaggagacaaaccctacaaatgtaaagaatgtggcaagggcttcaggcgcagctcttcccttcacaaccatc

SEQ ID NO: 789731 - DNA, 120 bp, Artificial Sequence
  ENSG00000267508_10 (sequence is synthesized)
atcgagtccacacaggggagatgccctacaaatgcgatgaatgtgggaaagggtttggatttaggtcacttctttgtattcatcagggagtacacacagggaaaaagccctataaatgtg

SEQ ID NO: 789732 - DNA, 120 bp, Artificial Sequence
  ENSG00000267508_11 (sequence is synthesized)
accttcttgtccatcagagagtccacactggagagaagccctacaaatgcagtgagtgtggcaagtgctttagttcaagctccgttcttcaagtccactggaggtttcacacaggggaga

SEQ ID NO: 789733 - DNA, 120 bp, Artificial Sequence
  ENSG00000267508_12 (sequence is synthesized)
aaccatataggtgtggtgagtgtggaaagggcttcagccaatgtacacaccttcacattcaccagagagtccacacaggggagaaaccatacaaatgcaatgtgtgtggaaaggattttg

SEQ ID NO: 789734 - DNA, 120 bp, Artificial Sequence
  ENSG00000267508_13 (sequence is synthesized)
cgtatagctctgttcttcacactcatcagagagttcacactggagaaaaaccatataaatgtgaagtgtgtggaaagtgcttcagttacagttcatattttcacttacatcaaagagatc

SEQ ID NO: 789735 - DNA, 120 bp, Artificial Sequence
  ENSG00000267508_14 (sequence is synthesized)
acatcagagagaaaccatataaatgtgatgagtgtggtaaaggcttcagccggaattcagatcttaatgttcacctcagagtccacacaggagagaggccctataagtgtaaggcatgtg

SEQ ID NO: 789736 - DNA, 120 bp, Artificial Sequence
  ENSG00000267508_15 (sequence is synthesized)
gtaagggcttcagtcgtaattcatacctccttgcccatcagagagtgcatatagatgagacacagtacacacactgtgagcgtggaaaggaccttctgactcatcaaagactacatgagc

SEQ ID NO: 789737 - DNA, 120 bp, Artificial Sequence
  ENSG00000267508_16 (sequence is synthesized)
agagagaaacattataaatgtagtaagtcagggttcaattagtaaaacagaagccacactgtattccagatgatagaggcttactcagcctgtgggagggctaggggagcaaaagacagg

SEQ ID NO: 789738 - DNA, 120 bp, Artificial Sequence
  ENSG00000267508_17 (sequence is synthesized)
gacactgccatcgataatgtcagcctgcagcactgaagtgtgccaggcaaggactgtggatttcaagaacttctgtgaagctcccatcaactgctgtatgctacaatggcaaagaggtta

SEQ ID NO: 789739 - DNA, 120 bp, Artificial Sequence
  ENSG00000267508_18 (sequence is synthesized)
cttttgacaaatgggtggtttgtggtagtggttgtagttagtggtcaaatttccattaaagggtgtgtccaggaaggaaattctaattgggatgatcatggtaaggtcttcagttcagcc

SEQ ID NO: 789740 - DNA, 120 bp, Artificial Sequence
  ENSG00000267508_19 (sequence is synthesized)
aacgtctttagatttttttttagtccccagtagaaaaatactctctgtatgaagaacattcaaaagtgtgctcaaaaatgaaacccatgctcttactatgaaagaacgttagtacccagg

SEQ ID NO: 789741 - DNA, 120 bp, Artificial Sequence
  ENSG00000267508_20 (sequence is synthesized)
ttttccatgagattctctacacaggcaagaagctccatagaagtggcatttgaagggtgtggcagaggcagtgctgtgtttatcacactggttccatttccttgcaaataagaagtctat

SEQ ID NO: 789742 - DNA, 120 bp, Artificial Sequence
  ENSG00000267508_21 (sequence is synthesized)
ttcccagtaacccttgcagttaagagtgtgcccatgtgattgagttctagccaatggagtgtgagcaaaagtgatataagccactttcaggtctagcctttacaaacatcctcaggcttc

SEQ ID NO: 789743 - DNA, 120 bp, Artificial Sequence
  ENSG00000267508_22 (sequence is synthesized)
tctatccctgccaaggtgaccttggaggctgcttattccagactgggttgatagaaggtcactacttcatctgtgttggatttctttttagagtaagaaataaaagttcattgtgtctca

SEQ ID NO: 789744 - DNA, 120 bp, Artificial Sequence
  ENSG00000267508_23 (sequence is synthesized)
gagtccacatacagaagtaacataattcagagttcaaaacttttaaatctttaaggcttgatgtggcagtgcaaccatctaaaatggtatggatgggacttcttcagtgataaccttcat

SEQ ID NO: 789745 - DNA, 120 bp, Artificial Sequence
  ENSG00000267508_24 (sequence is synthesized)
tcattggtgagtacaccaaagagaaatgttccagatgatatagctgtggtaaaactttactgaaaagtataacccaccgacgtaagaaatctcatataatagagaaactctataatgtgg

SEQ ID NO: 789746 - DNA, 120 bp, Artificial Sequence
  ENSG00000267508_25 (sequence is synthesized)
gtttgtcagctcacaccttaaatgcgattaaaaattaactagaataggtgttctgtggttagtcttaataaaattaattgaataaaatcaacatttactaaagtgaccaacaacatgtaa

SEQ ID NO: 789747 - DNA, 120 bp, Artificial Sequence
  ENSG00000267508_26 (sequence is synthesized)
aaaaccaacagtgttcattgcagactgatgcagtcttcttctcagcagacctgtataataatgggtttttaaaggatgctctttctgtcagtttccccccaaatttgtcatttaattggg

SEQ ID NO: 789748 - DNA, 120 bp, Artificial Sequence
  ENSG00000267508_27 (sequence is synthesized)
gctttttttttttttttttttttttggaaacagggtcttgctgtgtcacccaggtggctggagtgcagtggcctgatcattgctcgctgaagccttgaactcctggcttcagtgatcctc

SEQ ID NO: 789749 - DNA, 120 bp, Artificial Sequence
  ENSG00000267508_28 (sequence is synthesized)
gcctcctgagtagctgggactacagacatacaccaccgtgttcagctgatgttttctttaaaaattgtacttgtagagatggggtcttactttgttgcccaggttagtctcaaacttctg

SEQ ID NO: 789750 - DNA, 120 bp, Artificial Sequence
  ENSG00000267508_29 (sequence is synthesized)
ggggtcttactttgttgcccaggttagtctcaaacttctggtttcaagcgatcctcctacctcagcttcccaaagtgcagggattacaggtttgggccactgcactcatcccacaaggtg

SEQ ID NO: 789751 - DNA, 120 bp, Artificial Sequence
  ENSG00000267508_30 (sequence is synthesized)
ttttttttttccttcaaaaacagtgtccttttttgttttaattgacttataggtttcttcatttggatcatggtttattcctagtttttcttgcattacagtttcctgctagttatagtt

SEQ ID NO: 789752 - DNA, 120 bp, Artificial Sequence
  ENSG00000267508_31 (sequence is synthesized)
tgtaaacagaacagccattcaagtgcaaataaaaccatccctgaagtgtcattttcttactgatcaggtggataatagtgaaatattttaaaaattctatgtcagtagaaatgaggaaat

SEQ ID NO: 789753 - DNA, 120 bp, Artificial Sequence
  ENSG00000267508_32 (sequence is synthesized)
gagtgttcttacataagttggtgggggaaagaaaaacaggtacaaagttgctggagaggatcttgtctatatgtatcatatgtacaatgtgcattgtctttgagccaatgatcctgcttc

SEQ ID NO: 789754 - DNA, 120 bp, Artificial Sequence
  ENSG00000267508_33 (sequence is synthesized)
tcagaatgtatttttaggatgtaattacatgagtggggaaaatatggtttcagaaagaaatatgttctaagaattttgcaatgagaagactgtaaacaacctgaaggttcatgtataaga

SEQ ID NO: 789755 - DNA, 120 bp, Artificial Sequence
  ENSG00000267508_34 (sequence is synthesized)
gattgagtaaattagggcatcccatataatggaataacatggctccatcaacaatgatctagacctataaaaatgtccacatgttattgtccatgtccaccacatactccagtactccta

SEQ ID NO: 789756 - DNA, 120 bp, Artificial Sequence
  ENSG00000267508_35 (sequence is synthesized)
cttgcaaacattaagttagagaaaaaatccgggatacacattatcctaggaagcttttggggtttagaatgggtgcaacattccttcatgacagaatcagccctcagtgttggtggaggt

SEQ ID NO: 789757 - DNA, 120 bp, Artificial Sequence
  ENSG00000267508_36 (sequence is synthesized)
gtcccaggcaatcctctagtttggccgggagcagcgcttgcatatcacattaagctttttaaatatatgatgctaacaggaatgtctccctacttcacaaaattgtttgcttttcctctt

SEQ ID NO: 789758 - DNA, 120 bp, Artificial Sequence
  ENSG00000267508_37 (sequence is synthesized)
gtagcaaagtagcatggaaaaagcagaaattagtctagctcccaatcagtgggagccaatctcatttacaaatgaagatgcagagatcctaaataaatatgagcatgtcaaatccaatga

SEQ ID NO: 789759 - DNA, 120 bp, Artificial Sequence
  ENSG00000267508_38 (sequence is synthesized)
tttgataaaagcgtaacagactcgctcatgtataatttatcctaaatatgcttatcagcttctgcctcataacacacacaagaactgagtagctctaaatacatatttatttagctcatg

SEQ ID NO: 789760 - DNA, 120 bp, Artificial Sequence
  ENSG00000267508_39 (sequence is synthesized)
atgtgtgagctggcaagttcaactgggcttagctgggcagttctggtgtgggacatgctagattatcttaactgggctttgtacatgcatctgcagtcagctgatggttcatctgggcct

SEQ ID NO: 789761 - DNA, 120 bp, Artificial Sequence
  ENSG00000267508_40 (sequence is synthesized)
ggctgttttatgatggtcatagatgagacaacgaagttctctctgtcatcatggtctctcaccctccagaagaccaatcgagggttggtcccatagtgccagggtttcaagggcaaaagc

SEQ ID NO: 789762 - DNA, 120 bp, Artificial Sequence
  ENSG00000267508_41 (sequence is synthesized)
tgtgatctcttaaggcctcatcagggaacaggctcaatgatactttcaccacattttaatgattaaagcaagtcacaacactggcccagattcatggggtgagattaagacaaaataaaa

SEQ ID NO: 789763 - DNA, 120 bp, Artificial Sequence
  ENSG00000267508_42 (sequence is synthesized)
aatgttgagacataatcattggaaggaaaaggaagatactatttttatgctagagaataatgttatttacttataaaattcaaatccacctgtaaaatttgaccaattgaaggctgtttt

SEQ ID NO: 789764 - DNA, 120 bp, Artificial Sequence
  ENSG00000267508_43 (sequence is synthesized)
aaaattatcgggtcaacaaattggtttcacacgaaattggcatgtgaaaattcatagcattactatgtaagagtcttttataaaatgtagccaaaatgtttcattcacaataacaattgt

SEQ ID NO: 789765 - DNA, 120 bp, Artificial Sequence
  ENSG00000267508_44 (sequence is synthesized)
gtgcaatgaccagaattgtccaaaggtaattctgggagttccctttgggatgcctaggtgaggagctatctggggcctcagactcccacattcttcagtgggaagggctttacatgaact

SEQ ID NO: 789766 - DNA, 120 bp, Artificial Sequence
  ENSG00000267508_45 (sequence is synthesized)
caacttcccagcggctttctcttcctgatgggaggtgttagaacctggctttctcatgcaacttctgtgaagctctgacaactaaagccagattgtctgctttagttaagtagtccagat

SEQ ID NO: 789767 - DNA, 120 bp, Artificial Sequence
  ENSG00000267508_46 (sequence is synthesized)
tacctgcatagtcaatttgttccctcaccaacatggatgccttcacaattgctctttaagaaggataaaaacatagcggtgaggtgtggtctatttcctgcttcacccaggccctggtgc

SEQ ID NO: 789768 - DNA, 120 bp, Artificial Sequence
  ENSG00000267508_47 (sequence is synthesized)
cctggtgcttcttcaagtggtatgagaaattgtggtcctgtgccttctcttccagacccttagcttacatgttttccctataaaacttagtcctaatcccagcactttgggaggccaagg

SEQ ID NO: 789769 - DNA, 120 bp, Artificial Sequence
  ENSG00000267508_48 (sequence is synthesized)
actggacgcacgctgcgggcgacattgtttgggacgctgggttctgcttttccagaatcctgccctttccaaaaggaagacggtatgattaagttccaggagacgggattaaaaacaaca

SEQ ID NO: 789770 - DNA, 120 bp, Artificial Sequence
  ENSG00000267508_49 (sequence is synthesized)
gcacgctgcgggcgacattgtttgggacgctgggttctgcttttccagaatcctgccctttccaaaaggaagacggtatgattaagttccaggtaagttaagggtttctttctctttaaa

SEQ ID NO: 789771 - DNA, 120 bp, Artificial Sequence
  ENSG00000267508_50 (sequence is synthesized)
tatgctgttcattctgaggaaccagacacttctgttttctgaaaggaggtcagcattttttgagtgactactatgtattaggtactttatctgctcataatgactttgtgaggcaggtgg

SEQ ID NO: 789772 - DNA, 120 bp, Artificial Sequence
  ENSG00000267508_51 (sequence is synthesized)
acaaactcacagatttcaagatgtctactttggtgctactctaagtgtagttcatgtatcagtaccagtccatgaactgcttatcactgcccgatgagggaaaaagaatcaagagtaagt

SEQ ID NO: 789773 - DNA, 120 bp, Artificial Sequence
  ENSG00000267508_52 (sequence is synthesized)
tcagaaacttacagaaatttggtgttgccgcagcatccgagtgcatgggcagcatatacgtgaccatactctaaatgtgactggcctcattcaataagtagcaagatttgaatgggtatg

SEQ ID NO: 789774 - DNA, 120 bp, Artificial Sequence
  ENSG00000267508_53 (sequence is synthesized)
tattggtcagagttcagtcagcaaggcagaaccagtaagagatatatattaagagatttatcataaggaattgacttatatgattatgggggctaactaggcaagtccagaatccacagg

SEQ ID NO: 789775 - DNA, 120 bp, Artificial Sequence
  ENSG00000267508_54 (sequence is synthesized)
gcacgctgcgggcgacattgtttgggacgctgggttctgcttttccagaatcctgccctttccaaaaggaagacggtatgattaagttccagattcaagggatacatgtgcaggaaaggg

SEQ ID NO: 789776 - DNA, 120 bp, Artificial Sequence
  ENSG00000267534_0 (sequence is synthesized)
gacttagccgagcccggctggcaaccccagccccagccgcggccgccctggggacgcagacgccaaggcccctccggccagggccgggagccgggccggcctagccagttctgaaagccc

SEQ ID NO: 789777 - DNA, 120 bp, Artificial Sequence
  ENSG00000267534_1 (sequence is synthesized)
ctagccagttctgaaagccccatggccccagcaggcctctgagccccaccatgggcagcttgtactcggagtacctgaaccccaacaaggtccaggaacactataattataccaaggaga

SEQ ID NO: 789778 - DNA, 120 bp, Artificial Sequence
  ENSG00000267534_2 (sequence is synthesized)
cgctggaaacgcaggagacgacctcccgccaggtggcctcggccttcatcgtcatcctctgttgcgccattgtggtggaaaaccttctggtgctcattgcggtggcccgaaacagcaagt

SEQ ID NO: 789779 - DNA, 120 bp, Artificial Sequence
  ENSG00000267534_3 (sequence is synthesized)
tccactcggcaatgtacctgtttctgggcaacctggccgcctccgatctactggcaggcgtggccttcgtagccaataccttgctctctggctctgtcacgctgaggctgacgcctgtgc

SEQ ID NO: 789780 - DNA, 120 bp, Artificial Sequence
  ENSG00000267534_4 (sequence is synthesized)
agtggtttgcccgggagggctctgccttcatcacgctctcggcctctgtcttcagcctcctggccatcgccattgagcgccacgtggccattgccaaggtcaagctgtatggcagcgaca

SEQ ID NO: 789781 - DNA, 120 bp, Artificial Sequence
  ENSG00000267534_5 (sequence is synthesized)
agagctgccgcatgcttctgctcatcggggcctcgtggctcatctcgctggtcctcggtggcctgcccatccttggctggaactgcctgggccacctcgaggcctgctccactgtcctgc

SEQ ID NO: 789782 - DNA, 120 bp, Artificial Sequence
  ENSG00000267534_6 (sequence is synthesized)
ctctctacgccaagcattatgtgctgtgcgtggtgaccatcttctccatcatcctgttggccatcgtggccctgtacgtgcgcatctactgcgtggtccgctcaagccacgctgacatgg

SEQ ID NO: 789783 - DNA, 120 bp, Artificial Sequence
  ENSG00000267534_7 (sequence is synthesized)
ccgccccgcagacgctagccctgctcaagacggtcaccatcgtgctaggcgtctttatcgtctgctggctgcccgccttcagcatcctccttctggactatgcctgtcccgtccactcct

SEQ ID NO: 789784 - DNA, 120 bp, Artificial Sequence
  ENSG00000267534_8 (sequence is synthesized)
gcccgatcctctacaaagcccactactttttcgccgtctccaccctgaattccctgctcaaccccgtcatctacacgtggcgcagccgggacctgcggcgggaggtgcttcggccgctgc

SEQ ID NO: 789785 - DNA, 120 bp, Artificial Sequence
  ENSG00000267534_9 (sequence is synthesized)
agtgctggaggccgggggtgggggtgcaaggacggaggcggggcgggaccccgggccaccacctcctgccactccgcagctccagctccctggagaggggcatgcacatgcccacgtcac

SEQ ID NO: 789786 - DNA, 120 bp, Artificial Sequence
  ENSG00000267534_10 (sequence is synthesized)
ccacgtttctggagggcaacacggtggtctgagggtgggggtggaccaacaaccaggccagggcagaggggttcatggagaggccactgggtgaccccagatagagacttggggctactg

SEQ ID NO: 789787 - DNA, 120 bp, Artificial Sequence
  ENSG00000267534_11 (sequence is synthesized)
agccagatgcccccgccccacagacctgggtgatgttgcaaatatttcacacctggaaaggccagataaggcactgactagtcacatagcagtgttgcagtgcggtcctgagggccagtc

SEQ ID NO: 789788 - DNA, 120 bp, Artificial Sequence
  ENSG00000267534_12 (sequence is synthesized)
cagtggctagtgtgacccctttagaactggatcctggggaggccagggcaggggacctgtgaagagccagggtgagggcaggcagcatttaaggggagctcagggcaggagcactttacc

SEQ ID NO: 789789 - DNA, 89 bp, Artificial Sequence
  ENSG00000267534_13 (sequence is synthesized)
ctcctgacctcatgatccgcccgtgaagccacctcacctggcggtacaaagaatttctgcattttcttccctggcccctagtcctgcac

SEQ ID NO: 789790 - DNA, 120 bp, Artificial Sequence
  ENSG00000267534_14 (sequence is synthesized)
agaatttctgcattttcttccctggcccctagtcctgcaccgatttctccttttcgaatgtattcctcctgccaccttctctgggcaacttcgtgcgactacagaaccactgtcctgagg

SEQ ID NO: 789791 - DNA, 120 bp, Artificial Sequence
  ENSG00000267534_15 (sequence is synthesized)
agctagaggcctcctctctgaccatccagagcccaaatccacagcttccccaaatttcatcagctgccacttgacgacttctccccgtctctctgaggcccggaaaccacggctggaggt

SEQ ID NO: 789792 - DNA, 120 bp, Artificial Sequence
  ENSG00000267534_16 (sequence is synthesized)
ggggaggggatggcggctgaggtccattcctcattctcagacctcattgctcagttgcactatttggggcacagaataatcaccaaaagtgagaaaaacgagtttgggtggctggggagg

SEQ ID NO: 789793 - DNA, 120 bp, Artificial Sequence
  ENSG00000267534_17 (sequence is synthesized)
actttgggactcttgatgcaaggcgcaacttgagaaaattctgggtgtgatatttgcacagacaccctcctttcaaaaacagccaccccccaagctattctcagctccacacctgcagcc

SEQ ID NO: 789794 - DNA, 120 bp, Artificial Sequence
  ENSG00000267534_18 (sequence is synthesized)
ccagctaaggtaccaggtctcctgagcaaggcagagagaagccttgagccttctctgtgtcttctttcaagaaccccgctgtgtcttctttcaagattttttttttgagacagtttcaag

SEQ ID NO: 789795 - DNA, 74 bp, Artificial Sequence
  ENSG00000267534_19 (sequence is synthesized)
ttttttgagacagtttcaagataggtggcagtggttcaatctccgttcactgccacctccacctcccgggttca

SEQ ID NO: 789796 - DNA, 120 bp, Artificial Sequence
  ENSG00000267534_20 (sequence is synthesized)
aggcgtgagccactgtgcccggccttcttctttcaagttatatagaatggagcatgggggtggcagtggctagggacatttcctggggacactctcccctaaccccccagaaggacttca

SEQ ID NO: 789797 - DNA, 120 bp, Artificial Sequence
  ENSG00000267534_21 (sequence is synthesized)
ggggacactctcccctaaccccccagaaggacttcacaaaaacctgtggataatggaagggatgttacggtacaaacgtatatttatgtgtgtgtgtgtgtatgtgtgtgcgcgcgcgcg

SEQ ID NO: 789798 - DNA, 120 bp, Artificial Sequence
  ENSG00000267534_22 (sequence is synthesized)
tgtgcacataggcgtgatgtctgtgaccctcctctcctcgtcacatttcccccagaatgaatgctgtcctgtctgctcatgtttgtgttgaagctgccaaagtcggggagctctggtcct

SEQ ID NO: 789799 - DNA, 120 bp, Artificial Sequence
  ENSG00000267534_23 (sequence is synthesized)
gcccagacccctttggaattgctggcccatcctcccactggagagctggggtgcagctcaccttggggaaggaaacctcatgcctcagagtaatttcttgtgaatgcaaagcctggggga

SEQ ID NO: 789800 - DNA, 120 bp, Artificial Sequence
  ENSG00000267534_24 (sequence is synthesized)
gcgggtctttggggggcaaggagccagtcaggggcttgtttcccctcatagagctccccagacgtgcctccgcaatgcctgaaacccagacctaggctaataaacggttcaatttctgtt

SEQ ID NO: 789801 - DNA, 120 bp, Artificial Sequence
  ENSG00000267631_0 (sequence is synthesized)
gtccaacacccctcactccctgtctcactcccccacggagactcaatttactttccatgtccacattcccagtgcttgcggaagatatcccgctaagagagagacatgtcaaagaggctg

SEQ ID NO: 789802 - DNA, 120 bp, Artificial Sequence
  ENSG00000267631_1 (sequence is synthesized)
tgttgctgctgctgagcatgggcgggacatgggcatccaaggagccgcttcggccacggtgccgccccatcaatgccaccctggctgtggagaaggagggctgccccgtgtgcatcaccg

SEQ ID NO: 789803 - DNA, 120 bp, Artificial Sequence
  ENSG00000267631_2 (sequence is synthesized)
taccgcgatgtgcgcttcgagtccatccggctccctggctgcccgcgcggcgtgaaccccgtggtctcctacgccgtggctctcagctgtcaatgtgcactctgccgccgcagcaccact

SEQ ID NO: 789804 - DNA, 120 bp, Artificial Sequence
  ENSG00000267631_3 (sequence is synthesized)
gactgcgggggtcccaaggaccaccccttgacctgtgatgacccccgcttccaggactcctcttcctcaaaggcccctccccccagccttccaagtccatcccgtctcccggggccctag

SEQ ID NO: 789805 - DNA, 120 bp, Artificial Sequence
  ENSG00000267631_4 (sequence is synthesized)
ctggagggaggaaggggaactgcatctgagagagagcagccaattgggtccgctgactctggccaggttcccgtgccgcgtccaacacccctcactccctgtctcactcccccacggaga

SEQ ID NO: 789806 - DNA, 120 bp, Artificial Sequence
  ENSG00000267631_5 (sequence is synthesized)
ctcaatttactttccatgtccacattcccagtgcttgcggaagatatcccgctaagagagagacatgtcaaaggtagggtagatccacatttccgggcaccaaagatggagatgttccag

SEQ ID NO: 789807 - DNA, 120 bp, Artificial Sequence
  ENSG00000267631_6 (sequence is synthesized)
gaaagactgcagggcccctgggcaccttccacctccttccaggccatcactggcatgagaaggggcagacccgtgtgagctgtggaaggaggcctctttctggaggagcgtgacccccag

SEQ ID NO: 789808 - DNA, 120 bp, Artificial Sequence
  ENSG00000267673_0 (sequence is synthesized)
gagtcacgtgatgcatgtcatggccgcctccatggcccggggaggcgtgagtgccagggttctactgcaggctgccaggggcacctggtggaacagacctgggggcacttccgggtcggg

SEQ ID NO: 789809 - DNA, 120 bp, Artificial Sequence
  ENSG00000267673_1 (sequence is synthesized)
ggagggggtggcgctggggacaaccagaaagtttcaagcgacaggctcgcgcccggctggagaggaggacgcgggcggcccggagcggcccggggacgtggtgaacgtggtgttcgtaga

SEQ ID NO: 789810 - DNA, 120 bp, Artificial Sequence
  ENSG00000267673_2 (sequence is synthesized)
ccgctcaggccagcggatcccagtgagtggcagagtcggggacaatgttcttcacctggcccagcgccacggggtggacctggaaggggcctgtgaagcctccctggcctgctccacctg

SEQ ID NO: 789811 - DNA, 120 bp, Artificial Sequence
  ENSG00000267673_3 (sequence is synthesized)
ccatgtgtatgtgagtgaagaccacctggatctcctgcctcctcccgaggagagggaagacgacatgctagacatggcccccctcctccaggagaactcgcggctgggctgccagattgt

SEQ ID NO: 789812 - DNA, 120 bp, Artificial Sequence
  ENSG00000267673_4 (sequence is synthesized)
aacttctacgtggatggccatgtccccaagccccactgacatgaacacctggaccattccacattgccatggccccagggcccagattgagggaatagccaggtgccagccctgcccaga

SEQ ID NO: 789813 - DNA, 120 bp, Artificial Sequence
  ENSG00000267673_5 (sequence is synthesized)
gtgcggacaggcccgggagagacgtggaagcccctgtgaaggacaacacccctgcttgggagagagtcccatgtccaggctctggtggggacagggcccctagtggggtggccttcccca

SEQ ID NO: 789814 - DNA, 120 bp, Artificial Sequence
  ENSG00000267673_6 (sequence is synthesized)
ggcccctgagaatcagggtttgagtaggagtggactcatattggagctgcaataaatcgataacacaggccccagcatgttgagtgtccttgggggacagatctggggtctacaggtggc

SEQ ID NO: 789815 - DNA, 120 bp, Artificial Sequence
  ENSG00000267673_7 (sequence is synthesized)
agggggtggcgctggggacaaccagaaagtttcaagcgacaggtacctggggcgcccggggcgggcagcgttaatccgtcagatgccggcggggcggggctcggcgcagccgctcaccga

SEQ ID NO: 789816 - DNA, 120 bp, Artificial Sequence
  ENSG00000267673_8 (sequence is synthesized)
ccgaggagaggagaactcgcggctgggctgccagattgtgctgacaccggagctggaaggagcggaattcaccctgcccaagatcaccaggaacttctacgtggatggccatgtccccaa

SEQ ID NO: 789817 - DNA, 120 bp, Artificial Sequence
  ENSG00000267673_9 (sequence is synthesized)
gaattcctctggtccccatcttgccctgtagcttcatctcgaggtcccccttctgctttgccctattcagtacctgtgcgtcaagcctcaattcctacttcctaaccctagattctaccc

SEQ ID NO: 789818 - DNA, 120 bp, Artificial Sequence
  ENSG00000267673_10 (sequence is synthesized)
gctcggcgcagccgctcaccgaaccgtgttttccaggctcgcgcccggctggagaggaggacgcgggcggcccggagcggcccggggacgtattctacccgggccctgagcccatcatcc

SEQ ID NO: 789819 - DNA, 120 bp, Artificial Sequence
  ENSG00000267680_0 (sequence is synthesized)
ggttgctgcagtttttccgcgatagtttggggcagttccgcgcgttgcaggcccttctgaatttcctggacctacgcattggatcctcaaagaactgctgaataccactagaaacatacc

SEQ ID NO: 789820 - DNA, 120 bp, Artificial Sequence
  ENSG00000267680_1 (sequence is synthesized)
tgtaaccagagacagctgattatagctttctgcagcaaggaagcccacgtaccaggggctgtcttggcacaattctgctttcccaggaactgcatcactcaggactctgcaagtttccag

SEQ ID NO: 789821 - DNA, 120 bp, Artificial Sequence
  ENSG00000267680_2 (sequence is synthesized)
aagtaagagggaaaatgaccacgttcaaggaggcaatgaccttcaaggacgtggctgtggtcttcactgaggaagagctggggctgctggaccttgctcagaggaagctgtatcgagatg

SEQ ID NO: 789822 - DNA, 120 bp, Artificial Sequence
  ENSG00000267680_3 (sequence is synthesized)
tgatgctggagaacttcaggaacctgctctcagtgggacatcaagcattccacagggatactttccacttcctaagggaagaaaagatttggatgatgaagacagcaatccaaagggaag

SEQ ID NO: 789823 - DNA, 120 bp, Artificial Sequence
  ENSG00000267680_4 (sequence is synthesized)
ggaattcaggagacaagatccaaactgagatggagactgtttcagaagcaggaacacatcaagagtggtccttccagcaaatctgggaaaaaattgcaagtgatttaaccaggtctcaag

SEQ ID NO: 789824 - DNA, 120 bp, Artificial Sequence
  ENSG00000267680_5 (sequence is synthesized)
acttgatgataaatagctctcagttctccaaagaaggtgatttcccctgccagactgaggcaggactatctgtaattcacacaagacagaaatcttcccagggcaatggatataaaccat

SEQ ID NO: 789825 - DNA, 120 bp, Artificial Sequence
  ENSG00000267680_6 (sequence is synthesized)
ccttcagtgatgtctcccactttgattttcatcaacaattacactcaggagagaaatctcatacgtgtgatgagtgtggaaagaacttttgttacatctcagcccttcgtattcatcaga

SEQ ID NO: 789826 - DNA, 120 bp, Artificial Sequence
  ENSG00000267680_7 (sequence is synthesized)
gagtccacatgggagagaaatgctataagtgtgacgtgtgtggtaaggaattcagtcagagttcacatctgcaaactcatcagagagtccacactggagagaaaccgttcaaatgtgtgg

SEQ ID NO: 789827 - DNA, 120 bp, Artificial Sequence
  ENSG00000267680_8 (sequence is synthesized)
aatgtgggaaaggcttcagtcgtagatcagcacttaatgttcatcataaattacacacaggagagaaaccttataattgtgaggaatgcgggaaggccttcattcacgattcccagcttc

SEQ ID NO: 789828 - DNA, 120 bp, Artificial Sequence
  ENSG00000267680_9 (sequence is synthesized)
aagaacatcagagaatccatacgggggagaagccattcaaatgtgatatatgtggtaagagcttctgtggtagatcaagacttaataggcattccatggttcacacggcagagaaaccat

SEQ ID NO: 789829 - DNA, 120 bp, Artificial Sequence
  ENSG00000267680_10 (sequence is synthesized)
tccgatgtgatacgtgtgataagagctttcgtcagagatcagcacttaatagtcatcgcatgatccacacaggagagaaaccatacaaatgtgaggagtgtggaaaaggctttatttgta

SEQ ID NO: 789830 - DNA, 120 bp, Artificial Sequence
  ENSG00000267680_11 (sequence is synthesized)
ggcgagatctttatacgcatcatatggtccacacgggagaaaagccatataattgtaaagagtgtgggaagagcttcagatgggcctcgtgtcttttgaaacatcagcgagtccacagtg

SEQ ID NO: 789831 - DNA, 120 bp, Artificial Sequence
  ENSG00000267680_12 (sequence is synthesized)
gagaaaaaccattcaaatgtgaagaatgtgggaaaggattttacacaaattcacaatgctattcccaccagagatcccatagtggagaaaaaccatacaaatgtgtggagtgtgggaagg

SEQ ID NO: 789832 - DNA, 120 bp, Artificial Sequence
  ENSG00000267680_13 (sequence is synthesized)
gctacaaaaggaggttggatcttgactttcaccagcgcgtccatacaggagagaaactgtataattgtaaggaatgtgggaagagctttagtcgggccccatgtcttttgaaacatgaga

SEQ ID NO: 789833 - DNA, 120 bp, Artificial Sequence
  ENSG00000267680_14 (sequence is synthesized)
gactccacagtggagaaaaaccattccaatgtgaagagtgtgggaagagatttactcaaaattcacatcttcattcccatcagagagttcacactggagaaaagccatacaaatgtgaga

SEQ ID NO: 789834 - DNA, 120 bp, Artificial Sequence
  ENSG00000267680_15 (sequence is synthesized)
agtgtggaaagggctacaatagtaagtttaatcttgatatgcaccagaaggtccacacaggagagagaccatacaattgtaaggaatgtgggaagagttttggctgggcctcgtgtcttt

SEQ ID NO: 789835 - DNA, 120 bp, Artificial Sequence
  ENSG00000267680_16 (sequence is synthesized)
agtggagaaaaaccattcaaatgtgaagagtgtgggaaaagatttactcagaattcacagcttcattctcatcaaagagtgcacactggagaaaagccatacaaatgtgatgagtgtggg

SEQ ID NO: 789836 - DNA, 120 bp, Artificial Sequence
  ENSG00000267680_17 (sequence is synthesized)
aagggcttcagctggtcctcaactcgtctgacccatcagagacgccacagcagagaaacacctctcaaatgtgagcagcatgggaagaacattgtacagaattcattctctaaagtgcaa

SEQ ID NO: 789837 - DNA, 120 bp, Artificial Sequence
  ENSG00000267680_18 (sequence is synthesized)
gaaaaagttcacagtgtagaaaagccatacaaatgtgaggactgtgggaagggctacaacaggcgcttgaatcttgatatgcatcagagggtccacatgggagagaaaacatggaagtgt

SEQ ID NO: 789838 - DNA, 120 bp, Artificial Sequence
  ENSG00000267680_19 (sequence is synthesized)
agggagtgtgatatgtgctttagtcaggcctcaagccttcgacttcatcagaatgttcatgttggagaaaaaccttagtgatgtgatggtgcaataaagtcttcactcagtcttcatgaa

SEQ ID NO: 789839 - DNA, 120 bp, Artificial Sequence
  ENSG00000267680_20 (sequence is synthesized)
tgcagtctcatctgaaagttcacaaaggagagacacattaaaatatgaggcacatagtaagcacttccctttgagtattttatctctgaatccatgctggtgataaatttcacccattct

SEQ ID NO: 789840 - DNA, 120 bp, Artificial Sequence
  ENSG00000267680_21 (sequence is synthesized)
tggaagagggaaaacatttgtttaagataacatcagtgcttcagccatagctcagcatgccccagtagtctcaggaccaccataatggagaatccttgtaaatggtgcaataaagcttca

SEQ ID NO: 789841 - DNA, 120 bp, Artificial Sequence
  ENSG00000267680_22 (sequence is synthesized)
ttcagaagtttgataattacagctatcattcaggagacaggccttagaaagagtaagagttcatgaatttaccagactaatggtggacatgtccaaattgatgtccactagaatgtaaac

SEQ ID NO: 789842 - DNA, 120 bp, Artificial Sequence
  ENSG00000267680_23 (sequence is synthesized)
tacatgtgtctttgctgctaagtcgtcacagccttaacattgattagcactttgtatgtgttcagtacttgtttgttaaatcaatgaaaggataaaacatatgtatggatttggatacaa

SEQ ID NO: 789843 - DNA, 120 bp, Artificial Sequence
  ENSG00000267680_24 (sequence is synthesized)
ttttgtgtatccaaaaagggaagcctgcaaaaaataattctgggaaacatgagttgaaatgcagagtaaactcagtactgcaatccatagcaatattttgcatattattattttttcttt

SEQ ID NO: 789844 - DNA, 120 bp, Artificial Sequence
  ENSG00000267680_25 (sequence is synthesized)
taaatttttttcttgatcagatttatcatattcattgaacattattttattgcacttggctcctggcttccccccatcctgtgctctgaagtcagagtattatttgtggctctatgaaat

SEQ ID NO: 789845 - DNA, 120 bp, Artificial Sequence
  ENSG00000267680_26 (sequence is synthesized)
gtccattgcttgtatacggtataaatttaattatcttttgtagtttttctcacagtatagactgaaaaggtttggttaattttgcaataacagaccactgcatatttcacaattaagtgt

SEQ ID NO: 789846 - DNA, 120 bp, Artificial Sequence
  ENSG00000267680_27 (sequence is synthesized)
tttcaacagtattaaggcaagatttacagtaacacttttaaagtgccagatgtacattgacagaaattttcttagtcaatcctagattgatcatgatttgtgatttctatgcaggccttg

SEQ ID NO: 789847 - DNA, 120 bp, Artificial Sequence
  ENSG00000267680_28 (sequence is synthesized)
gtatgattgccttttaattgctgtacaatttcttttttttttttaacttctctggtataaaatattctaaatttgaatgacagcttttgtcaaccttcttatccaatattcttccaccaa

SEQ ID NO: 789848 - DNA, 120 bp, Artificial Sequence
  ENSG00000267680_29 (sequence is synthesized)
cgctatgaaacaggaagagaaaatggagtttggtaatttcatcaaatatattcattattgggggcaggagtaacatttaaatcctcctctttattgctggcagtaaaaatatgtcttttg

SEQ ID NO: 789849 - DNA, 120 bp, Artificial Sequence
  ENSG00000267680_30 (sequence is synthesized)
gagagcagaacatgccagaatgtataaggtgcaactgtttgatatgaaaaccataggataggaaactatgcctatgacactaaaactccaaaaagtagaagaccacattgatgatgtcac

SEQ ID NO: 789850 - DNA, 120 bp, Artificial Sequence
  ENSG00000267680_31 (sequence is synthesized)
tgcattttaaaatggaaagaacaagtgttcaagaacaggaatttgtgtgaattgcatttattcctataataatatgaactcaatgagatgatgacatagacacaataacaaaaggagaaa

SEQ ID NO: 789851 - DNA, 120 bp, Artificial Sequence
  ENSG00000267680_32 (sequence is synthesized)
aacaatgtggctttttttagccttcataacctaatcaaataaatatctttgtgtgttttatgttcttttgagtgtttacatactgtgtaaatgaatatttttactgatctttgctggcaa

SEQ ID NO: 789852 - DNA, 120 bp, Artificial Sequence
  ENSG00000267680_33 (sequence is synthesized)
aggtggctttgtatcctagggtacaaagtttcaagtcttaattagtaacttgaacctatggttcaagtttgagtgtgcagtaagaacctaaatttctggtaaactttaccttgatattac

SEQ ID NO: 789853 - DNA, 120 bp, Artificial Sequence
  ENSG00000267680_34 (sequence is synthesized)
agtcatgtgccaattcacaatacacatccctgttggtgggtggcatccctggccaccttttcatgtctctttttctgcctttcctggcactttgcaggcacaattctgctttcccaggaa

SEQ ID NO: 789854 - DNA, 120 bp, Artificial Sequence
  ENSG00000267680_35 (sequence is synthesized)
aagtggagtccaaacattcggtggagtcgcggacacttccgctcggggactgaggttgctgcagtttttccgcgatagtttggggcagttccgcgcgttgcaggcccttctgaatttcct

SEQ ID NO: 789855 - DNA, 120 bp, Artificial Sequence
  ENSG00000267680_36 (sequence is synthesized)
ccatcctaatggaatcgttttgggaactggaagaggtaacacaaatgagagccttaaagcagtccctgtcacttggtgactggtggtctcttgttaatttcccacgaaggaccgggtggg

SEQ ID NO: 789856 - DNA, 120 bp, Artificial Sequence
  ENSG00000267680_37 (sequence is synthesized)
gtcagagctccagctgcaggggcctcggcccttctccctgatccctgcaggacgctggatgatcccggaagccttctgacctctttttaggagagcgagggttgcgtccactttcatgaa

SEQ ID NO: 789857 - DNA, 120 bp, Artificial Sequence
  ENSG00000267680_38 (sequence is synthesized)
cggcgacgcggtcaaggtgtttcacagctttctcgttccccaacccgacctttccagaagagctgcagggagggacttcttggcttctgagggcaaagctctacctgaataccactagaa

SEQ ID NO: 789858 - DNA, 120 bp, Artificial Sequence
  ENSG00000267680_39 (sequence is synthesized)
gggcctcgtcggagagtagaggtttggaggggcaagggccgctgtttgcgttctcgtccgtggcaccttcttgggcttgggtctgtcctcgcttcccgggggcattggtacttggttggg

SEQ ID NO: 789859 - DNA, 120 bp, Artificial Sequence
  ENSG00000267680_40 (sequence is synthesized)
tcgcgtctcacctggtttcagggtttccggggctctgagctcgcccactccgccccctgcaccccacgcgcgtggccacttcttctcgatataacgttggggtgttaatctccttgggtt

SEQ ID NO: 789860 - DNA, 120 bp, Artificial Sequence
  ENSG00000267680_41 (sequence is synthesized)
ctcgggcatgggggtcgataataattaagtcttaattagtaacttcattctaagggctttatacaaataaatttacgccacaccgtggctctgtggagaagtattgcttttttctatttt

SEQ ID NO: 789861 - DNA, 120 bp, Artificial Sequence
  ENSG00000267680_42 (sequence is synthesized)
aaaaacgaaagtgagacacagagcgcataggcacccgactagtgagaggtggagctggggttggaacctaagcagtctgggtcagagcctgatttgatcttctcttgggatacgttgtca

SEQ ID NO: 789862 - DNA, 120 bp, Artificial Sequence
  ENSG00000267680_43 (sequence is synthesized)
ctgaggcagaggaactagttggacttaggtggggaaagcaagacttaggggcttgaaattttctgagtttctaaaaatgttgtcaactattttgtttcaatcattacaaatattttgtat

SEQ ID NO: 789863 - DNA, 120 bp, Artificial Sequence
  ENSG00000267680_44 (sequence is synthesized)
attttgtttcaatcattacaaatattttgtattcttatagaaccatgtcattgtacagcattctatttttctttattaagaacaaaatgggcctggcgcggtggcttacgcctgtaatcc

SEQ ID NO: 789864 - DNA, 76 bp, Artificial Sequence
  ENSG00000267680_45 (sequence is synthesized)
aaccgcatctctactaaaaaataatctactcgggagggtgaggcaggagaatcgtttgaatctgggaggcggaggt

SEQ ID NO: 789865 - DNA, 82 bp, Artificial Sequence
  ENSG00000267680_46 (sequence is synthesized)
ggcgtggtggtgggcgcctgtaatcccatctactcgggagggtgaggcaggagaatcgttgccattgcactccagtctgggc

SEQ ID NO: 789866 - DNA, 120 bp, Artificial Sequence
  ENSG00000267680_47 (sequence is synthesized)
tcttgattatattacttttgtttaaaattggttttgattcatattttattatatacacaatttattagcttcataatttaccatgcaagattttagactgattaggaaattcactaggaa

SEQ ID NO: 789867 - DNA, 120 bp, Artificial Sequence
  ENSG00000267680_48 (sequence is synthesized)
ttaattttattattgtcttttatttttattaaaaattttatttcagtagtctttttttattaaagtatatactggtttttggttacatggttgaattgtctaatggtgaagtctgagatt

SEQ ID NO: 789868 - DNA, 120 bp, Artificial Sequence
  ENSG00000267680_49 (sequence is synthesized)
gaattgtctaatggtgaagtctgagattttagtgtacccatcacctgagtagtgtacattgtacccaacttgtagctttttatcccttaccctaccttccaccctccccattttgagtct

SEQ ID NO: 789869 - DNA, 120 bp, Artificial Sequence
  ENSG00000267680_50 (sequence is synthesized)
accctccccattttgagtctccatagtccattatatcactctgtatgcctttgcatacccatagcttaactcccacttataagtgaaaacacggtatttggttttccattcctgagttac

SEQ ID NO: 789870 - DNA, 74 bp, Artificial Sequence
  ENSG00000267680_51 (sequence is synthesized)
gaataatttttatggctgaatagtattccctggtgaatatataccatattttctttatccactcattggttgat

SEQ ID NO: 789871 - DNA, 120 bp, Artificial Sequence
  ENSG00000267680_52 (sequence is synthesized)
tggttccatatctttgaaattgtgaattgtgctgtaataaatataggcatgcaggtgtccttttgatgtaaggacttcttttcctttgggtagatagtagtgggattgctggatcaaatg

SEQ ID NO: 789872 - DNA, 120 bp, Artificial Sequence
  ENSG00000267680_53 (sequence is synthesized)
gtagatccacttttagttctttagagaatctccatactgtatttcatagaggttgtactaatttacattcacaccagcagcagtgtataagcgtttcttctcaccacacccatgtcaaca

SEQ ID NO: 789873 - DNA, 120 bp, Artificial Sequence
  ENSG00000267680_54 (sequence is synthesized)
tctattgtttttcgtcttttatttctatcaagtattttacatatgatacttggtttagttcgaaattggcctcatccaaaccaaagattatggtgcacttgaaaaatacaaactgaatgt

SEQ ID NO: 789874 - DNA, 120 bp, Artificial Sequence
  ENSG00000267680_55 (sequence is synthesized)
tttacaaatttttataatttttttcttaatatttcccccttatgtgtttaactatggaaatttccaaatgctgacagactaaactagtgaattatcatgttatatcatactcattaatct

SEQ ID NO: 789875 - DNA, 120 bp, Artificial Sequence
  ENSG00000267680_56 (sequence is synthesized)
cattattgttattatttttcctatgactgtttcctaaaattataaaactttttattttcatgtcatttgaaacctatagaaaagttgcaaaagtagcctaagaaattcttatttactctt

SEQ ID NO: 789876 - DNA, 120 bp, Artificial Sequence
  ENSG00000267697_0 (sequence is synthesized)
tatagtagtgtactaacaaagtctcccttgcagcttcagactgttatctataggcttatcgttcaaatacagcacttgaatatcccaagtagttcttctacgcatagctcacctttctaa

SEQ ID NO: 789877 - DNA, 120 bp, Artificial Sequence
  ENSG00000267710_0 (sequence is synthesized)
gtccctggagcctgggaagacggtgggtgaccagagagtcctgtctatcctaggaggagaacattcagcccaaatcccagccccatcatgcacagatcagagccatttctgaaaatgtcg

SEQ ID NO: 789878 - DNA, 87 bp, Artificial Sequence
  ENSG00000267710_1 (sequence is synthesized)
ccccatcatgcacagatcagagccatttctgaaaatgtcgctgctgattctgcttttcctgggattggcagaagcctgtactcctcg

SEQ ID NO: 789879 - DNA, 120 bp, Artificial Sequence
  ENSG00000267710_2 (sequence is synthesized)
ggtctcagacacaacatcacttccctcaagatgcctcccctggtgtccccgcaagataggacagaagaagaaataaaaaagatcctaggcttgctgagcctccaagtactgcatgaagaa

SEQ ID NO: 789880 - DNA, 120 bp, Artificial Sequence
  ENSG00000267710_3 (sequence is synthesized)
accaccccatccaggaaaccactccccaagaggaagaacacgtggaacttcctgaaatgcgcctacatggtgatgacctacctcttcgtatcctacaacaaaggggactggtgttactgc

SEQ ID NO: 789881 - DNA, 120 bp, Artificial Sequence
  ENSG00000267710_4 (sequence is synthesized)
cactactgtaacttggaactggacatcagggatgatccctgctgttctttctagtgagcctgctccatctcagcttagccttcacaaggcctccatctcccaggcattctaacctctgaa

SEQ ID NO: 789882 - DNA, 120 bp, Artificial Sequence
  ENSG00000267710_5 (sequence is synthesized)
gaaagctctctgtcccctggactgcctgtgtggagggtaatgaactgggtcctttaaggaatggcacctgggtgcccagaggcatggccagaaggtgtctgtgggggccatgccttaggg

SEQ ID NO: 789883 - DNA, 120 bp, Artificial Sequence
  ENSG00000267710_6 (sequence is synthesized)
ggatgcacccagggcggctgagagagcaactgcaggagtttcccctaaaatctctcctccagatcgttctcgaactttccccactacttccataataaaatgtatacttgttgaaatggc

SEQ ID NO: 789884 - DNA, 120 bp, Artificial Sequence
  ENSG00000267710_7 (sequence is synthesized)
ggatgggctgccatcagggatcataggtctcatgagcagactgtcaccggatggtgatgaaaacgttctaaaattgtttgtggtgatggatgcacagctttgtgaatgtcctaaaaacta

SEQ ID NO: 789885 - DNA, 120 bp, Artificial Sequence
  ENSG00000267710_8 (sequence is synthesized)
cccatccaggaaaccactccccaagaggaagaacacgtggaacttcctgaaatgcgcctacatggtgatgacctacctcttcgtatcctacaacaaaggggactggggacgttcataagg

SEQ ID NO: 789886 - DNA, 120 bp, Artificial Sequence
  ENSG00000267710_9 (sequence is synthesized)
accaagcctgttgctggttgctggggactctgatggttgagctaccttcaagaaggtcctaattctgtaagggaggcagacatccacagagagaaccagatcaccgagtggtagcacttc

SEQ ID NO: 789887 - DNA, 120 bp, Artificial Sequence
  ENSG00000267710_10 (sequence is synthesized)
caacactaatggttggttcttttgaaaagcgtaatacaaatttaatcctctagcattactgacaagaaaaaatagaggagaaacaaactgccaatatttggaaggaagaagagagtatca

SEQ ID NO: 789888 - DNA, 120 bp, Artificial Sequence
  ENSG00000267710_11 (sequence is synthesized)
cacagagggctgagggtgtagaacatgttccctctgagatcacagatgagacgttcttgctatcaccacttgcatttcacattggactgaacgttctatccagtgcaaatcctagccagg

SEQ ID NO: 789889 - DNA, 120 bp, Artificial Sequence
  ENSG00000267710_12 (sequence is synthesized)
caagagaaagttaaacccttctcaggcaccaccccatccaggaaaccactccccaagaggaagaacacgtggaacttcctgaaatgcgcctacatggtgatgacctacctcttcgtatcc

SEQ ID NO: 789890 - DNA, 120 bp, Artificial Sequence
  ENSG00000267710_13 (sequence is synthesized)
caagtactgcatgaagaaacaagtggctgcaaggaggaaggtaattaaacccttctcaggcaccaccccatccaggaaaccactccccaagaggaagaacacgtggaacttcctgaaatg

SEQ ID NO: 789891 - DNA, 120 bp, Artificial Sequence
  ENSG00000267710_14 (sequence is synthesized)
acattctggaccacgcatgtaaccttggccaccatgctgactctcctggatgggctgccatcagggatcataggtctcatgagcagactgtcaccggatgacggactgaaccccaacagg

SEQ ID NO: 789892 - DNA, 120 bp, Artificial Sequence
  ENSG00000267710_15 (sequence is synthesized)
ctcccattcttcaaatggacgtacagctttctccttaagtcaataaacttgaaaaagttgctttataccgcttgagtaagtggtcagcctcataaggaggagacaactgtgaagataaat

SEQ ID NO: 789893 - DNA, 120 bp, Artificial Sequence
  ENSG00000267710_16 (sequence is synthesized)
atcatgaaaacaaaacgagattaaattataactagacactgttttctgccaaggctctttgtgtgaaggttgttcccgctgttcggtggaaataaacactagcaagtgttatgagttaaa

SEQ ID NO: 789894 - DNA, 120 bp, Artificial Sequence
  ENSG00000267710_17 (sequence is synthesized)
gatgttgtgatttttccctacatgtggcctcctcttccacggctcctgggaactccatactctgggcctgtctgctcccctgacctgtcttgcttcctggaccccatctccttctggatg

SEQ ID NO: 789895 - DNA, 120 bp, Artificial Sequence
  ENSG00000267710_18 (sequence is synthesized)
gacatcatcagagatcctaggcttgctgagcctccaagtactgcatggtaagtctggtgactgctatttcgtgttcactcctgtgcacagaaatatacagaagaaacaagtggctgcaag

SEQ ID NO: 789896 - DNA, 120 bp, Artificial Sequence
  ENSG00000267710_19 (sequence is synthesized)
aaggccctgcaggggctttggtacctgagaggctgccttcctgaagggcatccaaagtctgcaagccactgcccctttcacactgctcatgggcatcgaggagacccaacatactgagat

SEQ ID NO: 789897 - DNA, 120 bp, Artificial Sequence
  ENSG00000267710_20 (sequence is synthesized)
gtgagtgggagacatttctatcccagctgctgcttctgtggactgtgagtcctctcttcccgacatggaaattaccaagctaagtcctgggtgataggactgagggccggaaaaccagaa

SEQ ID NO: 789898 - DNA, 120 bp, Artificial Sequence
  ENSG00000267795_0 (sequence is synthesized)
aggtggtgtggagccggaagcaggaagcagcctgtgctccccaggacctgcctggttgggggaattggaggcttctaggaggtggcacggtgcacgccaagatggctgtgtccacagagg

SEQ ID NO: 789899 - DNA, 120 bp, Artificial Sequence
  ENSG00000267795_1 (sequence is synthesized)
agctggaggccacggttcaggaagtcctggggagactgaagagccaccagtttttccagtccacatgggacactgttgccttcattgttttcctcaccttcatgggcaccgtgctgctcc

SEQ ID NO: 789900 - DNA, 120 bp, Artificial Sequence
  ENSG00000267795_2 (sequence is synthesized)
ctgctgcagctcccccgggccccgcagggaaagccccaggaaggtgagcccctggaaggaaagacccaagggagtggataacttggccctggaaccctgaccctgtgtctcctgcccggt

SEQ ID NO: 789901 - DNA, 120 bp, Artificial Sequence
  ENSG00000267795_3 (sequence is synthesized)
ggcagtaacaaagccttctgtctgcccagagcctgagtctgcagtgtcttccagtccccgtctgggtgggtgacgcgggactcgccgccccactcaggtggccacctggcctctccaagc

SEQ ID NO: 789902 - DNA, 120 bp, Artificial Sequence
  ENSG00000267795_4 (sequence is synthesized)
cccactcaggtggccacctggcctctccaagccttcagtcagcacgactgtgccaggtcatcctcagtcacctagctgggaggggagctggtctcaggccgggcgcggtggctcacacct

SEQ ID NO: 789903 - DNA, 120 bp, Artificial Sequence
  ENSG00000267795_5 (sequence is synthesized)
ttctaatccccacaatgaccccagcctaataatacaataatccccaagtagaaccaggggcccaaggccccctcgtcagctgggctcccacctccaagctgacgccctcaaccactctgc

SEQ ID NO: 789904 - DNA, 120 bp, Artificial Sequence
  ENSG00000267795_6 (sequence is synthesized)
tggggagcccaaagatgttaacttgtttaataatcaagccctgtgaaggagtttatagcatctgtggattttggtacccacggaggtgctggaaccaatcgttgaggattccaaggacaa

SEQ ID NO: 789905 - DNA, 120 bp, Artificial Sequence
  ENSG00000267795_7 (sequence is synthesized)
acggaactgtactgggggtggaggcggaaggtgaggggagtggcgggaagggtgctcatccccctagggaacaacgagcgaacctgcttggtcccgctgtgcttctcgtgcaggaaagac

SEQ ID NO: 789906 - DNA, 120 bp, Artificial Sequence
  ENSG00000267795_8 (sequence is synthesized)
cgggccccgcagggaaagccccaggaaggaaagacccaagggagtggataacttggccctggaaccctgaccctgtgtctcctgcccggtggcagtaacaaagccttctgtctgcccaga

SEQ ID NO: 789907 - DNA, 120 bp, Artificial Sequence
  ENSG00000267795_9 (sequence is synthesized)
ggagtgcagaggcacaatgacagctcactgcagcctcgacttcctgggttcaagtgatcctcctgccccagcctccctagtagctgggacttcagggagtttatagcatctgtggatttt

SEQ ID NO: 789908 - DNA, 120 bp, Artificial Sequence
  ENSG00000267795_10 (sequence is synthesized)
ccctccctcccacccaccttctctcccatctctctctctttcattcacgaagtcagcagtggccaagcacacaggtgttcccagctgcatatctgggatactgaggaaaggtaagaagtc

SEQ ID NO: 789909 - DNA, 120 bp, Artificial Sequence
  ENSG00000267795_11 (sequence is synthesized)
tcaggagtgaagaagccacaggccggcgtcttcctccctgggcctccagcagtggggagccagggagcgcacctgctgggcctgggccctctcccctgggctgggcggcctctgctggcc

SEQ ID NO: 789910 - DNA, 120 bp, Artificial Sequence
  ENSG00000267796_0 (sequence is synthesized)
acggtccaggctggacacaaccaaaggcggaggacccgtggcccacgaagctcatctttgaactgtccccgccttctcccgccttgacttgtgaccctaggccctttggggcgcctctga

SEQ ID NO: 789911 - DNA, 120 bp, Artificial Sequence
  ENSG00000267796_1 (sequence is synthesized)
cccagctagccagatcccggacccaaaccatgttccctgtgaaggtgaaagtggagaaatcagagctggagatggccaaagcccggaaccaactggatgctgtcttgcagtgtctgctgg

SEQ ID NO: 789912 - DNA, 120 bp, Artificial Sequence
  ENSG00000267796_2 (sequence is synthesized)
agaagagtcacatggacagggagcgtctggatgaggaagctgggaaaacaccctcagacacccacaataaggactgctccatcgcagccactggcaaaaggccatctgcccgcttccccc

SEQ ID NO: 789913 - DNA, 120 bp, Artificial Sequence
  ENSG00000267796_3 (sequence is synthesized)
agcgtggacttggcccagttcagcgagaacacgccactgtacccaatctgccgcgcctggatgcgcaacagcccctctgtgcgcgagcgtgaatgctctcccagctcacccctgcccccg

SEQ ID NO: 789914 - DNA, 120 bp, Artificial Sequence
  ENSG00000267796_4 (sequence is synthesized)
ctgcctgaggatgaggagggctcagaggtaaccaacagcaagagtcgtgatgtgtacaagctgccgccacccacacccccggggccacccggagatgcctgcagatcccgcatcccatct

SEQ ID NO: 789915 - DNA, 120 bp, Artificial Sequence
  ENSG00000267796_5 (sequence is synthesized)
ccactgcagcctgagatgcagggcacccctgacgatgagccctctgagcccgagccctcaccctccacactcatctatcgcaacatgcagcgctggaaacgcatccgccagaggtggaag

SEQ ID NO: 789916 - DNA, 120 bp, Artificial Sequence
  ENSG00000267796_6 (sequence is synthesized)
gaggcctctcatcggaaccagcttcgttactcagaaagcatgaagatcctacgagagatgtacgaacgacagtgatgttcccaggtccccccacaccagtaaacatcccccagctccaca

SEQ ID NO: 789917 - DNA, 120 bp, Artificial Sequence
  ENSG00000267796_7 (sequence is synthesized)
cacacttgacccgctggctggttgaggtgtctgcccttcatacatgcctcctgtctgagtcccttagcgagcccctcatgccatttgttgctgggaaaggcaggagggatgaatgtggat

SEQ ID NO: 789918 - DNA, 120 bp, Artificial Sequence
  ENSG00000267796_8 (sequence is synthesized)
actagaggctcccagctcctaccccagtcctgacactccctctccctacgcaggccatctgcccgcttcccccaccagcggaggaagaagaggagggagatggatgatgggctggctgag

SEQ ID NO: 789919 - DNA, 120 bp, Artificial Sequence
  ENSG00000267796_9 (sequence is synthesized)
ggagggccgcagcgatccagtgagtagacagtggccctagagggtcggtaaggagccaagggcctatgcaaggatgctcacacacctcccatccccaccttcccagacacatatgtgatc

SEQ ID NO: 789920 - DNA, 120 bp, Artificial Sequence
  ENSG00000267796_10 (sequence is synthesized)
tgcctgggcctggctctgagattggccagggcagaggacacgcacgcccttccctggcccagtcagctgcccacctagctggggcctgggagctgactcctgctgggtcctctcttgccc

SEQ ID NO: 789921 - DNA, 120 bp, Artificial Sequence
  ENSG00000267796_11 (sequence is synthesized)
tcgggaccatcgggttgacagggtgtggagtcccggtggaagggagtatcgcggaaaggggactgcacgacttttccctgaagcccacctgacaatcgctgtatcaggcagcgagcgttg

SEQ ID NO: 789922 - DNA, 120 bp, Artificial Sequence
  ENSG00000267796_12 (sequence is synthesized)
aatggggtggctcgggcaatgacgtgcgtggtaggacatggggaatcctgagccgagctggagatggccaaagcccggaaccaactggatgctgtcttgcagtgtctgctggagaagagt

SEQ ID NO: 789923 - DNA, 120 bp, Artificial Sequence
  ENSG00000267796_13 (sequence is synthesized)
ccagggcagtgggtggataggctcaaaggatcctgcccctaagctagtgggatagacagacacaggtccctcacgtgaatcctggatcaggctaggcacacagatgtgcactcttaggtt

SEQ ID NO: 789924 - DNA, 120 bp, Artificial Sequence
  ENSG00000267796_14 (sequence is synthesized)
gacagttagatgtggacctccaagatcaggggttcccaagagccgaggggctagacaagggtccttagtacagacagaagtggccaccaggccttgaggagcaggggctgggcaggaatg

SEQ ID NO: 789925 - DNA, 120 bp, Artificial Sequence
  ENSG00000267796_15 (sequence is synthesized)
gatgggagtctataagccatctgacccagcggggtagacaagggtccccaggacagacatataggacccttcagacatataggactgtcagaaatggacagagcttcctaggtggcacag

SEQ ID NO: 789926 - DNA, 120 bp, Artificial Sequence
  ENSG00000267796_16 (sequence is synthesized)
ctttccttatccaagccctgaccgctcagcccagcgctacctccatcgtggcccggaccactccacctgtacaaagaccctgtggcaggagaagcttaggtccccccgtggttgccacct

SEQ ID NO: 789927 - DNA, 120 bp, Artificial Sequence
  ENSG00000267796_17 (sequence is synthesized)
agacccccatgggtatgggtgggacaaaaggcccaagaggcaagtggggttcatgtgagcatctcaggtttgataccagtatccccagggtgccctctgcagggttttgcacaggcgttt

SEQ ID NO: 789928 - DNA, 120 bp, Artificial Sequence
  ENSG00000267796_18 (sequence is synthesized)
tactcagggtgagtctgggaagctggaactacacctcccaggaagctagggggtagatggtttgtttccggaagcaaagccccaggtgggtgggacctaaagctgggagactacggaggc

SEQ ID NO: 789929 - DNA, 120 bp, Artificial Sequence
  ENSG00000267855_0 (sequence is synthesized)
agtatcgcggacggaagatggcgtccgccacccgtctcatccagcggctgcggaactgggcgtccgggcatgacctgcaggggaagctgcagctacgctaccaggagatctccaagcgaa

SEQ ID NO: 789930 - DNA, 120 bp, Artificial Sequence
  ENSG00000267855_1 (sequence is synthesized)
ctcagcctcctcccaagctccctgtgggtcctagccacaagctctccaacaattactattgcactcgcgatggccgccgggaatctgtgcccccttccatcatcatgtcgtcgcagaagg

SEQ ID NO: 789931 - DNA, 120 bp, Artificial Sequence
  ENSG00000267855_2 (sequence is synthesized)
ggaccagccttacctgtgacactgcaccctcacggccacccgactactttgcctccttggatttcctccagggagaatgtgacctaatttatgacaaatacgtagagctcaggtatcact

SEQ ID NO: 789932 - DNA, 120 bp, Artificial Sequence
  ENSG00000267855_3 (sequence is synthesized)
gacctaatttatgacaaatacgtagagctcaggtatcacttctagttttactttaaaaaataaaaaaatagagacagagtctcaccatgtttcccaggctgatcttgaactcctggcctc

SEQ ID NO: 789933 - DNA, 120 bp, Artificial Sequence
  ENSG00000267855_4 (sequence is synthesized)
cagcaacccgactccgagaatggacgtttcatttattcatttactcaccaaatgtttactaagagcctactatgagtcaagcactatgtgtcagatcctgagaataaagcagtgagcaac

SEQ ID NO: 789934 - DNA, 120 bp, Artificial Sequence
  ENSG00000267855_5 (sequence is synthesized)
agtatcgcggacggaagatggcgtccgccacccgtctcatccagcggctgcggaactgggcgtccgggcatgacctgcaggggaagctgcagctacgctaccaggagatctccaagcgct

SEQ ID NO: 789935 - DNA, 120 bp, Artificial Sequence
  ENSG00000267855_6 (sequence is synthesized)
tttaagcaatacccagcttacttggattttggggtgaagtcagtgctgagtctcccaactctgttggcactccaggggtgggacagacactgtccctgggtgcagaggccctggagacag

SEQ ID NO: 789936 - DNA, 120 bp, Artificial Sequence
  ENSG00000267855_7 (sequence is synthesized)
cactgccctttcccccaaaggccaggctctgaccttgagagtggtgggagtgggtgatccttctgggaggttggactcccaggaccgctggctgttggggagcattgattgtgaagacca

SEQ ID NO: 789937 - DNA, 120 bp, Artificial Sequence
  ENSG00000267855_8 (sequence is synthesized)
cccaggcatatgtccctgccagtgtaccaagggacacccccagcctgtggcttatcccagtggctggctgtagatcccacattttgtgactgaggtgacaggggcccacagcggggccat

SEQ ID NO: 789938 - DNA, 120 bp, Artificial Sequence
  ENSG00000267855_9 (sequence is synthesized)
agtatcgcggacggaagatggcgtccgccacccgtctcatccagcggctgcggaactgggcgtccgggcatgacctgcaggggaagctgcagctacgctaccaggagatctccaagcgta

SEQ ID NO: 789939 - DNA, 120 bp, Artificial Sequence
  ENSG00000267909_0 (sequence is synthesized)
acctccacggttgtagaggtgtagagggatgccgcagcgacggaaccgggcttcttttttaaagaatcaatgtgagggaagggtgcagagccgcgttattttagggagacattgtcgcac

SEQ ID NO: 789940 - DNA, 120 bp, Artificial Sequence
  ENSG00000267909_1 (sequence is synthesized)
tccccctcccacgtgtaggtagcatctggggtgcgtgcgccctgttcgcagaccccatggagagacgctggcggcggcagatggggctcctttcacggttgcagccggcagtaacccgac

SEQ ID NO: 789941 - DNA, 120 bp, Artificial Sequence
  ENSG00000267909_2 (sequence is synthesized)
cccgccggcgcagagactgaagaagcgcaggggacagcggcgagctgcgaacaaaagcccttggcgcggggccgaagcccaggacgcgggagattccaacaaaggacggggctcagccat

SEQ ID NO: 789942 - DNA, 120 bp, Artificial Sequence
  ENSG00000267909_3 (sequence is synthesized)
ggtggacccagtgcctgaagaagagaaggcaggagcggaacccggcgactctggaggggacgaggccgtggcgtccgtgccccctgattcccagggcgcacaggagcccgcagcttcctc

SEQ ID NO: 789943 - DNA, 120 bp, Artificial Sequence
  ENSG00000267909_4 (sequence is synthesized)
ggcctcggcctcggcctccgcggcggtgccccgcaaggcagaagtcccatgtgcagccgcagaaggcgggcggcgggagcagtccccgctgctgcacctcgacctcttcaacttcgactg

SEQ ID NO: 789944 - DNA, 120 bp, Artificial Sequence
  ENSG00000267909_5 (sequence is synthesized)
cccagaggcggagggcagccgctacgtgctgaccagcccccgctcgctagaggcctgcgcccgctgtgcggtcaagccggtggagctgctgccacgggccctggccgacctggtgcgaga

SEQ ID NO: 789945 - DNA, 120 bp, Artificial Sequence
  ENSG00000267909_6 (sequence is synthesized)
ggctccgggccgctccatgcgggtggccaccggcctgtatgaggcctacgaggcggagcggcgcgccaagctgcagcaatgccgggccgagcgcgagcgcatcatgcgcgaggagaagcg

SEQ ID NO: 789946 - DNA, 120 bp, Artificial Sequence
  ENSG00000267909_7 (sequence is synthesized)
gcgcatcatgcgcgaggagaagcggcgtcttttcacgcctttgagccccgcggccgccgccgccgccgccgccgccgcggcctcggccccgagcgcgggcagcagcagcagctgcagcag

SEQ ID NO: 789947 - DNA, 120 bp, Artificial Sequence
  ENSG00000267909_8 (sequence is synthesized)
gccgcgtgcggcccgcaaggcttcccctagtccctcctccgcccggacccaacctccgccagcgggttctcgaacaggcaggaagagccattcgctggactcactgtcccgccggcgtga

SEQ ID NO: 789948 - DNA, 120 bp, Artificial Sequence
  ENSG00000267909_9 (sequence is synthesized)
gggcgccctcagctccgagtcgggcgcatcgtcgtcatcctacagtggggaaagcttgagggagctgcgctggccgcctcgggcctcggccaggaacagctgcccagcggggtcggcgtc

SEQ ID NO: 789949 - DNA, 120 bp, Artificial Sequence
  ENSG00000267909_10 (sequence is synthesized)
ctccaccaccaacgctccgggccgcccgtctgccctgaccctggttccgatcaccggccgcagcttcagcctcggcgacctgagccattcgccgcagaccgctcagcacgtggagcgcat

SEQ ID NO: 789950 - DNA, 120 bp, Artificial Sequence
  ENSG00000267909_11 (sequence is synthesized)
cgtgcgtcaagtgcgtgcagagcgcggcctgcgcggggtgccggagcgtgaccggaagatcgcggcgctcatgctggcgcggcaccaggaggagctcctgctgctggagcaacgcgcggc

SEQ ID NO: 789951 - DNA, 120 bp, Artificial Sequence
  ENSG00000267909_12 (sequence is synthesized)
tgcccacggccagtgggagctgcagcgcgtgcacgccaagcagcggcgggagcgcgaggagcgggagaagcagcgcgccctagagcagggccgccgagcctgggccgcgcaggtggagga

SEQ ID NO: 789952 - DNA, 80 bp, Artificial Sequence
  ENSG00000267909_13 (sequence is synthesized)
gcggcgaggccgccgtggccgcgaagagcgcgaggcggcgcggcggcggcagcggcagtacgagcgcagcgaggagcggc

SEQ ID NO: 789953 - DNA, 120 bp, Artificial Sequence
  ENSG00000267909_14 (sequence is synthesized)
gcgggcggagcgcgcggcccgggaggatcggctgcgcaagcttcagcaggagcagaacctgaagcaacgtgaggaaggtctacaggaagggcgggagcgggctgagcagatccgcaggga

SEQ ID NO: 789954 - DNA, 120 bp, Artificial Sequence
  ENSG00000267909_15 (sequence is synthesized)
gcccgcgccaagcagcggcaggagggccagctgcagcgggagaagcgggagctgagccgggccgagcgggcgcgccacgaggcgctgctacagggtcggacccggcagcagcgccaggag

SEQ ID NO: 789955 - DNA, 120 bp, Artificial Sequence
  ENSG00000267909_16 (sequence is synthesized)
gcagcagcgccaggagcgagagggcctgcggagctcgctggaagccagtttgggccgtgcgcaggagaactacgagcatttggtggagcagcgcacccgggagctgcgggagcgggcccg

SEQ ID NO: 789956 - DNA, 120 bp, Artificial Sequence
  ENSG00000267909_17 (sequence is synthesized)
gctgcagcacgcgacgcaggtggccgaggaagcagtgcagcagaaggcgcggcgcgtgggccagagccggctggagaaggaacgagcccagcgcgccaacaaggagaaggtggagaggga

SEQ ID NO: 789957 - DNA, 120 bp, Artificial Sequence
  ENSG00000267909_18 (sequence is synthesized)
cgaagactgccgccggcgagagctactccaggccatcgggcgcaagctggagcgcagcgagcagctgacgcgggaacggcgcagtgcgctggagagcgcccgctccacagcccgggcttc

SEQ ID NO: 789958 - DNA, 120 bp, Artificial Sequence
  ENSG00000267909_19 (sequence is synthesized)
cttccacgtgcgtgagaaggtgcgcgaggagaccaacacgcgatccttcgaccgcatggtgcgggaggcccagctacacgccagcctggaccgcaaataactgcggctctttgccagcca

SEQ ID NO: 789959 - DNA, 120 bp, Artificial Sequence
  ENSG00000267909_20 (sequence is synthesized)
gattggcacgcacagccccctggggcctccctcaaccactgaccatcgtgggagtccccgctcggtgcgcagcgcggtggcctctcgaggcttctgaccaatgaggcaacaacagtacag

SEQ ID NO: 789960 - DNA, 120 bp, Artificial Sequence
  ENSG00000267909_21 (sequence is synthesized)
acgtttgggacctgtcagctggccccctttgtttttaaaacttacttcatttggagatgacagcacaatctgcccacatccacccttgatggctcccgcaccgacccttgccaaacttcc

SEQ ID NO: 789961 - DNA, 120 bp, Artificial Sequence
  ENSG00000267909_22 (sequence is synthesized)
ctatgtgtctcttgggctggaatagagaagcttgggggaaaggggctgatcaggactggtgagagggccccccaggagagggcagaggtggttgtccccaccccttctgcagcagttgcc

SEQ ID NO: 789962 - DNA, 120 bp, Artificial Sequence
  ENSG00000267909_23 (sequence is synthesized)
ccaggcacctgttcgacattggtgtctgagacagtgttgctactgctgagggaacatcaccctggctcacctccatctttcaaaatatggcaagctgcacaaatcgcggaggcctcccag

SEQ ID NO: 789963 - DNA, 120 bp, Artificial Sequence
  ENSG00000267909_24 (sequence is synthesized)
agaaacacagctcctccaaggtgtcaagccacgcccaaatgatccaaaaagcagttgattttttagaccttttaatcggccacctgagcaaattctcaccagttttgatagttttccagt

SEQ ID NO: 789964 - DNA, 120 bp, Artificial Sequence
  ENSG00000267909_25 (sequence is synthesized)
ttagtcccttgggttttctagttagacagtcatctgcagataatgttcaatttttgtcctttgccccctccctcattctaccaagtggcacaggaaattggttggtttggtgatgctgtt

SEQ ID NO: 789965 - DNA, 120 bp, Artificial Sequence
  ENSG00000267909_26 (sequence is synthesized)
tagctttaatagaaacccccagcccctggaggggctggattcctttgggagcagtgttccattccattaagcttccttgcagggtggggcccactccatgaagacagcagtcatgcctta

SEQ ID NO: 789966 - DNA, 120 bp, Artificial Sequence
  ENSG00000267909_27 (sequence is synthesized)
agaagcagagctaccttacgtgcctgcccaggctgttcctgcctaaatctccagccctgcatgccgtctcaagggtgggccccagagagtttggagtgtaggattccctctgtgaaggaa

SEQ ID NO: 789967 - DNA, 120 bp, Artificial Sequence
  ENSG00000267909_28 (sequence is synthesized)
tcatctctacttctctgaggacaattagggtatccttggctgctttactgtggtggccgaagagctggaattgcctttgttgagagttgtgttcactatcagtggtcgtgtaccttctcc

SEQ ID NO: 789968 - DNA, 120 bp, Artificial Sequence
  ENSG00000267909_29 (sequence is synthesized)
acctgcccccaggaaaaagagtctcccccttaaatttcctggtaccccctcacctatgcctgaaagcatttcaccctctcaatgcctcacctttcccattcgccagatggaaccatcagt

SEQ ID NO: 789969 - DNA, 120 bp, Artificial Sequence
  ENSG00000267909_30 (sequence is synthesized)
attcctctcctggtaccgcaaggcctcctggatccaaagcaccatgtcagtattatttgttggtcctttttgtgcctttcttgacctggagggggaggcaggaggattgctgtcagccta

SEQ ID NO: 789970 - DNA, 120 bp, Artificial Sequence
  ENSG00000267909_31 (sequence is synthesized)
gtttctttctgggaatatggctccctagtgttggaaagggcagtgcctcgtggacagatggtcatttagcctctggggtgaaatacttgcaataccaggtcactctgtggtccaaaaggt

SEQ ID NO: 789971 - DNA, 120 bp, Artificial Sequence
  ENSG00000267909_32 (sequence is synthesized)
cacattcagttgtcatcaggcaactttaacccttagagtgcttcccttccattaagctgaaattgccccacggccatatccacccattgactctgccttcatcaaggaaggtgggaagta

SEQ ID NO: 789972 - DNA, 120 bp, Artificial Sequence
  ENSG00000267909_33 (sequence is synthesized)
aaacatcactttttacattaaaccaggatcaggaataaaatgttaccaaaaaaaaaaaatggaaacagggtagagaactgctacattaaacatatttcatatatattctgctgggtaaaa

SEQ ID NO: 789973 - DNA, 120 bp, Artificial Sequence
  ENSG00000267978_0 (sequence is synthesized)
ctgggggtcagagagaagggagaggcctccttctgaggggcggcttgataccggtggaggagctccaggaagcaggcaggccttggtctgagacagtgtcctcaggtcgcagagcagagg

SEQ ID NO: 789974 - DNA, 120 bp, Artificial Sequence
  ENSG00000267978_1 (sequence is synthesized)
agacccaggcagtgtcagcagtgaaggttctcgggacaggctaaccaggaggacaggagccccaagaggccccagagcagcactgacgaagacctgcctgtgggtctccatcgcccagct

SEQ ID NO: 789975 - DNA, 120 bp, Artificial Sequence
  ENSG00000267978_2 (sequence is synthesized)
cctgcccacgctcctgactgctgccctgaccagagtcatcatgtctctcgagcagaggagtccgcactgcaagcctgatgaagaccttgaagcccaaggagaggacttgggcctgatggg

SEQ ID NO: 789976 - DNA, 120 bp, Artificial Sequence
  ENSG00000267978_3 (sequence is synthesized)
tgcacaggaacccacaggcgaggaggaggagactacctcctcctctgacagcaaggaggaggaggtgtctgctgctgggtcatcaagtcctccccagagtcctcagggaggcgcttcctc

SEQ ID NO: 789977 - DNA, 120 bp, Artificial Sequence
  ENSG00000267978_4 (sequence is synthesized)
ctccatttccgtctactacactttatggagccaattcgatgagggctccagcagtcaagaagaggaagagccaagctcctcggtcgacccagctcagctggagttcatgttccaagaagc

SEQ ID NO: 789978 - DNA, 120 bp, Artificial Sequence
  ENSG00000267978_5 (sequence is synthesized)
actgaaattgaaggtggctgagttggttcatttcctgctccacaaatatcgagtcaaggagccggtcacaaaggcagaaatgctggagagcgtcatcaaaaattacaagcgctactttcc

SEQ ID NO: 789979 - DNA, 120 bp, Artificial Sequence
  ENSG00000267978_6 (sequence is synthesized)
tgtgatcttcggcaaagcctccgagttcatgcaggtgatctttggcactgatgtgaaggaggtggaccccgccggccactcctacatccttgtcactgctcttggcctctcgtgcgatag

SEQ ID NO: 789980 - DNA, 120 bp, Artificial Sequence; identical to SEQ ID NO: 251772
  ENSG00000267978_7 (sequence is synthesized)

SEQ ID NO: 789981 - DNA, 120 bp, Artificial Sequence; identical to SEQ ID NO: 251773
  ENSG00000267978_8 (sequence is synthesized)

SEQ ID NO: 789982 - DNA, 120 bp, Artificial Sequence; identical to SEQ ID NO: 251774
  ENSG00000267978_9 (sequence is synthesized)

SEQ ID NO: 789983 - DNA, 120 bp, Artificial Sequence
  ENSG00000267978_10 (sequence is synthesized)
gaggagcaagagggagtctgagcaccagccgcagccggggccaaagtttgtggggtcagggccccatccagcagctgccctgccccatgtgacatgaggcccattcttggctctgtgttt

SEQ ID NO: 789984 - DNA, 120 bp, Artificial Sequence; identical to SEQ ID NO: 251776
  ENSG00000267978_11 (sequence is synthesized)

SEQ ID NO: 789985 - DNA, 120 bp, Artificial Sequence; identical to SEQ ID NO: 251777
  ENSG00000267978_12 (sequence is synthesized)

SEQ ID NO: 789986 - DNA, 120 bp, Artificial Sequence; identical to SEQ ID NO: 251778
  ENSG00000267978_13 (sequence is synthesized)

SEQ ID NO: 789987 - DNA, 120 bp, Artificial Sequence
  ENSG00000267978_14 (sequence is synthesized)
tgtagttaattcttgccttatacctctttctctctcctgtaaaattaaaatatatacatgtatacctggatttgcttggcttctttgagcatgtaagagaaataaaaattgaaagaataa

SEQ ID NO: 789988 - DNA, 120 bp, Artificial Sequence
  ENSG00000267978_15 (sequence is synthesized)
agagagtagcgggggcctcgctgtgaggggcgggtcgatatcggtggagggaagcgggcccaggctctgtgaggaggcaaggagctccaggaagcaggcaggccttggtctgagacagtg

SEQ ID NO: 789989 - DNA, 120 bp, Artificial Sequence
  ENSG00000267978_16 (sequence is synthesized)
cagagagaagggagaggcctccttctgaggggcggcttgataccggtggaggtaagctggccgaggctctgtgaggagtcaaggagctccaggaagcaggcaggccttggtctgagacag

SEQ ID NO: 789990 - DNA, 120 bp, Artificial Sequence
  ENSG00000268009_0 (sequence is synthesized)
gcccttttgattcttccacaatcagggtgagactgctcccagtgccatgaacggagacgacgcctttgcaaggagacccagggatgatgctcaaatatcagagaagttacgaaaggcctt

SEQ ID NO: 789991 - DNA, 120 bp, Artificial Sequence
  ENSG00000268009_1 (sequence is synthesized)
cgatgatattgccaaatacttctctaagaaagagtgggaaaagatgaaatcctcggagaaaatcgtctatgtgtatatgaagctaaactatgaggtcatgactaaactaggtttcaaggt

SEQ ID NO: 789992 - DNA, 120 bp, Artificial Sequence
  ENSG00000268009_2 (sequence is synthesized)
caccctcccacctttcatgcgtagtaaacgggctgcagacttccacgggaatgattttggtaacgatcgaaaccacaggaatcaggttgaacgtcctcagatgactttcggcagcctcca

SEQ ID NO: 789993 - DNA, 120 bp, Artificial Sequence
  ENSG00000268009_3 (sequence is synthesized)
gagaatcttcccgaagatcatgcccaagaagccagcagaggaagaaaatggtttgaaggaagtgccagaggcatctggcccacaaaatgatgggaaacagctgtgccccccgggaaatcc

SEQ ID NO: 789994 - DNA, 120 bp, Artificial Sequence
  ENSG00000268009_4 (sequence is synthesized)
aagtaccttggagaagattaacaagacatctggacccaaaagggggaaacatgcctggacccacagactgcgtgagagaaagcagctggtggtttatgaagagatcagcgaccctgagga

SEQ ID NO: 789995 - DNA, 120 bp, Artificial Sequence
  ENSG00000268009_5 (sequence is synthesized)
ggaagatgacgagtaactcccctcggggatatgacacatgcccatgatgagaagcagaacgtggtgacctttcacgaacatgggcatggctgcggacccctcgtcatcaggtgcatagca

SEQ ID NO: 789996 - DNA, 120 bp, Artificial Sequence
  ENSG00000268009_6 (sequence is synthesized)
ttcttagtgtgccaagagttcgatgttggcgtttccgctgtattttcttgcagtgtgccattctgttagacattagcgttttcgttgatgagcaagacatgcttaatgcatatttcggct

SEQ ID NO: 789997 - DNA, 120 bp, Artificial Sequence
  ENSG00000268009_7 (sequence is synthesized)
cgttttcgttgatgagcaagacatgcttaatgcatatttcggcttgtgtatccatgcacctacctcagaaaacaagtattgtcaggtattctctccatagaacagcactaccctcctctc

SEQ ID NO: 789998 - DNA, 120 bp, Artificial Sequence
  ENSG00000268009_8 (sequence is synthesized)
actactgaggggaggtctgagtgtttaatttccgattttttcctctgcatttacacacacaccacacacgcacacacacacaccaagtaccagtataagcatctcccatctgcttttctc

SEQ ID NO: 789999 - DNA, 120 bp, Artificial Sequence
  ENSG00000268009_9 (sequence is synthesized)
cattgccatgcgacctggtcaagcccccctcactctgtttcctgttcagcatgtactcccctcatccgattccgttgtatcagtcactgacagttaataaacctttgcaaacgttcccca

SEQ ID NO: 790000 - DNA, 120 bp, Artificial Sequence
  ENSG00000268041_0 (sequence is synthesized)
aggaggaggagaacgaggaggaggaggagcaggaggaagaggaggaagaggagaaggcgcaggaggcagggccgccccgcgcccccagccggccaggctgtccccggcgcgcgcccgccc

SEQ ID NO: 790001 - DNA, 120 bp, Artificial Sequence
  ENSG00000268041_1 (sequence is synthesized)
gcgctcgctgtgctgagctccagcccggagctccgtcctcagctctccccgtctctgctctctttgcgcgtctatctcgctgtctctctccctctctgcatctccccgtctctgctcgtc

SEQ ID NO: 790002 - DNA, 120 bp, Artificial Sequence
  ENSG00000268041_2 (sequence is synthesized)
tccccgtctctgtctccttggctgtctctccgtctctgagtctctcctgtcccggcgtctcagagactccctctcctcgtcctctgggtctctgcctccccggggctccgggcatctccc

SEQ ID NO: 790003 - DNA, 120 bp, Artificial Sequence
  ENSG00000268041_3 (sequence is synthesized)
cccaccccgcccctcgccccggtgccccctccccaggacgccgcgggggccatggctgcgggatccgaactttaaacacttctccccggaccggagcggatgcgaaaagcccagaaaggc

SEQ ID NO: 790004 - DNA, 120 bp, Artificial Sequence
  ENSG00000268041_4 (sequence is synthesized)
cggctccgccatggactgtagctgcgtctccgaccttctcttcgccccgcccgccctgccggctctctggacccccgggtttgccttcccggattgggcctacaagccagagtcatcccc

SEQ ID NO: 790005 - DNA, 120 bp, Artificial Sequence
  ENSG00000268041_5 (sequence is synthesized)
tggctcgaggcagatccagctgtggcactttatcctggagctgctgcagaaggaggagtaccagggcgtcatagcctggcagggggactacggggaattcgtcatcaaagaccccgatga

SEQ ID NO: 790006 - DNA, 120 bp, Artificial Sequence
  ENSG00000268041_6 (sequence is synthesized)
ggtggcccggctgtggggtattcgcaaatgcaagccccacatgaattacgacaagctgagccgggccctgcgttactactacaacaagcggattctccacaagaccaaagggaagaggtt

SEQ ID NO: 790007 - DNA, 120 bp, Artificial Sequence
  ENSG00000268041_7 (sequence is synthesized)
cacctacaagttcaacttcagcaaagtcgtgcttgtcaattacccgctgctggacatggcggcagctgccactggctccccactcttgctgacccccagtccctttgggggggccccagg

SEQ ID NO: 790008 - DNA, 120 bp, Artificial Sequence
  ENSG00000268041_8 (sequence is synthesized)
ccctgttctctgccccacgcctgggagagccaggggcccggacacccctgttcacctccgagacagataaattgcgtctggacagccctttcccattcctgggctctggtgccaccagct

SEQ ID NO: 790009 - DNA, 120 bp, Artificial Sequence
  ENSG00000268041_9 (sequence is synthesized)
attccaagccccctggcctgctgggtccttatggccgcgccttccctgagtacccctggaactttaacccgtacctcacgggccccttccccaagctgcctccctctctctaccccccgc

SEQ ID NO: 790010 - DNA, 120 bp, Artificial Sequence
  ENSG00000268041_10 (sequence is synthesized)
atttctaccccaaccctctggccagttccctgggccacctgccctcgtcaggggcagggggaggccccacagccacgcccctgctggcctcgacaggggagggcctgggccccgagcgcc

SEQ ID NO: 790011 - DNA, 120 bp, Artificial Sequence
  ENSG00000268041_11 (sequence is synthesized)
cctcgggcctggcagcggcccctcgcctggcgctgccaggggctgggggtccagaggctgcccttggtgggaaggaggacagcgactcggagctggagatcaccgacgtcagcggctgca

SEQ ID NO: 790012 - DNA, 120 bp, Artificial Sequence
  ENSG00000268041_12 (sequence is synthesized)
gctctgacagcgagggcgatgagggtctcccggcaccccccaaggcaaaggcgggcaaaggggggaccggcagctgagccggcagggggcaatggattctgctgaggcagggaccagggt

SEQ ID NO: 790013 - DNA, 120 bp, Artificial Sequence
  ENSG00000268041_13 (sequence is synthesized)
ggctgcccgtctgcccttgatgcctggcccaaggcccaggaccagccctcagcacctcccaggtctgggcacattgctgccccagtctccttccccagccccagagtggggggggtctca

SEQ ID NO: 790014 - DNA, 120 bp, Artificial Sequence
  ENSG00000268041_14 (sequence is synthesized)
cttccccctccacagaggacagagggaatgtgatggcctccggcctcctccccaggctccagtttgaggggggtccccgcctggccccactcccaaagtgcaatatggcgcccagcctgc

SEQ ID NO: 790015 - DNA, 120 bp, Artificial Sequence
  ENSG00000268041_15 (sequence is synthesized)
cccgcccgcccacccctgtgctatgccccaagtgtttgtgtggccgtgtctccaaaccccctgtgctggccccagtcctgacaccccccccatataggcccccctggggacagggagctc

SEQ ID NO: 790016 - DNA, 120 bp, Artificial Sequence
  ENSG00000268041_16 (sequence is synthesized)
agagcaataaccccgcccccagcccccacccaggaggggcccccctccccaccagctccccatgatcccaacagtcacctccagagagtttactacagaaataaaagaacagagagtgag

SEQ ID NO: 790017 - DNA, 120 bp, Artificial Sequence
  ENSG00000268043_0 (sequence is synthesized)
attctttcagaaatgtgattgataacagtaaagccacactcctcaagtgcctgaaatacccctcattgtcttcttcaggtggcaagggctctggaacagccacataaagcccttgaagat

SEQ ID NO: 790018 - DNA, 120 bp, Artificial Sequence
  ENSG00000268043_1 (sequence is synthesized)
aaggatggtcaaacaaaataatatcatacctggagaaactcagatcttgctaagatttactggttgggaatccaaagttaatgccaagaagcagctgccagttgggatcaaatgtgagcc

SEQ ID NO: 790019 - DNA, 80 bp, Artificial Sequence
  ENSG00000268043_2 (sequence is synthesized)
tatggatccttatcagagtctgagcagtgctttcagctctgagttgaggcacctcgaaccttgtttttgtggtgaaggat

SEQ ID NO: 790020 - DNA, 68 bp, Artificial Sequence
  ENSG00000268043_3 (sequence is synthesized)
aagtgctgtggggagtgatcacatttttcacaacatccctggtccagcgagaaggcagagatgaacat

SEQ ID NO: 790021 - DNA, 88 bp, Artificial Sequence
  ENSG00000268043_4 (sequence is synthesized)
aggcagagatgaacattctagaaatcaacgagaaattgcgcccccagttggcagagaacaaacagcagttcagaaacctcaaagagag

SEQ ID NO: 790022 - DNA, 120 bp, Artificial Sequence
  ENSG00000268043_5 (sequence is synthesized)
tggctgaggggtgtagactggcacagcaacttgtccaaaagctcagcccagaaaatgatgaagatgaggatgaagatgttcaagttgaggaggatgagaaagtactggaatcatctgccc

SEQ ID NO: 790023 - DNA, 120 bp, Artificial Sequence
  ENSG00000268043_6 (sequence is synthesized)
aaatgatgaagatgaggatgaagatgttcaagttgaggaggatgagaaagtactggaatcatctgcccccagggaggtgcagaaggctgaagagagcaaagtccctgaggactcactgga

SEQ ID NO: 790024 - DNA, 120 bp, Artificial Sequence
  ENSG00000268043_7 (sequence is synthesized)
gcccttgtgactccatccagcctcacaagaacatcaaaatcacatttgaggaagacaaagtcaactcaactgtggttgtagacagaaaatcctctcatgatgaatgtcaggatgctctaa

SEQ ID NO: 790025 - DNA, 120 bp, Artificial Sequence
  ENSG00000268043_8 (sequence is synthesized)
ctggcagagaagaaacagcagttcagaagcctcaaagagaaatgttttgtaactcaactggccggcttcctggccaagcagcagaacaaatacaaatatgaagagtgcaaagacctcata

SEQ ID NO: 790026 - DNA, 87 bp, Artificial Sequence
  ENSG00000268043_9 (sequence is synthesized)
gccaagcagcagaacaaatacaaatatgaagagtgcaaagacctcataaaatctatgctgaggaatgagctgaagcaagctgaggag

SEQ ID NO: 790027 - DNA, 89 bp, Artificial Sequence
  ENSG00000268043_10 (sequence is synthesized)
tgtccaaaagctcagcccagaaaatgatgaagatgaggatgaagatgttcaagttgaggaggatgagaaagtgctggaatcatctgcaa

SEQ ID NO: 790028 - DNA, 120 bp, Artificial Sequence
  ENSG00000268043_11 (sequence is synthesized)
agaacatcaaaatcacatttgaggaagacaaagtcaactcatctctggttgtagacagagaatcctctcatgatgaatgtcaggatgctctaaacattctcccagtccctggccccacct

SEQ ID NO: 790029 - DNA, 120 bp, Artificial Sequence
  ENSG00000268043_12 (sequence is synthesized)
agttcagaagcctcaaagagaaatgttttgtaactcaagtggcctgcttcctggccaagcagcagaacaaatacaaatatgaagagtgcaaagacctcctaaaatctatgctgaggaatg

SEQ ID NO: 790030 - DNA, 66 bp, Artificial Sequence
  ENSG00000268043_13 (sequence is synthesized)
aagtccctgaggactcactggaggagtgtgccatcacttgttcaaatagccatggcccttatgact

SEQ ID NO: 790031 - DNA, 63 bp, Artificial Sequence
  ENSG00000268043_14 (sequence is synthesized)
gtattcgactccttcagtttatcttggactgactgacccatgccagccctacagaagtgcctt

SEQ ID NO: 790032 - DNA, 71 bp, Artificial Sequence
  ENSG00000268043_15 (sequence is synthesized)
atcaaaacccaccatgccccaggctcaacagcgtgctgatggaagtggatcaatgtactttgaactacctg

SEQ ID NO: 790033 - DNA, 120 bp, Artificial Sequence
  ENSG00000268043_16 (sequence is synthesized)
cagaagtgtgttttactcatttgaggaacagcacatcacctttgcccttgacatggacaatagcttttttactttgacggtgacaagtctccacctggtcttccagatgggagtcatatt

SEQ ID NO: 790034 - DNA, 120 bp, Artificial Sequence
  ENSG00000268043_17 (sequence is synthesized)
ctccacctggtcttccagatgggagtcatattcccacaataagcagcccttactaagccgagaggtttcattcctgcaggcaggacctataggcacctgaagatttgaatgaaactatag

SEQ ID NO: 790035 - DNA, 75 bp, Artificial Sequence; identical to SEQ ID NO: 788160
  ENSG00000268043_18 (sequence is synthesized)

SEQ ID NO: 790036 - DNA, 120 bp, Artificial Sequence
  ENSG00000268043_19 (sequence is synthesized)
ctgtgcagcacatgccgggagtgatcagccggacattttaatttgaaccatgtatctctgggtagctacaaaattcctcagggatttcattttgcaggcatgtctctgagcttctatacc

SEQ ID NO: 790037 - DNA, 83 bp, Artificial Sequence
  ENSG00000268043_20 (sequence is synthesized)
caaaattcctcagggatttcattttgcaggcatgtctctgagcttctatacctactcaaggtcagtgtcatctttgtgtttag

SEQ ID NO: 790038 - DNA, 70 bp, Artificial Sequence
  ENSG00000268043_21 (sequence is synthesized)
gatggtggtgacatggacttgtttatagaggacaggtcagctctctggctcaatgatctacattctgaag

SEQ ID NO: 790039 - DNA, 80 bp, Artificial Sequence
  ENSG00000268043_22 (sequence is synthesized)
ctgtgcctttgtttttactagtgtctgctgttgcaaaaagaagaattttaatctatacaattaaaaccttttgcctatca

SEQ ID NO: 790040 - DNA, 120 bp, Artificial Sequence
  ENSG00000268043_23 (sequence is synthesized)
ggaccctgaggagccagcgggccgcaagcaagttgctgggcggcggttgagatagcggcggtgctgggaggggtaggtgagggtcgcgaggctgcctgagcttctgagtgagcctggtga

SEQ ID NO: 790041 - DNA, 120 bp, Artificial Sequence
  ENSG00000268043_24 (sequence is synthesized)
ttttgggaacgcgggacgggcgacctgcggcgccaggagcggggccgaggtacggcggcacggctgcagcctggatgggaagttcaagtttactgcgaagtccacccagcgttccggagg

SEQ ID NO: 790042 - DNA, 120 bp, Artificial Sequence
  ENSG00000268043_25 (sequence is synthesized)
cattctgaaggcaaatcctgtttagacccaggcaaaggttcctggtgacccaggctctcatgagcagattgtcccttatcattctcctgaggatgtctggagcttcagtgctgtgtgctc

SEQ ID NO: 790043 - DNA, 120 bp, Artificial Sequence
  ENSG00000268043_26 (sequence is synthesized)
ttggcctccacactgggggtgccaccaactcccactgtccagggcttctggtggactctccgaggcaccgatgtagaaacttacccattcagtgcaccaagagcagcctcacatggtgtg

SEQ ID NO: 790044 - DNA, 120 bp, Artificial Sequence
  ENSG00000268043_27 (sequence is synthesized)
aacccaagagtgtcttatctgaaataccaccaggaatgtctggacacagtagacaaaggtttttcaactggatgccttaggatacatgcttccaaaaacaaagtagccaaaaagaaacca

SEQ ID NO: 790045 - DNA, 120 bp, Artificial Sequence
  ENSG00000268089_0 (sequence is synthesized)
agtcgcagccaggagcggccgcagacggagcgcacctcgcagctgccgggcgggccctggggggagctgcgtccagcagagctgctgggtggttgctcctcccgggctctcatctccggt

SEQ ID NO: 790046 - DNA, 120 bp, Artificial Sequence
  ENSG00000268089_1 (sequence is synthesized)
atccgggccgacccccgcaccccctacttcccttgccctcgctgctctctccttagaggcgactctttggggaagggccagcaatcccgccttccccggccccagtagtcacccactctc

SEQ ID NO: 790047 - DNA, 120 bp, Artificial Sequence
  ENSG00000268089_2 (sequence is synthesized)
ccaccccacctctgttccttttcgcggccccgtctcccgcgccctcaggcgcccagaacgccccggccatgggcatccgaggcatgctgcgagccgcagtgatcctgctgctcatcagga

SEQ ID NO: 790048 - DNA, 120 bp, Artificial Sequence
  ENSG00000268089_3 (sequence is synthesized)
cctggctcgcggagggcaactaccccagtcccatcccgaaattccacttcgagttctcctctgctgtgcccgaagtcgtcctgaacctcttcaactgcaaaaattgtgcaaatgaagctg

SEQ ID NO: 790049 - DNA, 120 bp, Artificial Sequence
  ENSG00000268089_4 (sequence is synthesized)
tggttcaaaagattttggacagggtgctgtcaagatacgatgtccgcctgagaccgaattttggaggtgcccctgtgcctgtgagaatatctatttatgtcacgagcattgaacagatct

SEQ ID NO: 790050 - DNA, 120 bp, Artificial Sequence
  ENSG00000268089_5 (sequence is synthesized)
cagaaatgaatatggactacacgatcacgatgttttttcatcagacttggaaagattcacgcttagcatactatgagaccaccctgaacttgaccctggactatcggatgcatgagaagt

SEQ ID NO: 790051 - DNA, 120 bp, Artificial Sequence
  ENSG00000268089_6 (sequence is synthesized)
tgtgggtccctgactgctactttctgaacagcaaggatgctttcgtgcatgatgtgactgtggagaatcgcgtgtttcagcttcacccagatggaacggtgcggtacggcatccgactca

SEQ ID NO: 790052 - DNA, 120 bp, Artificial Sequence
  ENSG00000268089_7 (sequence is synthesized)
ccactacagcagcttgttccctggatctgcataaattccctatggacaagcaggcctgcaacctggtggtagagagctatggttacacggttgaagacatcatattattctgggatgaca

SEQ ID NO: 790053 - DNA, 120 bp, Artificial Sequence
  ENSG00000268089_8 (sequence is synthesized)
atgggaacgccatccacatgactgaggagctgcatatccctcagttcactttcctgggaaggacgattactagcaaggaggtgtatttctacacaggttcctacatacgcctgatactga

SEQ ID NO: 790054 - DNA, 120 bp, Artificial Sequence
  ENSG00000268089_9 (sequence is synthesized)
agttccaggttcagagggaagttaacagctaccttgtgcaagtctactggcctactgtcctcaccactattacctcttggatatcgttttggatgaactatgattcctctgcagccaggg

SEQ ID NO: 790055 - DNA, 120 bp, Artificial Sequence
  ENSG00000268089_10 (sequence is synthesized)
tgacaattggcttaacttcaatgctcatcctgaccaccatcgactcacatctgcgggataagctccccaacatttcctgtatcaaggccattgatatctatatcctcgtgtgcttgttct

SEQ ID NO: 790056 - DNA, 120 bp, Artificial Sequence
  ENSG00000268089_11 (sequence is synthesized)
ttgtgttcctgtccttgctggagtatgtctacatcaactatcttttctacagtcgaggacctcggcgccagcctaggcgacacaggagaccccgaagagtcattgcccgctaccgctacc

SEQ ID NO: 790057 - DNA, 120 bp, Artificial Sequence
  ENSG00000268089_12 (sequence is synthesized)
agcaagtggtggtaggaaacgtgcaggatggcctgattaacgtggaagacggagtcagctctctccccatcaccccagcgcaggcccccctggcaagcccggaaagcctcggttctttga

SEQ ID NO: 790058 - DNA, 120 bp, Artificial Sequence
  ENSG00000268089_13 (sequence is synthesized)
cgtccacctccgagcaggcccagctggccacctcggaaagcctcagcccactcacttctctctcaggccaggcccccctggccactggagaaagcctgagcgatctcccctccacctcag

SEQ ID NO: 790059 - DNA, 120 bp, Artificial Sequence
  ENSG00000268089_14 (sequence is synthesized)
agcaggcccggcacagctatggtgttcgctttaatggtttccaggctgatgacagtattattcctaccgaaatccgcaaccgtgtcgaagcccatggccatggtgttacccatgaccatg

SEQ ID NO: 790060 - DNA, 120 bp, Artificial Sequence
  ENSG00000268089_15 (sequence is synthesized)
aagattccaatgagagcttgagctcggatgagcgccatggccatggccccagtgggaagcccatgcttcaccatggcgagaagggtgtgcaagaagcaggctgggaccttgatgacaaca

SEQ ID NO: 790061 - DNA, 120 bp, Artificial Sequence
  ENSG00000268089_16 (sequence is synthesized)
atgacaagagcgactgccttgccattaaggagcaattcaagtgtgatactaacagtacctggggccttaatgatgatgagctcatggcccatggccaagagaaggacagtagctcagagt

SEQ ID NO: 790062 - DNA, 120 bp, Artificial Sequence
  ENSG00000268089_17 (sequence is synthesized)
ctgaggatagttgccccccaagccctgggtgctccttcactgaagggttctccttcgatctctttaatcctgactacgtcccaaaggtcgacaagtggtcccggttcctcttccctctgg

SEQ ID NO: 790063 - DNA, 120 bp, Artificial Sequence
  ENSG00000268089_18 (sequence is synthesized)
cctttgggttgttcaacattgtttactgggtataccatatgtattagtcccccagtgctccagaacagcgggagcactgtgctgtgctcctttcagtttcttttgggtttgtttttccct

SEQ ID NO: 790064 - DNA, 120 bp, Artificial Sequence
  ENSG00000268089_19 (sequence is synthesized)
ctttcctttgttccttttattttgtggttatttgggcaatccaataagttcatacttctctttataaacatgaggtggggagtaattggaaagaacatgttctagctggaagggaaggga

SEQ ID NO: 790065 - DNA, 120 bp, Artificial Sequence
  ENSG00000268089_20 (sequence is synthesized)
ttgaggaggagttggaggtatacagcacatggatttcctttcctgctagaagactctcaccttttcaaagacttgtaacaaggaataagcatagaaaagcccctggaaatgtttagagga

SEQ ID NO: 790066 - DNA, 120 bp, Artificial Sequence
  ENSG00000268089_21 (sequence is synthesized)
cagagaagagccaggttgggggatggggcaaggatctgggccttttgcccacaaacatttctggggggcttttctgtcccccttgaggtgtcaacatttctttttcattacatgttttct

SEQ ID NO: 790067 - DNA, 120 bp, Artificial Sequence
  ENSG00000268089_22 (sequence is synthesized)
tctttttttgtttcctcctagggattatgggtcttgttcaccctctgcttagggctttatagaagaaagtcaagctgggttgggctggggttcatagctaaagggctagccatggcttag

SEQ ID NO: 790068 - DNA, 120 bp, Artificial Sequence
  ENSG00000268089_23 (sequence is synthesized)
aagttcagggaacttcctataggaaacttagggagcatttgtaagtgcctttcccccactgtatggcatttgactgtggtgttttgatgcaagcgtggaaggggaatgtgggtggatggg

SEQ ID NO: 790069 - DNA, 120 bp, Artificial Sequence
  ENSG00000268089_24 (sequence is synthesized)
gctgcagagtgagacatcagggtgagagagcacatactcagcttgtggggttggcagagggtggggggtgatgtcaggttggaaattacacagttgagctggcctcttcggagggattgg

SEQ ID NO: 790070 - DNA, 120 bp, Artificial Sequence
  ENSG00000268089_25 (sequence is synthesized)
aacttgcctatatttctgcttcagaacgcttggcaatagagactcaatacatctgtctaagtcaggagttagctttccgtcagttgctgagttgatcaccagttacagcacttggtgaat

SEQ ID NO: 790071 - DNA, 120 bp, Artificial Sequence
  ENSG00000268089_26 (sequence is synthesized)
gcatagtaagtgtcaacaagctccctgacccattacatcactggagcctcacaggagccctgtaagccagggaaggcaaagcacattgtccccagtgttccaaggaaaacgaatggagct

SEQ ID NO: 790072 - DNA, 120 bp, Artificial Sequence
  ENSG00000268089_27 (sequence is synthesized)
tatgccgcatgcttgaggacatgcagccagtgagtggtagatccaccccacttgctctttcttgtctttttcctcctgactgtcccaactgaggcatttccttttcttccctccctaaag

SEQ ID NO: 790073 - DNA, 120 bp, Artificial Sequence
  ENSG00000268089_28 (sequence is synthesized)
agggtgctccagagggcccccaccacatcctctagcacctggggcatctctgcaggaataggctggtgaccagccaatgagcgtgacgtgagcagatggagaacacactctgcccactga

SEQ ID NO: 790074 - DNA, 120 bp, Artificial Sequence
  ENSG00000268089_29 (sequence is synthesized)
gcagggcccctaacggaagtaggattggccagcattccaacttgccaagcagctccacctcactgatggaggttgtgagggagtgaactttgccgagcactcaacatatgccacctcttc

SEQ ID NO: 790075 - DNA, 120 bp, Artificial Sequence
  ENSG00000268089_30 (sequence is synthesized)
ctccctatgcagtctctccctcagtcccttacccctctacccactcaccctttaactgtgcttctgtgtttgtgtttctgtatatacctgggtgtatgcatatgcagcagggtgggtgta

SEQ ID NO: 790076 - DNA, 120 bp, Artificial Sequence
  ENSG00000268089_31 (sequence is synthesized)
tgtacatatacaaccatttgagaagctgcatagtgccgtgtctagtggtgtaaatctacattggtgtgtacagaattgtatctacagcatgtggatgcatgcgtgtgtgtgcacatccct

SEQ ID NO: 790077 - DNA, 120 bp, Artificial Sequence
  ENSG00000268089_32 (sequence is synthesized)
gtgaaagtgtggcttatgtatgtgtatgcttgtgtacacatgggtctatgctgagtgcatgtatataagggcatgtctgcatatctatgtttatctgatttgaatgggtgtgaaaggaaa

SEQ ID NO: 790078 - DNA, 120 bp, Artificial Sequence
  ENSG00000268089_33 (sequence is synthesized)
tacccctgaaagcatatgtattccctgttggtgacccttctagaaccactataattcccttggcctgctcccatatggtggaggggccctatttggccgggctgcttaactgactgtttc

SEQ ID NO: 790079 - DNA, 120 bp, Artificial Sequence
  ENSG00000268089_34 (sequence is synthesized)
tttccaacttcctgttccagggagcagcatctcccagttcccttccactgtttgccctgtccctccatccatctgtgctgtctcctagatagaagactggggaagtgaatgtagtcctaa

SEQ ID NO: 790080 - DNA, 120 bp, Artificial Sequence
  ENSG00000268089_35 (sequence is synthesized)
gaagtggtgagctagtgccttgaggtaggaagtggttaatccatggaagaagctgcaagtacagagcatttcactttgtcctagaggaacatgtttcggggtaacaggctggggagtgag

SEQ ID NO: 790081 - DNA, 120 bp, Artificial Sequence
  ENSG00000268089_36 (sequence is synthesized)
gctgaaagaggcattgagaatagacacttgtacagtcacatacacatacacacacacaaatcttgtacgacagttgaaaacaagaaagttaccactggaagagctaaaattgcctcttta

SEQ ID NO: 790082 - DNA, 120 bp, Artificial Sequence
  ENSG00000268089_37 (sequence is synthesized)
tttttggataccccatacagagattcaggtggaggggagagcagtgactccatgtctgaagctcccaatgtggctattgaaaggctggcttcctggagcctaagcattggttggttgacg

SEQ ID NO: 790083 - DNA, 120 bp, Artificial Sequence
  ENSG00000268089_38 (sequence is synthesized)
tggatttgggtctccagcaccctggaggtgctttcaaccctgtggtggcaagcagttcatttgggataaagtcataaagggagattggagcagtgtgaagaaaaggagggttttaagatt

SEQ ID NO: 790084 - DNA, 120 bp, Artificial Sequence
  ENSG00000268089_39 (sequence is synthesized)
tgtctggaagcaatgcacatgaaggcttcacagcacagaggaagggcagcgaggccagttgtaaatatctctatagatccatatagctagatataatactataccttaaaaaggatatct

SEQ ID NO: 790085 - DNA, 120 bp, Artificial Sequence
  ENSG00000268089_40 (sequence is synthesized)
tgccctgacgtgctgcaatgagagcagttgaactctactgcgactcatactctgtaggttaagtgtcaaaatgaggtggagatttggcagtgacaccctttcgggaacgtgaaccttctg

SEQ ID NO: 790086 - DNA, 120 bp, Artificial Sequence
  ENSG00000268089_41 (sequence is synthesized)
agtttgctatggatttggtcattttagcctgcacgttgccagatctccccttgttgagtcttgtatgtggtctgtcctctgtgtcatttgagtcctcagctgtccccaaccccttcccag

SEQ ID NO: 790087 - DNA, 120 bp, Artificial Sequence
  ENSG00000268089_42 (sequence is synthesized)
cccctccccagcctgcagtcaccccctgtccagcaagctgcctccatcccatccctctcctcacctcacaccaggtaactctggaagtgcagaatgcttggtagtttggagcttgggcag

SEQ ID NO: 790088 - DNA, 120 bp, Artificial Sequence
  ENSG00000268089_43 (sequence is synthesized)
catctgggatgcaacaacccctattttactcttctacccaccttccatttctttccttcccatcgacttccccgacccaggatcccttctttgccactatcatgggaaggacacccctgt

SEQ ID NO: 790089 - DNA, 120 bp, Artificial Sequence
  ENSG00000268089_44 (sequence is synthesized)
ctgtctttctgaagtatcattttattgtggggatgtgtgacacgtttcctaccaagttcttgccagttccatctgccactgtggggtgcctttgcacaggtcatggacgatctgctgggt

SEQ ID NO: 790090 - DNA, 120 bp, Artificial Sequence
  ENSG00000268089_45 (sequence is synthesized)
cttactagagcctgtcaaatgtattcttacaattcatgtcatcttgttaatagcaggacttcaaagtctttgcatatttagagctgagttttgctgagactgtggccattcctaatgagg

SEQ ID NO: 790091 - DNA, 120 bp, Artificial Sequence
  ENSG00000268089_46 (sequence is synthesized)
tttcctcattccatatatataatagctaacccttaaagccattaactaatgaatgcatttattaagctatccactcgcatggtaccctgctgtggtgatgagcagtaactttctagctat

SEQ ID NO: 790092 - DNA, 120 bp, Artificial Sequence
  ENSG00000268089_47 (sequence is synthesized)
tccatagcccaacatcaaaggaaatcgtgactcgtcctactagaagtgtagtgtctttgtgtttgttgtgtagtgtcctgtgatcaatataaaatctatattatcagtgttgggttttca

SEQ ID NO: 790093 - DNA, 120 bp, Artificial Sequence
  ENSG00000268089_48 (sequence is synthesized)
ggggagggagggagaggatgttaaagtctctctttgataaacttaaattatgaaatagcccagttgttcagggtcacttctattgactcaatttgtgtgagactttgcactcactatctc

SEQ ID NO: 790094 - DNA, 120 bp, Artificial Sequence
  ENSG00000268089_49 (sequence is synthesized)
gccggccggactgcatgcccagggtcagtagtcagcagagctaaaggtgcccgaatttagcacagctggctgtggtgcctgacatagggcagtaccgggggattcttcagaggtcagcca

SEQ ID NO: 790095 - DNA, 120 bp, Artificial Sequence
  ENSG00000268089_50 (sequence is synthesized)
agtcggtaacattctgtgaagcagattaaatacagtaaaatcaaacaaacggaggtctttggaagtgatgctgggcccaggcagtgaaaatcaagaaaagaggagaaagaccaagacctg

SEQ ID NO: 790096 - DNA, 120 bp, Artificial Sequence
  ENSG00000268089_51 (sequence is synthesized)
gatgtcctggacgacctgacccaaaaaggggcacaaagcagcagagcttcaccaggtgactgggtggcttctttgtcctcattaaatgtacatctttgcatgaaaaggaccttgactggt

SEQ ID NO: 790097 - DNA, 120 bp, Artificial Sequence
  ENSG00000268089_52 (sequence is synthesized)
tgactggtctggactttaacaaagtaaaatatgaagaaacgtaaaattatgcttctgaaaaatatactgaaataaaattttgtaaatagctaaaagaaaaataaataaatataataacaa

SEQ ID NO: 790098 - DNA, 120 bp, Artificial Sequence
  ENSG00000268104_0 (sequence is synthesized)
ggctcactctggcaggtaggaacaggggagagtgcacctgctaccagtcaagctcagccagactgcaagaggaggcgaggcggagccagccgagggagtgaaccatggacaagttgaaat

SEQ ID NO: 790099 - DNA, 120 bp, Artificial Sequence
  ENSG00000268104_1 (sequence is synthesized)
gcccgagtttcttcaagtgcagggagaaggagaaagtgtcggcttcatcagagaatttccatgttggtgaaaatgatgagaatcaggaccgtggtaactggtccaaaaaatcggattatc

SEQ ID NO: 790100 - DNA, 120 bp, Artificial Sequence
  ENSG00000268104_2 (sequence is synthesized)
ttctatctatgattggatacgcagtgggattaggaaatgtgtggagatttccatatctgacctacagcaatggtggaggcgccttcttgataccttatgcaattatgttagcattggctg

SEQ ID NO: 790101 - DNA, 120 bp, Artificial Sequence
  ENSG00000268104_3 (sequence is synthesized)
gtttacctttgttctttctggagtgttcactgggacaatttgctagcttaggtccagtttcagtttggaggattcttccattgtttcaaggtgtgggaattacaatggtcctgatctcca

SEQ ID NO: 790102 - DNA, 120 bp, Artificial Sequence
  ENSG00000268104_4 (sequence is synthesized)
tttttgtgacaatctattacaatgtcataattgcctatagtctttactacatgtttgcttcttttcaaagtgaactaccatggaaaaattgttcttcgtggtcagataaaaactgtagca

SEQ ID NO: 790103 - DNA, 120 bp, Artificial Sequence
  ENSG00000268104_5 (sequence is synthesized)
gatcaccaatagtaactcactgtaatgtgagtacagtgaataaaggaatacaagagatcatccaaatgaataaaagctgggtagacatcaacaattttacctgcatcaacggcagtgaaa

SEQ ID NO: 790104 - DNA, 120 bp, Artificial Sequence
  ENSG00000268104_6 (sequence is synthesized)
tttatcagccagggcagcttcccagtgaacaatattggaataaagtggcgctccaacggtcaagtggaatgaatgagactggagtaattgtttggtatttagcactttgtcttcttctgg

SEQ ID NO: 790105 - DNA, 120 bp, Artificial Sequence
  ENSG00000268104_7 (sequence is synthesized)
cttggctcatagttggagcagcactatttaaaggaatcaaatcgtctggcaaggtggtatattttacagctcttttcccctatgtggtcctactcatcctgttagtacgaggtgcaactc

SEQ ID NO: 790106 - DNA, 120 bp, Artificial Sequence
  ENSG00000268104_8 (sequence is synthesized)
tggagggtgcttcaaaaggcatttcatactatattggagcccagtcaaattttacaaaacttaaggaagctgaggtatggaaagatgctgccactcagatattttactccctttcagtgg

SEQ ID NO: 790107 - DNA, 120 bp, Artificial Sequence
  ENSG00000268104_9 (sequence is synthesized)
cttggggtggcttagttgctctatcatcttacaataagttcaaaaacaactgcttctctgatgccattgtggtttgtttgacaaactgtctcactagcgtgtttgctggatttgctattt

SEQ ID NO: 790108 - DNA, 120 bp, Artificial Sequence
  ENSG00000268104_10 (sequence is synthesized)
tttctatattgggacacatggcccatatatctggaaaggaagtttctcaagttgtaaaatcaggttttgatttggcattcattgcctatccagaggctctagcccaactcccaggtggtc

SEQ ID NO: 790109 - DNA, 120 bp, Artificial Sequence
  ENSG00000268104_11 (sequence is synthesized)
cattttggtccatattattttttttcatgcttttaactttgggtctcgattctcagtttgcttcgattgaaacgatcacaacaacaattcaagatttatttcccaaagtgatgaagaaaa

SEQ ID NO: 790110 - DNA, 120 bp, Artificial Sequence
  ENSG00000268104_12 (sequence is synthesized)
tgagggttcccataactttgggctgctgcttggttttgtttctccttggtctcgtctgtgtgactcaggctggaatttactgggttcatctgattgaccacttctgtgctggatggggca

SEQ ID NO: 790111 - DNA, 120 bp, Artificial Sequence
  ENSG00000268104_13 (sequence is synthesized)
ttttaattgcagctatactggagctagttggaatcatctggatttatggagggaacagattcattgaggatacagaaatgatgattggagcaaagaggtggatattctggctatggtgga

SEQ ID NO: 790112 - DNA, 120 bp, Artificial Sequence
  ENSG00000268104_14 (sequence is synthesized)
gagcttgctggtttgtaattacgcctatccttttgattgcaatatttatctggtcattggtgcaatttcatagacctaattatggcgcaattccataccctgactggggagttgctttag

SEQ ID NO: 790113 - DNA, 120 bp, Artificial Sequence
  ENSG00000268104_15 (sequence is synthesized)
gctggtgtatgattgttttctgcattatttggattccaattatggctatcataaaaataattcaggctaaaggaaacatctttcaacgccttataagttgctgcagaccagcttctaact

SEQ ID NO: 790114 - DNA, 120 bp, Artificial Sequence
  ENSG00000268104_16 (sequence is synthesized)
ggggtccatacctggaacaacatcgtggggaaagatataaagacatggtagatcctaaaaaagaggctgaccatgaaatacctactgttagtggcagcagaaaaccggaatgagatctca

SEQ ID NO: 790115 - DNA, 120 bp, Artificial Sequence
  ENSG00000268104_17 (sequence is synthesized)
ttgaaaaaaatatatgattgtataatgtgattttttttagaatagggggaaccttatttatttgtgtgttaactgaataggaaaatgtacatactatgttcatgatagtgtgattttttt

SEQ ID NO: 790116 - DNA, 120 bp, Artificial Sequence
  ENSG00000268104_18 (sequence is synthesized)
cacacacacacacctaagagtctctatttcacaattatatttttgtaaatagtatatgcatttttaatacattggaggctttattttgaactaatttcttagagaatagttatattttct

SEQ ID NO: 790117 - DNA, 120 bp, Artificial Sequence
  ENSG00000268104_19 (sequence is synthesized)
attacacaagtttaaaaatattattaacttgtattttcttaatatacaatctatcttttccacaaatatgagtgggaaataaatcagcacatttgaaagaaagtgttaaaactgaaggcc

SEQ ID NO: 790118 - DNA, 120 bp, Artificial Sequence
  ENSG00000268104_20 (sequence is synthesized)
tcacttaattagaaacgtgataaatatatggacaaatggactatacatactataagaggactgtagtttaatactttttacccaaatatgtttaaaaacttcgtgcatttgttacagctc

SEQ ID NO: 790119 - DNA, 120 bp, Artificial Sequence
  ENSG00000268104_21 (sequence is synthesized)
atgttttctatatgaacttagtcattaatgttctttataaaaagtgaaataagatggaaaaataaggatcctacagccagtaagtgataaatctagaaaattgagttttgagtacctctt

SEQ ID NO: 790120 - DNA, 120 bp, Artificial Sequence
  ENSG00000268104_22 (sequence is synthesized)
ttcccatatacaatcttccttccttaggtaatttggaagaaaactatgacccatttaatttctattgtgtttcacaaaattaagtgttgttcattatactctctgaaatataggtttaat

SEQ ID NO: 790121 - DNA, 120 bp, Artificial Sequence
  ENSG00000268104_23 (sequence is synthesized)
ttcaaatagaatatggacttaaatgttaatgagaaaatggctttaatcaattctagcattttattactgtaatacagggctgatagagtgattttgtcttatatgagtaagttactactt

SEQ ID NO: 790122 - DNA, 120 bp, Artificial Sequence
  ENSG00000268104_24 (sequence is synthesized)
acaggtgataacttgcatactattggaagataaacttgtcaaacttgtcaagaatgagaaaagccaaattagaaaatcctatgtcctagtttccttaccaaggataattaaatatatcac

SEQ ID NO: 790123 - DNA, 120 bp, Artificial Sequence
  ENSG00000268104_25 (sequence is synthesized)
taagagctttatatattgattatatattgttgacaactggtttaagcatcatagcctatgatgataaacactgcctatatatgtaaatagcttttcatcaattcttaaatttcttaacct

SEQ ID NO: 790124 - DNA, 120 bp, Artificial Sequence
  ENSG00000268104_26 (sequence is synthesized)
aggcttcagggagcatatgaaaccaaaattatatggaacattttctgtgtgtacatgtacatgcatttttctagggagagagtccgtaggtttatcagaatatcaaggaaaactgtgacc

SEQ ID NO: 790125 - DNA, 120 bp, Artificial Sequence
  ENSG00000268104_27 (sequence is synthesized)
caaagaagtttaagaatcacatacactgctgctggctttttgtgcttggcaaatgagtgacaatagaagaaataatttttcttacacattttaaaacgttttctcttccttgtgattgaa

SEQ ID NO: 790126 - DNA, 120 bp, Artificial Sequence
  ENSG00000268104_28 (sequence is synthesized)
gatgaaaggagtaagaaattaaggcatttgtttaatttatactggtaacttatttaggggggaggggacatgaaggtaggtaaataggtaggcctctaattgaaccacctctctaagtta

SEQ ID NO: 790127 - DNA, 84 bp, Artificial Sequence
  ENSG00000268104_29 (sequence is synthesized)
taaataggtaggcctctaattgaaccacctctctaagttatgtacgtatatataagctgaaattgtgtttgacattctgagggg

SEQ ID NO: 790128 - DNA, 120 bp, Artificial Sequence
  ENSG00000268104_30 (sequence is synthesized)
tgcccggcccattctaagggttttctttgaagacaggtcaaatgctgttagtaagtttcaggagattgttaattcctcagttataccagattttataaaatatttgagaatagatggcta

SEQ ID NO: 790129 - DNA, 120 bp, Artificial Sequence
  ENSG00000268104_31 (sequence is synthesized)
acaagaggttagaaatacttttccttaattttaatccacagtatgttacatgcattctaccactacattttggtgctatttaaggtgtgcaattttctataggtgacttttgcaattcag

SEQ ID NO: 790130 - DNA, 120 bp, Artificial Sequence
  ENSG00000268104_32 (sequence is synthesized)
ggaagatttgggcatattaaatgaaagaatatctaattgggggaggtgtgaagggaaagaaattcttttcaaaagctgaccacaaagagtagttaaaagtttttgtcactatcttcacaa

SEQ ID NO: 790131 - DNA, 120 bp, Artificial Sequence
  ENSG00000268104_33 (sequence is synthesized)
gtgtgtaaagcacagatttcaacagagtgcttggcatattgtagggtgctcaatggtggtttttattattattactcagattccacagtggcaagaaacatcattctacataatggaaaa

SEQ ID NO: 790132 - DNA, 120 bp, Artificial Sequence
  ENSG00000268104_34 (sequence is synthesized)
catttacatcaaatcccacttactttaatgcgaacttggagataatttatggtattgtattgtaaaccattaatgaaaactttttcacagttgagtgaaattaaaatcactatatctcaa

SEQ ID NO: 790133 - DNA, 120 bp, Artificial Sequence
  ENSG00000268182_0 (sequence is synthesized)
agtcagtgcggcgccagctctgcagagcccagacagggtccggttggggaggtcctcaggttctgaatcttgtgcctggagaaccagagaggaccctggagcaggaggagaaagagaagc

SEQ ID NO: 790134 - DNA, 120 bp, Artificial Sequence
  ENSG00000268182_1 (sequence is synthesized)
ttgtctcagaagctccacctcctcctggggcaatgcagagtctcaggcctgagcagacacgggggctgctggagcctgagaggaccaagactctgctgcctcgggagagccgggcctggg

SEQ ID NO: 790135 - DNA, 120 bp, Artificial Sequence
  ENSG00000268182_2 (sequence is synthesized)
agaagcctcctcatcccgcctgcaccaaagactgggaggctgtggaggttggggcctccagccatgacagtgatgagaaagacctgtcttctcaagagactgggctttcccaggagtgga

SEQ ID NO: 790136 - DNA, 120 bp, Artificial Sequence
  ENSG00000268182_3 (sequence is synthesized)
gctcggtggaggaagatgacgaatcagagggctcccagggctttgtggagtggtcaaaagctccacaacaaacaaccatagtcttggtagtgtgcgtgctttttttgttcctggttttaa

SEQ ID NO: 790137 - DNA, 120 bp, Artificial Sequence
  ENSG00000268182_4 (sequence is synthesized)
cggggatgcctatgatgtttcacatttaactataatggtggctgttgttttaaaagtttaatttaatgaaatagatgccctatgtcatgttaaggaattgtgctagttaaaaatcaggaa

SEQ ID NO: 790138 - DNA, 120 bp, Artificial Sequence
  ENSG00000268182_5 (sequence is synthesized)
taggtgttgaatattttcaaatgcctttcaaacatcctttgagatgatttttaaaaaatttttggtgtgagttttcacatactttatttccatgaaatgaagacatcattgattgtaaaa

SEQ ID NO: 790139 - DNA, 120 bp, Artificial Sequence
  ENSG00000268182_6 (sequence is synthesized)
cattattttgtataccacggagaaagaaaagtgctaattaatcattaagatgccaccaactggaagatatctcctgactttgagaagatgaaaaaatgtgcaactgaagatcaatgaaat

SEQ ID NO: 790140 - DNA, 120 bp, Artificial Sequence
  ENSG00000268182_7 (sequence is synthesized)
ctggtacatttcctaacatcaaaccaactttgcattcttaaggttttggtgcaccagtcttttcatacactagattatatttattgatattttatgtaggattcttgcctctatcttcac

SEQ ID NO: 790141 - DNA, 120 bp, Artificial Sequence
  ENSG00000268182_8 (sequence is synthesized)
atgtgagattggtgctatctttgtgaagttttggtatcatggttaagcttgcatcatagaaagacttgggtaacttttaccttttctatgcttttcaatagtttctgtagcttaggaagt

SEQ ID NO: 790142 - DNA, 120 bp, Artificial Sequence
  ENSG00000268182_9 (sequence is synthesized)
atcagtcccttgacaccttacatgaattcattgttataaccaggtcatagagtcatggagagaacgtttcagctaattcttgggcagctttcttagttctttacaatgttatcagtttat

SEQ ID NO: 790143 - DNA, 66 bp, Artificial Sequence
  ENSG00000268182_10 (sequence is synthesized)
caatgttatcagtttattaatactttttacctcttgcatttattttggcgaattacagaggttttt

SEQ ID NO: 790144 - DNA, 79 bp, Artificial Sequence
  ENSG00000268182_11 (sequence is synthesized)
agagttcttttatcctctagaaaattcttcattccatagagctttttcatattattagcttaattatgcataatgtttt

SEQ ID NO: 790145 - DNA, 120 bp, Artificial Sequence
  ENSG00000268182_12 (sequence is synthesized)
ttttcatattattagcttaattatgcataatgttttataattaaaaatttctctttattttgttctatcccctgtttcctgtaaactgctgtttgtggtttactcgttattagatttgtc

SEQ ID NO: 790146 - DNA, 120 bp, Artificial Sequence
  ENSG00000268182_13 (sequence is synthesized)
aaaggtttatctagcttactattgtttttccaaagaaccaacattaggattcatttatatccattatttcttttatttgtaatttgtttttctttgatatgtattgcatttattttttat

SEQ ID NO: 790147 - DNA, 120 bp, Artificial Sequence
  ENSG00000268182_14 (sequence is synthesized)
tgtttttcttctttgtctcagtttttatactgaatacttgatttatattctctttatattttctataatagcatacttattaacgcaaatgtacttctggatatagcgttggccacatct

SEQ ID NO: 790148 - DNA, 120 bp, Artificial Sequence
  ENSG00000268182_15 (sequence is synthesized)
taacatttgattattcatttttgtttatgttgtctaaaaattacattgtagtgtgtctaaatattacattgtagtgtttctaaagagtgctttgaaactcagtgatttggtttatttttt

SEQ ID NO: 790149 - DNA, 120 bp, Artificial Sequence
  ENSG00000268182_16 (sequence is synthesized)
gtttaaaaatagttttgttttcttgttttactgcactgtgaacacagaatgtggcctataacacatctgcttccaaaactttttaaaaagcttttagtgtggcctagaacatgtccattt

SEQ ID NO: 790150 - DNA, 120 bp, Artificial Sequence
  ENSG00000268182_17 (sequence is synthesized)
tttgtaattgtttcacgaacatttaagatgaagatatcttctctgtctgtagaactgaaaactttatgtgcctgttagttaactcagtatcgtcaattatattgttcagattcatgtgtt

SEQ ID NO: 790151 - DNA, 120 bp, Artificial Sequence
  ENSG00000268182_18 (sequence is synthesized)
atctaattttggcctattatattcattaaaaaccaataaggttatgtgaaactttgttagtacaattgtttttgctaataaatttttataatctttgctttatgtactcaacagctgtgt

SEQ ID NO: 790152 - DNA, 120 bp, Artificial Sequence
  ENSG00000268182_19 (sequence is synthesized)
aattcgaggcatataagtgcagcattgttatgtccttgttaattaaataatatatgtaaaacaccatatgacaatggctggcagatagtaggcactcaataaatgttaattaaaacctga

SEQ ID NO: 790153 - DNA, 120 bp, Artificial Sequence
  ENSG00000268221_0 (sequence is synthesized)
cccactggccggtataaagcaccgtgaccctcaggtgacgcaccagggccggctgccgtcggggacagggctttccatagccatggcccagcagtggagcctccaaaggctcgcaggccg

SEQ ID NO: 790154 - DNA, 120 bp, Artificial Sequence
  ENSG00000268221_1 (sequence is synthesized)
ccatccgcaggacagctatgaggacagcacccagtccagcatcttcacctacaccaacagcaactccaccagaggccccttcgaaggcccgaattaccacatcgctcccagatgggtgta

SEQ ID NO: 790155 - DNA, 120 bp, Artificial Sequence
  ENSG00000268221_2 (sequence is synthesized)
ccacctcaccagtgtctggatgatctttgtggtcattgcatccgtcttcacaaatgggcttgtgctggcggccaccatgaagttcaagaagctgcgccacccgctgaactggatcctggt

SEQ ID NO: 790156 - DNA, 120 bp, Artificial Sequence
  ENSG00000268221_3 (sequence is synthesized)
gaacctggcggtcgctgacctggcagagaccgtcatcgccagcactatcagcgttgtgaaccaggtctatggctacttcgtgctgggccaccctatgtgtgtcctggagggctacaccgt

SEQ ID NO: 790157 - DNA, 120 bp, Artificial Sequence
  ENSG00000268221_4 (sequence is synthesized)
ctccctgtgtgggatcacaggtctctggtctctggccatcatttcctgggagagatggatggtggtctgcaagccctttggcaatgtgagatttgatgccaagctggccatcgtgggcat

SEQ ID NO: 790158 - DNA, 120 bp, Artificial Sequence
  ENSG00000268221_5 (sequence is synthesized)
tgccttctcctggatctgggctgctgtgtggacagccccgcccatctttggttggagcaggtactggccccacggcctgaagacttcatgcggcccagacgtgttcagcggcagctcgta

SEQ ID NO: 790159 - DNA, 120 bp, Artificial Sequence
  ENSG00000268221_6 (sequence is synthesized)
ccccggggtgcagtcttacatgattgtcctcatggtcacctgctgcatcaccccactcagcatcatcgtgctctgctacctccaagtgtggctggccatccgagcggtggcaaagcagca

SEQ ID NO: 790160 - DNA, 120 bp, Artificial Sequence
  ENSG00000268221_7 (sequence is synthesized)
gaaagagtctgaatccacccagaaggcagagaaggaagtgacgcgcatggtggtggtgatggtcctggcattctgcttctgctggggaccatacgccttcttcgcatgctttgctgctgc

SEQ ID NO: 790161 - DNA, 120 bp, Artificial Sequence
  ENSG00000268221_8 (sequence is synthesized)
cgttatctatgtctttatgaaccggcagtttcgaaactgcatcttgcagcttttcgggaagaaggttgacgatggctctgaactctccagcgcctccaaaacggaggtctcatctgtgtc

SEQ ID NO: 790162 - DNA, 120 bp, Artificial Sequence
  ENSG00000268221_9 (sequence is synthesized)
ctcggtatcgcctgcatgaggtctgcctcctacccatcccgcccaccggggctttggccacctctcctttccccctccttctccatccctgtaaaataaatgtaatttatctttgccaaa

SEQ ID NO: 790163 - DNA, 120 bp, Artificial Sequence
  ENSG00000268221_10 (sequence is synthesized)
accaacaaagtcacagaggctttcactgcagtgtgggaccacctgagcctctgcgtgtgcaggcactgggtctcgagagggtgcaagggggataaagaggagagagcgcttcatagactt

SEQ ID NO: 790164 - DNA, 120 bp, Artificial Sequence
  ENSG00000268221_11 (sequence is synthesized)
taagttttcccgagcctcatgtctaccgatggcgtgaaaggatcctggcaaaacagaagtgtgaggcaggtgggcgtctatatccatttcaccaggctggtggttacataatcggcaagc

SEQ ID NO: 790165 - DNA, 120 bp, Artificial Sequence
  ENSG00000268221_12 (sequence is synthesized)
aagagctgtggaggggcttgctggatgccctcagcacccaggaggagggagggagctagcaagctaaggcaggtggccctcctggccccttaaggtccatctgctggaggcccagagtcc

SEQ ID NO: 790166 - DNA, 120 bp, Artificial Sequence
  ENSG00000268221_13 (sequence is synthesized)
ttggagtacagtctacacctggaggggacccattcctgccagtctgtggcagggatggcgcgccacctctgccaggccaggaccccaagcccgatcagcatcagcatggtgcaggtgcac

SEQ ID NO: 790167 - DNA, 120 bp, Artificial Sequence
  ENSG00000268221_14 (sequence is synthesized)
aggcgtgagctgatcagtgacgaggggcaggcacacaaggtggagacaaagaccaagaggacggttgccagtgagaggcgcggactcaggaacttgaacaacatctgcgggggacggctt

SEQ ID NO: 790168 - DNA, 120 bp, Artificial Sequence
  ENSG00000268221_15 (sequence is synthesized)
tggaggtgctccgctgcctccagttgggtgacttgctgtagcatctccagcttggatattcggctcttgaaggtctccgtgatctcctgcaggagacgaaaatgcacgcaccagaagtca

SEQ ID NO: 790169 - DNA, 120 bp, Artificial Sequence; identical to SEQ ID NO: 529260
  ENSG00000268221_16 (sequence is synthesized)

SEQ ID NO: 790170 - DNA, 120 bp, Artificial Sequence
  ENSG00000268223_0 (sequence is synthesized)
catccagtgggccgaagcaggagggcaagagatttcatcgcaccactcagaacagtgcacagtttgaaacttaagagttgtttatttctggaattttccatctacgtcacaatacctgtg

SEQ ID NO: 790171 - DNA, 120 bp, Artificial Sequence
  ENSG00000268223_1 (sequence is synthesized)
ttattgccctcacttcatcccatcacgtagccatttgaccattttacatcatcataagaagcagtgtgtgtaaagaaggaagaatggagttctaaaaactcagagtcttcttaatcctgc

SEQ ID NO: 790172 - DNA, 120 bp, Artificial Sequence
  ENSG00000268223_2 (sequence is synthesized)
ttaagagaggtttatgatgctaaggactgtcaaagtgatcagagatgaatgaacaatcagagaaaaacaattccattcaagagagacacacagatcatagttttcctgagaagaactgtc

SEQ ID NO: 790173 - DNA, 120 bp, Artificial Sequence
  ENSG00000268223_3 (sequence is synthesized)
aaattggacagaaacaactgcaacaaatagagcggcagttaaaatgcttggcatttcgaaaccctggaccacaggtagcagactttaatcctgaaacaaggcagcagaaaaagaaagccc

SEQ ID NO: 790174 - DNA, 120 bp, Artificial Sequence
  ENSG00000268223_4 (sequence is synthesized)
ggatgtcaaagatgaatgaatatttttctaccaaatacaaaataatgaggaagtatgacaaaagtggcaggctcatctgtaatgacgctgatctgtgtgattgtctagagaagaactgcc

SEQ ID NO: 790175 - DNA, 120 bp, Artificial Sequence
  ENSG00000268223_5 (sequence is synthesized)
tgggctgcttctacccatgcccgaagtgtaactccaacaagtgtgggcccgagtgccgctgcaaccgacggtgggtttacgatgccatcgtcactgagtcaggagaggtcatcagcacgc

SEQ ID NO: 790176 - DNA, 120 bp, Artificial Sequence
  ENSG00000268223_6 (sequence is synthesized)
tgccgtttaatgttcctgactaggtgctcttgtatatggactgatttgtttcttcttcttacacatttaagttgacctctttcttttgggtgaattttagggcttgggggaaatatcgaa

SEQ ID NO: 790177 - DNA, 120 bp, Artificial Sequence
  ENSG00000268223_7 (sequence is synthesized)
aagaatgtaacaatggagggatcagcatttctcatcagcaccctcatctctactctgccttcaaattaaaactctcttccctctttgctgatatctgagaaaatgtagctttaagatttt

SEQ ID NO: 790178 - DNA, 120 bp, Artificial Sequence
  ENSG00000268223_8 (sequence is synthesized)
caaaactctgtagttgagagcttttcttacatagaacatagaatcttaaatttataatatctagttgtccttagaatcttatacatcactagctgtaaatcagaattgccatttggattt

SEQ ID NO: 790179 - DNA, 120 bp, Artificial Sequence
  ENSG00000268223_9 (sequence is synthesized)
tgaagaaaaactgtgactttgcactgtatacccatagcctcatttttttattgttcatgttttaataacattaaaatgaaatttagtaatacttggtagtatttttaatcattaaaattt

SEQ ID NO: 790180 - DNA, 120 bp, Artificial Sequence
  ENSG00000268223_10 (sequence is synthesized)
gtattgtacttgtaaaattgaaaagttaggaatttattatcctaaaagccaggagtttacatatttttgatttcagaagcagtatttcaggatttgtttttcatagagagaaaacaagtt

SEQ ID NO: 790181 - DNA, 120 bp, Artificial Sequence
  ENSG00000268223_11 (sequence is synthesized)
atacaaaaatgattttctgtatgtttgctaattgagtgtgttgataagcaattgactagataaatgatgtagtcttttcaactttgatacatcatcagagctataaaatattgaattcag

SEQ ID NO: 790182 - DNA, 120 bp, Artificial Sequence
  ENSG00000268223_12 (sequence is synthesized)
ctttctttgaattcatttttttatgacagtcttttttttaaccctaagtcaatggttctcattcatgagaattgcctagagaacttgtcaaaacatagatttttgcagccccacattcag

SEQ ID NO: 790183 - DNA, 120 bp, Artificial Sequence
  ENSG00000268223_13 (sequence is synthesized)
aatctgggacagggctcaaccatctgttccacgttcccaggtgatgttgatgctgctgatgtggggaccacactttgagaaccacttctctaaattattttagatacataatgtaaggaa

SEQ ID NO: 790184 - DNA, 120 bp, Artificial Sequence
  ENSG00000268223_14 (sequence is synthesized)
gtatttaaacctcattgactatgatactgccactgcacaaagctggaagtatttaaataaagtaacgtaataaaaatttaaaagtaaataaaagcatttaagttttaaaataaatttgaa

SEQ ID NO: 790185 - DNA, 120 bp, Artificial Sequence
  ENSG00000268235_0 (sequence is synthesized)
atgccgaagactgaggaaactgtgctccagaatgatcccagtgtagcagagaatggggcccctgagcctaaaacaccagggcagagccagaaaagcaagagtttctgtttagatgaccag

SEQ ID NO: 790186 - DNA, 120 bp, Artificial Sequence
  ENSG00000268235_1 (sequence is synthesized)
tctcctgatctgatagagacagttaatgaagtttccaagctgagcatttcacatgaaattgtagtaaaccaagatttctatgtggaagagaccattttgcctccaaacagtgtagaaggc

SEQ ID NO: 790187 - DNA, 120 bp, Artificial Sequence
  ENSG00000268235_2 (sequence is synthesized)
aggtttgcggaggcaatgtacaatgctttttggaaccatctgaaagaacagctattgagtactcctcctgacttcacttgtgcccttgaacttctaaaagatgttaaggagaccttgcta

SEQ ID NO: 790188 - DNA, 120 bp, Artificial Sequence
  ENSG00000268235_3 (sequence is synthesized)
tcactgctattaccatggcagaaccgcctaagaaatgagatagaagaagctctggacacagatctcctcaagcaggaagcagaacatggggccctggatgtccctcatctttctaactac

SEQ ID NO: 790189 - DNA, 120 bp, Artificial Sequence
  ENSG00000268235_4 (sequence is synthesized)
attctcaatttgatggctctgctatgtgcaccggttcgagatgaagcgatacagaaactagagaccataagagatccagtgcagttactgaggggcatcctccgtgttctgggcctaatg

SEQ ID NO: 790190 - DNA, 120 bp, Artificial Sequence
  ENSG00000268235_5 (sequence is synthesized)
aaaatggacatggtgaactataccatccagagctttcgaccctacctgcaggaacattccatccagtatgaacaagctaaattccaggaactccttgataaacagcccagtctcctcgat

SEQ ID NO: 790191 - DNA, 120 bp, Artificial Sequence
  ENSG00000268235_6 (sequence is synthesized)
cctagctcctcctgcagcatggtgtgttcacttccaagcggggcaggtaacaattcagagccccccagtccaacaatggtgctataccaaggttacctgaacctcctcctctgggatctt

SEQ ID NO: 790192 - DNA, 120 bp, Artificial Sequence
  ENSG00000268235_7 (sequence is synthesized)
gaaaacgtagaattcccagagactctgctgatggacagaatccggctccaggaactggcattccagttgcaccagttaactgtcctggcctcagtcttgctagtggccagaagcttctct

SEQ ID NO: 790193 - DNA, 120 bp, Artificial Sequence
  ENSG00000268235_8 (sequence is synthesized)
ggtgaagttttattcagatcacctgaatttgtggatagactgaaatgcaccaccaaggccctaactgaggaatttatctccaggcctgaagagactatgctgagtgtgagtgaacaggtg

SEQ ID NO: 790194 - DNA, 120 bp, Artificial Sequence
  ENSG00000268235_9 (sequence is synthesized)
tctcaggaagtccatcaaggccttaaggacatgggcctcactactctgagcagtgaaaacacagcatctcttctaggccaactccagaacatcaccaagaaagagaactgcattcgtagc

SEQ ID NO: 790195 - DNA, 120 bp, Artificial Sequence
  ENSG00000268235_10 (sequence is synthesized)
attgttgatcagtggatccgtttttttctcaaatgctgtttgcttcatggcatgcaggagtctctgctacactttcctggaggcctcattctcattgaaaaggagttggcagaactgggc

SEQ ID NO: 790196 - DNA, 120 bp, Artificial Sequence
  ENSG00000268235_11 (sequence is synthesized)
tggaagtttctcaatctgatgcatcataatcagcaggtatttggcccatactatgctgagatcctaaaacacatcatccatccagctcaagcacaagaaacagatgtggagcctaactga

SEQ ID NO: 790197 - DNA, 120 bp, Artificial Sequence
  ENSG00000268235_12 (sequence is synthesized)
agcagagtcatttttcacaaaacgaaatctttccagaagatcacgaataagagagatcaaagctaggcagcttgagttgaagtagagctggaagaaggagttttgaggactgtttcaaaa

SEQ ID NO: 790198 - DNA, 120 bp, Artificial Sequence
  ENSG00000268235_13 (sequence is synthesized)
ccactggactagatgatctctaaaggttcctgtattattttcttcttttcttatggctgttgtaacaaattaccccctgaactttgtggcttaaaataacatgcatgtattatcttatca

SEQ ID NO: 790199 - DNA, 120 bp, Artificial Sequence; identical to SEQ ID NO: 760597
  ENSG00000268235_14 (sequence is synthesized)

SEQ ID NO: 790200 - DNA, 120 bp, Artificial Sequence
  ENSG00000268320_0 (sequence is synthesized)
ggtgctgtccggtgaggcataaaatcccgggattctggctggaggcagctcctgagactgccggcatgaaggggagccgtgccctcctgctggtggccctcaccctgttctgcatctgcc

SEQ ID NO: 790201 - DNA, 120 bp, Artificial Sequence
  ENSG00000268320_1 (sequence is synthesized)
tgccaaggcagcaatgactgaactcaagtcctgcagagatggcctgcagccaatgcacaaggcggagctggtcaagctgctggtgcaagtgctgggcagtcaggacggtgcctaagtgga

SEQ ID NO: 790202 - DNA, 120 bp, Artificial Sequence; identical to SEQ ID NO: 689426
  ENSG00000268320_2 (sequence is synthesized)

SEQ ID NO: 790203 - DNA, 120 bp, Artificial Sequence; identical to SEQ ID NO: 629112
  ENSG00000268350_0 (sequence is synthesized)

SEQ ID NO: 790204 - DNA, 120 bp, Artificial Sequence; identical to SEQ ID NO: 629113
  ENSG00000268350_1 (sequence is synthesized)

SEQ ID NO: 790205 - DNA, 120 bp, Artificial Sequence; identical to SEQ ID NO: 629114
  ENSG00000268350_2 (sequence is synthesized)

SEQ ID NO: 790206 - DNA, 120 bp, Artificial Sequence; identical to SEQ ID NO: 629115
  ENSG00000268350_3 (sequence is synthesized)

SEQ ID NO: 790207 - DNA, 120 bp, Artificial Sequence; identical to SEQ ID NO: 629116
  ENSG00000268350_4 (sequence is synthesized)

SEQ ID NO: 790208 - DNA, 120 bp, Artificial Sequence; identical to SEQ ID NO: 629117
  ENSG00000268350_5 (sequence is synthesized)

SEQ ID NO: 790209 - DNA, 120 bp, Artificial Sequence; identical to SEQ ID NO: 629118
  ENSG00000268350_6 (sequence is synthesized)

SEQ ID NO: 790210 - DNA, 120 bp, Artificial Sequence; identical to SEQ ID NO: 629119
  ENSG00000268350_7 (sequence is synthesized)

SEQ ID NO: 790211 - DNA, 120 bp, Artificial Sequence; identical to SEQ ID NO: 629120
  ENSG00000268350_8 (sequence is synthesized)

SEQ ID NO: 790212 - DNA, 120 bp, Artificial Sequence
  ENSG00000268350_9 (sequence is synthesized)
ttacatttcaaatcgtagttcagaattcgtgaaatacccaaattaaatctctacgtggcagtaatccattttctttccttggtgtgtggttggaagattaatttgagataagtgttcagt

SEQ ID NO: 790213 - DNA, 120 bp, Artificial Sequence
  ENSG00000268350_10 (sequence is synthesized)
tctgggctgggcagtcgtgccgggcacgggaaattcaggttctttaagggaaaggcctgatgtgctaagacgaaatctataccgtgtgtagccgcttatgagaatatgaaactaaggaga

SEQ ID NO: 790214 - DNA, 120 bp, Artificial Sequence
  ENSG00000268350_11 (sequence is synthesized)
gccacaggtgaaaggtgtagcagtcactcggcctacacccacagcatcgaccttgtgaacccagcgacctgactgccttgggagaattgaagcgaatgagagtggggagtgtgagaggtg

SEQ ID NO: 790215 - DNA, 120 bp, Artificial Sequence
  ENSG00000268350_12 (sequence is synthesized)
ctgcccgcacacattcctcgccaccttcttggtgtctgagaacctccagcttcacctccttttctggacccgagggcctggcggagcttccagctgggaccagacctccatggatccact

SEQ ID NO: 790216 - DNA, 120 bp, Artificial Sequence
  ENSG00000268350_13 (sequence is synthesized)
ccagaaacggaatccagcatcgccttccaaatcttccccgatgacagctgcagagacttcccaggaaggtccagcgccctctcagccttcgtactcagaacagccgatgatgggcctcag

SEQ ID NO: 790217 - DNA, 120 bp, Artificial Sequence
  ENSG00000268350_14 (sequence is synthesized)
taacctgagccccggtcctggccccagccaggccgtgcctctcccagaggggctgctccgccagcggtacagagaggagaagaccctggaagagcggcggtgggagaggctggagttcct

SEQ ID NO: 790218 - DNA, 120 bp, Artificial Sequence
  ENSG00000268350_15 (sequence is synthesized)
tcagaggaagaaagcattcctgcggcatgtgaggaggagacaccgcgatcacatggccccctatgctgttgggagggaagccagaatctccccattaggtgacagaagtcagaatcgatt

SEQ ID NO: 790219 - DNA, 120 bp, Artificial Sequence
  ENSG00000268350_16 (sequence is synthesized)
ccgatgtgaatgtcgatactgccagagccacaggccgaatctttctgggatccctggggagagtaacagggccccacatccctcctcctgggagacgctggtgcagggcctcagtggctt

SEQ ID NO: 790220 - DNA, 120 bp, Artificial Sequence
  ENSG00000268350_17 (sequence is synthesized)
gactctcagcctaggcaccaaccagcccgggcctctgcctgaagcggcactccagccacaggagacagaggagaagcgccagcgagagaggcagcaggagagcaaaataatgtttcagag

SEQ ID NO: 790221 - DNA, 120 bp, Artificial Sequence
  ENSG00000268350_18 (sequence is synthesized)
gctgctcaagcagtggttagaggaaaactgagacgtgcacccccatgggatggagacccgaagggactcagacggagccgccgtgttggcagcgcctgggtgtgggcccattttggggac

SEQ ID NO: 790222 - DNA, 120 bp, Artificial Sequence
  ENSG00000268350_19 (sequence is synthesized)
caaacagcaagctgtggtcggatgagtgccaggacctgtgtaccgggacacgtgggagtcctcccagcatgatgcttgactgacccgaggaaggtcctcatgtttcgtgcctgtcattct

SEQ ID NO: 790223 - DNA, 120 bp, Artificial Sequence
  ENSG00000268350_20 (sequence is synthesized)
cggatggctgtgaggcattccttggcaagggacgctgcgtaccagcggtcctcaccgcatctcacatggctcctgtgatgcatgttgtcgctttcccacccgggatctccatctctcttc

SEQ ID NO: 790224 - DNA, 120 bp, Artificial Sequence
  ENSG00000268350_21 (sequence is synthesized)
ccttcctgctgtcagtaagagatcacatgtctgtgtagtgtgaatgccttgtcgctgtcctgtgcttttgcaccattgagttgactgcctctgagaagcagcactaggcctgttgaaatg

SEQ ID NO: 790225 - DNA, 120 bp, Artificial Sequence
  ENSG00000268350_22 (sequence is synthesized)
caatgtgctgccctgagatccagtttcaagaatgggcaggtaaacgcagtgtgggaaaggaatgtggaatgagaacttggtggttcaccgctgtactatttgtgtaaatgtttacgtatg

SEQ ID NO: 790226 - DNA, 120 bp, Artificial Sequence
  ENSG00000268350_23 (sequence is synthesized)
tgataagctacatgtatgtaaatgttgcaatacccctaacagtcgagtagtagtctcccttacaggaatttttgacggggttcctcatcatcaataccaaataaatatatgtaggaatgg

SEQ ID NO: 790227 - DNA, 120 bp, Artificial Sequence
  ENSG00000268350_24 (sequence is synthesized)
acaggcacgacgattgcggagctgaagttcaggcagcgggagcgaggagggtgtgtggcttttgatacagtagagttctttggcctactcaccaactgacagtcccaaaggggctggaga

SEQ ID NO: 790228 - DNA, 120 bp, Artificial Sequence
  ENSG00000268350_25 (sequence is synthesized)
tgccaccccggcaaagttcgccctagtcatttgcttcacgtgaaaggtgtagcagtcactcggcctacacccacagcatcgaccttgtgaacccagcgacctgactgccttggtctgggt

SEQ ID NO: 790229 - DNA, 120 bp, Artificial Sequence
  ENSG00000268350_26 (sequence is synthesized)
cacctcagcctccccagtagctgggaccatagctgtgcagcatcatgcctggctaattttttaagttttttgttgagatggtggtctcgccctgttgctcaggctggcctcaaactcctg

SEQ ID NO: 790230 - DNA, 81 bp, Artificial Sequence
  ENSG00000268350_27 (sequence is synthesized)
atgcctggctaattttttaagttttttgttgagatggtggtctcgccctgttgctcaggctggcctcaaactcctgggctg

SEQ ID NO: 790231 - DNA, 120 bp, Artificial Sequence
  ENSG00000268350_28 (sequence is synthesized)
tttattcctcagattaagacacgtccttgggatggggctgcattggataattcaccgaaggcaccgctgaatggagtgggccctcagtaaatacctggaggaatgtgacctggccagtga

SEQ ID NO: 790232 - DNA, 120 bp, Artificial Sequence; identical to SEQ ID NO: 629121
  ENSG00000268350_29 (sequence is synthesized)

SEQ ID NO: 790233 - DNA, 120 bp, Artificial Sequence
  ENSG00000268350_30 (sequence is synthesized)
taaagagagattggtgtcacaaatggtggagtgacttttgtatttcagcagacctcagtgagaaatggtcaccaccactccctagatgtgtgaccttgagtgagttgcttaacctctctg

SEQ ID NO: 790234 - DNA, 120 bp, Artificial Sequence
  ENSG00000268350_31 (sequence is synthesized)
atcctgttacctcatctgcaactggggatgagaatatatatcatagcatgccctgggagaagctgttcctgaccacctgggctatggtgattttgacttcctctgtgtcagaagtacccc

SEQ ID NO: 790235 - DNA, 120 bp, Artificial Sequence
  ENSG00000268350_32 (sequence is synthesized)
ggacactagcacaccagcaggaagctgaacagaaggctggaggtgccacggtgacaaggacgggatcctgtcaggccaggtgaaaggtgtagcagtcactcggcctacacccacagcatc

SEQ ID NO: 790236 - DNA, 120 bp, Artificial Sequence
  ENSG00000268350_33 (sequence is synthesized)
ggcgcttggacggcgggaaccggctccggagcgagaacgcgcccgcttatgagaatatgaaactaaggagagccacaggtgaaaggtgtagcagtcactcggcctacacccacagcatcg

SEQ ID NO: 790237 - DNA, 120 bp, Artificial Sequence
  ENSG00000268350_34 (sequence is synthesized)
gcagaattcggggctagggaagggaggggacacaggtagatgccatctgtggtcagggggaggtgtgggcccgagaccgtctcagctgaaatgtaggagtaatgggcacagaccattcaa

SEQ ID NO: 790238 - DNA, 120 bp, Artificial Sequence
  ENSG00000268350_35 (sequence is synthesized)
gagaaatgtgtgttgggctgaagaaagtagaaactacctccagagtatctcctccatctctaagacatgcacggtttaattctgttattttgtgaggctctttgcaccatgacacaagca

SEQ ID NO: 790239 - DNA, 120 bp, Artificial Sequence
  ENSG00000268350_36 (sequence is synthesized)
gatggtcttaacccttcaattacgagcgggcggcgctgcgtttccagggcagaggaaacgaggcgccgcgttggcgcttggacggcgggaaccggctccggagcgagaacgcgcgtgaaa

SEQ ID NO: 790240 - DNA, 120 bp, Artificial Sequence
  ENSG00000268350_37 (sequence is synthesized)
agtttgtgacaggcacgacgattgcggagctgaagttcaggcagcgggagcgaggaggctctcccagaacacatgcatcaaacccgggatcccctgtgccctggtgggatggcaggagtc

SEQ ID NO: 790241 - DNA, 120 bp, Artificial Sequence
  ENSG00000268350_38 (sequence is synthesized)
atagagggctccatcatacaggggagaacgagaccctgaatggtctcacagtctagtgggggaggcatatgtgttccttcaggcaacaaatatgtatgaaagtcttctacgtgccaggca

SEQ ID NO: 790242 - DNA, 120 bp, Artificial Sequence; identical to SEQ ID NO: 629125
  ENSG00000268350_39 (sequence is synthesized)

SEQ ID NO: 790243 - DNA, 120 bp, Artificial Sequence; identical to SEQ ID NO: 629126
  ENSG00000268350_40 (sequence is synthesized)

SEQ ID NO: 790244 - DNA, 120 bp, Artificial Sequence
  ENSG00000268350_41 (sequence is synthesized)
tgtcaattgtattttacaactcctccatttcctaccctggaagaaatctctccaccagtacggctgccatttgaggcatattcccatacaaactggacctctgacgactctaaaaaagga

SEQ ID NO: 790245 - DNA, 120 bp, Artificial Sequence
  ENSG00000268350_42 (sequence is synthesized)
acacaccctacccaggatacgcaccaaaggagatgaacttgtttttatccaaaggaagtgtttgtttgtaatcataaatttgtgagcctaagctactgcaaaggaaactggccaggttat

SEQ ID NO: 790246 - DNA, 120 bp, Artificial Sequence
  ENSG00000268350_43 (sequence is synthesized)
tagcccaaatgaaggcagtgggtaacttgggtttagccccaacaccagccgcacctaggaaagttacatgataaattgtgacaattgtttttttcccccccggagaataccaaagcaatt

SEQ ID NO: 790247 - DNA, 120 bp, Artificial Sequence
  ENSG00000268350_44 (sequence is synthesized)
catactttgttgtgggttcactgcctttttttttttaaccagccaattggatagtcatgttatcttacccatctctttctccctttctgattatacatttgcatagagttatgacaactt

SEQ ID NO: 790248 - DNA, 120 bp, Artificial Sequence
  ENSG00000268350_45 (sequence is synthesized)
accaccttttcagaagtagagtaaaactctcactcctagacagaacaatccattgtcaggagtgagaacatccctctgcaaaacagccattctctccaggaaaacaacaggaactgtctg

SEQ ID NO: 790249 - DNA, 120 bp, Artificial Sequence
  ENSG00000268350_46 (sequence is synthesized)
aagaagctaaaagacttggaatggttttagatgtgttcgcccccaacagggacaggtctcaggttgcaggcttttctggcaatccagctctgtgggttactgaagaagctcaacccaatt

SEQ ID NO: 790250 - DNA, 120 bp, Artificial Sequence
  ENSG00000268350_47 (sequence is synthesized)
cctgagttttccatgctctcattcatgaagccaaccaagtcaccagtgatgtcacgaaaaatattaacacaatcactcaagaaatgcaagaactccagaggctgttgtccatcatcaact

SEQ ID NO: 790251 - DNA, 120 bp, Artificial Sequence
  ENSG00000268350_48 (sequence is synthesized)
ggcattagccatcatccgggcagatctaggagatggatgcacttgtgcagttgtcaatgacgactgctgtacatatatcccccaacacctttctgatgtctttttgatgaattgccacct

SEQ ID NO: 790252 - DNA, 120 bp, Artificial Sequence
  ENSG00000268350_49 (sequence is synthesized)
agtcctgatctctgggacctctgggttatcattgggtggctgagaatatgaccttttcccttgaatattcccaacagggatacagtcctggggatgcactgcttttccaagatatagtga

SEQ ID NO: 790253 - DNA, 120 bp, Artificial Sequence
  ENSG00000268350_50 (sequence is synthesized)
taatttttctttttattctcataggaatactcctcatgaagtctatccagtcacatctagttaagaccagcagcactctcctgtccaaatggatgacccatgttacgactaaggaacaga

SEQ ID NO: 790254 - DNA, 120 bp, Artificial Sequence
  ENSG00000268350_51 (sequence is synthesized)
agaccaaataacaaactgctcctcagatccattatggaggccttcttggctcaattcctgaatatgatatatccttataattttgttttctctccaaaaaagaatatgctggcaatgaaa

SEQ ID NO: 790255 - DNA, 120 bp, Artificial Sequence; identical to SEQ ID NO: 629122
  ENSG00000268350_52 (sequence is synthesized)

SEQ ID NO: 790256 - DNA, 120 bp, Artificial Sequence; identical to SEQ ID NO: 629123
  ENSG00000268350_53 (sequence is synthesized)

SEQ ID NO: 790257 - DNA, 120 bp, Artificial Sequence; identical to SEQ ID NO: 774378
  ENSG00000268447_0 (sequence is synthesized)

SEQ ID NO: 790258 - DNA, 120 bp, Artificial Sequence; identical to SEQ ID NO: 774379
  ENSG00000268447_1 (sequence is synthesized)

SEQ ID NO: 790259 - DNA, 120 bp, Artificial Sequence; identical to SEQ ID NO: 774380
  ENSG00000268447_2 (sequence is synthesized)

SEQ ID NO: 790260 - DNA, 120 bp, Artificial Sequence; identical to SEQ ID NO: 774381
  ENSG00000268447_3 (sequence is synthesized)

SEQ ID NO: 790261 - DNA, 120 bp, Artificial Sequence; identical to SEQ ID NO: 774382
  ENSG00000268447_4 (sequence is synthesized)

SEQ ID NO: 790262 - DNA, 90 bp, Artificial Sequence
  ENSG00000268447_5 (sequence is synthesized)
aagatgacgagtaactcccctcagggatacgacacatgcccatgatgagaagcagaacgtggtgacctttcacgaacatgggcatggctg

SEQ ID NO: 790263 - DNA, 120 bp, Artificial Sequence
  ENSG00000268447_6 (sequence is synthesized)
cttagtgtgccaagagttcgatgttagcgtttacgttgtattttcttacactgtgtcattctgttagatactaacattttcattgatgagcaagacatacttaatgcatattttggtttg

SEQ ID NO: 790264 - DNA, 120 bp, Artificial Sequence
  ENSG00000268447_7 (sequence is synthesized)
tttgtgtatccatgcacctaccttagaaaacaagtattgtcggttacctctgcatggaacagcattaccctcctctctccccagatgtgactactgagggcagttctgagtgtttaattt

SEQ ID NO: 790265 - DNA, 79 bp, Artificial Sequence
  ENSG00000268447_8 (sequence is synthesized)
ccagatgtgactactgagggcagttctgagtgtttaatttcagattttttcctctgcatttacacacacacgcacacaa

SEQ ID NO: 790266 - DNA, 120 bp, Artificial Sequence
  ENSG00000268447_9 (sequence is synthesized)
tttcccattgccatgcgtcctggtcaagctcccctcactctgtttcctggtcagcatgtactcccctcatccgattcccctgtagcagtcactgacagttaataaacctttgcaaacgtt

SEQ ID NO: 790267 - DNA, 120 bp, Artificial Sequence
  ENSG00000268447_10 (sequence is synthesized)
cccggctccagggacggaaccttctcaaagtgggggtggagactctaattttcccgcctaaagcatcccctgggattggctactttaagttcagagtacgcatgctctgactttctctct

SEQ ID NO: 790268 - DNA, 120 bp, Artificial Sequence
  ENSG00000268447_11 (sequence is synthesized)
gaggaagatgacgagtaactcccctcggggatacgtcacatgcccatgatgagaagtagaacgtggtgacctttcacgaacataggcatggctgcggacccctcgtcatcaggtgcatag

SEQ ID NO: 790269 - DNA, 120 bp, Artificial Sequence; identical to SEQ ID NO: 687113
  ENSG00000268447_12 (sequence is synthesized)

SEQ ID NO: 790270 - DNA, 120 bp, Artificial Sequence; identical to SEQ ID NO: 687114
  ENSG00000268447_13 (sequence is synthesized)

SEQ ID NO: 790271 - DNA, 89 bp, Artificial Sequence; identical to SEQ ID NO: 687115
  ENSG00000268447_14 (sequence is synthesized)

SEQ ID NO: 790272 - DNA, 120 bp, Artificial Sequence; identical to SEQ ID NO: 687116
  ENSG00000268447_15 (sequence is synthesized)

SEQ ID NO: 790273 - DNA, 120 bp, Artificial Sequence
  ENSG00000268606_0 (sequence is synthesized)
attggaggtcagaggacagcgagattctcgccctgagcaacggcctgacgtcggcggagggaagcaggcgcaggctccgtgaggaggcaagatctcagggagttgatgaccttgttttca

SEQ ID NO: 790274 - DNA, 120 bp, Artificial Sequence
  ENSG00000268606_1 (sequence is synthesized)
gaaggtgactcaggtcaacacaggggcccccatctggtcgacagatgcagtggttctaggatctgccaagcatccaggtggagagcctgaggttctgagggggacaggctgacaagtagg

SEQ ID NO: 790275 - DNA, 120 bp, Artificial Sequence
  ENSG00000268606_2 (sequence is synthesized)
acccgaggcactggaggagcattgaaggagaagatctgcctgtgggtcttcattgcccagctcctgcccgcactcctgcctgctgccctgaccagagtcatcatgcctcttgagcagagg

SEQ ID NO: 790276 - DNA, 120 bp, Artificial Sequence
  ENSG00000268606_3 (sequence is synthesized)
agtcagcactgcaagcctgaagaaggccttgaggcccgaggagaggccctgggcctggtgggtgcgcaggctcctgctactgaggagcagcagaccgcttcttcctcttctactctagtg

SEQ ID NO: 790277 - DNA, 120 bp, Artificial Sequence
  ENSG00000268606_4 (sequence is synthesized)
gaagttaccctgggggaggtgcctgctgccgactcaccgagtcctccccacagtcctcagggagcctccagcttctcgactaccatcaactacactctttggagacaatccgatgagggc

SEQ ID NO: 790278 - DNA, 120 bp, Artificial Sequence
  ENSG00000268606_5 (sequence is synthesized)
tccagcaaccaagaagaggaggggccaagaatgtttcccgacctggagtccgagttccaagcagcaatcagtaggaagatggttgagttggttcattttctgctcctcaagtatcgagcc

SEQ ID NO: 790279 - DNA, 120 bp, Artificial Sequence
  ENSG00000268606_6 (sequence is synthesized)
agggagccggtcacaaaggcagaaatgctggagagtgtcctcagaaattgccaggacttctttcccgtgatcttcagcaaagcctccgagtacttgcagctggtctttggcatcgaggtg

SEQ ID NO: 790280 - DNA, 120 bp, Artificial Sequence
  ENSG00000268606_7 (sequence is synthesized)
atccttgtcacctgcctgggcctctcctacgatggcctgctgggcgacaatcaggtcatgcccaagacaggcctcctgataatcgtcctggccataatcgcaatagagggcgactgtgcc

SEQ ID NO: 790281 - DNA, 120 bp, Artificial Sequence
  ENSG00000268606_8 (sequence is synthesized)
cctgaggagaaaatctgggaggagctgagtatgttggaggtgtttgaggggagggaggacagtgtcttcgcacatcccaggaagctgctcatgcaagatctggtgcaggaaaactacctg

SEQ ID NO: 790282 - DNA, 120 bp, Artificial Sequence
  ENSG00000268606_9 (sequence is synthesized)
gagtaccggcaggtgcccggcagtgatcctgcatgctacgagttcctgtggggtccaagggccctcattgaaaccagctatgtgaaagtcctgcaccatacactaaagatcggtggagaa

SEQ ID NO: 790283 - DNA, 120 bp, Artificial Sequence
  ENSG00000268606_10 (sequence is synthesized)
cctcacatttcctacccacccctgcatgaacgggctttgagagagggagaagagtgagtctcagcacatgttgcagccagggccagtgggagggggtctgggccagtgcaccttccaggg

SEQ ID NO: 790284 - DNA, 120 bp, Artificial Sequence
  ENSG00000268606_11 (sequence is synthesized)
ccccatccattagcttccactgcctcgtgtgatatgaggcccattcctgcctctttgaagagagcagtcagcattcttagcagtgagtttctgttctgttggatgactttgagatttatc

SEQ ID NO: 790285 - DNA, 120 bp, Artificial Sequence
  ENSG00000268606_12 (sequence is synthesized)
tttgtttcctgttggaattgttcaaatgttccttttaacaaatggttggatgaacttcagcatccaagtttatgaatgacagtagtcacacatagtgctgtttatatagtttaggggtaa

SEQ ID NO: 790286 - DNA, 120 bp, Artificial Sequence
  ENSG00000268606_13 (sequence is synthesized)
gagtcctgttttttattcagattgggaaatccattccattttgtgagttgtcacataataacagcagtggaatatgtatttgcctatattgtgaacgaattagcagtaaaatacatgata

SEQ ID NO: 790287 - DNA, 120 bp, Artificial Sequence
  ENSG00000268606_14 (sequence is synthesized)
caaggaactcaaaagatagttaattcttgccttatacctcagtctattatgtaaaattaaaaatatgtgtatgtttttgcttctttgagaatgcaaaagaaattaaatctgaataaataa

SEQ ID NO: 790288 - DNA, 120 bp, Artificial Sequence
  ENSG00000268606_15 (sequence is synthesized)
ttgcgcattggaggtcagaggacagcgagattctcgccctgagcaacggcctgacgtcggcggagggaagcaggcgcaggctccgtgaggaggcaaggcctgtgggtcttcattgcccag

SEQ ID NO: 790289 - DNA, 120 bp, Artificial Sequence
  ENSG00000268606_16 (sequence is synthesized)
ttgcgcattggaggtcagaggacagcgagattctcgccctgagcaacggcctgacgtcggcggagggaagcaggcgcaggctccgtgaggaggcaaggtaagacgccgagggaggactga

SEQ ID NO: 790290 - DNA, 120 bp, Artificial Sequence
  ENSG00000268606_17 (sequence is synthesized)
ggcgggcctcaccccagacagagggcccccaataatccagcgctgcctctgctgccgggcctggaccaccctgcaggggaagacttctcaggctgagtcgccaccacctcaccccgccac

SEQ ID NO: 790291 - DNA, 120 bp, Artificial Sequence
  ENSG00000268606_18 (sequence is synthesized)
ttgcgcattggaggtcagaggacagcgagattctcgccctgagcaacggcctgacgtcggcggagggaagcaggcgcaggctccgtgaggaggcaaggttctgagggggacaggctgaca

SEQ ID NO: 790292 - DNA, 120 bp, Artificial Sequence
  ENSG00000268606_19 (sequence is synthesized)
ttgcgcattggaggtcagaggacagcgagattctcgccctgagcaacggcctgacgtcggcggagggaagcaggcgcaggctccgtgaggaggcaagggaactctggcgtaagagctttg

SEQ ID NO: 790293 - DNA, 120 bp, Artificial Sequence
  ENSG00000268606_20 (sequence is synthesized)
tgtgaccagggcagggctggttagaagtgctcagggcccagactcagccaggaatcaagaatccgggctttgcccctgcaatcaacccacggaagctccgggaatggcggccaagcacgc

SEQ ID NO: 790294 - DNA, 120 bp, Artificial Sequence
  ENSG00000268606_21 (sequence is synthesized)
ttgcgcattggaggtcagaggacagcgagattctcgccctgagcaacggcctgacgtcggcggagggaagcaggcgcaggctccgtgaggaggcaagaatccgggctttgcccctgcaat

SEQ ID NO: 790295 - DNA, 120 bp, Artificial Sequence
  ENSG00000268606_22 (sequence is synthesized)
gtggagagcctgaggaatcaggagctccaggaaccaggcagtgaggccttggtctgagtcagtgtcctcaggtcacagagcagaggggacgcagacagtgccaacactgaaggttctgag

SEQ ID NO: 790296 - DNA, 120 bp, Artificial Sequence
  ENSG00000268629_0 (sequence is synthesized)
gggagagagatcttcctctctcttcgggcgtgttaagacagcggggttggcctgtacttcctctggccctggctgaagagggctagtgaaaccgttaaacccctaggcgatcatggcctt

SEQ ID NO: 790297 - DNA, 120 bp, Artificial Sequence
  ENSG00000268629_1 (sequence is synthesized)
gagacctgaggaccccagtagcgggttccggcatagcaacgtggtggccttcatcaacgagaaaatggccaggcacacgaaaggccccgagttctatcttgagaatatatccttatcctg

SEQ ID NO: 790298 - DNA, 120 bp, Artificial Sequence
  ENSG00000268629_2 (sequence is synthesized)
ggagaaggtggaagacaagctgagggccatactggaggacagcgaggtgcccagtgaggtcaaagaggcctgcacctggggcagcctggccttgggagtgcgctttgcccacaggcaggc

SEQ ID NO: 790299 - DNA, 120 bp, Artificial Sequence
  ENSG00000268629_3 (sequence is synthesized)
acagctacaaaggcacagggtgcggtggctgcacggcttcgccaaactgcacaaatcagccgcacaggccttggcatcagacctgaagaagctcagggagcagcaggagacggaacgcaa

SEQ ID NO: 790300 - DNA, 120 bp, Artificial Sequence
  ENSG00000268629_4 (sequence is synthesized)
ggaggcggcctcccggctaagaatggcccagaccagcctcgtggaggtgcagaaagagagagacaaggagctggtgtctccccatgagtgggagcagggggcagggtggccaggcctggc

SEQ ID NO: 790301 - DNA, 120 bp, Artificial Sequence
  ENSG00000268629_5 (sequence is synthesized)
ggctgctgctggtgctgctggaggaaaaggagcagaagaagagcagagggatgtggaggttgtggctgcccctgtggaggccatggctccccctgtggaggctggggctgcccccatgga

SEQ ID NO: 790302 - DNA, 120 bp, Artificial Sequence
  ENSG00000268629_6 (sequence is synthesized)
gacccagttcccccacgtggaggccagggctgcctccatggagaccacagagaagctggagagaatcctcctgcagctccttggagatgctgatcaggaaaagtacacctattgggggca

SEQ ID NO: 790303 - DNA, 120 bp, Artificial Sequence
  ENSG00000268629_7 (sequence is synthesized)
gaaggagggagatctccggtcggtcgaaacagccacatcttatttctctggaaccacgaacccctggtccagagcctcatcagaacctcttcctgtccagctccctgcctcatactcata

SEQ ID NO: 790304 - DNA, 120 bp, Artificial Sequence
  ENSG00000268629_8 (sequence is synthesized)
ctcatactcaagccctttttcctccttctcagacatacccactatatcccctccacaagcaacagtcacagcaccagttccgcctcagctgccttccgactgggaggcctttgatactag

SEQ ID NO: 790305 - DNA, 120 bp, Artificial Sequence
  ENSG00000268629_9 (sequence is synthesized)
cctgtggtctgatggggggccccacagaatagaccatcaggagcacccaagagacaggagatactccgaacctcatcagcaaagacctccagtatatcgcaggccaggggactgggactg

SEQ ID NO: 790306 - DNA, 120 bp, Artificial Sequence
  ENSG00000268629_10 (sequence is synthesized)
cccttggtgtaacgctgtgaatttttcacggagggatacttgcttcgactgtgggaagggaatctggctgcaaaaacctcattgagtgcagaaatgcaaaatagaaccgaagcatgtata

SEQ ID NO: 790307 - DNA, 120 bp, Artificial Sequence
  ENSG00000268651_0 (sequence is synthesized)
ctgcagcctctctgcctccgcatcctcgtgggccctgaccttctctctgagagccgggcagaggctccggagccatgcaggccgaaggccggggcacagggggttcgacgggcgatgctg

SEQ ID NO: 790308 - DNA, 120 bp, Artificial Sequence
  ENSG00000268651_1 (sequence is synthesized)
gctgatggcccaggaggccctggcattcctgatggcccagggggcaatgctggcggcccaggagaggcgggtgccacgggcggcagaggtccccggggcgcaggggcagcaagggcctcg

SEQ ID NO: 790309 - DNA, 120 bp, Artificial Sequence
  ENSG00000268651_2 (sequence is synthesized)
cgggaggaggcgccccgcggggtccgcatggcggcgcggcttcagggctgaatggatgctgcagatgcggggccagggggccggagagccgcctgcttgagttctacctcgccatgcctt

SEQ ID NO: 790310 - DNA, 120 bp, Artificial Sequence; identical to SEQ ID NO: 658654
  ENSG00000268651_3 (sequence is synthesized)

SEQ ID NO: 790311 - DNA, 120 bp, Artificial Sequence; identical to SEQ ID NO: 658655
  ENSG00000268651_4 (sequence is synthesized)

SEQ ID NO: 790312 - DNA, 120 bp, Artificial Sequence; identical to SEQ ID NO: 658656
  ENSG00000268651_5 (sequence is synthesized)

SEQ ID NO: 790313 - DNA, 120 bp, Artificial Sequence
  ENSG00000268651_6 (sequence is synthesized)
ggcagggtgggggctgggatccgcctacccccacggtcaggctgctagaaacctgggaacaccccagcacagggtctcagaacagagacctggtacaccaggcccgccgccacccgaggg

SEQ ID NO: 790314 - DNA, 120 bp, Artificial Sequence
  ENSG00000268655_0 (sequence is synthesized)
gtggaaccatggccagtggcaccctggctccgggctgtcgtatctctgcaaccgaggtacctggatccaggcccaactgccatctcaccagcagctacttttcccaccgcattatcccac

SEQ ID NO: 790315 - DNA, 120 bp, Artificial Sequence
  ENSG00000268655_1 (sequence is synthesized)
ccatacccttcaccccgcccacggtgcagtccacggtcgcggaccctctaccccaagttgcaaagcaggattctcacaactgggctttcgacgaggtcctcagcagatgggagacaacct

SEQ ID NO: 790316 - DNA, 120 bp, Artificial Sequence
  ENSG00000268655_2 (sequence is synthesized)
ctggctcggcctacgtgcccaagacccatggcgggccctgcgcccagcccagagccccagagcctgcagaccccacgcggactgtggggatcaaggatttaggagaaaagctcagacacc

SEQ ID NO: 790317 - DNA, 120 bp, Artificial Sequence
  ENSG00000268655_3 (sequence is synthesized)
gcggctggcgcctcccactgaccacaaagtaccagagcagcgagacgagggcgcagtacactggctctcccagcggggacccgcgcgccccggaatacttcgggccccagcccccacaac

SEQ ID NO: 790318 - DNA, 120 bp, Artificial Sequence
  ENSG00000268655_4 (sequence is synthesized)
tcgcagaccaccaccgcgggggtccttcccaggctctaattgcctggacgaagaaccccgagctgtctggccggcctttcacagtatccgaccggggcgtcctggaccgccgccagctct

SEQ ID NO: 790319 - DNA, 120 bp, Artificial Sequence
  ENSG00000268655_5 (sequence is synthesized)
atctgaccacctcggcgcgggactttcggttctatcccaagacggagctgtccggatacccccgcaaggactccctgacctactggagcttcgaagagacgccccaggtctggagccacg

SEQ ID NO: 790320 - DNA, 120 bp, Artificial Sequence
  ENSG00000268655_6 (sequence is synthesized)
caccgcgggtccgcgtgccgcgcgtcagcccggtgacctcggccatgccgcaccggggagccctgtctctggctcaggagtcctacagccccctgctgcacccgctccggcggctcgacc

SEQ ID NO: 790321 - DNA, 120 bp, Artificial Sequence
  ENSG00000268655_7 (sequence is synthesized)
gcttctgcccgctggaggcgccctggggcggcccgcactggaagcccctgcggggcatctacagcgtgccgaaagcctacagtaccgagaactccagctatggcagcttgaagccggcgc

SEQ ID NO: 790322 - DNA, 120 bp, Artificial Sequence
  ENSG00000268655_8 (sequence is synthesized)
tggtgtgagccgtcagggccagccccaccccagacccgcccccagggccgcgctgccgagcggagctcgggacctccgctcactaggaagggttccggacccagcctgagtcgcactcat

SEQ ID NO: 790323 - DNA, 120 bp, Artificial Sequence
  ENSG00000268655_9 (sequence is synthesized)
tacgtctattggcaacgtgggggcgggactagcccagacacccactcagctgcggcatcacggagaggggactaagtccagataatgtccttgcaggctgtggccccgggggcaagacac

SEQ ID NO: 790324 - DNA, 120 bp, Artificial Sequence
  ENSG00000268655_10 (sequence is synthesized)
gcaccctgcgggcgtattaaataatgagttaaatcacctgaaccacacccacttccggggacgctccgggcatcctggcttgagggtagggtgggcggaggtccctaagggagaggtggg

SEQ ID NO: 790325 - DNA, 120 bp, Artificial Sequence
  ENSG00000268655_11 (sequence is synthesized)
gctcgggcttaatccctccttgggggcatctgggtcaagtggcttccctggcagcacagtcacggggagaccctctctcactgggcagaagctaagtccgaagcagcgcccctcctgtta

SEQ ID NO: 790326 - DNA, 120 bp, Artificial Sequence
  ENSG00000268655_12 (sequence is synthesized)
ggaccagggactacaaactcaccttcagggctcctaagctgctgcggagctagacggcgggctgtgggtggggaggagactagaatattctgagacggggtcaggtgggagttgggagag

SEQ ID NO: 790327 - DNA, 120 bp, Artificial Sequence
  ENSG00000268655_13 (sequence is synthesized)
gtaacttggagttgctgcccaagatgcagctcagctccagtggccacaccaagacggtttaagacagagcggaaccagggaggttgtttttggtggctgggggcttgggtttgagttcct

SEQ ID NO: 790328 - DNA, 120 bp, Artificial Sequence
  ENSG00000268696_0 (sequence is synthesized)
cttttgagttcctggtctctgtggcctcctgacctacatgcattgggagatccacagctaagacgccaggactccctggaagcctagaaatgggaccattgacattcacagatgtggcaa

SEQ ID NO: 790329 - DNA, 120 bp, Artificial Sequence
  ENSG00000268696_1 (sequence is synthesized)
taaaattttctctggaggagtggcaattcctggacactgcacagcagaatttatatagggatgtgatgttagagaactacagaaacctggtcttcctgggtgttggtgtctctaagccag

SEQ ID NO: 790330 - DNA, 120 bp, Artificial Sequence
  ENSG00000268696_2 (sequence is synthesized)
atttaatcacctgtctggagcaaggaaaagagccctggaatatgaagagacacaagatggtagccaagcccccagttgtgtgttctcattttgcccaagacctttggccagagcagggca

SEQ ID NO: 790331 - DNA, 120 bp, Artificial Sequence
  ENSG00000268696_3 (sequence is synthesized)
taaaagattctttccaaaaagtaatactgagaagctatggaaaatatggacatgacaatttacaattaagaaaaggctgtgaaagtgtggatgagtgtaagatgcacaaaggaggttatg

SEQ ID NO: 790332 - DNA, 120 bp, Artificial Sequence
  ENSG00000268696_4 (sequence is synthesized)
atgaacttaagcaatgtttgacaactaccccgagcaaaatatttcaatgtgataaatatgtaaaagtctttcataaattttcaagttcaaatagccagaagataagacatactggaaata

SEQ ID NO: 790333 - DNA, 120 bp, Artificial Sequence
  ENSG00000268696_5 (sequence is synthesized)
aataattctttcaaatgtaaagaatgtggcaaatcattttgcatgctttcacacctaactaaacatgaaagaaatcatactagagtgaattgttacaaatgtgaagaatgtggcaaagcc

SEQ ID NO: 790334 - DNA, 63 bp, Artificial Sequence
  ENSG00000268696_6 (sequence is synthesized)
ccttaataactttaatgtgttctcaagccttaataatcataagagaattcatactggagagaa

SEQ ID NO: 790335 - DNA, 86 bp, Artificial Sequence
  ENSG00000268696_7 (sequence is synthesized)
ttaaccaatcctcagaagaccttacaaatgtaaacaatgtggtaaaggttttagccaatcctcaacccttactaaacataagataa

SEQ ID NO: 790336 - DNA, 89 bp, Artificial Sequence
  ENSG00000268696_8 (sequence is synthesized)
tactggagaaagaccttacaaatgtaaacaatgtggtaaaggttttagccaatcctcaacccttactaaacataagataattcatacta

SEQ ID NO: 790337 - DNA, 120 bp, Artificial Sequence
  ENSG00000268696_9 (sequence is synthesized)
aatgtgaagaatgtggcaaagcctttaacaagtcctcaattcttaacagacataagataattcatactaaagagaaatcacaaaccttaaagatgtgacaatgctttttatgaaatccca

SEQ ID NO: 790338 - DNA, 120 bp, Artificial Sequence
  ENSG00000268696_10 (sequence is synthesized)
aaagagaaatcacaaaccttaaagatgtgacaatgctttttatgaaatcccaaacttttttaaacataaaagaaatgctggtggccaggcacagtagcttacgcctgtaatcccagcact

SEQ ID NO: 790339 - DNA, 87 bp, Artificial Sequence
  ENSG00000268696_11 (sequence is synthesized)
acctgaggtcaggagttcgagaccaacctaacatggtgaaacaacgtctctactaaaatacaaaaaaaattagccgggtgtagtggt

SEQ ID NO: 790340 - DNA, 120 bp, Artificial Sequence; identical to SEQ ID NO: 573571
  ENSG00000268738_0 (sequence is synthesized)

SEQ ID NO: 790341 - DNA, 120 bp, Artificial Sequence; identical to SEQ ID NO: 573572
  ENSG00000268738_1 (sequence is synthesized)

SEQ ID NO: 790342 - DNA, 120 bp, Artificial Sequence; identical to SEQ ID NO: 573573
  ENSG00000268738_2 (sequence is synthesized)

SEQ ID NO: 790343 - DNA, 120 bp, Artificial Sequence; identical to SEQ ID NO: 573574
  ENSG00000268738_3 (sequence is synthesized)

SEQ ID NO: 790344 - DNA, 120 bp, Artificial Sequence; identical to SEQ ID NO: 573575
  ENSG00000268738_4 (sequence is synthesized)

SEQ ID NO: 790345 - DNA, 120 bp, Artificial Sequence
  ENSG00000268738_5 (sequence is synthesized)
agcaagtttgccagatggaggacaagcgatcattgagtatggctcgctgtgaagaaagaaattcgaggggacaggatcatggcttggaaagggtgcctttccctccccagttgcagtcag

SEQ ID NO: 790346 - DNA, 120 bp, Artificial Sequence; identical to SEQ ID NO: 573577
  ENSG00000268738_6 (sequence is synthesized)

SEQ ID NO: 790347 - DNA, 120 bp, Artificial Sequence; identical to SEQ ID NO: 573578
  ENSG00000268738_7 (sequence is synthesized)

SEQ ID NO: 790348 - DNA, 120 bp, Artificial Sequence
  ENSG00000268738_8 (sequence is synthesized)
tgaaaaggagattctcaaaagggacgtcgcacacaaagtgtttgccacaacttcgataaagagcttcttccgccagctaaacttgtatggcttccgaaaacggcgtcaatgcactttcag

SEQ ID NO: 790349 - DNA, 120 bp, Artificial Sequence
  ENSG00000268738_9 (sequence is synthesized)
gaccttcacccgcattttctccgcaaaaaggctggtctccatcttgaataagttagagttctactgccatccttactttcaaagagactcccctcacctcctcgtgaggatgaagagaag

SEQ ID NO: 790350 - DNA, 120 bp, Artificial Sequence
  ENSG00000268738_10 (sequence is synthesized)
agtgggtgtcaagtctgcaccaagacatcaggaggaggacaagccagaagctgctggatcctgtctggcaccagcagacactgagcaacaagatcacacgtctccgaatgagaatgacca

SEQ ID NO: 790351 - DNA, 120 bp, Artificial Sequence
  ENSG00000268738_11 (sequence is synthesized)
ggtcacaccgcaacaccgggaaccggccggtcccaacacccaaatcaggagtggctctgctccaccagcaactcctgtgatggtgcctgattccgccgtggcgagtgacaacagtccagt

SEQ ID NO: 790352 - DNA, 120 bp, Artificial Sequence
  ENSG00000268738_12 (sequence is synthesized)
gacccagccggccggcgagtggtcagagggcagccaggctcacgtcactccggtggccgctgtccctgggcctgcagcgctgcccttcctctatgtccctggatctcccactcagatgaa

SEQ ID NO: 790353 - DNA, 120 bp, Artificial Sequence
  ENSG00000268738_13 (sequence is synthesized)
ttcttacgggcctgtggtggcccttcccacagcgtcccgtagtacccttgccatggacaccacaggacttcctgcacctggcatgctgcccttttgccatctctgggtaccggtgaccct

SEQ ID NO: 790354 - DNA, 120 bp, Artificial Sequence
  ENSG00000268738_14 (sequence is synthesized)
agtggctgctggggctgcacagcctgctgcctccatggtcatgttcccccatctcccagctctgcaccaccattgcccccacagccaccgcacgtcacagtacatgccagctagcgatgg

SEQ ID NO: 790355 - DNA, 120 bp, Artificial Sequence
  ENSG00000268738_15 (sequence is synthesized)
gccccaggcgtacccagactacgcagaccagagcacatagagggcagcatttgggcagaatatgtgctggtcaataaatgtgtcagaaaatgagtaattttctgactgcacaaaaaagtc

SEQ ID NO: 790356 - DNA, 120 bp, Artificial Sequence
  ENSG00000268799_0 (sequence is synthesized)
catggcgcgcaccaagcagaccgcccgcaaagccaccgcctggcaggcccccaggaagcccctggccaccaaagccgccagaaaaagggcgtcgcctacaggagggatcaagaagcctca

SEQ ID NO: 790357 - DNA, 120 bp, Artificial Sequence
  ENSG00000268799_1 (sequence is synthesized)
cagcgtctggtgcgtgagatcgcccaggccatcagcccggacctgcgcttccagagcgcggccattggcgccctgcaggaggccagcgaggcctacctggtgcaactctttgaagacacc

SEQ ID NO: 790358 - DNA, 120 bp, Artificial Sequence
  ENSG00000268799_2 (sequence is synthesized)
aacctgtgtgccatccatgccaggcgcgtcacaattatgccccgagacatgcagctggcccgccgcctccgtggagagggtgccggagagcccacgctcctgggaaaccttgcactctag

SEQ ID NO: 790359 - DNA, 120 bp, Artificial Sequence
  ENSG00000268902_0 (sequence is synthesized)
gtgcaatggctagtactatgtgtcaacttgtctaggctatactgctcagctgtgtggtcaaacagtagtctagatgttgctgtgaaggtattttgtagatgtgatcaacatttacaatca

SEQ ID NO: 790360 - DNA, 120 bp, Artificial Sequence
  ENSG00000268902_1 (sequence is synthesized)
gttgattttaagtaaagcagtttaacttccataatgtggatgggcctcatccaattagttgaaggtgttaagagaaaagaccaaggtttcctggaaaaggaattctaccacaagactaac

SEQ ID NO: 790361 - DNA, 120 bp, Artificial Sequence
  ENSG00000268902_2 (sequence is synthesized)
ataaaaatgcgctgtgagtttctagcctgctggcctgccttcactgtcctgggggaggcttggagagaccaggtggactggagtagactgttgagagacactggtctggtgaagatgtcc

SEQ ID NO: 790362 - DNA, 120 bp, Artificial Sequence
  ENSG00000268902_3 (sequence is synthesized)
aaccacgagcctccagcccattgtccaacaaccacccaccaacaccaaagaggcgaggaagtggaaggcatcctctcaaccctggcccagaagccctatcaaagttcccaagacaacccg

SEQ ID NO: 790363 - DNA, 120 bp, Artificial Sequence
  ENSG00000268902_4 (sequence is synthesized)
gaagggaaaagggacccatcaaggaagttccaggaacaaaaggctctccctaaaagaccgccgcttcaaaaaaacctgaggaatggagtgggccaacactatccagccactctgaccagc

SEQ ID NO: 790364 - DNA, 120 bp, Artificial Sequence
  ENSG00000268902_5 (sequence is synthesized)
cgaacgaggaactcaatcaaaatgagccatagcgggaccacaagggcaaggagaccaccaccttctccagtctctcttcggacagccagtaattcccgggcaaggccagagacttcaagt

SEQ ID NO: 790365 - DNA, 120 bp, Artificial Sequence
  ENSG00000268902_6 (sequence is synthesized)
ctatctgaaaagtctccagaggtctaaccccagataaatagccaacagggtgtagagtacattttacaccccaaagagtgtgccccatggtgatgaaaataaagtgaacatgttgcaaaa

SEQ ID NO: 790366 - DNA, 120 bp, Artificial Sequence
  ENSG00000268902_7 (sequence is synthesized)
ggttcacggcaagggtggaaccggattctgcccggatggggatctggatgggggggtggggggttgatttgggaagcagagcacagcagcccaaatttgcttgtaatgtcggcggctaca

SEQ ID NO: 790367 - DNA, 120 bp, Artificial Sequence
  ENSG00000268902_8 (sequence is synthesized)
gaggaaaggccaagaatggacagattaataaagggccatctacaagccacgaataaggccatcaccagaagccaaccccgccagtccttgatctaggacttccagacttcaaaacttttc

SEQ ID NO: 790368 - DNA, 120 bp, Artificial Sequence; identical to SEQ ID NO: 790359
  ENSG00000268916_0 (sequence is synthesized)

SEQ ID NO: 790369 - DNA, 120 bp, Artificial Sequence; identical to SEQ ID NO: 790360
  ENSG00000268916_1 (sequence is synthesized)

SEQ ID NO: 790370 - DNA, 120 bp, Artificial Sequence
  ENSG00000268916_2 (sequence is synthesized)
ataaaaatgcgctgtgagtttctagcctgctggcctgccttcactgtcctgggggaggcttggagagaccaggtggactggagtagactgttgagagacgctggtctggtgaagatgtcc

SEQ ID NO: 790371 - DNA, 120 bp, Artificial Sequence; identical to SEQ ID NO: 790362
  ENSG00000268916_3 (sequence is synthesized)

SEQ ID NO: 790372 - DNA, 120 bp, Artificial Sequence; identical to SEQ ID NO: 790363
  ENSG00000268916_4 (sequence is synthesized)

SEQ ID NO: 790373 - DNA, 120 bp, Artificial Sequence; identical to SEQ ID NO: 790364
  ENSG00000268916_5 (sequence is synthesized)

SEQ ID NO: 790374 - DNA, 120 bp, Artificial Sequence; identical to SEQ ID NO: 790365
  ENSG00000268916_6 (sequence is synthesized)

SEQ ID NO: 790375 - DNA, 120 bp, Artificial Sequence; identical to SEQ ID NO: 790366
  ENSG00000268916_7 (sequence is synthesized)

SEQ ID NO: 790376 - DNA, 120 bp, Artificial Sequence; identical to SEQ ID NO: 790367
  ENSG00000268916_8 (sequence is synthesized)

SEQ ID NO: 790377 - DNA, 120 bp, Artificial Sequence
  ENSG00000268940_0 (sequence is synthesized)
cgataaaacagagaaggtggctgtagatcctgaaactgtgtttaaacgtcccagggaatgtgacagtccttcgtatcagaaaaggcagaggatggccctgttggcaaggaaacaaggagc

SEQ ID NO: 790378 - DNA, 120 bp, Artificial Sequence
  ENSG00000268940_1 (sequence is synthesized)
caaggaaacaaggagcaggagacagccttattgcaggctctgccatgtccaaagcaaagaagcttatgacaggacatgctattccacccagccaattggattctcagattgatgacttca

SEQ ID NO: 790379 - DNA, 120 bp, Artificial Sequence
  ENSG00000268940_2 (sequence is synthesized)
ctggtttcagcaaagataggatgatgcagaaacctggtagcaatgcacctgtgggaggaaacgttaccagcagtttctctggagatgacctagaatgcagagaaacagcctcctctccca

SEQ ID NO: 790380 - DNA, 120 bp, Artificial Sequence
  ENSG00000268940_3 (sequence is synthesized)
aaagccaacgagaaattaatgctgatataaaacgtaaattagtgaaggaactccgatgcgttggacaaaaatatgaaaaaatcttcgaaatgcttgaaggagtgcaaggacctactgcag

SEQ ID NO: 790381 - DNA, 87 bp, Artificial Sequence; identical to SEQ ID NO: 767932
  ENSG00000268940_4 (sequence is synthesized)

SEQ ID NO: 790382 - DNA, 120 bp, Artificial Sequence
  ENSG00000268940_5 (sequence is synthesized)
caccccaaatgcataatctcgttaatgattgaggagagaaaaggatcagattgctgttttctacaatggagcaggatattgctgaagtctcctggcatatgttaccgaatcaaatagcct

SEQ ID NO: 790383 - DNA, 120 bp, Artificial Sequence
  ENSG00000268940_6 (sequence is synthesized)
tccagaggctaagaaatttctgttagtaaaagatgttctttttcccaaagcattttatttgaaaggataacttgtgttttggttattttgtattcccacctgtgctggtagatattatta

SEQ ID NO: 790384 - DNA, 120 bp, Artificial Sequence
  ENSG00000268940_7 (sequence is synthesized)
acccattaggtaaatactattacagtcgtggtttctgcagcagctcacagtgttgtagctggtatttatcactacgttctttcgctacccatttcacattccctttgccctgagatagca

SEQ ID NO: 790385 - DNA, 120 bp, Artificial Sequence
  ENSG00000268940_8 (sequence is synthesized)
tgtcagttggtcatgatgcttggcctggcaggatgactcaaaccttcattacggaagagtctgaaccattagatgtcctgcctggatggggttgctgtgatcttccattaactctaatcg

SEQ ID NO: 790386 - DNA, 120 bp, Artificial Sequence
  ENSG00000268940_9 (sequence is synthesized)
agtgttcggctgggccagcacactgtggctggctgcttcccttccttccatcccctttggaccaaacgggatcggtgcttctggtgagacgcctccccatgcacatcactcccaggtgcc

SEQ ID NO: 790387 - DNA, 120 bp, Artificial Sequence
  ENSG00000268964_0 (sequence is synthesized)
agactccttcttttcaggagcccactcggttctgtcgttcagggtgtcgcttctttctgagctcctgtctctttaaatgaagggcatttaccctttaactctttctgcgcatctcttgac

SEQ ID NO: 790388 - DNA, 120 bp, Artificial Sequence
  ENSG00000268964_1 (sequence is synthesized)
tgaatccaagaagaccaagaaccagaggacttccacacccctctgggtaacatctggtgttttcacctggttacctggttacctcgcctggttatccagctatcaacatttctggcatct

SEQ ID NO: 790389 - DNA, 120 bp, Artificial Sequence
  ENSG00000268964_2 (sequence is synthesized)
ccagttggatacatcagtctcaagtgaaactgtgggaaggtcccgaagaaccacagaagaacaacagaattcagcacctgagcattcttgtgagccactggagaacttaaaattccactt

SEQ ID NO: 790390 - DNA, 120 bp, Artificial Sequence
  ENSG00000268964_3 (sequence is synthesized)
caagtgaaaagataagtaaagccttctctctgttcacccaaaactaaagtcaatctcagtacggggaatcttggttgcggtggcattggttcttctccttattttgacccaactggcatg

SEQ ID NO: 790391 - DNA, 120 bp, Artificial Sequence
  ENSG00000268964_4 (sequence is synthesized)
ccacctgaagtcccgataacagcctgatttctcactaaacactccatcgaaccacttcattatttgtctctcctattttcagcactttccttttgctttcacaaagcttaagggagaatc

SEQ ID NO: 790392 - DNA, 120 bp, Artificial Sequence
  ENSG00000268964_5 (sequence is synthesized)
agctatgacagagaaattccttttcctttatctttccctccttcccatgcccctactctcacaggcacagtggaatgaaaattcccttgtcagtttttccaaaataattgcttcgggaaa

SEQ ID NO: 790393 - DNA, 120 bp, Artificial Sequence
  ENSG00000268964_6 (sequence is synthesized)
ccatctaagcaactgttggatctgccacaacttcatcaccaggtcctcatcttaccaatatattttggtaagaaatttttctttaaacctaacatttggttcaggaatccctgaaggcca

SEQ ID NO: 790394 - DNA, 120 bp, Artificial Sequence
  ENSG00000268964_7 (sequence is synthesized)
acataaatctgttccgctccaggtttcgcttgctaactcagcgcaccaagtcccctgcctggatctcactccacctttcaatcaaagctctaaaacttctttctatttctacaactgctc

SEQ ID NO: 790395 - DNA, 120 bp, Artificial Sequence
  ENSG00000268964_8 (sequence is synthesized)
ttctctaaaccaaacctgttgtccatgccctgaaggacactgtgacaggaagaacacctctgaggagggattccccagtcccaccatccatcccatgagcttctccccagcaggctgcca

SEQ ID NO: 790396 - DNA, 120 bp, Artificial Sequence
  ENSG00000268964_9 (sequence is synthesized)
ccctaacttgactcactggtgtccagctaaacaaatgaacgattatcgagacaagtcaccccaaaaccgctgtgcagcttgggaaggaaaagagctaatcacatggagggttctatattc

SEQ ID NO: 790397 - DNA, 120 bp, Artificial Sequence
  ENSG00000268964_10 (sequence is synthesized)
gcttcccaaggcacacactgtccccacatggccaaaatctactgttcccctgggagggcctctatcccctgcatgcaatcaaactattccagcagggtggaaatcgcagttacacaagtg

SEQ ID NO: 790398 - DNA, 120 bp, Artificial Sequence
  ENSG00000268964_11 (sequence is synthesized)
gttcgacagccacatcccccggtgggcctgtacccctcctggctatgtatttttatgtgggccacaaaaaaataaactgccctttgatggaagtcctaagataacctattcaaccccccc

SEQ ID NO: 790399 - DNA, 120 bp, Artificial Sequence
  ENSG00000268964_12 (sequence is synthesized)
ccaacatacgggagaatgtgctgtgggacttttgggaccacgggggataggtgtgaccatttataacaccacccaacccagacagaaaagagctctgggtctaatactggcagggatggg

SEQ ID NO: 790400 - DNA, 120 bp, Artificial Sequence
  ENSG00000268964_13 (sequence is synthesized)
tgcggccataggaatgatcgccccatggggagggttcacttatcatgatgtcaccctcagaaatctctccagacaaatagacaacatagctaagagtaccagagatagcatctctaaact

SEQ ID NO: 790401 - DNA, 120 bp, Artificial Sequence
  ENSG00000268964_14 (sequence is synthesized)
caaggcctccatagattctctagcaaatgtagtcatggacaacagattggccttagattacctcttagcagagcagggtggagtctgtgcagtgatcaataaatcctgttgcgtttatgt

SEQ ID NO: 790402 - DNA, 120 bp, Artificial Sequence
  ENSG00000268964_15 (sequence is synthesized)
caataacagtggggcgatagaggaggatataaaaaagatctatgatgaggctacgtggctccatgactttggaaaaggaggtgcttcagcaagggccatctgggaggctgtgaagtctgc

SEQ ID NO: 790403 - DNA, 120 bp, Artificial Sequence
  ENSG00000268964_16 (sequence is synthesized)
cctcccctccctcaactggtttgtccctttactgggaccagcaacagttatactcttacttttcctctttggcccttgtttctttaatttactgattaagtgtgtctcttctaggataaa

SEQ ID NO: 790404 - DNA, 120 bp, Artificial Sequence
  ENSG00000268964_17 (sequence is synthesized)
gcaatttcacatgaagtccccccaaatggaaagatatcagctatctgtcattggaggccccagcacctataagcacatctcccccttggatgccagtgggcaaagattccgggaaactat

SEQ ID NO: 790405 - DNA, 120 bp, Artificial Sequence
  ENSG00000268964_18 (sequence is synthesized)
ggaggaattttctctctgagacagagcaagagagggagaccctgatgacttcttcgccccatgtcagcaggaagtagttacagaagacccacgacgtccttacaaccagagcttttcagg

SEQ ID NO: 790406 - DNA, 120 bp, Artificial Sequence
  ENSG00000268964_19 (sequence is synthesized)
gtctccatctcttgaggagggaaatattagggtaggcaggtaggcaggcatgagcaggcaagagagcccttgggaaaggaatctttagaaacgcagcccactgatagcttccttggtgat

SEQ ID NO: 790407 - DNA, 87 bp, Artificial Sequence
  ENSG00000268964_20 (sequence is synthesized)
atctttagaaacgcagcccactgatagcttccttggtgatgctgcccacagacagtcagcacttctctaataacccatcctagaaca

SEQ ID NO: 790408 - DNA, 71 bp, Artificial Sequence
  ENSG00000268964_21 (sequence is synthesized)
gtctcaaactcctgacttcaggtgattcgcttggctactcagaacgcttctgaatggcacattcatgaaaa

SEQ ID NO: 790409 - DNA, 120 bp, Artificial Sequence
  ENSG00000268964_22 (sequence is synthesized)
tggctactcagaacgcttctgaatggcacattcatgaaaaatcatgtaaggttctcataaaaacatctgcccagccattagtaggagtagacacgtccttttgatcagcccgccctgttc

SEQ ID NO: 790410 - DNA, 120 bp, Artificial Sequence
  ENSG00000268964_23 (sequence is synthesized)
tgtctttctgggtgtactgttttgatgactttaaaagctcccataaaaactaaggcactagcagctggctcattcttctgatgtcctctctttttaaataaagcttacttaaccctttaa

SEQ ID NO: 790411 - DNA, 120 bp, Artificial Sequence
  ENSG00000268988_0 (sequence is synthesized)
acccctgatttgaaacaagactaggatacatggtaaagaaagtttattcaccaaagttttgacagactgaaggccattatttcagattggagataggaaacttaaaagaactacatggac

SEQ ID NO: 790412 - DNA, 120 bp, Artificial Sequence
  ENSG00000268988_1 (sequence is synthesized)
attgggtaaaagaacatgggttgaaatttgcctggcagtagcctaaaagtaaatggtcttcaaggtgcatgtgaaggaactgtaggagggaaatgggataattcacatctccaccaataa

SEQ ID NO: 790413 - DNA, 120 bp, Artificial Sequence
  ENSG00000268988_2 (sequence is synthesized)
ttaaatgtagccacactagcttggagggatttgaggtgagacatctaaaatactaagtcatggtgagggctggaagacaaaagaatgaatgacttcataggaatgactgtggggaagggc

SEQ ID NO: 790414 - DNA, 120 bp, Artificial Sequence
  ENSG00000268988_3 (sequence is synthesized)
ttgaaggaatcatcctctcacttccatgtgaaccatgaacattaaacatggagaaatgagcagcagcagattagtttgggatgcatcttcaggggatgctgaaacaacaacagcatttgg

SEQ ID NO: 790415 - DNA, 120 bp, Artificial Sequence
  ENSG00000268988_4 (sequence is synthesized)
tttcctctacacccctgtcatccgtcccccacaagcccagggagtggtcagcagtggtgctttgtgatgtctaagccaccctaggactgccattggctgggacactgcctgtatgatcaa

SEQ ID NO: 790416 - DNA, 120 bp, Artificial Sequence
  ENSG00000268988_5 (sequence is synthesized)
agagctctgggacatcctcctggcaagcttcaatatagctgtggaagtctgcagtctacaagagcctactatagacattctacaaccaagcagaatcatggaacagccgacttcaagcac

SEQ ID NO: 790417 - DNA, 120 bp, Artificial Sequence
  ENSG00000268988_6 (sequence is synthesized)
caatggggagaagaggaagagcccctgtgaatccaataacaaaaaaaatgatgagatgcaggaggcaccgaacagggtcttagcccccaaacagagcttgcaaaagacaaaaacaataga

SEQ ID NO: 790418 - DNA, 120 bp, Artificial Sequence
  ENSG00000268988_7 (sequence is synthesized)
atatctaacaataatagtgtattactacaggaagcatacgaaaataaattcaaatcaactggagaaggaccagtcccgagagaactccatcaatccagtccaagaggaggaggacgaagg

SEQ ID NO: 790419 - DNA, 120 bp, Artificial Sequence
  ENSG00000268988_8 (sequence is synthesized)
cctagactcagctgaaggatcttcacaggaggacgaagacctggactcatctgaaggatcttcacaggaggacgaagacctggactcatctgaaggatcttcacaggaggacgaagacct

SEQ ID NO: 790420 - DNA, 120 bp, Artificial Sequence
  ENSG00000268988_9 (sequence is synthesized)
ggactcatctgaaggatcttcacaggaggacgaagacctggactcatctgaaggatcttcacaggaggacgaagacctggacccacctgaaggatcttcacaggaggacgaagacctaga

SEQ ID NO: 790421 - DNA, 120 bp, Artificial Sequence
  ENSG00000268988_10 (sequence is synthesized)
ctcatctgaaggatcttcacaggagggtggggaggactagtcaaacatggagaaaccaaattggacaaatcctcactaccaatggcgatgattacaataaaatcaagtttgaggagctga

SEQ ID NO: 790422 - DNA, 120 bp, Artificial Sequence
  ENSG00000268994_0 (sequence is synthesized)
ggccctcggcctctttgcacccggcagagtgacgagcttcgccggtgtcttcaacgaagtcctgtcggtccctaccggcacatcacacactcctggaagcatgatcttcactcccttcct

SEQ ID NO: 790423 - DNA, 120 bp, Artificial Sequence
  ENSG00000268994_1 (sequence is synthesized)
aggcttgcccagggaacctgctcttctgcgagggtcttggaggagccggttccagagagccctggcatgtttcaccaagtgtttcaggggaggataccgggcactcggaatctgagacca

SEQ ID NO: 790424 - DNA, 120 bp, Artificial Sequence
  ENSG00000268994_2 (sequence is synthesized)
ccggagccacagacacagagccatgaacggtgaccaagccccttctgctgctccatgcccctgctcgccgcagtgtcccagtcaccaggcctgaaataaatgctggcacgcttgactgtt

SEQ ID NO: 790425 - DNA, 120 bp, Artificial Sequence
  ENSG00000269028_0 (sequence is synthesized)
agccaaacctagccctaaacccgttccaccttactatcaaataaccttaaccaaaccatttacccaaataaagtataggcgatagaaattgtaaaccggcgcaatagatatagtaccgca

SEQ ID NO: 790426 - DNA, 120 bp, Artificial Sequence
  ENSG00000269028_1 (sequence is synthesized)
agggaaagatgaaaaattataaccaagcataatacagcaaggactaacccctgtaccttttgcataatgaattaactagaaataactttgcaaagagaaccaaagctaaggcccccgaaa

SEQ ID NO: 790427 - DNA, 120 bp, Artificial Sequence
  ENSG00000269028_2 (sequence is synthesized)
ccagacgagctacctaagaacagctaaaagagcacacccgtctatgtagcaaaatagtgggaagatttataggtagaggcgacaaacctatcgagcctggtgatagctggttgtccaaga

SEQ ID NO: 790428 - DNA, 120 bp, Artificial Sequence
  ENSG00000269028_3 (sequence is synthesized)
tagaatcttagttcaactttaaatttacctacagaaccttctaaatccccttgtaaatttaactgttagtccaaagaggaacagctctttggacactaggaaaaaaccttgtaaagagag

SEQ ID NO: 790429 - DNA, 120 bp, Artificial Sequence
  ENSG00000269028_4 (sequence is synthesized)
acatacaactgagctccttacactcaattggaccaatctattaccttatagaagaactaatgttagtataagtaacatgaaaacattctcctccgcataagcctacatcagaccaaaata

SEQ ID NO: 790430 - DNA, 120 bp, Artificial Sequence
  ENSG00000269028_5 (sequence is synthesized)
ttaaactgacaattaacagcccaatatctacaatcaaccaacaagccattattaccctcactgttaacccaacacaggcatgcccacaaggaaaggttaaaaaaagtaaaaggaactcgg

SEQ ID NO: 790431 - DNA, 120 bp, Artificial Sequence
  ENSG00000269028_6 (sequence is synthesized)
taccaaaaacatcacctctagcattatcagtattagaggcaccgcctgcccggtgacatatgtttaacggccgcggtaccctaaccgtgcaaaggtagcataatcacttgttccttaaat

SEQ ID NO: 790432 - DNA, 120 bp, Artificial Sequence
  ENSG00000269028_7 (sequence is synthesized)
taatcacttgttccttaaatagggacttgtatgaatggctccacgagggttcagctgtctcttactttcaaccagtgaaattgacctacccgtgaagaggcgggcataacatagcaagac

SEQ ID NO: 790433 - DNA, 120 bp, Artificial Sequence
  ENSG00000269058_0 (sequence is synthesized)
agagccgcagagagagctgggagctaaggggtggcggcgaccggaagcgcagtgcacacccccatggcccgggctttggtccagctctgggccatatgcatgctgcgagtggcgctggct

SEQ ID NO: 790434 - DNA, 120 bp, Artificial Sequence
  ENSG00000269058_1 (sequence is synthesized)
accgtctatttccaagaggaatttctagacggagagcattggagaaaccgatggttgcagtccaccaatgactcccgatttgggcattttagactttcgtcgggcaagttttatggtcat

SEQ ID NO: 790435 - DNA, 120 bp, Artificial Sequence
  ENSG00000269058_2 (sequence is synthesized)
aaagagaaagataaaggtctgcaaaccactcagaatggccgattctatgccatctctgcacgcttcaaaccgttcagcaataaagggaaaactctggttattcagtacacagtaaaacat

SEQ ID NO: 790436 - DNA, 120 bp, Artificial Sequence
  ENSG00000269058_3 (sequence is synthesized)
gagcagaagatggactgtggagggggctacattaaggtctttcctgcagacattgaccagaagaacctgaatggaaaatcgcagtactatattatgtttggacccgatatttgtggattt

SEQ ID NO: 790437 - DNA, 120 bp, Artificial Sequence
  ENSG00000269058_4 (sequence is synthesized)
gatatcaagaaagttcatgttattttacatttcaagaataagtatcacgaaaacaagaaactgatcaggtgtaaggttgatggcttcacacacctgtacactctaattttaagaccagat

SEQ ID NO: 790438 - DNA, 120 bp, Artificial Sequence
  ENSG00000269058_5 (sequence is synthesized)
cccggcagaatcgaaggattgggaacagactaaagacaacaaagcccaggactgggagaagcattttctggacgccagcaccagcaagcagagcgactggaacggtgacctggatgggga

SEQ ID NO: 790439 - DNA, 120 bp, Artificial Sequence
  ENSG00000269058_6 (sequence is synthesized)
ctggccagcgccgatgctccagaagcccccgtaccaggatggcctgaaaccagaaggtattcataaagacgtctggctccaccgtaagatgaagaataccgactatttgacgcagtatga

SEQ ID NO: 790440 - DNA, 120 bp, Artificial Sequence
  ENSG00000269058_7 (sequence is synthesized)
cctctcagaatttgagaacattggtgccattggcctggagctttggcaggtgagatctggaaccatttttgataactttctgatcacagatgatgaagagtacgcagataattttggcaa

SEQ ID NO: 790441 - DNA, 120 bp, Artificial Sequence
  ENSG00000269058_8 (sequence is synthesized)
ggccacctggggcgaaaccaagggtccagaaagggagatggatgccatacaggccaaggaggaaatgaagaaggcccgcgaggaagaggaggaagagctgctgtcgggaaaaattaacag

SEQ ID NO: 790442 - DNA, 120 bp, Artificial Sequence
  ENSG00000269058_9 (sequence is synthesized)
gcacgaacattacttcaatcaatttcacagaaggaatgaactttagtgatccccattggatataaggatgactggtaaaatctcattgctactttaatctatgtttcaaactcaaatgtc

SEQ ID NO: 790443 - DNA, 120 bp, Artificial Sequence
  ENSG00000269058_10 (sequence is synthesized)
caagaaggaaacgtccccggcagaatcgaaggattgggaacagactaaagacaacaaagcccaggtgtgaatttttcctgggcaactctaaaaagtgcacaaatgtagtttgtaagtacc

SEQ ID NO: 790444 - DNA, 120 bp, Artificial Sequence
  ENSG00000269067_0 (sequence is synthesized)
gttggctctcgctgcacgcggaggtcaaggtgtcgtccttactgctgtgtgtcgtccgctcctaaaggcccagcttctatggccctgtgacctgcaggtattgggagattcacaactaag

SEQ ID NO: 790445 - DNA, 120 bp, Artificial Sequence
  ENSG00000269067_1 (sequence is synthesized)
tcgccaggacccccggaagcctagaaatgggatcgttgacatttcgggatgtggccatacaattctctctggaggagtggcaatgcctggacactgcacagcagaatttatataggaatg

SEQ ID NO: 790446 - DNA, 120 bp, Artificial Sequence
  ENSG00000269067_2 (sequence is synthesized)
tgatgttagagaactacagaaacctggtcttcctgggtattgctgcccctaagccagacctgatcatttttctggagcaaggaaaagagccctggaatatgaagagacatgagctggtga

SEQ ID NO: 790447 - DNA, 120 bp, Artificial Sequence
  ENSG00000269067_3 (sequence is synthesized)
aagaaccgccagttatatgttctcattttgctcaagacctttggccagagcagggcagagaagattctttccaaaaagtgatattgagaagatatgaaaaatgtggacatgagaatttac

SEQ ID NO: 790448 - DNA, 120 bp, Artificial Sequence
  ENSG00000269067_4 (sequence is synthesized)
agttaaaaattggttgtaccaatgtggatgagtgtaaggtgcacaaaaaaggttataataagcttaaccagagtttgacaactacacaaagcaaagtatttcaatgtggcaaatatgcaa

SEQ ID NO: 790449 - DNA, 120 bp, Artificial Sequence
  ENSG00000269067_5 (sequence is synthesized)
acatctttcataaatgttcaaattcaaaaagacataagataaggcatactggaaagaaacttttgaaatgtaaagaatatgtcagatcattttgcatgctttcacacctatctcaacata

SEQ ID NO: 790450 - DNA, 120 bp, Artificial Sequence
  ENSG00000269067_6 (sequence is synthesized)
cacctatctcaacataaaagaatttatactagagagaattcctacaaaagtgaagaacatggcaaagcctttaactggtcctcagcccttacttataagagaattcatactggagagaaa

SEQ ID NO: 790451 - DNA, 88 bp, Artificial Sequence
  ENSG00000269067_7 (sequence is synthesized)
atgtgaagaatgtggcaaagcctttagtaagttctcaatccttactaagcataaggtaattcatactggagagaaacatccggtcctc

SEQ ID NO: 790452 - DNA, 75 bp, Artificial Sequence
  ENSG00000269067_8 (sequence is synthesized)
atgtgaagaatgtggcaaagcctttagtaaggcctcaacccttactgcacataagacaattcataaccggtcctc

SEQ ID NO: 790453 - DNA, 120 bp, Artificial Sequence
  ENSG00000269067_9 (sequence is synthesized)
acaaatgtgaagaatgtggcaaagctttcaaccggtcctcaaaccttatggaacataagagaattcatactggagagaagccctgcaaatgtgaagaatgtggcaaagcctttggtaact

SEQ ID NO: 790454 - DNA, 90 bp, Artificial Sequence
  ENSG00000269067_10 (sequence is synthesized)
atgtgaagaatgtggcaaagccttcagctggccctcaagccttactgaacacaagagaattcatgctggagacacctttaagtggtcctc

SEQ ID NO: 790455 - DNA, 120 bp, Artificial Sequence
  ENSG00000269067_11 (sequence is synthesized)
atgtgaagaatgtggcaaagcctttactacattttcgagccttactaaacataaagtaattcatactggagagaaacactacaaatgtgaagaatgtggcaaagtcttcagctggtcctc

SEQ ID NO: 790456 - DNA, 89 bp, Artificial Sequence
  ENSG00000269067_12 (sequence is synthesized)
tcatactggagagaaacactacaaatgtgaagaatgtggcaaagtcttcagctggtcctcaagccttactacacataaggcaattcatg

SEQ ID NO: 790457 - DNA, 120 bp, Artificial Sequence
  ENSG00000269067_13 (sequence is synthesized)
cttaacaaacataagaaaattcatgctggaaagaaattctacaaatgtgaagaatgtggtaaagacttcaaccaatcctcacaccttactactcataagagaattcatactggaggaaaa

SEQ ID NO: 790458 - DNA, 120 bp, Artificial Sequence
  ENSG00000269067_14 (sequence is synthesized)
actggaggaaaaaccctacaaatgtgaaaaatgtggcaaagctttcaattagttcttaacccttactgaacataagggtatttatacaggagggaaaccctacaaatgtgaagaatgtgg

SEQ ID NO: 790459 - DNA, 120 bp, Artificial Sequence
  ENSG00000269067_15 (sequence is synthesized)
ctgttcctcaatccttactaaacataaggtaattcatactggagggaattcctacaattgtgtggaatgtggcaaagcctttaatcagtccttaaggcttactacgtacaagacaactca

SEQ ID NO: 790460 - DNA, 120 bp, Artificial Sequence
  ENSG00000269067_16 (sequence is synthesized)
tactggagagaaaccatacacgtgtgaagaatgtgggaaagcctctaacagatcctcaattcttaacagacataagctaattcatactagagagaaactgcaaacctgaaagatgtgaca

SEQ ID NO: 790461 - DNA, 120 bp, Artificial Sequence
  ENSG00000269067_17 (sequence is synthesized)
aggcttttggcaacacctgaaacttttctgaatataaaagaaatcatactggtgagaaatcctagaaatgtgaagaatgtgacaaagcctttaaatggctgtcacacttgattgtaggta

SEQ ID NO: 790462 - DNA, 120 bp, Artificial Sequence
  ENSG00000269067_18 (sequence is synthesized)
agatatctcatactggagaaaactactagaataaacaatgtggcaaaacatttaaccaatgctcatgcctaattgcaaaggaaagcatttacactagcctgggcaacagagggagactgt

SEQ ID NO: 790463 - DNA, 120 bp, Artificial Sequence
  ENSG00000269067_19 (sequence is synthesized)
tggagcaaggaaaagagccctggaatatgaagagacatgagctggtgaaagaaccgccaggcagaactggccatgaactgtggcttaggaagctggaactgagtcttggaactgctattg

SEQ ID NO: 790464 - DNA, 120 bp, Artificial Sequence
  ENSG00000269067_20 (sequence is synthesized)
ggaccaaggtctgcaggcctgccagcattgctctaaatgggtatcactctccaggcctctggaagacccaagacctctcacagactgtggctgggaggagtttgggatgattacagatta

SEQ ID NO: 790465 - DNA, 120 bp, Artificial Sequence
  ENSG00000269096_0 (sequence is synthesized)
ccgataaaacagagaaggtggctgtagatcctgaaactgtgtttaaacgtcccagggaatgtgacagtccttcgtatcagaaaaggcagaggatggccctgttggcaaggaaacaaggag

SEQ ID NO: 790466 - DNA, 120 bp, Artificial Sequence
  ENSG00000269096_1 (sequence is synthesized)
ggagcaggagacagccttattgcaggctctgccatgtccaaagaaaagaagcttatgacaggacatgctattccacccagccaattggattctcagattgatgacttcactggtttcagc

SEQ ID NO: 790467 - DNA, 120 bp, Artificial Sequence
  ENSG00000269096_2 (sequence is synthesized)
aaagataggatgatgcagaaacctggtagcaatgcacctgtgggaggaaacgttaccagcagtttctctggagatgacctagaatgcagagaaacagcctcctctcccaaaagccaacga

SEQ ID NO: 790468 - DNA, 120 bp, Artificial Sequence
  ENSG00000269096_3 (sequence is synthesized)
gaaattaatgctgatataaaacgtaaattagtgaaggaactccgatgcgttggacaaaaatatgaaaaaatcttcgaaatgcttgaaggagtgcaaggacctactgcagtcaggaagcga

SEQ ID NO: 790469 - DNA, 120 bp, Artificial Sequence; identical to SEQ ID NO: 790382
  ENSG00000269096_4 (sequence is synthesized)

SEQ ID NO: 790470 - DNA, 120 bp, Artificial Sequence; identical to SEQ ID NO: 790383
  ENSG00000269096_5 (sequence is synthesized)

SEQ ID NO: 790471 - DNA, 120 bp, Artificial Sequence; identical to SEQ ID NO: 790384
  ENSG00000269096_6 (sequence is synthesized)

SEQ ID NO: 790472 - DNA, 120 bp, Artificial Sequence
  ENSG00000269096_7 (sequence is synthesized)
tgtcagttggtcatgatgcttggcctggcaggatgactcaaaccttcattacggaagagtctgaaacattagatgtcctgcctggatggggttgctgtgatcttccattaactctaatcg

SEQ ID NO: 790473 - DNA, 80 bp, Artificial Sequence
  ENSG00000269113_0 (sequence is synthesized)
cgcccctctgagccgggctcgggggcagccggtcgccccagagccgccccccacccctgccgcgccttccgccgcacttg

SEQ ID NO: 790474 - DNA, 120 bp, Artificial Sequence
  ENSG00000269113_1 (sequence is synthesized)
acccctgccgcgccttccgccgcacttgtcccactgcgcgcctcctggagcgccgcgcacccctgggacccttgcgtgccccgggtgcccagcataaccccgggacccttgcgcaccccg

SEQ ID NO: 790475 - DNA, 120 bp, Artificial Sequence
  ENSG00000269113_2 (sequence is synthesized)
ggttctcggttctgccccaggaaccccgcgcgcccctggaccgcgacgcagctccgggaccccgcgcgcccccggaccccaacacgccctcagcacccgggggctcggccagcgaggttg

SEQ ID NO: 790476 - DNA, 120 bp, Artificial Sequence
  ENSG00000269113_3 (sequence is synthesized)
agcgcccgggggaggggcccagccctagagggtctccctcttccaacagacggagcccggccccagagaaacccccaggtccgacagggacagtcagccacgccccagagggcgcccagc

SEQ ID NO: 790477 - DNA, 120 bp, Artificial Sequence
  ENSG00000269113_4 (sequence is synthesized)
gtcagccacgccccagagggcgcccagcatcctgcggctggagccccgtgctccagaggaaactccgtgcccaactgggggctccccgccccgctgaggggcgccgcccaggagggtccc

SEQ ID NO: 790478 - DNA, 120 bp, Artificial Sequence
  ENSG00000269113_5 (sequence is synthesized)
cgccctggcggggccgctgctcgccgccctcctcgccaccgctcgcgcccgcccgcagcccccggacggaggacagtgccggccgcccggatcgcagagggacttgaactccttcctgtg

SEQ ID NO: 790479 - DNA, 120 bp, Artificial Sequence
  ENSG00000269113_6 (sequence is synthesized)
tgtggacgattcggcgtgatcctccggcctacctgtttggcactattcacgtcccctacacccgcgtctgggacttcatcccggacaactccaaggcagccttccaggctagcacccgtg

SEQ ID NO: 790480 - DNA, 120 bp, Artificial Sequence
  ENSG00000269113_7 (sequence is synthesized)
tctactttgagctggaccttacagacccctacaccatctcggccctggccagctgccagctgctgccgcacggggaaaacctgcaggacgtgctgccccacgagctttactggcgcttga

SEQ ID NO: 790481 - DNA, 120 bp, Artificial Sequence
  ENSG00000269113_8 (sequence is synthesized)
agcgccacctggactacgtgaagttgatgatgccctcctggatgacgcccgctcagcggggcaaggggctctatgctgactacctattcaatgccatcgcgggcaactgggagcgcaaga

SEQ ID NO: 790482 - DNA, 120 bp, Artificial Sequence
  ENSG00000269113_9 (sequence is synthesized)
ggcccgtctgggtgatgctcatggtaaactcgctcacagagagggacgtgcgcttccgtggtgtgcccgtgctcgacctctacctggcccagcaggctgagaagatgaagaagaccacag

SEQ ID NO: 790483 - DNA, 120 bp, Artificial Sequence
  ENSG00000269113_10 (sequence is synthesized)
gggctgtggagcaggtggaggagcagtgccatcccctcaacaacgggctcaacttctcccaggtgctgtttgccctgaaccaaaccctgctgcagcaggagagtgtgcgggccgggagcc

SEQ ID NO: 790484 - DNA, 120 bp, Artificial Sequence
  ENSG00000269113_11 (sequence is synthesized)
tgcaggcctcctacaccacggaggacctcatcaagcactacaactgcggagacctcagcgcagtcatcttcaaccacgacacatcccagctgcccaactttatcaacaccaccctcccgc

SEQ ID NO: 790485 - DNA, 120 bp, Artificial Sequence
  ENSG00000269113_12 (sequence is synthesized)
cacacgagcaggtgacggcccaggagattgacagctacttccgccaggagctcatctacaagaggaatgagcgcatggggaagagggtcatggcgcttctacgggagaacgaggacaaga

SEQ ID NO: 790486 - DNA, 120 bp, Artificial Sequence
  ENSG00000269113_13 (sequence is synthesized)
tctgcttctttgccttcggagcaggtcactttctggggaacaacacagtcatcgacatcctgcggcaggcagggctggaggtggaccacacacccgccgggcaggccatacacagccctg

SEQ ID NO: 790487 - DNA, 120 bp, Artificial Sequence
  ENSG00000269113_14 (sequence is synthesized)
ccccccagagcccagcgccctctcctgaggggacctcgacgagcccggccccagtgaccccagctgccgctgtccccgaagcaccctctgtgacccccaccgccccaccagaggatgagg

SEQ ID NO: 790488 - DNA, 120 bp, Artificial Sequence
  ENSG00000269113_15 (sequence is synthesized)
atccagccctgtccccacacctcctgctccccgacagcctcagccagctggaggagtttggccggcagaggaagtggcacaagaggcagagcacacaccagcggccgcggcagttcaatg

SEQ ID NO: 790489 - DNA, 120 bp, Artificial Sequence
  ENSG00000269113_16 (sequence is synthesized)
acctctgggtccgcatcgaggacagcaccaccgcctcaccacccccgctgcccctgcagcccacccacagctcggggaccgccaagccccccttccagctttcagaccagctacaacagc

SEQ ID NO: 790490 - DNA, 120 bp, Artificial Sequence
  ENSG00000269113_17 (sequence is synthesized)
aggacccgccagggcccgccagcagctcggcacccaccctgggccttctccccgccatcgccaccaccatcgctgtctgcttcctgctgcatagccttgggccctcctgacctcggccac

SEQ ID NO: 790491 - DNA, 120 bp, Artificial Sequence
  ENSG00000269113_18 (sequence is synthesized)
cccaagtggagaagccagagaaatgacacaggggtcttcggccacacccaactgctcctgccaccacctccagggggtgcccaacacgtcgagggcagtccacatgggattggctagaca

SEQ ID NO: 790492 - DNA, 120 bp, Artificial Sequence
  ENSG00000269113_19 (sequence is synthesized)
ctctagagctttactgtacccaagttacatcttcttttttgtagaaggatcttaatttcccatagtgctatggggctcttttgtaaaatacgtgtccatattaaaaaagaaaaatgtatt

SEQ ID NO: 790493 - DNA, 120 bp, Artificial Sequence
  ENSG00000269113_20 (sequence is synthesized)
tattctaccgataaaactattcttatgtggcctgtgttataaccccctagccctagtgctggcccgggaggggaacccgggacatcagtgacctcctgtggactgtggctctggactggc

SEQ ID NO: 790494 - DNA, 120 bp, Artificial Sequence
  ENSG00000269113_21 (sequence is synthesized)
ttgctcttggatcaccgaagcctcctgggtctgggtttggcttctccgactgtggggccctcagcaggaggggcaggcaggcaggcttagcctttgtgaagctggatttgggagccagag

SEQ ID NO: 790495 - DNA, 120 bp, Artificial Sequence
  ENSG00000269113_22 (sequence is synthesized)
gtgtgaacgttggccatcctcccctctgctggatgcacccgcggcctgggaagataatttaggaaagagaatgctgctattgtgaaacccctgagtgtctatctggccctccagagctct

SEQ ID NO: 790496 - DNA, 120 bp, Artificial Sequence
  ENSG00000269113_23 (sequence is synthesized)
tggtaagtgttttcaaccaaagcgctggggtggggtgggaggtgggatactggtgctgaggaaagcagtccccaccccacagaacaaatgaataaactgagatccagagagaaccaggtg

SEQ ID NO: 790497 - DNA, 120 bp, Artificial Sequence
  ENSG00000269113_24 (sequence is synthesized)
ggtagcccaaggtcacacggcaagtgggagagtgaggacataaatccagacctctctgttctggtgtcatgaatccagcttgggttaaaggagaggctgttgaagtcctggctaaatgga

SEQ ID NO: 790498 - DNA, 120 bp, Artificial Sequence
  ENSG00000269113_25 (sequence is synthesized)
ttgagctgggccgagggactggagtgggcacaggagggcagttttagagacaggggcttaggcctcacatgatgttaatagtaatgagagctgccatttttccaaagcctgcagcgtggc

SEQ ID NO: 790499 - DNA, 120 bp, Artificial Sequence
  ENSG00000269113_26 (sequence is synthesized)
aagcactttgcacacttgcttcactgattcttgcgctagttctgtgagatgtgactatccccatttcacagatgaggaaactgagccccccaaagaggcgaagggacttgctgaagatcc

SEQ ID NO: 790500 - DNA, 120 bp, Artificial Sequence
  ENSG00000269113_27 (sequence is synthesized)
cccagccaggatgtggccccagatcagtgtgatgcaaaacaattcctgcctcctgttccctgttctgccacgttctctctgcaagggagcagatctcacccaaactggggccagcacaag

SEQ ID NO: 790501 - DNA, 120 bp, Artificial Sequence
  ENSG00000269113_28 (sequence is synthesized)
ctttcactccaccaagaaaccttttggccggctgcttatgttgacccctctggccaaagggctctggcaactgcatgtgccatgtgtcgcatgtcctgacttgccagatcttggagccca

SEQ ID NO: 790502 - DNA, 120 bp, Artificial Sequence
  ENSG00000269113_29 (sequence is synthesized)
cgagaagctttcctgccaaatcaaaggctgagaggtgggcacagctgtggggcacctggggaggcacagcagccaagtggggaggcaggtgacagggactccgagagactttagcccctc

SEQ ID NO: 790503 - DNA, 120 bp, Artificial Sequence
  ENSG00000269113_30 (sequence is synthesized)
ggctcctcaaggtggtggttgaggagacagaggacccaggtgggctaactcccacctgggaggcctgaaaccctatggggcaggtgcctcagtaattacagagtcctggaacctgacagc

SEQ ID NO: 790504 - DNA, 120 bp, Artificial Sequence
  ENSG00000269113_31 (sequence is synthesized)
cacagccgggtgggcctgctgactcccagcccagtgcaccccaactttatagcttcgtgggtttccctggcaggcttgatggcagctaattggccccagtgccatcttgcccagcttggc

SEQ ID NO: 790505 - DNA, 120 bp, Artificial Sequence
  ENSG00000269113_32 (sequence is synthesized)
agctatctcccttctgagacggcaagttctgggcagctcatgggatggtcaggagtcccacgggcatcttggcaggcagctgaattctttacagctcagccctgatggacgtgtttgagc

SEQ ID NO: 790506 - DNA, 120 bp, Artificial Sequence
  ENSG00000269113_33 (sequence is synthesized)
ttgagacctggcaggagactggagctctgccttagagggcccagccagccctgtgggcaccatgctctaaactgaacttgacctcaatccaggctggagttggtttatccttggcaaaaa

SEQ ID NO: 790507 - DNA, 120 bp, Artificial Sequence
  ENSG00000269113_34 (sequence is synthesized)
tgtgacttcctatttctgagcgggaaggggcttagctgacttataaagcaggctcagaagttggacatcaaacggatcgtgcagtgcactatttggatgagataagtgtaaaggaattag

SEQ ID NO: 790508 - DNA, 120 bp, Artificial Sequence
  ENSG00000269113_35 (sequence is synthesized)
aagcacacaggccagattcctctctgtttggggcagagtatggcgtgagacgtattgagatggagcttgaggttaattaaagatgaagcatttgggtaaacagtccaggcacctgaccgt

SEQ ID NO: 790509 - DNA, 120 bp, Artificial Sequence
  ENSG00000269113_36 (sequence is synthesized)
gtgcccagatctgtgccaggcactgagccaagaaggtaaattaatgcagcttgtaattactgagcacatgcaatgccaggctctgtattagagctgaatctaaccactctccttggccca

SEQ ID NO: 790510 - DNA, 120 bp, Artificial Sequence
  ENSG00000269113_37 (sequence is synthesized)
gaggaactcattatcaagatgggacaagcagtgcaatgctagattacgtcgtcctggcccctaacttcaggaagattcagccttagtctttcccagatccctcctctgggcatattaggg

SEQ ID NO: 790511 - DNA, 120 bp, Artificial Sequence
  ENSG00000269113_38 (sequence is synthesized)
gatcctaaactctcccttaccctaattcaagtgtttaaagaaagatggctagactaaccgatggagtagacatgtacctacaggagagcaagagccaatgtggtcagacatctgttgcca

SEQ ID NO: 790512 - DNA, 120 bp, Artificial Sequence
  ENSG00000269113_39 (sequence is synthesized)
aagttcactgatctctgaggaccaccagctggccagggtctgaaatgaactcaacttgctgacttatgacccaaaagacttgaggcacatatgcaggaatctgcatgtctggggcacttg

SEQ ID NO: 790513 - DNA, 120 bp, Artificial Sequence
  ENSG00000269113_40 (sequence is synthesized)
aattctctcatcctgggccagagaaccaccattccataagcagcaacccacacctttgacacgatctatccaccactaactgacatttcttccagaaacgttctttgtgcccagcctcat

SEQ ID NO: 790514 - DNA, 120 bp, Artificial Sequence
  ENSG00000269113_41 (sequence is synthesized)
aaaatgctcctgttgctctgagaaatttgtgtgcacttcttagacttttctgtttgactgtgaggcaggcaggaaagatgaaaggtctgagacccagcaggtaaagtgatctgcttaagg

SEQ ID NO: 790515 - DNA, 120 bp, Artificial Sequence
  ENSG00000269113_42 (sequence is synthesized)
tcgggcagcatgttattgtggccctgggtcctctacctctcacgaaagctgactgtgtgatgaagggctctctggggcatgttggaatggccatgtccccaggtcttcctccagtggtgg

SEQ ID NO: 790516 - DNA, 120 bp, Artificial Sequence
  ENSG00000269113_43 (sequence is synthesized)
gtctgatgcaccagcagccagatgaagacagggagagccctgtcatccacagtggagggagaagaatcaggctgccagggagctgcaaagggctgctgaggatgcctccagtcctgagag

SEQ ID NO: 790517 - DNA, 120 bp, Artificial Sequence
  ENSG00000269113_44 (sequence is synthesized)
tcaaagatctgggatctaggaagcatggaaccttgtgctggttatgaacaaatttgtccttgcattgaaagaccctaagcatattttcttcatgctaaataatgtgttatctacaacttc

SEQ ID NO: 790518 - DNA, 120 bp, Artificial Sequence
  ENSG00000269113_45 (sequence is synthesized)
ctggcctcggctagacctggacaagcctaggtgctcaggccccttgtcccacttgcctaatctccagcccagggccattgtcacagtggatcccaaagaggagggaaagtccttctacca

SEQ ID NO: 790519 - DNA, 120 bp, Artificial Sequence
  ENSG00000269113_46 (sequence is synthesized)
aaaggaaagtctattgaaaatgctgtgaaggacaagagaagttctccagggaattgcagctttgatggcatcctgtgtggcagacagcagaattggggctggtgatagtttttcagtgac

SEQ ID NO: 790520 - DNA, 120 bp, Artificial Sequence
  ENSG00000269113_47 (sequence is synthesized)
tgtgagataagaaccagagtcctcagcctcaccctgaagtgtccgctagacccttcgtgacccaaccctgctgaccagccacgtctctcatgtctcttaccctgtgcctggccagcgtga

SEQ ID NO: 790521 - DNA, 120 bp, Artificial Sequence
  ENSG00000269113_48 (sequence is synthesized)
tgtgcagtcatctctagaatagacaggatgtttcacacatgctgctccctacccctggaaactcccttctctcccctgtaactgctcatccattgaggatcaacacagatagcacttcct

SEQ ID NO: 790522 - DNA, 120 bp, Artificial Sequence
  ENSG00000269113_49 (sequence is synthesized)
ccaggaagccccctcccattcctttgtgctttcttagcatctatcacaatacccactgcccagtgttgtgactatctagtgtgtatctgctcctctcggactgtgagcagcttaatggca

SEQ ID NO: 790523 - DNA, 120 bp, Artificial Sequence
  ENSG00000269113_50 (sequence is synthesized)
ggggtcatgtaaatttgtttttgtaccctcatctgacacaaaggtggtgctcaacagatgtgtagagagagaaaggaagggaaggaagctgaaggaaggggaggaagaaaggaatgaagg

SEQ ID NO: 790524 - DNA, 120 bp, Artificial Sequence
  ENSG00000269113_51 (sequence is synthesized)
cagaaaagaaggagagaggcagaccttagttccaccagtggcataatttccaccaagccaaagctgtctggggatggcccggagcccccaagggtggcaggtttcccatcgggagaggtg

SEQ ID NO: 790525 - DNA, 120 bp, Artificial Sequence
  ENSG00000269113_52 (sequence is synthesized)
tttgagcaggggcagtgtgcccactggctgaagaagtggtaggagagttgacatcttgccaagggcctggtgtagatgacattgagggtccctcctggctctgcaatgatcaagttctat

SEQ ID NO: 790526 - DNA, 120 bp, Artificial Sequence
  ENSG00000269113_53 (sequence is synthesized)
gaacattgttatttttccagaaattcatctgagcagccaaaaaaaatcaccccgctggctgtctaaaccagtaaggttcaggaataagtccagcctccccactccacccacaaccaccac

SEQ ID NO: 790527 - DNA, 120 bp, Artificial Sequence
  ENSG00000269113_54 (sequence is synthesized)
cacccctcacagcgcccccttcaatgacccagctgggcttgactgctgcctttgggtgggggaacttctgaaaggtggaggaggagtgaactggaacccaggcctgcagcccagcccaga

SEQ ID NO: 790528 - DNA, 120 bp, Artificial Sequence
  ENSG00000269113_55 (sequence is synthesized)
gctccttcccgctctgccccactccctgaccccaggggaggaaagggttcacgagaactgattgaccccctacttggctctttccagggagcatcggctatcctcaccctttctccaagt

SEQ ID NO: 790529 - DNA, 120 bp, Artificial Sequence
  ENSG00000269113_56 (sequence is synthesized)
gggagctgggctcttcctttccggagatactctggatactccttcactttgctggatgaccttgggcaagttcctgtccctctctgagccttcacttcctcatctgtcaaatgaagacct

SEQ ID NO: 790530 - DNA, 120 bp, Artificial Sequence
  ENSG00000269113_57 (sequence is synthesized)
tgattcctgcctgggcagttctagggctggagggcaggggtgacatggacaatcttgggcctccatggagatgaggtgcttggctttcttcccaggacccacaggctgccatgggattga

SEQ ID NO: 790531 - DNA, 120 bp, Artificial Sequence
  ENSG00000269113_58 (sequence is synthesized)
aagcatgtggaggtgggaaaggtgacagagtagcatgcctccaaggcccccttcatcccagtcctgctgtggggaaagtgggctttgaacgggatccaagtctaagatgtttccggtgag

SEQ ID NO: 790532 - DNA, 120 bp, Artificial Sequence
  ENSG00000269113_59 (sequence is synthesized)
ctgccagggacaaagggctctcagacatcttgggtccccagtggctggggtgggcaggggctgattcagccaaaggaggctctagcccagaacagaggaagccagagcccctgccccatt

SEQ ID NO: 790533 - DNA, 120 bp, Artificial Sequence
  ENSG00000269113_60 (sequence is synthesized)
cttgagcctcacagagcttgtccccgagttgattcactgtgcaacacaggcttcagattcatgtatttgaaaggtattcatgatgttgttctcttatcacctctgcccctcacctctgtg

SEQ ID NO: 790534 - DNA, 120 bp, Artificial Sequence
  ENSG00000269113_61 (sequence is synthesized)
cctctgtgaattatcatgaagagtcctttaagagtataaatagaagacaaagaaagatgctattaatgttattttgccaaaaatatttttgtagcataatatattaataaaagatattat

SEQ ID NO: 790535 - DNA, 120 bp, Artificial Sequence
  ENSG00000269190_0 (sequence is synthesized)
gcagccgccacgccccgggagaggaccgaccgcccagaccgccggtcccggggccccctgggccacgccgatcacggggagcccctcgactgcctcccagaacaaagtgggaaagggaag

SEQ ID NO: 790536 - DNA, 120 bp, Artificial Sequence
  ENSG00000269190_1 (sequence is synthesized)
cttagcccgccgctgccgcctccgagcagcccgccaggactctggctactggagatgggcgcccggctatcgcggcgacggctgccggcggacccatccctggccctggacgcgctgccc

SEQ ID NO: 790537 - DNA, 120 bp, Artificial Sequence
  ENSG00000269190_2 (sequence is synthesized)
ccggagctgctggtgcaggtgctgagccacgtgccgccacgctccttggtcacgcgatgccgcccagtgtgccgcgcctggcgcgacatagtggacgggcccactgtgtggctgctgcag

SEQ ID NO: 790538 - DNA, 120 bp, Artificial Sequence
  ENSG00000269190_3 (sequence is synthesized)
ctggcccgcgaccgcagcgccgagggccgcgcactctacgcagtggctcaacgctgcctgcccagcaacgaagacaaggaggagttcccgctgtgcgccctggcgcgctactgtctgcgc

SEQ ID NO: 790539 - DNA, 120 bp, Artificial Sequence
  ENSG00000269190_4 (sequence is synthesized)
gcgcccttcggccgcaatctcatcttcaactcctgcggagagcagggcttcagaggctgggaggtggagcatggcgggaacggctgggccatagaaaagaacctaacaccggtgcctggg

SEQ ID NO: 790540 - DNA, 120 bp, Artificial Sequence
  ENSG00000269190_5 (sequence is synthesized)
gctccttcgcagacctgcttcgtgacctctttcgaatggtgctccaagaggcagcttgtggacctggtgatggaaggggtgtggcaggagctgctggacagcgcccagattgagatctgt

SEQ ID NO: 790541 - DNA, 120 bp, Artificial Sequence
  ENSG00000269190_6 (sequence is synthesized)
gtggctgactggtggggcgctcgagagaactgcggctgcgtctaccagctccgggtccgccttctggatgtgtatgaaaaggaagtggtcaagttctcagcctcacctgacccggtcctt

SEQ ID NO: 790542 - DNA, 120 bp, Artificial Sequence
  ENSG00000269190_7 (sequence is synthesized)
cagtggactgagaggggctgccgacaggtctcccacgtcttcaccaactttggcaagggcatccgctacgtatcttttgagcagtacgggagagacgtgagttcctgggtggggcactat

SEQ ID NO: 790543 - DNA, 120 bp, Artificial Sequence
  ENSG00000269190_8 (sequence is synthesized)
ggcgcccttgtgacccactccagtgtgagggtcaggatccgtctgtcctagcgactggactactgcctgacgttgtcagtcaagaccagccttgcagccaggtgcagtggctcacacctg

SEQ ID NO: 790544 - DNA, 89 bp, Artificial Sequence
  ENSG00000269190_9 (sequence is synthesized)
agaccagcctgggcaacatagtgaaaccgtctccacaaataatttttaaaaaattagccaggcatggtggtggggtgggaggattgcct

SEQ ID NO: 790545 - DNA, 120 bp, Artificial Sequence
  ENSG00000269190_10 (sequence is synthesized)
gagaccaggaggttgaggctgcagtgagccgtgatttcaccaccactccagcctgggtgagaaagcaagaccctatatcaatgaaaaaaaaaaaaaaaaagaccagctttgcagccagaa

SEQ ID NO: 790546 - DNA, 120 bp, Artificial Sequence
  ENSG00000269190_11 (sequence is synthesized)
gccagaggatacccagggacagtagggctcccaggtggctggttctcagcacaccttccatgaatctgcttgctgctgcttcagtgtggtggccatcatgctgtgtgacaaaccaggctg

SEQ ID NO: 790547 - DNA, 120 bp, Artificial Sequence
  ENSG00000269190_12 (sequence is synthesized)
ttcacagcttcctcagccccccagaaggggagtgtcaggaagagacatttagttcatttgcctgcaaattttcttctcctgcaaggatctcggtggactcagtcacaaaacaaaggctaa

SEQ ID NO: 790548 - DNA, 120 bp, Artificial Sequence
  ENSG00000269190_13 (sequence is synthesized)
accaggatttataagagagggcttataaatccctctgccgacgcagggagcagagacttgccggcatgttttgggggtaatgatcgtgggcagggagcagaggtccgctgaggcagtctg

SEQ ID NO: 790549 - DNA, 83 bp, Artificial Sequence
  ENSG00000269190_14 (sequence is synthesized)
tgatcgtgggcagggagcagaggtccgctgaggcagtctgtccttgagactaacaaagtcatctgctgtttggggaaatctct

SEQ ID NO: 790550 - DNA, 90 bp, Artificial Sequence
  ENSG00000269190_15 (sequence is synthesized)
ggccataaacaaaatatctgcagcactgtgacatgtttgtgatggccatgacccccaccctgaaggttgtgggtttactggaacgagggc

SEQ ID NO: 790551 - DNA, 72 bp, Artificial Sequence
  ENSG00000269190_16 (sequence is synthesized)
ccagggcggaaaaccgcttaaaggggttcctgaaccacaaaccatagcataagtgatctgtgccttaaagcc

SEQ ID NO: 790552 - DNA, 120 bp, Artificial Sequence
  ENSG00000269190_17 (sequence is synthesized)
atagaaatcactgagaatgatgctaagagcagcgggagcggccgtgagcccagagctaaaattagggagaagagaggagtcatgatctgggtcagcagatgacgcatgaagcaaggactc

SEQ ID NO: 790553 - DNA, 120 bp, Artificial Sequence
  ENSG00000269190_18 (sequence is synthesized)
tgggtccagactagcttccagctccccccgacccgctaaaggcacacacgcccagcctctcgtctgctcggtttcccttctgtcactcctggatatctataatcataacagctaagaagt

SEQ ID NO: 790554 - DNA, 120 bp, Artificial Sequence
  ENSG00000269190_19 (sequence is synthesized)
atcgagcccttcttacatcccaagccctgtgtcaagacgcttacatatcgattcatttcattagcaaaaccccttaatgttcaacaaacactgattgagcacctactgtgtgctgggcac

SEQ ID NO: 790555 - DNA, 120 bp, Artificial Sequence
  ENSG00000269190_20 (sequence is synthesized)
tgatccgcctgcctcgggctctcaaagtgctgggattacaggtctaagccaccgcgctcagccggttcctggcactttgttctattccattgctcaacttacccatccttccaccaatac

SEQ ID NO: 790556 - DNA, 120 bp, Artificial Sequence
  ENSG00000269190_21 (sequence is synthesized)
tgcacaatttatgttattatggcacattctagtttgaggagaaggactgtttacaaagttgtaggcaggagcccctgagctagtaacagttaggaaaggaacgttaccacccctagactg

SEQ ID NO: 790557 - DNA, 120 bp, Artificial Sequence
  ENSG00000269190_22 (sequence is synthesized)
ctagaggtgaggggaggaaacagttactggaaaatgaggagagagtgccatggagatttgctttttccttgggggacaaggcagtcccttgagaaggacctaagaggataaataccctga

SEQ ID NO: 790558 - DNA, 120 bp, Artificial Sequence
  ENSG00000269190_23 (sequence is synthesized)
ttttagtcacctctttcacttccatcccctgccggagcatcccattggctgatccaacaggaagcaatgggtgacagagacaaggctgtccagctttagacccggggccctcacacttta

SEQ ID NO: 790559 - DNA, 120 bp, Artificial Sequence
  ENSG00000269190_24 (sequence is synthesized)
ggaggccacagagctccccgctcacatgtctagtatgtggccttcatttgtagtcatgtcctgtcccacaaagatgagggtcaggctttcatagaggtcagctgcctggagcccgcagca

SEQ ID NO: 790560 - DNA, 120 bp, Artificial Sequence
  ENSG00000269190_25 (sequence is synthesized)
gggtggagaatggcaaagggactccaagaggccaaggagagatgtatagcccatcatgcatcttcaggtctgctagagcaaaccctgagggctgctttagagagggttatcaagggagac

SEQ ID NO: 790561 - DNA, 120 bp, Artificial Sequence
  ENSG00000269190_26 (sequence is synthesized)
agcagcaggcttggcagcggctctgcaacaggggctcatttcccgccccatcaaccccacgggtagcggctgtcactgtgcaccctttgtgatgaggctgagaggggaagtgatgcagag

SEQ ID NO: 790562 - DNA, 120 bp, Artificial Sequence
  ENSG00000269190_27 (sequence is synthesized)
ccggggaaggtagagctttggagaagccagagcccccactctgcactcctgcccaccctcatcccagcaggctggggtggtccacagggggccactgactggcttgatacccctctgaaa

SEQ ID NO: 790563 - DNA, 120 bp, Artificial Sequence
  ENSG00000269190_28 (sequence is synthesized)
cgagacacctcccctgaccaccttgtggatgcccagggtctctgaaggggtgggagcatggtgccctgtgagctgaggctcagggagcatagttgggacaggactggcttcagagcctac

SEQ ID NO: 790564 - DNA, 120 bp, Artificial Sequence
  ENSG00000269190_29 (sequence is synthesized)
aggcttaggatgaatgccttcttcccaaaacacccaggttctgccccaaagcattccagctcctccttcaggctgtggctcttccatagaaaatctggtctcttccctggggctctggct

SEQ ID NO: 790565 - DNA, 120 bp, Artificial Sequence
  ENSG00000269190_30 (sequence is synthesized)
cttccctgaagtcatcaggcacctgccctgcattgtggttcttccccagagcatcctttcccgtcccccaactacctacccaaaagcctccagaatcaaccgcaggaccacccaggctcc

SEQ ID NO: 790566 - DNA, 120 bp, Artificial Sequence
  ENSG00000269190_31 (sequence is synthesized)
tcccccaggaccacccaggctcctcccctgctctggctccaccccaggaccacccagactcctcccccaggctctggctccaccccagggctctggctccaccccaggaccacccaggct

SEQ ID NO: 790567 - DNA, 120 bp, Artificial Sequence
  ENSG00000269190_32 (sequence is synthesized)
cctcccccaggctctggctcctccccaggaccacccaggctcctccgccaggctctggttccaccccagaaccaccaaggctcctcccctagaggttcccaggccaggacgtctccaaat

SEQ ID NO: 790568 - DNA, 120 bp, Artificial Sequence
  ENSG00000269190_33 (sequence is synthesized)
gtggtccagatgtgcaggaccttcatcaagatggagccagccctcagcctcccgccccgaaacccagagagctggctgggtgacgggggcatagaggctgactgctgcctggcaggtggg

SEQ ID NO: 790569 - DNA, 120 bp, Artificial Sequence
  ENSG00000269190_34 (sequence is synthesized)
ccagggtcacccaggcttctcctccaggttctggttccaccccaggaccacccaggctcctcccccaggaccacccaggcccctcccccaggctctggttccaccccaggaccacccagg

SEQ ID NO: 790570 - DNA, 120 bp, Artificial Sequence
  ENSG00000269190_35 (sequence is synthesized)
ctcctcccccaggaccacccaggcccctccccgaggctctggctccaccccaggaccacccagattcctcccccaggaccacccaggcccctcccccaggctctggctccactccaggac

SEQ ID NO: 790571 - DNA, 120 bp, Artificial Sequence
  ENSG00000269226_0 (sequence is synthesized)
aggctaacctggtgcggagccagcctgggtctcagccccgcgtacggcctttcacgagtcttcaagccttcaggctttcttctagtcaagatgagtgataaaccagacttgtcggaagtg

SEQ ID NO: 790572 - DNA, 120 bp, Artificial Sequence
  ENSG00000269226_1 (sequence is synthesized)
gagaagtttgacaggtcaaaactgaagaaaactaatactgaagaaaaaaatactcttccctcaaaggaaactatccagcaggagaaagagtgtgttcaaacatcataaaatggggatctc

SEQ ID NO: 790573 - DNA, 120 bp, Artificial Sequence
  ENSG00000269226_2 (sequence is synthesized)
ctccaaagagcagatttcagcattgcctgacagtcttggttttaggcttgtttttttgtaaacctgtgtgtttgtagagatttcagacatcttctgatttcttctcacctatattccctg

SEQ ID NO: 790574 - DNA, 120 bp, Artificial Sequence
  ENSG00000269226_3 (sequence is synthesized)
cctttgtgtaggtagtccttgcacctcatgcaggataagccaattttaactttctacaatgggtgcctcaatagtttcataatcttcatgaagttgcatcctttggcagcttcttacagt

SEQ ID NO: 790575 - DNA, 120 bp, Artificial Sequence
  ENSG00000269226_4 (sequence is synthesized)
ttattttcacttccaatgtagcaataaaataataaatataatcgttgttgtctgactctgtggttcattctggtggtattctaaggaatgaaaagtacacaaaggtaccttttacactca

SEQ ID NO: 790576 - DNA, 120 bp, Artificial Sequence
  ENSG00000269226_5 (sequence is synthesized)
aacaaaatggttgaaggaaaacttttagcagattagtcctgggggaaaatactaaattctgtccaagtccagtggttcctgacttggggatggtaggtgctttttctttatagttggaat

SEQ ID NO: 790577 - DNA, 120 bp, Artificial Sequence
  ENSG00000269226_6 (sequence is synthesized)
cacagagttagagaaccttgggagagaaggtcatgtggactaacctccttatctcagaatgaggaaatgaaaacacagggtctgaagtaatctgctcaatttgaataagggttggaattc

SEQ ID NO: 790578 - DNA, 70 bp, Artificial Sequence
  ENSG00000269226_7 (sequence is synthesized)
caaacttcgcttcaggcacatcaccaagccaggctaaatttggtatttttagtaaagatggggtttcgcc

SEQ ID NO: 790579 - DNA, 73 bp, Artificial Sequence
  ENSG00000269226_8 (sequence is synthesized)
ctagttttcttaattggtcactgtcattttcttaaacttgtgaacaaatgagaacctaaaagagccaatcttt

SEQ ID NO: 790580 - DNA, 120 bp, Artificial Sequence
  ENSG00000269226_9 (sequence is synthesized)
aaacttgtgaacaaatgagaacctaaaagagccaatctttcaagatggatcccagtggctaactgagcttaaatttaaaatagagccaagctgccacgtgttgactagagctaacacgtg

SEQ ID NO: 790581 - DNA, 120 bp, Artificial Sequence
  ENSG00000269226_10 (sequence is synthesized)
tactacaaattccccgaaaacccacacctctatctaactttggaactttcagagctcacctgaagcaaccaaccagagctcacctgtcgctgccaataagggctcagctgtattgaccaa

SEQ ID NO: 790582 - DNA, 120 bp, Artificial Sequence
  ENSG00000269226_11 (sequence is synthesized)
ccagagctcaactgagtcaaccaatcagaactaagtttgaattgtttatttgcataaattgactgtactgggaacctcgataggaactttctctataaaagccatatcctctctttgttc

SEQ ID NO: 790583 - DNA, 120 bp, Artificial Sequence
  ENSG00000269226_12 (sequence is synthesized)
tctggaactgcacttttgttttacactgaagtctgcacctccctggtttgcaaactgtacacaggaatagcctctttcctccaaattcctttacaaagaatttttcttcacaatatgatg

SEQ ID NO: 790584 - DNA, 120 bp, Artificial Sequence
  ENSG00000269226_13 (sequence is synthesized)
cgagaggtagaagacatgcttacagctgtggattcatatcctgaaatcaccacgattacaataaaacgaaaaatcaaacaaagaaataaaaagtagacaaaaacctcaaactaattttct

SEQ ID NO: 790585 - DNA, 120 bp, Artificial Sequence
  ENSG00000269226_14 (sequence is synthesized)
tttacaaggctgaacagctaggaggagacttattgattcaggacagttcacctgctcacattttgagccaatggctgaggcccaggactggagatacttcattagtttagccagtggaga

SEQ ID NO: 790586 - DNA, 120 bp, Artificial Sequence
  ENSG00000269226_15 (sequence is synthesized)
gtggggtttggatgctctcattggatacttctatcataagtgatgcatactcataggggttaagctttgcattaaaaaagattgtagactgggaaataatataattagacaaatgtgaat

SEQ ID NO: 790587 - DNA, 120 bp, Artificial Sequence
  ENSG00000269226_16 (sequence is synthesized)
gacttagagcagttatttcagtttctaggaagcttaaaaagggttcattgatttatttgactcagctatttctgcactgtgggtttttgttatgtgtttaaatgaattctataacagagg

SEQ ID NO: 790588 - DNA, 120 bp, Artificial Sequence
  ENSG00000269226_17 (sequence is synthesized)
taatgttgaaaaaagattgtatgaggtctgcttgttccattagtaatgtttgtcccagttcgatccttctgaatttttatttatagcagtaaactgtttccctgtgtgtgcgtgtgtgtg

SEQ ID NO: 790589 - DNA, 120 bp, Artificial Sequence
  ENSG00000269226_18 (sequence is synthesized)
tgtgtgtgtgggtgggtgtgtgtaatgtaatttaattactagtatttcaggtatgagttttgtaaccacatttataaatgagctgctcatatatatacatatacatatatatatatgtat

SEQ ID NO: 790590 - DNA, 90 bp, Artificial Sequence
  ENSG00000269226_19 (sequence is synthesized)
atttagtatgcttccttcaatgggtatcaacatcatattatattttcttgaaataagttttgtcggctgggcgcagtagctcatgcctgt

SEQ ID NO: 790591 - DNA, 120 bp, Artificial Sequence
  ENSG00000269226_20 (sequence is synthesized)
ggaggatcgcttgagtccaggagttctacaccagtctggggaaacatgatgaaaccacatctctacaaaaaaaaaatatgaaaactagccgggcgtggtggtgcgcgcttctagtcccag

SEQ ID NO: 790592 - DNA, 120 bp, Artificial Sequence
  ENSG00000269226_21 (sequence is synthesized)
ctctgtctcaaaaaaagaaaaagttttctctctttaaacctggaaccatcttactagcaataaatgacctgatcttaaaagtctgacaggaaacagcattggaatttgggatggtacctt

SEQ ID NO: 790593 - DNA, 120 bp, Artificial Sequence
  ENSG00000269226_22 (sequence is synthesized)
cttggtgattgctatttctttaattcttcttaatcgctaaatccttgtttggttcagtttctgggatttatgttttacattcatatatttaataaatgtttctgaatgtattatcataga

SEQ ID NO: 790594 - DNA, 80 bp, Artificial Sequence
  ENSG00000269313_0 (sequence is synthesized)
atggagccgcgcacaggggacgccgcggaccctagggggagcagaggaggccgcggcccctccccgctcgcgggccctag

SEQ ID NO: 790595 - DNA, 120 bp, Artificial Sequence
  ENSG00000269313_1 (sequence is synthesized)
gcggcgcgagctgcggtcgacgtggcagcgctggtacgcagggcgggcgccacattgcgcctgcgccggaaggaggctgttagcgtgctggactctgcggacatagaggtcacagacagt

SEQ ID NO: 790596 - DNA, 120 bp, Artificial Sequence
  ENSG00000269313_2 (sequence is synthesized)
cgcctgcctcatgccactattgtggatcaccggccccagcaccgttggttagagacatgtaacgcacctccccaattgatccagggtaaggcacgtagtgctccgaagccatcccaggcc

SEQ ID NO: 790597 - DNA, 120 bp, Artificial Sequence
  ENSG00000269313_3 (sequence is synthesized)
tctggtcatttctctgtggagctggttcgcggttacgcaggctttggcctcaccttaggtgggggccgggatgtagctggggacactccgctggccgtgcgcgggctgctgaaggatggc

SEQ ID NO: 790598 - DNA, 120 bp, Artificial Sequence
  ENSG00000269313_4 (sequence is synthesized)
ccagcacagcgctgtggtcgtttggaggtcggggacctcgtgctccacatcaacggagagtcaacgcagggcctcacccatgcccaggccgtggagcggatccgagctggaggcccccag

SEQ ID NO: 790599 - DNA, 120 bp, Artificial Sequence
  ENSG00000269313_5 (sequence is synthesized)
tggcaagcctcgaggggtgggagagccccgaaaaggagttgtcccgtcatggccagatcgcagcccagatcctggagggccggaggtaacggggtctcgcagcagcagcacttccctagt

SEQ ID NO: 790600 - DNA, 120 bp, Artificial Sequence
  ENSG00000269313_6 (sequence is synthesized)
tcagcaccctccatcccggacgacgctcaagaagacccggggcagcccggagcctagtccagaggcggccgccgatggccccacggtttctcctcctgagcgccgcgctgaggatcccaa

SEQ ID NO: 790601 - DNA, 120 bp, Artificial Sequence
  ENSG00000269313_7 (sequence is synthesized)
cgaccagatcccgggttccccggggccctggctagtgcccagcgaggaacggctctcgcgggccctaggggtccggggggcagcgcagctcgctcaggagatggcagccggaaggcggag

SEQ ID NO: 790602 - DNA, 120 bp, Artificial Sequence
  ENSG00000269313_8 (sequence is synthesized)
acactgagcctacctctgacagcgcggggctcactagttaccgcccaacctggatccggcgcgtgtggccgctgggcacttggcacctccccaagagcttccacttggtttggtcccccc

SEQ ID NO: 790603 - DNA, 120 bp, Artificial Sequence
  ENSG00000269313_9 (sequence is synthesized)
acccgctgctcagtggctctgaccacactcccctcgcagcgtcagtggtacgacccttccagccggctagcctgcgcttctggttctgggagggggaggtaataaaatggttcgatccgg

SEQ ID NO: 790604 - DNA, 120 bp, Artificial Sequence
  ENSG00000269313_10 (sequence is synthesized)
gagtgactggcgcagggcctccgctgggggagggttcggagaggagttgggttcagtgggacaggcctggggggtcagcagctactgccctgtcttgggtggggccaaggggcgcgactt

SEQ ID NO: 790605 - DNA, 120 bp, Artificial Sequence
  ENSG00000269313_11 (sequence is synthesized)
ggggcggggatcggagggtgcttcgagtgggaggagccttggggttattctagcatattccttgagggttattgcagtcggcgagggctagattagatgagagtgcggaactggaccccc

SEQ ID NO: 790606 - DNA, 120 bp, Artificial Sequence
  ENSG00000269313_12 (sequence is synthesized)
gttctggcggcggtcctttttgaggaggcagggcctggagagtgcttggggggcgggcacgcagcgaaggggcaggcctgaaatgtgagtcacgggggtggagcctatagtcccatgggg

SEQ ID NO: 790607 - DNA, 120 bp, Artificial Sequence
  ENSG00000269313_13 (sequence is synthesized)
gcggggcttgagatgtcaggaatgggatgagggttagaggctaattagagggcgtgctatggaaggttcaggagccaaattttggagtagcattctccagggtgggccgaatggtgttgt

SEQ ID NO: 790608 - DNA, 120 bp, Artificial Sequence
  ENSG00000269313_14 (sequence is synthesized)
ttgagggatgtgttctgcgtgttattagagggagataggaaggcctggaagattattcacatggctgagcccaggattgtttattaagaaggtggggtcagaacagttaatttgtttggg

SEQ ID NO: 790609 - DNA, 120 bp, Artificial Sequence
  ENSG00000269313_15 (sequence is synthesized)
ctgagaacctttaagattacttgaggggatggtgcgtaaatggtgggccagtttgtatatgagctgcaggggcaagacaagtagatgaggctagaatgttaactcagggaacaggtccta

SEQ ID NO: 790610 - DNA, 120 bp, Artificial Sequence
  ENSG00000269313_16 (sequence is synthesized)
ggtagtttccatggcatgtcccccaacagccctctccactgcttttatctcccagctgttagcgtgctggactctgcggacatagaggtcacagacagtcgcctgcctcatgccactatt

SEQ ID NO: 790611 - DNA, 120 bp, Artificial Sequence
  ENSG00000269313_17 (sequence is synthesized)
attttacatttccaccggaggtataggagttccatttcctccatatcttcagcaacagttggtattgtcaggcttttaaattctaactaggacctttagttaacagagtgcggcgcctgc

SEQ ID NO: 790612 - DNA, 120 bp, Artificial Sequence
  ENSG00000269313_18 (sequence is synthesized)
tctcttcgccgtctcctgctcctctccttattcattaatttcacctttttggaggtgtacagggtctcacacataaattattgtgcatggcatggagaatgcagaggtgagcctgtcgtg

SEQ ID NO: 790613 - DNA, 120 bp, Artificial Sequence
  ENSG00000269313_19 (sequence is synthesized)
gcaggactgcaccagtgtatccacagtcctgtctcggaatcatacagaccctcagctgacgtcgggatagcaaggctagaagcctagaagcagggcagcttccttcgccagaggcctgcg

SEQ ID NO: 790614 - DNA, 120 bp, Artificial Sequence
  ENSG00000269313_20 (sequence is synthesized)
gtctcccacttccggcctagtctgccagcttttgctggcacgtaggctaccactctccgggcaccggctggggtcctggagccccctttggggcggagtggggaaggtgtgagtcagcgc

SEQ ID NO: 790615 - DNA, 120 bp, Artificial Sequence
  ENSG00000269313_21 (sequence is synthesized)
ccctggacgggccgggctaaaaaaggctgttagaacctttgggccgtgcccccattttccgtacatggtgaagaactgcagccgggcttgtgtgcacacgccacacactgggcgttcccg

SEQ ID NO: 790616 - DNA, 120 bp, Artificial Sequence
  ENSG00000269313_22 (sequence is synthesized)
gcacgggagaggcccagagtttccttcaccctgggaacagagccctacagccagggcttatatggccagcgggactccaaccggggtagccgcgaggaaggcgctggcagaggacagaaa

SEQ ID NO: 790617 - DNA, 120 bp, Artificial Sequence
  ENSG00000269313_23 (sequence is synthesized)
tgtccagtcacctccgctgtcaccacatcctgagcactcggccccatccccccacaggagggaagctgtggtctgacggaatgggcaactttcgcccctgtggggaggggacggggaagg

SEQ ID NO: 790618 - DNA, 120 bp, Artificial Sequence
  ENSG00000269313_24 (sequence is synthesized)
aagaaagaatttaaaggaccggaatgcgagagtccaggtggccttggagaggaaagaggaacggtgaagacaagctgcgagagctgggagctggagggtgaagaggtgaacacttgagtg

SEQ ID NO: 790619 - DNA, 120 bp, Artificial Sequence
  ENSG00000269313_25 (sequence is synthesized)
gttagagctgtagatagacattgtggggaagtgtgccagggtggcttccagctacccctgacttagagcctggtggaggtgtggttcttcagaagtcagcaaagggctcaagagccccag

SEQ ID NO: 790620 - DNA, 120 bp, Artificial Sequence
  ENSG00000269313_26 (sequence is synthesized)
tctataaatacagtcacacccaggagactaataatagtaaccccagccaccatgtacttagttttatccctgctactggctttattgcaatatttattttcatctacaatagttgcacat

SEQ ID NO: 790621 - DNA, 120 bp, Artificial Sequence
  ENSG00000269313_27 (sequence is synthesized)
ctactcaactatccgaatatgtccatttcgcagaggaggaaagtgaggcccagggagtgcagatagctacagagaggagggtcaaagcacgatttaatcaaggcctgattcccaagtctg

SEQ ID NO: 790622 - DNA, 120 bp, Artificial Sequence
  ENSG00000269313_28 (sequence is synthesized)
tcctctcaatttcacctgcattgacaagtattaattgaaccccaactgtatatgttgcactgtgctaggtactgtggagatgctggaggaacaagacataaaatttctttgtgtagctga

SEQ ID NO: 790623 - DNA, 120 bp, Artificial Sequence
  ENSG00000269313_29 (sequence is synthesized)
gaacaagacataaaatttctttgtgtagctgatgtatgtaatgagagtagacagatgtcagacaaaaaagacgagaaaatgaataaataaaaaaccaggccaggcgtggtggctcacgcc

SEQ ID NO: 790624 - DNA, 120 bp, Artificial Sequence
  ENSG00000269313_30 (sequence is synthesized)
aacagagtgcggcgcctgcagcagagtgaggccaagcactcctcctggctcctacagccaggcctccttgctggccgccaggtaggtcaccgcgcgggtccgggagccaggcacgggacc

SEQ ID NO: 790625 - DNA, 120 bp, Artificial Sequence
  ENSG00000269313_31 (sequence is synthesized)
cgccagcttcagcctccagggcctgggcgggccgccaggtgagcgcgccccagagctcaaaattcgtagctggcagccctgcgtccacccggcggactactggccatggagccgcgcaca

SEQ ID NO: 790626 - DNA, 120 bp, Artificial Sequence
  ENSG00000269313_32 (sequence is synthesized)
ggggacgccgcggaccctagggggagcagaggaggtacagggattggggtcgttggggaaggacagggcgagtcgccgccatccccgtcccgcctgtctgctccacaccttttccttctg

SEQ ID NO: 790627 - DNA, 120 bp, Artificial Sequence
  ENSG00000269313_33 (sequence is synthesized)
acaggtggtaaacagagcggctctggcgcccaagtgaaggtggcagggggcaggggcccagcgatggaggctgggctggaggtcccctacccacacccacacacgagggaaagggccgcg

SEQ ID NO: 790628 - DNA, 120 bp, Artificial Sequence
  ENSG00000269313_34 (sequence is synthesized)
caccagagcaggggaggggctctcaggagtctccagggagacgtgcagatgtgcggggaggggtctgcccgtggtcactggggacacctgggcactcagggtcttagtgaactgggggga

SEQ ID NO: 790629 - DNA, 120 bp, Artificial Sequence
  ENSG00000269313_35 (sequence is synthesized)
ggggagctgggggcccctggggacctgtggagggggactctggaggtatgtgggccatggggggaacgggccctctgagggaattcatgggggtagcagcggttgcctaggatacttaga

SEQ ID NO: 790630 - DNA, 120 bp, Artificial Sequence
  ENSG00000269313_36 (sequence is synthesized)
cggggaattgggggttccggggctatggggtcaggccgtgttctcccaggatatctggggaaatggggtcccctgagatatcgcgggcgaagagttgggcatccagggtgattagggggc

SEQ ID NO: 790631 - DNA, 120 bp, Artificial Sequence
  ENSG00000269313_37 (sequence is synthesized)
agtcgaggacctcacggggtgttcggaggtgtctaggactattgcagtcaaacagcgatctccagggacaccgtgggagcaagcgggggtgcaccggctacccgcgacggtcggggatcg

SEQ ID NO: 790632 - DNA, 120 bp, Artificial Sequence
  ENSG00000269313_38 (sequence is synthesized)
cgtgaggggagggacagcagtgacctccgaaactatcgagggagtggccaggggtcgccgggtatcctgaggggcatttctaggtcttcgagcgtccggaagcataggggttggccgagg

SEQ ID NO: 790633 - DNA, 120 bp, Artificial Sequence
  ENSG00000269335_0 (sequence is synthesized)
gttcgcgggtcaagccggccctattgggcagtctcttcttgattcctcccccggagagggcggggcggccgagcgccccgaggctagacgccgccgtccgagagacgagggggcgtgtag

SEQ ID NO: 790634 - DNA, 120 bp, Artificial Sequence
  ENSG00000269335_1 (sequence is synthesized)
gcggtgacgccctgcaaagtggccggcgtgcttatcattaccgagcttccgcgggcctgcagagcctggcggactcagacttctctccggagcgggatgcggccctaccgcggcctcaca

SEQ ID NO: 790635 - DNA, 120 bp, Artificial Sequence
  ENSG00000269335_2 (sequence is synthesized)
cttctcgccggcttcccgagttctcgggggcggggcttgtgtttttacttccggatcccacagctatgacaccggaagccggaagcgtggtagggaagggcgaccgcgaaactgggactt

SEQ ID NO: 790636 - DNA, 120 bp, Artificial Sequence
  ENSG00000269335_3 (sequence is synthesized)
tctcggagcgccggggccctaccagcgttcacagtccgccgctcccacccttctcacgtctgacggactctgctgacagcccttgccctgttggatgaataggcacctctggaagagcca

SEQ ID NO: 790637 - DNA, 120 bp, Artificial Sequence
  ENSG00000269335_4 (sequence is synthesized)
actgtgtgagatggtgcagcccagtggtggcccggcagcagatcaggacgtactgggcgaagagtctcctctggggaagccagccatgctgcacctgccttcagaacagggcgctcctga

SEQ ID NO: 790638 - DNA, 120 bp, Artificial Sequence
  ENSG00000269335_5 (sequence is synthesized)
gaccctccagcgctgcctggaggagaatcaagagctccgagatgccatccggcagagcaaccagattctgcgggagcgctgcgaggagcttctgcatttccaagccagccagagggagga

SEQ ID NO: 790639 - DNA, 120 bp, Artificial Sequence
  ENSG00000269335_6 (sequence is synthesized)
gaaggagttcctcatgtgcaagttccaggaggccaggaaactggtggagagactcggcctggagaagctcgatctgaagaggcagaaggagcaggctctgcgggaggtggagcacctgaa

SEQ ID NO: 790640 - DNA, 120 bp, Artificial Sequence
  ENSG00000269335_7 (sequence is synthesized)
gagatgccagcagcagatggctgaggacaaggcctctgtgaaagcccaggtgacgtccttgctcggggagctgcaggagagccagagtcgcttggaggctgccactaaggaatgccaggc

SEQ ID NO: 790641 - DNA, 120 bp, Artificial Sequence
  ENSG00000269335_8 (sequence is synthesized)
tctggagggtcgggcccgggcggccagcgagcaggcgcggcagctggagagtgagcgcgaggcgctgcagcagcagcacagcgtgcaggtggaccagctgcgcatgcagggccagagcgt

SEQ ID NO: 790642 - DNA, 120 bp, Artificial Sequence
  ENSG00000269335_9 (sequence is synthesized)
gagcgccaggccgcctcggaggagaagaggaagctggcccagttgcaggtggcctatcaccagctcttccaagaatacgacaaccacatcaagagcagcgtggtgggcagtgagcggaag

SEQ ID NO: 790643 - DNA, 120 bp, Artificial Sequence
  ENSG00000269335_10 (sequence is synthesized)
cgaggaatgcagctggaagatctcaaacagcagctccagcaggccgaggaggccctggtggccaaacaggaggtgatcgataagctgaaggaggaggccgagcagcacaagattgtgatg

SEQ ID NO: 790644 - DNA, 120 bp, Artificial Sequence
  ENSG00000269335_11 (sequence is synthesized)
gagaccgttccggtgctgaaggcccaggcggatatctacaaggcggacttccaggctgagaggcaggcccgggagaagctggccgagaagaaggagctcctgcaggagcagctggagcag

SEQ ID NO: 790645 - DNA, 120 bp, Artificial Sequence
  ENSG00000269335_12 (sequence is synthesized)
ctgcagagggagtacagcaaactgaaggccagctgtcaggagtcggccaggatcgaggacatgaggaagcggcatgtcgaggtctcccaggcccccttgccccccgcccctgcctacctc

SEQ ID NO: 790646 - DNA, 120 bp, Artificial Sequence
  ENSG00000269335_13 (sequence is synthesized)
tcctctcccctggccctgcccagccagaggaggagcccccccgaggagccacctgacttctgctgtcccaagtgccagtatcaggcccctgatatggacaccctgcagatacatgtcatg

SEQ ID NO: 790647 - DNA, 120 bp, Artificial Sequence
  ENSG00000269335_14 (sequence is synthesized)
gagtgcattgagtagggccggccagtgcaaggccactgcctgccgaggacgtgcccgggaccgtgcagtctgcgctttcctctcccgcctgcctagcccaggatgaagggctgggtggcc

SEQ ID NO: 790648 - DNA, 120 bp, Artificial Sequence
  ENSG00000269335_15 (sequence is synthesized)
acaactgggatgccacctggagccccacccaggagctggccgcggcaccttacgcttcagctgttgatccgctggtcccctcttttggggtagatgcggccccgatcaggcctgactcgc

SEQ ID NO: 790649 - DNA, 120 bp, Artificial Sequence
  ENSG00000269335_16 (sequence is synthesized)
tgctctttttgttcccttctgtctgctcgaaccacttgcctcgggctaatccctccctcttcctccacccggcactggggaagtcaagaatggggcctggggctctcagggagaactgct

SEQ ID NO: 790650 - DNA, 120 bp, Artificial Sequence
  ENSG00000269335_17 (sequence is synthesized)
tcccctggcagagctgggtggccgctcttcctcccaccggacaccgacccgcccgccgctgtgccctgggagtgctgccctcttaccatgcacacgggtgctctccttttgggctgcatg

SEQ ID NO: 790651 - DNA, 120 bp, Artificial Sequence
  ENSG00000269335_18 (sequence is synthesized)
ctattccattttgcagccagaccgatgtgtatttaaccagtcactattgatggacatttgggttgtttcccatctttttgttaccataaataatggcatagtaaaaatccttgtgcatta

SEQ ID NO: 790652 - DNA, 120 bp, Artificial Sequence
  ENSG00000269335_19 (sequence is synthesized)
agcccgttcctgctccgcgcttctggagcactggccaaggcgggccgattcaggacccaggttacttgggcggcgagctggactgtttctactcctccctcctcctccactgcggggtct

SEQ ID NO: 790653 - DNA, 120 bp, Artificial Sequence
  ENSG00000269335_20 (sequence is synthesized)
gaccctactccttgtgtgaggactcctctagttcagagacatattctgttcaccaaacttgactgcgctctatcgaggtcgttaaattcttcggaaatgcctcacatatagtttggcagc

SEQ ID NO: 790654 - DNA, 120 bp, Artificial Sequence
  ENSG00000269335_21 (sequence is synthesized)
catggcccttgtgatccaggtggggaaactaaggcccagagaagtgaggaccccgcagactatcaatcccagtctcttcccctcactccctgtgaagctctccagcatcatcgaggtccc

SEQ ID NO: 790655 - DNA, 120 bp, Artificial Sequence
  ENSG00000269335_22 (sequence is synthesized)
gagctcaacttagcagagcctgtggggccctgcaacaattagttggaaaagctgaggcatggagcaggcacttcctggcttttaagattggggcctgggagatactcaccgatgcaccca

SEQ ID NO: 790656 - DNA, 120 bp, Artificial Sequence
  ENSG00000269335_23 (sequence is synthesized)
tgatgatgaatatgtgtgtatccgactgatggaaggcatcgccctggaaaagctcttcccgcaggatcccgcacacctgggtccggctcagggccacctgctctgccatgacgctgtctg

SEQ ID NO: 790657 - DNA, 120 bp, Artificial Sequence
  ENSG00000269335_24 (sequence is synthesized)
ctcctcgcccaggggagttgtgcagacggcacctgtttctttcggcaacagtgtgggacagcgagcacggagtcacaaccgggaagctcaccccagccgtggcggccggggttttcacgg

SEQ ID NO: 790658 - DNA, 120 bp, Artificial Sequence
  ENSG00000269335_25 (sequence is synthesized)
ggggtgggccgcgtgggcaccgagcgcctgcgtggccaaccctggtcactcggctgtagccaccagaggtccagctgtgtggcccaaggctccccccataaatcgtgtcattagcacaga

SEQ ID NO: 790659 - DNA, 120 bp, Artificial Sequence
  ENSG00000269335_26 (sequence is synthesized)
acagactccagaaaggtactggtggcaggggactggtctgctgagtcacagcaaccccacgctccaggccgtttgttcctgctgctccctttgggattaactagagattgaaccggctca

SEQ ID NO: 790660 - DNA, 120 bp, Artificial Sequence
  ENSG00000269335_27 (sequence is synthesized)
cagcgctgcctggaggagaatcaagagctccgagggaatgcagctggaagatctcaaacagcagctccagcaggccgaggaggccctggtggccaaacaggaggtgatcgataagctgaa

SEQ ID NO: 790661 - DNA, 120 bp, Artificial Sequence
  ENSG00000269343_0 (sequence is synthesized)
ttatttgtcggagaggctcctgagcgctaggtcggcactgcggtgactgaacccagaaggcggagaacagttgtcctctgctgcacagaggcgactctggagctctgtgacggcgccaag

SEQ ID NO: 790662 - DNA, 120 bp, Artificial Sequence
  ENSG00000269343_1 (sequence is synthesized)
cgtgacccacccctgggccaggatagggaccgtcatgcccatatctcctggctggtcaccctctcctcccaaccctgctttaaaccacgtggttcgatggcggtggtggccacgctgagg

SEQ ID NO: 790663 - DNA, 120 bp, Artificial Sequence
  ENSG00000269343_2 (sequence is synthesized)
ctctctgctcagggcacagtgacttttgaagacgtggctgtgaaatttacccaggaggaatggaatctccttagtgaggctcagagatgcctgtaccgtgatgtgactctggagaacctg

SEQ ID NO: 790664 - DNA, 120 bp, Artificial Sequence
  ENSG00000269343_3 (sequence is synthesized)
gcacttatgtcctccctgggttgttggtgtggagtggaagatgaggcggcaccttctaagcagagtatttatatacaaagagagactcaggtcaggactcctgtgacaggtgtgtctccc

SEQ ID NO: 790665 - DNA, 120 bp, Artificial Sequence
  ENSG00000269343_4 (sequence is synthesized)
aagaaggcccacccctgtgagatgtgtggcccgatcttgggagacattttgcatgtggcagatcatcagggaacacatcacaagcagaaactgcacaggtgtgaggcctgggggaataaa

SEQ ID NO: 790666 - DNA, 120 bp, Artificial Sequence
  ENSG00000269343_5 (sequence is synthesized)
ttgtatgacagtggaaactttcatcagcaccagaatgagcacattggagagaaaccctacagagggagtgttgaggaggcgttgtttgtgaagaggtgtaagttgcatgtgtcaggggag

SEQ ID NO: 790667 - DNA, 120 bp, Artificial Sequence
  ENSG00000269343_6 (sequence is synthesized)
tcatctgtcttcagtgagagtgggaaggactttttgcccaggtcaggattactccagcaggaggccagtcacactggggagaagtcaaacagcaaaactgagtgtgtgtctccctttcag

SEQ ID NO: 790668 - DNA, 120 bp, Artificial Sequence
  ENSG00000269343_7 (sequence is synthesized)
tgtgggggagctcactatagccatggagattccatgaaacattttagcaccaaacatatactcagtcagcaccagagacttctccctcgagaagaatgttatgtgtgctgtgaatgtggg

SEQ ID NO: 790669 - DNA, 120 bp, Artificial Sequence
  ENSG00000269343_8 (sequence is synthesized)
tgtgagaaatcttttagtcaaaagagcagcctcattcaacatcagcaatttcacactggaggaaaaccttatgggtgtgaagaatgtgggaaatattttagcttagaaggatatcttagg

SEQ ID NO: 790670 - DNA, 120 bp, Artificial Sequence
  ENSG00000269343_9 (sequence is synthesized)
cgccatcaaaaagttcacgctggaaaagggccttatgagtgtggagaatgtgggaaatcttttagttcaaacgtgaaccttaagagtcatcagcgcattcacactggagagagaccttac

SEQ ID NO: 790671 - DNA, 120 bp, Artificial Sequence
  ENSG00000269343_10 (sequence is synthesized)
aagtgtggagaatgtgagaaatcttttagtcggaagcccagccttagttaccatcagcgcattcacactgaagtaagaccttacaagtgtggagaatgtgggaaatcttatatttcaaag

SEQ ID NO: 790672 - DNA, 120 bp, Artificial Sequence
  ENSG00000269343_11 (sequence is synthesized)
gggcaccttaggatccatcagcgcatgcacactggagaaagaccttacaagtgtggagactgtgggaaatcttttaatgaaaaaggacaccttaggagtcatcagcgagttcacactaca

SEQ ID NO: 790673 - DNA, 120 bp, Artificial Sequence
  ENSG00000269343_12 (sequence is synthesized)
gaaagaccttataagtgtggggaatgtgggaaatgttttagtcacaagggtaacctcattctacaccagcatggccatactagaaaaaggccttatatgtgttgggaatgtggaaaatta

SEQ ID NO: 790674 - DNA, 120 bp, Artificial Sequence
  ENSG00000269343_13 (sequence is synthesized)
tttaagaagaagtctcacctccttgtacaccagagaattcacagtggagagaagccatatgcttgtgaggcttgtcagaaattttttaggcacaagtgccacctcactgcacaccagaga

SEQ ID NO: 790675 - DNA, 120 bp, Artificial Sequence
  ENSG00000269343_14 (sequence is synthesized)
gttcacactggagaaaggccatatgaatgcagtgattgtgggaagtcatttacccacagctgtgcattcattgttcataagagagttcacactggtcagaagccttatgagtgcagtgaa

SEQ ID NO: 790676 - DNA, 120 bp, Artificial Sequence
  ENSG00000269343_15 (sequence is synthesized)
tgtgggaaatcttttgctgcaagctcctatctcactagtcacaggagagttcacactggtcagaagccttatgagtgcagtgaatgtgggaaatcttttgctggaatctccagtctcact

SEQ ID NO: 790677 - DNA, 120 bp, Artificial Sequence
  ENSG00000269343_16 (sequence is synthesized)
aatcacaggagagttcacactggagaaaagccttatgggtgtagtgaatgtgaaaaaaaatttaggaaaagctcttcacttcgttaccatcagagagttcatgaaagaaaggccttatga

SEQ ID NO: 790678 - DNA, 120 bp, Artificial Sequence
  ENSG00000269343_17 (sequence is synthesized)
cgttgatctgcgatacgcgtgtttgcccagtgagtggccccggactgctacgtgggactgcggtgaatgaacccagaaggtggagaggaaccgttctcggtgcacagaggcggctctgca

SEQ ID NO: 790679 - DNA, 120 bp, Artificial Sequence
  ENSG00000269343_18 (sequence is synthesized)
gcccggtgagggcgcctgctgctcccgggcagtgctttccccaagtagtccgatggctgcggctgcgccgaggcgccctactcaggagcaacttggcgaggttcagactcttggagccag

SEQ ID NO: 790680 - DNA, 83 bp, Artificial Sequence
  ENSG00000269343_19 (sequence is synthesized)
tggagagagaccttacaagtgtggagaatgtgagaaatcttttagtcggaagcccagccttagttaccatacaggaaggagtt

SEQ ID NO: 790681 - DNA, 120 bp, Artificial Sequence
  ENSG00000269343_20 (sequence is synthesized)
ttgtggcctatttgcatagctgcccaaggcctccagtggacgacttcatggctttgtggtcttcatctgtagcatggatactacagattgtgggttcataggtcagctgggtacagggca

SEQ ID NO: 790682 - DNA, 120 bp, Artificial Sequence
  ENSG00000269343_21 (sequence is synthesized)
gtttttataacaacctctggtgggttttttattttagtgtcaatatcacactgaaagattggtgattttttttgaaccagacaaaattctctcttatgaggtatattgcactgtgctcgg

SEQ ID NO: 790683 - DNA, 120 bp, Artificial Sequence
  ENSG00000269343_22 (sequence is synthesized)
tactgttgagggaactctgttcagcagatcttacaaggcacacatgtgccatgatatccagaattctgtaaggcaacatcacaggttgtaaggctataggatgaaattataattttatgg

SEQ ID NO: 790684 - DNA, 120 bp, Artificial Sequence
  ENSG00000269343_23 (sequence is synthesized)
taaggctataggatgaaattataattttatggttacttagttactgcatttatagtcagcagaggggacagcaataaagtttttgaaatatatcttttttttttttttgagacacagtct

SEQ ID NO: 790685 - DNA, 120 bp, Artificial Sequence
  ENSG00000269343_24 (sequence is synthesized)
ccatctcggctcactgcaacctgtgccttctgggttcaagcgattctcccacctcagtcacccaagtagctagaattacaggtgcatgccaccacaccactaatgttttgtggttttagt

SEQ ID NO: 790686 - DNA, 120 bp, Artificial Sequence
  ENSG00000269343_25 (sequence is synthesized)
agagacgggtttcaccgtgttgcacagactggtcttgaattcaactcttgagctcaggtgatctgctcacctccgccttccaaagtgctgggactacaggtgtgggccgctgtgtttggc

SEQ ID NO: 790687 - DNA, 120 bp, Artificial Sequence
  ENSG00000269343_26 (sequence is synthesized)
tgaaatgtatgtcttttaaaggagtgtccacagttatccagtcactgtgtctgtgatggataagcagatacagaaattctcaagacttccataataatgaatgttgtgtagctaagcttt

SEQ ID NO: 790688 - DNA, 120 bp, Artificial Sequence
  ENSG00000269343_27 (sequence is synthesized)
ggtcagaggaaataatctaaaggttttgtgaattcatgtaaccttttgggctgctcaccttaaggtaactcctgtattaacaggaggaacagaatagggaaaaagatctcagttcagtga

SEQ ID NO: 790689 - DNA, 120 bp, Artificial Sequence
  ENSG00000269343_28 (sequence is synthesized)
tgtagctttgtgaccagccagtgatccagttcaatcaggtagaaatgaccttcctgctacatcaatatttgcttctatggaggctagtttccccacttagggcatgagaagaattggtaa

SEQ ID NO: 790690 - DNA, 120 bp, Artificial Sequence
  ENSG00000269343_29 (sequence is synthesized)
agtcaacataaaattgccaaacctgtcaccaaaaatgatggcaaatctgtatttttctcttaaaccgtgttataaaagctgtaataaggtataggctgagcatcatggctcatgcctgta

SEQ ID NO: 790691 - DNA, 120 bp, Artificial Sequence
  ENSG00000269343_30 (sequence is synthesized)
ttcccagcactttgggaggccagattccttgagaccagtgtggggaacatggcaaaaccttgtctctaggaaaaatagccaggtatggtggcatgtaccttagtcttagtgatgtgggag

SEQ ID NO: 790692 - DNA, 120 bp, Artificial Sequence
  ENSG00000269343_31 (sequence is synthesized)
gattgcttgagcctgggaggcagaagttgcagtgagctaagattgcaacgctgcagtccagcctgggtgatagagtgagaccccatcttaaaaataaaataaagatataaatgacatcca

SEQ ID NO: 790693 - DNA, 120 bp, Artificial Sequence
  ENSG00000269343_32 (sequence is synthesized)
ataaagtacacatatttgagctgtaggataagtcttgaattttattataatcccgtgaaaccatcatcagagtcaccataatgaatttatctaatctatcacctttgtatttacttggag

SEQ ID NO: 790694 - DNA, 120 bp, Artificial Sequence
  ENSG00000269343_33 (sequence is synthesized)
cctttataaagtttttctctctgctcttcaaacaaccattgatttactttgctgtatgatggagtactttccattttctggaattttctgactgatgtaataaagtgtttcctcttataa

SEQ ID NO: 790695 - DNA, 120 bp, Artificial Sequence
  ENSG00000269343_34 (sequence is synthesized)
aatgtggaaaatgtttacccaaaagaagtctgctctccttggacattggagagttcacaccagagaaaagtccttacaagtaaaataaatttggcagttttgtagccacacctctgtatt

SEQ ID NO: 790696 - DNA, 120 bp, Artificial Sequence
  ENSG00000269343_35 (sequence is synthesized)
ccttcaggattatatttaacactgaatgaaggccttactagtgtggcaaatataggctatttatccagaagtctggcttcaaaactcacaggagagctgtcactacggaaatgccttttg

SEQ ID NO: 790697 - DNA, 120 bp, Artificial Sequence
  ENSG00000269343_36 (sequence is synthesized)
aatgtaatgtttgcaaaaaagcactgtgccttctgtcattgaatcctagaacactgagatgagaaaaacactgtagatgtataggttagatatatagggaatgttattattttttccttt

SEQ ID NO: 790698 - DNA, 120 bp, Artificial Sequence
  ENSG00000269343_37 (sequence is synthesized)
ttttggagagacggtctcactccatcacccatgctggtgtgcagtgctgcgatcgtagctcactgcatcctccgccccctaggctcaagtgatcttcccaccttagcctccatgtagctg

SEQ ID NO: 790699 - DNA, 120 bp, Artificial Sequence
  ENSG00000269343_38 (sequence is synthesized)
ggcatgcaccaccatgcctggctattttctcatattagtagatatagggttttaccatgtttccaggctggtatcgaactcctgagctcaagcaatctgtacacctcagcctcccaaagt

SEQ ID NO: 790700 - DNA, 120 bp, Artificial Sequence
  ENSG00000269343_39 (sequence is synthesized)
cccaaagtgctgagattgtaggtttgagtcactgtgctcagccaattatgtttttctgtgtaacatgggaggagatcctttgagggcaccatgtgcccaaattgaaaaaactccaggcat

SEQ ID NO: 790701 - DNA, 120 bp, Artificial Sequence
  ENSG00000269343_40 (sequence is synthesized)
gtggcatctgtattatattttttactatgccctgttatcttgctagacttatgtgactgccacttatctggcaaaagccattacatctcagctacttggtaggtacccacattgcatcat

SEQ ID NO: 790702 - DNA, 120 bp, Artificial Sequence
  ENSG00000269404_0 (sequence is synthesized)
ggcaaacagcccgcccggcaccaccatgctcgccctggaggctgcacagctcgacgggccacacttcagctgtctgtacccagatggcgtcttctatgacctggacagctgcaagcattc

SEQ ID NO: 790703 - DNA, 120 bp, Artificial Sequence
  ENSG00000269404_1 (sequence is synthesized)
cagctaccctgattcagagggggctcctgaccctggttcccccggcatatgccccgtaccccagccctgtgctatcagaggaggaagacttaccgttggacagccctgccctggaggtct

SEQ ID NO: 790704 - DNA, 120 bp, Artificial Sequence
  ENSG00000269404_2 (sequence is synthesized)
cggacagcgagtcggatgaggccctcgtggctggccccgaggggaagggatccgaggcagggactcgcaagaagctgcgcctgtaccagttcctgctggggctactgacgcgcggggaca

SEQ ID NO: 790705 - DNA, 120 bp, Artificial Sequence
  ENSG00000269404_3 (sequence is synthesized)
tgcgtgagtgcgtgtggtgggtggagccaggcgccggcgtcttccagttctcctccaagcacaaggaactcctggcgcgccgctggggccagcagaaggggaaccgcaagcgcatgacct

SEQ ID NO: 790706 - DNA, 120 bp, Artificial Sequence
  ENSG00000269404_4 (sequence is synthesized)
accagaagctggcgcgcgccctccgaaactacgccaagaccggcgagatccgcaaggtcaagcgcaagctcacctaccagttcgacagcgcgctgctgcctgcagtccgccgggcctgag

SEQ ID NO: 790707 - DNA, 120 bp, Artificial Sequence
  ENSG00000269404_5 (sequence is synthesized)
cacacccgaggctcccacctgcggagccgctgggggacctcacgtcccagccaggatccccctggaagaaaaagggcgtccccacactctaggtgataggacttacgcatccccaccttt

SEQ ID NO: 790708 - DNA, 120 bp, Artificial Sequence
  ENSG00000269404_6 (sequence is synthesized)
tggggtaaggggagtgctgccctgccataatccccaagcccagcccgggcctgtctgggattccccacttgtgcctggggtcctctgggatttctttgtcatgtacagactccctgggat

SEQ ID NO: 790709 - DNA, 120 bp, Artificial Sequence
  ENSG00000269404_7 (sequence is synthesized)
cctcatgttttgggtgacaggacctatggaccactatactcggggaggcagggtagcagttcttccagaatcccaagagcttctctgggattttcttgtgatatctgattccccagtgag

SEQ ID NO: 790710 - DNA, 120 bp, Artificial Sequence
  ENSG00000269404_8 (sequence is synthesized)
gcctgggacgtttttaagatcgctgtgtgtctgtaaaccctgaatctcatctggggtgggggccctgctggcaaccctgagccctgtccaaggttccctcttgtcagatctgagatttcc

SEQ ID NO: 790711 - DNA, 120 bp, Artificial Sequence
  ENSG00000269404_9 (sequence is synthesized)
tagttatgtctggggccctctgggagctgttatcatctcagatctcttcgcccatctatggctgtgttgtcacatctgtcccctcatttttgagatcccccaattctctggaactattct

SEQ ID NO: 790712 - DNA, 120 bp, Artificial Sequence
  ENSG00000269404_10 (sequence is synthesized)
gctgcccctttttatgtgtctggagttccccaatcacatctagggctcctccaagatccttttgtcatgtctgaaatcactcttgagaggtctggggtggaggatggggagtcagtgaaa

SEQ ID NO: 790713 - DNA, 120 bp, Artificial Sequence
  ENSG00000269404_11 (sequence is synthesized)
tgtgtcatgtctgggccctgtcagggacacccttgttatatctgggatcctccaatcacatctgagacctcctaggctctccatctgatatgccctttcagggaccccacaaagactgag

SEQ ID NO: 790714 - DNA, 120 bp, Artificial Sequence
  ENSG00000269404_12 (sequence is synthesized)
ttctcatggggatcctacccttcctagtgccactccctatggccatgctgaagaccactctggccacgcgactgattttgggtgatcatggcagctccccacccatgtcatttctaacca

SEQ ID NO: 790715 - DNA, 120 bp, Artificial Sequence
  ENSG00000269404_13 (sequence is synthesized)
gccccggtcgctggtggtggtctctttagtgcactgtagcacttggtggtggaggtgtgagggatccacattaacagcaggccatcagctgggcaatggctcacacctgtaatcccagca

SEQ ID NO: 790716 - DNA, 86 bp, Artificial Sequence
  ENSG00000269404_14 (sequence is synthesized)
ttgaacccaggcagtctctacaaaacataacaaaaacaattagccgagcgtgggggtgaacacctgtggtcccagctgctcaggag

SEQ ID NO: 790717 - DNA, 72 bp, Artificial Sequence
  ENSG00000269404_15 (sequence is synthesized)
agtgagctgttaaaaacaaaaacaaggccgggcacggtggctcatgcctgttgtcccagcactttgggaggc

SEQ ID NO: 790718 - DNA, 61 bp, Artificial Sequence
  ENSG00000269404_16 (sequence is synthesized)
cagagtgagacaccgtcttaaaaacaaaaacaaggccgggcacggtggctcatgcctgttg

SEQ ID NO: 790719 - DNA, 120 bp, Artificial Sequence
  ENSG00000269404_17 (sequence is synthesized)
gcctgggggacagagcgagactccgtctgaaaataaaaacaacaaaaacagcagaccattcaaaatagggagactttgcataatccagatttctgccttcacttaaaactttggacggtc

SEQ ID NO: 790720 - DNA, 120 bp, Artificial Sequence
  ENSG00000269404_18 (sequence is synthesized)
ggtctggagagagtcggccagttttcggtggggggtggggagctggaacaggacagtagcctttcctaatgaggcatttgttctccaatctgccccagtcgctgccatccctggctatct

SEQ ID NO: 790721 - DNA, 120 bp, Artificial Sequence
  ENSG00000269404_19 (sequence is synthesized)
caccctagcagcttctcaagcctgttggctttagaccactgtataaacccagctggaactgaagcctgggtggactatggagccctggttgggacccccagggagtcaaaggctgcgggc

SEQ ID NO: 790722 - DNA, 120 bp, Artificial Sequence
  ENSG00000269404_20 (sequence is synthesized)
caagaggccagaggtccttgagcctgggtgggcaggtggatctagggtgcatgacttgctgcttcccaaccttagtttgtcccttctgtgaaaaagggagagaaggaggaggaagatctc

SEQ ID NO: 790723 - DNA, 120 bp, Artificial Sequence
  ENSG00000269404_21 (sequence is synthesized)
cgaaactccgtctcaaaaaaaaaaaactgttgcagccccgttgagcctttgacaccgcctgaaatccaccccactcccaggaggaggaggaggaaggaatgccaatgacctagagacacg

SEQ ID NO: 790724 - DNA, 120 bp, Artificial Sequence
  ENSG00000269404_22 (sequence is synthesized)
gaggaggaggaggaaggaatgccaatgacctagagacacgagaagtccatgtggaggcacacagcagctgatggcagagcccaggctgggacctgcccttaagagaatgagtgggaaggg

SEQ ID NO: 790725 - DNA, 120 bp, Artificial Sequence
  ENSG00000269404_23 (sequence is synthesized)
ggagggaggaagggcaggtaaaacgtcctccccagggccccctgcaacggggaaggtactttttacaaaagctatcattgtcaccctaaatgtggaataaaataagatgcatcgacgtag

SEQ ID NO: 790726 - DNA, 120 bp, Artificial Sequence
  ENSG00000269404_24 (sequence is synthesized)
ggcaccaccatgctcgccctggaggctgcacaattcaggtggctggaggcagcctcagcatgcccctgtgtctctccccctccaggctcgacgggccacacttcagctgtctgtacccag

SEQ ID NO: 790727 - DNA, 120 bp, Artificial Sequence
  ENSG00000269404_25 (sequence is synthesized)
cccccaggctgcccagctctgctacgaaccccccacctacagccctgcagggaacctcgaactggcccccagcctggaggccccggggcctggcctccctgcataccccacggagaactt

SEQ ID NO: 790728 - DNA, 120 bp, Artificial Sequence
  ENSG00000269404_26 (sequence is synthesized)
agctaccctgattcagagggggctcctggtgagtgaccccagccctgtgcccttcctgccttggggcccatttcacagataggggagctgaggcccaggggaggtcatttcctagcacaa

SEQ ID NO: 790729 - DNA, 120 bp, Artificial Sequence
  ENSG00000269404_27 (sequence is synthesized)
tacaatggcctctctgtgctgggggcttcgactgcgaggaggcctccgtgagacatcccagcttctgactcagtgcccttcccccagactccctgtgggactggactgtggccccacctg

SEQ ID NO: 790730 - DNA, 120 bp, Artificial Sequence
  ENSG00000269404_28 (sequence is synthesized)
ggactgcaatcctgcccctccactgaggccgctggctctcagagacaccgtgacatcacgggtgatgatgagaggagttcaaagagagaattatatgctggcgcggtggctctgtaatcc

SEQ ID NO: 790731 - DNA, 120 bp, Artificial Sequence
  ENSG00000269404_29 (sequence is synthesized)
caacactttggggggccaaggcaggaggatcgcttgagtacaggagtttgaaaccagcctgggcaagatagtgagatccccttcccacccgtctacaaaaaaaataaaaaattagcgggg

SEQ ID NO: 790732 - DNA, 85 bp, Artificial Sequence
  ENSG00000269404_30 (sequence is synthesized)
caagcttgagaggctgaggtgggaggaggattgcttgagcccagaaggtcgaggcaatccactgcactccagtctgggcaacaga

SEQ ID NO: 790733 - DNA, 120 bp, Artificial Sequence
  ENSG00000269405_0 (sequence is synthesized)
tcagcatttccaagttcgttctgtgagactgtagtgtcaggacaaagcaacaacaaaatgtgctctactctaaagaagtgtgggacatacagaactgaagttgcagaatgccatgaccat

SEQ ID NO: 790734 - DNA, 120 bp, Artificial Sequence
  ENSG00000269405_1 (sequence is synthesized)
ggtagcacttttcaaggaagaaagaaaggtgggagttctttccgggataattttgacaagaggagctgtcattatgaacatggtgggtatgagcgcccgccttcacactgccaggagaat

SEQ ID NO: 790735 - DNA, 120 bp, Artificial Sequence
  ENSG00000269405_2 (sequence is synthesized)
gatggaagcgtggagatgagggatgtccacaaggaccaacaactaagacacactccttatagcatccgatgcgaaagaagaatgaaatggcatagtgaagacgaaatccgtattaccacg

SEQ ID NO: 790736 - DNA, 120 bp, Artificial Sequence
  ENSG00000269405_3 (sequence is synthesized)
tggagaaatagaaaacctccggagagaaaaatgagtcagaacacacaggatggatacacaaggaactggtttaaggtcacaattccttacgggataaagtatgacaaggcatggctaatg

SEQ ID NO: 790737 - DNA, 120 bp, Artificial Sequence
  ENSG00000269405_4 (sequence is synthesized)
aattcaatccagagccattgcagtgaccgcttcactccggttgatttccactacgtccgaaatcgggcatgcttctttgtccaggatgctagcgctgcctccgcattgaaggatgtcagt

SEQ ID NO: 790738 - DNA, 120 bp, Artificial Sequence
  ENSG00000269405_5 (sequence is synthesized)
tataagatttatgatgatgagaaccaaaagatatgtatatttgtcaatcattctactgcgccctactctgtgaagaataagttgaagccaggccaaatggagatgctaaagctgaccatg

SEQ ID NO: 790739 - DNA, 120 bp, Artificial Sequence
  ENSG00000269405_6 (sequence is synthesized)
aacaaacggtacaatgtctcccagcaagctcttgatctccagaatctccgctttgacccagacttgatgggccgtgacattgatataatcctgaatcgaagaaactgcatggctgccacc

SEQ ID NO: 790740 - DNA, 120 bp, Artificial Sequence
  ENSG00000269405_7 (sequence is synthesized)
ctgaagatcattgaaagaaatttccctgagctgttgtctttgaacttgtgcaacaacaagctgtaccagctggatggcctttctgacattacagagaaggctcccaaagtcaagaccctg

SEQ ID NO: 790741 - DNA, 120 bp, Artificial Sequence
  ENSG00000269405_8 (sequence is synthesized)
tctcggaccagtccgcctatgtaagtgccatccgggattgtttccccaagttgttacgcctggacggccgagagttatccgcaccagtgattgttgacattgacagctctgagacaatga

SEQ ID NO: 790742 - DNA, 120 bp, Artificial Sequence
  ENSG00000269405_9 (sequence is synthesized)
aaccctgcaaggaaaactttactggatctgagaccctaaagcatttagtcctgcaattcctgcagcagtattactcgatctatgactctggagatcgacagggtctcctcggtgcttacc

SEQ ID NO: 790743 - DNA, 120 bp, Artificial Sequence
  ENSG00000269405_10 (sequence is synthesized)
acgatgaggcctgcttctccttggctattcccttcgaccccaaggactcagccccgagcagcttgtgcaagtactttgaggatagcaggaatatgaaaacactcaaggacccctacctga

SEQ ID NO: 790744 - DNA, 120 bp, Artificial Sequence
  ENSG00000269405_11 (sequence is synthesized)
agggggaactgctgaggcgcacaaaacgtgacattgtggactccctcagtgcgttgcccaaaactcagcatgacctcagctccatcctggtggacgtgtggtgccagacggaaaggatgc

SEQ ID NO: 790745 - DNA, 120 bp, Artificial Sequence
  ENSG00000269405_12 (sequence is synthesized)
tctgcttttctgtcaatggggttttcaaggaagtggaaggacagtctcagggttctgttctcgccttcacccggaccttcattgctacccctggcagcagttccagtctgtgcatcgtga

SEQ ID NO: 790746 - DNA, 120 bp, Artificial Sequence
  ENSG00000269405_13 (sequence is synthesized)
atgacgagctgtttgtgagggatgccagcccccaagagactcagagtgccttctccatcccagtgtccacactctcctccagctctgagccctccctctcccaggagcagcaggaaatgg

SEQ ID NO: 790747 - DNA, 120 bp, Artificial Sequence
  ENSG00000269405_14 (sequence is synthesized)
tgcaggctttctctgcccagtctgggatgaaactggagtggtctcagaagtgccttcaggacaatgagtggaactacactagagctggccaggccttcactatgctccagaccgagggca

SEQ ID NO: 790748 - DNA, 120 bp, Artificial Sequence
  ENSG00000269405_15 (sequence is synthesized)
agatccccgcggaggccttcaagcaaatctcctaaaaggagccctccgatgtcttctttgtcttcgttcacatcctctttgtttcctcttttcaccagcctaaggcctggctgaccagga

SEQ ID NO: 790749 - DNA, 120 bp, Artificial Sequence
  ENSG00000269405_16 (sequence is synthesized)
agccaacgttaacttgcaggccacgtgacataaccacccaaagagccagttgctctgtgtattcgccccactcatgatcaccattttattttcataataaagagtgacgttacacgttgt

SEQ ID NO: 790750 - DNA, 120 bp, Artificial Sequence
  ENSG00000269405_17 (sequence is synthesized)
aagattgcgtcttgtttgtggcaagattctgaggggaagtgtagctcccaggttggttccaagtcttcttccaattaggatcttatccaggacgcttcattgcatttggtcttcatttct

SEQ ID NO: 790751 - DNA, 120 bp, Artificial Sequence; identical to SEQ ID NO: 790153
  ENSG00000269433_0 (sequence is synthesized)

SEQ ID NO: 790752 - DNA, 120 bp, Artificial Sequence; identical to SEQ ID NO: 790154
  ENSG00000269433_1 (sequence is synthesized)

SEQ ID NO: 790753 - DNA, 120 bp, Artificial Sequence; identical to SEQ ID NO: 790155
  ENSG00000269433_2 (sequence is synthesized)

SEQ ID NO: 790754 - DNA, 120 bp, Artificial Sequence; identical to SEQ ID NO: 790156
  ENSG00000269433_3 (sequence is synthesized)

SEQ ID NO: 790755 - DNA, 120 bp, Artificial Sequence; identical to SEQ ID NO: 790157
  ENSG00000269433_4 (sequence is synthesized)

SEQ ID NO: 790756 - DNA, 120 bp, Artificial Sequence; identical to SEQ ID NO: 790158
  ENSG00000269433_5 (sequence is synthesized)

SEQ ID NO: 790757 - DNA, 120 bp, Artificial Sequence; identical to SEQ ID NO: 790159
  ENSG00000269433_6 (sequence is synthesized)

SEQ ID NO: 790758 - DNA, 120 bp, Artificial Sequence
  ENSG00000269433_7 (sequence is synthesized)
gaaagagtctgaatccacccagaaggcagagaaggaagtgacgcgcatggtggtggtgatggtcctggcattctgcttctgctggggaccctacgccttcttcgcatgctttgctgctgc

SEQ ID NO: 790759 - DNA, 120 bp, Artificial Sequence; identical to SEQ ID NO: 790161
  ENSG00000269433_8 (sequence is synthesized)

SEQ ID NO: 790760 - DNA, 120 bp, Artificial Sequence; identical to SEQ ID NO: 790162
  ENSG00000269433_9 (sequence is synthesized)

SEQ ID NO: 790761 - DNA, 120 bp, Artificial Sequence; identical to SEQ ID NO: 790163
  ENSG00000269433_10 (sequence is synthesized)

SEQ ID NO: 790762 - DNA, 120 bp, Artificial Sequence; identical to SEQ ID NO: 790164
  ENSG00000269433_11 (sequence is synthesized)

SEQ ID NO: 790763 - DNA, 120 bp, Artificial Sequence; identical to SEQ ID NO: 790165
  ENSG00000269433_12 (sequence is synthesized)

SEQ ID NO: 790764 - DNA, 120 bp, Artificial Sequence; identical to SEQ ID NO: 790166
  ENSG00000269433_13 (sequence is synthesized)

SEQ ID NO: 790765 - DNA, 120 bp, Artificial Sequence; identical to SEQ ID NO: 790167
  ENSG00000269433_14 (sequence is synthesized)

SEQ ID NO: 790766 - DNA, 120 bp, Artificial Sequence; identical to SEQ ID NO: 790168
  ENSG00000269433_15 (sequence is synthesized)

SEQ ID NO: 790767 - DNA, 120 bp, Artificial Sequence
  ENSG00000269437_0 (sequence is synthesized)
ttgtggcaagattctgaggggaagtgtagctcccaggttggttccaagtcttcttccaattaggatcttatccaggacgcttcattgcatttggtcttcatttctccttagtctcctcca

SEQ ID NO: 790768 - DNA, 120 bp, Artificial Sequence
  ENSG00000269437_1 (sequence is synthesized)
ggctgacatttcctcaatctttattggtcttccacagccctgacacttttggagataccagtcagcatttccaagttcgttctgtgagactgtagtgtcaggacaaagcaacaacaaaat

SEQ ID NO: 790769 - DNA, 120 bp, Artificial Sequence
  ENSG00000269437_2 (sequence is synthesized)
gtgctctactctaaagaagtgtgggacatacagaactgaagttgcagaatgccatgaccatggtagcacttttcaaggaagaaagaaaggtgggagttctttccgggataattttgacaa

SEQ ID NO: 790770 - DNA, 120 bp, Artificial Sequence
  ENSG00000269437_3 (sequence is synthesized)
gaggagctgtcattatgaacatggtgggtatgagcgcccgccttcacactgccaggagaatgatggaagcgtggagatgagggatgtccacaaggaccaacaactaagacacactcctta

SEQ ID NO: 790771 - DNA, 120 bp, Artificial Sequence
  ENSG00000269437_4 (sequence is synthesized)
tagcatccgatgcgaaagaagaatgaaatggcatagtgaagacgaaatccgtattaccacgtggagaaatagaaaacctccggagagaaaaatgagtcagaacacacaggatggatacac

SEQ ID NO: 790772 - DNA, 120 bp, Artificial Sequence
  ENSG00000269437_5 (sequence is synthesized)
aaggaactggtttaaggtcacaattccttacgggataaagtatgacaaggcatggctaatgaattcaatccagagccattgcagtgaccgcttcactccggttgatttccactacgtccg

SEQ ID NO: 790773 - DNA, 120 bp, Artificial Sequence
  ENSG00000269437_6 (sequence is synthesized)
aaatcgggcatgcttctttgtccaggatgctagcgctgcctccgcattgaaggatgtcagttataagatttatgatgatgagaaccaaaagatatgtatatttgtcaatcattctactgc

SEQ ID NO: 790774 - DNA, 120 bp, Artificial Sequence
  ENSG00000269437_7 (sequence is synthesized)
gccctactctgtgaagaataagttgaagccaggccaaatggagatgctaaagctgaccatgaacaaacggtacaatgtctcccagcaagctcttgatctccagaatctccgctttgaccc

SEQ ID NO: 790775 - DNA, 120 bp, Artificial Sequence
  ENSG00000269437_8 (sequence is synthesized)
agacttgatgggccgtgacattgatataatcctgaatcgaagaaactgcatggctgccaccctgaagatcattgaaagaaatttccctgagctgttgtctttgaacttgtgcaacaacaa

SEQ ID NO: 790776 - DNA, 120 bp, Artificial Sequence
  ENSG00000269437_9 (sequence is synthesized)
tcccaaagtcaagaccctgaatctctccaaaaataagctggagtcggcgtgggagttgggcaaggtgaaagggctgaagctcgaagagctatggctagaagggaacccgttgtgcagcac

SEQ ID NO: 790777 - DNA, 120 bp, Artificial Sequence
  ENSG00000269437_10 (sequence is synthesized)
cttctcggaccagtccgcctatgtaagtgccatccgggattgtttccccaagttgttacgcctggacggccgagagttatccgcaccagtgattgttgacattgacagctctgagacaat

SEQ ID NO: 790778 - DNA, 120 bp, Artificial Sequence
  ENSG00000269437_11 (sequence is synthesized)
gaaaccctgcaaggaaaactttactggatctgagaccctaaagcatttagtcctgcaattcctgcagcagtattactcgatctatgactctggagatcgacagggtctcctcggtgctta

SEQ ID NO: 790779 - DNA, 120 bp, Artificial Sequence
  ENSG00000269437_12 (sequence is synthesized)
ccacgatgaggcctgcttctccttggctattcccttcgaccccaaggactcagccccgagcagcttgtgcaagtactttgaggatagcaggaatatgaaaacactcaaggacccctacct

SEQ ID NO: 790780 - DNA, 120 bp, Artificial Sequence
  ENSG00000269437_13 (sequence is synthesized)
gaagggggaactgctgaggcgcacaaaacgtgacattgtggactccctcagtgcgttgcccaaaactcagcatgacctcagctccatcctggtggacgtgtggtgccagacggaaaggat

SEQ ID NO: 790781 - DNA, 120 bp, Artificial Sequence
  ENSG00000269437_14 (sequence is synthesized)
gctctgcttttctgtcaatggggttttcaaggaagtggaaggacagtctcagggttctgttctcgccttcacccggaccttcattgctacccctggcagcagttccagtctgtgcatcgt

SEQ ID NO: 790782 - DNA, 120 bp, Artificial Sequence
  ENSG00000269437_15 (sequence is synthesized)
gaatgacgagctgtttgtgagggatgccagcccccaagagactcagagtgccttctccatcccagtgtccacactctcctccagctctgagccctccctctcccaggagcagcaggaaat

SEQ ID NO: 790783 - DNA, 120 bp, Artificial Sequence
  ENSG00000269437_16 (sequence is synthesized)
ggtgcaggctttctctgcccagtctgggatgaaactggagtggtctcagaagtgccttcaggacaatgagtggaactacactagagctggccaggccttcactatgctccagaccgaggg

SEQ ID NO: 790784 - DNA, 120 bp, Artificial Sequence
  ENSG00000269437_17 (sequence is synthesized)
caagatccccgcggaggccttcaagcaaatctcctaaaaggagccctccgatgtcttctttgtcttcgttcacatcctctttgtttcctcttttcaccagcctaaggcctggctgaccag

SEQ ID NO: 790785 - DNA, 120 bp, Artificial Sequence
  ENSG00000269437_18 (sequence is synthesized)
gaagccaacgttaacttgcaggccacgtgacataaccacccaaagagccagttgctctgtgtattcgccccactcatgatcaccattttattttcataataaagagtgacgttacacgtt

SEQ ID NO: 790786 - DNA, 120 bp, Artificial Sequence
  ENSG00000269437_19 (sequence is synthesized)
gtccagcaccccatgagaaagccacccactggaatttccagggccatttcccacctagcctctgatgcttgtctccctgggcatgttcatcttatcgatcatccagctccatctccttgg

SEQ ID NO: 790787 - DNA, 120 bp, Artificial Sequence
  ENSG00000269437_20 (sequence is synthesized)
cagaggtgggtaggaggttaaggaggatcctgagcacctgagcgcttccttttcaggaaaggatgctctgcttttctgtcaatggggttttcaaggaaggtgagtgtctgtatagtcccc

SEQ ID NO: 790788 - DNA, 120 bp, Artificial Sequence
  ENSG00000269466_0 (sequence is synthesized)
agagatctccagtcagaaagagactgcctgcgagggagattcctggctgctgctttgtagaccaaggaaacccaggaccctccggaaagactaagcagcgcggcctccgacccacagacc

SEQ ID NO: 790789 - DNA, 120 bp, Artificial Sequence
  ENSG00000269466_1 (sequence is synthesized)
tgagggctggtaagtgtggggctgggttggcaggggctaagtgtgtgggagagtcatgcgcatggatctcaactcacaggctctctgaatcctgtccacagcaccactgccctcgctctc

SEQ ID NO: 790790 - DNA, 120 bp, Artificial Sequence
  ENSG00000269466_2 (sequence is synthesized)
tgacgccagcaccgcctgcagccggccaggctcagcccaaggacaggggagaggctaaggccccgcgacatggcgcgcaccaagcagaccgcccgcaaagccaccgcctggcaggccccc

SEQ ID NO: 790791 - DNA, 120 bp, Artificial Sequence
  ENSG00000269466_3 (sequence is synthesized)
aggaagcccctggccaccaaagcagccggaaaaagggcgccgcctacaggagggatcaagaagcctcaccgctacaagcctggcaccctggcgctgcgggaaatcagaaagtaccagaag

SEQ ID NO: 790792 - DNA, 120 bp, Artificial Sequence
  ENSG00000269466_4 (sequence is synthesized)
cgcaagctgcccttccagcgcctggtgcgcgagatcgcccaggccatcagcccggacctgcgcttccagagtgcggccattggcgccctgcaggaggccagcgaggcctacctggtgcag

SEQ ID NO: 790793 - DNA, 120 bp, Artificial Sequence
  ENSG00000269466_5 (sequence is synthesized)
ctctttgaagacaccaacctgtgtgccatccatgccaggcgcgtcacaattatgccccgagacatgcagctggcccgccgcctccgcagagagggtccttaagagcccaaaggtagctaa

SEQ ID NO: 790794 - DNA, 120 bp, Artificial Sequence
  ENSG00000269466_6 (sequence is synthesized)
gcataggattgggagtggaaacaggcagaaatcaggtcttggtggtgtttctgtgtgcttttgtttgttaatgtctaatctaccttgagggtcataaggcactagtgtcaggtgggaatg

SEQ ID NO: 790795 - DNA, 120 bp, Artificial Sequence
  ENSG00000269466_7 (sequence is synthesized)
tttcagtgagcgagtttcagcacttcagctctacatcaattttcaagaaacctgttcattttcactggactatgcctgtgtttagactacttcaaaccaaataaatctcttcctgatggc

SEQ ID NO: 790796 - DNA, 120 bp, Artificial Sequence; identical to SEQ ID NO: 664543
  ENSG00000269502_0 (sequence is synthesized)

SEQ ID NO: 790797 - DNA, 120 bp, Artificial Sequence
  ENSG00000269502_1 (sequence is synthesized)
gagatgcggaggggccagacctcctctaaatgggactaatcttagccctgctatcctttgcttcagagaacgcctcagggtcttgcctgctgtgagtgccttgaagagggagcagcgggc

SEQ ID NO: 790798 - DNA, 120 bp, Artificial Sequence
  ENSG00000269502_2 (sequence is synthesized)
acgatcaaagagacacctggctcaaggaccaataaggagtatggctgcccctcccaaagctcccatccgtgtcaggaatttgaccatcagagcaggagccctcactgggaaggagaacaa

SEQ ID NO: 790799 - DNA, 120 bp, Artificial Sequence
  ENSG00000269502_3 (sequence is synthesized)
catgctgcagcccgagacccacatcttcacagcccccgaggaggggagctcccaaggggctctgctgcttggccaggccccagaacctttgtctctgccctgtactccagtgaccttgga

SEQ ID NO: 790800 - DNA, 120 bp, Artificial Sequence
  ENSG00000269502_4 (sequence is synthesized)
agccacaggtccccaaagtctctgaccaggctttggtttctgcccactcagagtggcagcggaagctggaggccgctgaggctctgctgactctgagaaactctgcccaggcccctcctg

SEQ ID NO: 790801 - DNA, 120 bp, Artificial Sequence
  ENSG00000269502_5 (sequence is synthesized)
actccatctccctgcaccagccttgcaacccaccagctcctgctggagataaaggattccagcctcccagcccctctctccgccccaggccagccagctccatctcgctgcctattggac

SEQ ID NO: 790802 - DNA, 120 bp, Artificial Sequence
  ENSG00000269502_6 (sequence is synthesized)
atctgggatgcatctccctcttgagctaggaacccagaggaggaggcctcaatagagcactgcctatttggtatccagtttctgaatgtgcaaaatggttaacgtccaaaacgcttaacg

SEQ ID NO: 790803 - DNA, 120 bp, Artificial Sequence
  ENSG00000269502_7 (sequence is synthesized)
tctttttttaaagccttcaggtgttttataagctttttattatatggggcaactccttggctgagggtggatattcttgtacctctgtcccttactcttttggatgctggggcctttttc

SEQ ID NO: 790804 - DNA, 120 bp, Artificial Sequence
  ENSG00000269502_8 (sequence is synthesized)
tgtctcataaagacaggattgtgcaatctaagttgatcagtctctcagtggggttctgtgtgagttcatatgccagagtttttattcgtcttgtgattgctgacatacctgtgcactcat

SEQ ID NO: 790805 - DNA, 120 bp, Artificial Sequence; identical to SEQ ID NO: 664542
  ENSG00000269502_9 (sequence is synthesized)

SEQ ID NO: 790806 - DNA, 120 bp, Artificial Sequence
  ENSG00000269502_10 (sequence is synthesized)
cagcagccgcggcgacgtcactgtcctctcggcctggcacacagcgctccggccgccgaatgcccgtggacgcgcatctcttcccagagttcctgcttcctgggccagccaaagccgcag

SEQ ID NO: 790807 - DNA, 120 bp, Artificial Sequence
  ENSG00000269502_11 (sequence is synthesized)
tctgatcctccagccctgtgccacccttgaccctcttctactgcagccacaggtcctgggaaagtagtggggtccagaaccctgggaggggcggagtttagtggatgggaagagcagaag

SEQ ID NO: 790808 - DNA, 120 bp, Artificial Sequence
  ENSG00000269502_12 (sequence is synthesized)
agctctcccggaatccctttcgggaggactccttgctccagccccctgagccctggcctttggccaatgaggcagggctcatgggattgcttttgattcggaggtccgggagggagtgga

SEQ ID NO: 790809 - DNA, 120 bp, Artificial Sequence
  ENSG00000269526_0 (sequence is synthesized)
tgcggtggcatcggttcttctccttattttgacccacactggcatgccacctgaagtcccgataacagcctgatttctcactaaacactccatcgaaccatttcattatttgtctctcct

SEQ ID NO: 790810 - DNA, 120 bp, Artificial Sequence
  ENSG00000269526_1 (sequence is synthesized)
attttcagcactttccttttgctttcacaaagcttaagggagaatcagctatgacagagaaattccttttcctttatctttccctccttcccatgcccctactctcacaggcacagtgga

SEQ ID NO: 790811 - DNA, 120 bp, Artificial Sequence
  ENSG00000269526_2 (sequence is synthesized)
atgaaaattcccttgtcagtttttccaaaataattgcttcgggaaaccatctaagcaactgttggatctgccacaacttcatcaccaggtcctcatcttaccaatatattttggtaagaa

SEQ ID NO: 790812 - DNA, 120 bp, Artificial Sequence
  ENSG00000269526_3 (sequence is synthesized)
atttttctttaaacctaacatttggttcaggaatccctgaaggccaacataaatctgttccgctccaggtttcgcttgctaactcagcgcaccaagtcccctgcctggatctcactccac

SEQ ID NO: 790813 - DNA, 120 bp, Artificial Sequence
  ENSG00000269526_4 (sequence is synthesized)
ctttcaatcaaagctctaaaacttctttctatttctacaactgctcttctctaaaccaaacctgttgtccatgccctgaaggacactgtgacaggaagaacacctctgaggagggattcc

SEQ ID NO: 790814 - DNA, 120 bp, Artificial Sequence
  ENSG00000269526_5 (sequence is synthesized)
ccagtcccaccatccatcccatgagcttctccccagcaggctgccaccctaacttgactcactggtgtccagctaaacaaatgaacgattatcgagacaagtcaccccaaaaccgctgtg

SEQ ID NO: 790815 - DNA, 120 bp, Artificial Sequence
  ENSG00000269526_6 (sequence is synthesized)
cagcttgggaaggaaaagagctaatcacatggagggttctatatttgcttcccaaggcacacactgtccccacatggccaaaatctactgttcccctgggagggcctctatcccctgcat

SEQ ID NO: 790816 - DNA, 120 bp, Artificial Sequence
  ENSG00000269526_7 (sequence is synthesized)
gcaatcaaactattccagcagggtggaaatcgcagttacacaagtggttcgacagccacatcccccggtgggcctgtacccctcctggctatgtatttttatgtgggccacaaaaaaata

SEQ ID NO: 790817 - DNA, 120 bp, Artificial Sequence
  ENSG00000269526_8 (sequence is synthesized)
aactgccctttgatggaagtcctaagataacttattcaaccccccctgtggcaaacctctacacttgcattaataacatccaacatacgggagaatgtgctgtgggacttttgggaccac

SEQ ID NO: 790818 - DNA, 120 bp, Artificial Sequence
  ENSG00000269526_9 (sequence is synthesized)
agaaaagagctctgggtctaatactggcagggatgggtgcggccataggaatgatcgccccatggggagggttcacttatcatgatgtcaccctcagaaatctctccagacaaatagaca

SEQ ID NO: 790819 - DNA, 120 bp, Artificial Sequence
  ENSG00000269526_10 (sequence is synthesized)
acatagctaagagtaccagagatagcatctctaaactcaaggcctccatagattctctagcaaatgtagtcatgaacaacagattggccttagattacctcttagcagagcagggtggag

SEQ ID NO: 790820 - DNA, 120 bp, Artificial Sequence
  ENSG00000269526_11 (sequence is synthesized)
tctgtgcagtgatcagtaaatcctgttgcatttatgtcaataacagtggggcgatagaggaggatataaaaaagatctatgatgaggttacgtggctccataactttggaaaaggtgatt

SEQ ID NO: 790821 - DNA, 120 bp, Artificial Sequence
  ENSG00000269526_12 (sequence is synthesized)
cagcagggtccatttgggaggctgtgaagtctgccctcccctccctcacatggtttgtccctttactgggaccagctgcacttaatagcctgctttctcctctttggcccttgtctctat

SEQ ID NO: 790822 - DNA, 120 bp, Artificial Sequence
  ENSG00000269526_13 (sequence is synthesized)
aattcactaattaaatatgtctcttccaggatatggcaatttcacacagagcccctaaaaatggaaagagatcatccaatcttccttggaggtcccagcacctacaagtacatatctccc

SEQ ID NO: 790823 - DNA, 120 bp, Artificial Sequence
  ENSG00000269526_14 (sequence is synthesized)
ttggatgccagtgggcaaagattctgcaactacggaggggctccttccctgacagagagcaagagagggagaccctgatgacttcttcgtcccacgtcagcaggaagtagttacagaaga

SEQ ID NO: 790824 - DNA, 120 bp, Artificial Sequence
  ENSG00000269526_15 (sequence is synthesized)
cccacgacgtccttatgcccaaagcttttcagggtctccaactcttgagggggaatactgttagggtaggcaggtagccagacaagagcaggcaaggaagcccctgggaaaggaatcttt

SEQ ID NO: 790825 - DNA, 120 bp, Artificial Sequence
  ENSG00000269526_16 (sequence is synthesized)
agaaatgcagcccgctgatggcctccttggaaacgctgcacgctgagtcagcaaaaggaggagcgtggctacactggctacacctggccttgtggctgcattcctctgttccagaaggga

SEQ ID NO: 790826 - DNA, 120 bp, Artificial Sequence
  ENSG00000269526_17 (sequence is synthesized)
acttatcaaggcccagccagaggttaccaaggtaggagctattccccactaagaagcatgtatacttctctaataattcaccctaatataccattttgttcattaaaataataaaaaaaa

SEQ ID NO: 790827 - DNA, 120 bp, Artificial Sequence
  ENSG00000269556_0 (sequence is synthesized)
cggcggcggcggcggcgacggcgacggcgacggcagcggggacggcagcagtagcgggagcagcagcgtggacgcggctggcgctggcgccatgaacccgctgtaaggcgcaggctgtgc

SEQ ID NO: 790828 - DNA, 120 bp, Artificial Sequence
  ENSG00000269556_1 (sequence is synthesized)
gcgctggcgccatgaacccgctgtaaggcgcaggctgtgcagcacggggtgcgggggaggaggaggaggacgccgcggtgaagttctccgccatgaacctgaggggcctcttccaggact

SEQ ID NO: 790829 - DNA, 120 bp, Artificial Sequence
  ENSG00000269556_2 (sequence is synthesized)
tcaacccgagtaaattcctcatctatgcctgtctgctgctgttctctgtgctgctggcccttcgtttggatggcatcatacagtggagttactgggctgtctttgctccaatatggctgt

SEQ ID NO: 790830 - DNA, 120 bp, Artificial Sequence
  ENSG00000269556_3 (sequence is synthesized)
ggaagttaatggtcattgttggagcctcagttggaactggagtctgggcacgaaatcctcaatatcgagcagaaggagaaacgtgtgtggagtttaaagccatgttgattgcagtgggca

SEQ ID NO: 790831 - DNA, 120 bp, Artificial Sequence
  ENSG00000269556_4 (sequence is synthesized)
tccacttgctcttgttgatgtttgaagttctggtctgtgacagaatcgagagaggaagccatttctggctcctggtcttcatgccgctgttctttgtttccccggtgtctgttgcagctt

SEQ ID NO: 790832 - DNA, 120 bp, Artificial Sequence
  ENSG00000269556_5 (sequence is synthesized)
gcgtttggggctttcgacatgacaggtcactagagttagaaatcctgtgttctgtcaacattctccagtttatattcattgccttaagactggacaagatcatccactggccctggcttg

SEQ ID NO: 790833 - DNA, 120 bp, Artificial Sequence
  ENSG00000269556_6 (sequence is synthesized)
ttgtgtgtgtcccgctgtggattctcatgtcctttctgtgcctggtggtcctctactacattgtgtggtccgtcttgttcttgcgctctatggatgtgattgcggagcagcgcaggacac

SEQ ID NO: 790834 - DNA, 120 bp, Artificial Sequence
  ENSG00000269556_7 (sequence is synthesized)
acataaccatggccctgagctggatgaccatcgtcgtgccccttcttacatttgagattctgctggttcacaaactggatggccacaacgccttctcctgcatcccgatctttgtccccc

SEQ ID NO: 790835 - DNA, 120 bp, Artificial Sequence
  ENSG00000269556_8 (sequence is synthesized)
tttggctctcgttgatcacgctgatggcaaccacatttggacagaagggaggaaaccactggtggtttggtatccgcaaagatttctgtcagtttctgcttgaaatcttcccatttctac

SEQ ID NO: 790836 - DNA, 120 bp, Artificial Sequence
  ENSG00000269556_9 (sequence is synthesized)
gagaatatggaaacatttcctatgatctccatcacgaagataatgaagaaaccgaagagaccccagttccggagccccctaaaatcgcacccatgtttcgaaagaaggccagggtggtca

SEQ ID NO: 790837 - DNA, 120 bp, Artificial Sequence
  ENSG00000269556_10 (sequence is synthesized)
ttacccagagccctgggaagtatgtgctcccacctcccaaattaaatatcgaaatgccagattagatgccacttccggggacagagcttaagtggactgggacgcactctctccgccttc

SEQ ID NO: 790838 - DNA, 120 bp, Artificial Sequence
  ENSG00000269556_11 (sequence is synthesized)
gcatccagcgcctatcagccactcaccacgacgggacgcggaagtggcaggtgacgggggtgtgtgccagcagatgcggatgccaggaagagtgtgagaacaggggtgggattaccgtct

SEQ ID NO: 790839 - DNA, 120 bp, Artificial Sequence
  ENSG00000269556_12 (sequence is synthesized)
gtctgggaggggctccaggtacccctcttccccgtcagacccactgggagatggctgcttgccaggcccccagaaggaacatctgtctatacggtgctgaaatcccaatcaaaagtattg

SEQ ID NO: 790840 - DNA, 120 bp, Artificial Sequence
  ENSG00000269556_13 (sequence is synthesized)
tttagaaatgtatttctccacagggctgacctcctgcagctcgctgagcactcccaggtcctcagcactcccaggtcgtggctggggcagtcagtaggaactgtaactatgtctctgatg

SEQ ID NO: 790841 - DNA, 120 bp, Artificial Sequence
  ENSG00000269556_14 (sequence is synthesized)
caccacgtgtttagacacagcacagtccttttttctgttcctactgtggaagtagtttctctttgggcatgctgacagcagtttttcatagcctcacggatgagccctttctacgggagt

SEQ ID NO: 790842 - DNA, 120 bp, Artificial Sequence
  ENSG00000269556_15 (sequence is synthesized)
gactccatgcttgtatacagagtatttatacaaatgttttagcatcttcatatgcggtgttaacccctagttctgtacagcatattctgttcaagtatttttttacaagcttgtgctgta

SEQ ID NO: 790843 - DNA, 120 bp, Artificial Sequence
  ENSG00000269556_16 (sequence is synthesized)
ggcacatgccttctgctgcagaagtggacgcccgtggcacactccccccccccccgtggggtgccacgccttcatgggacattgccacttctgccctggaactcgtgcaggtacgtagta

SEQ ID NO: 790844 - DNA, 120 bp, Artificial Sequence
  ENSG00000269556_17 (sequence is synthesized)
gctgctactgccacaacggcaacaccaagcaagagatggtccatgcttttctgacgttctcagaatagtggctagcttcaaacctgacaagcgctgcttgaagccggaacactagagaat

SEQ ID NO: 790845 - DNA, 120 bp, Artificial Sequence
  ENSG00000269556_18 (sequence is synthesized)
gttgctgagagcagaaacggccacgcgggtcacgactatgcgtgggaaagtctcaagcttccctcctgccagcaacaagaaggctttggagtaggcatgatgttttcacgtgtgcgtgcc

SEQ ID NO: 790846 - DNA, 120 bp, Artificial Sequence
  ENSG00000269556_19 (sequence is synthesized)
gtttctccaagcactgcaggttccaccgtgtgtcagaggctgcaagtttaacatcctcctgcctgaaaacaaataggtcctttgctgaaaagagggtaaaaaaagagctttgatcttctc

SEQ ID NO: 790847 - DNA, 120 bp, Artificial Sequence
  ENSG00000269556_20 (sequence is synthesized)
agccaggagaagagggtggtgttttcacgcgggcaactgctcgccggcctacatggggttaattcaagtctgctgcgagcacgactccgcccttggcactggcctccagcaagccctgtt

SEQ ID NO: 790848 - DNA, 120 bp, Artificial Sequence
  ENSG00000269556_21 (sequence is synthesized)
ctctttggggtacaggggaacgggatggtttagactttcctgctcagtgtgtaaaaaatgtagctaaagccactatttttgctctccttaagctgttcaataaaccggttcctcatttta

SEQ ID NO: 790849 - DNA, 120 bp, Artificial Sequence
  ENSG00000269556_22 (sequence is synthesized)
tattataaaagtaattcatattcactgtacaaagcttggaaaagacggacaagcagaagtaatagcctaatagtcacccataatcccaccatggggagataacatggttagtgtttttat

SEQ ID NO: 790850 - DNA, 120 bp, Artificial Sequence
  ENSG00000269556_23 (sequence is synthesized)
gtctgtgttttatacaaacagtttggatataactgtgtgcaccattttgtatcctgatttttttgttttaatgttgtatcataaacattttatcatgttaataaaaggtctttataaaca

SEQ ID NO: 790851 - DNA, 120 bp, Artificial Sequence
  ENSG00000269556_24 (sequence is synthesized)
ctgcccttggaagaaacaacataccaggagctgagctccctcctcctgtgatgcaagaacagtacctatgttggtgcctttaggagagccgagtggcctatgcacagctgggtctgctat

SEQ ID NO: 790852 - DNA, 120 bp, Artificial Sequence
  ENSG00000269556_25 (sequence is synthesized)
ccggtcgcgtgcggacacaaggatggggacctcccagcgaggagcgctctgggcggggctccggacgcatgcgcggccctcgtacggaagcccggaaggaggggcagggggcggtggctc

SEQ ID NO: 790853 - DNA, 120 bp, Artificial Sequence
  ENSG00000269556_26 (sequence is synthesized)
aggccacagactgggagaaaatatttgcaaagcacacatcaaaacactgacttgcacccagaacatacagagaactcttaaaaactcaaaactgcaaaaagaaacacctaaaaattggca

SEQ ID NO: 790854 - DNA, 120 bp, Artificial Sequence
  ENSG00000269556_27 (sequence is synthesized)
aaagagttgacaatttgcgaaggggatatacacatggcgaaaaagcacaggaaaagatgctcaacgccattacaggttagggaagacaaactacaaccaggatgagggcccgaaacacat

SEQ ID NO: 790855 - DNA, 120 bp, Artificial Sequence
  ENSG00000269556_28 (sequence is synthesized)
ggcttcagaatggtgaaactcagcaacactgacgaggccacgtgcctgggaggatgcagaggaactgggacactccagtgttactggcgggaaggcaggtggtacgggcactgtagaaaa

SEQ ID NO: 790856 - DNA, 120 bp, Artificial Sequence
  ENSG00000269556_29 (sequence is synthesized)
tggtttggccatctctgatgcagttaaaagcgcacttcccgtgggacttggctgccccactcctgggtataagatttacccccagagaagtgaaagcgcgcagccttgtagaaacccaca

SEQ ID NO: 790857 - DNA, 120 bp, Artificial Sequence
  ENSG00000269556_30 (sequence is synthesized)
caccagtgtttgtagcagtcttgtttgcattttggatagcggccttgtttggttttcacaaaccaccctcagcggacagtcagataaactgtaggcatccatacaatggaataccactca

SEQ ID NO: 790858 - DNA, 120 bp, Artificial Sequence
  ENSG00000269556_31 (sequence is synthesized)
gatctgagagggaacgacctgtggatacagggagggaacaacttggatgaatctcattagagacattatgtggatggcgggaagccagtctcaacaggttacttgtctcgcgatgccatc

SEQ ID NO: 790859 - DNA, 120 bp, Artificial Sequence
  ENSG00000269556_32 (sequence is synthesized)
tacataaagttccagcagagacaaaagtacagtgagagaacagatcagtgtttgccggggctaatggtggggacggtgtgatagtgaagggacagcacggagagttttgcagggtgacag

SEQ ID NO: 790860 - DNA, 120 bp, Artificial Sequence
  ENSG00000269556_33 (sequence is synthesized)
acctcttctgcatcctgccaacggctgtgtgaatctacttgtgtgaagactcagggaactcacaccaaaggaagacggtcacttttcctactgtatgatagataattaataaaaagggag

SEQ ID NO: 790861 - DNA, 120 bp, Artificial Sequence
  ENSG00000269556_34 (sequence is synthesized)
aacggaggagtgtcgtcccaggaggcagggcaggagggcgaagacgtgtcacaggggagcctggccaagtggcgcccccggaactcgtcctctgggcttgtgtgtggatgagacaaggtc

SEQ ID NO: 790862 - DNA, 120 bp, Artificial Sequence
  ENSG00000269556_35 (sequence is synthesized)
tacctggtacgacagggacatactgggaatgcgcccttgccgtggaggcggggacccggcagcgctacgtatccagcatcaacctgtatccagcatcaacccgccaagttcactaacttg

SEQ ID NO: 790863 - DNA, 120 bp, Artificial Sequence
  ENSG00000269556_36 (sequence is synthesized)
gtaggggtgaggttagggatccttaggagcccaggcagccagactttctggggagcccattcccatttgtgttgccaaagtacccccagcaggttgtgggaatgttgcctgtgaagagag

SEQ ID NO: 790864 - DNA, 120 bp, Artificial Sequence
  ENSG00000269556_37 (sequence is synthesized)
tctgttggggtgagatcttgtgtgtgtgcacagggtgacagttgtgtcccatttcccgggaagctgtgatggcagcagaacctagaggagcctgagagagtgtgggagagtgggcctctg

SEQ ID NO: 790865 - DNA, 120 bp, Artificial Sequence
  ENSG00000269556_38 (sequence is synthesized)
gaagagtagaggctgcggagccaggtgcagggctgtctgtcacccaaaggaagagggactgatgactcactgagcgtgtgtgtcccctggtggcagcaggccccatagtgaacataccat

SEQ ID NO: 790866 - DNA, 120 bp, Artificial Sequence
  ENSG00000269556_39 (sequence is synthesized)
accttttctgtcctgagcgatgctcccagcagtcctgggagatggaacggtccttattcggctcacaggaaggaccgccttaactggacagacacagcaaggtgctaaagatgccttcca

SEQ ID NO: 790867 - DNA, 120 bp, Artificial Sequence
  ENSG00000269586_0 (sequence is synthesized)
agtgttcggctggggcaggcacgctgtggctggctacttcccttccttccatcccccttgggccaaacaggatcggtgcttctggtgagacgcctccccatgcacatcactcccaggtac

SEQ ID NO: 790868 - DNA, 120 bp, Artificial Sequence
  ENSG00000269586_1 (sequence is synthesized)
cctagggggcacatttcccacaactcccagagggcaggtttctagaaagtgccaccagtggggaggcgccacaacttcactgccattttgtgaggtgccgccgtctctcctccagcaagg

SEQ ID NO: 790869 - DNA, 120 bp, Artificial Sequence
  ENSG00000269586_2 (sequence is synthesized)
accgataaaacagagaaggtggctgtagatcctgaaactgtgtttaaacgtcccagggaatgtgacagtccttcgtatcagaaaaggcagaggatggccctgttggcaaggaaacaagga

SEQ ID NO: 790870 - DNA, 120 bp, Artificial Sequence
  ENSG00000269586_3 (sequence is synthesized)
aacaaggagcaggagacagccttattgcaggctctgccatgtccaaagaaaagaagcttatgacaggacatgctattccacccagccaattggattctcagattgatgacttcactggtt

SEQ ID NO: 790871 - DNA, 120 bp, Artificial Sequence
  ENSG00000269586_4 (sequence is synthesized)
ggaaacgttaccagcaatttctctggagatgacctagaatgcagaggaatagcctcctctcccaaaagccaacaagaaattaatgctgatataaaatgtcaagtagtgaaggaaatccga

SEQ ID NO: 790872 - DNA, 120 bp, Artificial Sequence
  ENSG00000269586_5 (sequence is synthesized)
tgccttggacgaaaatatgaaaaaatcttcgaaatgcttgaaggagtgcaaggacctactgcagtcaggaaacgattttttgaatccatcatcaaggaagcagcaagatgtatgagacga

SEQ ID NO: 790873 - DNA, 120 bp, Artificial Sequence
  ENSG00000269586_6 (sequence is synthesized)
gactttgttaagcaccttaagaagaaactgaaacgtatgatttgagaatacttgtccctggaggattatcacaccccaaatgcataatctcgttaatgattgaggagagaaaaggatcag

SEQ ID NO: 790874 - DNA, 120 bp, Artificial Sequence
  ENSG00000269586_7 (sequence is synthesized)
attgctgttttctacaatggagcaggatattgctgaagtctcctggcatatgttaccgaatcaactggccttccagaggctaagaaatttctgttagtaaaagatgttctttttcccaaa

SEQ ID NO: 790875 - DNA, 120 bp, Artificial Sequence; identical to SEQ ID NO: 726515
  ENSG00000269699_0 (sequence is synthesized)

SEQ ID NO: 790876 - DNA, 120 bp, Artificial Sequence
  ENSG00000269699_1 (sequence is synthesized)
cgaggctgcgcagcactgaggtgagctttgccttcttgatcttccgtccttcttggagacgactggcgagaggaagagggactaggtccaaacgctaggtggctgggtccagccggagac

SEQ ID NO: 790877 - DNA, 120 bp, Artificial Sequence
  ENSG00000269699_2 (sequence is synthesized)
ccgcaccaaggaggagatcatcgagctcttggtccttgagcagtacctgaccatcatccctgaaaagctcaagccttgggtgcgagcaaaaaagccggagaactgtgagaagctcgtcac

SEQ ID NO: 790878 - DNA, 120 bp, Artificial Sequence
  ENSG00000269699_3 (sequence is synthesized)
tctgctggagaattacaaggagatgtaccaaccagaagacgacaacaacagtgacgtgaccagcgacgacgacatgacccggaacagaagagagtcctcaccacctcactcagtccattc

SEQ ID NO: 790879 - DNA, 120 bp, Artificial Sequence
  ENSG00000269699_4 (sequence is synthesized)
tttcagtggtgaccgggactgggaccggaggggcagaagcagagacatggagccacgagaccgctggtcccacaccaggaacccaagaagcaggatgcctccgcgggatctttcccttcc

SEQ ID NO: 790880 - DNA, 120 bp, Artificial Sequence
  ENSG00000269699_5 (sequence is synthesized)
tgtggtggcgaaaacaagctttgaaatggacagagaggacgacagggactccagggcttatgagtcccgatctcaggatgctgaatcataccaaaatgtggtggacctcgctgaggacag

SEQ ID NO: 790881 - DNA, 120 bp, Artificial Sequence
  ENSG00000269699_6 (sequence is synthesized)
gaaacctcacaacacaatccaggacaacatggaaaactacaggaagctgctctccctcggtttccttgctcaggactctgtccctgcagaaaagaggaacacagagatgttagacaatct

SEQ ID NO: 790882 - DNA, 120 bp, Artificial Sequence
  ENSG00000269699_7 (sequence is synthesized)
gccatctgctgggtcccagttcccggacttcaaacacttaggaacatttctggtgtttgaggagttggtgaccttcgaggatgtgcttgtggacttcagcccagaggaacttagttccct

SEQ ID NO: 790883 - DNA, 120 bp, Artificial Sequence
  ENSG00000269699_8 (sequence is synthesized)
gggcaccagttctctaaacctgacattatctcacgcctggaagaggaggaatcatatgcaatggagacagacagcagacatacagtgatttgtcaaggagagtctcatgatgatccattg

SEQ ID NO: 790884 - DNA, 120 bp, Artificial Sequence
  ENSG00000269699_9 (sequence is synthesized)
gaaccacaccagggcaaccaagagaaacttttgactcctataacaatgaatgaccccaagaccctcactccggaaagaagctatggcagtgatgaatttgagagaagctctaatcttagt

SEQ ID NO: 790885 - DNA, 120 bp, Artificial Sequence
  ENSG00000269699_10 (sequence is synthesized)
aaacaatcaaaggatcctctaggaaaggatccccaggaaggcactgctcctggaatatgtacgagtccccagtcagcatcccaagagaacaaacacaacagatgtgaattttgcaaacga

SEQ ID NO: 790886 - DNA, 120 bp, Artificial Sequence
  ENSG00000269699_11 (sequence is synthesized)
acctttagtacgcaagtagcccttaggagacacgaacggatccatactgggaagaaaccctatgaatgtaaacagtgtgctgaagccttctatctcatgccacacctcaacagacatcag

SEQ ID NO: 790887 - DNA, 120 bp, Artificial Sequence
  ENSG00000269699_12 (sequence is synthesized)
aagacccattctggtaggaagacttctggctgcaatgaaggtagaaagccttccgtccagtgtgcgaatctctgtgaacgtgtaagaattcacagtcaggaggactactttgaatgtttt

SEQ ID NO: 790888 - DNA, 120 bp, Artificial Sequence
  ENSG00000269699_13 (sequence is synthesized)
cagtgcggcaaagcttttctccagaatgtgcatcttcttcaacatctcaaagcccatgaggcagcaagagtccttcctcctgggttgtcccacagcaagacatacttaattcgttatcag

SEQ ID NO: 790889 - DNA, 120 bp, Artificial Sequence
  ENSG00000269699_14 (sequence is synthesized)
cggaaacatgactacgttggagagagagcctgccagtgttgtgactgtggcagagtcttcagtcggaattcatatctcattcagcattatagaactcacactcaagagaggccttaccag

SEQ ID NO: 790890 - DNA, 120 bp, Artificial Sequence
  ENSG00000269699_15 (sequence is synthesized)
tgtcagctatgtgggaaatgtttcggccgaccctcatacctcactcaacattatcaactccattctcaagagaaaactgttgagtgcgatcactgttgagaaacctttagtcacagcaca

SEQ ID NO: 790891 - DNA, 120 bp, Artificial Sequence
  ENSG00000269699_16 (sequence is synthesized)
cacttttctcaacattattggcttcctcctagagtgttgtgagtgtgagaaggcctttcactagccccaccttgttaacaacttgaacattcatcaaagtgtggtaaaaaaaaaaaaaaa

SEQ ID NO: 790892 - DNA, 120 bp, Artificial Sequence
  ENSG00000269699_17 (sequence is synthesized)
tgtgttttgactctgttcctgtggatagctgcttggtctgaagttccagaaaggatcctgttcccagacagaggtttcggaacctaatctatgtggaatttgttgggcctcggaagaccc

SEQ ID NO: 790893 - DNA, 120 bp, Artificial Sequence
  ENSG00000269699_18 (sequence is synthesized)
gaaaattttacttagagaaatgctgcctccaaagcacttgtctgccaccaaacctaagaagtcctgggccccaaatctgtatgagctagacagtgacttgactaaggagccggatgtcat

SEQ ID NO: 790894 - DNA, 120 bp, Artificial Sequence
  ENSG00000269699_19 (sequence is synthesized)
tctcagactcgataagacaaagaaagatgcaatgccaggtgcctgtggctctggattagagcacgtggaagctctctgctggtctgaatgcctgcatcatgttcagtcctctctaatcac

SEQ ID NO: 790895 - DNA, 120 bp, Artificial Sequence
  ENSG00000269699_20 (sequence is synthesized)
ttctttcccagtaggagatatagagcatgtgctgtgcacaggttcaaggggaaagtgccagggcctcgaagtttctgctgctccatttggagtatattccgcttccccaaaagtttagtc

SEQ ID NO: 790896 - DNA, 120 bp, Artificial Sequence
  ENSG00000269699_21 (sequence is synthesized)
caaggctcgtatttttgaagttccactcggtaccaccagcacaggtttcaccacatagacctgttgccacctaaactatttgctcagtattcttaagctggtgcattaaaaaaaaaaaaa

SEQ ID NO: 790897 - DNA, 120 bp, Artificial Sequence
  ENSG00000269699_22 (sequence is synthesized)
ctccctcggagtgcagcttgctgaagacgatggccactcccacatgacgcagggccactcatcaagatccaagagaagtgcctacccaagcaccagtcgaggtttccttgctcaggactc

SEQ ID NO: 790898 - DNA, 60 bp, Artificial Sequence
  ENSG00000269713_0 (sequence is synthesized)
aaagtgctgtgggagtgatcacatttttcacaacagtagtccagcgagaaggcagagatg

SEQ ID NO: 790899 - DNA, 86 bp, Artificial Sequence
  ENSG00000269713_1 (sequence is synthesized)
gagaaattgcgcccccagttggcagagaacaaacagcagttcggaaacctcaaagagagatgttttctaactcaactggccggctt

SEQ ID NO: 790900 - DNA, 120 bp, Artificial Sequence
  ENSG00000269713_2 (sequence is synthesized)
atgaggatgaagatgttcaagttgaggaggatgagaaagtactggaatcatctgcccccagggaggtgcagaaggctgaagagagcaaagtcgctgaggactcactggaggaatgtgcca

SEQ ID NO: 790901 - DNA, 120 bp, Artificial Sequence
  ENSG00000269713_3 (sequence is synthesized)
ggcccttgtgactccaaccagcctcacaagaacatcaaaatcacatttgaggaagacgaagtcaactcaactctggttgtagacagagaatcctctcatgatgaatgtcaggatgctcta

SEQ ID NO: 790902 - DNA, 63 bp, Artificial Sequence
  ENSG00000269713_4 (sequence is synthesized)
ctcatgttgaacgggaagatgctgtacacattattccagaaaatgaaagtgatgatgaggaag

SEQ ID NO: 790903 - DNA, 88 bp, Artificial Sequence
  ENSG00000269713_5 (sequence is synthesized)
tcaaaacccaccatgccccaggctcaacggcgtgctgatggaagtggggatgttattctactccgtcaatgtactttgaactacctga

SEQ ID NO: 790904 - DNA, 84 bp, Artificial Sequence
  ENSG00000269713_6 (sequence is synthesized)
agcacatcagcttcgccctttacgtggacaataggttttttactttgacggtgacaagtctccacctggtgttccagatggaag

SEQ ID NO: 790905 - DNA, 120 bp, Artificial Sequence
  ENSG00000269713_7 (sequence is synthesized)
ttgacggtgacaagtctccacctggtgttccagatggaagtcatattcccacaataagcagcccttactaagccgagagatgtcattcctgcaggcaggacctataggcacgtgaagttt

SEQ ID NO: 790906 - DNA, 72 bp, Artificial Sequence
  ENSG00000269713_8 (sequence is synthesized)
accatgccagtggcaacctgtgctcagtctgaagacaatggacccacgttaggtgtgacacgttcacataac

SEQ ID NO: 790907 - DNA, 120 bp, Artificial Sequence
  ENSG00000269713_9 (sequence is synthesized)
cagcacatgccgggagtgatcagtcagacattttaatttgaaccacgtatctctgggtagctacaaaattcctcagggatttcattttgcagacatgtctctgagcttctatacctgctc

SEQ ID NO: 790908 - DNA, 79 bp, Artificial Sequence
  ENSG00000269713_10 (sequence is synthesized)
atctctgggtagctacaaaattcctcagggatttcattttgcagacatgtctctgagcttctatacctgctcaaggtca

SEQ ID NO: 790909 - DNA, 85 bp, Artificial Sequence
  ENSG00000269713_11 (sequence is synthesized)
tgacctgtctccttcacatagtcctatattttgggttcaaaaaaagtaaaaagataatgtagctgcatttctttagttattttga

SEQ ID NO: 790910 - DNA, 80 bp, Artificial Sequence
  ENSG00000269713_12 (sequence is synthesized)
tgctgttgcaaaaagaagaattttaatctatacaattaaaaccttttgcctatcactctggacttttggattgtttttta

SEQ ID NO: 790911 - DNA, 120 bp, Artificial Sequence
  ENSG00000269713_13 (sequence is synthesized)
ttaattttaatctatacaattaaaaccttttgcctatcactctggacttttggattgttttttacattcagtgttataatatttgattatgctgattggttttggtgggtactgatgcga

SEQ ID NO: 790912 - DNA, 120 bp, Artificial Sequence
  ENSG00000269713_14 (sequence is synthesized)
gggaccctgaggatccagctggccgcaggctatgggctgggcggcggttgagacagcggcgatattgggaggggtaggtgagcgtcgcgaggcagcgtgagcttctgagtgaacgcggtg

SEQ ID NO: 790913 - DNA, 120 bp, Artificial Sequence
  ENSG00000269713_15 (sequence is synthesized)
cttttgggaacgcgggacgggcgacctgtggcgccaggagcgggccgaggcgcggcggcgcggctgccgtctggatgggaagttacggtttacagcgaagtccacccagcgtttccgagg

SEQ ID NO: 790914 - DNA, 120 bp, Artificial Sequence
  ENSG00000269713_16 (sequence is synthesized)
caatctgaaagcaaatcctgtttagatgcaggcgaaggttcctggtgacccaggctctcaccttaccgtcccttaccgtcctcctgagggtgtcctggagcttcagtgctgtgtgttctt

SEQ ID NO: 790915 - DNA, 120 bp, Artificial Sequence
  ENSG00000269713_17 (sequence is synthesized)
ggcctccatgctgggggtgccaccaattcccactgtccagggcttccagtggactctccgaggtactgatgtagaaacttccccattcggtgcaccaagagcaacctcacacggtgtggg

SEQ ID NO: 790916 - DNA, 120 bp, Artificial Sequence
  ENSG00000269713_18 (sequence is synthesized)
attcggtgcaccaagagcaacctcacacggtgtgggccaaatgaagagctgccagatcccacaggtggcaagggctctggaacagccacataaagcccttgaagataaggatggtcaaac

SEQ ID NO: 790917 - DNA, 120 bp, Artificial Sequence
  ENSG00000269713_19 (sequence is synthesized)
gaaactcagatcttgctaagatttactggttgggaatccaaagttaatgccaagaagcagccgccagttgggatcaaatgtgagcctatggatcaagacggttacctggcacgctggcca

SEQ ID NO: 790918 - DNA, 82 bp, Artificial Sequence
  ENSG00000269713_20 (sequence is synthesized)
cttatcagagtctgagctactggcagtgctttcagctctgagttgaggcacctcaaaccttgtttttgtggtgaaggatcct

SEQ ID NO: 790919 - DNA, 61 bp, Artificial Sequence
  ENSG00000269713_21 (sequence is synthesized)
tgacaacgatgacgatgaagatgttcaaattgaggtggctgagaaagtgcagaaatcgtct

SEQ ID NO: 790920 - DNA, 60 bp, Artificial Sequence
  ENSG00000269713_22 (sequence is synthesized)
gagtcctgggatgaaggttattcgactccctcaattcctcctgaaatgttggcctcgtac

SEQ ID NO: 790921 - DNA, 120 bp, Artificial Sequence
  ENSG00000269713_23 (sequence is synthesized)
ctggagtgcagtggcacaatcacagctgaccacaaccttgacctcccaaggctcaggtgatcctcctgcctcagcccccaagtagctgggacctacaggcaatctgaaagcaaatcctgt

SEQ ID NO: 790922 - DNA, 120 bp, Artificial Sequence
  ENSG00000269713_24 (sequence is synthesized)
tggttgtgagtgcagcaacccaagagtgtcttatctgaaataccaccaggaatgtctggacacagtagacaaagttttttcaactggacgccttaggatacatgcttccaaaaacaaagt

SEQ ID NO: 790923 - DNA, 62 bp, Artificial Sequence
  ENSG00000269713_25 (sequence is synthesized)
ttatctacccttggtctttgatgatggcgacctacagatggggttttgggtaacagtcaggt

SEQ ID NO: 790924 - DNA, 74 bp, Artificial Sequence
  ENSG00000269713_26 (sequence is synthesized)
atgtgtctaaatcaagggagaggtgtatatatgctttcttcctatttgttggtagtatgttggctagtattttt

SEQ ID NO: 790925 - DNA, 120 bp, Artificial Sequence
  ENSG00000269713_27 (sequence is synthesized)
aagatgtgacccaggtttcactgaatttattcccattttctgtgtcttctaagttcgcttgttttagctcatctgtccgtcatgttcctggtatgttttctagataaatggctgactttt

SEQ ID NO: 790926 - DNA, 80 bp, Artificial Sequence
  ENSG00000269713_28 (sequence is synthesized)
acccacaaaagccataatagctgatgctactgtgtagaaccaagttacattttgactcaagagctggttcattgcacccc

SEQ ID NO: 790927 - DNA, 79 bp, Artificial Sequence
  ENSG00000269713_29 (sequence is synthesized)
atttgcctacaatttattggggaaaaaaatcgcgcatttgtgtacaacaggggaattttgcccaaggctcatgaaagaa

SEQ ID NO: 790928 - DNA, 120 bp, Artificial Sequence
  ENSG00000269720_0 (sequence is synthesized)
gggcgtgcctggcgggtgctcgccctgtgcggggtggccgtgttcctggctgcggcagcagccggcggggccctggtagcctggaatctggccgcctcggctgctcggggacctcgctgc

SEQ ID NO: 790929 - DNA, 120 bp, Artificial Sequence
  ENSG00000269720_1 (sequence is synthesized)
gccaatgccacggcgccgcccggggacccgccgcctggggtcgacgacctgcggcgccggctggcagaggctgccgagcgggaggaggccctagccaggcagctggaccaggcggaaagt

SEQ ID NO: 790930 - DNA, 120 bp, Artificial Sequence
  ENSG00000269720_2 (sequence is synthesized)
acgacactgaagattgagatggacgaagccaaggcacaggggacccagatgggggccgagaacggggcgctgacagaggccctggcgcgctgggaggcggcggccacggagtctacgcgg

SEQ ID NO: 790931 - DNA, 120 bp, Artificial Sequence
  ENSG00000269720_3 (sequence is synthesized)
cggctggacgaggctctgcggcgcgcaggcgtggcggaggccgagggcgaagcctgtgcggcccgggaggcggcgctgcgcgaacgccttaacgtcctggaagccgagatgagcccacag

SEQ ID NO: 790932 - DNA, 120 bp, Artificial Sequence
  ENSG00000269720_4 (sequence is synthesized)
cgtcctggaagccgagatgagcccacagcgcagagtgccccggccgcgtccccgctcggggtcccgaccccggcccagccctcgctcgcgctctcgctccggaccctccgggggctgccg

SEQ ID NO: 790933 - DNA, 77 bp, Artificial Sequence
  ENSG00000269720_5 (sequence is synthesized)
gacgcccggctaactttgttggtttgaaatcccatcagctagtcccagatggagctgaaagtggaacttgaatctga

SEQ ID NO: 790934 - DNA, 120 bp, Artificial Sequence
  ENSG00000269720_6 (sequence is synthesized)
gctagtcccagatggagctgaaagtggaacttgaatctgaccgcagagctcagcactctccactttctggtggcttagggttggtggcgttggacctgggcagagatctccctccaggca

SEQ ID NO: 790935 - DNA, 120 bp, Artificial Sequence
  ENSG00000269720_7 (sequence is synthesized)
ggcagctgtcaccactcggtgccccaggcttcagaagccacttctgtattttacaactacaaggccccaaaggacattccacacaaagctcaggacacagggtcgcaggtggcttctcac

SEQ ID NO: 790936 - DNA, 120 bp, Artificial Sequence
  ENSG00000269720_8 (sequence is synthesized)
aggccgaatcactcctcctctcctctgcctacaccccctcccacttcccctccactcctcagagccggcttcagacccaactaacgacactgaagattgagatggacgaagccaaggcac

SEQ ID NO: 790937 - DNA, 120 bp, Artificial Sequence
  ENSG00000269720_9 (sequence is synthesized)
aggggacccagatgggggccgagaacggggcgctgacaggtgcgttggggtgtaagggagtgggcagggatagaagtgggaggagcctaggtgaatcctagttatccaaacaagcacagt

SEQ ID NO: 790938 - DNA, 120 bp, Artificial Sequence
  ENSG00000269720_10 (sequence is synthesized)
tgcaaacgtaatgcaaataacacggatataaacgcaaaaacttatgaaaagaatgcaaacaacatgcagaggccatgcaaatgtcacaaaaacaaggcaaatgccacaaaacatgcaaac

SEQ ID NO: 790939 - DNA, 120 bp, Artificial Sequence
  ENSG00000269720_11 (sequence is synthesized)
tccttgtaaacgactcacgaaagcaatgcaaacctatgaaaagctatgcaaatggcacgtggaagccatgcaatggtacacactaatttaattcaaataaaggaaagcgtgcaaacggca

SEQ ID NO: 790940 - DNA, 120 bp, Artificial Sequence
  ENSG00000269743_0 (sequence is synthesized)
gggagctccgttgtgcgtcgcttaagtgagggcggcggatgggcgaaggtccggtgactgcgactgtcgctgctttctgaggccacaggaaaggggccgtcggtcgccgccatgacagcg

SEQ ID NO: 790941 - DNA, 120 bp, Artificial Sequence
  ENSG00000269743_1 (sequence is synthesized)
agcgaggcggagtttcttccatctgcacccagttgtcttcagcatgggggagcagaaccactctcccgggaaggagcttcagcacaggacgcgagcagaggctccaggaaagaaaagctg

SEQ ID NO: 790942 - DNA, 120 bp, Artificial Sequence
  ENSG00000269743_2 (sequence is synthesized)
gcattcccaggcctatgcccttggggccgtttccaactttatgtctacttttctgacctttcctatctataaggttgtgttccggcaacagatccatgccatggcagtgtcagaggctgt

SEQ ID NO: 790943 - DNA, 120 bp, Artificial Sequence
  ENSG00000269743_3 (sequence is synthesized)
gagacagctttggcatgaaggtcctcaatacttctaccggggaatctaccctcctcttctctccaagacgttgcaagggactcttctgtttgggacttatgatagcctgctgtgctttct

SEQ ID NO: 790944 - DNA, 120 bp, Artificial Sequence
  ENSG00000269743_4 (sequence is synthesized)
ctctcctgttgggccacacaccctgggacaccgctgggctgccgggctcatgtctggcgtggtggaggccgtggcactcagcccctttgaaagggtgcaaaatgtgctccaggatggtcg

SEQ ID NO: 790945 - DNA, 120 bp, Artificial Sequence
  ENSG00000269743_5 (sequence is synthesized)
caagcaagctcgcttccccagcaccttcagcattctcaaggaattcaattcttatgggctttgggggcggctgtcactgggctactatcgtggtttctggcctgtcctggccaggaacag

SEQ ID NO: 790946 - DNA, 120 bp, Artificial Sequence
  ENSG00000269743_6 (sequence is synthesized)
cctggggagtgctctatatttttctttcaaggaccccatccaggatggcctggcagagcaaggcctgccccactgggttcctgccttggtgtctggtagtgtcaatggaacaatcacctg

SEQ ID NO: 790947 - DNA, 120 bp, Artificial Sequence
  ENSG00000269743_7 (sequence is synthesized)
cctagttctgtatcctctgattgtgctggttgctaatatgcagtcccatattggatggcagaacatgccaagcctgtgggcctctgcccaggatgtatggaacactcggggccgaaagct

SEQ ID NO: 790948 - DNA, 120 bp, Artificial Sequence
  ENSG00000269743_8 (sequence is synthesized)
gctcctgatctaccgtggaggctccctagtcatcctaaggtccagtgtgacatggggcctcactacggcaatccatgacttcctgcagaggaagtcgcactccaggaaagagctgaagac

SEQ ID NO: 790949 - DNA, 120 bp, Artificial Sequence
  ENSG00000269743_9 (sequence is synthesized)
tgactagctgcagaaagtgtggcatggcagctttgttattctaaatcttccctggttggttctatatagcttacttctttggctaggttgcctaatacagccatcctttagcatctataa

SEQ ID NO: 790950 - DNA, 120 bp, Artificial Sequence
  ENSG00000269743_10 (sequence is synthesized)
actcattgcatgggagaagttcccaactaccaacctgttgagcaaggacaaagcccaaaagtattccttagtcaaaaagaaacgttcaccccagtctctccacagtttcagtagcctcag

SEQ ID NO: 790951 - DNA, 120 bp, Artificial Sequence
  ENSG00000269743_11 (sequence is synthesized)
agccaggaggcctttaaataacatgtaacccagattaagtgtcattcctttaaggaattccttggcaataaacagaaacttaaaaagatgaccttacttaggcactctgagctctgggac

SEQ ID NO: 790952 - DNA, 120 bp, Artificial Sequence
  ENSG00000269743_12 (sequence is synthesized)
ccctctaggtgtcctccagaccaaactgagtggaactccaatttcaaagaactatgcttgactcttaggatgggaattccataaaacttctcagatggctacattttcatgatattgttc

SEQ ID NO: 790953 - DNA, 120 bp, Artificial Sequence
  ENSG00000269743_13 (sequence is synthesized)
actgcctctaccaccacctctcacttctcaaggctgtgggtcctactttcagggtagcagctgtggctggaaatcctaaattaggcttgcatgaactcgtcaggtgccacaagaactagt

SEQ ID NO: 790954 - DNA, 120 bp, Artificial Sequence
  ENSG00000269743_14 (sequence is synthesized)
ggggctggagatgggagtgagaagaggcgtggcccatggatggaaagaataaaaactttgaaagaaaagatttaattacatgcaaaatagaaacatttgctatagtctgcttggtgttat

SEQ ID NO: 790955 - DNA, 120 bp, Artificial Sequence
  ENSG00000269743_15 (sequence is synthesized)
ctgctaggacatttctgagagcaaggtgataacattgcctagaaaccgtttgagtttccctaagaaacctggaagtgaagtgaccatatctcttcacagaaaattgcatattttgttgat

SEQ ID NO: 790956 - DNA, 120 bp, Artificial Sequence
  ENSG00000269743_16 (sequence is synthesized)
gtggttaaatgtagttactatgacataaagatcagaaatcttagcctgtcattcagagccattcaaaatatggtcatcatataactttcaacatattgtcactccacttacataaacccc

SEQ ID NO: 790957 - DNA, 120 bp, Artificial Sequence
  ENSG00000269743_17 (sequence is synthesized)
aaacactagccataatgaactattgttctctccccagacattccatgaactttcccatggccatactctggcccacactattctttccacctgcagtgctccttcttcacatgccagtct

SEQ ID NO: 790958 - DNA, 120 bp, Artificial Sequence
  ENSG00000269743_18 (sequence is synthesized)
accaaaatccttccagttccttgaagcccagctcagaggtcaccttctctatggagttcttgattttccccaactgaatgtgacattagtctctgtgatgcccctttctttttttttttt

SEQ ID NO: 790959 - DNA, 120 bp, Artificial Sequence
  ENSG00000269743_19 (sequence is synthesized)
aggcgtgagccaccgcgcccagcctctgtgatgcccctttctaacagcacttcatacagggtactgattccattatgtcactaatctcatgtgaccctttgttcttgtattcttcaatac

SEQ ID NO: 790960 - DNA, 120 bp, Artificial Sequence
  ENSG00000269743_20 (sequence is synthesized)
ctttgttcttgtattcttcaatacctcctactagactgtaaaactcattgaaagcagggatttttgtatgcattttaaaatcttccattgtgcctaggtgctcaataacgttggtcaaat

SEQ ID NO: 790961 - DNA, 120 bp, Artificial Sequence
  ENSG00000269743_21 (sequence is synthesized)
tactgagttgattatcaagctgtgatatggtatatcctcagggtgctgtcccttgtacatgacgataaagttattgactcactgtcagcaagacacgtgcctttgggctgtgtttttgct

SEQ ID NO: 790962 - DNA, 120 bp, Artificial Sequence
  ENSG00000269743_22 (sequence is synthesized)
ttcttttaataattgatttagttttgtgctaatgataatgatgctgctactgataataataataacaataataaaaattactttcaactggcacatttgatgagtttatattactgatgg

SEQ ID NO: 790963 - DNA, 120 bp, Artificial Sequence
  ENSG00000269743_23 (sequence is synthesized)
attttgaggatttccaagatgacatgtgttatagtttccccctacagatatcttagtaatgccctcctcttgcatctccttactgaaccaaatttgtcctgtatttgtcttacttggttg

SEQ ID NO: 790964 - DNA, 120 bp, Artificial Sequence
  ENSG00000269743_24 (sequence is synthesized)
tagatttagcagtgagaacttctcactgaatgccacagaaattaaagacatggttgttggaggtatgatgtcagagagcatttgccaccaaggttggcagaaaatggctggtccaggaga

SEQ ID NO: 790965 - DNA, 120 bp, Artificial Sequence
  ENSG00000269743_25 (sequence is synthesized)
gctgaagatgagcttccacatctgcagatcgggatgtgttgggacagtactcaacttgtggattcaaggaagtatgaacacagagtctgcataaggaaaggaaaaagatgcattcatctc

SEQ ID NO: 790966 - DNA, 120 bp, Artificial Sequence
  ENSG00000269743_26 (sequence is synthesized)
ccaagtacactggtgatttccacttatgtcattctgtccatccatgtccctttcttcattttaacttcttatttaaaaataatttcaaacatttaaaaatgttgcaagcataaataaagc

SEQ ID NO: 790967 - DNA, 120 bp, Artificial Sequence
  ENSG00000269743_27 (sequence is synthesized)
ttaaagaacacccatgtcccctttaccctaattcccctattattaatgtttctccccatttgctttattatttaagtgtgcactctgtctatacacacacaggatattttttccctgaac

SEQ ID NO: 790968 - DNA, 120 bp, Artificial Sequence
  ENSG00000269743_28 (sequence is synthesized)
tatctgagagttgcatacatcagttttcaatattcctagattcaatgtttgtagatccaaattattttttaagagaccgtgttttatctctgacaatgggacagttattacagaatataa

SEQ ID NO: 790969 - DNA, 120 bp, Artificial Sequence
  ENSG00000269743_29 (sequence is synthesized)
taaaatgaaaactcacacaatatatgtgatattgtgaaatatatacttggtctttgatcctgtttcttggcatacaactcctaaaatccttagaatttccaaagtgatatctttttgtat

SEQ ID NO: 790970 - DNA, 120 bp, Artificial Sequence
  ENSG00000269743_30 (sequence is synthesized)
gctaataattgactgatggctggcagcctctggttgcttcaggatgggaactagtcaccaggaagaccaaggcaccattagagggttgggacttaacagcctcattcccgacctccaggg

SEQ ID NO: 790971 - DNA, 120 bp, Artificial Sequence
  ENSG00000269743_31 (sequence is synthesized)
aggggagagggatggaaggttaagttgatcaccagtggccaatgatttaatcaatcatgcctacgcaatgaagcttccataaaaaccccaaagcactgggtttggagagcttccagatag

SEQ ID NO: 790972 - DNA, 120 bp, Artificial Sequence
  ENSG00000269743_32 (sequence is synthesized)
ctgaacatgtggaggttcctggagggtggtgacccagggagggcacagaagctctgagccccttccgcagtacctcaccctatgcatctcttcatctctatcctttgatatatcctttat

SEQ ID NO: 790973 - DNA, 120 bp, Artificial Sequence
  ENSG00000269743_33 (sequence is synthesized)
aataaagtggtaaacgttaagtatttccccaagttctgtgaccctttctggcaaattaaacccaaagaaggggtcatgtgaactcaaacttgaagcccatctgtcagaagttctggaggc

SEQ ID NO: 790974 - DNA, 120 bp, Artificial Sequence
  ENSG00000269743_34 (sequence is synthesized)
ttggatttgcgactggtgtctgaagggcctgggaacagtcttgtgaaacctagtcctcagcttgtgggatatgacgctatctccaggtagattgtgtcagaatggaattggagtacaccc

SEQ ID NO: 790975 - DNA, 120 bp, Artificial Sequence
  ENSG00000269743_35 (sequence is synthesized)
agctggtgttcgctgcagaactgattgctcacttagtgtgtgggaaaactccacacatctggacatggaaatattctgtgctgattgccgtggtgtaagagcaatgcaaaaagtttgggt

SEQ ID NO: 790976 - DNA, 120 bp, Artificial Sequence
  ENSG00000269743_36 (sequence is synthesized)
attttcccctcggagtatattttaaagctaaattgctaataattgcttaaatttactatatttgcctttataaaaactttatgtatgttgaagcttgaagctatgcaattataatataaa

SEQ ID NO: 790977 - DNA, 120 bp, Artificial Sequence
  ENSG00000269743_37 (sequence is synthesized)
catggatttacaactaaagcatgttataatttaaataattgagtttttcaaatcggttcatatgaaatcctaggcaatattgtaaaattatacagacctgtcaactttttccacttaaaa

SEQ ID NO: 790978 - DNA, 120 bp, Artificial Sequence
  ENSG00000269743_38 (sequence is synthesized)
gttgtgagcaaaatttaagggcatagtcgttttcaagtaattttaaatgtcaatgttaatatttagtttagtgatgttaatggagctatgttttctgatattaaaaatgagttttaggag

SEQ ID NO: 790979 - DNA, 120 bp, Artificial Sequence
  ENSG00000269743_39 (sequence is synthesized)
ttgagaccaataaaataaggaggtaataaatatctatatctgtttaaacacataaaatatacaatttaacactaaaattacttggtataaaaagtcaaaaaaaagaataaaaagccatca

SEQ ID NO: 790980 - DNA, 120 bp, Artificial Sequence
  ENSG00000269743_40 (sequence is synthesized)
tacaacacaatatatgcgtgatatatatttttctctaaatataaactacatcagcttttataaagctcaagttgaaataataacgttttatgacaaatcattatatggtatattctgact

SEQ ID NO: 790981 - DNA, 120 bp, Artificial Sequence
  ENSG00000269743_41 (sequence is synthesized)
acactaaatagcattataattttactgggataactatatatagtgtagtatattaaagttaataaaatgacgttgcatatgagagaaaaagcataataaatcagaaacaatataaaaagc

SEQ ID NO: 790982 - DNA, 120 bp, Artificial Sequence
  ENSG00000269743_42 (sequence is synthesized)
ataataaatcagaaacaatataaaaagctttcagaaaagataaaaatattgtatttctctagtctgttcactctccagtgtctctggttctttcatatcatcttcctttcctcaaatctt

SEQ ID NO: 790983 - DNA, 120 bp, Artificial Sequence
  ENSG00000269743_43 (sequence is synthesized)
ttaatactccctccctcatcatttccaactagtgaccctactttctatttcattaagaaaacagatacattcagaagagaactgccagtttaaagaacatttacaaagccatcacccatg

SEQ ID NO: 790984 - DNA, 120 bp, Artificial Sequence
  ENSG00000269743_44 (sequence is synthesized)
taataaccagccagagcaagaaatagagccctttaataacctactcttctccccccaccactgatgacaccgctccctccatcttaggtgtagcccccatgctgacttttgtaataataa

SEQ ID NO: 790985 - DNA, 120 bp, Artificial Sequence
  ENSG00000269743_45 (sequence is synthesized)
tttctttgcttttgtttataagttttcttccttataagcatctctaaacaacagttttgttttacagatgttcaaacattaaatgctttttagacttggaattgtgactatcttgtttca

SEQ ID NO: 790986 - DNA, 120 bp, Artificial Sequence
  ENSG00000269743_46 (sequence is synthesized)
ctccacattgcttgtgagactcattgatattgcagatagctgtagttgatccatttttattgttgtacagtttaccattgtataaatataccatgatttattcatgataactttgaggaa

SEQ ID NO: 790987 - DNA, 120 bp, Artificial Sequence
  ENSG00000269743_47 (sequence is synthesized)
cattctggttgtttgcaggttttatttttacagttcattagttttattgatgtataataattgtatatgtttatggggtatatgtgatattttgatacatgtgtacaatgtgtaatgatt

SEQ ID NO: 790988 - DNA, 120 bp, Artificial Sequence
  ENSG00000269743_48 (sequence is synthesized)
aaatcaaggtaattgggatatccatcagctcaaacatttatcatttctttgcattgggaacattccaaatcttctcttctagctattttgaaatacacaataaattgaatactgtggtca

SEQ ID NO: 790989 - DNA, 120 bp, Artificial Sequence
  ENSG00000269743_49 (sequence is synthesized)
ttaagtgagggcggcggatgggcgaaggtccggtgactgcgactgtcgctgctttctgaggccacaggaaaggggccgtcggtcgccgccatgacagcgagcgaggcggaggaaccatgt

SEQ ID NO: 790990 - DNA, 120 bp, Artificial Sequence
  ENSG00000269743_50 (sequence is synthesized)
aagaagtctgactgccctgctggagaaatcaaatggagaggtcaagagacaacatggagagagaacgcacagcccagctgagcccagctttccagttatccccaccaatgcgccacacat

SEQ ID NO: 790991 - DNA, 120 bp, Artificial Sequence
  ENSG00000269743_51 (sequence is synthesized)
atgacggaagtcattttggtccctccaaaacaacctagccagccagctggataccactgagtgacctcagtagatgccacgtgggacaggagaattctctagtgagctttgcccacattc

SEQ ID NO: 790992 - DNA, 120 bp, Artificial Sequence
  ENSG00000269743_52 (sequence is synthesized)
agtcatgagtataattaaatgattattgttttaagccccaagttttggggtggtttattacacagcagtatataactggaacattgggcactgaagtagtggaaaccatacatgcacgtt

SEQ ID NO: 790993 - DNA, 120 bp, Artificial Sequence
  ENSG00000269743_53 (sequence is synthesized)
atatttccgttaaacttggaaagggaaagatctgatggagtgggaggatcacataagatcaagggagaatttttatgaagatgacagagacttgggagtgtgcatatgctgatggggaag

SEQ ID NO: 790994 - DNA, 120 bp, Artificial Sequence
  ENSG00000269743_54 (sequence is synthesized)
agttaggagaaagagaatgttgaagataggggagagaggagatggctgatgcatgaggtttatgagaaggtaagggaagggatgagatgcaaaattctgctggacagactgatcttgctt

SEQ ID NO: 790995 - DNA, 120 bp, Artificial Sequence
  ENSG00000269791_0 (sequence is synthesized)
acacgccgatttgcccttttgattcttccacaatcagggtgagactgctcccagtgccatgaacggagacgacgcctttgcaaggagacccagggatgatgctcaaatatcagagaagtt

SEQ ID NO: 790996 - DNA, 120 bp, Artificial Sequence
  ENSG00000269791_1 (sequence is synthesized)
acgaaaggccttcgatgatattgccaaatacttctctaagaaagagtgggaaaagatgaaatcctcggagaaaatcgtctatgtgtatatgaagctaaactatgaggtcatgactaaact

SEQ ID NO: 790997 - DNA, 120 bp, Artificial Sequence
  ENSG00000269791_2 (sequence is synthesized)
aggtttcaaggtcaccctcccacctttcatgcgtagtaaacgggctgcagacttccacgggaatgattttggtaacgatcgaaaccacaggaatcaggttgaacgtcctcagatgacttt

SEQ ID NO: 790998 - DNA, 120 bp, Artificial Sequence
  ENSG00000269791_3 (sequence is synthesized)
cggcagcctccagagaatcttcccgaagatcatgcccaagaagccagcagaggaagaaaatggtttgaaggaagtgccagaggcatctggcccacaaaatgatgggaaacagctgtgccc

SEQ ID NO: 790999 - DNA, 120 bp, Artificial Sequence
  ENSG00000269791_4 (sequence is synthesized)
cccgggaaatccaagtaccttggagaagattaacaagacatctggacccaaaagggggaaacatgcctggacccacagactgcgtgagagaaagcagctggtggtttatgaagagatcag

SEQ ID NO: 791000 - DNA, 120 bp, Artificial Sequence; identical to SEQ ID NO: 789995
  ENSG00000269791_5 (sequence is synthesized)

SEQ ID NO: 791001 - DNA, 120 bp, Artificial Sequence; identical to SEQ ID NO: 789996
  ENSG00000269791_6 (sequence is synthesized)

SEQ ID NO: 791002 - DNA, 120 bp, Artificial Sequence; identical to SEQ ID NO: 789997
  ENSG00000269791_7 (sequence is synthesized)

SEQ ID NO: 791003 - DNA, 120 bp, Artificial Sequence; identical to SEQ ID NO: 789998
  ENSG00000269791_8 (sequence is synthesized)

SEQ ID NO: 791004 - DNA, 120 bp, Artificial Sequence; identical to SEQ ID NO: 789999
  ENSG00000269791_9 (sequence is synthesized)

SEQ ID NO: 791005 - DNA, 120 bp, Artificial Sequence
  ENSG00000269855_0 (sequence is synthesized)
atgccctgccctcggccgttctggctccgccattcccgggccccccagggctcgggtcccagctccccaggctcgctctctgcgccccgctccccaagcagaggggaagaccaggaggag

SEQ ID NO: 791006 - DNA, 120 bp, Artificial Sequence
  ENSG00000269855_1 (sequence is synthesized)
gaggaggaggaggaaggggacggcagcccaggctccggccctatcctgccccccgcctccccggtggagtgcctcatctgcgtgtcgtccttcgacggcgtgttcaagctgcccaagcgc

SEQ ID NO: 791007 - DNA, 120 bp, Artificial Sequence
  ENSG00000269855_2 (sequence is synthesized)
ctggactgcggccacgtcttctgtctcgagtgcctggcgcgcctatcgttggccacggcgggcggcggcaacgcggtggcctgtccggtgtgccgcgcgcccacgcgcctggccccccgc

SEQ ID NO: 791008 - DNA, 120 bp, Artificial Sequence
  ENSG00000269855_3 (sequence is synthesized)
cgcggactccccgcgttgcccacgcagtccggtctcctgccccgcgacgcgcgcgcaccgccctctcgccagggctccgtgcgcttcgaccggcgccgcggccttctctacctgcggccg

SEQ ID NO: 791009 - DNA, 120 bp, Artificial Sequence
  ENSG00000269855_4 (sequence is synthesized)
ctgcgcctgggccgcccgctgtcgcgccgcttgtcgctggccagcccggcctgggtcttcaacgctgccgtggcgctggcggtgctggtggccgcgggcctcgtggtctcgggcgtctac

SEQ ID NO: 791010 - DNA, 120 bp, Artificial Sequence
  ENSG00000269855_5 (sequence is synthesized)
ggcctcgtggtctcgggcgtctacatcttcttcctcatcccgcacgccacctcctccggccccccgcggccccagctcgtggcgctcgctccagcgcctggcttctcttggtttccgccg

SEQ ID NO: 791011 - DNA, 120 bp, Artificial Sequence
  ENSG00000269855_6 (sequence is synthesized)
tggtttccgccgaggcccccgccggggtcgccctgggcccccgcctggacgccgcgccccacgggccctgacctggacacggccctgccaggaactgcagaagatgcgctggagcccgag

SEQ ID NO: 791012 - DNA, 120 bp, Artificial Sequence
  ENSG00000269855_7 (sequence is synthesized)
gacccggcggaggccgagaggacgctggacaggcgatcggatggcacgtggggcacagaggctggccccggctgggccccgtggccacggggcgcgaggaggctgtggggctcacaataa

SEQ ID NO: 791013 - DNA, 120 bp, Artificial Sequence
  ENSG00000269858_0 (sequence is synthesized)
ggggtatggcgcgctgtgcggcgcagggcggctggcacaaacggcggcgccggggccggaggaaaaagctcgccaccctgaagggtcccttcccaagcccttagggaccgcagaggactt

SEQ ID NO: 791014 - DNA, 120 bp, Artificial Sequence
  ENSG00000269858_1 (sequence is synthesized)
ggggaccagcaagcaacccccagggcacgagaagagctcttgctgtctgccctgcctcaccctgccccacgccaggcccggtggcccccagctgcatcaagtggaggcggaggaggaggc

SEQ ID NO: 791015 - DNA, 120 bp, Artificial Sequence
  ENSG00000269858_2 (sequence is synthesized)
ggaggagggtggcaccatgggcccgggcggtgccctccatgcccgggggatgaagacactgctgccatggacagcccgtgccagccgcagcccctaagtcaggctctccctcagttacca

SEQ ID NO: 791016 - DNA, 120 bp, Artificial Sequence
  ENSG00000269858_3 (sequence is synthesized)
gggtcttcgtcagagcccttggagcctgagcctggccgggccaggatgggagtggagagttacctgccctgtcccctgctcccctcctaccactgtccaggagtgcctagtgaggcctcg

SEQ ID NO: 791017 - DNA, 120 bp, Artificial Sequence
  ENSG00000269858_4 (sequence is synthesized)
gcagggagtgggacccccagagccacagccacctctaccactgccagccctcttcgggacggttttggcgggcaggatggtggtgagctgcggccgctgcagagtgaaggcgctgcagcg

SEQ ID NO: 791018 - DNA, 120 bp, Artificial Sequence
  ENSG00000269858_5 (sequence is synthesized)
ctggtcaccaaggggtgccagcgattggcagcccagggcgcacggcctgaggcccccaaacggaaatgggccgaggatggtggggatgccccttcacccagcaaacggccctgggccagg

SEQ ID NO: 791019 - DNA, 120 bp, Artificial Sequence
  ENSG00000269858_6 (sequence is synthesized)
caagagaaccaggaggcagagcgggagggtggcatgagctgcagctgcagcagtggcagtggtgaggccagtgctgggctgatggaggaggcgctgccctctgcgcccgagcgcctggcc

SEQ ID NO: 791020 - DNA, 120 bp, Artificial Sequence
  ENSG00000269858_7 (sequence is synthesized)
ctggactatatcgtgccctgcatgcggtactacggcatctgcgtcaaggacagcttcctgggggcagcactgggcggtcgcgtgctggccgaggtggaggccctcaaacggggtgggcgc

SEQ ID NO: 791021 - DNA, 120 bp, Artificial Sequence
  ENSG00000269858_8 (sequence is synthesized)
cagattgcctgggtggaaggccatgaaccaggctgtcgaagcattggtgccctcatggcccatgtggacgccgtcatccgccactgcgcagggcggctgggcagctatgtcatcaacggg

SEQ ID NO: 791022 - DNA, 120 bp, Artificial Sequence
  ENSG00000269858_9 (sequence is synthesized)
cgcaccaaggccatggtggcgtgttacccaggcaacgggctcgggtacgtaaggcacgttgacaatccccacggcgatgggcgctgcatcacctgtatctattacctgaatcagaactgg

SEQ ID NO: 791023 - DNA, 120 bp, Artificial Sequence
  ENSG00000269858_10 (sequence is synthesized)
gacgttaaggtgcatggcggcctgctgcagatcttccctgagggccggcccgtggtagccaacatcgagccactctttgaccggttgctcattttctggtctgaccggcggaacccccac

SEQ ID NO: 791024 - DNA, 120 bp, Artificial Sequence
  ENSG00000269858_11 (sequence is synthesized)
gaggtgaagccagcctatgccaccaggtacgccatcactgtctggtattttgatgccaaggagcgggcagcagccaaagacaagtatcagctagcatcaggacagaaaggtgtccaagta

SEQ ID NO: 791025 - DNA, 120 bp, Artificial Sequence
  ENSG00000269858_12 (sequence is synthesized)
cctgtatcacagccgcctacgcccacctagtggccagtcccagagccgcatggcagacagcttaaatgacttcaggagagccctgggcctgtgctggctgctccttccctgccaccgctg

SEQ ID NO: 791026 - DNA, 120 bp, Artificial Sequence
  ENSG00000269858_13 (sequence is synthesized)
ctgcttctgactttgcctctgtcctgcctggtgtggagggctctgtctgttgctgaggaccaaggaggagaagagacctttgctgccccatcatgggggctggggttgtcacctggacag

SEQ ID NO: 791027 - DNA, 120 bp, Artificial Sequence
  ENSG00000269858_14 (sequence is synthesized)
ggggcagccgtggaggccaccgttaccaactgaagctgggggcctgggtcctaccctgtctggtcatgaccccattaggtatggagagctgggaggaggcattgtcacttcccaccagga

SEQ ID NO: 791028 - DNA, 120 bp, Artificial Sequence
  ENSG00000269858_15 (sequence is synthesized)
tgcaggacttggggttgaggtgagtcatggcctcttgctggcaatggggtgggaggagtacccccaagtcctctcactcctccagcctggaatgtgaagtgactccccaacccctttggc

SEQ ID NO: 791029 - DNA, 120 bp, Artificial Sequence
  ENSG00000269858_16 (sequence is synthesized)
catggcaggcaccttttggactgggctgccactgcttgggcagagtaaaaggtgccaggaggagcatgggtgtggaagtcctgtcagccaagaaataaaagtttacctcagagctgcaca

SEQ ID NO: 791030 - DNA, 120 bp, Artificial Sequence
  ENSG00000269858_17 (sequence is synthesized)
gagcggcccttaggccctgcccctgtcgcctactgcgctcagaaggggcctcagggcctgccccgggttgggggcgttggggtgccctggatgggggcacctttatctctcgtcctgtct

SEQ ID NO: 791031 - DNA, 120 bp, Artificial Sequence
  ENSG00000269858_18 (sequence is synthesized)
ctctgtcgccgcggaccctctccccgagggcccctcccgtcggtcagtctcgggacctcccttccgtctgggcgtgtgtccgcccccggccggcttcctcccgtcgggctcgggtcgacc

SEQ ID NO: 791032 - DNA, 120 bp, Artificial Sequence
  ENSG00000269858_19 (sequence is synthesized)
ccaccgtcccgctccgccccgggtcctccctcccagcttccctccggtctatttttctgtctctgggcccctcgttctctttgtttttggactccccagtttcctctgtcttttgacccc

SEQ ID NO: 791033 - DNA, 120 bp, Artificial Sequence
  ENSG00000269858_20 (sequence is synthesized)
cccgcccccaccctgactctccctggaacccccacgtttctcgttgtctttctggaacgccgaggcaggtccctcctattttccaaaccccctcctttcccactcctccacaccaccctt

SEQ ID NO: 791034 - DNA, 120 bp, Artificial Sequence
  ENSG00000269858_21 (sequence is synthesized)
ttctactccagccctccttcttctgtctttggttaccgcgtcccacaacctgcaccacagtcctctgtcttagggtcatctacccagcccctggcctccagcctctccctatcactgcct

SEQ ID NO: 791035 - DNA, 120 bp, Artificial Sequence
  ENSG00000269858_22 (sequence is synthesized)
cttatctgtcagcggactcccgcacctccagattctcagggtcctctccccgacttggcctcaggttttggggggcctctatagtcaagtctgtcctggtcgtcttccccactcctgccc

SEQ ID NO: 791036 - DNA, 120 bp, Artificial Sequence
  ENSG00000269858_23 (sequence is synthesized)
ataccatcccggctttcccctgcctgcctgtctctagtttctctcacatccctttttttttttcctttctctagccaccctgaagggtcccttcccaagcccttagggaccgcagaggac

SEQ ID NO: 791037 - DNA, 120 bp, Artificial Sequence
  ENSG00000269858_24 (sequence is synthesized)
gtgttgggagggagtgggctcttgaggcccaggagctgaggtttctgatagacttggggatgggattttggctgaaaaagaaagtcttttggggcaggagcttggaacccttgacccaag

SEQ ID NO: 791038 - DNA, 120 bp, Artificial Sequence
  ENSG00000269858_25 (sequence is synthesized)
atgccaccaggtatgacctgtacttctggagacgcacccaggtgctccccctgtgacaatgtcctgtcagagcctcagagtgactagggagcgacgaagtattgagagggggcctaggtg

SEQ ID NO: 791039 - DNA, 120 bp, Artificial Sequence
  ENSG00000269858_26 (sequence is synthesized)
gtgtgagtcccatgtgcttggtgggaggcgctgtgtgagaatgtacagggcaggaggaaacatagcagggctggggtgcagaggaggcccagagcagtgcactccagtctgcaggtactg

SEQ ID NO: 791040 - DNA, 120 bp, Artificial Sequence
  ENSG00000269858_27 (sequence is synthesized)
cactgggcactggggagaccaacctggccccaggggcttccctgtggctgccttccagggcagtactaggtaaacaggtgcctgtgctgatgccatgttgctaggagtggaacggacaat

SEQ ID NO: 791041 - DNA, 120 bp, Artificial Sequence
  ENSG00000269858_28 (sequence is synthesized)
cagccggagtactcaaggtgacccttggtctctgaatcctgaataacaaagagggtcagaaggaagagtgtcccaggccagtgctgaggccttgtggtggcgatgagctcagcctgttga

SEQ ID NO: 791042 - DNA, 120 bp, Artificial Sequence
  ENSG00000269858_29 (sequence is synthesized)
ggcatggagcagagtgatgggagaggcacatgaggttgggggcctttgaggctgtggttgggaatttgtattttctcaggatggagtgaagacctggagaggaggggctctggctgctgt

SEQ ID NO: 791043 - DNA, 120 bp, Artificial Sequence
  ENSG00000269858_30 (sequence is synthesized)
gtggggatgaattgtgggaagagggtgcagcactggaccccttccctgccacccatccacgtgcatcatcagtgtaatctctgattggattcctaattggggaggtcttgcccatctcta

SEQ ID NO: 791044 - DNA, 120 bp, Artificial Sequence
  ENSG00000269858_31 (sequence is synthesized)
gtcagtaactcactgtttctaagcctcctggaccatggcccaattcttctcccagtgaggtggttgctcagagtgccgacccttccatagggagtgagcagtgcaaagaaggtgccccct

SEQ ID NO: 791045 - DNA, 120 bp, Artificial Sequence
  ENSG00000269858_32 (sequence is synthesized)
cctgaaccttgaagtgtagccattagggttttccctggggggccttctcactaattgtactctggtgctgccagagagaaggttgtcagcttcccactgctaggtggcagtagatggtgg

SEQ ID NO: 791046 - DNA, 120 bp, Artificial Sequence
  ENSG00000269858_33 (sequence is synthesized)
cagccctctctttccagggcaaggtctggtggatgaggtgcacatggttaatgcagagcagcttaacatccaccacagagggtgagccctgggataatgtgttgggaggcgtcctgggga

SEQ ID NO: 791047 - DNA, 120 bp, Artificial Sequence
  ENSG00000269858_34 (sequence is synthesized)
gggtgaggattgaagcagcccagtctgctgtggcgtgcgtgcttggcaagcatcctgttgtggcagtggccactgatgtttgatcgtgaatgtttatcttgggactgtcttgctgggccg

SEQ ID NO: 791048 - DNA, 120 bp, Artificial Sequence
  ENSG00000269858_35 (sequence is synthesized)
ggcccataggtgtagctgagcattcgtggggaatggacgccagcagagttgtaccagggcagagaggtcagggcagagaggtcaagacagatggtccgggctggggagaagttgaagggt

SEQ ID NO: 791049 - DNA, 120 bp, Artificial Sequence
  ENSG00000269858_36 (sequence is synthesized)
ccttgtgccagtcctcccctttttgtgtgctacctcatcttgccactgcagtgactttgggcagagggtgggacagggaccttttaaaatttttaaatggcatttcagcctgtgctccag

SEQ ID NO: 791050 - DNA, 120 bp, Artificial Sequence
  ENSG00000269858_37 (sequence is synthesized)
ttctccatgtggcaggcactgtgctggctgtcttcccagacacttgttatcttgttcacttgttccacaacaacctgtgaaatagctgtgagctccattggatccatggatgaggaacct

SEQ ID NO: 791051 - DNA, 120 bp, Artificial Sequence
  ENSG00000269858_38 (sequence is synthesized)
gagaccaggaagtcacctgcctgatgccacagctcatgtggcagcactgagacttgaaccagggaattgtgtctgcagaagtggctgggccatttcctttacctctcagccacctttctg

SEQ ID NO: 791052 - DNA, 120 bp, Artificial Sequence
  ENSG00000269858_39 (sequence is synthesized)
ccagctccctgatgacaaacatcccggggccctggccacagcattgtagggctgggtcaggggagtggcaactgtcaggcagaggaaagaaccctgtagacagagaaaccaagccctgca

SEQ ID NO: 791053 - DNA, 120 bp, Artificial Sequence
  ENSG00000269858_40 (sequence is synthesized)
atgagtcctgttagatctccaggagttggggctccagaacctcccaagttatgttctcagagagattaattgctaccgctgtaaacagcagtgtttattacccctgctgtacacatcagg

SEQ ID NO: 791054 - DNA, 120 bp, Artificial Sequence
  ENSG00000269858_41 (sequence is synthesized)
cagttgaggcccattcaggtgttggaactggctagggttacccagcaaattatccttggagttggaattaggtctttctattcagactgtagcttttggctcctgttcggaggtctatgg

SEQ ID NO: 791055 - DNA, 120 bp, Artificial Sequence
  ENSG00000269858_42 (sequence is synthesized)
gctgcatggtagaattacctgggaagctttaccaatttcaggcccttccttaggccaggtacttcagaacctcagagctccccagggggctccactccacagccaagggtaagaattcct

SEQ ID NO: 791056 - DNA, 120 bp, Artificial Sequence
  ENSG00000269858_43 (sequence is synthesized)
ggtctagggctgtgaggccacctccttgcacacctgaaaatgtttaaattggtattattctactgaaatggctgaggtggggtttggggtatcttgaaacaaatcaaactctgttactaa

SEQ ID NO: 791057 - DNA, 120 bp, Artificial Sequence
  ENSG00000269858_44 (sequence is synthesized)
ttctggcattctcctgtttctcttctcaacacacagcgggcagtgcgatctgccggctcttcctgggaaatggcacctcctcctctctagcggactgtgtggtgggaactcccctctttc

SEQ ID NO: 791058 - DNA, 120 bp, Artificial Sequence
  ENSG00000269858_45 (sequence is synthesized)
cgggaatggtgctgtctgcccagccccacccggccttgtaatgaacactttcccccttttcctgtctttagtagcttcctgcccatctccatggtgatgcagtctctgggttgtcattca

SEQ ID NO: 791059 - DNA, 120 bp, Artificial Sequence
  ENSG00000269858_46 (sequence is synthesized)
ctttgagagcccgaggggtgggagggagtgatgcaggcagacgctgcgcctcctagtgggctcccggggcaccgtgggaggcagcggctcctggccgtaccagctagcctcatcctttgg

SEQ ID NO: 791060 - DNA, 120 bp, Artificial Sequence
  ENSG00000269858_47 (sequence is synthesized)
gccctcttgggcctgatgccaccccatccccctcatcagcctcttgttaaatcccaccactcatttttcttcatctctgcccaccttccttagcccactctcctggtaccccaacaggag

SEQ ID NO: 791061 - DNA, 120 bp, Artificial Sequence
  ENSG00000269858_48 (sequence is synthesized)
gtcagtctcgggacctcccttccgtctgggcgtgtgtccgcccccggccggcttcctcccgtcgggctcgggtcgaccccaccgtcccgctccgccccggccaccctgaagggtcccttc

SEQ ID NO: 791062 - DNA, 120 bp, Artificial Sequence
  ENSG00000269964_0 (sequence is synthesized)
ggagttattttctctggactggttgtggagcactcgtctcctcctcggaacagcccgccaagaggggcagaaggggtcgagtcggccgcagggtcttctggggcttgtggtctccgggac

SEQ ID NO: 791063 - DNA, 120 bp, Artificial Sequence
  ENSG00000269964_1 (sequence is synthesized)
ctgctccctcacttcccccacgagtggaaggccctgggcgctggccagcgtttccccgctggctctggtgaccacctgcggggcagcacgtggaaccccgcccctggggatggcgcagag

SEQ ID NO: 791064 - DNA, 120 bp, Artificial Sequence
  ENSG00000269964_2 (sequence is synthesized)
cgcctgctccagggctcccgtgcccgcttgagggcgccctcccccgctacaggaacccagaaggtaggcggggcgggccctgcacagctttccaggacgccctccctcagcgcgaggcct

SEQ ID NO: 791065 - DNA, 120 bp, Artificial Sequence
  ENSG00000269964_3 (sequence is synthesized)
ggctttctgtgcctgtggaccactcgtccctttcacgtgccctgggtttggacctgagctcgcaatattttcagggacaaaagccaggatggatgttcaaaaatggtatttgagaacttc

SEQ ID NO: 791066 - DNA, 120 bp, Artificial Sequence
  ENSG00000269964_4 (sequence is synthesized)
aaagctggctctggccttggcaattatccgctcaaaaccagcagacaaaagcagcagagaatacacagagcaccttgctatgttgctgtctgaggagcagtcaaaatggagatcaaaagt

SEQ ID NO: 791067 - DNA, 120 bp, Artificial Sequence
  ENSG00000269964_5 (sequence is synthesized)
tgaaatcttggaagctgaagttatgcaattacgtcaaaaacttcttgtgagcaggctttgttcaggatcctttaagagtggatacgtttcctcccagttggaggctcaggaacctaagag

SEQ ID NO: 791068 - DNA, 120 bp, Artificial Sequence
  ENSG00000269964_6 (sequence is synthesized)
ttctgaaagtacattaacttcgatggaagattctggatgtgatttgtcgaatgagcagagaactgaatcctcagacctgtcccagcactttgtggaaagctgtacccccactcactttcc

SEQ ID NO: 791069 - DNA, 120 bp, Artificial Sequence
  ENSG00000269964_7 (sequence is synthesized)
accactgcctcttgtgaaaagaccttgtgctatcctgcaaaatcctttgtcttctcacatgcaattcttgcaatatctacttgaattaaagaacttgacagaatcaggtaatcttaaaag

SEQ ID NO: 791070 - DNA, 120 bp, Artificial Sequence
  ENSG00000269964_8 (sequence is synthesized)
agacttaacccactttgaaaaagactcttccacagtctctgattctgtttttcaattgctggatggcctgatcactttttaccgtaatcccaaacttcctttttcaagattttggacaga

SEQ ID NO: 791071 - DNA, 120 bp, Artificial Sequence
  ENSG00000269964_9 (sequence is synthesized)
agctgttggtactttagctagtctgatcagtgactataacttatctagtcatattcttaaaaagtgttccaagaagttggaagaatttgagaaaaccctactacatgctattttaggaaa

SEQ ID NO: 791072 - DNA, 120 bp, Artificial Sequence
  ENSG00000269964_10 (sequence is synthesized)
caatcatataaatcagtttcaggtgcagcattatgtctctcagagtctggttaccttgggaaattgcagcttgttgagaaaatctattatatctctgcttctatcagaagtaaatggctt

SEQ ID NO: 791073 - DNA, 120 bp, Artificial Sequence
  ENSG00000269964_11 (sequence is synthesized)
tgctgatgatctgggagccatcaatcaggagcaagccagttatgatgtgtcacgctatgaaaacattttctacctgttctgggttctggagcagcttcttcaaaaggaaaccgaagaagg

SEQ ID NO: 791074 - DNA, 120 bp, Artificial Sequence
  ENSG00000269964_12 (sequence is synthesized)
caacacttcaagtataggtcatgatgaccaagaaatcaagaaatttcttcagaagcatgatgaaactattttccaactttctgatgcatttcctttgtttactttttatttatggagagt

SEQ ID NO: 791075 - DNA, 120 bp, Artificial Sequence
  ENSG00000269964_13 (sequence is synthesized)
gggcattcttttgagctcagcacagatagaaactcttagaaaataactccattccttagcaatttaccacgtttgaagcataataaagtagaatatatgaaaatctcatactgaaaagat

SEQ ID NO: 791076 - DNA, 120 bp, Artificial Sequence
  ENSG00000269964_14 (sequence is synthesized)
tttaattagcattttagaattgatctctaaatataattatcaattcaacttaatggttagtcttaaattgtatgaaattttatgagtcatatttctatactaaaatcagccagtttcggt

SEQ ID NO: 791077 - DNA, 120 bp, Artificial Sequence
  ENSG00000269964_15 (sequence is synthesized)
gccagtttcggttggtaatgccatccttattcccatgtaactgtatcttatttcactcaatatagtttagctctattattctgtaaaatggaccattaattgtctgtcccttaaaagata

SEQ ID NO: 791078 - DNA, 120 bp, Artificial Sequence
  ENSG00000269964_16 (sequence is synthesized)
ttgaagttgtaaaagatttccatataattgatgctaaatggtaatcaaagaaagagatttttaaagaagtttagttgcattatcaacacaaagtgttggaatataagaagtggtcataaa

SEQ ID NO: 791079 - DNA, 120 bp, Artificial Sequence
  ENSG00000269964_17 (sequence is synthesized)
tgcaatttttaaaactttttcttacatagttgaacttatatcattgctttcaccttagacgagaatcatatagaagtagaacttttttaacatttggaaacttaattgctttttatttat

SEQ ID NO: 791080 - DNA, 120 bp, Artificial Sequence
  ENSG00000269964_18 (sequence is synthesized)
ttcaatttcatatggctaatacatttgtcgagctcttttgaaaatactattaattagttgtttaaaatgttctttgtttttcaacaaatacttgtttcaattctgttaattaaatatgtt

SEQ ID NO: 791081 - DNA, 120 bp, Artificial Sequence
  ENSG00000269964_19 (sequence is synthesized)
agtatacaattaagtcactagacatattttataaattctaatatccatctaaaagtgaaatttatagttatttggtggaatttttcagttatacaatttcattgacttcatttcaatgat

SEQ ID NO: 791082 - DNA, 120 bp, Artificial Sequence
  ENSG00000269964_20 (sequence is synthesized)
tttcattgacttcatttcaatgattaaaatcataaccgcaaacttaatgagcatatgttacatttcctatagtgccatttagggaacacaaaatataaatttcctttattaatgatatgt

SEQ ID NO: 791083 - DNA, 120 bp, Artificial Sequence
  ENSG00000269964_21 (sequence is synthesized)
gatggtgtttcataagttaattagcattcctaaatgtcgttggcattaaaagtaatcttgataattccatctacaatgtatatacaattatgtcatctggcacaaacaattatctttgga

SEQ ID NO: 791084 - DNA, 120 bp, Artificial Sequence
  ENSG00000269964_22 (sequence is synthesized)
tagcatttttgaaaagataatgcctttttgataatcctgaaactacatgtatgtcagtcagcttttgttatgtgacagatagataatcaatcacaaaatatctatcagtggcatacaaca

SEQ ID NO: 791085 - DNA, 120 bp, Artificial Sequence
  ENSG00000269964_23 (sequence is synthesized)
ataatatttctcagatatatgcaggtcactcaaggatcagctgatttggactggacttgactttaatgaaaagctctgctgaggttgcacataccacaggaataggcttcttgctaaaag

SEQ ID NO: 791086 - DNA, 120 bp, Artificial Sequence
  ENSG00000269964_24 (sequence is synthesized)
tcaggctttcttctcttccacatgtgcatattctgagaaccagacttgggggatagtagcttctcagtggaagctcctctcatggcagtggcaattgagcaagacgaaaggctaggctga

SEQ ID NO: 791087 - DNA, 120 bp, Artificial Sequence
  ENSG00000269964_25 (sequence is synthesized)
gaaatgtcacattagcacttccatccacatgcattgtcaaagtacatcaaatggtcaagcccaaagaaaagtgactgacaggggagtagacttgagtgggagaacttgcagttacagggc

SEQ ID NO: 791088 - DNA, 120 bp, Artificial Sequence
  ENSG00000269964_26 (sequence is synthesized)
aatgagcatggatgtaggtaggtaattattagggccaataatttacttcacaacaagtaccagttgaatacaagaagtatattccaaatcttggattaggagggatttttctaatgtctg

SEQ ID NO: 791089 - DNA, 120 bp, Artificial Sequence
  ENSG00000269964_27 (sequence is synthesized)
attcctgtgaacacctgtgaaggcttatggaagtcacttcagttgatatagcattacacaaaatccactttccatgacaccttcatcttctttcattgtgattaaacaagattggtaaat

SEQ ID NO: 791090 - DNA, 120 bp, Artificial Sequence
  ENSG00000269964_28 (sequence is synthesized)
acacaagtatcagcaatggccctttccctattgcagccagccaacgtaatgatcagctaagagacttttggagctacaacaaatttattaatttcagtggtctccaaggcttcaaggtct

SEQ ID NO: 791091 - DNA, 120 bp, Artificial Sequence
  ENSG00000269964_29 (sequence is synthesized)
gaaaattagcctaggaaatatatttattataaaagaagatgcaagatgttgggatcactgtgaatgcacaaaatggagaaacattttatttccatttggtatccattttatataaacatt

SEQ ID NO: 791092 - DNA, 120 bp, Artificial Sequence
  ENSG00000269964_30 (sequence is synthesized)
taacttccaccaagtatatgatactttaattatcctgggtttcagtctatatcagagtgaatggtgtagtaaattagtattaaggtccaaatctactggtcaaaaagaagataaaatgat

SEQ ID NO: 791093 - DNA, 120 bp, Artificial Sequence
  ENSG00000269964_31 (sequence is synthesized)
aaaatgagacatttttatctgtgtttcagtaaagcagtgaattaatgaatgatttaaactggtattacaatgtttaagaatgttataacagtttatatttaggtaatgtctaactttaga

SEQ ID NO: 791094 - DNA, 120 bp, Artificial Sequence
  ENSG00000269964_32 (sequence is synthesized)
attaaggttttagggataagagtaatggagtcagtagtaattgggcagcattgaaactggatataagataggataggaaataaagagaaccatagaatgatcataaaaatgaagcaaata

SEQ ID NO: 791095 - DNA, 120 bp, Artificial Sequence
  ENSG00000269964_33 (sequence is synthesized)
aaaatatatgaataagtaatattatacatatatatacgatatgtataataaataccaaatagccaggtacttacctaagcattttacatatattaaactgtttgattctcccagcacctg

SEQ ID NO: 791096 - DNA, 120 bp, Artificial Sequence
  ENSG00000269964_34 (sequence is synthesized)
taatgagaaaggtacgattatttcctgaatctgtattttagagatgaagaactcagaacttgcccaagttcacaacaccaggaagtggcagttaggtttcatcctgaggcagtccatctt

SEQ ID NO: 791097 - DNA, 120 bp, Artificial Sequence
  ENSG00000269964_35 (sequence is synthesized)
ccaattccacactcctactttactgcactgcctgttatgtgcagctctcctggcacttcagtaaactttcacaaacacagcttctttgcaattgtcatcaaagctttatacatgcttaac

SEQ ID NO: 791098 - DNA, 120 bp, Artificial Sequence
  ENSG00000269964_36 (sequence is synthesized)
tatgaaccttaaggcacaacagtggaaattactagcttatgattagcttattttggattttttaattgctgtaaacaagttgtcctatctataagtaaaccagaggaacagcatctttga

SEQ ID NO: 791099 - DNA, 120 bp, Artificial Sequence
  ENSG00000269964_37 (sequence is synthesized)
ccttttcagggttgtagcatcttgctactcaagactgtagccaagttacagattgtcttcaaacgataatgtcctaaaaggtacagagctccctccagaggtgtttaggtagactgtgag

SEQ ID NO: 791100 - DNA, 120 bp, Artificial Sequence
  ENSG00000269964_38 (sequence is synthesized)
gctgtaatgataagcaaaatggggagagaaaacaaatctgactggtttgttcttggaaaaatatatacgattatctcacaggccttgtactttttaatggtatttgttgtcttttagcca

SEQ ID NO: 791101 - DNA, 120 bp, Artificial Sequence
  ENSG00000269964_39 (sequence is synthesized)
aggtcagcatatttcaagagaggcagggaaacaaggcatttgcatttccaaaattttatgtacatttacagattttctgaacgccatattatggggaaaatattgacagctctgctttat

SEQ ID NO: 791102 - DNA, 120 bp, Artificial Sequence
  ENSG00000269964_40 (sequence is synthesized)
tgtaacctaatttcatttattcatcaaatatgaagcaccaattgtctacaaaccaattatttgcaaaaataaaacatactaagctttaacttttgtcagatttatgaaaccaagctttct

SEQ ID NO: 791103 - DNA, 120 bp, Artificial Sequence
  ENSG00000269964_41 (sequence is synthesized)
cttagcagtcaatataatgacccaactacatcaatatttgctgaaggagataattaacttgttaatgtttatctaatattgaaaaaatatataggattttattattgttaaaagttaatt

SEQ ID NO: 791104 - DNA, 120 bp, Artificial Sequence
  ENSG00000270170_0 (sequence is synthesized)
gaagacgagggcggcgaggtcgggttccgggcgcttggagaagatggtgctgcggcggctgctggccgccctgctgcacagcccgcagctggtggaacgtctgtcagagtcgcggcctat

SEQ ID NO: 791105 - DNA, 120 bp, Artificial Sequence
  ENSG00000270170_1 (sequence is synthesized)
ctatccgacgtgcggcgcagctcacggccttcgcactgctgcaggcccagctgcggggccaggacgcggcccgccgcctgcaggacctcgcggctgggcccgtgggctccctgtgccgcc

SEQ ID NO: 791106 - DNA, 120 bp, Artificial Sequence
  ENSG00000270170_2 (sequence is synthesized)
tgagcgatttagagacgccttcacccaggagctacgccgcggcctccgaggccgctcggggccaccaccaggtagccagaggggccctggcgcaaacatttaatcctgggctgtgcgggg

SEQ ID NO: 791107 - DNA, 120 bp, Artificial Sequence
  ENSG00000270170_3 (sequence is synthesized)
tacagtggcatcaatgtggaggggtcattccgggcactgcgcgcggcttcgaatcccgactgggattgttggcctgcagacatcccacgcataagagcctaggccagaccgcccgctccg

SEQ ID NO: 791108 - DNA, 120 bp, Artificial Sequence
  ENSG00000270170_4 (sequence is synthesized)
ttgaagtcttgtgattggacaagacacagtgtggagacagccctaagcctaacagagatgaaggtaggctgggtccagacacggcacctacggagagccacggaccgaagccagagagcc

SEQ ID NO: 791109 - DNA, 120 bp, Artificial Sequence
  ENSG00000270170_5 (sequence is synthesized)
tttcctctgcaagtgggactgaaactcttgacagatgctgctcaatctgactggtatagcaggacagttaattccagggacgatatggatgaaaagacaaccctacagctgccaaattcc

SEQ ID NO: 791110 - DNA, 120 bp, Artificial Sequence
  ENSG00000270170_6 (sequence is synthesized)
tttgattaaatgtgtgagctggttgataggcatgagtgtgatacttctcaggcaagatgtgttaagaataccggggactgtaggcctatggtaataataaacacgtattttatgaaatga

SEQ ID NO: 791111 - DNA, 120 bp, Artificial Sequence
  ENSG00000270188_0 (sequence is synthesized)
cccaaacctcgctaaaaatattattaaatcatctcaatcaaaccatttaccttagacgaaagtgtaggcgatagaaatttatgccttgatgcagtagatacactaccataagggaaagat

SEQ ID NO: 791112 - DNA, 120 bp, Artificial Sequence
  ENSG00000270188_1 (sequence is synthesized)
gaaagaactaaattaagcactaaaaagcaaagataaagtcttttaccttctgcataatgtactagctagaaataacttgacacagagaaccatagccaagtctcccgaaaccagacgagc

SEQ ID NO: 791113 - DNA, 120 bp, Artificial Sequence
  ENSG00000270188_2 (sequence is synthesized)
tactcaagaacagctgaaagagcacacccacctgtgtggcaaaatagtgggaaaattcatgagtagtggtgacaagcctacggagccttgtgatagctggttgtccaagatagaatctta

SEQ ID NO: 791114 - DNA, 120 bp, Artificial Sequence
  ENSG00000270188_3 (sequence is synthesized)
gttcaactttaaacttacccacagaattacttaagctccctgtaagtctgttagtctaaagagggacagctctttagaccctagggaataacttttctgtagaaagtaaaaaatattacc

SEQ ID NO: 791115 - DNA, 120 bp, Artificial Sequence
  ENSG00000270188_4 (sequence is synthesized)
cccatagttgacccacaaacagccaccaattaagaaagcgttcaacctcaacatctaattatcttaaattctaatcactttactgaactcctaacaacaccttggactaatctgttattt

SEQ ID NO: 791116 - DNA, 120 bp, Artificial Sequence
  ENSG00000270188_5 (sequence is synthesized)
aatagaagcaataatgttcacataagtaacgtgaaaatattctccattgcataagcttatatcagactggaataacccactgacaactaacagcctaatattaataagcaatataacaag

SEQ ID NO: 791117 - DNA, 120 bp, Artificial Sequence
  ENSG00000270188_6 (sequence is synthesized)
ctagcatttccagtattagaggtactgcctgcccactgacatatgttcaacggccacggtatcctgactgtgcaaaggtagcataatcacttgttccctaaatagggacttttacgaatg

SEQ ID NO: 791118 - DNA, 120 bp, Artificial Sequence
  ENSG00000270188_7 (sequence is synthesized)
gccacacgagggttcagctgtcttttacttgtaatcagtgaaattgacctatccgtgaagaggtgggtataaacaaataagaaaagaagaccctatggagctttaactcattaatgcaaa

SEQ ID NO: 791119 - DNA, 120 bp, Artificial Sequence
  ENSG00000270188_8 (sequence is synthesized)
taaaacttcaaaaagcctacaggccttagcatactgtctgtgcattaaaattttggttggggtgacctcggagtataattcaacctccaaacagcctagactaagaccgcactagtgtaa

SEQ ID NO: 791120 - DNA, 120 bp, Artificial Sequence
  ENSG00000270188_9 (sequence is synthesized)
gcgagctgacacacattgattcgataatttgatcaacagaagaagttaccctaggggtaacagcacaatccttttctagagtccatatagacaatagggtttacaacctcaatgttggat

SEQ ID NO: 791121 - DNA, 120 bp, Artificial Sequence
  ENSG00000270188_10 (sequence is synthesized)
caggccatcctaatggcgtagctactattaagggttcatttgttcaatgattaaagtcctacgtgatctgagttcagaccagagtaatccaggtcagtttctatctatttaacatttctc

SEQ ID NO: 791122 - DNA, 120 bp, Artificial Sequence
  ENSG00000270188_11 (sequence is synthesized)
ctagtacagaaggacaagagaaatagggcccacttcataaagtgccctcgccccatagatgatattatctcaatctaacaaatcatcacacaccctacccaagaacagggtttgttaaga

SEQ ID NO: 791123 - DNA, 120 bp, Artificial Sequence
  ENSG00000270276_0 (sequence is synthesized)
aatctggtccgatactcttgtatatcaggggaagacggtgctcgccttgacagaagctgtctatcgggctccagcggtcatgtccggcagaggaaagggcggaaaaggcttaggcaaagg

SEQ ID NO: 791124 - DNA, 120 bp, Artificial Sequence
  ENSG00000270276_1 (sequence is synthesized)
gggcgctaagcgccaccgcaaggtcttgagagacaacattcagggcatcaccaagcctgccattcggcgtctagctcggcgtggcggcgttaagcggatctctggcctcatttacgagga

SEQ ID NO: 791125 - DNA, 120 bp, Artificial Sequence
  ENSG00000270276_2 (sequence is synthesized)
gacccgcggtgtgctgaaggtgttcctggagaatgtgattcgggacgcagtcacctacaccgagcacgccaagcgcaagaccgtcacagccatggatgtggtgtacgcgctcaagcgcca

SEQ ID NO: 791126 - DNA, 120 bp, Artificial Sequence
  ENSG00000270276_3 (sequence is synthesized)
ggggcgcaccctgtacggcttcggaggctaggccgccgctccagctttgcacgtttcgatcccaaaggccctttttagggccgaccacttgctcatctgaggagttggacacttgactgc

SEQ ID NO: 791127 - DNA, 120 bp, Artificial Sequence
  ENSG00000270276_4 (sequence is synthesized)
atcggatctgaagttaacggaaagctaccgcggcccatagcgctcacagccgtaaagacttaagtcgttgaccgaaagcggctttttcacttacctgggctttttttttttttttttttt

SEQ ID NO: 791128 - DNA, 120 bp, Artificial Sequence
  ENSG00000270276_5 (sequence is synthesized)
tttttaaagcctttatcggtatgaaaggttgaatgctctaggtttgagcactgctttctcggcttgctcttctggtgcagtataggcacacctagagggccacgtcagtctttgcgatca

SEQ ID NO: 791129 - DNA, 120 bp, Artificial Sequence
  ENSG00000270276_6 (sequence is synthesized)
ccaaatctggttctgagaaataggcactggcaatttacacatgccttgctgtgtaatctcactatatttgctcaggcaaagtgggagaagcagccttaggttttcattctagagatgccg

SEQ ID NO: 791130 - DNA, 120 bp, Artificial Sequence
  ENSG00000270276_7 (sequence is synthesized)
gctttcccacctgatcggcttagagttcacgattgactgttttgggcttcatttcaccctctacataacaagcgggtggactagatgccttagcaagggtccgtgttgtgtggtgtctcc

SEQ ID NO: 791131 - DNA, 120 bp, Artificial Sequence
  ENSG00000270276_8 (sequence is synthesized)
agccacgcactcagctcaatcttagcacagttaaaaaatgcctttctagcaagttatctgcccagtgcctgaaaagtatcatttcttgtgttcaataaaaagcctcctaatttaatcaag

SEQ ID NO: 791132 - DNA, 120 bp, Artificial Sequence
  ENSG00000270276_9 (sequence is synthesized)
ccgaagccctggcttcttctgaggtgcaaataaatgaccgagaaggtgttatctaagacctctacagccatttgtatctggccgtgtgtagagtgggctctgcaagaccctgcctcactt

SEQ ID NO: 791133 - DNA, 120 bp, Artificial Sequence
  ENSG00000270276_10 (sequence is synthesized)
gttgtggcattgcaaggatacaaatgcagagatattttaaagtgatccttctgtaagagtgaaccaacgatatgatctgaaagcaacttcacaggtaattcaggcttatgattttactgt

SEQ ID NO: 791134 - DNA, 120 bp, Artificial Sequence
  ENSG00000270276_11 (sequence is synthesized)
gtatgtatttgggagaagaaattctgtcagctcccaaaggataaaccagcagttgctttattggtcttcagatgtggctgcaaacacttgagactgaactaagcttaaaacacggtactt

SEQ ID NO: 791135 - DNA, 120 bp, Artificial Sequence
  ENSG00000270276_12 (sequence is synthesized)
agcaatcgggttgccagcaaagcactggatgcaagccttgccttccagaagcttaccagtcgggttgccagcaaagcagtggatgcaagacttgccctccaggagcttaccatcacaacg

SEQ ID NO: 791136 - DNA, 120 bp, Artificial Sequence
  ENSG00000270276_13 (sequence is synthesized)
aagaagacaaataaatgcataatatatagacgacataaatccatactgtacacatttaagaataaacagtccagtagtaagaggcagtacatattcaatctgctgagaaatgtagacaat

SEQ ID NO: 791137 - DNA, 120 bp, Artificial Sequence
  ENSG00000270276_14 (sequence is synthesized)
aactactataagaatcctaatgctacagaagtcactggctgctgggaaaccggggaaaacttggctatggacgtgggggcttgtgtcggactctgaataaagagcagaatgattggcgtc

SEQ ID NO: 791138 - DNA, 120 bp, Artificial Sequence
  ENSG00000270339_0 (sequence is synthesized)
actataaagacagtaaaaagatcagtggttatctttgcagacgccaccatcgctgtgagccctgtactatcagccatggtcaactccgtcgtcttttttgacatcaccgtcgacggcaag

SEQ ID NO: 791139 - DNA, 82 bp, Artificial Sequence
  ENSG00000270339_1 (sequence is synthesized)
caactccgtcgtcttttttgacatcaccgtcgacggcaagcccttgggccgcatctccatcaaactgtttgcagacaagatt

SEQ ID NO: 791140 - DNA, 120 bp, Artificial Sequence
  ENSG00000270339_2 (sequence is synthesized)
aagtccatctatggggagaaatttgatgatgagaacctcatccgaaagcatacaggttctggcatcttgtccatggtaaatgctggacccaacacaaatggctcccagttattcatctgc

SEQ ID NO: 791141 - DNA, 90 bp, Artificial Sequence; identical to SEQ ID NO: 787986
  ENSG00000270339_3 (sequence is synthesized)

SEQ ID NO: 791142 - DNA, 120 bp, Artificial Sequence
  ENSG00000270339_4 (sequence is synthesized)
atcaccattgctgactgtggacaattctaatgagtttgacttgtgttttattttcaccaccagacccattcattctgtagctcaggagagcacccctccaccacatttgcttgcaatatc

SEQ ID NO: 791143 - DNA, 120 bp, Artificial Sequence
  ENSG00000270379_0 (sequence is synthesized)
acttggaagcttctacctccagaagtccagacacctcccctgtacctctcgtaccacagaggacaggtctcctccagctgtgcccccactcccctaaaagccttgtattcccccctgcag

SEQ ID NO: 791144 - DNA, 120 bp, Artificial Sequence
  ENSG00000270379_1 (sequence is synthesized)
gttccctctggccccaccaggagaagaagatggcctatgaaaaatcaactgatatctctgatgtctccaggtcaatgttcctgtacccatggctggaatatccagacaagaccaaagaac

SEQ ID NO: 791145 - DNA, 120 bp, Artificial Sequence
  ENSG00000270379_2 (sequence is synthesized)
tcagaaaagccatggctcctgttcatctgcccttgtcctgctaccagatgccaaaggaagagtttcccccaagtccagagtgctggaggcagcatccgagcaagccaaactcagtcccgt

SEQ ID NO: 791146 - DNA, 120 bp, Artificial Sequence
  ENSG00000270379_3 (sequence is synthesized)
actgctacttcaagaaacctgagatctacacgcactggcacgacctgtatgatcagcgagaggaaagggaggctgagaagatgttgaggaaaatgagagatgactgtaggtacatcaaag

SEQ ID NO: 791147 - DNA, 120 bp, Artificial Sequence
  ENSG00000270379_4 (sequence is synthesized)
aggtacatcaaacccacatcaaaatgttccatctcccaatgagcaagctgactataaaatctgagatgcgatccaggcccttagagcctacccaggaccccctgaagtggcaaagattaa

SEQ ID NO: 791148 - DNA, 120 bp, Artificial Sequence
  ENSG00000270379_5 (sequence is synthesized)
gggaactcacaaaaagcctggaatctcccagagaggatgagcagttctatgcagcacaggctctgggatgcttacgcatcagtgacaagtttgtcatggaggcactacagcaggtggccc

SEQ ID NO: 791149 - DNA, 120 bp, Artificial Sequence
  ENSG00000270379_6 (sequence is synthesized)
aaactggtccagagaaagtgaagtacgaggcctaccgaaccctggccatcctgggttgcctgaataagcatgtgatccgggctctcatcaaacagctgaaggagaaaaatgagggtcaaa

SEQ ID NO: 791150 - DNA, 120 bp, Artificial Sequence
  ENSG00000270379_7 (sequence is synthesized)
ggatggagactttgacggggctacgaatggctcttaactcctgggctgctgtctctaaagacaagaggactcaagtcggggatgagggcaagctggtgcctgtactacagacactgatca

SEQ ID NO: 791151 - DNA, 120 bp, Artificial Sequence
  ENSG00000270379_8 (sequence is synthesized)
ctgaggccttgcagcaacatggtccaagagttcttgttgcagtgcctgtgccaaggactcaagacccagcggatgaaggcacttaggatgctggtcaaggtgatgcacgtgcactcagcc

SEQ ID NO: 791152 - DNA, 120 bp, Artificial Sequence
  ENSG00000270379_9 (sequence is synthesized)
ccagtcatcaaggccatcctagaccagctgtgttcttccagtgtccttgaggaccgctttgaagccacccaaatgctcaagaccattgggctggaacagatccaggcacaggggctagag

SEQ ID NO: 791153 - DNA, 120 bp, Artificial Sequence
  ENSG00000270379_10 (sequence is synthesized)
gaactcacatttaacctgctcaggaggaagacgcataatgaacccttccttgctgtgaggcaggctgtggctcaaactgtggaagagctcaagttgaagcctacgatgatgaacttggtg

SEQ ID NO: 791154 - DNA, 120 bp, Artificial Sequence
  ENSG00000270379_11 (sequence is synthesized)
gaggcacaactgatgaacccagatgccactgcacgccaggaagcagtcatctctttgggtgtcctggggatccgcagtccacaagtgttccacttgctcctggacttactagatgcagaa

SEQ ID NO: 791155 - DNA, 120 bp, Artificial Sequence
  ENSG00000270379_12 (sequence is synthesized)
aaccaccaggctgtgaagaagagtctacaagaaacattaatcctttgtgcctcaattgatccctggatccaaaacaagctgaaaaacaaggttctctctgtatatgaggcacctaagacc

SEQ ID NO: 791156 - DNA, 120 bp, Artificial Sequence
  ENSG00000270379_13 (sequence is synthesized)
aatgtgaaggcagagcccacaaggttccagaaagagcctgagaacccagaagagttaactattcaagactttcgacttgcaaagctgaaccccttgtttattgcaaagtccatcaccaaa

SEQ ID NO: 791157 - DNA, 120 bp, Artificial Sequence
  ENSG00000270379_14 (sequence is synthesized)
gtaggccaaaagaaaacgcctgctttcccaccgtgctgctcgaaaccacgaaaacataggccacaggtcatagggccctggcagccaaggatcaagaaacagctccgggtccttgctgaa

SEQ ID NO: 791158 - DNA, 120 bp, Artificial Sequence
  ENSG00000270379_15 (sequence is synthesized)
attgccaaataagtcaattctttgggcctactccccgactccctccctgaagatgcttctcaggctcccatgagaaaacaatctatacttatcttccgtgaataaacaagtgtcactcta

SEQ ID NO: 791159 - DNA, 120 bp, Artificial Sequence
  ENSG00000270379_16 (sequence is synthesized)
cttggaagcttctacctccagaagtccagacacctcccctgtacctctcgtaccacagaggacaggtcaatgttcctgtacccatggctggaatatccagacaagaccaaaggtgaggct

SEQ ID NO: 791160 - DNA, 120 bp, Artificial Sequence
  ENSG00000270379_17 (sequence is synthesized)
ggcatgtgggcacagacgaggctccccggggtgctaggatggcgggtcagatccagtaaggacacagccaccactgtgcagcatgacccatcccatgtccttggcctcttcgaagagcag

SEQ ID NO: 791161 - DNA, 120 bp, Artificial Sequence
  ENSG00000270379_18 (sequence is synthesized)
ctggatctaaaagatagggaaggaagaatctgaagatctccctggtctaaccgaaaagacattggactgaaaagccaggaaagtctgaaagccagaacagagtacattctctgcctttac

SEQ ID NO: 791162 - DNA, 120 bp, Artificial Sequence
  ENSG00000270379_19 (sequence is synthesized)
tggaaacaccgcatatgtatacatcagcttaccactgggaacatgcattctttatatccataatctcatttaactcttacaacaacaccaggaattagtatctgtatttctctaaatgag

SEQ ID NO: 791163 - DNA, 120 bp, Artificial Sequence
  ENSG00000270379_20 (sequence is synthesized)
aaaatgaaagctctgagagaccaagggacttgcccagggccaagtggctacaagataccagatagagatttgaacaaacatctaactcccaactgtattgttccttccattgaaccattt

SEQ ID NO: 791164 - DNA, 120 bp, Artificial Sequence
  ENSG00000270394_0 (sequence is synthesized)
aatattatcaaactatcttaatcaaaccatttacattaaacgaaagtataggtgatagaaatttttaccctggtgtagtagacatagtaccgtaaaagaaaggtgaaagaactatataaa

SEQ ID NO: 791165 - DNA, 120 bp, Artificial Sequence
  ENSG00000270394_1 (sequence is synthesized)
gcactaaaaagcaaagacaagctcttataccttccgcataatgtattaactagaagtaactttacacagaggattatagccaagtcccccaaaaccagatgagctacccaagaacaactg

SEQ ID NO: 791166 - DNA, 120 bp, Artificial Sequence
  ENSG00000270394_2 (sequence is synthesized)
aagagtacacccatctatgtggcaaaatagttgggagattcatgactagcggtgacaagcctaccaagcctggtgatagttggttgtccaacgtggaatcttagttcaactttaaactta

SEQ ID NO: 791167 - DNA, 120 bp, Artificial Sequence
  ENSG00000270394_3 (sequence is synthesized)
cccacagaattatttactctccctgtaaatttagctgttagtctaagagggacagctctgtagaccctaggaaacgacgttcctacagagagtaaaaaatactaccaccatagttggccc

SEQ ID NO: 791168 - DNA, 120 bp, Artificial Sequence
  ENSG00000270394_4 (sequence is synthesized)
aaacgcagccaccaattaagaaagcatttaaagctcaacatctaactatcttcaattctaatcactctactgaactcctaacatcatactggactaatcaattacttaatagaaccaata

SEQ ID NO: 791169 - DNA, 120 bp, Artificial Sequence
  ENSG00000270394_5 (sequence is synthesized)
atgttaatataaacattctccattgcatacgtttacatcagactggaataacccactgacagttaacaacctaatattaataaatgatataataagcaccctattatttacactgttaac

SEQ ID NO: 791170 - DNA, 120 bp, Artificial Sequence
  ENSG00000270394_6 (sequence is synthesized)
aagcaccctattatttacactgttaacccaactaaggtatgctctaaggaaagattgcaaaaagtaagaggaacatgacaaatcttaccccacctgtttaccaaaaacatcacctctagc

SEQ ID NO: 791171 - DNA, 120 bp, Artificial Sequence
  ENSG00000270394_7 (sequence is synthesized)
gacatatgttcaacggccatggtatcctgaccgtgcaaaggtagcataatcgcttgttccctaaatagggacttgtatgaatggacacacaagggttcagctgtctcttacttttaatca

SEQ ID NO: 791172 - DNA, 120 bp, Artificial Sequence
  ENSG00000270394_8 (sequence is synthesized)
gtgaaattgacctatctgtgaagaggcggatataaacaaatgagactagaaaaccctatggagctttaattcattaatgcaaataaaaacccaaacaagtctagaggccctggcctacta

SEQ ID NO: 791173 - DNA, 120 bp, Artificial Sequence
  ENSG00000270394_9 (sequence is synthesized)
tccctgcattaaaaattttggttggggtgagctcggagcatagttcaacctccgaacaacctaaactaagactgcagtagtctaagcgagttagtacacattgaccaaataattcaatca

SEQ ID NO: 791174 - DNA, 120 bp, Artificial Sequence
  ENSG00000270394_10 (sequence is synthesized)
acggaataaattaccctacggataaaagtattgacaatagggtttacaacctcgatgttggatgaggacatcctaatggtgtagccgctattaagggttcgtttgtttaacggttaaagt

SEQ ID NO: 791175 - DNA, 120 bp, Artificial Sequence
  ENSG00000270394_11 (sequence is synthesized)
tctatgtgatctgagttcagacctgagtaatccaggtcagtttctatctatataacatttatcttagtatgaaaggacaagagaaatagggcccacttcataaagtgccctcactccata

SEQ ID NO: 791176 - DNA, 120 bp, Artificial Sequence
  ENSG00000270467_0 (sequence is synthesized)
atggagtttgagctcagctgggttttccttgttgctattttacaaggtgtccactgtgaggtgcagctggtagagtctgggagaggcttggcccagcctggggggtacctaaaactctcc

SEQ ID NO: 791177 - DNA, 120 bp, Artificial Sequence
  ENSG00000270467_1 (sequence is synthesized)
ctacgcagactctgtgaagggcagattcaccatctccacagacaactcaaagaacacgctctacctgcaaatgaacagcctgagagtggaggacacggccgtgtattactgtgcaagaga

SEQ ID NO: 791178 - DNA, 120 bp, Artificial Sequence
  ENSG00000270472_0 (sequence is synthesized)
aactacgcagactctgtgaaaggccgattcaccatctccagggacaacgccaagaactcactgtatctgcaaatgaacagcctgagagccgaggacacggctgtgtattactgtgtgaaa

SEQ ID NO: 791179 - DNA, 62 bp, Artificial Sequence
  ENSG00000270505_0 (sequence is synthesized)
atggactggacctggaggatcctcttcttggtggcagcagctacaggtgcccactcccaggt

SEQ ID NO: 791180 - DNA, 120 bp, Artificial Sequence
  ENSG00000270505_1 (sequence is synthesized)
ctatgcacagaagtttcagggcagagtcaccatgaccagggacacgtccatcagcacagcctacacggagctgagcagcctgagatctgaggacacggccacgtattactgtgcgagaga

SEQ ID NO: 791181 - DNA, 78 bp, Artificial Sequence; identical to SEQ ID NO: 753149
  ENSG00000270550_0 (sequence is synthesized)

SEQ ID NO: 791182 - DNA, 120 bp, Artificial Sequence
  ENSG00000270550_1 (sequence is synthesized)
gcagcctctggattcaccttcagtagctatggcatgcactgggtccgccaggctccaggcaaggggctggagtgggtggcagttatatcatatgatggaagtaataaatactatgcagac

SEQ ID NO: 791183 - DNA, 120 bp, Artificial Sequence
  ENSG00000270550_2 (sequence is synthesized)
tactatgcagactccgtgaagggccgattcaccatctccagagacaattccaagaacacgctgtatctgcaaatgaacagcctgagagctgaggacacggctgtgtattactgtgcgaaa

SEQ ID NO: 791184 - DNA, 120 bp, Artificial Sequence; identical to SEQ ID NO: 769449
  ENSG00000270601_0 (sequence is synthesized)

SEQ ID NO: 791185 - DNA, 120 bp, Artificial Sequence; identical to SEQ ID NO: 769450
  ENSG00000270601_1 (sequence is synthesized)

SEQ ID NO: 791186 - DNA, 120 bp, Artificial Sequence; identical to SEQ ID NO: 769451
  ENSG00000270601_2 (sequence is synthesized)

SEQ ID NO: 791187 - DNA, 120 bp, Artificial Sequence
  ENSG00000270601_3 (sequence is synthesized)
ttcaagtgctggatttacaggatgtctgtgagaacttctggatggtttggtctgaagctatggcccatgggtgcttcctcaatgccaagaggaacaaaaaaccagtgcaggactgtccaa

SEQ ID NO: 791188 - DNA, 120 bp, Artificial Sequence
  ENSG00000270601_4 (sequence is synthesized)
aaaaaccagtgcaggactgtccaaggatgagaggacagcagcccttgactgtgttcgtagaactttggctcaagaacaggactctggatgaatacctcacctgcctccttctatgggtca

SEQ ID NO: 791189 - DNA, 120 bp, Artificial Sequence; identical to SEQ ID NO: 769454
  ENSG00000270601_5 (sequence is synthesized)

SEQ ID NO: 791190 - DNA, 120 bp, Artificial Sequence; identical to SEQ ID NO: 769455
  ENSG00000270601_6 (sequence is synthesized)

SEQ ID NO: 791191 - DNA, 120 bp, Artificial Sequence; identical to SEQ ID NO: 769456
  ENSG00000270601_7 (sequence is synthesized)

SEQ ID NO: 791192 - DNA, 120 bp, Artificial Sequence; identical to SEQ ID NO: 769457
  ENSG00000270601_8 (sequence is synthesized)

SEQ ID NO: 791193 - DNA, 120 bp, Artificial Sequence; identical to SEQ ID NO: 769458
  ENSG00000270601_9 (sequence is synthesized)

SEQ ID NO: 791194 - DNA, 120 bp, Artificial Sequence; identical to SEQ ID NO: 769459
  ENSG00000270601_10 (sequence is synthesized)

SEQ ID NO: 791195 - DNA, 120 bp, Artificial Sequence
  ENSG00000270601_11 (sequence is synthesized)
tctctgctggagcagatttcctcaaattagggctgagctgatgaagagagtgagggacttaaggcaccccaagaggatcttgttctgtactgactgctgccctgactgtggcaacaggtc

SEQ ID NO: 791196 - DNA, 120 bp, Artificial Sequence; identical to SEQ ID NO: 769461
  ENSG00000270601_12 (sequence is synthesized)

SEQ ID NO: 791197 - DNA, 120 bp, Artificial Sequence
  ENSG00000270601_13 (sequence is synthesized)
agggagcacagaacccatcatttcacacatgggctctgaaagtgggaaaggaaaggtgatcaagcaggggcaggacttgggggaagtgttgccatggattcgatgggactttggggacct

SEQ ID NO: 791198 - DNA, 120 bp, Artificial Sequence
  ENSG00000270629_0 (sequence is synthesized)
agacggttacctggcacgctggccacattctgcctcactcttatcagagtctgagctactggcagtgctttcagctctgagttgaggcacctcgaaccttgtttttgtggtgaaggatcc

SEQ ID NO: 791199 - DNA, 68 bp, Artificial Sequence
  ENSG00000270629_1 (sequence is synthesized)
gtgctgtggggagtgatcacatttttcacaacatccctggtccagtgagaaggcagagatgaacattc

SEQ ID NO: 791200 - DNA, 86 bp, Artificial Sequence
  ENSG00000270629_2 (sequence is synthesized)
ggaggctgagaaagtactggaatcatctgcccccagggaggtgcagaaggctgaagagagcaaagtccctgaggactcactggagg

SEQ ID NO: 791201 - DNA, 120 bp, Artificial Sequence
  ENSG00000270629_3 (sequence is synthesized)
ccttgtgactccaaccagcctcacaagaacatcaaaatcacatttgaggaagacgaagtcaactcaactctggttgtagacagagaatcctctcatgatgaatgtcaggatgctctaaac

SEQ ID NO: 791202 - DNA, 86 bp, Artificial Sequence
  ENSG00000270629_4 (sequence is synthesized)
tcagaaacctcaaagagaaatgttttctaactcaactgtccggcttcctggccaaccaacagaagaaatacaaatatgaagagtgc

SEQ ID NO: 791203 - DNA, 61 bp, Artificial Sequence
  ENSG00000270629_5 (sequence is synthesized)
agaagaaatacaaatatgaagagtgcggagcagctgaagcaagctgaggagctcaggcaat

SEQ ID NO: 791204 - DNA, 74 bp, Artificial Sequence
  ENSG00000270629_6 (sequence is synthesized)
gaactgactgactcatgccagccctatagaagtgccttttacatattggagcaaaagaagtggaagaagaccaa

SEQ ID NO: 791205 - DNA, 87 bp, Artificial Sequence
  ENSG00000270629_7 (sequence is synthesized)
agatcaaaacccaccatgccccaggctcaacggcgtgctgatggaagtggaagagcgtgaagtcttatcaatgtactttgaactacc

SEQ ID NO: 791206 - DNA, 81 bp, Artificial Sequence
  ENSG00000270629_8 (sequence is synthesized)
agcacatcagcttcgccctttacgtggacaataggttttttactttgacggtgacaagtctccacctggtgttccagatgg

SEQ ID NO: 791207 - DNA, 120 bp, Artificial Sequence
  ENSG00000270629_9 (sequence is synthesized)
actttgacggtgacaagtctccacctggtgttccagatgggagtcatattcccacaataagcagcccttagtaatccgagagatgtcattcctgcaggcaggacctataggcaagtgaag

SEQ ID NO: 791208 - DNA, 73 bp, Artificial Sequence
  ENSG00000270629_10 (sequence is synthesized)
accatgccagtggaaacctgtgcgcagtctgaagacaatggacccacgttaggtgtgacacgttcacataact

SEQ ID NO: 791209 - DNA, 120 bp, Artificial Sequence
  ENSG00000270629_11 (sequence is synthesized)
gtgcagcacatgccgggagtgatcagtcagacattttaatttgaaccacgtatctctgggtagctacaaaattcctcagggatttcattttgcaggcatgtctctgagcttctatacctg

SEQ ID NO: 791210 - DNA, 82 bp, Artificial Sequence
  ENSG00000270629_12 (sequence is synthesized)
cgtatctctgggtagctacaaaattcctcagggatttcattttgcaggcatgtctctgagcttctatacctgctcaaggtca

SEQ ID NO: 791211 - DNA, 67 bp, Artificial Sequence
  ENSG00000270629_13 (sequence is synthesized)
ttagccctgctcctctctattccatcctgtagaggtcaggagtcaggagcaatgccatgttcttgca

SEQ ID NO: 791212 - DNA, 81 bp, Artificial Sequence
  ENSG00000270629_14 (sequence is synthesized)
gtctgctgttgcaaaaagaagttttaatctatacaattaaaaccttttgcctatcactctggacttttggattgtttttta

SEQ ID NO: 791213 - DNA, 120 bp, Artificial Sequence
  ENSG00000270629_15 (sequence is synthesized)
ttaattttaatctatacaattaaaaccttttgcctatcactctggacttttggattgttttttacattcagtgttataatatttgattatggtgattggttttggtgggtactgatgcga

SEQ ID NO: 791214 - DNA, 65 bp, Artificial Sequence
  ENSG00000270629_16 (sequence is synthesized)
acggcgtgctgatggaagtggaagagcgtgaagtcttacaggactcactggatagatgttattcg

SEQ ID NO: 791215 - DNA, 120 bp, Artificial Sequence
  ENSG00000270629_17 (sequence is synthesized)
aaacttcgggcggctgaggcggcggccgaggagcggcggactccgggcgcggggagtcgaggcatttgcgcctgggcttcggagcgtagcgccagggcctgagcctttgaagcaggagga

SEQ ID NO: 791216 - DNA, 120 bp, Artificial Sequence
  ENSG00000270629_18 (sequence is synthesized)
ggggaggagagagtggggctcctctatcgggaccccctccccatgtggatctgcccaggcggcggcggcggaggaggcgaccgagaagatgcccgccctgcgccccgctctgctgtgggc

SEQ ID NO: 791217 - DNA, 120 bp, Artificial Sequence
  ENSG00000270629_19 (sequence is synthesized)
gctgctggcgctctggctgtgctgcgcgacccccgcgcatgtgtcgagatggctatgaaccctgtgtaaatgaaggaatgtgtgttacctaccacaatggcacaggatactgcaaatgtc

SEQ ID NO: 791218 - DNA, 120 bp, Artificial Sequence
  ENSG00000270629_20 (sequence is synthesized)
cagaaggcttcttgggggaatattgtcaacatcgagacccctgtgagaagaaccgctgccagaatggtgggacttgtgtggcccaggccatgctggggaaagccacgtgccgatgtgcct

SEQ ID NO: 791219 - DNA, 120 bp, Artificial Sequence
  ENSG00000270629_21 (sequence is synthesized)
cagggtttacaggagaggactgccaatactcgacatctcatccatgctttgtgtctcgaccttgcctgaatggcggcacatgccatatgctcagccgggatacctatgagtgcacctgtc

SEQ ID NO: 791220 - DNA, 120 bp, Artificial Sequence
  ENSG00000270629_22 (sequence is synthesized)
catccctgtgcaaatggaagtacctgtaccactgtggccaaccagttctcctgcaaatgcctcacaggcttcacagggcagaagtgtgagactgatgtcaatgagtgtgacattccagga

SEQ ID NO: 791221 - DNA, 120 bp, Artificial Sequence
  ENSG00000270629_23 (sequence is synthesized)
cactgccagcatggtggcatctgcctcaacctgcctggttcctaccagtgccagtgccttcagggcttcacaggccagtactgtgacagcctgtatgtgccctgtgcaccctcgccttgt

SEQ ID NO: 791222 - DNA, 120 bp, Artificial Sequence
  ENSG00000270629_24 (sequence is synthesized)
gtcaatggaggcacctgtcggcagactggtgacttcacttttgagtgcaactgccttccagcaacatggccaatctttcctaagctgctcagcttacaagaaaaggaatcatactgctaa

SEQ ID NO: 791223 - DNA, 120 bp, Artificial Sequence
  ENSG00000270629_25 (sequence is synthesized)
gaattcaaacttcagcagtcatagggagccttgggaggaccccgaatcactgatggaattgcgcagtgcatggagatggctcagcaggatgaggtccctgactccacctcttctgccaca

SEQ ID NO: 791224 - DNA, 120 bp, Artificial Sequence
  ENSG00000270647_0 (sequence is synthesized)
agtacagctccggccgccgcgccgcctggctttcgtattcgttgttctcggcgggctgtggggcctccgcgccgcggccgttagtcatgtcggattctggaagttacggtcagtctgggg

SEQ ID NO: 791225 - DNA, 120 bp, Artificial Sequence
  ENSG00000270647_1 (sequence is synthesized)
gtgagcagcaaagttattctacctatggaaatccaggcagccaaggctatggacaagcatcacaaagctattctggctatgggcaaacgactgattcctcttatggacagaactacagcg

SEQ ID NO: 791226 - DNA, 120 bp, Artificial Sequence
  ENSG00000270647_2 (sequence is synthesized)
gttactccagttatggacaaagtcagtcaggttattcacagtcctatggtggttatgagaatcaaaagcagagctcatatagccagcaaccatataataaccagggacagcagcaaaaca

SEQ ID NO: 791227 - DNA, 120 bp, Artificial Sequence
  ENSG00000270647_3 (sequence is synthesized)
tggaatcatcaggaagccaaggtggaagagcaccttcctatgaccagccagactatggtcaacaagattcatatgaccagcagtcaggctatgatcaacatcaaggctcatatgatgagc

SEQ ID NO: 791228 - DNA, 120 bp, Artificial Sequence
  ENSG00000270647_4 (sequence is synthesized)
agtcaaattatgatcagcagcatgattcctatagtcaaaaccagcagtcctatcattcacaaagggaaaactacagccaccacacacaagatgaccgtcgtgatgtgagtaggtatggag

SEQ ID NO: 791229 - DNA, 120 bp, Artificial Sequence
  ENSG00000270647_5 (sequence is synthesized)
aagataatagaggatatggcgggtcacagggaggaggtagagggcgtgggggatatgacaaggatggaagaggtcctatgacaggatcaagtggtggtgaccgcggtggcttcaaaaatt

SEQ ID NO: 791230 - DNA, 120 bp, Artificial Sequence
  ENSG00000270647_6 (sequence is synthesized)
ttggtggtcacagggattatggacccagaacagatgctgattcagaatctgataattcagataacaacacaatctttgtgcaaggacttggggagggtgtgtctacagatcaagttgggg

SEQ ID NO: 791231 - DNA, 120 bp, Artificial Sequence
  ENSG00000270647_7 (sequence is synthesized)
agttctttaaacaaataggaattatcaagacaaataagaagaccggaaaaccaatgataaatctttatacagacaaggacacaggaaagccaaagggggaggcaacagtgtcatttgatg

SEQ ID NO: 791232 - DNA, 120 bp, Artificial Sequence
  ENSG00000270647_8 (sequence is synthesized)
accctccttcagctaaggcagccattgactggtttgatggaaaagaattccatggcaacatcattaaagtgtcctttgccactagaagacctgaattcatgagaggaggtggaagtggag

SEQ ID NO: 791233 - DNA, 120 bp, Artificial Sequence
  ENSG00000270647_9 (sequence is synthesized)
gggcggcgaggccgtggaggatatagaggtcgtggaggctttcaagggagaggtggagaccccaaaagtggggattgggtttgccctaatccgtcatgcggaaatatgaactttgctcga

SEQ ID NO: 791234 - DNA, 120 bp, Artificial Sequence
  ENSG00000270647_10 (sequence is synthesized)
aggaattcctgcaatcagtgcaatgagcctagaccagaggactctcgtccctcaggaggagatttccgggggagaggctacggtggagagaggggctacagaggtcgtgggggcagaggt

SEQ ID NO: 791235 - DNA, 120 bp, Artificial Sequence
  ENSG00000270647_11 (sequence is synthesized)
ggagaccgaggcggctatggtggagacagaagtgggggtggctatggtggagacagaagcagcggtggtggctacagcggagatagaagtgggggcggctatggtggagacagaagtggg

SEQ ID NO: 791236 - DNA, 120 bp, Artificial Sequence
  ENSG00000270647_12 (sequence is synthesized)
ggtggctatggtggggacagaggcggcggctatggtggggacagaggaggcggctatggaggagaccgaggaggtggctatggaggagatcgaggtggctatggaggagaccgaggtgga

SEQ ID NO: 791237 - DNA, 120 bp, Artificial Sequence
  ENSG00000270647_13 (sequence is synthesized)
ggctatggtggagaccgaggaggctatggaggagatcgaggaggttacggaggagatcgaggaggttatggaggagatcgaggaggctatggaggagacagaagccgggggggctatgga

SEQ ID NO: 791238 - DNA, 120 bp, Artificial Sequence
  ENSG00000270647_14 (sequence is synthesized)
ggagaccgtggtggtggcagtggctacggtggagaccgaagtggaggctatggaggagacaggagtggtggcggctatggaggagaccgaggtgggggctacggaggagaccgaggtggc

SEQ ID NO: 791239 - DNA, 120 bp, Artificial Sequence
  ENSG00000270647_15 (sequence is synthesized)
tatggaggcaaaatgggaggaagaaacgactacagaaatgatcagcgcaaccgaccatactgatgactgttttgaatgttcctttgtctctgacatgatccatagtgaaattgccagagt

SEQ ID NO: 791240 - DNA, 120 bp, Artificial Sequence
  ENSG00000270647_16 (sequence is synthesized)
tttgcctgctgctttcctcgtggcctcttcttgggtagtgaaattaagtgacatttggatttttatttgggtgggagggctgggacagtttttcttctagaaatgtctgttgagatttcc

SEQ ID NO: 791241 - DNA, 120 bp, Artificial Sequence
  ENSG00000270647_17 (sequence is synthesized)
ccctttagtttccaaccttctccccaacccttggagctaaatgcgttgtaaaatattgccaaaatgaaaagtgttttgtaatactgcaataaaggctgcttgtttttgtggacttttgta

SEQ ID NO: 791242 - DNA, 120 bp, Artificial Sequence
  ENSG00000270647_18 (sequence is synthesized)
agtacagctccggccgccgcgccgcctggctttcgtattcgttgttctcggcgggctgtggggcctccgcgccgcggccgttagtcatgtcggcgaggcctcgggccagtcatctcgccg

SEQ ID NO: 791243 - DNA, 120 bp, Artificial Sequence
  ENSG00000270647_19 (sequence is synthesized)
cctcgtacctcagttttcccatcctcgaagtggagctgggcctgcctgactcacccattcatcagcaagtctttggaaatatttttgttggtgctgacagccaaagcagtccaatacaga

SEQ ID NO: 791244 - DNA, 120 bp, Artificial Sequence
  ENSG00000270647_20 (sequence is synthesized)
agtggaggctatggaggagacaggagtggtggcggctatggaggagaccgaggtgggggctacggaggagaccgaggtggctatggaggcaaaatgggaggaagatccagctgctcttcg

SEQ ID NO: 791245 - DNA, 120 bp, Artificial Sequence
  ENSG00000270647_21 (sequence is synthesized)
aagaggccaaggacatgggatgggtcatgctgcacagtggtggctgtgtccttactggatctgacccgccatcctagcaccccggggagcctcgtctgtgcccacatgccacacatctca

SEQ ID NO: 791246 - DNA, 120 bp, Artificial Sequence
  ENSG00000270647_22 (sequence is synthesized)
agtgcctccatgacaaacttgtcactgatgcgtaagcatcccagagcctgcaggaagagggatggaggaaagagaaggaaacttggacatcatccccaggagttaccattctctggatac

SEQ ID NO: 791247 - DNA, 120 bp, Artificial Sequence
  ENSG00000270647_23 (sequence is synthesized)
agctggagtttgtgcttggaataccatccccacaaccaccatcacgtcaagcagctttttactttccagcttggccaactcctggctgtaaccaccctcctctatccttgcctcttctca

SEQ ID NO: 791248 - DNA, 120 bp, Artificial Sequence
  ENSG00000270647_24 (sequence is synthesized)
cctgtgctgcatagaactgctcatcctctctgggagattccaggctttttgtgagttcctgcccatccaaggcagccagtggaaaggaagacagagaaaaataaagaatttcaaactaaa

SEQ ID NO: 791249 - DNA, 120 bp, Artificial Sequence
  ENSG00000270647_25 (sequence is synthesized)
tagtcttttttctttttctcatatttagaaaataaccgtttggaaaaaatacttactctagtttagtatttttcatgctgtgcctccagctttatgttatggtttaatagtatccctttg

SEQ ID NO: 791250 - DNA, 120 bp, Artificial Sequence
  ENSG00000270647_26 (sequence is synthesized)
gcttggggttgggaagatttagaaataagagtatattagatatgtaataagcttgaaaagacatcttgtggaaatagatccttgggaaaacacttagatggaaacaacatttagaactct

SEQ ID NO: 791251 - DNA, 120 bp, Artificial Sequence
  ENSG00000270647_27 (sequence is synthesized)
tcagtacagctccggccgccgcgccgcctggctttcgtattcgttgttctcggcgggctgtggggcctccgcgccgcggccgttagtcatgtcgggtaggtgacttcttcagcgagcagc

SEQ ID NO: 791252 - DNA, 120 bp, Artificial Sequence
  ENSG00000270647_28 (sequence is synthesized)
ggcagcgacgagaaggtcctggcggggttgggctgtcttcccgcccaccggagggccctgaggagaagcctccggccctgagggaggcttggggtgggggggcggccgctgccgccgcca

SEQ ID NO: 791253 - DNA, 120 bp, Artificial Sequence
  ENSG00000270647_29 (sequence is synthesized)
tgttgaactggaggcacgcacgctcccaatggctccccggctgcaaatcacggcgggagcgcctcgggcctcttgtcttttgaccctgtccttggaacccgaggagacttgccgttcccg

SEQ ID NO: 791254 - DNA, 120 bp, Artificial Sequence
  ENSG00000270647_30 (sequence is synthesized)
ggggagggtgtgtgtgagtcggggggcggaggccgtctacgccatcgtaggggcggggggagccgagattagagcatcagcctgagagaagcggtgcttctggttctccgctccgcctcg

SEQ ID NO: 791255 - DNA, 120 bp, Artificial Sequence
  ENSG00000270647_31 (sequence is synthesized)
gatctttcagcgaggcctcgggccagtcatctcgccgcctcgtacctcagttttcccatcctcgaagtggagctgggcctgcctgactcacccattcatcaggtgggggccttgacgctc

SEQ ID NO: 791256 - DNA, 120 bp, Artificial Sequence
  ENSG00000270647_32 (sequence is synthesized)
tgggagccctttcaaaggacgttgccttacacgaaatcgtacttatcgttattcactctgcagtaaccacctggatttgagttgggggtgtttgcatagtaatttagcttcctcttcacc

SEQ ID NO: 791257 - DNA, 120 bp, Artificial Sequence
  ENSG00000270647_33 (sequence is synthesized)
ctcctgccattcgtcttccccaccagtttatctcctgaaagagtttgaaagtgagccttgtctatctattattgataagctcctgtaggtgtatgtggcatttaccttaaaacatgcaga

SEQ ID NO: 791258 - DNA, 120 bp, Artificial Sequence
  ENSG00000270647_34 (sequence is synthesized)
ccaaaggaaaggcaatcttttttccccccacgaagcagttaacttggcagaggccacccattgtgtggaagagaaagagaggcattagtctcttcaggacaaccagtttggatcctgcta

SEQ ID NO: 791259 - DNA, 120 bp, Artificial Sequence
  ENSG00000270647_35 (sequence is synthesized)
agggtcctctattgttaggctgcatcacgggccgcaaagacccaggtgtctatccacttgctagaaaccatcatgagagttagataccagttttctgctggaaatacagaacatttcctg

SEQ ID NO: 791260 - DNA, 120 bp, Artificial Sequence
  ENSG00000270647_36 (sequence is synthesized)
aaaccgtgtggttgaggtgaaacaggcattttgcagtcttatattttgagtaaggccaaacctgcctagtgttataaaactagacaaaaaacccaggtacccggtcttgcaggatagaaa

SEQ ID NO: 791261 - DNA, 120 bp, Artificial Sequence
  ENSG00000270647_37 (sequence is synthesized)
tgtgtgactaaaatgaagcatcgatctgagaagactacaaattagcgggaacctttggacaggagcatgctatacattacttagattaatgttgatatttaaggagccaggatattgatt

SEQ ID NO: 791262 - DNA, 120 bp, Artificial Sequence
  ENSG00000270647_38 (sequence is synthesized)
tgtttttgaggggtgcccatctacttcatataagaggctataaactgcacttctttcagtttctgcttaatccttgctcaaacaagaaataatttcttattccaaagtagacattggtac

SEQ ID NO: 791263 - DNA, 120 bp, Artificial Sequence
  ENSG00000270647_39 (sequence is synthesized)
atctttttctaggtacgtaatttgggatgaagtctgataaagctccttagaagttcttatagtacaccctcacaagagtgtatcatctacccgtggtttaaacagaaattaaaattctac

SEQ ID NO: 791264 - DNA, 120 bp, Artificial Sequence
  ENSG00000270647_40 (sequence is synthesized)
cctcgtggagaaatttaccaagttttaatggtttcagtcctcattaaaaacttttagcctgtcttgatctttaacataattattgatataaaacaatggcttctgtggaaagtcgaagtt

SEQ ID NO: 791265 - DNA, 120 bp, Artificial Sequence
  ENSG00000270647_41 (sequence is synthesized)
ttagtggtttgctatttgtaaaatacaggctttttcatgtatcatataagcatataagctggcttaatcattagtattgatcttcaagttactaagacaccagatatttgttattttgta

SEQ ID NO: 791266 - DNA, 120 bp, Artificial Sequence
  ENSG00000270647_42 (sequence is synthesized)
gttcgagtattttttaaaatacgaaattggcttttcggtgtgtgaaaagggctacttactagacgcttgtttttaaattaacattcaattaattaaagctagactctttatattcttagg

SEQ ID NO: 791267 - DNA, 120 bp, Artificial Sequence
  ENSG00000270647_43 (sequence is synthesized)
cttggtatactatttatatgttttgtaataagtgtataaaaataatacctttgactttgtgtaaaaataatgcttttgacttgttctttgatgaatgtttattaaaatcccccaaaacaa

SEQ ID NO: 791268 - DNA, 120 bp, Artificial Sequence
  ENSG00000270647_44 (sequence is synthesized)
gtgatgaaacttgagtatttacctaaatttcagagctattctggctatgggcaaacgactgattcctcttatggacagaactacagcggttactccagttatggacaaagtcagtcaggt

SEQ ID NO: 791269 - DNA, 120 bp, Artificial Sequence
  ENSG00000270647_45 (sequence is synthesized)
gatggaagaggtcctatgacaggatcaaggtaagtatgtagataaagatgcgtacatttcttcttcttcctcttttttttttttttaaggtgttacttggctggatcaattccagcatct

SEQ ID NO: 791270 - DNA, 120 bp, Artificial Sequence
  ENSG00000270647_46 (sequence is synthesized)
atgcggtgtttccagtaaaggcagagaatgtactctgttctggctttcagactttcctggcttttcagtccaatgtcttttcggttagaccagggagatcttcagattcttccttcccta

SEQ ID NO: 791271 - DNA, 120 bp, Artificial Sequence
  ENSG00000270647_47 (sequence is synthesized)
gaaaagtaaattattagggttgtccaatcagcctttacaaccagagcttaacaaaagtgatactagcataatgctaaagtggcaggtgctgtctaggacaagttaaaggaaatgttgaca

SEQ ID NO: 791272 - DNA, 120 bp, Artificial Sequence
  ENSG00000270647_48 (sequence is synthesized)
ttcatcttgatttcctaaactttaaataaaacataatttatatatttactttgtaaatctgtgatggttgactttcaaggattttggaagtattgacttttcatgccttggtttattact

SEQ ID NO: 791273 - DNA, 120 bp, Artificial Sequence
  ENSG00000270672_0 (sequence is synthesized)
aactctagccctaaacttaactaatagtactaccgaataaccttaatcaaaccatttacccaaacaaaagtataggcgaaagaaattttacccaggcgcagtggacgtagtactgcaagg

SEQ ID NO: 791274 - DNA, 120 bp, Artificial Sequence
  ENSG00000270672_1 (sequence is synthesized)
taaagatgaaaaagttaaccaagaataaaatagcaaggatagacccttataccttctgcgtaatgaattaactagaaataactttacacagagaaccaaagccaaggcccccaaaaccag

SEQ ID NO: 791275 - DNA, 120 bp, Artificial Sequence
  ENSG00000270672_2 (sequence is synthesized)
acgagctacccaagaacagctaaaagaacacacccatctatgtagtaaaatagtggggagattcatgagtagtggtgataagcctactgagcctagtgatagctggttgtccaagataga

SEQ ID NO: 791276 - DNA, 120 bp, Artificial Sequence
  ENSG00000270672_3 (sequence is synthesized)
atcttagttcaactttaaatttacctacagagccacttaatccccctgtaaatttaactgttagtctaaagagggacagctctttagacattaggaaacaaccttcatgtagagagtaaa

SEQ ID NO: 791277 - DNA, 120 bp, Artificial Sequence
  ENSG00000270672_4 (sequence is synthesized)
aaacattatccccatagttggcccgaaagcagccatcaattaagaaagcgttcaagctcaacatccaaccactctaaattctaatcacaccactgaactcctaacaccacattggactaa

SEQ ID NO: 791278 - DNA, 120 bp, Artificial Sequence
  ENSG00000270672_5 (sequence is synthesized)
tctattactttatagatgcaataatattaatataagtaacatgaaatattctccactgcttaagcctacatcagaccagaataacccactgacaaattaacagcctaatattaataaaca

SEQ ID NO: 791279 - DNA, 120 bp, Artificial Sequence
  ENSG00000270672_6 (sequence is synthesized)
aaatttattattaccgatactgttaatccaacacaggcatgctctaaggaaaggttaaaaaaaattaaaaggaactcggcaaattttaccctgcctgtttaccaaaaacatcacctctag

SEQ ID NO: 791280 - DNA, 120 bp, Artificial Sequence
  ENSG00000270672_7 (sequence is synthesized)
cattattagtattagaggcaccacctgccagtgacatatgttcaacggccacagtaccctgaccatgcaaaggtagcataatcacttgttccttaaatagggacttgtatgaatgacccc

SEQ ID NO: 791281 - DNA, 120 bp, Artificial Sequence
  ENSG00000270672_8 (sequence is synthesized)
acgagggttcagctgtctcttacttccaaccagtgaaactgacctgcctgtgaagaggcgaacatgaataaataagatgagaagatcctatggagctttaatttattaatgcaaacaaag

SEQ ID NO: 791282 - DNA, 120 bp, Artificial Sequence
  ENSG00000270672_9 (sequence is synthesized)
ctcagataagcccacaggccttaaactactgtccctgcattaaatattttggttggggtgacctcggagcataatttaacctccgagcaacctatgctaagactaaacaagtttaagcga

SEQ ID NO: 791283 - DNA, 120 bp, Artificial Sequence
  ENSG00000270672_10 (sequence is synthesized)
attactatacatatattgacccaataatttgatcaacggaacaagttaccctagggataacagcgcaatcctattctagagtccatattgacaatagggtttacgacctcgatgttggat

SEQ ID NO: 791284 - DNA, 120 bp, Artificial Sequence
  ENSG00000270672_11 (sequence is synthesized)
caggacatcctaatggtgtagctgctatcaagggttcatttgttcaatgattaaagtcctacgtggtctgagttcagaccggagcaagccaggtctggtacatgtgtatttaagtcctcc

SEQ ID NO: 791285 - DNA, 120 bp, Artificial Sequence
  ENSG00000270765_0 (sequence is synthesized)
ccacctcctgccctgctggggtccagccatgtcccagcctgcgggaggcaggaggaagcccaggaccctagggccgcctgtgtgcagtatccggcctttcaagtcgagtgagcagtacct

SEQ ID NO: 791286 - DNA, 120 bp, Artificial Sequence
  ENSG00000270765_1 (sequence is synthesized)
ggaggccatgaaggaagacctggctgagtggcttcgcgacctctatgggctggacatcgacgcagccaacttcctgcaggtgctggaaacgggcctggtgctgtgccaacacgccaacgt

SEQ ID NO: 791287 - DNA, 120 bp, Artificial Sequence
  ENSG00000270765_2 (sequence is synthesized)
tgtcactgacgctgccctggccttcctggctgaggcacctgcccaagcccagaagattcccatgccccgggtcggggtctcctgcaatggggccgcccagccaggtaccttccaggccag

SEQ ID NO: 791288 - DNA, 120 bp, Artificial Sequence
  ENSG00000270765_3 (sequence is synthesized)
ggacaatgtctctaacttcatccagtggtgtcgaaaggagatgggcatccaagaggtgctgatgttcgagacggaggacttggtgctgcgcaagaacgtgaagaacgtggtgctgtgttt

SEQ ID NO: 791289 - DNA, 120 bp, Artificial Sequence
  ENSG00000270765_4 (sequence is synthesized)
gctggagctgggccgccgggcgtggcgctttggtgttgcggcgcccacactcgtgcagctggaggaggagatcgaggaggaggtgcggcgggagctggccctgcccccgcccgacccctc

SEQ ID NO: 791290 - DNA, 120 bp, Artificial Sequence
  ENSG00000270765_5 (sequence is synthesized)
gccgccagcgccccccaggcgccagccctgccacttccgcaacctggaccagatggtgcagagccttgtgagccactgcacgtgcccagtgcagttctccatggtcaaagtgtctgaggg

SEQ ID NO: 791291 - DNA, 120 bp, Artificial Sequence
  ENSG00000270765_6 (sequence is synthesized)
gaagtaccgtgtgggtgactccaacaccctcatcttcatccggatcctccggaaccatgtgatggtacgtgtagggggcggctgggacacactgggccattacctggacaaacatgaccc

SEQ ID NO: 791292 - DNA, 120 bp, Artificial Sequence
  ENSG00000270765_7 (sequence is synthesized)
ctgccgctgcacatccctctcacacaagccaggcagcttcctgaagcccccggccccaccagtgcagcatgaagtaagggtacaggatggaccctcacagacccagcctacaatgaccat

SEQ ID NO: 791293 - DNA, 120 bp, Artificial Sequence
  ENSG00000270765_8 (sequence is synthesized)
cagccgctcacagagcccaccaccccctgtggactggaagacatatacctcttcagaccgaaggctgaggccccccaccccatcctcccccagaccccgcagggaacggggagcagggac

SEQ ID NO: 791294 - DNA, 120 bp, Artificial Sequence
  ENSG00000270765_9 (sequence is synthesized)
gggggcctccagagagatggcaccattcctgaggtgccaggagaggtctctcatcccatcttggaggcagccgacagctggggacagcccacccagcccccagtcctcatctacccaaaa

SEQ ID NO: 791295 - DNA, 120 bp, Artificial Sequence
  ENSG00000270765_10 (sequence is synthesized)
aggccgagacccacagtgtacctcgtcaggaaagagggaggagagatacccccctgaactccccaggggaaggattcccacatcttgggttcatgaagaaacagacagctggggaaccga

SEQ ID NO: 791296 - DNA, 120 bp, Artificial Sequence
  ENSG00000270765_11 (sequence is synthesized)
cgccgggaaccccaccccacaaagactccgagccattgaggccaccaccaaagggatatcagcaagaggaccatctcccctgcctcgttcctttggcccagccgagtgcctgggcctcag

SEQ ID NO: 791297 - DNA, 120 bp, Artificial Sequence
  ENSG00000270765_12 (sequence is synthesized)
atgaggccaagggtgcgttcttccagttcagggagccagagtctgtccgttctccaacccctgtccaaggcctaaccaagatccccatccggctgccccctgctcgccccccaacaccag

SEQ ID NO: 791298 - DNA, 120 bp, Artificial Sequence
  ENSG00000270765_13 (sequence is synthesized)
gaaggagctttcctggtgctacaagtggaagtcccaggacagaacttgggagagaccccatcccactaagggccgtcactgtggacctggctgggtccacgcatggggactgctctgtgg

SEQ ID NO: 791299 - DNA, 120 bp, Artificial Sequence
  ENSG00000270765_14 (sequence is synthesized)
aagtgaggcaggaggaccagcagctggacatccaggtcatggcagaggccagagagtcctgggacctgggcctacaggagcaggaggggcggtacacacctctgcccttgggcgggaaca

SEQ ID NO: 791300 - DNA, 120 bp, Artificial Sequence
  ENSG00000270765_15 (sequence is synthesized)
aggagcaagccatctactgtagccttgaagaggagattttgggcaacatgaagctgctagaagtcaggagtgcctgtccgcagggcacaaggtctggggtcatccctcgcagtggggtct

SEQ ID NO: 791301 - DNA, 120 bp, Artificial Sequence
  ENSG00000270765_16 (sequence is synthesized)
acatccccaggctggctgggcagtggcctgagcctgggggtccttatgacaaagccatccaagaactggctcaggggtccccatccctccttaaagtggacctggaagcctggaaggcag

SEQ ID NO: 791302 - DNA, 120 bp, Artificial Sequence
  ENSG00000270765_17 (sequence is synthesized)
ccccgactggctcccctaagccagctgttaccccaggaccgggaagcctcaaagggaagttgggagccagacagagtgggcccaggacaaaggcaagcctgagtgccaagggcacccaca

SEQ ID NO: 791303 - DNA, 120 bp, Artificial Sequence
  ENSG00000270765_18 (sequence is synthesized)
tgaggaaggtcccacctcagggagggcaggactgctcggcttctactgtgtctgccagcccggaggcccccacaccttcgcccttggaccccaactctgacaaagccaaggcatgtctga

SEQ ID NO: 791304 - DNA, 120 bp, Artificial Sequence
  ENSG00000270765_19 (sequence is synthesized)
gcaagggcaggagaactctccggaagcccaagagggtcccgtccatctacaagctgaagctgagacccaggattcggccccggagagaccacaggcctgagaagcagccttcacgaatcc

SEQ ID NO: 791305 - DNA, 120 bp, Artificial Sequence
  ENSG00000270765_20 (sequence is synthesized)
ccaggccactggcctatgtcttcctgggtccagccaggcagccccccaaggacaggctgttgagagctgtgctgggcagcaagggaggggaggcatcccgggtggatggagcttcagtag

SEQ ID NO: 791306 - DNA, 120 bp, Artificial Sequence
  ENSG00000270765_21 (sequence is synthesized)
gtgaggaggaggaggaaggaaaggaggagaaagagccagccgctccattggagagcagcccccaacctccagagggcctgcaacctcactggcttaatcaagctccacttccacctgagg

SEQ ID NO: 791307 - DNA, 120 bp, Artificial Sequence
  ENSG00000270765_22 (sequence is synthesized)
aggagtcctgggtctgaggcacatgagcgtgttgggtaggagggaagcaaaaaggatggccatgtatacactggattcacagctgcgggaacagaagggatgttccctcacctccacaca

SEQ ID NO: 791308 - DNA, 120 bp, Artificial Sequence
  ENSG00000270765_23 (sequence is synthesized)
gggccttgggcaggagtgggtcagaagacaaatatagactccatctgctcatctgagcaaaggggcaacccactgctctcactccaactccagaggtaggccaggggcagtaggaccatc

SEQ ID NO: 791309 - DNA, 120 bp, Artificial Sequence
  ENSG00000270765_24 (sequence is synthesized)
ctgtatctcattactctcccctagaacggctcaccacactcctggcctctggcccctggccatgcccacctgtttccataactcccataagttattaaatgcatgtgattctgcccttga

SEQ ID NO: 791310 - DNA, 62 bp, Artificial Sequence
  ENSG00000270800_0 (sequence is synthesized)
ttcctttccagccccggtaccggaccctgcagccgcagagatgttgatgcctaagaagaacc

SEQ ID NO: 791311 - DNA, 79 bp, Artificial Sequence
  ENSG00000270800_1 (sequence is synthesized)
ctaagcacccggagctggcagactctcaagtcccgaggctacgtgaaggaacagtttgcctggagacatttctactggt

SEQ ID NO: 791312 - DNA, 120 bp, Artificial Sequence
  ENSG00000270800_2 (sequence is synthesized)
ctactggtaccttaccaatgagggtatccagtatctccgtgattaccttcatctgcccccggagattgtgcctgccaccctacgccgtagccgtccagagactggcaggcctcggcctaa

SEQ ID NO: 791313 - DNA, 120 bp, Artificial Sequence
  ENSG00000270800_3 (sequence is synthesized)
aggtctggagggtgagcgacctgcgagactcacaagaggggaagctgacagagatacctacagacggagtgctgtgccacctggtgccgacaagaaagccgaggctggggctgggtcagc

SEQ ID NO: 791314 - DNA, 120 bp, Artificial Sequence
  ENSG00000270800_4 (sequence is synthesized)
aaccgaattccagtttgtgctactcgtgagcagtagtcgccatccagacagatggattgtccctggaggaggcatggagcccgaggaggagccaagtgtggcagcagttcgtgaagtctg

SEQ ID NO: 791315 - DNA, 120 bp, Artificial Sequence
  ENSG00000270800_5 (sequence is synthesized)
tgaggaggctggagtaaaagggacattgggaagattagttggaatttttgagaaccaggagaggaagcacaggacgtatgtctatgtgctcattgtcactgaagtgctggaagactggga

SEQ ID NO: 791316 - DNA, 120 bp, Artificial Sequence
  ENSG00000270800_6 (sequence is synthesized)
agattcagttaacattggaaggaagagggaatggtttaaaatagaagacgccataaaagtgctgcagtatcacaaacccgtgcaggcatcatattttgaaacattgaggcaaggctactc

SEQ ID NO: 791317 - DNA, 120 bp, Artificial Sequence
  ENSG00000270800_7 (sequence is synthesized)
agccaacaatggcaccccagtcgtggccaccacatactcggtttctgctcagagctcgatgtcaggcatcagatgactgaagacttcctgtaagagaaatggaaattggaaactagactg

SEQ ID NO: 791318 - DNA, 120 bp, Artificial Sequence
  ENSG00000270800_8 (sequence is synthesized)
aagtgcaaatcttccctctcaccctggctctttccacttctcacaggcctcctctttcaaataaggcatggtgggcagcaaagaaagggtgtattgataatgttgctgtttggtgttaag

SEQ ID NO: 791319 - DNA, 120 bp, Artificial Sequence
  ENSG00000270800_9 (sequence is synthesized)
tgatggggctttttcttctgtttttattgagggtgggggttgggtgtgtaatttgtaagtacttttgtgcatgatctgtccctccctcttcccacccctgcagtcctctgaagagaggcc

SEQ ID NO: 791320 - DNA, 120 bp, Artificial Sequence
  ENSG00000270800_10 (sequence is synthesized)
aacagccttcccctgccttggattctgaagtgttcctgtttgtcttatcctggccctggccagacgttttctttgatttttaattttttttttttattaaaagataccagtatgagatga

SEQ ID NO: 791321 - DNA, 120 bp, Artificial Sequence
  ENSG00000270800_11 (sequence is synthesized)
aaacttccaataatttgtcctataatgtgctgtacagttcagtagagtggtcactttcactgcagtatacatttatctacacattatatatcggacatataatatgtaaataaatgactt

SEQ ID NO: 791322 - DNA, 120 bp, Artificial Sequence
  ENSG00000270800_12 (sequence is synthesized)
ctagaaagagaaatttgtttaatttttcaaggtttttttctcttttaatttgggcatttctagaattgagagcctcacaattaacatacctttttgttttcgatgctagtggctgggcag

SEQ ID NO: 791323 - DNA, 120 bp, Artificial Sequence
  ENSG00000270800_13 (sequence is synthesized)
gttgccctgtcctttctctatttcccagtcattgactgtagatatgggaagagtttagctaccttcatagtgctcccaggactcatggcctttccttctttaagctgtatttccctgccc

SEQ ID NO: 791324 - DNA, 120 bp, Artificial Sequence
  ENSG00000270800_14 (sequence is synthesized)
agaaagaaacaggaagaaacctttttttatttttttatttttttttaaccaagcaaggagcaaatggcctcagcccagatctgtaaaaacaatgatagaaattgaattctgccccacatg

SEQ ID NO: 791325 - DNA, 120 bp, Artificial Sequence
  ENSG00000270800_15 (sequence is synthesized)
ttgacagtagagttggaactggattcttgggattacttatctaaaaaactggagcatcaggtccatttctgttctgctggtttggaatcttttccgtaatgctatttattgccaacaatg

SEQ ID NO: 791326 - DNA, 120 bp, Artificial Sequence
  ENSG00000270800_16 (sequence is synthesized)
gcctctctttgtgtccatatatgccttacaccgtgctgacctgggtatcatccatgtgctctgaagcatccaactttactttgcaggtgcatcaatgtagtcctgtccctgaactgagta

SEQ ID NO: 791327 - DNA, 120 bp, Artificial Sequence
  ENSG00000270800_17 (sequence is synthesized)
accgtgttcctgaaaagtacactagggaaattcacctgcttgcttgtctttgtattggcatggcacttgtgattgcaccatggagcatgctcagagctattaaattggtctcccatctcc

SEQ ID NO: 791328 - DNA, 120 bp, Artificial Sequence
  ENSG00000270800_18 (sequence is synthesized)
caccaggatatgaaaggtccatatgggaggccacgtaatcacttattacagtggttacataatacactggctcactgcagactctcttgttttttgatacagtttcgtgctggcttcatt

SEQ ID NO: 791329 - DNA, 120 bp, Artificial Sequence
  ENSG00000270800_19 (sequence is synthesized)
gtactccagtggcatctccttagccaagatgtgaaattaaaatcatagttcgcctcatttaaaaattctaataaagcactcaaactttgaaaagcttttacttttccctcctactaaaag

SEQ ID NO: 791330 - DNA, 120 bp, Artificial Sequence
  ENSG00000270800_20 (sequence is synthesized)
aaagaaatgtatgtacctcatagccctgtgtcatttagtgttcagcacttttgggaacatcagttggtgaactttaaattttgctgtctactcactgggcacggtggctcacacctgtaa

SEQ ID NO: 791331 - DNA, 120 bp, Artificial Sequence
  ENSG00000270800_21 (sequence is synthesized)
aaaaaaaaatttttttttttttttttgctatatactcttagtttacatcctctcccccaatcttcacacacagagccaaagagcagttatattcttgggataccatgatacctctgggaa

SEQ ID NO: 791332 - DNA, 120 bp, Artificial Sequence
  ENSG00000270800_22 (sequence is synthesized)
tctgggaaaggaattatattcccaaggagaggtcccattggataagaacaataccatgggacttgagtctgaatgccaacttactattcacacatccttcttaaaaacgaacacactgtt

SEQ ID NO: 791333 - DNA, 120 bp, Artificial Sequence
  ENSG00000270800_23 (sequence is synthesized)
tcttttcctgacctagagcattctaaagttctgttcaaataaataaagggcaaaataaagtagatttaaccaagtgccaggtggaattcaaaaaacacattcttccagataaattctacc

SEQ ID NO: 791334 - DNA, 120 bp, Artificial Sequence
  ENSG00000270800_24 (sequence is synthesized)
aaacacattcttccagataaattctacctttatggtatggatttgaaagtactttgcaggaaaacagtcagtactctttaaaaagggactgcagggctgggtgtagtggctcacacctgt

SEQ ID NO: 791335 - DNA, 60 bp, Artificial Sequence
  ENSG00000270800_25 (sequence is synthesized)
tcctgtaatcccagctacttggtaggctgaagcatgagaattgcttaaacctgggaggca

SEQ ID NO: 791336 - DNA, 120 bp, Artificial Sequence
  ENSG00000270800_26 (sequence is synthesized)
gaaaataaaacggaactgcagtgctaacagtaatttatacatttttaaatgttctgagtatgttttgactgggctagtgtaacaatatactaccctgaaagtgcagttttgattgttgtt

SEQ ID NO: 791337 - DNA, 120 bp, Artificial Sequence
  ENSG00000270800_27 (sequence is synthesized)
ggtgtctttgggtcaggaaagtgaactgtgccaagaagtatttttcagtgacatgaatggattcctgttaatgcaattgactgagagattgtgcttacgctttcttaactgacaaaaaga

SEQ ID NO: 791338 - DNA, 120 bp, Artificial Sequence
  ENSG00000270800_28 (sequence is synthesized)
ggctttgtccaacatcagaattgttgaaactggtgctgttttctgttgcactgggattctgatgatctgggattttccctccttggcacagtaaacaccatgactgtctttattgagaat

SEQ ID NO: 791339 - DNA, 120 bp, Artificial Sequence
  ENSG00000270800_29 (sequence is synthesized)
gtcgtcacagtcctttagtgatagattagttagacccatggttgcaatacctttatctccccaaagaaaataatcaaaagaaagcacaaaagctaccctgtttgcagaatatttcactga

SEQ ID NO: 791340 - DNA, 120 bp, Artificial Sequence
  ENSG00000270800_30 (sequence is synthesized)
cattgatttgtcattaattctaccagagctgacctcattcaggcttgatagaaacaggttcctatgtttagggcagatccctagcctctcgctcacagtgagtctgcatgtcctagattc

SEQ ID NO: 791341 - DNA, 120 bp, Artificial Sequence
  ENSG00000270800_31 (sequence is synthesized)
tggttattgctggagcatccattaaagtctaccaaactcaggacagaagaagatagcagtggatttgtaaaaatttttagtttataaattacagtcattggggaaacactagtaaggtca

SEQ ID NO: 791342 - DNA, 120 bp, Artificial Sequence
  ENSG00000270800_32 (sequence is synthesized)
tgtgatcttttggaccaggattttctctctgtcttctctctgggtgtgtgtgtgtgtatgtacagaagggctaccaggaagtgtcaaccatgttagattttctgtagtcttccagaaaca

SEQ ID NO: 791343 - DNA, 120 bp, Artificial Sequence
  ENSG00000270800_33 (sequence is synthesized)
gtgcagcccatacaacaggaatcttaattttcctcacagcaaatataacaggatggaacagttagtgttttgttttcacaagtgtccaccactccatctgccctgcatggagagggctct

SEQ ID NO: 791344 - DNA, 120 bp, Artificial Sequence
  ENSG00000270800_34 (sequence is synthesized)
ctcactgctagatctaggctgagccatctggaaggatcaaagggtgtgggagtatcaccccctctcaggctgcagaaggtctcgagggtggcgtcacagcaggatttccgccttctgcat

SEQ ID NO: 791345 - DNA, 120 bp, Artificial Sequence
  ENSG00000270800_35 (sequence is synthesized)
tgcactgcacagccccatggaacatgaggcacttgaggccttgcttcttggagcctctggggagcagagtaggtcactgccctctgggagtgttttgcagtagttttgtaaatgtgttgc

SEQ ID NO: 791346 - DNA, 120 bp, Artificial Sequence
  ENSG00000270800_36 (sequence is synthesized)
cctgcagccgcagaggtgagtttctgtggcgttcgagttccatcggctcccatccgggctatcctgccgccttagcggctgcttctccccaggatgcgggcagggggcctctctcccact

SEQ ID NO: 791347 - DNA, 120 bp, Artificial Sequence
  ENSG00000270800_37 (sequence is synthesized)
ccccacacaccgatttctgagtagcgataggggctggaggcttattttatggggtagggggccgctggtaggcgaagattgtccgagggagagggggaggatgaagccagtgagtggcgg

SEQ ID NO: 791348 - DNA, 120 bp, Artificial Sequence
  ENSG00000270800_38 (sequence is synthesized)
tgccaggtgagactagcgagacggtgtcccaccgacacgcttttttcttgggaacaggactcccccgactgcctccttgcctggcactggagctctagtttgggggagaagtggtaggta

SEQ ID NO: 791349 - DNA, 120 bp, Artificial Sequence
  ENSG00000270806_0 (sequence is synthesized)
accctctcacatcccagtctctgatcagggaaagcagggcacagccttgggaagaatggataagcatggtgtgaagacccccttgtggaagaaggaaacggaagagctccgggccgagga

SEQ ID NO: 791350 - DNA, 120 bp, Artificial Sequence
  ENSG00000270806_1 (sequence is synthesized)
cgcggagcaagaggaagggaaggaggggtcggaggacgaggacgaggacaaccagaggccgctggaggacagcgcgacggagggcgaggagccgccgcgggtagcggaggagggcgaagg

SEQ ID NO: 791351 - DNA, 120 bp, Artificial Sequence
  ENSG00000270806_2 (sequence is synthesized)
ccgcgagcggcgctcagtgtcctactgcccgctgcgccaggagtccagcacccagcaggtggcgctgctgcggcgcgcggacagcggcttctggggctggctcggccccttagcgctgct

SEQ ID NO: 791352 - DNA, 120 bp, Artificial Sequence
  ENSG00000270806_3 (sequence is synthesized)
gggcggcctaacagctcccaccgacaggaagcggagcctcccggaggagccgtgcgtgctggagatccggcgacgaccgccgcgccgcgggggctgtgcttgctgcgagctcctcttctg

SEQ ID NO: 791353 - DNA, 120 bp, Artificial Sequence
  ENSG00000270806_4 (sequence is synthesized)
ggccgctgggaactcctgagcgcccccgctcccagcctttgtgccctccatcatttcctggccccagaccccctaccgaccttctctcttggagcgcggagccctcttcgacgcattccg

SEQ ID NO: 791354 - DNA, 120 bp, Artificial Sequence
  ENSG00000270806_5 (sequence is synthesized)
caggaccgccccttctcagctgctgcccagagcgcccccatccgtcaagaaggcccactgttggtgcttggttcccatctgtcacctagcgcccccagtgcagagcccagcataacctag

SEQ ID NO: 791355 - DNA, 120 bp, Artificial Sequence
  ENSG00000270806_6 (sequence is synthesized)
agcccgctgtcaacagcgcccaccgagggctccccgcccccacgcagcaccagcgccaccgcacacctgactctgtccgctcacacagcctcaccttcacctcttgggtatttcagatcc

SEQ ID NO: 791356 - DNA, 120 bp, Artificial Sequence
  ENSG00000270806_7 (sequence is synthesized)
gctctggcccagtgggcagaggcatcgcctagagaaaataacctcagggttccctcatccctctgacaaacctgcctctttccctgaaaccattcaataaaacctctgatcaaagtgtca

SEQ ID NO: 791357 - DNA, 120 bp, Artificial Sequence
  ENSG00000270806_8 (sequence is synthesized)
gatcagggaaagcagggcacagccttgggaagaatggataagcatgcaggactgccctgacctcctcccggcccgcaggtgtgaagacccccttgtggaagaaggaaacggaagagctcc

SEQ ID NO: 791358 - DNA, 120 bp, Artificial Sequence
  ENSG00000270882_0 (sequence is synthesized)
aagctgtctatcgggctccagcggtcatgtccggcagaggaaagggcggaaaaggcttaggcaaagggggcgctaagcgccaccgcaaggtcttgagagacaacattcagggcatcacca

SEQ ID NO: 791359 - DNA, 120 bp, Artificial Sequence
  ENSG00000270882_1 (sequence is synthesized)
agcctgccattcggcgtctagctcggcgtggcggcgttaagcggatctctggcctcatttacgaggagacccgcggtgtgctgaaggtgttcctggagaatgtgattcgggacgcagtca

SEQ ID NO: 791360 - DNA, 120 bp, Artificial Sequence
  ENSG00000270882_2 (sequence is synthesized)
cgctccagctttgcacgtttcgatcccaaaggccctttttagggccgaccacttgctcatctgaggagttggacacttgactgcgtaaagtgcaacagtaacgatgttggaaggtaactt

SEQ ID NO: 791361 - DNA, 120 bp, Artificial Sequence
  ENSG00000270882_3 (sequence is synthesized)
tggcagtggggcgacaatcggatctgaagttaacggaaagctaccgcggcccatagcgctcacagccgtaaagacttaagtcgttgaccgaaagcggctttttcacttacctgggctttt

SEQ ID NO: 791362 - DNA, 120 bp, Artificial Sequence; identical to SEQ ID NO: 791132
  ENSG00000270882_4 (sequence is synthesized)

SEQ ID NO: 791363 - DNA, 120 bp, Artificial Sequence
  ENSG00000270882_5 (sequence is synthesized)
ctttatcggtatgaaaggttgaatgctctaggtttgagcactgctttctcggcttgctcttctggtgcagtataggcacacctagagggccacgtcagtctttgcgatcaccaaatctgg

SEQ ID NO: 791364 - DNA, 120 bp, Artificial Sequence
  ENSG00000270882_6 (sequence is synthesized)
ccggctttcccacctgatcggcttagagttcacgattgactgttttgggcttcatttcaccctctacataacaagcgggtggactagatgccttagcaagggtccgtgttgtgtggtgtc

SEQ ID NO: 791365 - DNA, 120 bp, Artificial Sequence
  ENSG00000270882_7 (sequence is synthesized)
tccagccacgcactcagctcaatcttagcacagttaaaaaatgcctttctagcaagttatctgcccagtgcctgaaaagtatcatttcttgtgttcaataaaaagcctcctaatttaatc

SEQ ID NO: 791366 - DNA, 120 bp, Artificial Sequence
  ENSG00000270882_8 (sequence is synthesized)
aaggacctatgagataactgtcttttagttgtggcattgcaaggatacaaatgcagagatattttaaagtgatccttctgtaagagtgaaccaacgatatgatctgaaagcaacttcaca

SEQ ID NO: 791367 - DNA, 120 bp, Artificial Sequence
  ENSG00000270882_9 (sequence is synthesized)
ggtaattcaggcttatgattttactgtgtatgtatttgggagaagaaattctgtcagctcccaaaggataaaccagcagttgctttattggtcttcagatgtggctgcaaacacttgaga

SEQ ID NO: 791368 - DNA, 120 bp, Artificial Sequence
  ENSG00000270882_10 (sequence is synthesized)
ctgaactaagcttaaaacacggtacttagcaatcgggttgccagcaaagcactggatgcaagccttgccttccagaagcttaccagtcgggttgccagcaaagcagtggatgcaagactt

SEQ ID NO: 791369 - DNA, 120 bp, Artificial Sequence
  ENSG00000270882_11 (sequence is synthesized)
gccctccaggagcttaccatcacaacgaagaagacaaataaatgcataatatatagacgacataaatccatactgtacacatttaagaataaacagtccagtagtaagaggcagtacata

SEQ ID NO: 791370 - DNA, 120 bp, Artificial Sequence; identical to SEQ ID NO: 791137
  ENSG00000270882_12 (sequence is synthesized)

SEQ ID NO: 791371 - DNA, 120 bp, Artificial Sequence
  ENSG00000270885_0 (sequence is synthesized)
cgcgctccggagggagagctggggctggaggttcctaccccctcggcggcccgcatctgcccccgcgcgcccgccctgagcccgccccgactgggcaggcgggggagcccctacttctct

SEQ ID NO: 791372 - DNA, 80 bp, Artificial Sequence
  ENSG00000270885_1 (sequence is synthesized)
ggagcccggggggagctcagccccgccgaccggccggccagggcagggggcagctaggacggccccggtccaggtggagg

SEQ ID NO: 791373 - DNA, 120 bp, Artificial Sequence
  ENSG00000270885_2 (sequence is synthesized)
tccaggtggaggccgcagagggcccagggcaagcagaggcagcaatggttggtcctgacggtggctgagcccccagcccctggaatatgcagcccgggggagccccagacagcggcaagg

SEQ ID NO: 791374 - DNA, 120 bp, Artificial Sequence
  ENSG00000270885_3 (sequence is synthesized)
acgaggtggcggagtggggcgggaggcatggtctccacctaccgggtggccgtgctgggggcgcgaggtgtgggcaagagtgccatcgtgcgccagttcttgtacaacgagttcagcgag

SEQ ID NO: 791375 - DNA, 120 bp, Artificial Sequence
  ENSG00000270885_4 (sequence is synthesized)
gtctgcgtccccaccaccgcccgccgcctttacctgcctgctgtcgtcatgaacggccacgtgcacgacctccagatcctcgactttccacccatcagcgccttccctgtcaatacgctc

SEQ ID NO: 791376 - DNA, 120 bp, Artificial Sequence
  ENSG00000270885_5 (sequence is synthesized)
caggagtgggcagacacctgctgcaggggactccggagtgtccacgcctacatcctggtctacgacatctgctgctttgacagctttgagtacgtcaagaccatccgccagcagatcctg

SEQ ID NO: 791377 - DNA, 120 bp, Artificial Sequence
  ENSG00000270885_6 (sequence is synthesized)
gagacgagggtgatcggaacctcagagacgcccatcatcatcgtgggcaacaagcgggacctgcagcgcggacgcgtgatcccgcgctggaacgtgtcgcacctggtacgcaagacctgg

SEQ ID NO: 791378 - DNA, 120 bp, Artificial Sequence
  ENSG00000270885_7 (sequence is synthesized)
aagtgcggctacgtggaatgctcggccaagtacaactggcacatcctgctgctcttcagcgagctgctcaagagcgtcggctgcgcccgttgcaagcacgtgcacgctgccctgcgcttc

SEQ ID NO: 791379 - DNA, 120 bp, Artificial Sequence
  ENSG00000270885_8 (sequence is synthesized)
gcaaccgctgcgccatcatgtgacgcctgcgcgcccctcgggctgcaccggcactggccgagcggagggcggggccgtactgcggggctggggcggggagcgggcgggaaatggaactgt

SEQ ID NO: 791380 - DNA, 120 bp, Artificial Sequence
  ENSG00000270885_9 (sequence is synthesized)
cgggaaatggaactgtgacggtcccggcctgaggcccctgcagccacgcacctcccggtgagaagcagagcgcgagagggagccctccgtaactgcccagccctgccccttgcccccgtg

SEQ ID NO: 791381 - DNA, 120 bp, Artificial Sequence
  ENSG00000270885_10 (sequence is synthesized)
gcttcctgggacagccgccttcagtgctgtatttagtgcagtgcccggcccgacccgcgggggtgccacagccttttgggatgggggtgagcgtgcaatggaggctgggggtggcgaggt

SEQ ID NO: 791382 - DNA, 120 bp, Artificial Sequence
  ENSG00000270885_11 (sequence is synthesized)
gccgccttggccgggcccccacgtgtcttctccagaatgtgtctgtctttgcctggtgtcttcctttcccgtgtccgcccaccccagcgtctgttggtacttacctgtctcacctaccct

SEQ ID NO: 791383 - DNA, 120 bp, Artificial Sequence
  ENSG00000270885_12 (sequence is synthesized)
ccagtcccctcccagctccgctcacagggctctcatttcgtccatccccttgtcgcagatcctggcagcttctttgtgaggccaggccttctgactgtcagcaccaccggcacagggcag

SEQ ID NO: 791384 - DNA, 120 bp, Artificial Sequence
  ENSG00000270885_13 (sequence is synthesized)
agacctccccgcccagcagcccccagagacacaacaacctaccttccagccttaactcgatggtccgtccctgccaggtgcccctcactcttcctgaccccaaagccagatcaccccctg

SEQ ID NO: 791385 - DNA, 120 bp, Artificial Sequence
  ENSG00000270885_14 (sequence is synthesized)
ggttaaaactttttttcttttttttttttggacagagtgtggaaagggagccccccaaaggatagcttctttttcatgatgccaggctccagtcctttattcccttctgcatactgcaat

SEQ ID NO: 791386 - DNA, 120 bp, Artificial Sequence
  ENSG00000270885_15 (sequence is synthesized)
ctgatctgtcagactggggaatgttgggttctggggtctggtcgtgggcaggatggtgcccagaagggggttaggttgtcccagtgaaaattctgttgccccgtctcaaccccatctgac

SEQ ID NO: 791387 - DNA, 120 bp, Artificial Sequence
  ENSG00000270885_16 (sequence is synthesized)
taccccagactctgcctgcctcagatctcagactatcctgattaatctggggaagaacagagccagggaaagaatggtggggacccctgtacttgggggagacacacctgcatcttcctc

SEQ ID NO: 791388 - DNA, 120 bp, Artificial Sequence
  ENSG00000270885_17 (sequence is synthesized)
ctgccacagatggaggccctcaggatctgacaccctcttgtcccaacaccagtcagccctataccctaactcactccaccccattttctccggctgcctggccgggtttctacctctcgt

SEQ ID NO: 791389 - DNA, 120 bp, Artificial Sequence
  ENSG00000270885_18 (sequence is synthesized)
caccggagctgatcactgtcagttttgtaccgatttagaaataacaataataatgaagattctaggaatggcatgagggattgatgggggacttggagggagggacaagtggtgccctgt

SEQ ID NO: 791390 - DNA, 120 bp, Artificial Sequence
  ENSG00000270885_19 (sequence is synthesized)
cccctgctcccctggccaaagaaagctgtccttgaggctgagccctcagccctggcctggtggggggacagcaaggtcccttgttataagaggggcagagaggacaactccgctttggcc

SEQ ID NO: 791391 - DNA, 120 bp, Artificial Sequence
  ENSG00000270885_20 (sequence is synthesized)
aacctagccaaggctgcagcatatagaccaggaaatcaggtagcccagactggtgatggagcagagtctgggggaagggtcgtgggtggggaatttatcaccaacatccattgtaggggg

SEQ ID NO: 791392 - DNA, 120 bp, Artificial Sequence
  ENSG00000270885_21 (sequence is synthesized)
aatctatgattctgcttccccagcggattcccactctgtccaccaagtggggggtagcacagcctcacagcaaccgccctgaccttgggcagtctagtgttcctgcattctagtccctgc

SEQ ID NO: 791393 - DNA, 120 bp, Artificial Sequence
  ENSG00000270885_22 (sequence is synthesized)
tgtgctgcaggactttgggcaagtgacctgccctctgtgagcctccctctgacacagaggaggtggctccccttccccacaccttagagtggctgggagggtaacaaagagggcctgccc

SEQ ID NO: 791394 - DNA, 120 bp, Artificial Sequence
  ENSG00000270885_23 (sequence is synthesized)
ctttagtctcctgcacccctgccccctggttcaccagagggagcggatgaaggatggcagcatctcacatgccccatcaccaactctgaggcacctggggtgggggggcggagcccaggc

SEQ ID NO: 791395 - DNA, 120 bp, Artificial Sequence
  ENSG00000270885_24 (sequence is synthesized)
ctctggctgctcccctgtgggagccattggaatgtatcccctgacaggcccccttccgcctccacctcaacccaggtcttggatttcaggtccctccacccccattctgagtctctgtcc

SEQ ID NO: 791396 - DNA, 120 bp, Artificial Sequence
  ENSG00000270885_25 (sequence is synthesized)
ttctccttccacccgctcccagggtttcccaccacagggtctggaagtgtgtgtgacgcccattgagctgttacccgaagtcagattaaaaatcagggagtgttttccctcgtttctgta

SEQ ID NO: 791397 - DNA, 62 bp, Artificial Sequence
  ENSG00000270885_26 (sequence is synthesized)
cgtgcacgacctccagatcctcgactttccacccatcagcgccttccctgtcaatacgctcc

SEQ ID NO: 791398 - DNA, 120 bp, Artificial Sequence; identical to SEQ ID NO: 790465
  ENSG00000270946_0 (sequence is synthesized)

SEQ ID NO: 791399 - DNA, 120 bp, Artificial Sequence
  ENSG00000270946_1 (sequence is synthesized)
ggaaacaaggagcaggagacagccttattgcaggctctgccatgtccaaagaaaagaagcttatgacaggacatgctattccacccagccaattggattctcagattgatgacttcactg

SEQ ID NO: 791400 - DNA, 120 bp, Artificial Sequence
  ENSG00000270946_2 (sequence is synthesized)
gtttcagcaaagataggatgatgcagaaacctggtagcaatgcacctgtgggaggaaacgttaccagcagtttctctggagatgacctagaatgcagagaaacagccttctctcccaaaa

SEQ ID NO: 791401 - DNA, 120 bp, Artificial Sequence
  ENSG00000270946_3 (sequence is synthesized)
cgatgcgttggacaaaaatatgaaaaaatcttcgaaatgcttgaaggagtgcaaggacctactgcagtcaggaaacgattttttgaatccatcatcaaggaagcagcaagatgtatgaga

SEQ ID NO: 791402 - DNA, 120 bp, Artificial Sequence
  ENSG00000270946_4 (sequence is synthesized)
cgagactttgttaagcaccttaagaagaaactgaaacgtatgatttgagaatacttgtccctggaggattatcacaccccaaatgcataatctcattaatgattgaggagagaaaaggat

SEQ ID NO: 791403 - DNA, 120 bp, Artificial Sequence
  ENSG00000270946_5 (sequence is synthesized)
cagattgctgttttctacaatggagcaggatattgctgaagtctcctggcatatgttaccgaatcaactggccttccagaggctaagaaatttctgttagtaaaagatgttctttttccc

SEQ ID NO: 791404 - DNA, 120 bp, Artificial Sequence
  ENSG00000270946_6 (sequence is synthesized)
agtgttcggctggggcaggcacgctgtggctggctacttcccttcctcccatcccccttgggccaaacgggatcggtgcttctggtgagacgcctccccatgcacatcactcccaggtgc

SEQ ID NO: 791405 - DNA, 120 bp, Artificial Sequence
  ENSG00000270946_7 (sequence is synthesized)
aagcgttttatttgaaaggataacttgtgttttggttattttgtattcccacctgtgctggtagatattattaacccattaggtaaatactattacagtcgtggtttctgcagcagctca

SEQ ID NO: 791406 - DNA, 120 bp, Artificial Sequence
  ENSG00000270946_8 (sequence is synthesized)
cactgatgtagctggcgtttataactaccttctttcgctacccgtttcgcattccctttgccctgagatagcatgtcagttggtcatgatgcttggcctggcaggatgactcaaaccttc

SEQ ID NO: 791407 - DNA, 120 bp, Artificial Sequence
  ENSG00000270946_9 (sequence is synthesized)
attacggaagagtctgaaccattagatatcctgcctggatggggttgctgtgattttccattaactctaatcgaaaaacacgggaggactaagaagctctctagacatatcacacatact

SEQ ID NO: 791408 - DNA, 120 bp, Artificial Sequence
  ENSG00000271079_0 (sequence is synthesized)
agagcagcctcgacgctatggaggagcccggtgctacccctcagccctacctggggctggtcctggaggagctacgcagagttgtggcagcactacctgagagtatgagaccagatgaga

SEQ ID NO: 791409 - DNA, 120 bp, Artificial Sequence
  ENSG00000271079_1 (sequence is synthesized)
ctgagagtatgagaccagatgagaatccttatggttttccatcggaactggtggtatgtgcagctgttattggattttttgttgttctcctttttttgtggagaagttttagatcggtta

SEQ ID NO: 791410 - DNA, 120 bp, Artificial Sequence
  ENSG00000271079_2 (sequence is synthesized)
agcaaaaacttggtgcaacgctttctggactaattgaagaaaaatgtaaactacttgaaaagtttagccttattcaaaaagagtatgaaggctatgaagtagagtcatctttagaggatg

SEQ ID NO: 791411 - DNA, 120 bp, Artificial Sequence
  ENSG00000271079_3 (sequence is synthesized)
ccagctttgagaaggcggcagcagaagaagcacgaagtttggaggcaacctgtgaaaagctgaacaggtccaattctgaacttgaggatgaaatcctctgtctagaaaaagacttaaaag

SEQ ID NO: 791412 - DNA, 120 bp, Artificial Sequence
  ENSG00000271079_4 (sequence is synthesized)
aagagaaatctaaacattctcaacaagatgaattgatggcggatatttcaaaaagtatacagtctctagaagatgagtcaaaatccctcaaatcacaaatagctgaagccaaaatcatct

SEQ ID NO: 791413 - DNA, 120 bp, Artificial Sequence
  ENSG00000271079_5 (sequence is synthesized)
gcaagacatttaaaatgagtgaagaacgacgggctatagcaataaaagatgctttgaatgaaaattctcaacttcagacaagccataaacagctttttcagcaagaagctgaagtatgga

SEQ ID NO: 791414 - DNA, 120 bp, Artificial Sequence
  ENSG00000271079_6 (sequence is synthesized)
gaaaataacatttgaagactccaaagtacacgcagaacaagttctgaatgataaagaaaatcacatcaagaccctgactggacacttgccaatgatgaaagatcaggctgctgtgcttga

SEQ ID NO: 791415 - DNA, 120 bp, Artificial Sequence
  ENSG00000271079_7 (sequence is synthesized)
tgatgaaagatcaggctgctgtgcttgaagaagacacaacggatgatgataacctggaattagaagtgaacagtcaatgggaaaatggtgctaacttagatgatcctctgaaaggagctt

SEQ ID NO: 791416 - DNA, 120 bp, Artificial Sequence
  ENSG00000271079_8 (sequence is synthesized)
tgaagaaactgattcatgctgctaagttaaatgtttctttaaaaagcttagaaggagaaagaaaccacattattattcagttatctgaagtggacaaaacaaaggaagagcttacagagc

SEQ ID NO: 791417 - DNA, 90 bp, Artificial Sequence
  ENSG00000271079_9 (sequence is synthesized)
ttatctgaagtggacaaaacaaaggaagagcttacagagcatattaaaaatcttcagactcaacaagcatctttgcaatcagaaaacata

SEQ ID NO: 791418 - DNA, 120 bp, Artificial Sequence
  ENSG00000271079_10 (sequence is synthesized)
tagagtggaagaaaagctcagccgtgccactgaacagctggagacctatagaaagctagccaaagatcttgaagaagaattggagagaactgttcatttttatcaaaagcaggttatttc

SEQ ID NO: 791419 - DNA, 120 bp, Artificial Sequence
  ENSG00000271079_11 (sequence is synthesized)
ctacgagaaaagaggacatgataattggttggcagctcggactgctgaaagaaacctcagtgatttaaggaaagaaaatgctcacaacaaacaaaaattaactgaaacagagttgaaatt

SEQ ID NO: 791420 - DNA, 120 bp, Artificial Sequence
  ENSG00000271079_12 (sequence is synthesized)
tgaacttttagaaaaagatcctaatgcacttgatgtttcaaatacagcatttggcagagagcatgccccgaatggtcccgcaccattgggtcagcgttcatctgaaacgagagcttttct

SEQ ID NO: 791421 - DNA, 120 bp, Artificial Sequence
  ENSG00000271079_13 (sequence is synthesized)
ctctcctcaaactttgttggaggatccactgggactctcacctgtgcttccggagggaggaggaagaggcccaagaggcccagggaatcccctggaccatcagattaccaatgaaagagg

SEQ ID NO: 791422 - DNA, 120 bp, Artificial Sequence
  ENSG00000271079_14 (sequence is synthesized)
agaaccaagctgtgacaggttaaccgatcctcacagggctccttctgacactgggtccctgtcatctccggtggaacaggactgtaagatgatgtttcctccaccaggacaatcatatcc

SEQ ID NO: 791423 - DNA, 120 bp, Artificial Sequence
  ENSG00000271079_15 (sequence is synthesized)
tgattcagctcttcctcctcaaagggaagacagattttattctaattctgaaagactgtctggatcagcagaacccagaagttttaaaatgacttctttggataaaatggatgggtcaat

SEQ ID NO: 791424 - DNA, 120 bp, Artificial Sequence
  ENSG00000271079_16 (sequence is synthesized)
gccttcagaaatggaatccagtagaaatgatgccaaagatgatcttggtaatttaaatgtgcctgattcatctctccctgctgaaaatgaagcaactggccctggctttattcctccacc

SEQ ID NO: 791425 - DNA, 120 bp, Artificial Sequence
  ENSG00000271079_17 (sequence is synthesized)
tcttgctccagtcagaggaccattgtttccagtggatacaaggggcccgttcatgagaagaggacctcctttccccccacctcctccaggaaccatgtttggagcttctcgaggttattt

SEQ ID NO: 791426 - DNA, 120 bp, Artificial Sequence
  ENSG00000271079_18 (sequence is synthesized)
tccaccaagggatttcccaggtccaccacatgctccatttgcaatgagaaacatctacccaccgaggggtttacctccttactttcacccgagacctggattttaccccaaccccgcatt

SEQ ID NO: 791427 - DNA, 120 bp, Artificial Sequence
  ENSG00000271079_19 (sequence is synthesized)
ctgaaggtagaagcgagttcccttcaggattgattccgcctttaatgctactgaacatccaggaccacaaaagaaacctgacaatattgttgctttcttcaaaagtaattttgactgatc

SEQ ID NO: 791428 - DNA, 120 bp, Artificial Sequence
  ENSG00000271079_20 (sequence is synthesized)
tcattttcagtttaagtaactgctattacttaagtgattgcacttttgctcaaattgaagtttaatggaattataattctcaggatagtattttgtaaataaagatgttttaaataggaa

SEQ ID NO: 791429 - DNA, 66 bp, Artificial Sequence
  ENSG00000271130_0 (sequence is synthesized)
taaaaggtgggtccctgagactgtcctgtccagcctctggattcaccttcagtaaccactacatga

SEQ ID NO: 791430 - DNA, 120 bp, Artificial Sequence
  ENSG00000271130_1 (sequence is synthesized)
caaactacgcagactctgtgaagggccgattcaccatctccagggacaacgccaataactcaccgtatctgcaaatgaacagcctgagagctgaggacacggctgtgtattactgtgtga

SEQ ID NO: 791431 - DNA, 120 bp, Artificial Sequence
  ENSG00000271178_0 (sequence is synthesized)
ctacgcagactccatgaagggccaattcaccatctccagagacaatgctaagaacacgctgtatctgcaaatgaacagtctgagagctgaggacatggctgtgtattactgtactagaga

SEQ ID NO: 791432 - DNA, 120 bp, Artificial Sequence
  ENSG00000271271_0 (sequence is synthesized)
ggatggtttccataagggattttaccatgcctaagaagtttgtccagatgctggtttttaatttgactctgactgaagttgttctaagtgggaatgtgttaatttggcctacagatggta

SEQ ID NO: 791433 - DNA, 120 bp, Artificial Sequence
  ENSG00000271271_1 (sequence is synthesized)
gccattggttaaatattaagattattctagaagagttgattcaaagaaatcacaatgtgactgtactggcttcatcagcaactctattcatcaactccaatcccgattctcctgtgaatt

SEQ ID NO: 791434 - DNA, 120 bp, Artificial Sequence
  ENSG00000271271_2 (sequence is synthesized)
ttgaagtgatacctgtttcctacaagaagagcaatatagattccttaattgagcatatgataatgctgtggattgaccatagaccaactcctctcacaatatgggctttctacaaagaac

SEQ ID NO: 791435 - DNA, 120 bp, Artificial Sequence
  ENSG00000271271_3 (sequence is synthesized)
taggaaaacttctagacactttctttcaaattaacatacaactctgtgatggtgtactaaagaacccaaagttgatggcaagacttcagaaaggtggttttgatgtgttggtagcagacc

SEQ ID NO: 791436 - DNA, 120 bp, Artificial Sequence
  ENSG00000271271_4 (sequence is synthesized)
cagtaacaatctgtggtgatcttgttgctctgaaattaggaattccatttatgtacacattgaggttctctccagcatcaacagtggagagacactgtgggaaaatcccagcaccagtct

SEQ ID NO: 791437 - DNA, 120 bp, Artificial Sequence
  ENSG00000271271_5 (sequence is synthesized)
cctatgtaccggcagccttatcagagctcactgaccagatgacctttggtgaaaggattaaaaataccatatcttattctctgcaagactatatatttcagtcctactggggagaatgga

SEQ ID NO: 791438 - DNA, 120 bp, Artificial Sequence
  ENSG00000271271_6 (sequence is synthesized)
cctaattttgagtttgttggaggattgcactgcaaacctgccaaacctttacctaaggaaatggaagaatttatccagagctcaggtaaaaatggtgttgtggtgttttctctgggatca

SEQ ID NO: 791439 - DNA, 120 bp, Artificial Sequence
  ENSG00000271271_7 (sequence is synthesized)
atggtcaaaaaccttacagaagaaaaggccaatcttattgcctcagcccttgcccagattccacagaaggttttatggagatacaaaggaaagaaaccagccacattaggaaacaatact

SEQ ID NO: 791440 - DNA, 120 bp, Artificial Sequence
  ENSG00000271271_8 (sequence is synthesized)
cagctctttgattggataccccagaatgatcttcttggacatcccaaaaccaaagcttttatcactcatggtggaactaatgggatctacgaagctatttaccacggagtccctatggtg

SEQ ID NO: 791441 - DNA, 120 bp, Artificial Sequence
  ENSG00000271271_9 (sequence is synthesized)
ggagttcccatgtttgctgatcagcctgataacattgctcacatgaaggccaaaggagcagctgtggaagtgaacctaaacacaatgacaagtgtggatttgcttagcgctttgagaaca

SEQ ID NO: 791442 - DNA, 120 bp, Artificial Sequence
  ENSG00000271271_10 (sequence is synthesized)
gtcattaatgaaccttcttataaagagaatgctatgaggttatcaagaattcaccatgatcaacctgtaaagcccctggatcgagcagtcttctggatcgagtttgtcatgcgccacaaa

SEQ ID NO: 791443 - DNA, 120 bp, Artificial Sequence
  ENSG00000271271_11 (sequence is synthesized)
ggagccaagcaccttcgggttgcagcccatgacctcacctggttccagtaccactctttggatgtaattgggttcttgctggtctgtgtgacaacggctatatttttggtcatacaatgt

SEQ ID NO: 791444 - DNA, 120 bp, Artificial Sequence
  ENSG00000271271_12 (sequence is synthesized)
tgtttgttttcctgtcaaaaatttggtaagataggaaagaagaaaaaaagagaataggtcaagaaaaagaggaaatatatatatttttaagtttggcaaaatcctgagtagtgtagtcct

SEQ ID NO: 791445 - DNA, 80 bp, Artificial Sequence
  ENSG00000271303_0 (sequence is synthesized)
cggcacctggcgagcggagccggagtcgggctggggaccgcggggtcgaggccggaccgcggcggggtcgggggagaaac

SEQ ID NO: 791446 - DNA, 80 bp, Artificial Sequence
  ENSG00000271303_1 (sequence is synthesized)
gaatggtatggcccggccggagttaaggccggggggaggcggcgagtcccgcggcggcggcgacgatggggctgcgtgca

SEQ ID NO: 791447 - DNA, 120 bp, Artificial Sequence
  ENSG00000271303_2 (sequence is synthesized)
ccgaggggcccgggccgagcggcggcgcgcagggcggcagcatccactcgggccgcatcgccgcggtgcacaacgtgccgctgagcgtgctcatccggccgctgccgtccgtgttggacc

SEQ ID NO: 791448 - DNA, 120 bp, Artificial Sequence
  ENSG00000271303_3 (sequence is synthesized)
ccgccaaggtgcagagcctcgtggacacgatccgggaggacccagacagcgtgccccccatcgatgtcctctggatcaaaggggcccagggaggtgactacttctactcctttgggggct

SEQ ID NO: 791449 - DNA, 120 bp, Artificial Sequence
  ENSG00000271303_4 (sequence is synthesized)
gccaccgctacgcggcctaccagcaactgcagcgagagaccatccccgccaagcttgtccagtccactctctcagacctaagggtgtacctgggagcatccacaccagacttgcagtagc

SEQ ID NO: 791450 - DNA, 120 bp, Artificial Sequence
  ENSG00000271303_5 (sequence is synthesized)
agcctccttggcacctgctgccaccttcaagagcccagaagacacacctggcctccagcaggctgggccatgcagaagggatagcaggggtgcattctctttgcacctggcgagagggtc

SEQ ID NO: 791451 - DNA, 120 bp, Artificial Sequence
  ENSG00000271303_6 (sequence is synthesized)
tgactctgggcacccctctcaccagctacaaggccttggactcactgtacagtgtgggagccccagttcccacctctgtgacaataggatcatggccttacccttgaagcattaccgaga

SEQ ID NO: 791452 - DNA, 120 bp, Artificial Sequence
  ENSG00000271303_7 (sequence is synthesized)
aggagaacagagatgggcttgaagagccacgtgctgccggctccaaattcccaaggacaaggatccctctgcatttttgtctatgtaacctcttatatggactacattcagctgcaagga

SEQ ID NO: 791453 - DNA, 120 bp, Artificial Sequence
  ENSG00000271303_8 (sequence is synthesized)
aaggaaaaccttgattgcagtggtttaaacaaacagaagattgtttttccacatagcatggattctggagatgggtggctaatggtattggttcaacaactccacgaaggtaggggtcac

SEQ ID NO: 791454 - DNA, 120 bp, Artificial Sequence
  ENSG00000271303_9 (sequence is synthesized)
gtcttggatccttttgccttaatctcagtgctcgttacttcatggtcccaagatggctgctgtatccccaagaatcatgtctgcgttcaaggaaggaggggtggaggaagaggaagggcc

SEQ ID NO: 791455 - DNA, 120 bp, Artificial Sequence
  ENSG00000271303_10 (sequence is synthesized)
aaactagctggacccgtcaccttctatcagaaagtaaaacctcgtcagaagtctgtttcctgctctctccctctgcatatcttcacttagatgcccttggcccgagccagctaccattgc

SEQ ID NO: 791456 - DNA, 120 bp, Artificial Sequence
  ENSG00000271303_11 (sequence is synthesized)
accaatcgtgttccatctactgagactggcacactgcctcctgcaataaaactgggatcccattaccaagagagaaatgcagaattgtgtaccagttagcttttgctgtgtaacaaacca

SEQ ID NO: 791457 - DNA, 120 bp, Artificial Sequence
  ENSG00000271303_12 (sequence is synthesized)
tccccaaacttggcagctagaaacaaaccctgtattttcccacaatcctatgggttggcaatttgggctgggctcaacagggcagttctgctgctcacacctgggatccctcatggagct

SEQ ID NO: 791458 - DNA, 120 bp, Artificial Sequence
  ENSG00000271303_13 (sequence is synthesized)
aaggtcagctgttacctcagctgggcctggatggtctaggatagccttactcacttgcctggcaggtgacaggctgttggctggaattgcttggttctcctccatgtggcctctccagca

SEQ ID NO: 791459 - DNA, 120 bp, Artificial Sequence
  ENSG00000271303_14 (sequence is synthesized)
ggctagctcaggcttattcacatgatggcttcaggattccaaagagagtgagagtagaagctgaaagacttcttgagttcttggcctggaactgggactaggacagtgtcacttctgcta

SEQ ID NO: 791460 - DNA, 120 bp, Artificial Sequence
  ENSG00000271303_15 (sequence is synthesized)
agttcttttggtcagagcaaatcacaaggctttacccagattcaagggatgagaaacagactacatgtcttgatgaggggaaccacaaagagcttgtggccatttttcacctatcacaaa

SEQ ID NO: 791461 - DNA, 120 bp, Artificial Sequence
  ENSG00000271303_16 (sequence is synthesized)
taattttggatgggtatttatttggataaaggtatttccctcttccccctttctctctgtctcatggggcctcactctgccaagttggaaggcactaagacattgtcctggccctcaggg

SEQ ID NO: 791462 - DNA, 120 bp, Artificial Sequence
  ENSG00000271303_17 (sequence is synthesized)
tctaggggaagaggtgttggggcaggaagtgagtctctccatgggctggacccactgtagtaggagtgcctccttgtctgcactgctggtatggggttaggccaggtaggacattccaga

SEQ ID NO: 791463 - DNA, 120 bp, Artificial Sequence
  ENSG00000271303_18 (sequence is synthesized)
ggggcttctgaaaaccaagagtccctggggaaagggaacagagtaaggcaggccttgttctcactgccctctaagggaacttggtcactcggcacttttaagcctcagtttctccagttc

SEQ ID NO: 791464 - DNA, 120 bp, Artificial Sequence
  ENSG00000271303_19 (sequence is synthesized)
aataataaggacaagagcttttcccatgcattctctttccccgggaaagttgactgaggtgaccagtaatagaattgaaaagggagagtgtcttcagtgcaatgtggcatcctggattgg

SEQ ID NO: 791465 - DNA, 120 bp, Artificial Sequence
  ENSG00000271303_20 (sequence is synthesized)
gtcttggaacaaaaacaggacattagtgggaaaattggaaatctgaaaaaagtctgaattttagttaatataccaatttcagtctcttggttttgacagatgtaccatggtgatgtaaga

SEQ ID NO: 791466 - DNA, 120 bp, Artificial Sequence
  ENSG00000271303_21 (sequence is synthesized)
tgttgaccttggggtaggctgggtgaagggtatacaggaactctttgtactatctctgcaacttctctgtaaatctagtatcattccaaaataaaagtttatttaatttaaaaaaaaaaa

SEQ ID NO: 791467 - DNA, 120 bp, Artificial Sequence; identical to SEQ ID NO: 766610
  ENSG00000271321_0 (sequence is synthesized)

SEQ ID NO: 791468 - DNA, 120 bp, Artificial Sequence; identical to SEQ ID NO: 766611
  ENSG00000271321_1 (sequence is synthesized)

SEQ ID NO: 791469 - DNA, 120 bp, Artificial Sequence; identical to SEQ ID NO: 766612
  ENSG00000271321_2 (sequence is synthesized)

SEQ ID NO: 791470 - DNA, 120 bp, Artificial Sequence; identical to SEQ ID NO: 766613
  ENSG00000271321_3 (sequence is synthesized)

SEQ ID NO: 791471 - DNA, 120 bp, Artificial Sequence; identical to SEQ ID NO: 766614
  ENSG00000271321_4 (sequence is synthesized)

SEQ ID NO: 791472 - DNA, 120 bp, Artificial Sequence; identical to SEQ ID NO: 766615
  ENSG00000271321_5 (sequence is synthesized)

SEQ ID NO: 791473 - DNA, 83 bp, Artificial Sequence; identical to SEQ ID NO: 766616
  ENSG00000271321_6 (sequence is synthesized)

SEQ ID NO: 791474 - DNA, 120 bp, Artificial Sequence; identical to SEQ ID NO: 766617
  ENSG00000271321_7 (sequence is synthesized)

SEQ ID NO: 791475 - DNA, 120 bp, Artificial Sequence; identical to SEQ ID NO: 766618
  ENSG00000271321_8 (sequence is synthesized)

SEQ ID NO: 791476 - DNA, 120 bp, Artificial Sequence
  ENSG00000271321_9 (sequence is synthesized)
gttatctgaagtggacaaaacaaaggaagagcttacagagcatattaaaaatcttcagactcaacaagaatctttgcaatcagaaaacatatattttgaaagtgagaatcagaagcttca

SEQ ID NO: 791477 - DNA, 120 bp, Artificial Sequence
  ENSG00000271321_10 (sequence is synthesized)
taaagtggaagaaaagctcagccgtgccactgaacagctggagacctatagaaagctagccaaagatcttgaagaagaattggagagaactgttcatttttatcaaaagcaggttatttc

SEQ ID NO: 791478 - DNA, 120 bp, Artificial Sequence; identical to SEQ ID NO: 791419
  ENSG00000271321_11 (sequence is synthesized)

SEQ ID NO: 791479 - DNA, 120 bp, Artificial Sequence; identical to SEQ ID NO: 791420
  ENSG00000271321_12 (sequence is synthesized)

SEQ ID NO: 791480 - DNA, 120 bp, Artificial Sequence; identical to SEQ ID NO: 791421
  ENSG00000271321_13 (sequence is synthesized)

SEQ ID NO: 791481 - DNA, 120 bp, Artificial Sequence; identical to SEQ ID NO: 791422
  ENSG00000271321_14 (sequence is synthesized)

SEQ ID NO: 791482 - DNA, 120 bp, Artificial Sequence; identical to SEQ ID NO: 791423
  ENSG00000271321_15 (sequence is synthesized)

SEQ ID NO: 791483 - DNA, 120 bp, Artificial Sequence; identical to SEQ ID NO: 791424
  ENSG00000271321_16 (sequence is synthesized)

SEQ ID NO: 791484 - DNA, 120 bp, Artificial Sequence; identical to SEQ ID NO: 791425
  ENSG00000271321_17 (sequence is synthesized)

SEQ ID NO: 791485 - DNA, 120 bp, Artificial Sequence; identical to SEQ ID NO: 791426
  ENSG00000271321_18 (sequence is synthesized)

SEQ ID NO: 791486 - DNA, 120 bp, Artificial Sequence; identical to SEQ ID NO: 791427
  ENSG00000271321_19 (sequence is synthesized)

SEQ ID NO: 791487 - DNA, 120 bp, Artificial Sequence; identical to SEQ ID NO: 791428
  ENSG00000271321_20 (sequence is synthesized)

SEQ ID NO: 791488 - DNA, 71 bp, Artificial Sequence
  ENSG00000271383_0 (sequence is synthesized)
tctgcctcactcttatcagagtctgagctactggcagtgctttcagctctgagttgaggcacctcgaacct

SEQ ID NO: 791489 - DNA, 73 bp, Artificial Sequence
  ENSG00000271383_1 (sequence is synthesized)
tggccacattctgcctcactcttatcagagtctgagctactggcagtgctttcagctctgagttgaggcacct

SEQ ID NO: 791490 - DNA, 120 bp, Artificial Sequence
  ENSG00000271383_2 (sequence is synthesized)
tcaaaacccaccatgccccaggctcaacagcgtgctgatggaagtggaagagcctgaagtcttacaggactcactggatggatgttattcgactccgtcaatgtactttgaactacctga

SEQ ID NO: 791491 - DNA, 84 bp, Artificial Sequence
  ENSG00000271383_3 (sequence is synthesized)
agcatatcagcttcgccctttacttggacaataggttttttactttgacggtgacaagtctccatctggtgttccagatgttag

SEQ ID NO: 791492 - DNA, 120 bp, Artificial Sequence
  ENSG00000271383_4 (sequence is synthesized)
ttgacggtgacaagtctccatctggtgttccagatgttagtcatattcccacaataggcagcccttactaagccgagagatgtcattcctgcaggcaggacctataggcacgtgaagatt

SEQ ID NO: 791493 - DNA, 86 bp, Artificial Sequence
  ENSG00000271383_5 (sequence is synthesized)
taggatgggtcagtgggcatggctcttttcctattctcaaaccatgccagtggcaacctgtgctcagtctgaagacaatggaccca

SEQ ID NO: 791494 - DNA, 120 bp, Artificial Sequence
  ENSG00000271383_6 (sequence is synthesized)
cagcacatgccgggagtgatcagtcggacattttaatttgaaccacgtatctttgggtagctacaaaattcctcagggatttcattttgcaggcatgtctctgagcttctatacctgctc

SEQ ID NO: 791495 - DNA, 79 bp, Artificial Sequence
  ENSG00000271383_7 (sequence is synthesized)
atctttgggtagctacaaaattcctcagggatttcattttgcaggcatgtctctgagcttctatacctgctcaaggtca

SEQ ID NO: 791496 - DNA, 80 bp, Artificial Sequence; identical to SEQ ID NO: 790910
  ENSG00000271383_8 (sequence is synthesized)

SEQ ID NO: 791497 - DNA, 120 bp, Artificial Sequence
  ENSG00000271383_9 (sequence is synthesized)
accttttgcctatcactctggacttttggattgttttttacattcagtgttataatatttgattatgctgattggttttggtgggtactgatgtgaattaataaaaacatttcatttcca

SEQ ID NO: 791498 - DNA, 61 bp, Artificial Sequence
  ENSG00000271383_10 (sequence is synthesized)
tgaatgggaggatgctgtacacattatcatcgctgggatcaagtgaaaaaggaggaccaag

SEQ ID NO: 791499 - DNA, 64 bp, Artificial Sequence
  ENSG00000271425_0 (sequence is synthesized)
ctggcagagaagaaacagcagttcagaagcctcaaagagatatgaagagtgtaaagacctcata

SEQ ID NO: 791500 - DNA, 84 bp, Artificial Sequence
  ENSG00000271425_1 (sequence is synthesized)
ggaggagaagcttgcagagcagctagttcactctcaggaacgagagctgacccagctaagggagaagttacgggaagggagaga

SEQ ID NO: 791501 - DNA, 79 bp, Artificial Sequence
  ENSG00000271425_2 (sequence is synthesized)
cagcggaggctgagaaagtactggaatcatctgcccccagggaggtgcagaaggctgaagagagcaaagtccctgagga

SEQ ID NO: 791502 - DNA, 66 bp, Artificial Sequence
  ENSG00000271425_3 (sequence is synthesized)
caaccagcctcacaagaacatcaaaatcacatttgaggaagacgaagtcaactcaactctggttgt

SEQ ID NO: 791503 - DNA, 120 bp, Artificial Sequence
  ENSG00000271425_4 (sequence is synthesized)
aaaatcacatttgaggaagacgaagtcaactcaactctggttgtagacagagaatcctctcatgatgaatgtcaggatgctctaaacattctcccagtccctggccccacctcttctgcc

SEQ ID NO: 791504 - DNA, 86 bp, Artificial Sequence
  ENSG00000271425_5 (sequence is synthesized)
taactcaactgtccggcttcctggccaaccaacagaagaaatacaaatatgaagagtgcaaagacctcataaaatttatgctgagg

SEQ ID NO: 791505 - DNA, 66 bp, Artificial Sequence
  ENSG00000271425_6 (sequence is synthesized)
acggcgtgctgatggaagtggaagagcgtgaagtcttacaggactcactggatagatgttattcga

SEQ ID NO: 791506 - DNA, 68 bp, Artificial Sequence
  ENSG00000271425_7 (sequence is synthesized)
agcacatcagcttcgccctttacgtggacaataggttttttactttgacggtgacaagtctccacctg

SEQ ID NO: 791507 - DNA, 120 bp, Artificial Sequence
  ENSG00000271425_8 (sequence is synthesized)
caataggttttttactttgacggtgacaagtctccacctggtgttccagatgggagtcatattcccacaataagcagcccttagtaatccgagagatgtcattcctgcaggcaggaccta

SEQ ID NO: 791508 - DNA, 68 bp, Artificial Sequence
  ENSG00000271425_9 (sequence is synthesized)
ttagtaatccgagagatgtcattcctgcaggcaggacctataggcaagtgaagatttgaatgaaagta

SEQ ID NO: 791509 - DNA, 86 bp, Artificial Sequence
  ENSG00000271425_10 (sequence is synthesized)
gacattttaatttgaaccacgtatctctgggtagctacaaaattcctcagggatttcattttgcaggcatgtctctgagcttctat

SEQ ID NO: 791510 - DNA, 120 bp, Artificial Sequence
  ENSG00000271425_11 (sequence is synthesized)
tttgaaccacgtatctctgggtagctacaaaattcctcagggatttcattttgcaggcatgtctctgagcttctatacctgctcaaggtcattgtcatctttgtgtttagctcatccaaa

SEQ ID NO: 791511 - DNA, 78 bp, Artificial Sequence
  ENSG00000271425_12 (sequence is synthesized)
tcctccctgcctgtgtctattattatattcatatctctacactgcaaatttggtgttgcaaaaagaagacattctctg

SEQ ID NO: 791512 - DNA, 120 bp, Artificial Sequence
  ENSG00000271425_13 (sequence is synthesized)
gttaattttaatctatacaattaaaaccttttgcctatcactctggacttttggattgttttttacattcagtgttataatatttgattatggtgattggttttggtgggtactgatgcg

SEQ ID NO: 791513 - DNA, 120 bp, Artificial Sequence
  ENSG00000271425_14 (sequence is synthesized)
aaacttcgggcggcggctgaggcggcggccgaggagcggcggactcggggcgcggggagtcgaggcatttgcgctgggcttcggagcgtagcgccagggcctgagcctttgaagcaggag

SEQ ID NO: 791514 - DNA, 120 bp, Artificial Sequence
  ENSG00000271425_15 (sequence is synthesized)
gaggggaggagagagtggggctcctctatcgggaccccctccccatgtggatctgcccaggcggccgcggcggcggcggcggaggaggcgaccgagaagatacccgccctgcgccccgct

SEQ ID NO: 791515 - DNA, 120 bp, Artificial Sequence
  ENSG00000271425_16 (sequence is synthesized)
ctgctgtgggcgctgctggcgctctggctgtgctgcgcgacccccgcgcatgcattgcagtgtcgagatggctatgaaccctgtgtaaatgaaggaatgtgtgttacctaccacaatggc

SEQ ID NO: 791516 - DNA, 120 bp, Artificial Sequence
  ENSG00000271425_17 (sequence is synthesized)
acaggatactgcaaatgtccagaaggcttcttgggggaatattgtcaacatcgagacccctgtgagaagaaccgctgccagaatggtgggacttgtgtggcccaggccatgctggggaaa

SEQ ID NO: 791517 - DNA, 120 bp, Artificial Sequence
  ENSG00000271425_18 (sequence is synthesized)
gccacgtgccgatgtgcctcagggtttacaggagaggactgccagtactcgacatctcatccatgctttgtgtctcgaccttgcctgaatggcggcacatgccatatgctcagccgggat

SEQ ID NO: 791518 - DNA, 120 bp, Artificial Sequence
  ENSG00000271425_19 (sequence is synthesized)
acctatgagtgcacctgtcaagtcgggtttacaggtaaggagtgccaatggaccgatgcctgcctgtctcatccctgtgcaaatggaagtacctgtaccactgtggccaaccagttctcc

SEQ ID NO: 791519 - DNA, 120 bp, Artificial Sequence
  ENSG00000271425_20 (sequence is synthesized)
tgcaaatgcctcacaggcttcacagggcagaagtgtgagactgatgtcaatgagtgtgacattccaggacactgccagcatggtggcacctgcctcaacctgcctggttcctaccagtgc

SEQ ID NO: 791520 - DNA, 120 bp, Artificial Sequence
  ENSG00000271425_21 (sequence is synthesized)
cagtgccttcagggcttcacaggccagtactgtgacagcctgtatgtgccctgtgcaccctcgccttgtgtcaatggaggcacctgtcggcagactggtgacttcacttttgagtgcaac

SEQ ID NO: 791521 - DNA, 120 bp, Artificial Sequence
  ENSG00000271425_22 (sequence is synthesized)
tgccttccagacggttacctggcacgctggccacattctgcctcactcttatcagagtctgagctactggcagtgctttcagctctgagttgaggcacctcgaaccttgtttttgtggtg

SEQ ID NO: 791522 - DNA, 68 bp, Artificial Sequence; identical to SEQ ID NO: 791199
  ENSG00000271425_23 (sequence is synthesized)

SEQ ID NO: 791523 - DNA, 120 bp, Artificial Sequence
  ENSG00000271447_0 (sequence is synthesized)
ggcggacccgcgggcaggcactgcccgggctggacgacgtctggccggctcccggcgaagggcagcggaggagcggcccagagcgcgcagctagggcactggcgaaaccccgggacagtc

SEQ ID NO: 791524 - DNA, 120 bp, Artificial Sequence
  ENSG00000271447_1 (sequence is synthesized)
cactggcgaaaccccgggacagtccctctccgtgcgggggcggcgcagagcagtcccatccccggggtcccgggcgcggctgactgccggctggttccctgcgcgcagtagctccccgag

SEQ ID NO: 791525 - DNA, 120 bp, Artificial Sequence
  ENSG00000271447_2 (sequence is synthesized)
ccgggctgcaccggaggcggcgagatggtcgcgcgcgtcggcctcctgctgcgcgccctgcagctgctactgtggggccacctggacgcccagcccgcggagcgcggaggccaggagctg

SEQ ID NO: 791526 - DNA, 120 bp, Artificial Sequence
  ENSG00000271447_3 (sequence is synthesized)
cgcaaggaggcggaggcattcctagagaagtacggatacctcaatgaacaggtccccaaagctcccacctccactcgattcagcgatgccatcagagcgtttcagtgggtgtcccagcta

SEQ ID NO: 791527 - DNA, 120 bp, Artificial Sequence
  ENSG00000271447_4 (sequence is synthesized)
cctgtcagcggcgtgttggaccgcgccaccctgcgccagatgactcgtccccgctgcggggttacagataccaacagttatgcggcctgggctgagaggatcagtgacttgtttgctaga

SEQ ID NO: 791528 - DNA, 120 bp, Artificial Sequence
  ENSG00000271447_5 (sequence is synthesized)
caccggaccaaaatgaggcgtaagaaacgctttgcaaagcaaggtaacaaatggtacaagcagcacctctcctaccgcctggtgaactggcctgagcatctgccggagccggcagttcgg

SEQ ID NO: 791529 - DNA, 120 bp, Artificial Sequence
  ENSG00000271447_6 (sequence is synthesized)
ggcgccgtgcgcgccgccttccagttgtggagcaacgtctcagcgctggagttctgggaggccccagccacaggccccgctgacatccggctcaccttcttccaaggggaccacaacgat

SEQ ID NO: 791530 - DNA, 120 bp, Artificial Sequence
  ENSG00000271447_7 (sequence is synthesized)
gggctgggcaatgcctttgatggcccagggggcgccctggcgcacgccttcctgccccgccgcggcgaagcgcacttcgaccaagatgagcgctggtccctgagccgccgccgcgggcgc

SEQ ID NO: 791531 - DNA, 120 bp, Artificial Sequence
  ENSG00000271447_8 (sequence is synthesized)
aacctgttcgtggtgctggcgcacgagatcggtcacacgcttggcctcacccactcgcccgcgccgcgcgcgctcatggcgccctactacaagaggctgggccgcgacgcgctgctcagc

SEQ ID NO: 791532 - DNA, 120 bp, Artificial Sequence
  ENSG00000271447_9 (sequence is synthesized)
tgggacgacgtgctggccgtgcagagcctgtatgggaagcccctagggggctcagtggccgtccagctcccaggaaagctgttcactgactttgagacctgggactcctacagcccccaa

SEQ ID NO: 791533 - DNA, 120 bp, Artificial Sequence
  ENSG00000271447_10 (sequence is synthesized)
agacaggcaacagcaactgtacatttttaaagggagccatttctgggaggtggcagctgatggcaacgtctcagagccccgtccactgcaggaaagatgggtcgggctgccccccaacat

SEQ ID NO: 791534 - DNA, 120 bp, Artificial Sequence
  ENSG00000271447_11 (sequence is synthesized)
tgaggctgcggcagtgtcattgaatgatggagatttctacttcttcaaagggggtcgatgctggaggttccggggccccaagccagtgtggggtctcccacagctgtgccgggcaggggg

SEQ ID NO: 791535 - DNA, 120 bp, Artificial Sequence
  ENSG00000271447_12 (sequence is synthesized)
cctgccccgccatcctgacgccgccctcttcttccctcctctgcgccgcctcatcctcttcaagggtgcccgctactacgtgctggcccgagggggactgcaagtggagccctactaccc

SEQ ID NO: 791536 - DNA, 120 bp, Artificial Sequence
  ENSG00000271447_13 (sequence is synthesized)
ccgaagtctgcaggactggggaggcatccctgaggaggtcagcggcgccctgccgaggcccgatggctccatcatcttcttccgagatgaccgctactggcgcctcgaccaggccaaact

SEQ ID NO: 791537 - DNA, 120 bp, Artificial Sequence
  ENSG00000271447_14 (sequence is synthesized)
gcaggcaaccacctcgggccgctgggccaccgagctgccctggatgggctgctggcatgccaactcggggagcgccctgttctgaaggcacctcctcacctcagaaactggtggtgctct

SEQ ID NO: 791538 - DNA, 120 bp, Artificial Sequence
  ENSG00000271447_15 (sequence is synthesized)
cagggcaaaatcatgttccccacccccggggcagaacccctcttagaagcctctgagtccctctgcagaagaccgggcagcaaagcctccatctggaagtctgtctgcctttgttccttg

SEQ ID NO: 791539 - DNA, 120 bp, Artificial Sequence
  ENSG00000271447_16 (sequence is synthesized)
aagaatgcagcattgtctttgtctgtccccaccacatggaggtgggggtgggatcaatcttaggaaaagcaaaaaagggtcccagatcccttggccctttcctccgaggacttctatcct

SEQ ID NO: 791540 - DNA, 120 bp, Artificial Sequence
  ENSG00000271447_17 (sequence is synthesized)
ccccaggcctttgtttcttcggctaaaggtacagttcctttcaagaggtaacagcactgggatccaagcagggggatgaaaaactcagcagagaaattcgagaccattttgcaagactgt

SEQ ID NO: 791541 - DNA, 120 bp, Artificial Sequence
  ENSG00000271447_18 (sequence is synthesized)
gcccttctcctcaggaccccctggctcagttcttgaaaaacggtgtcatatttagtcagaggccccacccccaggaagcatggatggggatgaaggcacaggcgtctccaacctcagagg

SEQ ID NO: 791542 - DNA, 120 bp, Artificial Sequence
  ENSG00000271447_19 (sequence is synthesized)
ccctttgtggggtcaggacacagagtgggagggagactgatgcaggcctaccagtccctggctttttgtctggggctggaataaagaggtgccttcagctggtgggccgagaggcaggaa

SEQ ID NO: 791543 - DNA, 120 bp, Artificial Sequence
  ENSG00000271447_20 (sequence is synthesized)
acggcctaaagaagcaacaagaaaggaaccgagtgcctggagaacttcatggagcagagccacttgcctactttggatcatctgtctctaagagagggaaataaacatttcttttgtgtg

SEQ ID NO: 791544 - DNA, 120 bp, Artificial Sequence
  ENSG00000271447_21 (sequence is synthesized)
aggccaagatttcccaatgtcttgaagccaatggctaggaaaacagctgagcctgggactggactttgtcagtaacctctcttccctagggcacgggaggagtgggtgaataggacctct

SEQ ID NO: 791545 - DNA, 120 bp, Artificial Sequence
  ENSG00000271447_22 (sequence is synthesized)
tggcttgaggaccatgattgtgaatacagacatttaattcagaatgacacctacattgatgaattttcattgtacaagtgtttttccagatcaaacacaaaacccatgtaattccttgat

SEQ ID NO: 791546 - DNA, 120 bp, Artificial Sequence
  ENSG00000271447_23 (sequence is synthesized)
aaattttcaatgcagggcagataaactgttgctaacatttttcatttatatttactgaagttattttcatcagaattcattctttttcataagttattaaacaaatgtgtgatctattga

SEQ ID NO: 791547 - DNA, 120 bp, Artificial Sequence; identical to SEQ ID NO: 790465
  ENSG00000271449_0 (sequence is synthesized)

SEQ ID NO: 791548 - DNA, 120 bp, Artificial Sequence; identical to SEQ ID NO: 790466
  ENSG00000271449_1 (sequence is synthesized)

SEQ ID NO: 791549 - DNA, 120 bp, Artificial Sequence
  ENSG00000271449_2 (sequence is synthesized)
aaagataggatgatgcagaaacctggtagcaatgcacctgtgggaggaaacgttaccagcagtttctctggagatgacctagaatgcagagaaacagccttctctcccaaaagccaacaa

SEQ ID NO: 791550 - DNA, 120 bp, Artificial Sequence
  ENSG00000271449_3 (sequence is synthesized)
gaaattaatgctgatataaaacgtcaattagtgaaggaactccgatgcgttggacaaaaatatgaaaaaatcttcgaaatgcttgaaggagtgcaaggacctactgcagtcaggaaacga

SEQ ID NO: 791551 - DNA, 120 bp, Artificial Sequence
  ENSG00000271449_4 (sequence is synthesized)
caccccaaatgcataatctcattaatgattgaggagagaaaaggatcagattgctgttttctacaatggagcaggatattgctgaagtctcctggcatatgttaccgaatcaactggcct

SEQ ID NO: 791552 - DNA, 120 bp, Artificial Sequence; identical to SEQ ID NO: 767934
  ENSG00000271449_5 (sequence is synthesized)

SEQ ID NO: 791553 - DNA, 120 bp, Artificial Sequence; identical to SEQ ID NO: 767935
  ENSG00000271449_6 (sequence is synthesized)

SEQ ID NO: 791554 - DNA, 120 bp, Artificial Sequence
  ENSG00000271449_7 (sequence is synthesized)
tgtcagttggtcatgatgcttggcctggcaggatgactcaaaccttcattacagaagagtctgaaccattagatatcctgcctggatggggttgctgtgattttccattaactctaatcg

SEQ ID NO: 791555 - DNA, 120 bp, Artificial Sequence; identical to SEQ ID NO: 791404
  ENSG00000271449_8 (sequence is synthesized)

SEQ ID NO: 791556 - DNA, 120 bp, Artificial Sequence; identical to SEQ ID NO: 790868
  ENSG00000271449_9 (sequence is synthesized)

SEQ ID NO: 791557 - DNA, 120 bp, Artificial Sequence
  ENSG00000271503_0 (sequence is synthesized)
atttcagttttcttttccgttttgtgcaatttcacttatgataccggccaatgcttggttgctattttggaaactccccttaggggatgcccctcaactggccctataaagggccagcct

SEQ ID NO: 791558 - DNA, 120 bp, Artificial Sequence
  ENSG00000271503_1 (sequence is synthesized)
gagctgcagaggattcctgcagaggatcaagacagcacgtggacctcgcacagcctctcccacaggtaccatgaaggtctccgcggcagccctcgctgtcatcctcattgctactgccct

SEQ ID NO: 791559 - DNA, 120 bp, Artificial Sequence
  ENSG00000271503_2 (sequence is synthesized)
ctgcgctcctgcatctgcctccccatattcctcggacaccacaccctgctgctttgcctacattgcccgcccactgccccgtgcccacatcaaggagtatttctacaccagtggcaagtg

SEQ ID NO: 791560 - DNA, 120 bp, Artificial Sequence
  ENSG00000271503_3 (sequence is synthesized)
ctccaacccagcagtcgtctttgtcacccgaaagaaccgccaagtgtgtgccaacccagagaagaaatgggttcgggagtacatcaactctttggagatgagctaggatggagagtcctt

SEQ ID NO: 791561 - DNA, 120 bp, Artificial Sequence
  ENSG00000271503_4 (sequence is synthesized)
gaacctgaacttacacaaatttgcctgtttctgcttgctcttgtcctagcttgggaggcttcccctcactatcctaccccacccgctccttgaagggcccagattctaccacacagcagc

SEQ ID NO: 791562 - DNA, 72 bp, Artificial Sequence
  ENSG00000271503_5 (sequence is synthesized)
cacaacaacaacaacaaaaagcttccccaactaaagcctagaagagcttctgaggcgctgctttgtcaaaag

SEQ ID NO: 791563 - DNA, 120 bp, Artificial Sequence
  ENSG00000271503_6 (sequence is synthesized)
aaagcctagaagagcttctgaggcgctgctttgtcaaaaggaagtctctaggttctgagctctggctttgccttggctttgccagggctctgtgaccaggaaggaagtcagcatgcctct

SEQ ID NO: 791564 - DNA, 120 bp, Artificial Sequence
  ENSG00000271503_7 (sequence is synthesized)
agaggcaaggaggggaggaacactgcactcttaagcttccgccgtctcaacccctcacaggagcttactggcaaacatgaaaaatcggcttaccattaaagttctcaatgcaaccataaa

SEQ ID NO: 791565 - DNA, 120 bp, Artificial Sequence
  ENSG00000271567_0 (sequence is synthesized)
actataaagacagtgaaaagatcagtggttatctttgcagacgccaccatcgctgtgagccctgtactatcagccatggtcaactccgtcgtcttttttgaaatcaccagggatggcaag

SEQ ID NO: 791566 - DNA, 82 bp, Artificial Sequence
  ENSG00000271567_1 (sequence is synthesized)
caactccgtcgtcttttttgaaatcaccagggatggcaagcccttgggccgcatctccatcaaactgtttgcagacaagatt

SEQ ID NO: 791567 - DNA, 120 bp, Artificial Sequence
  ENSG00000271567_2 (sequence is synthesized)
tgtgtcagggtggtgacttcacacgccctaatggcaccggtgacaagtccatctatggggagaaatttgatgatgagaacctcatccgaaagcatacaggttctggcatcttgtccatgg

SEQ ID NO: 791568 - DNA, 120 bp, Artificial Sequence
  ENSG00000271567_3 (sequence is synthesized)
actgagtggttggatggcaagcatgtggcgtttggcaaggtgaaagaacgtgtgaatattgtggaagccatggagcactttgggtacaggaatagcaagaccagcaagaagatcaccatt

SEQ ID NO: 791569 - DNA, 120 bp, Artificial Sequence
  ENSG00000271567_4 (sequence is synthesized)
cattgctgactgtggacaattctaatgagtttgacttgtgttttattttcaccaccagacccattccttctgtagctcaggagagcacccctccaccacatttgcttgcaatatcctaga

SEQ ID NO: 791570 - DNA, 120 bp, Artificial Sequence
  ENSG00000271601_0 (sequence is synthesized)
gagtccccaggcgctagctgactggggtggttgggaccgttagctcggcaggctggcaggctccggggcgctactccattggcggccgggatggagactatgcgagcgcagcggctgcag

SEQ ID NO: 791571 - DNA, 120 bp, Artificial Sequence
  ENSG00000271601_1 (sequence is synthesized)
ggagactatgcgagcgcagcggctgcagcctggtgtgggcaccagcgggaggggcactctccgagcgctgcggcccggagtgactggggccgcggccgccaccgccacaccccctgcggg

SEQ ID NO: 791572 - DNA, 120 bp, Artificial Sequence
  ENSG00000271601_2 (sequence is synthesized)
ccccgccgccgctgctcctgtctggggccccaggactacccctgccccccggcgccgccggcagcccggcagtgctgcgagaggccgtggaggccgtggtgaggagcttcgccaagcaca

SEQ ID NO: 791573 - DNA, 120 bp, Artificial Sequence
  ENSG00000271601_3 (sequence is synthesized)
cacacgcagggctatggccgagtgaatgtggtggaggcacttcaggaattctggcagatgaagcagtcccgtggtgctgacttaaagaatggggctctagtggtttatgagatggttccc

SEQ ID NO: 791574 - DNA, 120 bp, Artificial Sequence
  ENSG00000271601_4 (sequence is synthesized)
tccaacagccctccttatgtctgctatgtcaccctgcctgggggaagctgctttgggagtttccagttttgccccacaaaagctgaggcccggaggagtgctgcaaagattgcgctaatg

SEQ ID NO: 791575 - DNA, 120 bp, Artificial Sequence
  ENSG00000271601_5 (sequence is synthesized)
aattctgtgtttaatgaacatccttcccgaagaatcactgatgagttcatcgagaagagtgtctctgaggccctggcatcttttaatggcaacagggaggaagctgacaacccaaataca

SEQ ID NO: 791576 - DNA, 120 bp, Artificial Sequence
  ENSG00000271601_6 (sequence is synthesized)
gggattggtgccttccgattcatgctggaatccaacaagggcaaatcaatgttggagttccaggagctaatgacagtttttcaactgctacactggaatggcagccttaaggccatgagg

SEQ ID NO: 791577 - DNA, 120 bp, Artificial Sequence
  ENSG00000271601_7 (sequence is synthesized)
gaacgacaatgctctcggcaggaggtgttggctcattattcgcaccgggccctggatgatgatattcgccaccaaatggccttggactgggtgagccgggagcagagtgtgccgggggca

SEQ ID NO: 791578 - DNA, 120 bp, Artificial Sequence
  ENSG00000271601_8 (sequence is synthesized)
ctgtctagagagctggcctctactgagcgggagctggatgaagcccgactggcaggcaaggagctgcgcttccacaaggagaagaaagatattcttgtgctggctgctgggcagttgggc

SEQ ID NO: 791579 - DNA, 120 bp, Artificial Sequence
  ENSG00000271601_9 (sequence is synthesized)
aatatgcattcttccaactgctaggcatccacccacataactccccaggctttccacagcctttttttatgtctcctttctaagatttaggatgattttttgtacatactttctcatttt

SEQ ID NO: 791580 - DNA, 120 bp, Artificial Sequence
  ENSG00000271601_10 (sequence is synthesized)
tatactttaaaaaatatatatgtgtataaattctacacctagattcctatttgctaagagatcccttttcttactaccagtttttggatgtagttttatttgaaacatcttcagtccact

SEQ ID NO: 791581 - DNA, 120 bp, Artificial Sequence
  ENSG00000271601_11 (sequence is synthesized)
ttacaacaaagagcagcttgtctttgcagctttgttagctcttaaacttccagattaactgtgtagccatttcagtagcactaaaagattaactctagtgttcatgtgtccttcttttca

SEQ ID NO: 791582 - DNA, 120 bp, Artificial Sequence
  ENSG00000271601_12 (sequence is synthesized)
aatatcaggtaacttgaataaggattatgtgccccacccttactctcattcctgcttcctcttggactcaaacagggtatgagtatgaagattttgcctttagttcctgaactgaacctg

SEQ ID NO: 791583 - DNA, 120 bp, Artificial Sequence
  ENSG00000271601_13 (sequence is synthesized)
cttgctatccctttcctccccaccactaccttattccttctctgcctccaaattgccactttgttttgaggcttccttccctaccttattattctgaaggaagtagagatcttgcttctg

SEQ ID NO: 791584 - DNA, 120 bp, Artificial Sequence
  ENSG00000271601_14 (sequence is synthesized)
aaacccctcctaagaaactgcccagggacaagataaattacaaacaattcatgggagtttactacctaagttgcttctagggcatatgtataccatactagtagtctagatttctggata

SEQ ID NO: 791585 - DNA, 120 bp, Artificial Sequence
  ENSG00000271601_15 (sequence is synthesized)
tactctacagtagatgggggttatggttgaaactgattctctttcagtattccctctaaacatctcccctactcccccagcttagttaaaccctgcgtttggaccttcctgcctgcagct

SEQ ID NO: 791586 - DNA, 120 bp, Artificial Sequence
  ENSG00000271601_16 (sequence is synthesized)
tcccttcacctaacattttattttttggaagcgttatcagtcctatttggttagtgagaaccatgttccccttattcccgctaagttgctgctgtttactaccttagattctcatttgtt

SEQ ID NO: 791587 - DNA, 120 bp, Artificial Sequence
  ENSG00000271601_17 (sequence is synthesized)
ttctctttctttcctctccttccacattaattattagaacataagttgatcaggaaaattaaatgagactttagtattttggcacttcctaattgacaccttgggagactgcaggaaggg

SEQ ID NO: 791588 - DNA, 120 bp, Artificial Sequence
  ENSG00000271601_18 (sequence is synthesized)
ttgggagactgcaggaagggaaagagaatcaatgatcagttatttgtgtgtgtgtgtggtttttttttttttttggaagacagagtctcacacttttgcccaggctggagtgcagtggcg

SEQ ID NO: 791589 - DNA, 62 bp, Artificial Sequence
  ENSG00000271601_19 (sequence is synthesized)
ttgaactcctgacatagcctggcctatttgtggtttttttttggttttgtttttgtttttgt

SEQ ID NO: 791590 - DNA, 67 bp, Artificial Sequence
  ENSG00000271601_20 (sequence is synthesized)
atttgtgtttttaacaccattctcccccacttctctcctgggtgacataagagagaaataacctgta

SEQ ID NO: 791591 - DNA, 120 bp, Artificial Sequence
  ENSG00000271601_21 (sequence is synthesized)
cacttctctcctgggtgacataagagagaaataacctgtagtacagcagctaaagtattctcctttcagagaatttttttggaggtctctaatatatatttcccccttgtctctgtgatc

SEQ ID NO: 791592 - DNA, 120 bp, Artificial Sequence
  ENSG00000271601_22 (sequence is synthesized)
tcttatttatactatattattgtcccatgtactttctaaactgagcttggaacatttagtattcctgcaattggacttcccacttaacaattatacagactttgcttttagaaatagatt

SEQ ID NO: 791593 - DNA, 120 bp, Artificial Sequence
  ENSG00000271601_23 (sequence is synthesized)
aggttccaaacagaaagttcaagtgtaacaacaacaataaaaatagattatgaaacaggctataattggctcttttggatttgataggggcaagatgaaaggcaactttcttgcttttga

SEQ ID NO: 791594 - DNA, 120 bp, Artificial Sequence
  ENSG00000271601_24 (sequence is synthesized)
aatcatgttgggtaagaggtaaggaatccagctacaattttattagtgcttgaaacgggcttccttgaattctccaggccctatcattttttttttcttactaatcagaagagagctggg

SEQ ID NO: 791595 - DNA, 120 bp, Artificial Sequence
  ENSG00000271601_25 (sequence is synthesized)
gtagaagccccatgtttgtattccatgaaacacgtcgggttggagtaaaggcaaaaacagctagacacaccaggtgtgtctgtttgacatttataagctggcactcatcaacactcctgt

SEQ ID NO: 791596 - DNA, 120 bp, Artificial Sequence
  ENSG00000271601_26 (sequence is synthesized)
ttctcctttctctgggacgtgtggattaaggggtgtgagttgtgggaagaattgccctcgtacctcctggatttattatttttctcaaataccaaccagtaagatcccaaataacttgag

SEQ ID NO: 791597 - DNA, 120 bp, Artificial Sequence
  ENSG00000271601_27 (sequence is synthesized)
aaaaattgtttcctgatctgtccacttctggtgtcaaagattttactcatcttcttagtacattctatgtattttatatgtataattttatacaattaaaaatagatttttgtctagtga

SEQ ID NO: 791598 - DNA, 120 bp, Artificial Sequence
  ENSG00000271605_0 (sequence is synthesized)
agtattatgcaaacctcatccaaaccctctgatttccttaacttggctaagaaaaagaggaagttctccgagttactcaccactgtggttctactatgccttctgaccccgtcttggact

SEQ ID NO: 791599 - DNA, 120 bp, Artificial Sequence
  ENSG00000271605_1 (sequence is synthesized)
tcaactgggagaatgtggagccatttgaacaggctcctcttctggagcatattttcttctgtcacttgtagaaaagctgtattggattgtgaggcaatgaaaacaaatgaattcccttct

SEQ ID NO: 791600 - DNA, 120 bp, Artificial Sequence
  ENSG00000271605_2 (sequence is synthesized)
ccatgtttggactcaaagactaaggtggttatgaagggtcaaaatgtatctatgttttgttcccataagaacaaatcactgcagatcacctattcattgtttcgacgtaagacacacctg

SEQ ID NO: 791601 - DNA, 120 bp, Artificial Sequence
  ENSG00000271605_3 (sequence is synthesized)
ggaacccaggatggaaaaggtgaacctgcgatttttaacctaagcatcacagaagcccatgaatcaggcccctacaaatgcaaagcccaagttaccagctgttcaaaatacagtcgtgac

SEQ ID NO: 791602 - DNA, 120 bp, Artificial Sequence
  ENSG00000271605_4 (sequence is synthesized)
catcaattacactttctttgaaaaccatgttgccatatcaccagctatttccaagtatgacagggagcctgctgaatttaacttaaccaagaagaatcctggagaagaggaagagtatag

SEQ ID NO: 791603 - DNA, 120 bp, Artificial Sequence
  ENSG00000271605_5 (sequence is synthesized)
gtgtgaagctaaaaacagattgcctaactatgcaacatacagtcaccctgtcaccatgccctcaacaggcggagacagctgtcctttctgtctgaagctactacttccagggttattact

SEQ ID NO: 791604 - DNA, 120 bp, Artificial Sequence
  ENSG00000271605_6 (sequence is synthesized)
gttgctggtggtgataatcctaattctggctttttgggtactgcccaaatacaaaacaagaaaagctatgagaaataatgtgcccagggaccgtggagacacagccatggaagttggaat

SEQ ID NO: 791605 - DNA, 120 bp, Artificial Sequence
  ENSG00000271605_7 (sequence is synthesized)
ctatgcaaatatccttgaaaaacaagcaaaggaggaatctgtgccagaagtgggatccaggccgtgtgtttccacagcccaagatgaggccaaacactcccaggagctacagtatgccac

SEQ ID NO: 791606 - DNA, 120 bp, Artificial Sequence
  ENSG00000271605_8 (sequence is synthesized)
ccccgtgttccaggaggtggcaccaagagagcaagaagcctgtgattcttataaatctggatatgtctattctgaactcaacttctgaaatttacagaaacaaactacatctcagggtaa

SEQ ID NO: 791607 - DNA, 83 bp, Artificial Sequence
  ENSG00000271605_9 (sequence is synthesized)
ctacaagcctgagccaccgtgcccggccctgaatcgctttagtaaataaagggtctccaagaataaattcatccgaacatgca

SEQ ID NO: 791608 - DNA, 120 bp, Artificial Sequence
  ENSG00000271605_10 (sequence is synthesized)
atgtggagccatttgaacaggctcctcttctggagcatattttcttctgtcacttgtagaaaagctgtattggattgtgaggcaatgaaaacaaatgacccggtgacttccccagtgctg

SEQ ID NO: 791609 - DNA, 120 bp, Artificial Sequence
  ENSG00000271824_0 (sequence is synthesized)
gccagaaagctcagtctcctgctcaaaacaggagcgcagcagccggagggagtggggacaagctcgctgaacactgggcgtctcgacagggaccagagcctgcaggactgttccgagacg

SEQ ID NO: 791610 - DNA, 120 bp, Artificial Sequence
  ENSG00000271824_1 (sequence is synthesized)
ctgcggtggcggcggcgccggaggacgcggaggactccctggccacccgccctccgtgcgctctgccaccgggcgctcagcagagaccccgggctgcggctgcacttgctgagtgcctct

SEQ ID NO: 791611 - DNA, 120 bp, Artificial Sequence
  ENSG00000271824_2 (sequence is synthesized)
ccccgccgccgcagcccagaggcgcccagcacctggagctcactggagctgagggtccgagctgagcgggctgttgtaaagccgaaaggcgagtcagtgactgggacctctgtcctggtg

SEQ ID NO: 791612 - DNA, 120 bp, Artificial Sequence
  ENSG00000271824_3 (sequence is synthesized)
gcgacggagagaaacagtgagcccgaggggcgcgggcacagaactgtccagctccgagaactggggtccgccagccggcggggaaagcagctgagcgcggaggcgagtgagcggacgcgt

SEQ ID NO: 791613 - DNA, 120 bp, Artificial Sequence
  ENSG00000271824_4 (sequence is synthesized)
cccggggtctttgcagtccccgccggccccaaggcaccgactctcggtcagttgggcgcggcagggcgggaggggcgcgccatggaggcgccgggtcgcgccagtatgctccaggccaag

SEQ ID NO: 791614 - DNA, 120 bp, Artificial Sequence
  ENSG00000271824_5 (sequence is synthesized)
tgaagcggtccggctggggtcggcgggacccgcgggccatgtacggcgacatattcaacgccacgggcggccccgaggcggcggtaggcagcgcgctggccccaggagccacggtcaagg

SEQ ID NO: 791615 - DNA, 120 bp, Artificial Sequence
  ENSG00000271824_6 (sequence is synthesized)
cagaaggcgctttgccgctggagctggccactgcgcgcggtatgagggacggcgcggccacaaagcccgacctgcccacctacctgctgctcttcttcctgctgctgctctcggtggcgc

SEQ ID NO: 791616 - DNA, 120 bp, Artificial Sequence
  ENSG00000271824_7 (sequence is synthesized)
tcggttgccagctgcgccattcggccttcgccgcgctgccccacgaccgctcgctgcgcgacgcccgcgcgccctggaagacgcggccggtgtagcttgggactgagccacggccgccgg

SEQ ID NO: 791617 - DNA, 120 bp, Artificial Sequence
  ENSG00000271824_8 (sequence is synthesized)
gcgccccgtcccgacctagccaagagcagccagcttgagcctggtagggagggcacgacaccggggatcgctggcccctgggaacacggtgccctgacccaaagacccttcctgaactag

SEQ ID NO: 791618 - DNA, 120 bp, Artificial Sequence
  ENSG00000271824_9 (sequence is synthesized)
agtggcaacccgagaggaaagggagaccgaggcgtcgggagcctgtgtagggtctcgatcccagtacctgtaggtaccgtgattctgatcccctggccaaatctttcttcctctggacag

SEQ ID NO: 791619 - DNA, 120 bp, Artificial Sequence
  ENSG00000271824_10 (sequence is synthesized)
agggtccagtcgggaaaccttcccgaaagacggcggtcgggtcgggaaaccttcctgaaagacggcgcgccagcccgtcttgcttgctcgccgcctgctgacttccttactttgcacacg

SEQ ID NO: 791620 - DNA, 120 bp, Artificial Sequence
  ENSG00000271824_11 (sequence is synthesized)
gaaggggcaggaaccgcaagcgtgcaactagcctggagctacccgtctggactcgcaggccctgtggctgtttcccacagctgctacggcctctcttgctccttgacaccgaggaggacc

SEQ ID NO: 791621 - DNA, 120 bp, Artificial Sequence
  ENSG00000271824_12 (sequence is synthesized)
ccactaggatccgagcgtcgtgaactcacctgaactttggaaggttggcactggggggccgcatccccctgggaaatgactgaacgcggggtttcagtgggtcccgcctgggtctaagga

SEQ ID NO: 791622 - DNA, 120 bp, Artificial Sequence
  ENSG00000271824_13 (sequence is synthesized)
cccagtttcttctgtgagcacgggcagtgggaggccggtggaaaggcgcaggggcccacctacgcgtctcacatcttcaggggcgcatttctacaataaaaactcacccaattagaccta

SEQ ID NO: 791623 - DNA, 120 bp, Artificial Sequence
  ENSG00000272031_0 (sequence is synthesized)
acgcccggaaccgaagcttgcgaagcgggtcgcagagagagatgggcgttgcagaatcagctggggtcacttatttccggtctcactccagatgaaggagccactagccggcgagagttc

SEQ ID NO: 791624 - DNA, 120 bp, Artificial Sequence
  ENSG00000272031_1 (sequence is synthesized)
accgagggaacgtgacactcatatctcatcgagggaccgtgttgagggagcccctacagagaggccaaaggaggagagggcctacggagaaatgaacctctgtaaaagctgctctttagg

SEQ ID NO: 791625 - DNA, 120 bp, Artificial Sequence
  ENSG00000272031_2 (sequence is synthesized)
gatcagtctttttgtgactctagcttcatagcttggtctctccattactccagccttcctttcaatcatacactgcctctctccagcaccaccaatggatacttcttttctaaaaatgtt

SEQ ID NO: 791626 - DNA, 120 bp, Artificial Sequence
  ENSG00000272031_3 (sequence is synthesized)
tttctgtgggttgctgccgtgtctgtgagaagctggacacaaactcattcctaaaatatgtggatggaagctatggtaaccatggagacagggcaggtggcaaggagaggcagagacagt

SEQ ID NO: 791627 - DNA, 120 bp, Artificial Sequence
  ENSG00000272031_4 (sequence is synthesized)
gtgagagaccaatagacagataggaagagagaagatataaggaatgtttcagacagagatcgtcaagcaagatggaaaaaataagacgtctaagcaagactgagattaaagagatgcaat

SEQ ID NO: 791628 - DNA, 120 bp, Artificial Sequence
  ENSG00000272031_5 (sequence is synthesized)
gtgagagagtgtattacaagtgtgccatgtgccgtgtatggcaggtcaggtctggcgcacaggagcgcacaaacacaccaagtgcggagaatggggatctgctgaatctcagcgaagaat

SEQ ID NO: 791629 - DNA, 120 bp, Artificial Sequence
  ENSG00000272031_6 (sequence is synthesized)
ctggatgatggtccctgtctgggtcgcggaggagtcccctaaggaacacttaggtttgttggggctgaggggaggtcggctgagaaaaggaagtcaggattggagcctctaggtttttga

SEQ ID NO: 791630 - DNA, 120 bp, Artificial Sequence
  ENSG00000272031_7 (sequence is synthesized)
ctaggtttttgagggtttatgtgtgcatgagtgggggagcagtttggtgcctgacgcccccacccgcagtgactaggctataaatagcacagcagagctccgcccccccccccccccccc

SEQ ID NO: 791631 - DNA, 120 bp, Artificial Sequence
  ENSG00000272031_8 (sequence is synthesized)
ttctctcctcccgagccggcgctgtgcccggggcgctccgggaggagggaccaggatccggcgccggggcgcagatactgacaccaagggaatccgggtgcccccccccccacgccatgc

SEQ ID NO: 791632 - DNA, 120 bp, Artificial Sequence
  ENSG00000272031_9 (sequence is synthesized)
gggcccccaggaaactggctccgccacctcggctgccccgtggccacggccccaatcctggccaggcggagattctgcggacattcagggatcggcttcgtcactgagacctcaggcctc

SEQ ID NO: 791633 - DNA, 120 bp, Artificial Sequence
  ENSG00000272031_10 (sequence is synthesized)
tgccagccactccccctccccatacccctagtcatcctcggcaggtctcagtcccggctccatctgtgccctcgccccagccgcagctatgttgcacaccgagggccacgctcttcttcg

SEQ ID NO: 791634 - DNA, 120 bp, Artificial Sequence
  ENSG00000272031_11 (sequence is synthesized)
ggcggtgggtcagggtaagctacgcttggcccgtttgcttctggagggaggcgcctacgtgaatgagggtgatgcgcagggggagactgcgctaatggcagcctgtcgggcccgctacga

SEQ ID NO: 791635 - DNA, 120 bp, Artificial Sequence
  ENSG00000272031_12 (sequence is synthesized)
cgacccccagaacaaggcacgcatggtacgctacctcctggagcaaggcgcggaccccaatatcgcagaccgattagggcgcacggcgctcatgcacgcttgcgccgggggtgggggcgc

SEQ ID NO: 791636 - DNA, 120 bp, Artificial Sequence
  ENSG00000272031_13 (sequence is synthesized)
cgcggtggcctcgctgctccttgcccacggcgcagacccctcagtccgagatcacgcgggcgcctcggctcttgtccacgccctggaccgcggggaccgcgagacccttgccacactgct

SEQ ID NO: 791637 - DNA, 120 bp, Artificial Sequence
  ENSG00000272031_14 (sequence is synthesized)
ggacgcctgcaaggccaagggtacggaggtcatcatcatcaccaccgatacctcgccctcaggcaccaagaagacccggcagtatctcaattctccaccatccccaggggtggaggaccc

SEQ ID NO: 791638 - DNA, 120 bp, Artificial Sequence
  ENSG00000272031_15 (sequence is synthesized)
gcctctcctagcccggggttctgcacgtcgccttcggaaatccaactgcagaccgctggaggaggagggcgtgggatgttatcccctcgcgcccaggaagaagaggagaagcgggacgta

SEQ ID NO: 791639 - DNA, 120 bp, Artificial Sequence
  ENSG00000272031_16 (sequence is synthesized)
tttgaattccctcttcctaagccccccgatgacccatccccttccgagccgctccccaaaccaccacgccatcccccaaaaccactcaaaaggctcaactccgagccctggggcctagtg

SEQ ID NO: 791640 - DNA, 120 bp, Artificial Sequence
  ENSG00000272031_17 (sequence is synthesized)
gcccctcctcaaccagtcccacccactgaagggagaccggggatcgagcgcttgactgccgaattcaatggcctgaccctgaccggtcgaccccgtctttcccgacgtcacagcaccgaa

SEQ ID NO: 791641 - DNA, 120 bp, Artificial Sequence
  ENSG00000272031_18 (sequence is synthesized)
ggccctgaggacccgcccccatgggcggagaaagtgactagcgggggtcctctctctcgccgaaacacagcaccagaagctcaggagtctggtcccccttcagggctgaggcagaaactg

SEQ ID NO: 791642 - DNA, 120 bp, Artificial Sequence
  ENSG00000272031_19 (sequence is synthesized)
agccgcatggagccagtggagctggacacccctggacacctttgccctgactcgcctgagtccagccgcctgtccctggagcgccgccgatacagcgcctccccgttgaccctccctcca

SEQ ID NO: 791643 - DNA, 120 bp, Artificial Sequence
  ENSG00000272031_20 (sequence is synthesized)
gccggctcggctccctctccgcgccagtcccaggagagtctgccaggggcagtatctccgctaagcggaaggaggcggagtccggggctgctggagcggaggggctcggggacgttgctc

SEQ ID NO: 791644 - DNA, 120 bp, Artificial Sequence
  ENSG00000272031_21 (sequence is synthesized)
ctggaccacatctcgcaaacgcggccgggtttcctaccccctctcaacgtcagtccccaccctcccatccctgacattcgcccacaacccggaggtcgggcgccttcgttgcctgcccct

SEQ ID NO: 791645 - DNA, 120 bp, Artificial Sequence
  ENSG00000272031_22 (sequence is synthesized)
ccttatgccggggcgccaggctctcccaggaccaagcgcaaattggtgagacgccactccatgcagactgagcagatccgcctgctggggggcttccagagtctaggtgggcctggggag

SEQ ID NO: 791646 - DNA, 120 bp, Artificial Sequence
  ENSG00000272031_23 (sequence is synthesized)
ccagggcgctgagaggagtgagaggagccaaggagggtggggattaggaccttaatgggataggtgggagaaccagctcacacacacaccacgaacaaagggatctcttgcatgtgctca

SEQ ID NO: 791647 - DNA, 120 bp, Artificial Sequence
  ENSG00000272031_24 (sequence is synthesized)
tgggtgcacagtgcacccacacatggttaaacatgtgtccataagcacagtactcttattagcaagaaagaataagtactctatttactgggtatatacacacatgtattcatgccctgg

SEQ ID NO: 791648 - DNA, 120 bp, Artificial Sequence
  ENSG00000272031_25 (sequence is synthesized)
tcatttcacatgcatatgggattacttgtgtacctacaggcacagcatatcaataaacacacagggctagggtcccaaactctcttgcatttgttcagaagcagtagggaacccttactt

SEQ ID NO: 791649 - DNA, 120 bp, Artificial Sequence
  ENSG00000272031_26 (sequence is synthesized)
atgggcagtctccgatgtctttgccctcctgcagaagcaatcccttgctttccatgtatgccctgaaacacagcctatcatgattttgcacactctctccgtggacatcccagcccattc

SEQ ID NO: 791650 - DNA, 120 bp, Artificial Sequence
  ENSG00000272031_27 (sequence is synthesized)
tgcaggtcttgcttctttctccaggcctggctccttattcacaccctgcttctaaccccaaccacttttcaggatatctttttcactcttcttgggggttcctgcagcaacccccagcct

SEQ ID NO: 791651 - DNA, 120 bp, Artificial Sequence
  ENSG00000272031_28 (sequence is synthesized)
cagttctgctgctgtctttactgctctcaacttcacttctcaacttcctgctttttattcccaccctgttcctccaacaactacaacagattgtctcattttcccagggggtgggtcatg

SEQ ID NO: 791652 - DNA, 120 bp, Artificial Sequence
  ENSG00000272031_29 (sequence is synthesized)
ggctctaagctgctcttctgtctgtctgagcttatgaacacccccacaggtagaagtggggagaaaccctaaatcactcctctctccacttgacatatcaaataaatgtgttcagaagtc

SEQ ID NO: 791653 - DNA, 120 bp, Artificial Sequence
  ENSG00000272047_0 (sequence is synthesized)
actctgccggcaacgccgaggcgcttctgcatctgtgggccgagcattcttcaggtcatctgaaccttctgagaaaacatggtcaacgtcttgaaaggagtgcttatagaatgtgatcct

SEQ ID NO: 791654 - DNA, 120 bp, Artificial Sequence
  ENSG00000272047_1 (sequence is synthesized)
gccatgaagcagtttctgctgtacttggatgagtccaatgccctggggaagaagttcatcattcaagacattgatgacactcacgtctttgtaatagcagaattggttaatgtcctccag

SEQ ID NO: 791655 - DNA, 120 bp, Artificial Sequence
  ENSG00000272047_2 (sequence is synthesized)
gagcgagtgggtgaattaatggaccaaaatgctttttcccttacccagaaatgaaaatactcaatatggaccatttaggaattataagcagcaactgtgaaagacttgccactcaatatc

SEQ ID NO: 791656 - DNA, 120 bp, Artificial Sequence
  ENSG00000272047_3 (sequence is synthesized)
ttaggtgactgattagacatagagggttgttttaggagcatgccacgggaaagactgagggatcatgatcatttgttcagaaaaaaagcccctgaactgattttgttaccatagaattta

SEQ ID NO: 791657 - DNA, 120 bp, Artificial Sequence
  ENSG00000272047_4 (sequence is synthesized)
aaaaaaaaaaaagctttaacagttggctgtaatttggcttttattatcctttattaaaatacaaatgtcaatgcttttcctgcctttttaataccatgtcagtgtaacataggtatttat

SEQ ID NO: 791658 - DNA, 120 bp, Artificial Sequence
  ENSG00000272047_5 (sequence is synthesized)
tttgctcatccctgtgatctgtgcatttttgctgcgtggatgtgattgtttggtttcagttagaaacgtcatagatttgctgtttgaatatgccaaggtggggacttagacattatgtac

SEQ ID NO: 791659 - DNA, 120 bp, Artificial Sequence
  ENSG00000272047_6 (sequence is synthesized)
gtctcacaaatcctacctgcataccagtcagctctattgaggaagacaatgtaaaactaatgtaaactacagtttgcatttccctgaaaacagaatattgtttttaagagggttagaaac

SEQ ID NO: 791660 - DNA, 120 bp, Artificial Sequence
  ENSG00000272047_7 (sequence is synthesized)
aaccagtgggaaaggcacatgctgctttgtttagtttttccttgttcaaactttgttggtcacattttcccatctgtattcttttttattaagaaaacagcttagggaggctgaggtggg

SEQ ID NO: 791661 - DNA, 78 bp, Artificial Sequence
  ENSG00000272047_8 (sequence is synthesized)
acagccgaggttgctacaaaaacaccattgcactctggcctggacaacagagagaccctgcctcaaaaaaaaaaaaaa

SEQ ID NO: 791662 - DNA, 120 bp, Artificial Sequence
  ENSG00000272047_9 (sequence is synthesized)
cttattccctatgagaatacttatcaaacttatctaaaaaagaaaaataggaacagccatatgcaaagtcagcccaacaggaaaggacatattagattaaaatacattgcggcctgggct

SEQ ID NO: 791663 - DNA, 120 bp, Artificial Sequence
  ENSG00000272047_10 (sequence is synthesized)
ggaggctgaggcaggcagatcgcttgagtccaggagtcgaaaccctgtctctacaaaaaaaaaaatacaaaaatctgcctgttgtcccagccactggggaggctgaggtaggaggtcaag

SEQ ID NO: 791664 - DNA, 120 bp, Artificial Sequence
  ENSG00000272047_11 (sequence is synthesized)
aaaaaaaaatacaaaaatctgcctgttgtcccagccactggggaggctgaggtaggaggtcaaggctgcagtgaaccttgatcattgctactgccactccagcctaggtgacagagtgag

SEQ ID NO: 791665 - DNA, 120 bp, Artificial Sequence
  ENSG00000272047_12 (sequence is synthesized)
tgtgtgtatatatagcaagagagagttctgtgatcaattgaaggcaaaaacagtaacactgagaggggctttgcttcccttcctgaagatcatgtcattggggtgggttcctgtaaaggg

SEQ ID NO: 791666 - DNA, 120 bp, Artificial Sequence
  ENSG00000272047_13 (sequence is synthesized)
aattttccaagagaaaagagaattttcatgacctgtagactcttacaaatccattttacctgcttccttatggtatgtttattcaaagcacctgtgtaccatatttattcacttacacag

SEQ ID NO: 791667 - DNA, 120 bp, Artificial Sequence
  ENSG00000272047_14 (sequence is synthesized)
cattactgaatctggaaattttcagttaggtatattttacataattcccacccatataactcagtccatacagttcacagttttcattccctcatagcaatgcaaaaaattttgatgagt

SEQ ID NO: 791668 - DNA, 84 bp, Artificial Sequence
  ENSG00000272047_15 (sequence is synthesized)
ttttcattccctcatagcaatgcaaaaaattttgatgagttactactactaaaactagttaagtaaaagatgattcttaagaat

SEQ ID NO: 791669 - DNA, 120 bp, Artificial Sequence
  ENSG00000272047_16 (sequence is synthesized)
taccaaaatgttactaatgtatcttatatttcaggcatgtctaaatcaacttttagtatgcctcaggcatttgtcaccaaccttttatattaacatgaaacttagaaaatttttgataga

SEQ ID NO: 791670 - DNA, 120 bp, Artificial Sequence
  ENSG00000272047_17 (sequence is synthesized)
atcccagagttcaaaaggtattaggatttttgccactgaagtaaaaaagagaaaaaaagatatttatgagaaaactattgaacagtgactgtgttgtacccgagcaagttagaggaacgc

SEQ ID NO: 791671 - DNA, 120 bp, Artificial Sequence
  ENSG00000272047_18 (sequence is synthesized)
cacactttgagacgaatttaaaagtcctttatttagctggcagccaagaggtggctcacacttggaattctctcagctccgaggaaggggcttgattttcctttatactttggtttagga

SEQ ID NO: 791672 - DNA, 120 bp, Artificial Sequence
  ENSG00000272047_19 (sequence is synthesized)
aggggacgggagctcagttgcaacaattctacagaagtaaaaacatgcaaaaaattaaaaagacaaatggttacagagaaacaaacagttccaggtgcaggggctctaaatctatcataa

SEQ ID NO: 791673 - DNA, 120 bp, Artificial Sequence
  ENSG00000272047_20 (sequence is synthesized)
gatgtcaggtgtgggggctctgccagacacaaactcaaggctttatggtgtatctcttgagcgaaatcctgggaacttcgtacattgcttgcttcagtaccttatgagttaattggactc

SEQ ID NO: 791674 - DNA, 120 bp, Artificial Sequence
  ENSG00000272047_21 (sequence is synthesized)
tttgatatgttgagagtcagcttacacaagttaactccttgaggaaagggggtgggtaaggagtccttgatgtcctgtaaatgaaggaaccaaatggagttcctccggctttctcagcta

SEQ ID NO: 791675 - DNA, 120 bp, Artificial Sequence
  ENSG00000272047_22 (sequence is synthesized)
agggagagcttattcacatggaaacaaggctaggtgattaagggagaaagggacagtctgaaaacaaggttagtaaaaacaaggttaggtattagaactgcaaagagtattaagtgaaat

SEQ ID NO: 791676 - DNA, 120 bp, Artificial Sequence
  ENSG00000272047_23 (sequence is synthesized)
aagtgaaggaaaatatgagctcttatttttaaaaagttgtgttggggcaaatgttaaatatctttctttctctggacattattaagaaagatagagtgatgtgaatgataggaagcccac

SEQ ID NO: 791677 - DNA, 120 bp, Artificial Sequence
  ENSG00000272047_24 (sequence is synthesized)
ctgtaaccacttagctgacatgtccaactatgggtgaacaggaaataagcgacattcacctaggctgtttattggaatctgactagcattatttgatttggcatactttacatgtccaga

SEQ ID NO: 791678 - DNA, 120 bp, Artificial Sequence
  ENSG00000272047_25 (sequence is synthesized)
acaaggctgttggtgcttggcaccaagaaatttatgactttttttttttttttaaataaagtcctaaaggtagcattaaaatgacttaactggaggcaggaggatcactgaagcccagga

SEQ ID NO: 791679 - DNA, 120 bp, Artificial Sequence
  ENSG00000272047_26 (sequence is synthesized)
gtttgaagctgcagtaagctaagaaggtgccactgcactgcagcctggatgacagagtgaaactttgtctcttaatagaactatggactgaagttgtgatattgagtgttatatttctca

SEQ ID NO: 791680 - DNA, 120 bp, Artificial Sequence
  ENSG00000272047_27 (sequence is synthesized)
ataaaggttttttcttttaatactgtattaggtcaaattcaaggtcttaattccttgaattccaatttccttgtgaaatttcatgtgattaatttaaaattccagggatcctatctaaca

SEQ ID NO: 791681 - DNA, 120 bp, Artificial Sequence
  ENSG00000272047_28 (sequence is synthesized)
tcacagttgatggatataacaatgtattttgagaaatcagttttggtgaacagtaacagcattactgataataggcaacaaacactactgcattttatttctgataggcattataggtgg

SEQ ID NO: 791682 - DNA, 120 bp, Artificial Sequence
  ENSG00000272047_29 (sequence is synthesized)
tagaacaggtgatttgacataattgtacttttttctgagaagttggtagtgtacttactactctattttgcagttatacaataaatcttacttagctgacaactaggagtaaaagctctg

SEQ ID NO: 791683 - DNA, 120 bp, Artificial Sequence
  ENSG00000272047_30 (sequence is synthesized)
acaaaaagcctctgctgtaactaaaatactgagatcattctatcttaacaaacttaacagatggggaaggggtatattttaaagatggagaaatgatgcagtttgcaaatatagtcaata

SEQ ID NO: 791684 - DNA, 120 bp, Artificial Sequence
  ENSG00000272047_31 (sequence is synthesized)
aatattctcaagtgtacgtagctcaatttcatttgcagcaaagataacactgaaatgtctatggatgagattattggataaacttttttaaaaacactgttctcaagataggcaagtgat

SEQ ID NO: 791685 - DNA, 76 bp, Artificial Sequence
  ENSG00000272047_32 (sequence is synthesized)
aacttttttaaaaacactgttctcaagataggcaagtgattaagagcactgactgggccgggcgcggtggctcacg

SEQ ID NO: 791686 - DNA, 120 bp, Artificial Sequence
  ENSG00000272047_33 (sequence is synthesized)
gatcgtgccactgcactccagccggggtgacagagcgagactcccacccatctcaaaaaaaataaaaatgaaaagcactgattgaatctagattccttgagtccaagtgtcagatctctg

SEQ ID NO: 791687 - DNA, 120 bp, Artificial Sequence
  ENSG00000272047_34 (sequence is synthesized)
gatctctgcttactagctctgggatctcagatgtttcgttgattggatttctttgtgctcatttgtgtaaacaggaatgcccgtctttaaagactattaaaatgaatgtgagttaacaca

SEQ ID NO: 791688 - DNA, 120 bp, Artificial Sequence
  ENSG00000272047_35 (sequence is synthesized)
caagaggtcttcaaaaagttgatggaaaatgcatattatgaaaaaaattatgcatagatttcaaaaatctttgcagcaaaataaactcatcattataacatgtctgaacaggatctagtt

SEQ ID NO: 791689 - DNA, 120 bp, Artificial Sequence
  ENSG00000272047_36 (sequence is synthesized)
tgaggcactaagaaggatatcagtttaaatagagcccctgtcagaacaatatgaattctgctaaaactgaagcaagaacaaacatcaaatttatggcaaagcttaggtggaagaatggtg

SEQ ID NO: 791690 - DNA, 120 bp, Artificial Sequence
  ENSG00000272047_37 (sequence is synthesized)
caatcattgatgctttgcaaaaagtttatgggaacaacgccccaaggaaatcagtttacaaatggataattcattttaagaaaggacaagacaatgttgaagatgaaacctacagcagca

SEQ ID NO: 791691 - DNA, 120 bp, Artificial Sequence
  ENSG00000272047_38 (sequence is synthesized)
gaccatgccacttcgtgaggaaaaaattatctcattcatgccctacttgaagaggaccaatgattaacagcagaaacgatagccaacacaatatgctcctcagttggttcagcttttata

SEQ ID NO: 791692 - DNA, 120 bp, Artificial Sequence
  ENSG00000272047_39 (sequence is synthesized)
aatctgactgaaaaattaaagttgagcacactttccactcaatggataccaaaaccatccagcccaggtcagctgcagacaaaagcagagctttcgatggaaatgtcaaacaagtgagat

SEQ ID NO: 791693 - DNA, 120 bp, Artificial Sequence
  ENSG00000272047_40 (sequence is synthesized)
caagatcctgaagcatttcttcaaagaattgtagcaaaaacagacttttaaaaccttgaattcagagacaggtataaagactgcttggtgattttgaaaggactgagatcattttgggag

SEQ ID NO: 791694 - DNA, 120 bp, Artificial Sequence
  ENSG00000272047_41 (sequence is synthesized)
agatcatcttcagaaaatgaccagatacaacaagaatttaacatggcagccaaaccaacccactaacacacatttaaataagatacccaaatgcagaaagaaaagcacagtcgtcatgca

SEQ ID NO: 791695 - DNA, 120 bp, Artificial Sequence
  ENSG00000272047_42 (sequence is synthesized)
aaatagtcactactcattcaaaaactctatagttgtctgagtcgttatgctcaaaatatccaataatatttcttttgctgagctgtaaaataattattttgcaaacataaaagaaaaaaa

SEQ ID NO: 791696 - DNA, 120 bp, Artificial Sequence
  ENSG00000272047_43 (sequence is synthesized)
aaagaattgtaacagaaacatggctttaccagtatgaccctcaagacaaaatacaaaacaatggctaccaagaggtggaagtggcccagtcacagcaagagcagattgatcaagagcaaa

SEQ ID NO: 791697 - DNA, 120 bp, Artificial Sequence
  ENSG00000272047_44 (sequence is synthesized)
ggtcatggtaacagttttttggatcctcaagtcattttgcttgttgactttttggagggccaaataaagatatcatctgcttattatgagagtgtttcgagagaaatccaaagcttagca

SEQ ID NO: 791698 - DNA, 120 bp, Artificial Sequence
  ENSG00000272047_45 (sequence is synthesized)
gagaaacgcctgggaaagcttcaccagagggtcttccaccgtgacagttcccctgcgcattcctctcataaagcaagggcagtttagctagaatttctatcaaaaatcattaggtatcca

SEQ ID NO: 791699 - DNA, 120 bp, Artificial Sequence
  ENSG00000272047_46 (sequence is synthesized)
tctcccagtcctgatttggctccttctgacttctttttgtttcccaatcttaaaaaaatccctgaagggcacctgtttttcttcagctaataaaaaagacatggttaatttcccaggacc

SEQ ID NO: 791700 - DNA, 120 bp, Artificial Sequence
  ENSG00000272047_47 (sequence is synthesized)
ctcagttctttagggatagactgaatggctggtatcattgcttgaacttaatggagcttatgttgagaaataaaagaaattatattttatttttatcttttaattctatttttccatgaa

SEQ ID NO: 791701 - DNA, 120 bp, Artificial Sequence
  ENSG00000272047_48 (sequence is synthesized)
ctttttgaagtcccctcagatataaagcagaacgttatgaaactgagttaccttgaatctagaagagtacaatgataaaggggaagatagaaacacacacatatgcgttgttttccccac

SEQ ID NO: 791702 - DNA, 120 bp, Artificial Sequence
  ENSG00000272047_49 (sequence is synthesized)
tttcacaatgccgtgcagaaactaacagatgaaggaggagaatccctaaaaacagagcattgggtagctagtccaccagcggtctgatgctttcattgatctcaaaactgtctctgagta

SEQ ID NO: 791703 - DNA, 120 bp, Artificial Sequence
  ENSG00000272047_50 (sequence is synthesized)
actctaccaggaaagttgtctggagggttaacatttctgaaaccatttttatctttgccttcattcttgaatgataattagtctcgaatgtttggatcacaatccattgaaagactaggc

SEQ ID NO: 791704 - DNA, 120 bp, Artificial Sequence
  ENSG00000272047_51 (sequence is synthesized)
tattttttcactgtcctcagacatttactgagtccagtttggactttattttattttattttttttgaaacaagatctcgctctgttgctcaggctgaagtgcaatagcgcaaactcggc

SEQ ID NO: 791705 - DNA, 89 bp, Artificial Sequence
  ENSG00000272047_52 (sequence is synthesized)
atccctataggcatgcgccaccacactttgctaatcttgtatttttggtagagacggggtttgcaccatgttggccaggctggtctcga

SEQ ID NO: 791706 - DNA, 86 bp, Artificial Sequence
  ENSG00000272047_53 (sequence is synthesized)
caaagtggggacttaacttctgaagaactctttctgtttagattgcaggagcgttctctcggctcatctcttgttttctcacccag

SEQ ID NO: 791707 - DNA, 120 bp, Artificial Sequence
  ENSG00000272047_54 (sequence is synthesized)
aggagcgttctctcggctcatctcttgttttctcacccagctgttcttcttctagttggccatcattcttcatccctccctccctttcctgcagttaattatttctttgaaattttaaaa

SEQ ID NO: 791708 - DNA, 120 bp, Artificial Sequence
  ENSG00000272047_55 (sequence is synthesized)
cttcttaatgttgcctggaatacatgagtcttcctgatctcttcaaacggggtttgttttgttttgctttggggagaattcttttgacgtttttgaataagctgttaacaactttaatac

SEQ ID NO: 791709 - DNA, 120 bp, Artificial Sequence
  ENSG00000272047_56 (sequence is synthesized)
ctgtcttgtttgttttcttcagaaatttgttaattctccatgattagcacctttatgtggttatctcattattttcattcctttttaattctctgttttaggaatgcttgtcaaattcgt

SEQ ID NO: 791710 - DNA, 120 bp, Artificial Sequence
  ENSG00000272047_57 (sequence is synthesized)
cactaaaattgatttactttcttgaaaacctgtttctgctgctcccaacatgatttaatcttggctactgagcttttggttacgttgcactccctttaaaattactccgtttaagtacag

SEQ ID NO: 791711 - DNA, 120 bp, Artificial Sequence
  ENSG00000272047_58 (sequence is synthesized)
tgttcactctttgggtaatgtgtacaatagaagcccaatccccacctatacccaatatatccatgggacaagcatgtacatgcaccccctgagtctaaaataaaaattttaaaaaaacta

SEQ ID NO: 791712 - DNA, 120 bp, Artificial Sequence
  ENSG00000272047_59 (sequence is synthesized)
gcactctgccggcaacgccgaggcgcttctgcatctgtgggccgagcattcttcaggtcatctgaaccttctgagaaaacatggtcaacgtcttgaaaggagtgcttatagaatggctgg

SEQ ID NO: 791713 - DNA, 120 bp, Artificial Sequence
  ENSG00000272196_0 (sequence is synthesized)
cgactttcccgatcgccaggcaggagtttctctcggtgactactatcgctgtcatgtctggtcgtggcaagcaaggaggcaaggcccgcgccaaggccaagtcgcgctcgtcccgcgctg

SEQ ID NO: 791714 - DNA, 120 bp, Artificial Sequence
  ENSG00000272196_1 (sequence is synthesized)
gccttcagttcccggtagggcgagtgcatcgcttgctgcgcaaaggcaactacgcggagcgagtgggggccggcgcgcccgtctacatggctgcggtcctcgagtatctgaccgccgaga

SEQ ID NO: 791715 - DNA, 120 bp, Artificial Sequence; identical to SEQ ID NO: 737923
  ENSG00000272196_2 (sequence is synthesized)

SEQ ID NO: 791716 - DNA, 120 bp, Artificial Sequence; identical to SEQ ID NO: 737924
  ENSG00000272196_3 (sequence is synthesized)

SEQ ID NO: 791717 - DNA, 80 bp, Artificial Sequence
  ENSG00000272325_0 (sequence is synthesized)
acgccgctgacgcatcgcgcccaagatggcggcgcggtcgtcgtcgggggtggcggcggcagagggggcggcggccctgg

SEQ ID NO: 791718 - DNA, 120 bp, Artificial Sequence
  ENSG00000272325_1 (sequence is synthesized)
gtgacggtggcagcggcggcgcgggacctgggcctgggggaatgaggcggccgcggcgggccagcggcggagccgtgtagcggagaagctccccctccctgcttcccttggccgagccgg

SEQ ID NO: 791719 - DNA, 120 bp, Artificial Sequence
  ENSG00000272325_2 (sequence is synthesized)
gtccagagcgggctccccacccctcgactcctgcgacccgcaccgcacccccacccgggcccggaggatgatgaagctcaagtcgaaccagacccgcacctacgacggcgacggctacaa

SEQ ID NO: 791720 - DNA, 120 bp, Artificial Sequence
  ENSG00000272325_3 (sequence is synthesized)
gaagcgggccgcatgcctgtgtttccgcagcgagagcgaggaggaggtgctactcgtgagcagtagtcgccatccagacagatggattgtccctggaggaggcatggagcccgaggagga

SEQ ID NO: 791721 - DNA, 120 bp, Artificial Sequence
  ENSG00000272325_4 (sequence is synthesized)
gccaagtgtggcagcagttcgtgaagtctgtgaggaggctggagtaaaagggacattgggaagattagttggaatttttgagaaccaggagaggaagcacaggacgtatgtctatgtgct

SEQ ID NO: 791722 - DNA, 120 bp, Artificial Sequence
  ENSG00000272325_5 (sequence is synthesized)
cattgtcactgaagtgctggaagactgggaagattcagttaacattggaaggaagagggaatggtttaaaatagaagacgccataaaagtgctgcagtatcacaaacccgtgcaggcatc

SEQ ID NO: 791723 - DNA, 120 bp, Artificial Sequence
  ENSG00000272325_6 (sequence is synthesized)
atattttgaaacattgaggcaaggctactcagccaacaatggcaccccagtcgtggccaccacatactcggtttctgctcagagctcgatgtcaggcatcagatgactgaagacttcctg

SEQ ID NO: 791724 - DNA, 120 bp, Artificial Sequence
  ENSG00000272325_7 (sequence is synthesized)
taagagaaatggaaattggaaactagactgaagtgcaaatcttccctctcaccctggctctttccacttctcacaggcctcctctttcaaataaggcatggtgggcagcaaagaaagggt

SEQ ID NO: 791725 - DNA, 120 bp, Artificial Sequence
  ENSG00000272325_8 (sequence is synthesized)
gtattgataatgttgctgtttggtgttaagtgatggggctttttcttctgtttttattgagggtgggggttgggtgtgtaatttgtaagtacttttgtgcatgatctgtccctccctctt

SEQ ID NO: 791726 - DNA, 120 bp, Artificial Sequence
  ENSG00000272325_9 (sequence is synthesized)
cccacccctgcagtcctctgaagagaggccaacagccttcccctgccttggattctgaagtgttcctgtttgtcttatcctggccctggccagacgttttctttgatttttaattttttt

SEQ ID NO: 791727 - DNA, 120 bp, Artificial Sequence
  ENSG00000272325_10 (sequence is synthesized)
tttttattaaaagataccagtatgagatgaaaacttccaataatttgtcctataatgtgctgtacagttcagtagagtggtcactttcactgcagtatacatttatctacacattatata

SEQ ID NO: 791728 - DNA, 120 bp, Artificial Sequence
  ENSG00000272325_11 (sequence is synthesized)
tcggacatataatatgtaaataaatgacttctagaaagagaaatttgtttaatttttcaaggtttttttctcttttaatttgggcatttctagaattgagagcctcacaattaacatacc

SEQ ID NO: 791729 - DNA, 120 bp, Artificial Sequence
  ENSG00000272325_12 (sequence is synthesized)
tttttgttttcgatgctagtggctgggcaggttgccctgtcctttctctatttcccagtcattgactgtagatatgggaagagtttagctaccttcatagtgctcccaggactcatggcc

SEQ ID NO: 791730 - DNA, 120 bp, Artificial Sequence
  ENSG00000272325_13 (sequence is synthesized)
tttccttctttaagctgtatttccctgcccagaaagaaacaggaagaaacctttttttatttttttatttttttttaaccaagcaaggagcaaatggcctcagcccagatctgtaaaaac

SEQ ID NO: 791731 - DNA, 120 bp, Artificial Sequence
  ENSG00000272325_14 (sequence is synthesized)
aatgatagaaattgaattctgccccacatgttgacagtagagttggaactggattcttgggattacttatctaaaaaactggagcatcaggtccatttctgttctgctggtttggaatct

SEQ ID NO: 791732 - DNA, 120 bp, Artificial Sequence
  ENSG00000272325_15 (sequence is synthesized)
tttccgtaatgctatttattgccaacaatggcctctctttgtgtccatatatgccttacaccgtgctgacctgggtatcatccatgtgctctgaagcatccaactttactttgcaggtgc

SEQ ID NO: 791733 - DNA, 120 bp, Artificial Sequence
  ENSG00000272325_16 (sequence is synthesized)
atcaatgtagtcctgtccctgaactgagtaaccgtgttcctgaaaagtacactagggaaattcacctgcttgcttgtctttgtattggcatggcacttgtgattgcaccatggagcatgc

SEQ ID NO: 791734 - DNA, 120 bp, Artificial Sequence
  ENSG00000272325_17 (sequence is synthesized)
tcagagctattaaattggtctcccatctcccaccaggatatgaaaggtccatatgggaggccacgtaatcacttattacagtggttacataatacactggctcactgcagactctcttgt

SEQ ID NO: 791735 - DNA, 120 bp, Artificial Sequence
  ENSG00000272325_18 (sequence is synthesized)
tttttgatacagtttcgtgctggcttcatttgccaattgtgttgtttagttcggaagtaagagggtcttgagattgaggggtagggagggctacactgactgatccgtggcttaagacag

SEQ ID NO: 791736 - DNA, 120 bp, Artificial Sequence
  ENSG00000272325_19 (sequence is synthesized)
gagattatctctgtactccagtggcatctccttagccaagatgtgaaattaaaatcatagttcgcctcatttaaaaattctaataaagcactcaaactttgaaaagcttttacttttccc

SEQ ID NO: 791737 - DNA, 120 bp, Artificial Sequence
  ENSG00000272325_20 (sequence is synthesized)
tcctactaaaagaaatgtatgtacctcatagccctgtgtcatttagtgttcagcacttttgggaacatcagttggtgaactttaaattttgctgtctactcactgggcacggtggctcac

SEQ ID NO: 791738 - DNA, 120 bp, Artificial Sequence; identical to SEQ ID NO: 791331
  ENSG00000272325_21 (sequence is synthesized)

SEQ ID NO: 791739 - DNA, 120 bp, Artificial Sequence
  ENSG00000272325_22 (sequence is synthesized)
taccatgatacctctgggaaaggaattatattcccaaggagaggtcccattggataagaacaataccatgggacttgagtctgaatgccaacttactattcacacatccttcttaaaaac

SEQ ID NO: 791740 - DNA, 120 bp, Artificial Sequence
  ENSG00000272325_23 (sequence is synthesized)
gaacacactgtttcttttcctgacctagagcattctaaagttctgttcaaataaataaagggcaaaataaagtagatttaaccaagtgccaggtggaattcaaaaaacacattcttccag

SEQ ID NO: 791741 - DNA, 120 bp, Artificial Sequence; identical to SEQ ID NO: 791334
  ENSG00000272325_24 (sequence is synthesized)

SEQ ID NO: 791742 - DNA, 62 bp, Artificial Sequence
  ENSG00000272325_25 (sequence is synthesized)
caaaaattagctgggcatgatggtgcactcctgtaatcccagctacttggtaggctgaagca

SEQ ID NO: 791743 - DNA, 120 bp, Artificial Sequence
  ENSG00000272325_26 (sequence is synthesized)
ataaataaataagaaaataaaacggaactgcagtgctaacagtaatttatacatttttaaatgttctgagtatgttttgactgggctagtgtaacaatatactaccctgaaagtgcagtt

SEQ ID NO: 791744 - DNA, 120 bp, Artificial Sequence
  ENSG00000272325_27 (sequence is synthesized)
ttgattgttgttggtgtctttgggtcaggaaagtgaactgtgccaagaagtatttttcagtgacatgaatggattcctgttaatgcaattgactgagagattgtgcttacgctttcttaa

SEQ ID NO: 791745 - DNA, 120 bp, Artificial Sequence
  ENSG00000272325_28 (sequence is synthesized)
ctgacaaaaagaggctttgtccaacatcagaattgttgaaactggtgctgttttctgttgcactgggattctgatgatctgggattttccctccttggcacagtaaacaccatgactgtc

SEQ ID NO: 791746 - DNA, 120 bp, Artificial Sequence
  ENSG00000272325_29 (sequence is synthesized)
tttattgagaatgtcgtcacagtcctttagtgatagattagttagacccatggttgcaatacctttatctccccaaagaaaataatcaaaagaaagcacaaaagctaccctgtttgcaga

SEQ ID NO: 791747 - DNA, 120 bp, Artificial Sequence
  ENSG00000272325_30 (sequence is synthesized)
atatttcactgacattgatttgtcattaattctaccagagctgacctcattcaggcttgatagaaacaggttcctatgtttagggcagatccctagcctctcgctcacagtgagtctgca

SEQ ID NO: 791748 - DNA, 120 bp, Artificial Sequence
  ENSG00000272325_31 (sequence is synthesized)
tgtcctagattctggttattgctggagcatccattaaagtctaccaaactcaggacagaagaagatagcagtggatttgtaaaaatttttagtttataaattacagtcattggggaaaca

SEQ ID NO: 791749 - DNA, 120 bp, Artificial Sequence
  ENSG00000272325_32 (sequence is synthesized)
ctagtaaggtcatgtgatcttttggaccaggattttctctctgtcttctctctgggtgtgtgtgtgtgtatgtacagaagggctaccaggaagtgtcaaccatgttagattttctgtagt

SEQ ID NO: 791750 - DNA, 120 bp, Artificial Sequence
  ENSG00000272325_33 (sequence is synthesized)
cttccagaaacagtgcagcccatacaacaggaatcttaattttcctcacagcaaatataacaggatggaacagttagtgttttgttttcacaagtgtccaccactccatctgccctgcat

SEQ ID NO: 791751 - DNA, 120 bp, Artificial Sequence
  ENSG00000272325_34 (sequence is synthesized)
ggagagggctctctcactgctagatctaggctgagccatctggaaggatcaaagggtgtgggagtatcaccccctctcaggctgcagaaggtctcgagggtggcgtcacagcaggatttc

SEQ ID NO: 791752 - DNA, 120 bp, Artificial Sequence
  ENSG00000272325_35 (sequence is synthesized)
cgccttctgcattgcactgcacagccccatggaacatgaggcacttgaggccttgcttcttggagcctctggggagcagagtaggtcactgccctctgggagtgttttgcagtagttttg

SEQ ID NO: 791753 - DNA, 120 bp, Artificial Sequence
  ENSG00000272325_36 (sequence is synthesized)
taaatgtgttgctacatagtcaagttcctttgtggcaaagaaatattttgttttgatattaggagccagcccatgtaatgcctctcaggcttgcttgcttagaagaaaaaagtcaccctt

SEQ ID NO: 791754 - DNA, 120 bp, Artificial Sequence
  ENSG00000272325_37 (sequence is synthesized)
tgtggtttttaagaaaaaaattctgtgcagatctgttcctcctcctgctccttcccttttctctacatacagtgctcattggaggctcctgctaaaccttcttaaccagagaaataatag

SEQ ID NO: 791755 - DNA, 120 bp, Artificial Sequence
  ENSG00000272325_38 (sequence is synthesized)
tctagtactttcttaatgcctttgttggagtccgcatcctcatctttaaaaaaaaaaaaaaaaaaacagcttagcctaagccacattcactttttttagttcacaaaaaggatttaatag

SEQ ID NO: 791756 - DNA, 120 bp, Artificial Sequence
  ENSG00000272325_39 (sequence is synthesized)
ccacaatgtgatttttgccacaactgtgtgattttaatattctctaatatcaagggcggatttagaattgcaggaaatacctggagaaatcacagtggaatgaatttttgctttaagaga

SEQ ID NO: 791757 - DNA, 120 bp, Artificial Sequence
  ENSG00000272325_40 (sequence is synthesized)
aatgagagttggctgtctctgtaattgataatacagcttcatcctagtcccatctgcatttcagaaaataaccctcatctttacaaaacacaggacacttgtgggacagttaactcaagc

SEQ ID NO: 791758 - DNA, 120 bp, Artificial Sequence
  ENSG00000272325_41 (sequence is synthesized)
agctatggggagggaggagattattgaatggtgattaaataatgcaaatggctcttctgtttcttaaagactgtggaagaggtcagactgcccagttgaggtgggcagttcatactgctc

SEQ ID NO: 791759 - DNA, 120 bp, Artificial Sequence
  ENSG00000272325_42 (sequence is synthesized)
agttgaggtggcagtcatttattctgagtcctgttggatagagcctatctcctcaaggctacagaggcttccaggatatggagctgtgcatgttaatggctcagccttgcctccatcagg

SEQ ID NO: 791760 - DNA, 120 bp, Artificial Sequence
  ENSG00000272325_43 (sequence is synthesized)
gcacctgcctaacttggagcaagtgggagagcaccctagagtcatcctctgtgctgtttcgtgagttttgcagcggagacttcaccatccggaggagctgtgtttctgtgtcacttggga

SEQ ID NO: 791761 - DNA, 120 bp, Artificial Sequence
  ENSG00000272325_44 (sequence is synthesized)
tatcacctaaaaatgaaacatttgatattttaaggtataaaaaaaaagtaaattggggaacattggctgcagtccctaaaagatactgttgtctgtgcatcaggttagcttgaggtcacc

SEQ ID NO: 791762 - DNA, 120 bp, Artificial Sequence
  ENSG00000272325_45 (sequence is synthesized)
acaggtcctgggagcccagagagtttaggcatactctcctttggaggccagcagcctttcacaaaccctgcctctaaaagggcggtttcacatttgaccatgtttttgcattagcctcag

SEQ ID NO: 791763 - DNA, 120 bp, Artificial Sequence
  ENSG00000272325_46 (sequence is synthesized)
aaactcttgtctttagctgataacctttgagggatgtgagaagcctagttggagcatctgagaaaatgatacctctcaccttcaaattaatcaaatagtttgtccttctagtccccttat

SEQ ID NO: 791764 - DNA, 73 bp, Artificial Sequence
  ENSG00000272325_47 (sequence is synthesized)
ggaatcccattttgtgatgatttgggcacactacttgagctgaggctagcagtcacatgattttggctgtctc

SEQ ID NO: 791765 - DNA, 120 bp, Artificial Sequence
  ENSG00000272325_48 (sequence is synthesized)
cttgagctgaggctagcagtcacatgattttggctgtctctgacctgaagcttttgaagtaaggttatgtctcttccctgaagctttgtttatagtggtaatttggtgagtttgagcttt

SEQ ID NO: 791766 - DNA, 120 bp, Artificial Sequence
  ENSG00000272325_49 (sequence is synthesized)
gagcttgtcttagaaaataagactgtccacctggggaggggagcttatagggaacccgtgttaactcagaatgctgaagaaagtgcttttagccaacaaaagtaagattactatctagaa

SEQ ID NO: 791767 - DNA, 120 bp, Artificial Sequence
  ENSG00000272325_50 (sequence is synthesized)
ggtggaaagaagtcattgcttctgttcctccagcagtcagttgactctaggtttcctttggtttatatccccagttcttaatactaaaacttatttgacttcctatcaggaagcacacaa

SEQ ID NO: 791768 - DNA, 120 bp, Artificial Sequence
  ENSG00000272325_51 (sequence is synthesized)
aaaaagcgtcatttaaaaccctggatataggctttaaaggatacaaaaacagcagcattgtcgttttgccaggttcatcaccattttgatgtgctacccatccttccaccctccctttcc

SEQ ID NO: 791769 - DNA, 120 bp, Artificial Sequence
  ENSG00000272325_52 (sequence is synthesized)
tgcccccaagcctcccagccaggccagatgtgaagattctattaatcactgtttcagagaacattaattcttgtatagaataattatctactaaattgcttattatctgtgactaccttg

SEQ ID NO: 791770 - DNA, 120 bp, Artificial Sequence
  ENSG00000272325_53 (sequence is synthesized)
cagagaacatctcaacagtgcagtaaaatagctctcctagacttgagcttccagccaggcatttagatcactcttaagcctttgtggaattctgaggaaaaaaagcaagatgcctcaatg

SEQ ID NO: 791771 - DNA, 120 bp, Artificial Sequence
  ENSG00000272325_54 (sequence is synthesized)
ccaatgctgggccataagattctactcccctccctgtagggtggggcgcgtggctcagctttggaaaatcattttgccagtaatattgcctgtgaatccctttaagaagtcgtcctgatc

SEQ ID NO: 791772 - DNA, 120 bp, Artificial Sequence
  ENSG00000272325_55 (sequence is synthesized)
tgagcctgtctttctgagcactttggtgctgaattgaaaatggtaagctaaagcagtgacagatccacgtagcctctttaacctctttattatcttgccaaaaaaaaagtttctcaggtt

SEQ ID NO: 791773 - DNA, 120 bp, Artificial Sequence
  ENSG00000272325_56 (sequence is synthesized)
aaacctttgtctttaacctccctttgttgtggagaaaatgtgtcactaatcagtggtccaagggatatctagctttggttactcagttcctgcagcataacagatatgacttatgccagg

SEQ ID NO: 791774 - DNA, 120 bp, Artificial Sequence
  ENSG00000272325_57 (sequence is synthesized)
gaaggtagaggctgattatggagacacccaggaacaggaataagaagggataggtctgctccacgtagaacctccccagatcggaagttaagtcttggagagtttccaaagtgctgaagt

SEQ ID NO: 791775 - DNA, 120 bp, Artificial Sequence
  ENSG00000272325_58 (sequence is synthesized)
aaaaaggagacttggagggcctttgcttaatgagcaagaggcttgtgtcctcccaagaacatgagggagttcagaagggagctatagctcacagacagaaacctgcccgctcaccccatc

SEQ ID NO: 791776 - DNA, 120 bp, Artificial Sequence
  ENSG00000272325_59 (sequence is synthesized)
cctcgtgactgggagcatgtttgctcagaattttctaagaggactctcccttcaaaaatccaatttgctcccagaatgttgtttagcctctgagaatctcactctttcatttccatctgt

SEQ ID NO: 791777 - DNA, 120 bp, Artificial Sequence
  ENSG00000272325_60 (sequence is synthesized)
gaatggacatagatgtgttgctcagggatcagaaacatcagagtccagggcccagtggcatggtgttgcattagtagttagaaaagtaattggtcagctctactgtaaaagaaataagta

SEQ ID NO: 791778 - DNA, 120 bp, Artificial Sequence
  ENSG00000272325_61 (sequence is synthesized)
tgtagtacagttttgtaaatgtcaggtctgttctattgttttgtgatctgaagactgtcaaactggttgataatcaaagaaaaggttggtggttagaataagtaaaatttcagttagaaa

SEQ ID NO: 791779 - DNA, 120 bp, Artificial Sequence
  ENSG00000272325_62 (sequence is synthesized)
gatatagcttaccagttttccatgtgcttaaggaagtcaagaatatttcaggttgttgagaactgttgtaaaatggaattgaagctagtgtctctcaccttcttaggtgtatcagagaga

SEQ ID NO: 791780 - DNA, 120 bp, Artificial Sequence
  ENSG00000272325_63 (sequence is synthesized)
ggaagtggaaggccagtagtagcatcttcatacttacttttgccagcccagcctccatttcaaagactttgtcttccatcctatccaatgacatggtcagggatgggctctgaggaggca

SEQ ID NO: 791781 - DNA, 120 bp, Artificial Sequence
  ENSG00000272325_64 (sequence is synthesized)
gtgaggccccaccttggtttgctccactgtggtgtgtagtctccaaacagcttaagggtttttaagttttctcacgattacctccactccactcatctactatcagcatcagaaaggtta

SEQ ID NO: 791782 - DNA, 120 bp, Artificial Sequence
  ENSG00000272325_65 (sequence is synthesized)
acatccctgggaccattctacttataaaagagatgaactagtgtgctttctccccttttccaggtgtgccatccatatacaatctcctcttggccaagttcaacaaatgtttccagggaa

SEQ ID NO: 791783 - DNA, 120 bp, Artificial Sequence
  ENSG00000272325_66 (sequence is synthesized)
ccccgtgggttgaggcaaagtagccaagatgtattgagttaagtttttctagaggacaaaagtatttcttgtcccttttccctcatgctcatatgttttagctgaggcgtaaatggccaa

SEQ ID NO: 791784 - DNA, 120 bp, Artificial Sequence
  ENSG00000272325_67 (sequence is synthesized)
gttgagtaatatctgtggaactgagacagagagccagggacccatgtacccagggaccagtcccctggggaatcacacagtggctcagactagactgctctatcccaccagaactctgct

SEQ ID NO: 791785 - DNA, 120 bp, Artificial Sequence
  ENSG00000272325_68 (sequence is synthesized)
gctgttcatttccatcaggaccacccaggaaagcaaataagttagccttctcatcattaggtcacctaatctcttgggttgcaggatgagagcatatatagatctcctgtttagagagtg

SEQ ID NO: 791786 - DNA, 120 bp, Artificial Sequence
  ENSG00000272325_69 (sequence is synthesized)
tgttcataattgtagaaagggatagaaaatggaataaccaagaggctgtgtcattttttaagaggatggcaaggatgacctcaaatgagctcaacaaaactgggaatccaaggaatggtg

SEQ ID NO: 791787 - DNA, 120 bp, Artificial Sequence
  ENSG00000272325_70 (sequence is synthesized)
cttgtagggaaagagaggtcagttgtggtccttaaacctcttggcaccttgtgcgggttataaaacaaggagctggagtaaaattgcccttacccccaatccaaatgctgtccaggattt

SEQ ID NO: 791788 - DNA, 120 bp, Artificial Sequence
  ENSG00000272325_71 (sequence is synthesized)
aggagctacccaacctgtggttatatggtgttggtttccattttttgtttgtttgcttgtttccaaaatagccttgcttggtactgcatggaaagttcaagcttttcttcttgcccgctc

SEQ ID NO: 791789 - DNA, 120 bp, Artificial Sequence
  ENSG00000272325_72 (sequence is synthesized)
agggctggcctcttccccgtgtcttcacagcgtccctaaggaagatttttgcagcactctctggagctgaggggagtgaaatttggtccagagaaggcggaaggaaatagttttcctgtt

SEQ ID NO: 791790 - DNA, 120 bp, Artificial Sequence
  ENSG00000272325_73 (sequence is synthesized)
tccttttctcgaggtggatgtcctcaggcttccttcacacctccttctcatgggtgcggctggcagtacagtcaggctgtggaggagggctgagaagaaaggggcactggtccagcccca

SEQ ID NO: 791791 - DNA, 120 bp, Artificial Sequence
  ENSG00000272325_74 (sequence is synthesized)
ggtttggtctgagacaggtacacagcagataccatcccaccttcctctctaaagaacaggccagccacacatataaccctttccctactttactaatgtatcccttatgtggtaccagca

SEQ ID NO: 791792 - DNA, 120 bp, Artificial Sequence
  ENSG00000272325_75 (sequence is synthesized)
atggaggacaggcagacttaccccctgccatctagagagaatgttgttattacccgtaaaacttgaccacccccatatcccactcctttttgtaaaaacaaatgcttaaacctgtgagcc

SEQ ID NO: 791793 - DNA, 120 bp, Artificial Sequence
  ENSG00000272325_76 (sequence is synthesized)
tgccgttcctttctatgtgttaatcagtttccttccatttgagctgtgtgggagggaagggcattgaaattgtaggttgtaatcttgtgccaaccaataaaaaccagtatttcacacaca

SEQ ID NO: 791794 - DNA, 80 bp, Artificial Sequence
  ENSG00000272333_0 (sequence is synthesized)
gaaagagtgcgggtagctctgcggcgcggcggtggcgcgacggggccgggcggagccgagcccggggaggacacggccct

SEQ ID NO: 791795 - DNA, 120 bp, Artificial Sequence
  ENSG00000272333_1 (sequence is synthesized)
gtgggccggcccgcgggtccagcggggccggggacggggtcggggccggggctggggcccgagtcgaggctgcgtgccggaggaggagagcagtgacggggaatccgacgaggaggagtt

SEQ ID NO: 791796 - DNA, 120 bp, Artificial Sequence
  ENSG00000272333_2 (sequence is synthesized)
gaggagtttcagggttttcattcagatgaagatgtggcccccagttccctgcgctctgcgctccgatcccagcgaggtcgagcgccccgaggtcggggtcgcaagcataagacgaccccc

SEQ ID NO: 791797 - DNA, 120 bp, Artificial Sequence
  ENSG00000272333_3 (sequence is synthesized)
cttcctcctcctcgcctagcagatgtggctcctacccccccaaagacccctgcccggaaacggggtgaggaaggcacagaacggatggtgcaggcactgactgaacttctccggcgggcc

SEQ ID NO: 791798 - DNA, 120 bp, Artificial Sequence
  ENSG00000272333_4 (sequence is synthesized)
caggcaccccaagcaccccggagccgggcatgtgagccctccaccccccggcggtctcggggacggcccccaggacggccagcaggcccctgcaggaggaagcagcaagcagtagtggtg

SEQ ID NO: 791799 - DNA, 120 bp, Artificial Sequence
  ENSG00000272333_5 (sequence is synthesized)
gcagaagcagctgtgacaatccccaaacctgagcccccacctcctgtggttccagtgaaacatcagactggcagctggaaatgcaaggaggggcccggtccaggacctgggacccccagg

SEQ ID NO: 791800 - DNA, 120 bp, Artificial Sequence
  ENSG00000272333_6 (sequence is synthesized)
cgtggaggacagtcaagccgtggaggccgtggaggcaggggccgcggccgaggtggtgggctcccctttgtgatcaagtttgtttcaagggccaaaaaagtaaagatgggacaattgtcc

SEQ ID NO: 791801 - DNA, 120 bp, Artificial Sequence
  ENSG00000272333_7 (sequence is synthesized)
ttgggactcgaatcaggtcaaggtcaaggtcaacatgaggaaagttggcaggatgtcccccaaagaagagttggatctggacagggagggagcccttgctggaaaaagcaggaacagaag

SEQ ID NO: 791802 - DNA, 120 bp, Artificial Sequence
  ENSG00000272333_8 (sequence is synthesized)
ctggatgacgaggaagaagagaagaaagaagaagaagaaaaagacaaggagggagaagagaaggaagaaagagctgtagctgaggagatgatgccagctgcggaaaaggaagaggcaaag

SEQ ID NO: 791803 - DNA, 120 bp, Artificial Sequence
  ENSG00000272333_9 (sequence is synthesized)
ctgccaccaccgcctctgactcctccagccccttcacctcctccacccctcccacccccttcgacatctcctccacccccactctgccctccaccaccacccccagtgtccccaccacct

SEQ ID NO: 791804 - DNA, 120 bp, Artificial Sequence
  ENSG00000272333_10 (sequence is synthesized)
ctaccatcccctccaccgcctcctgcccaagaggagcaggaggaatcccctcctcctgtggtcccagctacgtgctccaggaagaggggccggcctcccctgactcccagccagcgggcg

SEQ ID NO: 791805 - DNA, 120 bp, Artificial Sequence
  ENSG00000272333_11 (sequence is synthesized)
gagcgggaagctgctcgggcagggccagagggcacctctcctcccactccaacccccagcaccgccacgggaggccctccggaagacagtcccaccgtggcccccaaaagcaccaccttc

SEQ ID NO: 791806 - DNA, 120 bp, Artificial Sequence
  ENSG00000272333_12 (sequence is synthesized)
ctgaagaatatccggcagtttattatgcctgtggtgagtgcccgctcctcccgtgtcatcaagacaccccggcgatttatggatgaagacccccccaaacccccaaaggtggaggtctca

SEQ ID NO: 791807 - DNA, 120 bp, Artificial Sequence
  ENSG00000272333_13 (sequence is synthesized)
cctgtcctgcgacctcccattaccacctccccacctgttccccaggagccagcaccagtcccctctccaccacgtgccccaactcctccatctaccccagttccactccctgagaagaga

SEQ ID NO: 791808 - DNA, 120 bp, Artificial Sequence
  ENSG00000272333_14 (sequence is synthesized)
cggtccatcctaagggaacccacatttcgctggacctcactgacccgggagctgccccctcctcccccagcccctccacctcccccggccccctccccaccccctgctcctgccacctcc

SEQ ID NO: 791809 - DNA, 120 bp, Artificial Sequence
  ENSG00000272333_15 (sequence is synthesized)
tcccggaggcccctactccttcgggcccctcagtttaccccaagcgaagcccacctgaagatctacgaatcggtgcttactcctcctcctcttggggctcctgaagcccctgagccagag

SEQ ID NO: 791810 - DNA, 120 bp, Artificial Sequence
  ENSG00000272333_16 (sequence is synthesized)
cctcctcctgccgatgactctccagctgagcctgagcctcgggcagtgggccgcaccaaccacctcagcctgcctcgattcgcccctgtggtcaccactcctgttaaggccgaggtgtcc

SEQ ID NO: 791811 - DNA, 120 bp, Artificial Sequence
  ENSG00000272333_17 (sequence is synthesized)
cctcacggggctccagctctgagcaacgggccacagacacaggctcagctactgcagcccctgcaggccttgcaaacccagctcctgccccaggcactaccgccaccacagccacagctg

SEQ ID NO: 791812 - DNA, 120 bp, Artificial Sequence
  ENSG00000272333_18 (sequence is synthesized)
cagccaccgccgtcaccacagcagatgcctcccctggaaaaagcccggattgcgggcgtgggttccttgccgctgtctggggtagaggagaagatgttcagcctcctcaagagagccaaa

SEQ ID NO: 791813 - DNA, 120 bp, Artificial Sequence
  ENSG00000272333_19 (sequence is synthesized)
gtgcagctattcaagatcgatcagcagcagcagcagaaggtggcagcttccatgccgctgagccctggagggcagatggaggaggtggccggggctgtcaagcagatctccgacagaggc

SEQ ID NO: 791814 - DNA, 120 bp, Artificial Sequence
  ENSG00000272333_20 (sequence is synthesized)
cctgtccggtctgaagatgagtcggtggaagctaagagagagcggccctcaggtcccgagtcccctgtgcaaggtccccgcatcaaacatgtctgccgtcatgctgctgtggccctgggt

SEQ ID NO: 791815 - DNA, 120 bp, Artificial Sequence
  ENSG00000272333_21 (sequence is synthesized)
caggcccgggccatggtgcctgaagatgtccctcgcctcagtgccctccctctccgggatcggcaggacctcgccacagaggatacatcatcggcgtccgagactgagagtgtcccgtca

SEQ ID NO: 791816 - DNA, 120 bp, Artificial Sequence
  ENSG00000272333_22 (sequence is synthesized)
cggtcccggcggggaaaggtggaggcagcaggccctgggggagaatcagagcccacaggttctggagggaccctggcccacacaccccggcgctcactgccctcccatcacggcaagaag

SEQ ID NO: 791817 - DNA, 120 bp, Artificial Sequence
  ENSG00000272333_23 (sequence is synthesized)
atgcgcatggctcgatgtggacactgtcggggctgcctacgtgtgcaggactgtgggtcctgtgtcaactgcctagacaagcccaagtttgggggccctaacaccaagaagcagtgctgt

SEQ ID NO: 791818 - DNA, 120 bp, Artificial Sequence
  ENSG00000272333_24 (sequence is synthesized)
gtataccggaagtgtgacaaaatagaggctcggaagatggaacgactggctaaaaaaggccggacgatagtgaagacgctgttgccctgggattccgatgaatctcctgaggcctcccct

SEQ ID NO: 791819 - DNA, 120 bp, Artificial Sequence
  ENSG00000272333_25 (sequence is synthesized)
ggtcctccaggcccacgccggggggcgggagctggggggccccgggaggaggtggtggcccacccagggcccgaggagcaggactccctcctgcagcgcaagtcagctcggcgctgcgtc

SEQ ID NO: 791820 - DNA, 120 bp, Artificial Sequence
  ENSG00000272333_26 (sequence is synthesized)
aaacagcgaccctcctatgatatcttcgaggattcggatgactcggagcccgggggcccccctgctcctcggcgtcggaccccccgagaaaatgagctgccactgccagaacctgaggag

SEQ ID NO: 791821 - DNA, 120 bp, Artificial Sequence
  ENSG00000272333_27 (sequence is synthesized)
cagagccggccccgcaaacctaccctgcagcctgtgttgcagctcaaggcccgaaggcgcctggacaaggatgctttggcccctggcccctttgcttcttttcccaatggctggactgga

SEQ ID NO: 791822 - DNA, 120 bp, Artificial Sequence
  ENSG00000272333_28 (sequence is synthesized)
aagcagaagtctcccgatggtgtgcaccgcgtccgtgtggattttaaggaggattgtgatttagagaacgtgtggctgatggggggcctgagtgtgctcacctctgtgccagggggcccc

SEQ ID NO: 791823 - DNA, 120 bp, Artificial Sequence
  ENSG00000272333_29 (sequence is synthesized)
ccgatggtgtgcttgctgtgtgccagcaaaggactccacgagctggtgttctgtcaagtctgctgtgacccattccacccattctgcctggaggaggccgagcggcccctgccccagcat

SEQ ID NO: 791824 - DNA, 120 bp, Artificial Sequence
  ENSG00000272333_30 (sequence is synthesized)
cacgacacctggtgctgccgtcgctgcaaattctgccacgtctgtggacgcaaaggtcgtggatccaagcacctcctggagtgcgagcgctgccgccatgcataccacccggcctgtctg

SEQ ID NO: 791825 - DNA, 120 bp, Artificial Sequence
  ENSG00000272333_31 (sequence is synthesized)
gggcccagctatccaacccgggccacgcgcaaacggcgccactggatctgttcagcctgtgtgcgctgtaagagctgtggggcaactccaggcaagaactgggacgtcgagtggtctgga

SEQ ID NO: 791826 - DNA, 120 bp, Artificial Sequence
  ENSG00000272333_32 (sequence is synthesized)
gattacagcctctgccccaggtgcacccagctatatgagaaaggaaactactgcccgatctgtacacgctgctatgaagacaacgactatgagagcaagatgatgcagtgcgcacagtgc

SEQ ID NO: 791827 - DNA, 120 bp, Artificial Sequence
  ENSG00000272333_33 (sequence is synthesized)
gatcactgggtgcatgccaagtgcgaggggctctcagatgaagactacgagatcctttcaggactgccagactcggtgctgtacacctgcggaccgtgtgctggggcagcgcagccccgc

SEQ ID NO: 791828 - DNA, 120 bp, Artificial Sequence
  ENSG00000272333_34 (sequence is synthesized)
aaggtggtgggcccactgctgctctgcacccagtgtgggccagatgggaagcaactgcacccaggaccctgcggcctgcaagctgtgagtcagcgcttcgaggatggccactacaagtct

SEQ ID NO: 791829 - DNA, 120 bp, Artificial Sequence
  ENSG00000272333_35 (sequence is synthesized)
gtgcacagcttcatggaggacatggtgggcatcctcatgcggcactcggaggagggagagaccccggaccgccgggctggaggccagatgaaggggctcctgctgaagctgctagaatct

SEQ ID NO: 791830 - DNA, 120 bp, Artificial Sequence
  ENSG00000272333_36 (sequence is synthesized)
gcgttcggctggttcgacgcccacgaccccaagtactggcgacggagtacccggctgccaaacggagtccttcccaatgcggtgttgcccccatccctggatcatgtctatgcgcagtgg

SEQ ID NO: 791831 - DNA, 120 bp, Artificial Sequence
  ENSG00000272333_37 (sequence is synthesized)
agacagcaggaaccagagaccccagaatcagggcagcctccaggggatccctcagcagcattccagggcaaggatccggctgccttctcacacctggaggacccccgtcagtgtgcactc

SEQ ID NO: 791832 - DNA, 120 bp, Artificial Sequence
  ENSG00000272333_38 (sequence is synthesized)
tgcctcaaatacggggatgcagactccaaggaggcggggcggctcttgtacatcgggcagaacgagtggacacacgtcaactgtgccatctggtcggcggaagtcttcgaggagaacgac

SEQ ID NO: 791833 - DNA, 120 bp, Artificial Sequence
  ENSG00000272333_39 (sequence is synthesized)
ggctccctcaagaatgtgcatgctgctgtggcccgagggaggcagatgcgctgcgagctctgcctgaagcctggcgccacggtgggctgctgcctgtcctcctgcctcagcaacttccac

SEQ ID NO: 791834 - DNA, 120 bp, Artificial Sequence
  ENSG00000272333_40 (sequence is synthesized)
ttcatgtgtgcccgggccagctactgcatcttccaggatgacaagaaagtcttctgccagaaacacactgatctcctggatggcaaggaaattgtgaaccccgatggttttgatgttctc

SEQ ID NO: 791835 - DNA, 120 bp, Artificial Sequence
  ENSG00000272333_41 (sequence is synthesized)
cgccgagtctatgtggacttcgagggcatcaacttcaagcggaagttcttgacggggcttgaacccgatgccatcaacgtgctcattggttccatccgcattgactccctgggtactctg

SEQ ID NO: 791836 - DNA, 120 bp, Artificial Sequence
  ENSG00000272333_42 (sequence is synthesized)
tctgatctctcggactgcgagggacggctcttccccattggctaccagtgctcccgtctgtactggagcacagtggatgctcggaggcgctgctggtatcggtgccgaattctggagtat

SEQ ID NO: 791837 - DNA, 120 bp, Artificial Sequence
  ENSG00000272333_43 (sequence is synthesized)
cggccatgggggccgagggaagagccagctcacctggaggctgcagaggagaaccagaccattgtgcacagccccgccccttcctcagagcccccaggtggtgaggaccccccactggac

SEQ ID NO: 791838 - DNA, 120 bp, Artificial Sequence
  ENSG00000272333_44 (sequence is synthesized)
acagatgttcttgtccctggagctcctgagcgccactcgcccattcagaacctggaccctccactgcggccagattcaggcagcgcccctcctccagccccccgttctttttcgggggct

SEQ ID NO: 791839 - DNA, 120 bp, Artificial Sequence
  ENSG00000272333_45 (sequence is synthesized)
cgaatcaaagtgcccaactactcgccatcccggaggcccttggggggtgtctcctttggccccctgccctcccctggaagtccatcttcactgacccaccacatccccacagtgggagac

SEQ ID NO: 791840 - DNA, 120 bp, Artificial Sequence
  ENSG00000272333_46 (sequence is synthesized)
ccggacttcccagctccccccagacgttcccgtcgtcccagccctttggctcccaggccgcctccatcacggtgggcctcccctcctctaaaaacctcccctcagctcagggtgccccct

SEQ ID NO: 791841 - DNA, 120 bp, Artificial Sequence
  ENSG00000272333_47 (sequence is synthesized)
cctacctcagtcgtcacagccctcacacctacctcaggggagctggctccccctggcccggccccatctccaccaccccctgaagacctgggcccagacttcgaggacatggaggtggtg

SEQ ID NO: 791842 - DNA, 120 bp, Artificial Sequence
  ENSG00000272333_48 (sequence is synthesized)
tcaggactgagtgctgctgacctggacttcgcggccagcctgctggggactgagcccttccaggaagagattgtagccgctggggccatggggagcagccacgggggcccgggggacagc

SEQ ID NO: 791843 - DNA, 120 bp, Artificial Sequence
  ENSG00000272333_49 (sequence is synthesized)
tccgaggaggagtccagccccacctcccgctacatccacttccctgtgactgtggtgtccgcccctggtctggcccccagcgctacccctggagccccccgcattgaacagctggacggc

SEQ ID NO: 791844 - DNA, 120 bp, Artificial Sequence
  ENSG00000272333_50 (sequence is synthesized)
gtggacgacggcactgacagtgaggctgaggcggtgcagcagcctcggggccagggcacgcctccttcggggccaggagtagtccgggcaggggtccttggggctgcaggggacagggcc

SEQ ID NO: 791845 - DNA, 120 bp, Artificial Sequence
  ENSG00000272333_51 (sequence is synthesized)
cggcctcctgaggacctgccatcggaaattgtggattttgtgttgaagaacctagggggtcctggggatggaggtgctggccctagagaggagtcactccccccggcgcctcccctggct

SEQ ID NO: 791846 - DNA, 120 bp, Artificial Sequence
  ENSG00000272333_52 (sequence is synthesized)
aatggcagccagccctcccaaggcctgaccgccagcccagctgaccccacccgcacatttgcctggctcccaggggccccaggggtccgggtgttaagccttggccctgcccctgagccc

SEQ ID NO: 791847 - DNA, 120 bp, Artificial Sequence
  ENSG00000272333_53 (sequence is synthesized)
cccaaacccgccacatccaaaatcatacttgtcaacaagctggggcaagtatttgtgaagatggctggggagggtgaacctgtcccacccccagtgaagcagccacctttgccccccacc

SEQ ID NO: 791848 - DNA, 120 bp, Artificial Sequence
  ENSG00000272333_54 (sequence is synthesized)
atttcccccacggctcccacctcctggactctgcccccaggccccctcctcggcgtgctgcccgtggtcggagtggtccgccctgccccgcccccgccaccccctcccctgacgctggtg

SEQ ID NO: 791849 - DNA, 120 bp, Artificial Sequence
  ENSG00000272333_55 (sequence is synthesized)
ctgagcagtgggccagccagcccgccccgccaggccatccgcgtcaagagggtgtccactttctccggccggtccccgccagcacctcccccatacaaagccccccggctggatgaagat

SEQ ID NO: 791850 - DNA, 120 bp, Artificial Sequence
  ENSG00000272333_56 (sequence is synthesized)
ggagaggcctcagaggatacccctcaggttccagggcttggcagtggcgggtttagccgtgtgaggatgaaaacccccacagtgcgtggggtccttgacctggatcggcctggggagccc

SEQ ID NO: 791851 - DNA, 120 bp, Artificial Sequence
  ENSG00000272333_57 (sequence is synthesized)
gctggggaagaaagtcctgggcccctccaggaacggtcccctttgctgccacttccggaagatggtcctccccaggtccccgatggtcccccagacctgctgcttgagtcccagtggcac

SEQ ID NO: 791852 - DNA, 120 bp, Artificial Sequence
  ENSG00000272333_58 (sequence is synthesized)
cactattcaggtgaggcttcgagctctgaggaagagcctccatccccagatgataaagagaaccaggccccaaaacggactggcccacatctgcgcttcgagatcagcagtgaggatggg

SEQ ID NO: 791853 - DNA, 120 bp, Artificial Sequence
  ENSG00000272333_59 (sequence is synthesized)
ttcagcgttgaggcagagagcttggagggggcgtggagaactctgatcgagaaagtgcaagaggcccgagggcatgcccgactcagacatctctcctttagtggaatgagtggggcgaga

SEQ ID NO: 791854 - DNA, 120 bp, Artificial Sequence
  ENSG00000272333_60 (sequence is synthesized)
ctcctgggcatccaccatgatgctgtcatcttcctggccgagcagctccccggagcccagcgttgccagcactataagttccgttaccaccagcagggagagggccaggaggagccgccc

SEQ ID NO: 791855 - DNA, 120 bp, Artificial Sequence
  ENSG00000272333_61 (sequence is synthesized)
ctgaatccccatggggctgctcgggcagaggtctatctccggaagtgcacctttgacatgttcaacttcctggcctcccagcaccgggtgctccctgagggggccacctgtgatgaggaa

SEQ ID NO: 791856 - DNA, 120 bp, Artificial Sequence
  ENSG00000272333_62 (sequence is synthesized)
gaggatgaggtgcagctcaggtcaaccagacgtgccaccagcctggagctgcccatggccatgcgttttcgtcaccttaagaagacgtccaaagaagctgtgggtgtctacagatcagcc

SEQ ID NO: 791857 - DNA, 120 bp, Artificial Sequence
  ENSG00000272333_63 (sequence is synthesized)
atccacgggcgaggcctgttctgtaagcgcaacatcgacgcgggggagatggtcatcgagtactctggcattgtcatccgctcggtgttgactgacaagcgggagaagttctacgatggg

SEQ ID NO: 791858 - DNA, 120 bp, Artificial Sequence
  ENSG00000272333_64 (sequence is synthesized)
aagggcatcgggtgctatatgttccgcatggatgactttgatgtagtggacgccacgatgcatggcaatgccgcccgcttcatcaaccactcctgtgagcccaactgcttctctcgggtc

SEQ ID NO: 791859 - DNA, 120 bp, Artificial Sequence
  ENSG00000272333_65 (sequence is synthesized)
atccacgtggagggccagaaacacattgttatcttcgccctgcgccgcatcctgcgtggtgaggagctcacctacgactacaagttccccatcgaggatgccagcaacaagctgccctgc

SEQ ID NO: 791860 - DNA, 120 bp, Artificial Sequence
  ENSG00000272333_66 (sequence is synthesized)
aactgtggcgccaagcgctgccgtcggttccttaactgaggccgtggctgcccaccacgacccctcacacctcctgctgccgtcgctgccatcttgcccctagcctgggggctccctagc

SEQ ID NO: 791861 - DNA, 120 bp, Artificial Sequence
  ENSG00000272333_67 (sequence is synthesized)
ccctcccagagcatctcacccccaccctcatgttcagggtggatgtgggcatgcaggtgacaagggccctgcctccacccctccagcccatccagcaatcgccccctttctgccctgggg

SEQ ID NO: 791862 - DNA, 120 bp, Artificial Sequence
  ENSG00000272333_68 (sequence is synthesized)
gcccaggatgtagatattgtacaaaggtttctaaatcccttcttttctatgcacttttttatttaagaggtggggtcccaggtgggaacccccccacaataaagtctgtcaatgtttgga

SEQ ID NO: 791863 - DNA, 120 bp, Artificial Sequence
  ENSG00000272333_69 (sequence is synthesized)
gcccaggagttggagaccagcgtaggcaacatggcaaaaccccatctctaaaataaaaatttaaaaaagttatttctagagctgacatcagaaaaatgaaccccacccatttccctgtta

SEQ ID NO: 791864 - DNA, 120 bp, Artificial Sequence
  ENSG00000272333_70 (sequence is synthesized)
ggcagtggcgggtgagtgcgggtgctgaggctggcagagcaggcaagggggcagatgggcgggagatgcggctcatccttctcgggctcgccctcccaggtttagccgtgtgaggatgaa

SEQ ID NO: 791865 - DNA, 120 bp, Artificial Sequence
  ENSG00000272333_71 (sequence is synthesized)
tggggcaggggaggtggggcagggtggcctggagaggtgacatcgggagagtgtggccatgtgggttttgcctctcctaaagcctgttccactcaagcttttgtgcccccaacccccagt

SEQ ID NO: 791866 - DNA, 120 bp, Artificial Sequence
  ENSG00000272333_72 (sequence is synthesized)
ggtcagtccccagcccacacctgcttgagcagcagcagcgtttggtgcagcggatccctcccgccttgaagcattgtcttcccggcttccaaggctgctcctgctctcacctctggtcct

SEQ ID NO: 791867 - DNA, 120 bp, Artificial Sequence
  ENSG00000272333_73 (sequence is synthesized)
gcctccttgctcacagctgtcaggctagatgtgtcccgggaccctggccttgacttctgtgtatgctcactcccaggggctcccttccagcttggtggctgtcctcccgtctgtgttctg

SEQ ID NO: 791868 - DNA, 120 bp, Artificial Sequence
  ENSG00000272333_74 (sequence is synthesized)
attgtctccacattgctctctccagcctagaccctgtccctgaactgtggcctcctccatcctgtcctgctgcctgcccaccatctccaccagcaggttgcagggggaggtttctaagag

SEQ ID NO: 791869 - DNA, 120 bp, Artificial Sequence
  ENSG00000272333_75 (sequence is synthesized)
gcctctcaaagtcagcctgtcccaaactgagccctccacctgcacgccaaacccattcttcttttgccttcgctgtctcagtccacagcagttttatccttccaggtgttcaagcccagc

SEQ ID NO: 791870 - DNA, 120 bp, Artificial Sequence
  ENSG00000272333_76 (sequence is synthesized)
gttgtcccgacccccatcccccttcttcacatccacatctactacgtcagcatatcccgtctgccctgtttaatctattaaccctcgagaaatcccctaaatagctcataacatacagtg

SEQ ID NO: 791871 - DNA, 81 bp, Artificial Sequence
  ENSG00000272333_77 (sequence is synthesized)
accctcgagaaatcccctaaatagctcataacatacagtgtacttggctctgtgcatgtgagcctatataataatatattt

SEQ ID NO: 791872 - DNA, 120 bp, Artificial Sequence
  ENSG00000272333_78 (sequence is synthesized)
gagatcacaccattgcattccagcctgggagacagaacgagactttgtctcaaaaaatgataattttatgtttgtaacagttacagaaatttgctgcatctaaaaaaaatagatgtgcaa

SEQ ID NO: 791873 - DNA, 120 bp, Artificial Sequence
  ENSG00000272333_79 (sequence is synthesized)
taaaaaaaatagatgtgcaaaatacaattctccagtattttaaattttgtgtgagaaacagaataatgacaggtagatgggatgtatggtacactgggtttgagtgagccataggcgtgt

SEQ ID NO: 791874 - DNA, 120 bp, Artificial Sequence
  ENSG00000272333_80 (sequence is synthesized)
cctgaagagccaaaaggccccaagcctctgtggaatgcttttgtacccaagaagtcctgcagaagaggagccgcaggctccttaggggaagaaatgtccattctgcagggctcactgggt

SEQ ID NO: 791875 - DNA, 120 bp, Artificial Sequence
  ENSG00000272391_0 (sequence is synthesized)
actgccctcgcttcctgtgcctcttcaggtcatcgcttgctctcgttcccaggctttggcttctagtggacgagaatcaccgagtctgcggggctggatgctgaccgcccggaccagcac

SEQ ID NO: 791876 - DNA, 120 bp, Artificial Sequence
  ENSG00000272391_1 (sequence is synthesized)
ccggaccagcacctaggcgggcgggagctgtgcggcccagggttcgcgcgggccgggtagaggctcgagctgggacccccgagcgtgaaccccggagccggcggcgctggggccagaggg

SEQ ID NO: 791877 - DNA, 120 bp, Artificial Sequence
  ENSG00000272391_2 (sequence is synthesized)
agggaggcggatctgggccccgagaaggacacccgcctggatttgccccgtaggcccggcccgggcccctcgggagcagaacagccttggtgaggtggacaggaggggacctcgcgagca

SEQ ID NO: 791878 - DNA, 120 bp, Artificial Sequence
  ENSG00000272391_3 (sequence is synthesized)
gacgcgcgcgccagcgacagcagcccgccccggcctctcgggagccgtggggcagaggctgcggagccccaggagggggccagtgtcattcaaagatgtggctgtggatttcacccagga

SEQ ID NO: 791879 - DNA, 120 bp, Artificial Sequence
  ENSG00000272391_4 (sequence is synthesized)
ggagtggcggcaactggaccctgatgagaagataacatacggggatgtgatgttggagaactacagccatctagtttccttggcttatgaggtggcaacatcttgtacttcggagattct

SEQ ID NO: 791880 - DNA, 120 bp, Artificial Sequence
  ENSG00000272391_5 (sequence is synthesized)
gaagccgagcaacttgcccaagtccttcttcttttcccattaacaagatatgatatcaccaagccaaacgtcatcattaagttggagcagggagaggagctgtggataacgggaggtgaa

SEQ ID NO: 791881 - DNA, 120 bp, Artificial Sequence
  ENSG00000272391_6 (sequence is synthesized)
tttccatgtcaacatagtcctgggatcgtgggactttaccagatcggtttgtaataacacctcgaagacgctatccgatccatcagacccagtattcctgtccgggggtacttcccacag

SEQ ID NO: 791882 - DNA, 120 bp, Artificial Sequence
  ENSG00000272391_7 (sequence is synthesized)
tgtgctggaatggttatcacaagaaggctgtgctgtcccctcgcaactccaggatggtgtgtagcccagtgactgtgaggatcgcccctcctgacagaagattttcacgttctgcgatac

SEQ ID NO: 791883 - DNA, 120 bp, Artificial Sequence
  ENSG00000272391_8 (sequence is synthesized)
cagagcagataatcagctcaacactgtcgtcaccatcaagtaatgccccagacccatgtgcaaaggagactgtactgagtgccctcaaagagaagaagaagaaaaggacagtggaggaag

SEQ ID NO: 791884 - DNA, 120 bp, Artificial Sequence
  ENSG00000272391_9 (sequence is synthesized)
aagaccaaatattccttgatggccaggaaaataaaagaaggcgccatgatagcagtggcagtggacattcagcatttgagcccctggtggccagtggagtccccgcttcttttgtgccta

SEQ ID NO: 791885 - DNA, 120 bp, Artificial Sequence
  ENSG00000272391_10 (sequence is synthesized)
agcctgggtctctgaagagaggcctcaattctcagagctcagatgaccacttgaataagagatcccgaagctcttccatgagctccttgacaggcgcttacacaagtggcatccctagct

SEQ ID NO: 791886 - DNA, 120 bp, Artificial Sequence
  ENSG00000272391_11 (sequence is synthesized)
ccagccgcaatgccattaccagttcctacagctccactcgaggcatctcacagctgtggaagagaaatggccccagttcatcacccttctctagcccagcctcatcccgctcccagacac

SEQ ID NO: 791887 - DNA, 120 bp, Artificial Sequence
  ENSG00000272391_12 (sequence is synthesized)
cggagaggccagcaaagaaaataagagaagaagagctgtgtcatcattccagttcttcaactccattggcagcagacaaggagtcccagggagaaaaggctgcagatacaaccccaagga

SEQ ID NO: 791888 - DNA, 120 bp, Artificial Sequence
  ENSG00000272391_13 (sequence is synthesized)
agaaacaaaactcgaattctcagtctacacctggcagctctgggcagcgtaagcggaaagttcagctgctgccttctcggcgaggggaacagctgaccttgcctccacctccccagcttg

SEQ ID NO: 791889 - DNA, 120 bp, Artificial Sequence
  ENSG00000272391_14 (sequence is synthesized)
gctattcgatcactgccgaggacctagacttagagaagaaggcttcattacagtggttcaaccaggccttggaggacaagagtgatgctgcctcgaactctgtcactgagaccccaccta

SEQ ID NO: 791890 - DNA, 120 bp, Artificial Sequence
  ENSG00000272391_15 (sequence is synthesized)
ccactcagccttcatttacctttaccctgcctgctgctgcaactgcctccccacccacctccctcctggccccaagcaccaacccactgttagagagcttgaagaagatgcagactcccc

SEQ ID NO: 791891 - DNA, 120 bp, Artificial Sequence
  ENSG00000272391_16 (sequence is synthesized)
cgagcctgccaccctgcccagaatctgctggagcagcaaccactgaggccctctcacctccaaagacacccagcctcctacccccgctgggtttatcacagtcagggccgccagggctgc

SEQ ID NO: 791892 - DNA, 120 bp, Artificial Sequence
  ENSG00000272391_17 (sequence is synthesized)
tccccagcccctcctttgactccaaacccccgaccactttgctggggctgatccctgctccatccatggtaccagccactgacaccaaggcacctccaacccttcaggcagagacggcta

SEQ ID NO: 791893 - DNA, 120 bp, Artificial Sequence
  ENSG00000272391_18 (sequence is synthesized)
ccaaaccccaagccacatctgccccgtcccccgcccccaagcaaagcttcctgtttggaacacagaacacctcaccttccagccctgccgcccctgctgcatcttcagcatctcccatgt

SEQ ID NO: 791894 - DNA, 120 bp, Artificial Sequence
  ENSG00000272391_19 (sequence is synthesized)
tcaagcccattttcacggctccacccaagagtgagaaggaaggcctcacaccgcctggcccttcagtctcagccacagcgccctccagctcctccctccccacgaccaccagcaccacag

SEQ ID NO: 791895 - DNA, 120 bp, Artificial Sequence
  ENSG00000272391_20 (sequence is synthesized)
ccccgaccttccagcctgtctttagcagcatggggccacctgcatctgtgcccttgcctgctcccttcttcaagcagacaactactcccgccactgctcccaccacaactgccccgctct

SEQ ID NO: 791896 - DNA, 120 bp, Artificial Sequence
  ENSG00000272391_21 (sequence is synthesized)
tcactggcctggccagcgccacctctgctgtggctcccatcacctctgccagtccatccacagactctgcttcgaagcctgcgtttggctttggcataaacagtgtgagcagcagcagtg

SEQ ID NO: 791897 - DNA, 120 bp, Artificial Sequence
  ENSG00000272391_22 (sequence is synthesized)
tgagtaccacgaccagcaccgccactgccgcctcacagcctttcctcttcggggcgccccaggcctctgctgccagcttcaccccggccatgggctccatattccagtttggcaaacctc

SEQ ID NO: 791898 - DNA, 120 bp, Artificial Sequence
  ENSG00000272391_23 (sequence is synthesized)
ctgccttgcccacaaccaccacagtcaccaccttcagccagtccctgcccactgccgtgccaacggccaccagcagcagcgctgccgactttagtggttttggcagcaccctcgccacct

SEQ ID NO: 791899 - DNA, 120 bp, Artificial Sequence
  ENSG00000272391_24 (sequence is synthesized)
ccgggagccaacccccagcccgcatttggggccgctgaggggcagccaccgggggccgccaagccagcccttacccccagctttggcagctctttcacttttggaaactctgcagccccg

SEQ ID NO: 791900 - DNA, 120 bp, Artificial Sequence
  ENSG00000272391_25 (sequence is synthesized)
gccccggctactgcacccacacctgcacctgcgtccacgatcaagatcgtgcctgcgcacgtgcctacgcccatccagcctacctttggcggtgccacgcactcggcgtttggattgaaa

SEQ ID NO: 791901 - DNA, 120 bp, Artificial Sequence
  ENSG00000272391_26 (sequence is synthesized)
gccacggcttccgccttcggcgctcccgccagctcacagcccgcctttggcggctccactgctgtcttctccttcggtgcagccaccagctccggctttggagccaccacccagaccgcc

SEQ ID NO: 791902 - DNA, 120 bp, Artificial Sequence
  ENSG00000272391_27 (sequence is synthesized)
agcagcgggagcagcagctcggtgtttggcagcacaacaccatcacccttcacgtttgggggttcggcagcccccgctggcagtgggagctttgggatcaacgtggccaccccaggctcc

SEQ ID NO: 791903 - DNA, 120 bp, Artificial Sequence
  ENSG00000272391_28 (sequence is synthesized)
agcgccaccaccggagctttcagctttggagcaggacagagtgggagcacagccacctccacccccttcacagggggcttaggtcagaacgccctgggcaccaccggccagagcacaccg

SEQ ID NO: 791904 - DNA, 120 bp, Artificial Sequence
  ENSG00000272391_29 (sequence is synthesized)
tttgccttcaacgtgggcagcacaactgagagcaaacctgtgtttggaggcaccgccacccccacctttggtcagaacacccctgcgcctggagtgggcacatcgggcagcagcctctcc

SEQ ID NO: 791905 - DNA, 120 bp, Artificial Sequence
  ENSG00000272391_30 (sequence is synthesized)
tttggggcatcttcagcacccgcccaaggctttgttggtgttggaccgttcggatcggcggccccttcattttccattggtgcgggatccaagaccccaggggctcgacagcgactgcag

SEQ ID NO: 791906 - DNA, 120 bp, Artificial Sequence
  ENSG00000272391_31 (sequence is synthesized)
gcccgaaggcagcacacccgcaaaaagtagcctttgtcccctgtccctgttccccccaccccttccctaaatctggaccttggcacgtgctagaaagagccttggacccttccagctgcg

SEQ ID NO: 791907 - DNA, 120 bp, Artificial Sequence
  ENSG00000272391_32 (sequence is synthesized)
taaagcaaacctaccccggatctctggcttcagccgccagggggcagtggcagccctggggccctttcccttctggaggaagcacaagcctcagggaaggggaagcaggatgcggagggc

SEQ ID NO: 791908 - DNA, 120 bp, Artificial Sequence
  ENSG00000272391_33 (sequence is synthesized)
caaagcccgggacctctacttgaacagttccactggggaggctggagaactaaggacctgtacatagtgtccgctgccctgactcccgcttagcgcacccttaggcaggcgccccttcca

SEQ ID NO: 791909 - DNA, 120 bp, Artificial Sequence
  ENSG00000272391_34 (sequence is synthesized)
cctttccccgagagccgtcgtcgctggagggggcagggtccagcccgcctggatcggtggtgtgcacctgatgggatttgggaaatgggttatccctaaagctttatcttgcttggctta

SEQ ID NO: 791910 - DNA, 120 bp, Artificial Sequence
  ENSG00000272391_35 (sequence is synthesized)
gctgtgagaagtggttctcttcctctggtcccttctggggactctgtttccccatttcttgctgctgtgtccctcaccggttccttgcaggattccctcctttttaaatgcccttgaatc

SEQ ID NO: 791911 - DNA, 120 bp, Artificial Sequence
  ENSG00000272391_36 (sequence is synthesized)
tagctttgccttggagaccccagtgggtgctgctcctgccgttttcttcctgccaagcctgaatcaatgtttcatctccaaccctctgccagtttggcccctcagagcttggtggctcaa

SEQ ID NO: 791912 - DNA, 120 bp, Artificial Sequence
  ENSG00000272391_37 (sequence is synthesized)
gactgttagcctggcagagccaggggtgaagggagaagctcttggagcaggcaggatgcccactgctgcttcagctgcctcctcgcccagctaccctttggccccattgggccctcgtct

SEQ ID NO: 791913 - DNA, 120 bp, Artificial Sequence
  ENSG00000272391_38 (sequence is synthesized)
gcctctccaggattgtatgtttcaagccttgtcctgtgttcctttgtctgacgctctgtgtattgctctttgaatcgagtttggaggaagagttgagttgtatgagtggcggcatgttgg

SEQ ID NO: 791914 - DNA, 120 bp, Artificial Sequence
  ENSG00000272391_39 (sequence is synthesized)
tagtgccggacttcctgtttcaagttttctggggcctcgctaattgaatgtggaaagtagcaccacttgacggctacaagtgccgactcctgaattttcccatggtgttctgacttcaag

SEQ ID NO: 791915 - DNA, 120 bp, Artificial Sequence
  ENSG00000272391_40 (sequence is synthesized)
ggctggcagccagggagaatgggcccaggggaagcaaagacctcttccctctgcggtttctgtcccacttaactgacctcactggaggctacgtcacccaaagtagatgttagaaaacct

SEQ ID NO: 791916 - DNA, 120 bp, Artificial Sequence
  ENSG00000272391_41 (sequence is synthesized)
aaattaatgaaccatatttttaaaatcctatttttcccaaacagggccctctgcagcccatcctttccttccgtccttctgaaaccacataccccaggcccaagcgccttgctgtcacgc

SEQ ID NO: 791917 - DNA, 120 bp, Artificial Sequence
  ENSG00000272391_42 (sequence is synthesized)
ccaacctctttgggagaagtatgaatgcgtgtgtctaaattaaaagaaaaaaatatttaaacgttttttaacaaaaatttatttttgtatttaagctaaattgccttttaaattccttca

SEQ ID NO: 791918 - DNA, 120 bp, Artificial Sequence
  ENSG00000272391_43 (sequence is synthesized)
agcttggttcattgaggtggttaagtataaatgctattaactaggaattagctgtatagttaagttatgcctgtgcaaagaagaggctcaaatgctgtccccggcagctttcctggggga

SEQ ID NO: 791919 - DNA, 120 bp, Artificial Sequence
  ENSG00000272391_44 (sequence is synthesized)
ctagagctccttctggccatgttatatgaaatgtaattcttattttataaataatgtgatgtagatgtaaccggtgccccctccccgttgtgactgagggcgagtgttatacctggctgc

SEQ ID NO: 791920 - DNA, 120 bp, Artificial Sequence; identical to SEQ ID NO: 702945
  ENSG00000272391_45 (sequence is synthesized)

SEQ ID NO: 791921 - DNA, 120 bp, Artificial Sequence
  ENSG00000272391_46 (sequence is synthesized)
tagtgtcagtacctgagcttgtttacctcagttccgcaggcaggacagccggtccgggaaccctgagtgagagtgagtgtggatgtgtacagtacacacactggacggcagcgggaggct

SEQ ID NO: 791922 - DNA, 120 bp, Artificial Sequence; identical to SEQ ID NO: 702947
  ENSG00000272391_47 (sequence is synthesized)

SEQ ID NO: 791923 - DNA, 120 bp, Artificial Sequence
  ENSG00000272391_48 (sequence is synthesized)
ggagcaggcgagcggcggcggccgatagcgagtgtcagggacggccggggccggggctgcggcgggccggccggggcggcgcttctcggcctgtcgctggtcggcctcctactgtacctc

SEQ ID NO: 791924 - DNA, 120 bp, Artificial Sequence
  ENSG00000272391_49 (sequence is synthesized)
ctggtcggcctcctactgtacctcgtgcctgctgcggctgcgctggcctggctggccgtggggactaccgcggcctggtggggactgagccgcgagccccgaggttcgcgccccttgtcc

SEQ ID NO: 791925 - DNA, 120 bp, Artificial Sequence
  ENSG00000272391_50 (sequence is synthesized)
tccttcgttcagaaggcgcgacatcggcgaacactgttcgcttcgcctccggccaagtcgacagccaacggaaacctcctagagccgcggaccctgctcgaaggacctgaccctgccgaa

SEQ ID NO: 791926 - DNA, 120 bp, Artificial Sequence
  ENSG00000272391_51 (sequence is synthesized)
gaccctgccgaactgctcctcatgggcagttacctgggcaagcccgggccgccgcagcccgcccccgctccggagggccaggacctgcggaataggcctggccgccgcccacccgcccgc

SEQ ID NO: 791927 - DNA, 77 bp, Artificial Sequence
  ENSG00000272391_52 (sequence is synthesized)
ggtacctttcaacccaggaggtggaggtggcagtgagcgaagatcatgccacactgtactctggcctaggtgacaga

SEQ ID NO: 791928 - DNA, 120 bp, Artificial Sequence
  ENSG00000272391_53 (sequence is synthesized)
cgaagatcatgccacactgtactctggcctaggtgacagagcaagactgtctcaagcgtaagctgaatatgggggtggggtgggggtgggcacagcacaagtggacatgcctttcaggcc

SEQ ID NO: 791929 - DNA, 120 bp, Artificial Sequence
  ENSG00000272391_54 (sequence is synthesized)
caggatggcgcatgcaaaggcccagaggcagaaacatgtttggtatgttgaagagcagaacaaagacaagcatggcaggagggcaggagctaaagcagtggtgtggaaggaggccaagag

SEQ ID NO: 791930 - DNA, 120 bp, Artificial Sequence
  ENSG00000272391_55 (sequence is synthesized)
gcgaggattgtttgtggccagggttgggtgtttgggtcttaagtgttcaggaaaaccattgcagaatcaggcagaaggatgcagtgatggttcctcccgtgtggaagatgaatgtagatc

SEQ ID NO: 791931 - DNA, 120 bp, Artificial Sequence
  ENSG00000272391_56 (sequence is synthesized)
ccatggcttctgtttgcttcgtgaagtaggagagaaaatctgggagagggaaggtcgggataaagtgtataaaaaaggggtcttttgaaatagtcattttggacagtgggggaaaggaac

SEQ ID NO: 791932 - DNA, 120 bp, Artificial Sequence
  ENSG00000272391_57 (sequence is synthesized)
atcatattaaaaagtgtgatcagtttccaggcagtttgtgggctggaaaattgtgattgtgaagttaaagtgaggccagttagcatggcgtgtgtttcccagcgacactgggtatagatc

SEQ ID NO: 791933 - DNA, 120 bp, Artificial Sequence
  ENSG00000272391_58 (sequence is synthesized)
taaggtcagcggacagctggtgccacccggctgtggagaccccagcaagcacagcaggaggggcagcgggtcagtgccccgatgcagctcagggggtgcaggagtggagagcgggtgaag

SEQ ID NO: 791934 - DNA, 120 bp, Artificial Sequence
  ENSG00000272391_59 (sequence is synthesized)
tcagctgcaggaggggtggtgcctgcaggagattcgggagccggagcagttgtggtgacagtgtggctgcaggagtggtggcaggggtcggggagaggaggtcatgggggtggcagggcc

SEQ ID NO: 791935 - DNA, 120 bp, Artificial Sequence
  ENSG00000272391_60 (sequence is synthesized)
gaggggctgagaggaccatcagtcagccccacagggcgaagtcaccgtgagtggtgatggggaggaagccagtgagccaagggtcctctgtgaatcagggagtgacctggcagttgacag

SEQ ID NO: 791936 - DNA, 120 bp, Artificial Sequence
  ENSG00000272391_61 (sequence is synthesized)
gtgacatgaggacatggcagattaaagtgatttgaacctgagttacggtatttagggaaggaagagaaactgtgtggaagcagcgtgggagcacagggagcttccccttgtccgggccgg

SEQ ID NO: 791937 - DNA, 120 bp, Artificial Sequence
  ENSG00000272391_62 (sequence is synthesized)
aggccaagccctgagagcagccatccctgcagaggggctgccagagagggcatcgggcaggcagccagagccagtcagggcaaggccggggaagggaggggaccacggggcatcacaaaa

SEQ ID NO: 791938 - DNA, 120 bp, Artificial Sequence
  ENSG00000272391_63 (sequence is synthesized)
gacacaggacggacaaaccaggcttcagaggggaggggacggtggctagggggaaaaggcctgaacagaggaggtagccaacccaggtacgctaggaggcgggggccccagagtactccc

SEQ ID NO: 791939 - DNA, 120 bp, Artificial Sequence
  ENSG00000272391_64 (sequence is synthesized)
ctctgcagcgatggtcaggaggcccacgaggtggctgcggggcaggggggctttttctctgccctggcgtggccattagcgggtgggagaagcaggctgagctggggcaccaggcatgaa

SEQ ID NO: 791940 - DNA, 120 bp, Artificial Sequence
  ENSG00000272391_65 (sequence is synthesized)
gactcggttgtctggctcagctgctgatggaggagtgccccagaagcagaagtggggctgagggtcccgtgggaagtgccctgcagagcacaggctcctgcccggctcctcgcctgcctc

SEQ ID NO: 791941 - DNA, 120 bp, Artificial Sequence
  ENSG00000272391_66 (sequence is synthesized)
agcctcatgcttctgtagaaacgtgttaaaagtttattttcaagaaagaaggctctaagtcttccggtcggaattttgtggtgttcagttatttgggcgccatgatagcagtggcagtgg

SEQ ID NO: 791942 - DNA, 120 bp, Artificial Sequence
  ENSG00000272391_67 (sequence is synthesized)
gtcccagggagaaaagggtaggttgctgagccaggaggaggggctgctgttggtggtggaggtatttgtggaggatgtagagattaatacctattgaaaaaaggtcttgagcattgctat

SEQ ID NO: 791943 - DNA, 120 bp, Artificial Sequence
  ENSG00000272391_68 (sequence is synthesized)
cttatgcaggtgatttctgcctttgcaggccggagccctcatgacttcagtgacctgcttctgcccctctaggtctatcagccacagtctctgcatgtttccaagagcagcagaaaatga

SEQ ID NO: 791944 - DNA, 120 bp, Artificial Sequence
  ENSG00000272391_69 (sequence is synthesized)
atggggtttcaccatgttggccaggccagcctcaaactcctgacctcaagtgatccagctggcttggcctcccagagtgctgagattaccggcgttagccaccacgcccagccttcccgt

SEQ ID NO: 791945 - DNA, 120 bp, Artificial Sequence
  ENSG00000272398_0 (sequence is synthesized)
accttgcctgcgcccgcccggagccagcggttctccaagcacccagcatcctgctagacgcgccgcgcaccgacggaggggacatgggcagagcaatggtggccaggctcgggctggggc

SEQ ID NO: 791946 - DNA, 120 bp, Artificial Sequence
  ENSG00000272398_1 (sequence is synthesized)
tgctgctgctggcactgctcctacccacgcagatttattccagtgaaacaacaactggaacttcaagtaactcctcccagagtacttccaactctgggttggccccaaatccaactaatg

SEQ ID NO: 791947 - DNA, 120 bp, Artificial Sequence
  ENSG00000272398_2 (sequence is synthesized)
ccaccaccaaggcggctggtggtgccctgcagtcaacagccagtctcttcgtggtctcactctctcttctgcatctctactcttaagagactcaggccaagaaacgtcttctaaatttcc

SEQ ID NO: 791948 - DNA, 120 bp, Artificial Sequence
  ENSG00000272398_3 (sequence is synthesized)
ccatcttctaaacccaatccaaatggcgtctggaagtccaatgtggcaaggaaaaacaggtcttcatcgaatctactaattccacaccttttattgacacagaaaatgttgagaatccca

SEQ ID NO: 791949 - DNA, 120 bp, Artificial Sequence
  ENSG00000272398_4 (sequence is synthesized)
aatttgattgatttgaagaacatgtgagaggtttgactagatgatggatgccaatattaaatctgctggagtttcatgtacaagatgaaggagaggcaacatccaaaatagttaagacat

SEQ ID NO: 791950 - DNA, 120 bp, Artificial Sequence
  ENSG00000272398_5 (sequence is synthesized)
gatttccttgaatgtggcttgagaaatatggacacttaatactaccttgaaaataagaatagaaataaaggatgggattgtggaatggagattcagttttcatttggttcattaattcta

SEQ ID NO: 791951 - DNA, 120 bp, Artificial Sequence
  ENSG00000272398_6 (sequence is synthesized)
taaggccataaaacaggtaatataaaaagcttccatgattctatttatatgtacatgagaaggaacttccaggtgttactgtaattcctcaacgtattgtttcgacagcactaatttaat

SEQ ID NO: 791952 - DNA, 120 bp, Artificial Sequence
  ENSG00000272398_7 (sequence is synthesized)
gccgatatactctagatgaagttttacattgttgagctattgctgttctcttgggaactgaactcactttcctcctgaggctttggatttgacattgcatttgaccttttatgtagtaat

SEQ ID NO: 791953 - DNA, 120 bp, Artificial Sequence
  ENSG00000272398_8 (sequence is synthesized)
ttcaacaagagcactacattcatttagctaaacggattccaaagagtagaattgcattgaccacgactaatttcaaaatgctttttattattattattttttagacagtctcactttgtc

SEQ ID NO: 791954 - DNA, 120 bp, Artificial Sequence
  ENSG00000272398_9 (sequence is synthesized)
cttgagcccccgcgcccagccatcaaaatgctttttatttctgcatatgttgaatactttttacaatttaaaaaaatgatctgttttgaaggcaaaattgcaaatcttgaaattaagaag

SEQ ID NO: 791955 - DNA, 120 bp, Artificial Sequence
  ENSG00000272398_10 (sequence is synthesized)
gcaaaaatgtaaaggagtcaaaactataaatcaagtatttgggaagtgaagactggaagctaatttgcattaaattcacaaacttttatactctttctgtatatacattttttttcttta

SEQ ID NO: 791956 - DNA, 120 bp, Artificial Sequence
  ENSG00000272398_11 (sequence is synthesized)
aaaaacaactatggatcagaatagccacatttagaacactttttgttatcagtcaatatttttagatagttagaacctggtcctaagcctaaaagtgggcttgattctgcagtaaatctt

SEQ ID NO: 791957 - DNA, 120 bp, Artificial Sequence
  ENSG00000272398_12 (sequence is synthesized)
ttacaactgcctcgacacacataaacctttttaaaaatagacactccccgaagtcttttgttcgcatggtcacacactgatgcttagatgttccagtaatctaatatggccacagtagtc

SEQ ID NO: 791958 - DNA, 120 bp, Artificial Sequence
  ENSG00000272398_13 (sequence is synthesized)
ttgatgaccaaagtcctttttttccatctttagaaaactacatgggaacaaacagatcgaacagttttgaagctactgtgtgtgtgaatgaacactcttgctttattccagaatgctgta

SEQ ID NO: 791959 - DNA, 120 bp, Artificial Sequence
  ENSG00000272398_14 (sequence is synthesized)
catctattttggattgtatattgtgtttgtgtatttacgctttgattcatagtaacttcttatggaattgatttgcattgaacacaaactgtaaataaaaagaaatggctgaaagagcaa

SEQ ID NO: 791960 - DNA, 120 bp, Artificial Sequence
  ENSG00000272398_15 (sequence is synthesized)
agtttgcagcgtcaggcagcgggtctgcgcccagcgagcggctccccagctcctgggaagatgcggacccgggacgcccccgtgagctcactgcgcctggctgacacgaggcgctcacag

SEQ ID NO: 791961 - DNA, 120 bp, Artificial Sequence
  ENSG00000272398_16 (sequence is synthesized)
aacaaagcaagggcttcggggagggcgcggccgcggggccgagcgcgcagatcgctccggacccggacaccgcctgcgaggagcgccgaccagccgggaagggttcgcgctaggcggcgc

SEQ ID NO: 791962 - DNA, 120 bp, Artificial Sequence
  ENSG00000272398_17 (sequence is synthesized)
gcgcgcagatcgctccggacccggacaccgcctgcgaggagcgccgaccagccgggaagggttcgcgctaggcggcgcccgggtcccgtcggccagggtgagcgtccggcccgcgtccgc

SEQ ID NO: 791963 - DNA, 120 bp, Artificial Sequence
  ENSG00000272398_18 (sequence is synthesized)
gccacgcccgccgcgttcccctttcctctgcggcgggccgagagataaccctgcccgaggggtcccggcgcccgccccccacgcggtcgcactggaattcgcagcccctctcgggtcccc

SEQ ID NO: 791964 - DNA, 120 bp, Artificial Sequence
  ENSG00000272398_19 (sequence is synthesized)
ctttttaaacaaaccccggttccgggctgaagccgaggcggggaccctctcctgacgctgcgctctctgcgaggcaacctttcacgtccatcgcttgtcatcttaggatccccatgttat

SEQ ID NO: 791965 - DNA, 120 bp, Artificial Sequence
  ENSG00000272398_20 (sequence is synthesized)
tttagcccagattggctagttctggggaggcagcatggtgggacgattctgtcccgagtccccgccaggctttgttcgggtcgccgctaccagcgcggtctccctagatcctccatccgg

SEQ ID NO: 791966 - DNA, 120 bp, Artificial Sequence
  ENSG00000272398_21 (sequence is synthesized)
ggaacctcgccccgggtgcgggtacccggggccgcgcagcgctgcctcgagggtgtatggatgcaccgcgccggcgagagagaccgggggctgggcctgggagaccctagcgggggcggg

SEQ ID NO: 791967 - DNA, 120 bp, Artificial Sequence
  ENSG00000272398_22 (sequence is synthesized)
agatcgctccggacccggacaccgcctgcgaggagcgccgaccagccgggaagggttcgcgctaggcggcgcccgggtcccgtcggccaggatttattccagtgaaacaacaactggaac

SEQ ID NO: 791968 - DNA, 120 bp, Artificial Sequence
  ENSG00000272514_0 (sequence is synthesized)
cttccatctccatggttacgcggcggtggctgcgagcgcccaactgctccgaccgtcgcggtgagggccccaggacagaagcagacagacacggctcctgctgtcgattccgatccagcc

SEQ ID NO: 791969 - DNA, 120 bp, Artificial Sequence
  ENSG00000272514_1 (sequence is synthesized)
agaatgcctccaactcaggccgaaagtgttataaggagtattatacgagaaataggacaagaatgtgcagcccatggagagattgtttctgaaactctgattgcttttatggtgaaagct

SEQ ID NO: 791970 - DNA, 120 bp, Artificial Sequence
  ENSG00000272514_2 (sequence is synthesized)
gttgtcctggatccaagtaatggctttaacatggatagaaccctcatgaaaagtgatgtgcagaatcttgttaagctttgtatgactcggctattggatactaaaaatccatccctggac

SEQ ID NO: 791971 - DNA, 120 bp, Artificial Sequence
  ENSG00000272514_3 (sequence is synthesized)
actattaagatgcaagtctacttcgatatgaattatacgaatcgagtggaatttctcgaagaacatcaccgggtcctagagtctagattaggctctgttacccgagaaattacagataac

SEQ ID NO: 791972 - DNA, 120 bp, Artificial Sequence
  ENSG00000272514_4 (sequence is synthesized)
agagcatgtgctaaagaagaattggaaagcctctaccggaagattatcagctatgtgttactccgctctggccttggatcccctacagacatcaagactgtcagagaggtaacagctgct

SEQ ID NO: 791973 - DNA, 120 bp, Artificial Sequence
  ENSG00000272514_5 (sequence is synthesized)
ctacagagtgtttttcctcaggcagagcttgggacatttctaactctttctaagaaggacaaagaacgccagctgaaagaactcaccatgattgttactggaattcgtttatttaacaga

SEQ ID NO: 791974 - DNA, 120 bp, Artificial Sequence
  ENSG00000272514_6 (sequence is synthesized)
gactgtggaaaaggaggagaaggcattgatgatttgccagctgttctccatgtagcaatcccagccaccatgcagcatattgattaccagcttgagactgcccggagccaggtataccgc

SEQ ID NO: 791975 - DNA, 120 bp, Artificial Sequence
  ENSG00000272514_7 (sequence is synthesized)
tacacagccatccttgagaaggcagccaacgacccactcatgagggctgaacttcagccatatatgttaaaagaagcgctatataatatacgacaatatgaggtcttccttcagatcatt

SEQ ID NO: 791976 - DNA, 120 bp, Artificial Sequence
  ENSG00000272514_8 (sequence is synthesized)
ttgtcagatataattactggtgctcaagaagtggaaatgatgacaaaacagttaggagcccatctggaacaactaaaaatgaccataaaatcaaagatagcggtcccaacatcacaagtc

SEQ ID NO: 791977 - DNA, 120 bp, Artificial Sequence
  ENSG00000272514_9 (sequence is synthesized)
cgaaactattgtggttggtgtcctcagtaatttattcactcacattcagccattcttgggtgctcacgaactatactttcctgagagagtgatgcaatgtcatcttaatggagcgactgt

SEQ ID NO: 791978 - DNA, 120 bp, Artificial Sequence
  ENSG00000272514_10 (sequence is synthesized)
gaaaactgatgtgtgtagaatgaaagaacacatggaagatagagtaaatgtggcagatttcagaaaactagaatggcttttcccagaaacaacagcaaattttgataaactgttaattca

SEQ ID NO: 791979 - DNA, 120 bp, Artificial Sequence
  ENSG00000272514_11 (sequence is synthesized)
atatcggggattttgtgcttacacgtttgctgcaacagatggtcttctccttccaggaaatccagcaattggaattttaaaatataaagaaaaatattacacattcaatagtaaagatgc

SEQ ID NO: 791980 - DNA, 120 bp, Artificial Sequence
  ENSG00000272514_12 (sequence is synthesized)
tgcatattcatttgcagaaaatcctgaacattatattgacatagttagagaaaaggccaaaaaaaatacagagttaattcaactattggaacttcatcaacagtttgaaacatttattcc

SEQ ID NO: 791981 - DNA, 120 bp, Artificial Sequence
  ENSG00000272514_13 (sequence is synthesized)
atattctcagatgagagatgctgacaaacattatataaaaccaattacaaaatgtgaaagtagcacacagacgaatacacacatactgccaccaacgattgtgagatcatatgagtggaa

SEQ ID NO: 791982 - DNA, 120 bp, Artificial Sequence
  ENSG00000272514_14 (sequence is synthesized)
tgaatgggaattaagaagaaaagctataaaattggctaatttgcgccagaaagttactcactcagtacaaactgatcttagtcacttgagaagagaaaattgttcccaagtgtaccctcc

SEQ ID NO: 791983 - DNA, 120 bp, Artificial Sequence
  ENSG00000272514_15 (sequence is synthesized)
aaaggacactagcacccagtccatgagggaagacagcactggggtgcccaggcctcagatttacttggctggtcttcgtggaggaaagagcgaaatcaccgatgaggtcaaggtgaactt

SEQ ID NO: 791984 - DNA, 120 bp, Artificial Sequence
  ENSG00000272514_16 (sequence is synthesized)
aactagagatgtggatgaaacctaattacagacaacgttttaaaatagatgctactcaattatgaacaatagcaagtacttaaaggtatattaacatctatacaaattaattttgtaggg

SEQ ID NO: 791985 - DNA, 120 bp, Artificial Sequence
  ENSG00000272514_17 (sequence is synthesized)
gtggcacattcattggttgtgtgactgtttattgggttcccatattttatcaaactgttttctgtaacacatttttcattctgttgaaattgaaaaataaaactgtccatttatctttta

SEQ ID NO: 791986 - DNA, 120 bp, Artificial Sequence
  ENSG00000272514_18 (sequence is synthesized)
tagttaatttaaaagttgtattttgttgtagaatgcttcccaggtccacacagagagagtcagatgagggtctttacaggttgtctgaaagggattcatatctgaagatgaaaactaatt

SEQ ID NO: 791987 - DNA, 120 bp, Artificial Sequence
  ENSG00000272514_19 (sequence is synthesized)
gaatcaaagaataatgaaaacaggatatggagtcaaattgatgaattaggaaatggggaaaatctgaatcagaacaacttcattgacttataaataattgaagctgcagtatatttctgt

SEQ ID NO: 791988 - DNA, 120 bp, Artificial Sequence
  ENSG00000272514_20 (sequence is synthesized)
atctgaaattggaggagctcaacacagataacacagatagtaacttatactcagagctgcaaaacaatttaacaggtttaaattgtagtagtctgaaaggccacagaatggatctcaagg

SEQ ID NO: 791989 - DNA, 120 bp, Artificial Sequence
  ENSG00000272514_21 (sequence is synthesized)
tgggtttcttgtatgtctgtgcctattgattaattcattcatcttatttagtaagccacttattgtgtgtcagtaattattcttggcataagggatttcatgaaacaaaacagataaaaa

SEQ ID NO: 791990 - DNA, 120 bp, Artificial Sequence
  ENSG00000272514_22 (sequence is synthesized)
tctctaccggtttggaactcacatttgaatgccgtatattctaatgttcttcctctttgtctctcattttcgttgttcatctctttttttgttctttttagaggcaaggtctcactctgt

SEQ ID NO: 791991 - DNA, 120 bp, Artificial Sequence
  ENSG00000272514_23 (sequence is synthesized)
gaggcaaggtctcactctgtcacccaggatggagagcactggcacaatcatagcttactgtaccttccaactcctgggttcaagggatcgtcttgcctcagtctcccaagtagctgggac

SEQ ID NO: 791992 - DNA, 120 bp, Artificial Sequence
  ENSG00000272514_24 (sequence is synthesized)
tgtagagatggggtctcgccatgttgcccgggctggtctcaaacttgtggcttcaagttatcctcccgccttggcatcccaaagtgttgggattataggcacgagccaccatgccaagcc

SEQ ID NO: 791993 - DNA, 120 bp, Artificial Sequence
  ENSG00000272514_25 (sequence is synthesized)
ttataggcacgagccaccatgccaagcctgttgttcatctcttaagtggtctttctttctctcctgtctcttgttgaattcctctcttttaaactcactaaaatgaaaacattttgaaat

SEQ ID NO: 791994 - DNA, 120 bp, Artificial Sequence
  ENSG00000272514_26 (sequence is synthesized)
cttgttttcctgaagtagaattgccatatccaatccagtttttctctagttcttacgtaagaagaattctaaaaattaaatatatagaacattgttatttggcaattttagtggaatttc

SEQ ID NO: 791995 - DNA, 120 bp, Artificial Sequence
  ENSG00000272514_27 (sequence is synthesized)
ggagcgcgcacacagatccggagcgcgcacacagatccggagcgcgcacacagatccggagcgcgcacacagatccggagcgcgcacacagatccggagcgcgcacacagatccggagcg

SEQ ID NO: 791996 - DNA, 120 bp, Artificial Sequence
  ENSG00000272514_28 (sequence is synthesized)
cgacggactctcccactgactggcacttgcgcatgcgctgcctgtgatcttggagtactgattataagctgttttaagcgattcccttaagccgcgcactgttgtaaccactaaaaacag

SEQ ID NO: 791997 - DNA, 120 bp, Artificial Sequence
  ENSG00000272573_0 (sequence is synthesized)
agatcttttccagcagctgctgcctgccagagaggcgccttcagagacccagcgcttacacaatacccaccatgtcccaggctggtgctcaggaagcccctatcaagaagaagcgccccc

SEQ ID NO: 791998 - DNA, 120 bp, Artificial Sequence
  ENSG00000272573_1 (sequence is synthesized)
ctgtgaaggacgaggacctgaagggggcccgaggaaacctgaccaagaaccaggaaatcaagtccaagacctaccaggtcatgcgagagtgtgagcaagctggctcggccgccccgtcgg

SEQ ID NO: 791999 - DNA, 120 bp, Artificial Sequence
  ENSG00000272573_2 (sequence is synthesized)
gcccaaagccggacccaccaagagtgtcttcggctgagaagtgtgcgccactccccttgctgcccgaatgctcggaaacaggagcctttcccaggaactcttttttatgccagaacgctt

SEQ ID NO: 792000 - DNA, 120 bp, Artificial Sequence
  ENSG00000272573_3 (sequence is synthesized)
cctctcccctgctgtctctggggctgccaccctcccccacagtccaggcccttcagccaagggctctgcaccagcaccttggaagcaccaataaagaggatgcccacgtggccccagcaa

SEQ ID NO: 792001 - DNA, 120 bp, Artificial Sequence
  ENSG00000272573_4 (sequence is synthesized)
gttgatgccagagggagtggaggtggagtcctggacactttcggctctggcagctgtgtcttgatctgagccccaagcatgaactggaggctctgcagcccttgggagatgggggctcag

SEQ ID NO: 792002 - DNA, 120 bp, Artificial Sequence
  ENSG00000272602_0 (sequence is synthesized)
gttttcctctggctcctgcgagggcttggtttagggcttcagctctctgcgttctcggctccgggaggcctcggtgattcagccacagcctctgcctcccgttgctctgtgacctgaggg

SEQ ID NO: 792003 - DNA, 120 bp, Artificial Sequence
  ENSG00000272602_1 (sequence is synthesized)
tattggacaatttgtagctaagactcccggataccctgaagtcgggaaatggaactcgtaacattcagggatgtggccatagaattctcccctgaagagtggaaatgtctggaccctgcc

SEQ ID NO: 792004 - DNA, 120 bp, Artificial Sequence
  ENSG00000272602_2 (sequence is synthesized)
cagcagaatttgtatagagatgtgatgttggagaactacaggaacctggtctccctgggttttgtgatctctaacccagacctggtcacctgtctggagcaaataaaagagccctgcaat

SEQ ID NO: 792005 - DNA, 120 bp, Artificial Sequence
  ENSG00000272602_3 (sequence is synthesized)
ttgaagatacatgagacagcagccaaacccccagctatatgttctcctttcagccaagacctttcaccagtgcaggggatagaagattcattccacaaacttatactgaaaagatacgag

SEQ ID NO: 792006 - DNA, 120 bp, Artificial Sequence
  ENSG00000272602_4 (sequence is synthesized)
aaatgtggacatgagaatttacaattaagaaaaggctgtaaacgtgtgaatgagtgtaaggtgcagaaaggagttaataatggagtttaccagtgcttgtcaactacccagagcaaaata

SEQ ID NO: 792007 - DNA, 120 bp, Artificial Sequence
  ENSG00000272602_5 (sequence is synthesized)
tttcaatgtaatacatgtgttaaagtttttagtaaattttcaaattcaaacaaacataagataagacatactggagagaaaccctttaaatgtacagaatgtggcagatcgttttacatg

SEQ ID NO: 792008 - DNA, 87 bp, Artificial Sequence
  ENSG00000272602_6 (sequence is synthesized)
accctttaaatgtacagaatgtggcagatcgttttacatgtcacacctaactcaacatacaggaattcatggcaaagcctttaatag

SEQ ID NO: 792009 - DNA, 66 bp, Artificial Sequence
  ENSG00000272602_7 (sequence is synthesized)
actttagatggtccacaagcctgaatgaacataagaatattcatactggagagaaaccctacaaat

SEQ ID NO: 792010 - DNA, 120 bp, Artificial Sequence
  ENSG00000272602_8 (sequence is synthesized)
ctacaaatgtaaagaatgtggcaaagcctttagacagtccaggagcctgaatgaacataaaaatattcatactggcgaaaaaccctacacatgtgaaaaatgtggcaaagcttttaacca

SEQ ID NO: 792011 - DNA, 120 bp, Artificial Sequence
  ENSG00000272602_9 (sequence is synthesized)
gaaaaaccctacacatgtgaaaaatgtggcaaagcttttaaccaatcctcaagtcttattatacacaggagcattcattctgaacaaaaactttacaaatgtgaagaatgtggcaaagcc

SEQ ID NO: 792012 - DNA, 120 bp, Artificial Sequence
  ENSG00000272602_10 (sequence is synthesized)
tggagagaaaccctacacgtgcgaagaatgtggcaaagcttttaaccaatcctcaactcttatattacacaagagaatccattctgggcaaaaaccttacaaatgtgaagaatgtggcaa

SEQ ID NO: 792013 - DNA, 81 bp, Artificial Sequence
  ENSG00000272602_11 (sequence is synthesized)
aaatgtgaagaatgtggcaaagcctttacacggtccacaacactgaacgaacataagaaaattcatactggcatatggtcc

SEQ ID NO: 792014 - DNA, 88 bp, Artificial Sequence
  ENSG00000272602_12 (sequence is synthesized)
gtaaagaatgtggcaaagcttttaaccaatcctcaggccttattatacacaggagcattcattctgaacaaaaactttcggtccacag

SEQ ID NO: 792015 - DNA, 120 bp, Artificial Sequence
  ENSG00000272602_13 (sequence is synthesized)
gcaaagcctttactcggtccacagccctgaatgaacataagaaaattcattctggagagaaaccctacaaatgcaaagaatgtggcaaagcctataacttatcctcaacccttactaaac

SEQ ID NO: 792016 - DNA, 87 bp, Artificial Sequence
  ENSG00000272602_14 (sequence is synthesized)
gagaattcatactggagagaaacccttcacatgtgaagaatgtggcaaagccttcaattggtcctcatccctttcctacaaatgtga

SEQ ID NO: 792017 - DNA, 120 bp, Artificial Sequence
  ENSG00000272602_15 (sequence is synthesized)
gtgaagaatgtggcaaagcttttaatcggccctcaacccttactgtacacaagcgaattcatactggcaaggaacatagttgaatgacatttctagtaatctctaattccagtgtcttta

SEQ ID NO: 792018 - DNA, 120 bp, Artificial Sequence
  ENSG00000272602_16 (sequence is synthesized)
cacagcaaataaattggagaatattgctcccatataaacttgtattatttttcttattttaaattttttaaaatttctgtaggtacatagtatgtgtatctattcatggcttatttggat

SEQ ID NO: 792019 - DNA, 120 bp, Artificial Sequence
  ENSG00000272602_17 (sequence is synthesized)
tattttgatacaggcatatgacatgtaattatcacatcagagtaaatgagttattcttcacaagcatttgttctttgtattacacacagtccagttatacactttaattttttttttttt

SEQ ID NO: 792020 - DNA, 67 bp, Artificial Sequence
  ENSG00000272602_18 (sequence is synthesized)
ccggcagaatgctggccaggctgttctcgaactcctgagctcatgatccacccacctcggcctccca

SEQ ID NO: 792021 - DNA, 120 bp, Artificial Sequence
  ENSG00000272602_19 (sequence is synthesized)
aagtgctgggattacgggtgtgagccatcgtacctggccactttaattatttttaaatgtgcaattatttttttactacaggttattttatgattataataagtatatgagtataattat

SEQ ID NO: 792022 - DNA, 120 bp, Artificial Sequence
  ENSG00000272602_20 (sequence is synthesized)
gagtataattataattcacacatttctaagtcatgaatgcttttaaaaaatgttccatatttatctttgaacatgtagcatctctttccgcaaataaatgcagactttggttttgattta

SEQ ID NO: 792023 - DNA, 120 bp, Artificial Sequence
  ENSG00000272602_21 (sequence is synthesized)
taggtgagactgaatgaaggagaggacacaggctaggaggccagaggtcaggaaggaagccaggccttcaaatgtagtctgggaaactgcgccaataaaaataatttccgaaaaggctgc

SEQ ID NO: 792024 - DNA, 120 bp, Artificial Sequence
  ENSG00000272602_22 (sequence is synthesized)
attttttctcttattcacaaatagggtcatcttctgtcccatgctcttaaatcttctaagaatttcctttttttcttcagtgatctccaagtttacaaggagagccaatgtccactttat

SEQ ID NO: 792025 - DNA, 120 bp, Artificial Sequence
  ENSG00000272602_23 (sequence is synthesized)
cgcttataatgggctgcataatctgactgctgttccattgcttttagagacataggagtatttgtattattgaggacctctatgttaaagtattttttcaaatattattttcgcatcatg

SEQ ID NO: 792026 - DNA, 120 bp, Artificial Sequence
  ENSG00000272602_24 (sequence is synthesized)
aggtgtgagccactgcaccacgtcaggattgcgtcttatgttaatgcgaaatatgcatagctgtcatccgaagtataccaccattcccttcagcactctacgtcagaggaggcacgtcag

SEQ ID NO: 792027 - DNA, 120 bp, Artificial Sequence
  ENSG00000272602_25 (sequence is synthesized)
gggagacaaaattcctcttcggacagtccctcaaaagacaggaatgtggacatatattccacatttctctttgtctcctgaggaagaagcatagagttgggagtttctcctggattgcac

SEQ ID NO: 792028 - DNA, 120 bp, Artificial Sequence
  ENSG00000272602_26 (sequence is synthesized)
catgctgtattgggaggaggtcaggctgcgctgggcatatctaataagctttttcttctcttctacatgtttttggcattgtgctcaactgaagtagtacaaattcttaactatgttcag

SEQ ID NO: 792029 - DNA, 120 bp, Artificial Sequence
  ENSG00000272636_0 (sequence is synthesized)
ccggggtcgcgccgggccgggccgcgcccggggcggggcggcgctgcctgcatgaccctccggcggcgcggggagaaggcgaccatcagcatccaggagcatatggccatcgacgtgtgc

SEQ ID NO: 792030 - DNA, 120 bp, Artificial Sequence
  ENSG00000272636_1 (sequence is synthesized)
atcgacgtgtgccccggccccatccgtcccatcaagcagatctccgactacttcccccgcttcccgcggggcctgcccccggacgccgggccccgagccgctgcacccccggacgccccc

SEQ ID NO: 792031 - DNA, 120 bp, Artificial Sequence
  ENSG00000272636_2 (sequence is synthesized)
ggctgtggccggtgccggccgccgcagcccctccgacggcgcccgcgaggacgacgaggatgtggaccagctcttcggagcctacggctccagcccgggccccagcccgggtcccagccc

SEQ ID NO: 792032 - DNA, 120 bp, Artificial Sequence
  ENSG00000272636_3 (sequence is synthesized)
cggccgccagccaagccgccggaggacgagccggacgccgacggctacgagtcggacgactgcactgccctgggcacgctggacttcagcctgctgtatgaccaggagaacaacgccctc

SEQ ID NO: 792033 - DNA, 120 bp, Artificial Sequence
  ENSG00000272636_4 (sequence is synthesized)
cactgcaccatcaccaaggccaagggcctgaagccaatggaccacaatgggctggcagacccctacgtcaagctgcacctgctgccaggagccagtaaggcaaataagctcagaacaaaa

SEQ ID NO: 792034 - DNA, 120 bp, Artificial Sequence
  ENSG00000272636_5 (sequence is synthesized)
actctccgtaacactctgaaccccacatggaacgagaccctcacttactacgggatcacagatgaagacatgatccgcaagaccctgcggatctctgtgtgtgacgaggacaaattccgg

SEQ ID NO: 792035 - DNA, 120 bp, Artificial Sequence
  ENSG00000272636_6 (sequence is synthesized)
cacaatgagttcatcggggagacacgtgtgcccctgaagaagctgaaacccaaccacaccaagaccttcagcatctgcctggagaagcagctgccggtggacaagactgaagacaagtcc

SEQ ID NO: 792036 - DNA, 120 bp, Artificial Sequence
  ENSG00000272636_7 (sequence is synthesized)
ctggaggagcggggccgcatcctcatctccctcaagtacagctcacagaagcaaggcctgctggtaggcatcgtgcggtgcgcccacctggccgccatggacgccaacggctactcggac

SEQ ID NO: 792037 - DNA, 120 bp, Artificial Sequence
  ENSG00000272636_8 (sequence is synthesized)
ccctacgtgaaaacatacctgaggccagatgtggacaagaaatccaaacataagacagcggtgaagaaaaaaaccctgaacccggagtttaatgaggagttctgttacgagatcaagcat

SEQ ID NO: 792038 - DNA, 120 bp, Artificial Sequence
  ENSG00000272636_9 (sequence is synthesized)
ggggacctggccaagaagtccctggaggtcaccgtttgggattacgacattggaaaatccaacgatttcattggtggtgtggttctgggcatccacgccaagggggagcgcctgaagcac

SEQ ID NO: 792039 - DNA, 120 bp, Artificial Sequence
  ENSG00000272636_10 (sequence is synthesized)
tggtttgactgcctgaagaacaaggacaagcgcatcgagcgctggcacacgctcaccagcgagctcccaggggctgtgctcagcgactgacgcccacccgccactgctacccctgccgcc

SEQ ID NO: 792040 - DNA, 120 bp, Artificial Sequence
  ENSG00000272636_11 (sequence is synthesized)
acctgcgcccagcacggccggccccgggcttccccagcagccaccaaggcctgtggcccccacactgggggagatccagaacccctgcttggacacagagccactgcagtccccgctcgg

SEQ ID NO: 792041 - DNA, 120 bp, Artificial Sequence
  ENSG00000272636_12 (sequence is synthesized)
aggatgtggagggctcagccactctgggacggggagggcaaggagctggggtggggggctctcagctctctggggcccaagaggccggtggtggaaagagacctcagcacctgcccaggg

SEQ ID NO: 792042 - DNA, 120 bp, Artificial Sequence
  ENSG00000272636_13 (sequence is synthesized)
gaaggggacacgcccatctgggagcaaagacccttctagaggccagccccggctgagaggacaggagtgtgggggcgccttggcggacagtgggaacagaggagggaggtggtgagcaga

SEQ ID NO: 792043 - DNA, 120 bp, Artificial Sequence
  ENSG00000272636_14 (sequence is synthesized)
cagacaggtggaggatgggaccttgaagactggctgctccagcccaagaaagcctaactgcatccctcatctccttcgctgctggacagatggaagaagcgggcctgccggccgaaagtc

SEQ ID NO: 792044 - DNA, 120 bp, Artificial Sequence
  ENSG00000272636_15 (sequence is synthesized)
tgccagagttcccggaggctcctgatgatgggtaaattggcacatgcttcactcaatgattccacaagccctgggggtgaatgagacacagggcctgccctcagggagttcccatctagt

SEQ ID NO: 792045 - DNA, 120 bp, Artificial Sequence
  ENSG00000272636_16 (sequence is synthesized)
caggaagctgggaacaaaccattccaactggggtgagaaataccaagaccagcttggccagtctgcaagtaccgtgggctctgctgactctgccgggaggtcagggacggcttcctggag

SEQ ID NO: 792046 - DNA, 120 bp, Artificial Sequence
  ENSG00000272636_17 (sequence is synthesized)
gaggcggtgcttccgtaaggccttggagggtgagtgagggcttctaaaagcagtccaggcagtgggagtggtctaaaacgcctggagagagaaagccaatggggccggggtgctgtggac

SEQ ID NO: 792047 - DNA, 120 bp, Artificial Sequence
  ENSG00000272636_18 (sequence is synthesized)
ccagggtctcctctccaggggagggtttgttaggaaggtgtgaggctcgaggcaggaggtgggggacgtgatggaaacaccatggagaaactggtgtaggctcaagttcagacctcagac

SEQ ID NO: 792048 - DNA, 120 bp, Artificial Sequence
  ENSG00000272636_19 (sequence is synthesized)
ccaagtctcccactctgatctctttctactcctgagggacctcaaggacggagcccgcccctcctccttcctggcataagcatcaggtcagctgcagtggagaaaagggtcccttgtgct

SEQ ID NO: 792049 - DNA, 120 bp, Artificial Sequence
  ENSG00000272636_20 (sequence is synthesized)
tgggaaaaaaagcaagcattcctacacgtcctgactctgccctttcccctcccctccactccatggctcacactgggggcctccgggtgcttgctcgtggcatcttggtcccactaccgc

SEQ ID NO: 792050 - DNA, 120 bp, Artificial Sequence
  ENSG00000272636_21 (sequence is synthesized)
cacagatgtcccttttgggagtaatcagtggccgtccagggccttgtctctggggaggcctgtggggccagctccaccctccaggagctgagcaagaatcaccctggctggtgggcctgt

SEQ ID NO: 792051 - DNA, 120 bp, Artificial Sequence
  ENSG00000272636_22 (sequence is synthesized)
ctgctcccctgagtgagactccccaggaggcttgagagtatctgaatcttggggcccatgcctgaagcccacaaactttctctgcctaccaagggcccctcaggaacgctgggtgaacaa

SEQ ID NO: 792052 - DNA, 120 bp, Artificial Sequence
  ENSG00000272636_23 (sequence is synthesized)
atgcagagccaaggagttgcacagccagagtcccagtgtgctcagcccatcagtgtgtgatggaaacaggcccagagaggtcaggtgacctgcccagggccttccaggccccacacagct

SEQ ID NO: 792053 - DNA, 120 bp, Artificial Sequence
  ENSG00000272636_24 (sequence is synthesized)
tgctgagctcacaccagagaggtcctgctagctgccagcctggggctcccccgcctgctgcccaccccttcaacaccgatagagggactcacaggcacgacggtgggaccttccactgca

SEQ ID NO: 792054 - DNA, 120 bp, Artificial Sequence
  ENSG00000272636_25 (sequence is synthesized)
gacacaaagcacaccaccacctgaggtccagggttatgatttgaatcctaccaagtgcccatcaggcctttcccaggttgcggggaaaacaggaccccagcccccacacagtccctggcc

SEQ ID NO: 792055 - DNA, 120 bp, Artificial Sequence
  ENSG00000272636_26 (sequence is synthesized)
acctgctgctcctggagacttgtctccctgcctttaggaagggtttttgtgtgaaggtttttgcatgcactggtctgaacgcatgttcacagccctgcaaggtgggtttgattctcatcc

SEQ ID NO: 792056 - DNA, 120 bp, Artificial Sequence
  ENSG00000272636_27 (sequence is synthesized)
ccatcttgcaggtgaaacaggttcccagagtctgagtagtttgccaaggccacacagccaggaaggggtgaaccaggactcaaacccaggtcctctgactgccgctttctctctctgggg

SEQ ID NO: 792057 - DNA, 120 bp, Artificial Sequence
  ENSG00000272636_28 (sequence is synthesized)
gtcggtacccccagtcccttccctcttggtctgtcggagactcagcagagacaccaggtgaaggctcagtaagctcaggtgcatgatggagacctggggtcttgtcactgtcctgccacc

SEQ ID NO: 792058 - DNA, 120 bp, Artificial Sequence
  ENSG00000272636_29 (sequence is synthesized)
tcatccgctggctttgaaaccatccgtgctacttcaggcttccccagaggtgtctaacctggccccaaaactcagccaccccaccctagcctctgggggctgaggcaagggctcctcttt

SEQ ID NO: 792059 - DNA, 120 bp, Artificial Sequence
  ENSG00000272636_30 (sequence is synthesized)
tctccacacagaatgggcaccctctgggggcctaaggtaagaggtggtctatttctaaaaggcctggtgtctagttaagctctgggtatcttcttagctttgcttttttgggggtctcat

SEQ ID NO: 792060 - DNA, 120 bp, Artificial Sequence
  ENSG00000272636_31 (sequence is synthesized)
tcagagaggagatttgacagcctctctgaagacacagaagtgaatggcaaagcgagaagaggctgtaccccccacctaccatgacttccttattaggcacatggggaatgtgaggcccag

SEQ ID NO: 792061 - DNA, 120 bp, Artificial Sequence
  ENSG00000272636_32 (sequence is synthesized)
tgggtgaaaggggcctgaaggggcacagctgggacaagaacccagaactccagccccccagtccagggccctctactgcccaggctgtgcaaatggggctgggaccgaaagatggggaca

SEQ ID NO: 792062 - DNA, 120 bp, Artificial Sequence
  ENSG00000272636_33 (sequence is synthesized)
gtcaggctgggaggcgggcttactggccagccagcccaggggcagcacaggcactcgggcaggaactccccaggaagtttggatccttccttccctaggatctcagcacccttttagatc

SEQ ID NO: 792063 - DNA, 80 bp, Artificial Sequence
  ENSG00000272636_34 (sequence is synthesized)
ggatccttccttccctaggatctcagcacccttttagatcccgtgcagattgtctttctgttaaagcgttttgaggcacg

SEQ ID NO: 792064 - DNA, 78 bp, Artificial Sequence
  ENSG00000272636_35 (sequence is synthesized)
caaacaaacaacgctttgagaagctgcagaagcggctctgcctttgaccccgaatgggcatctttactcgggtccatc

SEQ ID NO: 792065 - DNA, 120 bp, Artificial Sequence
  ENSG00000272636_36 (sequence is synthesized)
tgcctttgaccccgaatgggcatctttactcgggtccatcatccccacaaagacaggaaatctgatgccaaaaaaaaaaagtcattccaggtgtcagtaaccaggcgctgcctccagcgc

SEQ ID NO: 792066 - DNA, 120 bp, Artificial Sequence
  ENSG00000272636_37 (sequence is synthesized)
cgccccgcccgccgcctgcgccaatccccgacgggcccgtcttccagccccgaagcggtcacctcctgacctctagtggcgagcgcggggaactgcgccccggcccgtccgcccgccgag

SEQ ID NO: 792067 - DNA, 120 bp, Artificial Sequence
  ENSG00000272636_38 (sequence is synthesized)
gccccggcccgtccgcccgccgagcccgggccgtgcatgccgagcccgttgttccttcgcaaaccgagtgaacctcccgatgcatggactctggctgtcgtcgacgcagactctcgtgca

SEQ ID NO: 792068 - DNA, 120 bp, Artificial Sequence
  ENSG00000272636_39 (sequence is synthesized)
ctgcttaaccccgttttgctgccatgtgacggctgcagacactgtcctcaaactgcagtcccacagacaagttttgtattttggtctgacctacccgaaggtgtcctttttaagtcttat

SEQ ID NO: 792069 - DNA, 120 bp, Artificial Sequence
  ENSG00000272636_40 (sequence is synthesized)
ttgttaatatttataatgacatataatccaaagtaaatggaaacgtcatattgcgatctcattgccttggcgagactctcaccttttaatagatttgaaggggtgggggcggtggctcac

SEQ ID NO: 792070 - DNA, 120 bp, Artificial Sequence
  ENSG00000272636_41 (sequence is synthesized)
accttttaatagatttgaaggggtgggggcggtggctcacgcctgtaagtcctagcacttttggaggtcgaggtgggagaattgcttgaggcctggagttcgagaccagcctggtcaaca

SEQ ID NO: 792071 - DNA, 120 bp, Artificial Sequence
  ENSG00000272636_42 (sequence is synthesized)
tgacaattagcctagcgtggtggcacacacctgtagccccagcttttcaggaggctgaggtaggaggaggaggatcgcttgagcctggaaagtggggattgcagtgagccgagatcacgc

SEQ ID NO: 792072 - DNA, 120 bp, Artificial Sequence
  ENSG00000272636_43 (sequence is synthesized)
tccagcctgggcaacagagggagaccttgtcaaaaaaaaaaaaaaaagatttggaagggtaggaggggagggtggaaagacggaggaaaaggcaactgaaacctactccggatatagtct

SEQ ID NO: 792073 - DNA, 120 bp, Artificial Sequence
  ENSG00000272636_44 (sequence is synthesized)
tatagtcttgttactcttcaccagggacccatttgaggtaggccctcaagttacagatggggaaactaaggcccagagaggttaaaatacttttacagaatcacacggctggtcgatggc

SEQ ID NO: 792074 - DNA, 120 bp, Artificial Sequence
  ENSG00000272636_45 (sequence is synthesized)
agaagcaggattcaaactgaggcagcccaagacattttgcaccaggacctgtcgaccatgctgttgtccactcatccaacaaacagccgtggagtattgactaacgccagcccgtctgag

SEQ ID NO: 792075 - DNA, 120 bp, Artificial Sequence
  ENSG00000272636_46 (sequence is synthesized)
gctccaagagtcttacgttttggaaggtaatttaagacatgtactgcttaggtttggagggaaaaaaataaaccttcctaaccacagattagtgtattaggactagtagcaatccccaca

SEQ ID NO: 792076 - DNA, 120 bp, Artificial Sequence
  ENSG00000272636_47 (sequence is synthesized)
ctttatattttcattccaccttgttagaaaatgttgatcaattgttgaatacagtttattgtacatcattctttaggtcagaaatttctcgagataaaagcctttgctttctaacatcga

SEQ ID NO: 792077 - DNA, 120 bp, Artificial Sequence
  ENSG00000272636_48 (sequence is synthesized)
ctcattcctacgccggatgacccaagcgtccgaccacacatgtgctcagggcaccagcacaacaggtgcatctcggacaggagagagaaaaattgctgttaaataaaagcatcaaggtga

SEQ ID NO: 792078 - DNA, 120 bp, Artificial Sequence
  ENSG00000272636_49 (sequence is synthesized)
gtggcaggcacccagggagtgcctgaggtacaggggcgctgtgttccctgatgggctaccttggcaactccaggggttaagcatggccagcccatttcacagatggggaaactgagggac

SEQ ID NO: 792079 - DNA, 120 bp, Artificial Sequence
  ENSG00000272674_0 (sequence is synthesized)
caaagctctaagtatgctgggacagatactacaaatgaactttatgatgagcgaattaacctgatttatagtcctgtactttctctacgtgccatatccattattaaagaaatgagtcta

SEQ ID NO: 792080 - DNA, 120 bp, Artificial Sequence
  ENSG00000272674_1 (sequence is synthesized)
ttattaaagaaatgagtctaagtaggaagtagagttaacctatagtttcatttcttgaatttcttattctctttcttcagtctttttcagttaacctacacacacacacacacacacaca

SEQ ID NO: 792081 - DNA, 120 bp, Artificial Sequence
  ENSG00000272674_2 (sequence is synthesized)
tatgtttataagtgggatgggagaacgggtacggtgataattaaaagaggtaaggtttctcttgagatgaaaatgttctaaaattgtgatggcggatgcacacctctgaatatattaaaa

SEQ ID NO: 792082 - DNA, 120 bp, Artificial Sequence
  ENSG00000272674_3 (sequence is synthesized)
gccattgaaatgaaaaaagggtggggggaatccaaaagtgtagcagacccaaccttgagatttgcttgtttgggaatgaattttccaataacttgaaagttgtaaaaactcacacttctc

SEQ ID NO: 792083 - DNA, 120 bp, Artificial Sequence
  ENSG00000272674_4 (sequence is synthesized)
agggttaggtgtcagaaagaaaaggaagtaatttattctttaataaagcaattgttaaatactctttagaactaccactgattgcaattttgcagtgtctactcatagtgtctatatagg

SEQ ID NO: 792084 - DNA, 120 bp, Artificial Sequence
  ENSG00000272674_5 (sequence is synthesized)
taccatgaaaaagatgtacttgtgaaactgttctcatgttacttcagaaaaattttgcttctaagtgtgtattctatgtctggttaaatgttcattgaattttatttaatcattaatctc

SEQ ID NO: 792085 - DNA, 120 bp, Artificial Sequence
  ENSG00000272674_6 (sequence is synthesized)
aacagcattaaacagtcaataacataaatgacagtcttctctttgtactcctccctgtacaacatcacagagctccatctgtatacacgaaagtcacatgaaaatagaactcagtgtttt

SEQ ID NO: 792086 - DNA, 120 bp, Artificial Sequence
  ENSG00000272674_7 (sequence is synthesized)
gtattacatagtctattcagtacatttagaagtattttgcctccaatattcaaccacagtaaaagactcagtgagaacgcgtggtggcgctgcaggttaagatgacggaaaatacaactg

SEQ ID NO: 792087 - DNA, 120 bp, Artificial Sequence
  ENSG00000272674_8 (sequence is synthesized)
cctacgcagctccaggatccagcaaaccgtttcccaaagcctggaagcagaagaatagctgagccagagcgaacgtgagtgtgaaacctctttaagacaccgttgggctgcttggttctg

SEQ ID NO: 792088 - DNA, 120 bp, Artificial Sequence
  ENSG00000272674_9 (sequence is synthesized)
acattctggactgcaaaacagttctactaggatcctggggatacatgaagcttctgtgaaccaacttttcaagaaaaagcaatggagattggatggatgcacaatcggagacaaaggcaa

SEQ ID NO: 792089 - DNA, 120 bp, Artificial Sequence
  ENSG00000272674_10 (sequence is synthesized)
gtccttgttttctttgttttgctgagcttgtctggggcgggcgccgagttggggtcctattccgtagtggaagaaacggagagaggctcttttgtggcaaatctaggaaaagacctgggg

SEQ ID NO: 792090 - DNA, 120 bp, Artificial Sequence
  ENSG00000272674_11 (sequence is synthesized)
ttggggttgacagagatgtccacccgcaaggccaggatcatttcccaggggaacaaacagcatttgcagctcaaggctcaaactggggatttgctcataaatgagaagctagatcgagag

SEQ ID NO: 792091 - DNA, 120 bp, Artificial Sequence
  ENSG00000272674_12 (sequence is synthesized)
gagctatgcggtcccactgagccttgcatactacatttccaagtgttaatggaaaaccctttagaaatatttcaggctgaactgagggtgatagatataaatgaccattctcccatgttc

SEQ ID NO: 792092 - DNA, 120 bp, Artificial Sequence
  ENSG00000272674_13 (sequence is synthesized)
actgaaaaggaaatgattctaaaaataccggaaaacagtcctctaggaactgagttccctctgaatcatgctttggacttggacgtaggaagcaataatgttcaaaactataaaatcagc

SEQ ID NO: 792093 - DNA, 120 bp, Artificial Sequence
  ENSG00000272674_14 (sequence is synthesized)
ccaagctctcatttccgggttctaatccatgaattcagagatggcaggaaataccctgagctagtgttggataaagagctggatcgggaggaggagcctcaactaagattaaccctgaca

SEQ ID NO: 792094 - DNA, 120 bp, Artificial Sequence
  ENSG00000272674_15 (sequence is synthesized)
gcgctggatggtggctctccaccgcgatctggaactgctcaggtccgtattgaagtggtggacatcaatgataacgctcctgagtttgagcagcccatctacaaagtgcagattccagag

SEQ ID NO: 792095 - DNA, 120 bp, Artificial Sequence
  ENSG00000272674_16 (sequence is synthesized)
aacagtcctcttggctccctggttgccaccgtctccgccagggatttagacggcggagccaatggaaaaatatcatacacactctttcagccttcggaggatattagtaaaactttggag

SEQ ID NO: 792096 - DNA, 120 bp, Artificial Sequence
  ENSG00000272674_17 (sequence is synthesized)
gtaaatcctatgacaggggaagttcgactgagaaagcaagtagatttcgaaatggttacgtcttatgaagtgcgcatcaaagccacagatgggggaggtctttcaggaaagtgcactctt

SEQ ID NO: 792097 - DNA, 120 bp, Artificial Sequence
  ENSG00000272674_18 (sequence is synthesized)
ctcctgcaggtggtggacgtgaatgacaatcccccacaggtgaccatgtctgcactcaccagccccatcccagagaactcgcctgagatagtagttgctgttttcagcgtttcagatcct

SEQ ID NO: 792098 - DNA, 120 bp, Artificial Sequence
  ENSG00000272674_19 (sequence is synthesized)
gactccggaaacaatgggaagacgatttcctccatccaggaagaccttccctttcttctaaaaccttcagtcaagaacttttacaccttggtaacggagagagcactcgacagagaagca

SEQ ID NO: 792099 - DNA, 69 bp, Artificial Sequence
  ENSG00000272674_20 (sequence is synthesized)
gactccaaggctgaaaacggagcacaacataacagtgcagatatcagatgtcaatgataacgcccccac

SEQ ID NO: 792100 - DNA, 120 bp, Artificial Sequence
  ENSG00000272674_21 (sequence is synthesized)
ggcaccaacgcccaggtcacctactcgctgctgccgccccaagacccgcacctgcccctcgcctccctggtctccatcaacgcggacaacggccacctgttcgccctcaggtcgctggac

SEQ ID NO: 792101 - DNA, 120 bp, Artificial Sequence
  ENSG00000272674_22 (sequence is synthesized)
ctgttcgccctcaggtcgctggactacgaggccctgcaggctttcgagttccgcgtgggcgccacagaccgcggctcccccgcgctgagcagagaggcgctggtgcgcgtgctggtgctg

SEQ ID NO: 792102 - DNA, 68 bp, Artificial Sequence
  ENSG00000272674_23 (sequence is synthesized)
caaggccacggagcccgggctgttcgggacgcagccaagcagaggctggtggtgctggtcaaggacaa

SEQ ID NO: 792103 - DNA, 71 bp, Artificial Sequence
  ENSG00000272674_24 (sequence is synthesized)
cctgccgctcccagaggcggcccccggccagacccaggccaactcgctcactgtctacctggtggtggcgt

SEQ ID NO: 792104 - DNA, 120 bp, Artificial Sequence
  ENSG00000272674_25 (sequence is synthesized)
ctcccagaggcggcccccggccagacccaggccaactcgctcactgtctacctggtggtggcgttggcctcggtgtcgtcgctcttcctcttttcggtgctcctgttcgtggcggtgcgg

SEQ ID NO: 792105 - DNA, 120 bp, Artificial Sequence
  ENSG00000272674_26 (sequence is synthesized)
tcggtgggccgctgctcgatgcctgagggcccctttccagggcgtctggtggacgtaagcggcaccgggaccctgtcccagagctaccaatacgaggtgtgtctgacaggaggctcagaa

SEQ ID NO: 792106 - DNA, 120 bp, Artificial Sequence
  ENSG00000272674_27 (sequence is synthesized)
acaagtgagttcaagttcctgaagccgattatccccaacttctctccttagggcactaggaaagaaatagattaaaattccacccttcacaatagctttggatttaattattgataggaa

SEQ ID NO: 792107 - DNA, 120 bp, Artificial Sequence
  ENSG00000272674_28 (sequence is synthesized)
cccatttgataaattccttaacttcttatgattgtcttgttgattaaattgttcatgctcaccaccaccaataaggtatttttctctgattgttagttcaaattatattgttaattccag

SEQ ID NO: 792108 - DNA, 120 bp, Artificial Sequence
  ENSG00000272674_29 (sequence is synthesized)
tttcccttttcctcatatttaccccgaagaggtgttgcatatagaatcccaattaacaaaatatactttatcttcaaagttgatgtcatttaaaatttttccgtctttatattttattta

SEQ ID NO: 792109 - DNA, 120 bp, Artificial Sequence
  ENSG00000272674_30 (sequence is synthesized)
cttcctattcattttttgctccatttttcatgttacttctcagtttcctagaacttcaagtattaaaataacctgttgcatgtattaggcatatttcctatgttacatttcttttgtcta

SEQ ID NO: 792110 - DNA, 120 bp, Artificial Sequence
  ENSG00000272674_31 (sequence is synthesized)
atttcctatgttacatttcttttgtctattttcctttcaaaattggtatttttgttgggctcaattttcattataatacttttcttaaagtttctttctttcttttcttttctttctttt

SEQ ID NO: 792111 - DNA, 75 bp, Artificial Sequence
  ENSG00000272674_32 (sequence is synthesized)
aggtgcatgccaccatgcctggctaatcttttgcagcgatgggattttgccaatcctcagcctcccaaaattctg

SEQ ID NO: 792112 - DNA, 120 bp, Artificial Sequence
  ENSG00000272674_33 (sequence is synthesized)
tttatttatttttttgagatggagtctcgtaaagttacctttaaaaaaaaagttctattttccctgtattggtatctccttaaataaaataaaatattcctattgtaagtgatatgagaa

SEQ ID NO: 792113 - DNA, 120 bp, Artificial Sequence
  ENSG00000272674_34 (sequence is synthesized)
ataaaatattcctattgtaagtgatatgagaaatctttaaccagccttatctaaaaataaaaagagaagccattgtaagacattcagtatgtgtaaatgtgtttgtgtttgtagacaaaa

SEQ ID NO: 792114 - DNA, 120 bp, Artificial Sequence
  ENSG00000272674_35 (sequence is synthesized)
ggcaaaggtattatgtaaaaatatttaataatttattctttctattactgaattaaaaaatcagaggtccctgttatatttttaatggctaacaactcaatctcattaagttggaaaaaa

SEQ ID NO: 792115 - DNA, 120 bp, Artificial Sequence
  ENSG00000272674_36 (sequence is synthesized)
aacttatcaaagagacatttacatggtttggcttttatattcatcatagtatacattggcggtatctagccctttctctgtaaaatatccctatgtttaatctgtatttcttgcttatta

SEQ ID NO: 792116 - DNA, 120 bp, Artificial Sequence
  ENSG00000272674_37 (sequence is synthesized)
tatgtaaagttgagcttctttctagatattaggcctttgaataaaattctatgtgagtcagatttaataatttgttttcactttcaatagtgttaggataggtgttagtttgatctgttc

SEQ ID NO: 792117 - DNA, 120 bp, Artificial Sequence
  ENSG00000272674_38 (sequence is synthesized)
tttacctccgcttatttggttcagagaaattagggcctactagatttccactaaaagggacttgaaaataaaggtcagtcccttctttaattctgcaagttactttaaagctaatctaag

SEQ ID NO: 792118 - DNA, 120 bp, Artificial Sequence
  ENSG00000272804_0 (sequence is synthesized)
catctcctccagttcaatccccagcatggctgcgtccactatgtctgtctgctccagcgacctgagctacggcagccgcgtctgccttcctggttcctgtgactcttgctccgactcctg

SEQ ID NO: 792119 - DNA, 120 bp, Artificial Sequence
  ENSG00000272804_1 (sequence is synthesized)
gcaggtggacgactgcccagagagctgctgcgagcccccctgctgcgccccggccccctgcctgagcctggtctgcaccccagtgagctatgtgtccagcccctgctgccgagtgacctg

SEQ ID NO: 792120 - DNA, 120 bp, Artificial Sequence
  ENSG00000272804_2 (sequence is synthesized)
tgagcccagcccctgccaatcaggctgcaccagctcctgcacgccctcgtgctgccagcagtctagctgccagctggcttgctgtgcctcctccccctgccagcaggcctgctgcgtgcc

SEQ ID NO: 792121 - DNA, 120 bp, Artificial Sequence
  ENSG00000272804_3 (sequence is synthesized)
cgtctgctgcaagactgtctgctgcaagcctgtgtactgtgtgcctgtctgcagtggggattcttcatgctgccagcagtctagctgccagtcagcttgctgcacctcctccccctgcca

SEQ ID NO: 792122 - DNA, 120 bp, Artificial Sequence
  ENSG00000272804_4 (sequence is synthesized)
gcaggcctgctgtgtgcccatctgctgcaagcctgtctgctctgggatttcctcttcgtgctgccagcagtctagctgtgtgagctgtgtgtccagtccctgctgccaggcggtctgtga

SEQ ID NO: 792123 - DNA, 120 bp, Artificial Sequence
  ENSG00000272804_5 (sequence is synthesized)
gcccagcccctgccaatcaggctgcatcagctcctgcacgccctcgtgctgccagcagtctagctgcaagccggcttgctgcacctcctccccttgccagcaggcctgctgtgtgcctgt

SEQ ID NO: 792124 - DNA, 120 bp, Artificial Sequence
  ENSG00000272804_6 (sequence is synthesized)
ctgtgtgcccacctgctctgatgattccggttcatgctgccagccagcttgctgcacctcctcccaaagccagcagggctgctgcgtgcccgtctgctgtaagcctgtgtgctgtgtgcc

SEQ ID NO: 792125 - DNA, 120 bp, Artificial Sequence
  ENSG00000272804_7 (sequence is synthesized)
gtctagctgccagccggcttgctgcaccacctcctgctgcagaccctcctcctccgtgtccctcctctgccgccccgtgtgcaggcccgcctgctgcgtgcccgtcccctcctgctgcgc

SEQ ID NO: 792126 - DNA, 120 bp, Artificial Sequence
  ENSG00000272804_8 (sequence is synthesized)
gcccgcctgctgcgtgcccgtcccctcctgctgcgcccccacctcctcctgccaggccagctgctgccgcccagcctcctgtgtgtctctcctttgccgccccgcatgctcccgcccggc

SEQ ID NO: 792127 - DNA, 120 bp, Artificial Sequence
  ENSG00000272804_9 (sequence is synthesized)
ctgctgtggccccacctcaacccagaagtccagctgctgagtgatctccttaagatcatccaaagcctgagtgctcactgccacctgcacccctggattctttacccttgacggctctcc

SEQ ID NO: 792128 - DNA, 120 bp, Artificial Sequence
  ENSG00000272804_10 (sequence is synthesized)
acatcccgctcctaagccctgcagtggacgtcagtggtcagctggccatccagtgtgcgcttctcctcctagaagcagctcagctgtttctccaagtcttgactttcccccaattaccca

SEQ ID NO: 792129 - DNA, 120 bp, Artificial Sequence
  ENSG00000272804_11 (sequence is synthesized)
gccctgcttccccagcaacaggtgggcagtgaccccagcaaggccagcgggtgctcccaggccatagcccggtgtggggagaaatgagggtagacaggtaccaactgggtttctcgtcac

SEQ ID NO: 792130 - DNA, 120 bp, Artificial Sequence
  ENSG00000272804_12 (sequence is synthesized)
tgtcccagctcagtggcgagccctgctcctcccctgctgtgggcctgggcctctttctctgtcttccctgaccacgggagcaggtcagacccttctaataaactcctttcctaaaaagta

SEQ ID NO: 792131 - DNA, 120 bp, Artificial Sequence
  ENSG00000272886_0 (sequence is synthesized)
agaggggctaggctctgggattcaagatggaggcgctgagtcgagctgggcaggagatgagcctagcggccctgaagcaacacgacccctatatcaccagcatcgcagacctcacgggcc

SEQ ID NO: 792132 - DNA, 120 bp, Artificial Sequence
  ENSG00000272886_1 (sequence is synthesized)
aggtcgctctgtacaccttctgccccaaggccaaccagtgggagaagactgatatagaagggaccttattcgtatatcgaaggtcagcttccccttaccatggttttaccattgtgaatc

SEQ ID NO: 792133 - DNA, 120 bp, Artificial Sequence
  ENSG00000272886_2 (sequence is synthesized)
gactaaatatgcacaatctagttgaaccagtgaataaagatttggaatttcagctccatgaaccatttcttctgtatagaaatgcaagcttgtcgatatatagtatctggttttatgaca

SEQ ID NO: 792134 - DNA, 120 bp, Artificial Sequence
  ENSG00000272886_3 (sequence is synthesized)
agaatgactgtcaccgcatagcaaaactcatggctgatgtggtagaagaggagacacggcgatcccagcaagctgctcgggacaaacagagtcccagccaggccaatggctgcagcgacc

SEQ ID NO: 792135 - DNA, 120 bp, Artificial Sequence
  ENSG00000272886_4 (sequence is synthesized)
acaggcccatcgacatcctggagatgctgagcagagccaaggatgagtatgagaggaatcagatgggtgactcaaatatctccagccctgggttacagccaagcactcagctctccaatc

SEQ ID NO: 792136 - DNA, 120 bp, Artificial Sequence
  ENSG00000272886_5 (sequence is synthesized)
tgggaagcaccgagactctagaagaaatgccctccgggtcacaggataagtctgctccatctggacacaagcatctgacggtagaagagttatttggaacctctttgccaaaggaacaac

SEQ ID NO: 792137 - DNA, 120 bp, Artificial Sequence
  ENSG00000272886_6 (sequence is synthesized)
cagcagttgtgggtctggattcagaagaaatggagaggttgccaggagatgcctcccagaaagagcccaattcattcctaccatttccctttgagcagttaggaggagcccctcaatcag

SEQ ID NO: 792138 - DNA, 120 bp, Artificial Sequence
  ENSG00000272886_7 (sequence is synthesized)
aaaccctgggtgtcccttctgctgcccaccattcagtccagcctgaaatcaccaccccggtgctaatcactccagcctccatcacacagtccaatgaaaagcatgctccaacctacacaa

SEQ ID NO: 792139 - DNA, 120 bp, Artificial Sequence
  ENSG00000272886_8 (sequence is synthesized)
tcccgttgagccctgttctcagtcccactctgccagctgaagctcctactgcacaggttccccccagcttacctcgaaacagcaccatgatgcaggcagtgaagaccacgcctagacaga

SEQ ID NO: 792140 - DNA, 120 bp, Artificial Sequence
  ENSG00000272886_9 (sequence is synthesized)
ggtctccactcctgaaccagccagtccctgagctaagccatgccagtctgattgccaaccagagccccttcagggccccattgaacgtgacgaacacagctggcacatccctcccaagcg

SEQ ID NO: 792141 - DNA, 120 bp, Artificial Sequence
  ENSG00000272886_10 (sequence is synthesized)
ttgatcttctccagaaactcaggttgaccccacagcatgaccaaatacagacacaaccacttgggaaaggtgcaatggtagccagcttttctccggcagctggtcagctagccacacctg

SEQ ID NO: 792142 - DNA, 120 bp, Artificial Sequence
  ENSG00000272886_11 (sequence is synthesized)
agagcttcatagagcctccctctaagacagcagcagcaagagtggcggcctcagcctccctgagcaacatggtgcttgctccccttcagtctatgcagcagaaccaggatcctgaagtat

SEQ ID NO: 792143 - DNA, 120 bp, Artificial Sequence
  ENSG00000272886_12 (sequence is synthesized)
ttgtgcagcctaaggtgttatccagtgccatcccggttgcaggcgccccactggttactgcaacgaccactgcagtgtcttcagtcctgctggccccaagtgttttccagcagacagtta

SEQ ID NO: 792144 - DNA, 120 bp, Artificial Sequence
  ENSG00000272886_13 (sequence is synthesized)
caagatcttcggaccttgagaggaaagccagctccccttctcctctaactattggaacgccagaaagtcagagaaagccttccattattctcagcaagtctcagctccaggatacattaa

SEQ ID NO: 792145 - DNA, 120 bp, Artificial Sequence
  ENSG00000272886_14 (sequence is synthesized)
tacatctaataaagaatgattccagcttcctcagtacacttcatgaagtctacttgcaggttctgaccaagaacaaagacaaccacaacctatgactggagcagaataagtctaaaggca

SEQ ID NO: 792146 - DNA, 120 bp, Artificial Sequence
  ENSG00000272886_15 (sequence is synthesized)
gagccccagcctcagagacaaataggcttcatcatggaaacttctgagcagaacattgagtttgagaatcctgaaattgagcctatgagaaagagactcatttcttaagaatgttttcca

SEQ ID NO: 792147 - DNA, 120 bp, Artificial Sequence
  ENSG00000272886_16 (sequence is synthesized)
gaaagagactcatttcttaagaatgttttccaagtgacattctcagtgataatggaggtttcactgtgaagcatcaccagcagatccttgttttgacaaaaaaaaaaaaaaaaaaaaaaa

SEQ ID NO: 792148 - DNA, 120 bp, Artificial Sequence
  ENSG00000272886_17 (sequence is synthesized)
ggtgttttcatcagctaggagcaaggctgtggaataaggagtcagattctcagcttgctttcactttcaaggacttacagaggagtagtcaccagcctcacagcagaagttcagcccggc

SEQ ID NO: 792149 - DNA, 120 bp, Artificial Sequence
  ENSG00000272886_18 (sequence is synthesized)
ccccaccgcttcccccagcctaccccatagaaacgggctttgggctgacaagtcaagttttgaacagagtagaaggcagctctgcaaagtagcttctagtttttaggaccagaatttaag

SEQ ID NO: 792150 - DNA, 120 bp, Artificial Sequence
  ENSG00000272886_19 (sequence is synthesized)
ccggcaaattaggaattatttcctcaagtgaagtatattttatatgaatgccccatttgggccttaaaagttgtgaaatttcttaatagcattttgtttttaagtgccccagtcctgccc

SEQ ID NO: 792151 - DNA, 120 bp, Artificial Sequence
  ENSG00000272886_20 (sequence is synthesized)
tgcagcaggcccccagtgcagcattaccatttgaatagggcactgtcaggctctggtggtgtggacacaggcatgtcatacctttgaaggaaaggctggggctgggaatgcccacatcct

SEQ ID NO: 792152 - DNA, 120 bp, Artificial Sequence
  ENSG00000272886_21 (sequence is synthesized)
atcaaatcttcattttaggttaaactctccattggttctgaaaatgctaagtttgtgtgtgaagcacagccttattttccttttctgtcattgttgattgttttccttaacactttgaca

SEQ ID NO: 792153 - DNA, 120 bp, Artificial Sequence
  ENSG00000272886_22 (sequence is synthesized)
aaaggaccagtggaccaatctgacaaagccattctggttcctttccttgagtgtactgagaatagttttaaagctatgcagaaaagggagctgttattcacactgcccttattttgttgt

SEQ ID NO: 792154 - DNA, 120 bp, Artificial Sequence
  ENSG00000272886_23 (sequence is synthesized)
agaattatggagttaaaagaaaatgtgattccgaactctaccaatgtattcctaggctgtgagtactttcccggcccaaagtgtgaaaatatgtaaagaagctttgttatgctgctattg

SEQ ID NO: 792155 - DNA, 120 bp, Artificial Sequence
  ENSG00000272886_24 (sequence is synthesized)
tagtaatattttaatgtagattttgatttatttcagcaatagtaattttaagatattctttgaatgaaagtgtcttcgtttctatgatacaggtcattttgtagtatttaaccaattaag

SEQ ID NO: 792156 - DNA, 120 bp, Artificial Sequence
  ENSG00000272886_25 (sequence is synthesized)
atgcactgcttacttttctgagcactatttaatgatggggtaaaaacccaattggctcaaccagctagcataaggattagctgtgaataatgctgacagatatgatggttccttaggaac

SEQ ID NO: 792157 - DNA, 120 bp, Artificial Sequence
  ENSG00000272886_26 (sequence is synthesized)
aatcatttaagctttaatggtaactcaatcataagtccatagattatttttttctagctaaaattttagaaaattacttgtgaattacatacttgttttagtttggtcttagtttttagc

SEQ ID NO: 792158 - DNA, 120 bp, Artificial Sequence
  ENSG00000272886_27 (sequence is synthesized)
ataaagaatgattggcttttgttgatctaaacatgcttcctggacagggtttctgcttctcattttagtgtcttctattgctgtctacctaattatgtgtgaattgtgcagaattcaggg

SEQ ID NO: 792159 - DNA, 120 bp, Artificial Sequence
  ENSG00000272886_28 (sequence is synthesized)
aagcttataagttttcatgctcaattgtgaatagtttgttttcacagatagtatgtaaattaagcaaccaaaaatgaattccttatgcatcatctgggaacgagaaagctatagtgggat

SEQ ID NO: 792160 - DNA, 120 bp, Artificial Sequence
  ENSG00000272886_29 (sequence is synthesized)
acagagtgttgctgacaccgggagatggtgtccagggagccacgtgacttccataaagtggacgcaccagtaggtgtgattgcacctcaagtgtagtctcagtgggcttcggtgaacaga

SEQ ID NO: 792161 - DNA, 120 bp, Artificial Sequence
  ENSG00000272886_30 (sequence is synthesized)
cgaatcaagggattcttgaatcgaaattatgcttttgagtatgtaatattatgagagagttaagagagaatatcctaaagagagtctgtgatcatactaattttcacctttaatgctagg

SEQ ID NO: 792162 - DNA, 120 bp, Artificial Sequence
  ENSG00000272886_31 (sequence is synthesized)
aatggatatgatagacagtaaagagcatctatgataaggcttccttagtgtgaaagtaaacttaagtgcccaagtcatggagacttgaaaagggtaaacctgtttcacctcccaaattta

SEQ ID NO: 792163 - DNA, 120 bp, Artificial Sequence
  ENSG00000272886_32 (sequence is synthesized)
tatattcaaagtatttacttaaaattcagaagccagaagttcatgtcatgattaccaggaagttcaggccagaatgaatccctagagaagccaggccaagcctggataattgcagctgga

SEQ ID NO: 792164 - DNA, 120 bp, Artificial Sequence
  ENSG00000272886_33 (sequence is synthesized)
tgaccctggcccgaaagtcacagttcagttgccttattcctagttcaggcttactatctagaacctcatgctagcttaggttgcatgtttacattgctgcagtgtctttactggaagctt

SEQ ID NO: 792165 - DNA, 120 bp, Artificial Sequence
  ENSG00000272886_34 (sequence is synthesized)
agttggatcgaaatggacaccgagatggagatgcttctggctagatttcgcagaaccccaggagacctgcatttagaccactctgtccatttgtgtgcccacccccacccccagggtcta

SEQ ID NO: 792166 - DNA, 120 bp, Artificial Sequence
  ENSG00000272886_35 (sequence is synthesized)
agtgtagactccaagaggagcagcccagagcttggaggagaggtgtgtctggggcaccactggtgggtggtgctgctcttctttttgttgtagttaatgcggtgtcttttaatggactct

SEQ ID NO: 792167 - DNA, 120 bp, Artificial Sequence
  ENSG00000272886_36 (sequence is synthesized)
caggcctcccagacagccttgttcctttaaggcagaagctcttcttcattgtgtacctcctgggattcatgaggtgtgagatttggcctgcttgactttgaattcaagtttttcaagtga

SEQ ID NO: 792168 - DNA, 120 bp, Artificial Sequence
  ENSG00000272886_37 (sequence is synthesized)
ctctcagtgtcagaagaagcatttcatgctgtccacatgtggtatgtccacagctcaccttcaaaggcttagatgtagccatcacagagagtggtattttattaagaacccaagtcccag

SEQ ID NO: 792169 - DNA, 67 bp, Artificial Sequence
  ENSG00000272886_38 (sequence is synthesized)
ctctagcctgggcgactgggcccctctctacagggggacacacaggcttagtttagtatatgtctaa

SEQ ID NO: 792170 - DNA, 120 bp, Artificial Sequence
  ENSG00000272886_39 (sequence is synthesized)
ctacagggggacacacaggcttagtttagtatatgtctaaccagattttgcatgtcaagcatttgtccttttcctggcttatgttttcttgtagaaattatataaaccctatcaaatcca

SEQ ID NO: 792171 - DNA, 120 bp, Artificial Sequence
  ENSG00000272886_40 (sequence is synthesized)
ctactaggtaaatttttaaaccatgcagctttattactctcctcccccaaagaatgtagtttgaaattttctcatttccatagtagaggccctaactgccattgtattactaataatgca

SEQ ID NO: 792172 - DNA, 120 bp, Artificial Sequence
  ENSG00000272886_41 (sequence is synthesized)
acatgaaattgaaggtgcctaactgctcaaaaaacaaaatcagccatcatactgtaactctgagaggaatgagaggtggcacaggcacgagtgggctcagcccgtgtgagtgaggagaac

SEQ ID NO: 792173 - DNA, 120 bp, Artificial Sequence
  ENSG00000272886_42 (sequence is synthesized)
tgaggaatcctagggtgcgcatcctgcatcctggctgcacgtttgctgcagagtatgtttttctttcttgcctcccttcagttttcttcagttgcgttcagtgtatcttctggaaccaat

SEQ ID NO: 792174 - DNA, 120 bp, Artificial Sequence
  ENSG00000272886_43 (sequence is synthesized)
agtgccctgtgttctcaagtctctaaaatgctaagatctgagcaaagtcaagcagcttacactaggcttttttacagctgtgcttgagaacatttccgagtggaccagggccttgaggag

SEQ ID NO: 792175 - DNA, 120 bp, Artificial Sequence
  ENSG00000272886_44 (sequence is synthesized)
cctgtttttcagcaaattcaacagatgtgtgcagtgattccctccgttttgtatttgacaccttcatttaaaatgctaagatgcaatatcattcacttcaaagtggggaaaatgcagaat

SEQ ID NO: 792176 - DNA, 120 bp, Artificial Sequence
  ENSG00000272886_45 (sequence is synthesized)
tgtgtttcctttttatctgtgtgattccttaagaaacatgtttttaaaatatgtgttctaaatggttttttattctgtattactgctttggccatgtggctctcatgactttcattgtac

SEQ ID NO: 792177 - DNA, 120 bp, Artificial Sequence
  ENSG00000272886_46 (sequence is synthesized)
cagattctcagctccctgaaacatggggacgagaagctctggaattacagcaagatttttgttccatgagcgcaatactgtatcattaacatttttaatggtatggattttatagcatct

SEQ ID NO: 792178 - DNA, 120 bp, Artificial Sequence
  ENSG00000272886_47 (sequence is synthesized)
gtgtatgtttgcaaatattaagttattacatgttttaaaatgagcgtttttcatcttaaattttatatgtttgcaaatatatttttttaataaaatttcaaaaccaagttttagcaccta

SEQ ID NO: 792179 - DNA, 120 bp, Artificial Sequence
  ENSG00000272899_0 (sequence is synthesized)
actcgccgtcagaagcactctgcttgctgtgctcacccctcagctgtggccaccctggtgccactccttccctggccaccatgtcacggcagctcaacatagacgcgttacggcagaact

SEQ ID NO: 792180 - DNA, 120 bp, Artificial Sequence
  ENSG00000272899_1 (sequence is synthesized)
tctggaaggaggaatatctgagggaaaagatgttgcgctgtgaatggtaccgcaagtatgggtcgatggtgaaggccaagcagaaggctaaggctgcagcccgcctgcccctcaaactgc

SEQ ID NO: 792181 - DNA, 120 bp, Artificial Sequence
  ENSG00000272899_2 (sequence is synthesized)
ccaccctgcaccccaaagccccactctcacccccacccgcccccaagtcagccccttccaaggtgcccagccctgtcccagaggcgccttttcagtcggaaatgtacccggtaccaccta

SEQ ID NO: 792182 - DNA, 120 bp, Artificial Sequence
  ENSG00000272899_3 (sequence is synthesized)
tcacccgagccctgctgtatgaaggcatctcccacgacttccaggggcggtaccgctacctcaacactcgaaaactggacatgccagagacgcgatacctcttccccatcaccaccagct

SEQ ID NO: 792183 - DNA, 120 bp, Artificial Sequence
  ENSG00000272899_4 (sequence is synthesized)
tcacgtatggctggcagctgggccccccagtgaagcaagaactggtctcctgcaagatgtgccgcattgagtcattcttccgcaagaacggggccttcgcactgcttgatccccgagacc

SEQ ID NO: 792184 - DNA, 120 bp, Artificial Sequence
  ENSG00000272899_5 (sequence is synthesized)
tggccctctgaccgtgggccaggtgtgggcttaggggagggaagaagaaataacaggcctcctggtggggcaaagctgctgtgtgtgtctgtgcccctctgctctccctgtccctgaggt

SEQ ID NO: 792185 - DNA, 120 bp, Artificial Sequence
  ENSG00000272899_6 (sequence is synthesized)
tgcattcaggcctttctgaaactatcagacctgcaagttgccctcttgctttttccgtaaccctcatcactttaatcatccctttgaggactcagcaatgaccagagggtgctgggaagg

SEQ ID NO: 792186 - DNA, 120 bp, Artificial Sequence
  ENSG00000272899_7 (sequence is synthesized)
gcgagcactacttcgcaggcacgggatcctcagcaccaggggaacacagtagttccaggaagttctgggtgttcctggggagagagcggcttgtcatttcggaggccagggaaaggggcc

SEQ ID NO: 792187 - DNA, 120 bp, Artificial Sequence
  ENSG00000272899_8 (sequence is synthesized)
tcctgccaccgccacacccctccttgcccgcccctcacctggccccgagggcccgcagccgctccgtcctctcccgatgcatttgctccagctgctcccgcagggcgcgccgccgcccag

SEQ ID NO: 792188 - DNA, 120 bp, Artificial Sequence
  ENSG00000272899_9 (sequence is synthesized)
ccgcgtcctcctggcggtgcggagcgctgagcgtccgcggctcagtggggcgggcggggcagcacctggcacacctgcccctcgcgccccgccgagtcactgccagagtgcagtgcgctc

SEQ ID NO: 792189 - DNA, 120 bp, Artificial Sequence
  ENSG00000272899_10 (sequence is synthesized)
acttcaaagggacccgggcgcgctaagctcggcccctgccccgcgcaggctccttgtggccccaccgccttctaggggtcttgcctgtggcgggagttgagccggactgggcgggagccc

SEQ ID NO: 792190 - DNA, 120 bp, Artificial Sequence
  ENSG00000272899_11 (sequence is synthesized)
cacggggtgaacccggcagtggcggttcctggcgatgtggaggcgttccaggacctgcagaggcggcagtcagcgtccggccgcccctcggtgccccgcccgctccaggcaggccccgat

SEQ ID NO: 792191 - DNA, 120 bp, Artificial Sequence
  ENSG00000272899_12 (sequence is synthesized)
cgatcccggcgtggggacacacccggagccgctgctgctcacggtcccgccggcggcgctgccgcctggccgcgctgtgcagctccagcagccgctgcagagccgtcacctgctgcgccg

SEQ ID NO: 792192 - DNA, 120 bp, Artificial Sequence
  ENSG00000272899_13 (sequence is synthesized)
cgcttaagcccgcaggcgccttggcggtgctgaggggcgccggccacgcggccttcaaggccttgggacgctcagggccgccccacccgaccccggagggcacccggaagccaagcctgg

SEQ ID NO: 792193 - DNA, 120 bp, Artificial Sequence
  ENSG00000272899_14 (sequence is synthesized)
gggcccactccagggccctgcagcccgtgcggatcgcgctccaggcctgggggccccggagagccccgaggagcccctgctgcccggatacctcggcgcgcagggtcgctggcatctcgg

SEQ ID NO: 792194 - DNA, 120 bp, Artificial Sequence
  ENSG00000272899_15 (sequence is synthesized)
gacctgggagccgccgccgggccgggggcttcgggcgggtaagcgcagcccacgccccctcccgggcggcccccagctttgccaccgccggtgccgacctttgtggctcgcctttgatca

SEQ ID NO: 792195 - DNA, 120 bp, Artificial Sequence
  ENSG00000272899_16 (sequence is synthesized)
agcgtggtagtccttctccggaggtttgggctctccctgcccacaggctttggagtctgtgctttcagggacccgcaggagtccctcggatggctatgggggtcgccttcctctgggggc

SEQ ID NO: 792196 - DNA, 120 bp, Artificial Sequence
  ENSG00000272899_17 (sequence is synthesized)
tgcacagtggcctctccgggagccacctcccaggcttgtgagatattgccttcccaagaccgcagcatcttcttccctggactctggggactcgcctttccctggcacttaggactaaat

SEQ ID NO: 792197 - DNA, 120 bp, Artificial Sequence
  ENSG00000272899_18 (sequence is synthesized)
tctcttcgactcctccctctgaccctgaggagcccttgggctctggcccccgtgtgtcttcaccttctgactctgaggagcatctttgatctcgccccaggaggcctcggctctcttacg

SEQ ID NO: 792198 - DNA, 120 bp, Artificial Sequence
  ENSG00000272899_19 (sequence is synthesized)
ctgaggggtctccgctttctgatcctgagggtcctcctctcagactcaggggtgtccatccttggtggtctttgaagttctgctctctcctggcccaggtgcgggtccgagcccagccct

SEQ ID NO: 792199 - DNA, 120 bp, Artificial Sequence
  ENSG00000272899_20 (sequence is synthesized)
tcaagggcatcttgggaaggcaggttttgggagggcaggtcccccggcccaggggtcccgggagtgagctttcttttctgggtctcaggctctgcctcactcctctcttccctctgggcc

SEQ ID NO: 792200 - DNA, 120 bp, Artificial Sequence
  ENSG00000272899_21 (sequence is synthesized)
aggtcctggaaaggaaaagcactttgggcccaggtttgagagggaacctgcagaccccaggggccagcctttgcctgattcctgaatttgttaaagccattttatgtagtgtggaaggtg

SEQ ID NO: 792201 - DNA, 120 bp, Artificial Sequence
  ENSG00000272899_22 (sequence is synthesized)
cttcactgaagagcctcctcctcaccccagcagcctcctcccaggcagacccacccctgccatccccaacctgagacccttgaccttttcaccttgcactctgagctacctggcacccca

SEQ ID NO: 792202 - DNA, 120 bp, Artificial Sequence
  ENSG00000272899_23 (sequence is synthesized)
aaactcctcctggtagtggggttgagctcttgtaaggagcctgaggaagaaagaccagtattgggagctcatgtcccagcccctcatgcacagttcacctagactagagccaggaagttt

SEQ ID NO: 792203 - DNA, 120 bp, Artificial Sequence
  ENSG00000272899_24 (sequence is synthesized)
agggagtcccagtgcatggctaggggtgccctgagggcgctgtctgaacctcaggctgtcacagttcatcaatcagccagccatgcacctgtcaggtgtgcctgccaacagcctgcccca

SEQ ID NO: 792204 - DNA, 120 bp, Artificial Sequence
  ENSG00000272899_25 (sequence is synthesized)
tctttctcatcctcccagccaaggcagaccactccagagggacctgcacagccccttcctcaagaccaccacaggaggcctgggagtgagaagggtcacggtgctgggtgcctgggttcc

SEQ ID NO: 792205 - DNA, 120 bp, Artificial Sequence
  ENSG00000272899_26 (sequence is synthesized)
tcagcaccggccactcccactttgccctggtgtgcccatcaggcccagagaagaaacccgctctgggcgtcttactttttactcttattcagaaaaaccttccttagccttttctttgtt

SEQ ID NO: 792206 - DNA, 120 bp, Artificial Sequence
  ENSG00000272899_27 (sequence is synthesized)
tctgacagcaaaatcaaaggaaattcaagatgaaattttaggccagagcctggcctaaaaactgcaagtgttcataattaacaaaagaaatctaaaaaaagagatgatgtgttgccgctc

SEQ ID NO: 792207 - DNA, 120 bp, Artificial Sequence
  ENSG00000272899_28 (sequence is synthesized)
ccctgcagctgtggaggaaggagagctgttctgcatccataaaaaccagttaaaagggatttcataaggtctgaaattgagaactttcccaagaatactgcatcttgttctcttgtgcaa

SEQ ID NO: 792208 - DNA, 120 bp, Artificial Sequence
  ENSG00000272899_29 (sequence is synthesized)
tatacagacgtgtgaatattcctaacagtaaccaaatgggtgcactctctgtgaaaacgcatctttcaaagagttttttaaacaaaggagactcctgggcctttagaaataattgccaca

SEQ ID NO: 792209 - DNA, 120 bp, Artificial Sequence
  ENSG00000272899_30 (sequence is synthesized)
aactgcaaaaacaatctccaacctcccacttctgtaattctcatctgttgtcttactagaaaatttatttctctggtaataatgttataattgatatccctgtcttctcaagatgtaaaa

SEQ ID NO: 792210 - DNA, 120 bp, Artificial Sequence
  ENSG00000272899_31 (sequence is synthesized)
tacttgtaaaaacttctctgtccatcagaaaataattattggcacttttcttctctctcatgtgcatgatggaacaataaaaagcttatggctttgctagatctattatttaacaaacaa

SEQ ID NO: 792211 - DNA, 120 bp, Artificial Sequence
  ENSG00000273045_0 (sequence is synthesized)
cttccctcagcttgaaacacctgctgcttcgcggcggtggctttgtgccacttttcccagggcttgggcatcattctggacccatgttcggtgaaccggttactctcagagctgctttcg

SEQ ID NO: 792212 - DNA, 120 bp, Artificial Sequence
  ENSG00000273045_1 (sequence is synthesized)
ggcgcagctcctgctgcagccagggcccgttttaagagaggcttccaggtccagccctcccgctgcagcctgcagggagcgagccggcctgtcccgatgacatagacactaggtttttac

SEQ ID NO: 792213 - DNA, 120 bp, Artificial Sequence
  ENSG00000273045_2 (sequence is synthesized)
agcaattctctgatgaccttgatatggtagaacgctgtgtatttcaagagtaagctctcgtttgaggagactaacaattcctgttttcgccagatttcttcttgaatggcaacctaaatg

SEQ ID NO: 792214 - DNA, 120 bp, Artificial Sequence
  ENSG00000273045_3 (sequence is synthesized)
ccagtccaaagaggcccccaatagacttgttcacccttcatgtcctcaactctggggaagttaagtaatcaagttgaagaaacacttccactacttaaaaaggtacctgcaaattacttt

SEQ ID NO: 792215 - DNA, 120 bp, Artificial Sequence
  ENSG00000273045_4 (sequence is synthesized)
cacatttgttcagctatcctaatgggattttcacttagtaaatctgctactcaggtatctgctatacatatggattcaaaagtggatgatcacttaatacgagggactgaaaaaagcagg

SEQ ID NO: 792216 - DNA, 120 bp, Artificial Sequence
  ENSG00000273045_5 (sequence is synthesized)
gactggcacaggatctctttctgggaaagccttgggttcagtggtatatgtcaaagaaagtgatggactagaaatgacagatgtggaatgaagcaatttgtacgtattaccaaagaaacc

SEQ ID NO: 792217 - DNA, 120 bp, Artificial Sequence
  ENSG00000273045_6 (sequence is synthesized)
aaaaactgcctttgactaaggggggtgttgaaagagaacttaaccttattaggaaaccctgacaaaatgatggaagactattgccttattttgcactatttgtgaatcatcttacactgc

SEQ ID NO: 792218 - DNA, 120 bp, Artificial Sequence
  ENSG00000273045_7 (sequence is synthesized)
atttttttatgatgcttattcaaaaggcagttgctttagggtgaaaaagccttccaagattcaaagcagatttctctggtattatattatatccttcttaaaaaccagagtttttaagta

SEQ ID NO: 792219 - DNA, 120 bp, Artificial Sequence
  ENSG00000273045_8 (sequence is synthesized)
aaaaccagagtttttaagtaacagtatttgaatggcatcaaaacattttcattttaatgtatttctttaacaagtggttaaaaaaagtgtccaagcagccgggcgcagtggctcacacct

SEQ ID NO: 792220 - DNA, 120 bp, Artificial Sequence; identical to SEQ ID NO: 774794
  ENSG00000273045_9 (sequence is synthesized)

SEQ ID NO: 792221 - DNA, 120 bp, Artificial Sequence
  ENSG00000273045_10 (sequence is synthesized)
agcctggagtcaggggagcctggggaccacggccttggtcagctctgcacgatcagggctgaatcaggaagtggcagatctagcaacaaagtccagattcctgaccgatattccttctcc

SEQ ID NO: 792222 - DNA, 120 bp, Artificial Sequence
  ENSG00000273045_11 (sequence is synthesized)
acatgccagtccttttccaaatcccctcaccttaaagtgacaaatgagctttttagtgaaaaagaatgagcgctgcattcttctaccaattttttggagcccagaatgggggggaaaaaa

SEQ ID NO: 792223 - DNA, 120 bp, Artificial Sequence
  ENSG00000273079_0 (sequence is synthesized)
cccttaggaaggggacgctttgggaatgaccatgctccaccgagggacggagccggcccccagcttctccacacagagcctcctccactaacgctccaaaaaccaaaaaccgtaattgcc

SEQ ID NO: 792224 - DNA, 120 bp, Artificial Sequence
  ENSG00000273079_1 (sequence is synthesized)
agaagaagcgttaaaaatctattccagccactaacctcacatgcacacggaataattactctggattctgcattgtgagctgctctccataccctgaattacctttgaattaaatctttt

SEQ ID NO: 792225 - DNA, 120 bp, Artificial Sequence
  ENSG00000273079_2 (sequence is synthesized)
tttttttgaatttgcatctcttcaagacacaagattaaaacaaaatttacgctaaattggattttaaattatcttccgttcatttatccttcgtctttcttatgtggatatgcaagcgag

SEQ ID NO: 792226 - DNA, 120 bp, Artificial Sequence
  ENSG00000273079_3 (sequence is synthesized)
aagaagggactggacattcccaacatgctcactcccttaatctgtccgtctagaggtttggcttctacaaaccaagggagtcgacgagttgaagatgaagcccagagcggagtgctgttc

SEQ ID NO: 792227 - DNA, 120 bp, Artificial Sequence
  ENSG00000273079_4 (sequence is synthesized)
tcccaagttctggttggtgttggccgtcctggccgtgtcaggcagcagagctcgttctcagaagagcccccccagcattggcattgctgtcatcctcgtgggcacttccgacgaggtggc

SEQ ID NO: 792228 - DNA, 120 bp, Artificial Sequence
  ENSG00000273079_5 (sequence is synthesized)
catcaaggatgcccacgagaaagatgatttccaccatctctccgtggtaccccgggtggaactggtagccatgaatgagaccgacccaaagagcatcatcacccgcatctgtgatctcat

SEQ ID NO: 792229 - DNA, 120 bp, Artificial Sequence
  ENSG00000273079_6 (sequence is synthesized)
gtctgaccggaagatccagggggtggtgtttgctgatgacacagaccaggaagccatcgcccagatcctcgatttcatttcagcacagactctcacccccatcctgggcatccacggggg

SEQ ID NO: 792230 - DNA, 120 bp, Artificial Sequence
  ENSG00000273079_7 (sequence is synthesized)
ctcctctatgataatggcagataaggatgaatcctccatgttcttccagtttggcccatcaattgaacagcaagcttccgtaatgctcaacatcatggaagaatatgactggtacatctt

SEQ ID NO: 792231 - DNA, 120 bp, Artificial Sequence
  ENSG00000273079_8 (sequence is synthesized)
ttctatcgtcaccacctatttccctggctaccaggactttgtaaacaagatccgcagcaccattgagaatagctttgtgggctgggagctagaggaggtcctcctactggacatgtccct

SEQ ID NO: 792232 - DNA, 120 bp, Artificial Sequence
  ENSG00000273079_9 (sequence is synthesized)
ggacgatggagattctaagatccagaatcagctcaagaaacttcaaagccccatcattcttctttactgtaccaaggaagaagccacctacatctttgaagtggccaactcagtagggct

SEQ ID NO: 792233 - DNA, 120 bp, Artificial Sequence
  ENSG00000273079_10 (sequence is synthesized)
gactggctatggctacacgtggatcgtgcccagtctggtggcaggggatacagacacagtgcctgcggagttccccactgggctcatctctgtatcatatgatgaatgggactatggcct

SEQ ID NO: 792234 - DNA, 120 bp, Artificial Sequence
  ENSG00000273079_11 (sequence is synthesized)
ccccgccagagtgagagatggaattgccataatcaccactgctgcttctgacatgctgtctgagcacagcttcatccctgagcccaaaagcagttgttacaacacccacgagaagagaat

SEQ ID NO: 792235 - DNA, 120 bp, Artificial Sequence
  ENSG00000273079_12 (sequence is synthesized)
ctaccagtccaatatgctaaataggtatctgatcaatgtcacttttgaggggaggaatttgtccttcagtgaagatggctaccagatgcacccgaaactggtgataattcttctgaacaa

SEQ ID NO: 792236 - DNA, 120 bp, Artificial Sequence
  ENSG00000273079_13 (sequence is synthesized)
ggagaggaagtgggaaagggtggggaagtggaaagacaagtccctgcagatgaagtactatgtgtggccccgaatgtgtccagagactgaagagcaggaggatgaccatctgagcattgt

SEQ ID NO: 792237 - DNA, 120 bp, Artificial Sequence
  ENSG00000273079_14 (sequence is synthesized)
gaccctggaggaggcaccatttgtcattgtggaaagtgtggaccctctgagtggaacctgcatgaggaacacagtcccctgccaaaaacgcatagtcactgagaataaaacagacgagga

SEQ ID NO: 792238 - DNA, 120 bp, Artificial Sequence
  ENSG00000273079_15 (sequence is synthesized)
gccgggttacatcaaaaaatgctgcaaggggttctgtattgacatccttaagaaaatttctaaatctgtgaagttcacctatgacctttacctggttaccaatggcaagcatgggaagaa

SEQ ID NO: 792239 - DNA, 120 bp, Artificial Sequence
  ENSG00000273079_16 (sequence is synthesized)
aatcaatggaacctggaatggtatgattggagaggtggtcatgaagagggcctacatggcagtgggctcactcaccatcaatgaggaacgatcggaggtggtcgacttctctgtgccctt

SEQ ID NO: 792240 - DNA, 120 bp, Artificial Sequence
  ENSG00000273079_17 (sequence is synthesized)
catagagacaggcatcagtgtcatggtgtcacgcagcaatgggactgtctcaccttctgccttcttagagccattcagcgctgacgtatgggtgatgatgtttgtgatgctgctcatcgt

SEQ ID NO: 792241 - DNA, 120 bp, Artificial Sequence
  ENSG00000273079_18 (sequence is synthesized)
ctcagccgtggctgtctttgtctttgagtacttcagccctgtgggttataacaggtgcctcgctgatggcagagagcctggtggaccctctttcaccatcggcaaagctatttggttgct

SEQ ID NO: 792242 - DNA, 120 bp, Artificial Sequence
  ENSG00000273079_19 (sequence is synthesized)
ctggggtctggtgtttaacaactccgtacctgtgcagaacccaaaggggaccacctccaagatcatggtgtcagtgtgggccttctttgctgtcatcttcctggccagctacactgccaa

SEQ ID NO: 792243 - DNA, 120 bp, Artificial Sequence
  ENSG00000273079_20 (sequence is synthesized)
cttagctgccttcatgatccaagaggaatatgtggaccaggtttctggcctgagcgacaaaaagttccagagacctaatgacttctcaccccctttccgctttgggaccgtgcccaacgg

SEQ ID NO: 792244 - DNA, 120 bp, Artificial Sequence
  ENSG00000273079_21 (sequence is synthesized)
cagcacagagagaaatattcgcaataactatgcagaaatgcatgcctacatgggaaagttcaaccagaggggtgtagatgatgcattgctctccctgaaaacagggaaactggatgcctt

SEQ ID NO: 792245 - DNA, 120 bp, Artificial Sequence
  ENSG00000273079_22 (sequence is synthesized)
catctatgatgcagcagtgctgaactatatggcaggcagagatgaaggctgcaagctggtgaccattggcagtgggaaggtctttgcttccactggctatggcattgccatccaaaaaga

SEQ ID NO: 792246 - DNA, 120 bp, Artificial Sequence
  ENSG00000273079_23 (sequence is synthesized)
ttctgggtggaagcgccaggtggaccttgctatcctgcagctctttggagatggggagatggaagaactggaagctctctggctcactggcatttgtcacaatgagaagaatgaggtcat

SEQ ID NO: 792247 - DNA, 120 bp, Artificial Sequence
  ENSG00000273079_24 (sequence is synthesized)
gagcagccagctggacattgacaacatggcaggggtcttctacatgttgggggcggccatggctctcagcctcatcaccttcatctgcgaacaccttttctattggcagttccgacattg

SEQ ID NO: 792248 - DNA, 120 bp, Artificial Sequence
  ENSG00000273079_25 (sequence is synthesized)
ctttatgggtgtctgttctggcaagcctggcatggtcttctccatcagcagaggtatctacagctgcatccatggggtggcgatcgaggagcgccagtctgtaatgaactcccccaccgc

SEQ ID NO: 792249 - DNA, 120 bp, Artificial Sequence
  ENSG00000273079_26 (sequence is synthesized)
aaccatgaacaacacacactccaacatcctgcgcctgctgcgcacggccaagaacatggctaacctgtctggtgtgaatggctcaccgcagagcgccctggacttcatccgacgggagtc

SEQ ID NO: 792250 - DNA, 120 bp, Artificial Sequence
  ENSG00000273079_27 (sequence is synthesized)
atccgtctatgacatctcagagcaccgccgcagcttcacgcattctgactgcaaatcctacaacaacccgccctgtgaggagaacctcttcagtgactacatcagtgaggtagagagaac

SEQ ID NO: 792251 - DNA, 120 bp, Artificial Sequence
  ENSG00000273079_28 (sequence is synthesized)
gttcgggaacctgcagctgaaggacagcaacgtgtaccaagatcactaccaccatcaccaccggccccatagtattggcagtgccagctccatcgatgggctctacgactgtgacaaccc

SEQ ID NO: 792252 - DNA, 120 bp, Artificial Sequence
  ENSG00000273079_29 (sequence is synthesized)
acccttcaccacccagtccaggtccatcagcaagaagcccctggacatcggcctcccctcctccaagcacagccagctcagtgacctgtacggcaaattctccttcaagagcgaccgcta

SEQ ID NO: 792253 - DNA, 120 bp, Artificial Sequence
  ENSG00000273079_30 (sequence is synthesized)
cagtggccacgacgacttgatccgctccgatgtctctgacatctcaacccacaccgtcacctatgggaacatcgagggcaatgccgccaagaggcgtaagcagcaatataaggacagcct

SEQ ID NO: 792254 - DNA, 120 bp, Artificial Sequence
  ENSG00000273079_31 (sequence is synthesized)
gaagaagcggcctgcctcggccaagtcccgcagggagtttgacgagatcgagctggcctaccgtcgccgaccgccccgctcccctgaccacaagcgctacttcagggacaaggaagggct

SEQ ID NO: 792255 - DNA, 120 bp, Artificial Sequence
  ENSG00000273079_32 (sequence is synthesized)
acgggacttctacctggaccagttccgaacaaaggagaactcaccccactgggagcacgtagacctgaccgacatctacaaggagcggagtgatgactttaagcgcgactccgtcagcgg

SEQ ID NO: 792256 - DNA, 120 bp, Artificial Sequence
  ENSG00000273079_33 (sequence is synthesized)
aggagggccctgtaccaacaggtctcacatcaagcacgggacgggcgacaaacacggcgtggtcagcggggtacctgcaccttgggagaagaacctgaccaacgtggagtgggaggaccg

SEQ ID NO: 792257 - DNA, 120 bp, Artificial Sequence
  ENSG00000273079_34 (sequence is synthesized)
gtccgggggcaacttctgccgcagctgtccctccaagctgcacaactactccacgacggtgacgggtcagaactcgggcaggcaggcgtgcatccggtgtgaggcttgcaagaaagcagg

SEQ ID NO: 792258 - DNA, 120 bp, Artificial Sequence
  ENSG00000273079_35 (sequence is synthesized)
caacctgtatgacatcagtgaggacaactccctgcaggaactggaccagccggctgccccagtggcggtgacgtcaaacgcctccaccactaagtaccctcagagcccgactaattccaa

SEQ ID NO: 792259 - DNA, 120 bp, Artificial Sequence
  ENSG00000273079_36 (sequence is synthesized)
ggcccagaagaagaaccggaacaaactgcgccggcagcactcctacgacaccttcgtggacctgcagaaggaagaagccgccctggccccgcgcagcgtaagcctgaaagacaagggccg

SEQ ID NO: 792260 - DNA, 120 bp, Artificial Sequence
  ENSG00000273079_37 (sequence is synthesized)
attcatggatgggagcccctacgcccacatgtttgagatgtcagctggcgagagcacctttgccaacaacaagtcctcagtgcccactgccggacatcaccaccacaacaaccccggcgg

SEQ ID NO: 792261 - DNA, 120 bp, Artificial Sequence
  ENSG00000273079_38 (sequence is synthesized)
cgggtacatgctcagcaagtcgctctaccctgaccgggtcacgcaaaaccctttcatccccacttttggggacgaccagtgcttgctccatggcagcaaatcctacttcttcaggcagcc

SEQ ID NO: 792262 - DNA, 120 bp, Artificial Sequence
  ENSG00000273079_39 (sequence is synthesized)
cacggtggcgggggcgtcgaaagccaggccggacttccgggcccttgtcaccaacaagccggtggtctcggcccttcatggggccgtgccagcccgtttccagaaggacatctgtatagg

SEQ ID NO: 792263 - DNA, 120 bp, Artificial Sequence
  ENSG00000273079_40 (sequence is synthesized)
gaaccagtccaacccctgtgtgcctaacaacaaaaaccccagggctttcaatggctccagcaatgggcatgtttatgagaaactttctagtattgagtctgatgtctgagtgagggaaca

SEQ ID NO: 792264 - DNA, 120 bp, Artificial Sequence
  ENSG00000273079_41 (sequence is synthesized)
gagaggttaaggtgggtacgggagggtaaggctgtgggtcgcgtgatgcgcatgtcacggagggtgacgggggtgaacttggttcccatttgctcctttcttgttttaatttatttatgg

SEQ ID NO: 792265 - DNA, 120 bp, Artificial Sequence
  ENSG00000273079_42 (sequence is synthesized)
gatcctggagttctggttcctactgggggcaaccctggtgaccagcaccatctctcctccttttcacagttctctccttcttccccccgctgtcagccattcctgttcccatgagatgat

SEQ ID NO: 792266 - DNA, 120 bp, Artificial Sequence
  ENSG00000273079_43 (sequence is synthesized)
gccatgggccctctcagcaggggagggtagagcggagaaaggaagggctgcatgcgggcttcctcctggtgtggaagagctccttgatatcctctttgagtgaagctgggagaaccaaaa

SEQ ID NO: 792267 - DNA, 120 bp, Artificial Sequence
  ENSG00000273079_44 (sequence is synthesized)
agaggctatgtgagcacaaaggtagcttttcccaaactgatcttttcatttaggtgaggaagcaaaagcatctatgtgagaccatttagcacactgcttgtgaaaggaaagaggctctgg

SEQ ID NO: 792268 - DNA, 120 bp, Artificial Sequence
  ENSG00000273079_45 (sequence is synthesized)
ctaaattcatgctgcttagatgacatctgtctaggaatcatgtgccaagcagaggttgggaggccatttgtgtttatatataagccaaaaaatgcttgcttcaaccccatgagactcgat

SEQ ID NO: 792269 - DNA, 120 bp, Artificial Sequence
  ENSG00000273079_46 (sequence is synthesized)
agtggtggtgaacagaacaaaaggtcattggtggcagagtggattcttgaacaaactggaaagtacgttatgatagtgtcccacggtgccttggggacaagagcaggtggattgtgcgtg

SEQ ID NO: 792270 - DNA, 120 bp, Artificial Sequence
  ENSG00000273079_47 (sequence is synthesized)
catgtgtgttcatgcacacttgcacccatgtgtagtcaggtgcctcaagagaaggcaaccttgactctttctattgtttctttcaatatccccaagcagtgtgattgtttggcttatata

SEQ ID NO: 792271 - DNA, 120 bp, Artificial Sequence
  ENSG00000273079_48 (sequence is synthesized)
cagacagagatggccatgtattacctgaattttggctgtgtctcccttcatccttctggaataaggagaatgaaaattcttgataaagaagattctgtggtctaaacaaaaaaaggcggt

SEQ ID NO: 792272 - DNA, 120 bp, Artificial Sequence
  ENSG00000273079_49 (sequence is synthesized)
gagcaatcctgcaagaacaaggtacataaacaagtcctcagtggttggcaattgtttcaaccagtttgaaccaagaactttccaggaaggctaaagggaaaccgaattttcacagccatg

SEQ ID NO: 792273 - DNA, 120 bp, Artificial Sequence
  ENSG00000273079_50 (sequence is synthesized)
attcttttgcccacacttgggagcaaaagattctacaaagctcttttgagcatttagactctcgactggccaaggtttggggaagaacgaagccacctttgaagaagtaaggagtcgtgt

SEQ ID NO: 792274 - DNA, 120 bp, Artificial Sequence
  ENSG00000273079_51 (sequence is synthesized)
atggtagggtaagtgagagagggggatgtttccaatgctttgatcccttcttacttaacctgaagctagacgagcaggcttcttccccccaaaactgattacaactgctacagagcagac

SEQ ID NO: 792275 - DNA, 120 bp, Artificial Sequence
  ENSG00000273079_52 (sequence is synthesized)
agttaagagaaatgagcttgacctttaagagaaatgagctgcactccatgagtgcagctctggaggtacgaaaagaggggaagagacttggaaatgggagacgggggcagagagggaccc

SEQ ID NO: 792276 - DNA, 120 bp, Artificial Sequence
  ENSG00000273079_53 (sequence is synthesized)
tccaccacctctttgggcctggctccctgggaatgtgacttgagcccagagtgaacactcttggtagaagcccttctaccttcctgcaacaccttgtttccctctcagattgtaccattg

SEQ ID NO: 792277 - DNA, 120 bp, Artificial Sequence
  ENSG00000273079_54 (sequence is synthesized)
aggaataaaaaaagatatacatgtataaaactccagggatgagggtaccagcagaactgatgctcccttcacttaacattggaaaattgagaagggaaatgaatatgtatcactgccggt

SEQ ID NO: 792278 - DNA, 120 bp, Artificial Sequence
  ENSG00000273079_55 (sequence is synthesized)
cctgaaacttgcggtagggctatttattctatgggtcagttccactgtcctgccatcctcccctacacagggtggcatccagagagccccaggtctgtgtggaagcttgactgcaggatc

SEQ ID NO: 792279 - DNA, 120 bp, Artificial Sequence
  ENSG00000273079_56 (sequence is synthesized)
gccatgttgcacacaggacacataaaccagaaaggtgctcatcctcctctggaaggaagctgccatgtctcttcaagtcactccctccagggctgctcttcgcccctgtttgccctcact

SEQ ID NO: 792280 - DNA, 120 bp, Artificial Sequence
  ENSG00000273079_57 (sequence is synthesized)
cgtgacccttcctcatcccgcccttgactgctgtccccaaccctcctccttgatttttacctcagtatctttcattttaaagccaactgaaggccttgtaaagctttgttttctttctaa

SEQ ID NO: 792281 - DNA, 120 bp, Artificial Sequence
  ENSG00000273079_58 (sequence is synthesized)
aatgaacatgggggcaaggggctgaacctctcacagatttggtgagaggagcacggagtgctttaccttagataacagaaaagactgagagaggacagagggcatgaggcacctccagga

SEQ ID NO: 792282 - DNA, 120 bp, Artificial Sequence
  ENSG00000273079_59 (sequence is synthesized)
ggaagaaggcgaagggccacgtaaacactgcttcgccctgactctgtccaggggtcagggactcatcccctcatcttcctcttacctcacccctttcaaacaaaaaaaccaaaccaacta

SEQ ID NO: 792283 - DNA, 120 bp, Artificial Sequence
  ENSG00000273079_60 (sequence is synthesized)
acctagcgaacagcaatctagaaccaagggagctctttcagtctccgctggcaacagaaatcaagatggtgtttatttcatatgtaaatattttgttttctaattttgtatagataaagt

SEQ ID NO: 792284 - DNA, 120 bp, Artificial Sequence
  ENSG00000273079_61 (sequence is synthesized)
gttctcttgtgagtattcagggtgttgggctggagggagtggggtggtgatgggaatgagagggaaaaagtgttttgttatgggttttcatttcccattgggggaattgttttgtatggc

SEQ ID NO: 792285 - DNA, 120 bp, Artificial Sequence
  ENSG00000273079_62 (sequence is synthesized)
ttttttgcttcagggtgtctggaaaaagcgaatgctcatggaggccactatggtgaaaaagccaggggaaagtaattgtgtccatcccccccagaaaaccagtcttcttactggtttgtg

SEQ ID NO: 792286 - DNA, 120 bp, Artificial Sequence
  ENSG00000273079_63 (sequence is synthesized)
agaaatgttcatgcactttggccagggttttacatagggttcaatttggctctaagcaaaccccaggtctgactcctatcttctaggtagaccctaggttaccacattccacacaaagac

SEQ ID NO: 792287 - DNA, 120 bp, Artificial Sequence
  ENSG00000273079_64 (sequence is synthesized)
aggctggtggcaccatatttcctctgtcagtacctagggtaggaaagattcccaaaagggcttaaacagaattaaggtcaaattaacttcccattcttggcgtgactgaaaggtttcagg

SEQ ID NO: 792288 - DNA, 120 bp, Artificial Sequence
  ENSG00000273079_65 (sequence is synthesized)
aagctcaatcctgagaaatctcccagcggcctcctctgatgctgaaacaatcgtctcagtcatctgagtcttttcttctttaggacctgggcgctgactcactccctgccccatctccac

SEQ ID NO: 792289 - DNA, 120 bp, Artificial Sequence
  ENSG00000273079_66 (sequence is synthesized)
cctcagaagtcagcctggcaaacacacgtggaaaaatctccactaactctactttttgaagcatgtgatatctggtcacagagaggtagtgctggatatgtgtcttacaaatttgcatgc

SEQ ID NO: 792290 - DNA, 120 bp, Artificial Sequence
  ENSG00000273079_67 (sequence is synthesized)
ttttctagaaaagatgatgggatccactagaaactcagtggtgagatgattcccttagcaagattgctgaagttaggtttagacgtgggagggtgggtatgtgagcaatggtgccaatag

SEQ ID NO: 792291 - DNA, 120 bp, Artificial Sequence
  ENSG00000273079_68 (sequence is synthesized)
cggctctttatttgccttgtcctcattactgccatcaggaaggtgctactggcctcgagccaggtgttcataatctggccttgggttaaccagacaaatagaacttcttttcctagactg

SEQ ID NO: 792292 - DNA, 120 bp, Artificial Sequence
  ENSG00000273079_69 (sequence is synthesized)
ttggctttgtggaggttggcagcctctatcacaggataaaatttccaaatccatttacccagtatattcactacattttttcctatcctcccatcataaaagctgttagctggacaattt

SEQ ID NO: 792293 - DNA, 120 bp, Artificial Sequence
  ENSG00000273079_70 (sequence is synthesized)
tatttttctaaacttatttggccccagttggttgcttttcttcaactggatatttgcactgggactaagttactcatggtctgcttaagaaaacttaaagaaaggaaggctgggcattgt

SEQ ID NO: 792294 - DNA, 120 bp, Artificial Sequence
  ENSG00000273079_71 (sequence is synthesized)
taaaatctagatgttacttaattccagaataacaagcaagtaaaatgcatgaggaagaattcagctataagcccaatctatatcacagatgggtatgaaacaacacccaatccatccaaa

SEQ ID NO: 792295 - DNA, 120 bp, Artificial Sequence
  ENSG00000273079_72 (sequence is synthesized)
actgtgagattccgcagataccctcaggagcacctaatattcccatgttcttcagaatccatgctttctcgctttgtaccctctatcattcccttccattgcagaagtggttggtgagtg

SEQ ID NO: 792296 - DNA, 120 bp, Artificial Sequence
  ENSG00000273079_73 (sequence is synthesized)
tggtcctgtatgaactcctttcagtggcaatgcttaaatctcagcatttccactgacaataatctgacccttgaatttgcctgagtcgagactttgcacacccttcaaagtgatgcatgt

SEQ ID NO: 792297 - DNA, 120 bp, Artificial Sequence
  ENSG00000273079_74 (sequence is synthesized)
acagtggactttgttatttcaaaatctgtcactgtgtatcctcagccagaacttgggaaacatccttcatatgtatttccctgcactggccacagccatgttgtgattgaggggaaaatc

SEQ ID NO: 792298 - DNA, 120 bp, Artificial Sequence
  ENSG00000273079_75 (sequence is synthesized)
ccaaatgattccattaaatgttgctggtgtcagtagtgccaaaaacgcatgtatgacatgatacagtaggagttgtctatacagttaagtgactatcactcacccggtcttccgtggcca

SEQ ID NO: 792299 - DNA, 120 bp, Artificial Sequence
  ENSG00000273079_76 (sequence is synthesized)
tcaggagttgcccaagggagaattctctgcagagtgctggtcacctgcacatgtcactaagaactaggtttctttggttcattttttttttttttttggtcggtttttagttagttagtt

SEQ ID NO: 792300 - DNA, 120 bp, Artificial Sequence
  ENSG00000273079_77 (sequence is synthesized)
caagatttacagatagaataaccagattgtttgggcaataagcttttggaaaaactattccagaactcactttattctttcaatcatcatctctctaaaaaggccctgtcattgcttgac

SEQ ID NO: 792301 - DNA, 120 bp, Artificial Sequence
  ENSG00000273079_78 (sequence is synthesized)
accctgtgaatgtctgtttttgtatgttaggaatgattcagatgtgtgcataaatgatgtcactgcagtgatattgatgaatgcattcagcatttccagggactgtggccataccttatg

SEQ ID NO: 792302 - DNA, 120 bp, Artificial Sequence
  ENSG00000273079_79 (sequence is synthesized)
tgctctctgagcccaaagccatataggaaatacatgctcagtaggctgctacacactacagcagagcttttgctttcttcacttgggtgtcagagacttttcctcctgtttaaggagctc

SEQ ID NO: 792303 - DNA, 120 bp, Artificial Sequence
  ENSG00000273079_80 (sequence is synthesized)
ttcatggaggagaagcagctgaaagtgaatagtcacactgggatgggtctggccttatgtatgctatgtggtccatggtgtgttgaaggtcctgaaaaggtctttttcatttcccacccc

SEQ ID NO: 792304 - DNA, 120 bp, Artificial Sequence
  ENSG00000273079_81 (sequence is synthesized)
actgcaactaccaccttcccacacagatttgttgctttagcactgagctgagctgtctgtcattcgaatgaaagtaatcccaggaaaggtgacatattaagccatattagggatgtatac

SEQ ID NO: 792305 - DNA, 120 bp, Artificial Sequence
  ENSG00000273079_82 (sequence is synthesized)
atttaatcacctaatttacattaggaatctcactccttttcctgggaataagttatgatacaagagaagaggaagggagcagagagcactgagagcaatagagtagggaacaaggataca

SEQ ID NO: 792306 - DNA, 120 bp, Artificial Sequence
  ENSG00000273079_83 (sequence is synthesized)
ggttctagatggcaaagacatttaaaccatattttggcctccgcctgcttttatttaagcctcatttgacacctaaataggactcctggttaggaattattttcaatacacaatcatatg

SEQ ID NO: 792307 - DNA, 120 bp, Artificial Sequence
  ENSG00000273079_84 (sequence is synthesized)
agtgtataatttatgaatttctaaattcagtatcttgtagggcaggttgagaactatgattctttccatagaaaatagaagagtgatgcttctcctccattacatgttactgagtaggca

SEQ ID NO: 792308 - DNA, 120 bp, Artificial Sequence
  ENSG00000273079_85 (sequence is synthesized)
gctagaaaaatcaaattgaattagtgatacaataaaatttactgtcattgtctggtttctgtcccagtttaattaatcttccaattagctgagttggtctatatcctatactttccacct

SEQ ID NO: 792309 - DNA, 120 bp, Artificial Sequence
  ENSG00000273079_86 (sequence is synthesized)
ccatagggggtgccctgttatctggtaaaagagccacttatgacctcaggtgctacttaacctggggggcaattgtttcttaggcctagcagatgtttgggatgacactaaaatggcaga

SEQ ID NO: 792310 - DNA, 120 bp, Artificial Sequence
  ENSG00000273079_87 (sequence is synthesized)
ttagtcagtctgagaatgtctaatattgatctgaatctaggattctattctagtttggggggtggggttgcagtattgtataaaatcataggatatctgagaacatcccaccctcaactc

SEQ ID NO: 792311 - DNA, 120 bp, Artificial Sequence
  ENSG00000273079_88 (sequence is synthesized)
attccaaccacattgattcagtcacacagtggccctgtgagctctatgacttagaagagatagcctatctattcctatgacaaaggccctcacccaaaaccttaaattgaaagccagtgc

SEQ ID NO: 792312 - DNA, 120 bp, Artificial Sequence
  ENSG00000273079_89 (sequence is synthesized)
tgctactttcatgccttggagagaactgtgacgtttagggcttctcatttacaatattgaagcaagaaaaaagaattttgttcagagtaatgggttagaatagcagtactgggaataagt

SEQ ID NO: 792313 - DNA, 120 bp, Artificial Sequence
  ENSG00000273079_90 (sequence is synthesized)
agggaaagttagaaatcttccacatttctctctacatctctcaagagctctgtacagtgagtttctggagctgcttcatgctttgaatataattgctggggtgattatgtggttaagggc

SEQ ID NO: 792314 - DNA, 120 bp, Artificial Sequence
  ENSG00000273079_91 (sequence is synthesized)
tcctgaaagaactgaaggtgaaaagcagagtagatgagtagaattcctcagagccttggcactctggtgtgtagaatctgtgttttggagaaggtgaaagaactcagtgcaagaattaag

SEQ ID NO: 792315 - DNA, 120 bp, Artificial Sequence
  ENSG00000273079_92 (sequence is synthesized)
gtacaattaaaaagcacaacactaagcccaatttaaactgttattttaaagattaggtttccacactttaaacctgaactcttttatcggtaattattttaatgttgtgatttaggaggt

SEQ ID NO: 792316 - DNA, 120 bp, Artificial Sequence
  ENSG00000273079_93 (sequence is synthesized)
ggagcagattctagtactatgcaggagaaaaaaataaaagctctctggttaaatatgtgagtttaattaaaccaacgtctattgtgcacgtactatgtccctaggctagttctgtgaatg

SEQ ID NO: 792317 - DNA, 120 bp, Artificial Sequence
  ENSG00000273079_94 (sequence is synthesized)
atataaaaggtttcaaaatggagtatattgtactcacgtagaatatatgaaagcataagtataaaatatgtaaatgtatgtataaataggtatgcatacatttgtatgattatacatgca

SEQ ID NO: 792318 - DNA, 120 bp, Artificial Sequence
  ENSG00000273079_95 (sequence is synthesized)
agtttaatattttctggtttcagggtaggagtcaaagatatccattatgctatttgaaaaaacattgcagagattcagcttcccatgtcatggccaggcctggacttattcttttgaaat

SEQ ID NO: 792319 - DNA, 120 bp, Artificial Sequence
  ENSG00000273079_96 (sequence is synthesized)
tattacacctcccagagctaaaactctgggatttcctctctaaccacaaccttgccttttctatatcttccttccttcaagacccctctgttgttctggtccataaatccatcaggcctc

SEQ ID NO: 792320 - DNA, 120 bp, Artificial Sequence
  ENSG00000273079_97 (sequence is synthesized)
attgaattccctctttggtctaaccctgtatttacccacattagcaatattctcaccggcaattcctttttcctcttgccatctcactacaccaaccatgcttagctaactgcatcccat

SEQ ID NO: 792321 - DNA, 120 bp, Artificial Sequence
  ENSG00000273079_98 (sequence is synthesized)
ccccttgtcattcattgcatccccaagaagagcaagtcttaaacctacgtgaagagcacaaattcaatcaatttaacctcacctgaagcctactcacttggactttttaatttctccaat

SEQ ID NO: 792322 - DNA, 120 bp, Artificial Sequence
  ENSG00000273079_99 (sequence is synthesized)
gttgactcagtgtcacattctgtgcttgataaatttgttttattttcctttcatgttcatgtcctgtctttcaacaggcaatctttcctactgtgtttgcaagaaaatctgattattgaa

SEQ ID NO: 792323 - DNA, 120 bp, Artificial Sequence
  ENSG00000273079_100 (sequence is synthesized)
tcctcacatatgctgtcctctctgcctttagatttctcttgtctttcacacatcttttccatcctttctcccaaccaagtgctcctcttccctatgctctgacctcttctgaggtgctct

SEQ ID NO: 792324 - DNA, 120 bp, Artificial Sequence
  ENSG00000273079_101 (sequence is synthesized)
ccagccaattgtatttctctcttttgcatctttaattccttccacacatctacctgcaactatctcaaaaacacccgtcctacaactatctctaaagacaaatctctcaatccaatttga

SEQ ID NO: 792325 - DNA, 120 bp, Artificial Sequence
  ENSG00000273079_102 (sequence is synthesized)
ctcttgaatttctgtcctatcgctatcttttcacttcccaacttctcaaaagggtagtctttctttctccacttcctcaccttatgctcatggcttcatcaatgggctacaccctaccac

SEQ ID NO: 792326 - DNA, 120 bp, Artificial Sequence
  ENSG00000273079_103 (sequence is synthesized)
tcttctgaaactactctcaggcaacgttccaatgaagttcttgttacaaaagtcaatagccttttttctttacttaccctgctcttcaacctcattgacaattaccattgggaggcaata

SEQ ID NO: 792327 - DNA, 120 bp, Artificial Sequence
  ENSG00000273079_104 (sequence is synthesized)
cattctggttttaatcttagttctctggtcctctaacctcattggttcctgctcttcctcttatctccttagcattgacttgccatggtatatctgagcttgaccctcttctccttatct

SEQ ID NO: 792328 - DNA, 120 bp, Artificial Sequence
  ENSG00000273079_105 (sequence is synthesized)
taatgcttctgtagcaatctttctgtcttctatgatttcaataactctttgaatgaagatgaatcccaaatcttcacttttagcccctaccttttgcttttccttcatacacatacttcc

SEQ ID NO: 792329 - DNA, 120 bp, Artificial Sequence
  ENSG00000273079_106 (sequence is synthesized)
agtcaccttctgaacactcaacttcatcttgactcaaatatccaaaaccattgctgcaaaccaacataatcaccaacttcctccttttgcttaatggtatcaccatgtcttccgtcaccg

SEQ ID NO: 792330 - DNA, 120 bp, Artificial Sequence
  ENSG00000273079_107 (sequence is synthesized)
aactcaagcttttcaggcacttttgcctcctccattttcttcatcctgcatatctaaaaatttgaaaagcctactaattcttccccctaaggtttccagtctttccttttcattcagacc

SEQ ID NO: 792331 - DNA, 120 bp, Artificial Sequence
  ENSG00000273079_108 (sequence is synthesized)
cttccttctagtctggattatttcagcgtcttttagcattgttccaatattttatatttgaatctactcttgtcagtactcacttcctacatataaatcagatgtcattcttcagatcaa

SEQ ID NO: 792332 - DNA, 120 bp, Artificial Sequence
  ENSG00000273079_109 (sequence is synthesized)
gaaacaaccttcagtgggcttcacttgccgtagtctgccagcaataatttcttgttacttgactatgtgtgtgtcccataatccagacaagctgaataacatttgtttcacctttcccta

SEQ ID NO: 792333 - DNA, 120 bp, Artificial Sequence
  ENSG00000273079_110 (sequence is synthesized)
ccagcttgttttcccacttgcgtcttcccttaaactgttccctttgtccaaaatactctccttcctatctcccatctcactcccttcttgaataatatccattccctctatataagtctt

SEQ ID NO: 792334 - DNA, 120 bp, Artificial Sequence
  ENSG00000273079_111 (sequence is synthesized)
caaagaccagaacaacttctttatcttccattcagaaaataattttaggcattttatgaatgcccataacactttcgttgtttctccctagtggcagctatcatgggccatcttatttca

SEQ ID NO: 792335 - DNA, 120 bp, Artificial Sequence
  ENSG00000273079_112 (sequence is synthesized)
taggtatttggttatacatctcatctctcctgctacagcataagctccctgtgttcagggccatgtatttttaaatctttttatctcctgtagcactaaacagagtgccttgtatatgaa

SEQ ID NO: 792336 - DNA, 120 bp, Artificial Sequence
  ENSG00000273079_113 (sequence is synthesized)
aggcattagtaaatatttgatattattataaattataattgagaaggagtcactttattttgcccatttgtatctgcagtagcacctaaggatgaatccccccagtttctctatatatat

SEQ ID NO: 792337 - DNA, 120 bp, Artificial Sequence
  ENSG00000273079_114 (sequence is synthesized)
ctgcacacacaatcacatgtatatactacatgtatacagttcattatttcaaatggaatctggatttttctaagtgctttgtcctttttctaagtgctttgtcctttgaagttgttttgg

SEQ ID NO: 792338 - DNA, 120 bp, Artificial Sequence
  ENSG00000273079_115 (sequence is synthesized)
actgttttatggttaggaaagtgtacttggaacactacatgtgttcaagtaagtgacagagggagaaactatgaaggatattgatcaaattttaggtatcagcttttcagatgctttggg

SEQ ID NO: 792339 - DNA, 120 bp, Artificial Sequence
  ENSG00000273079_116 (sequence is synthesized)
tagagcttgtatccagacactttactaccaagattgagtctctaataacctgatccatgctgggactgatctgtgatccaatatttagcttcttttttaacactttcagcaccaaaagaa

SEQ ID NO: 792340 - DNA, 120 bp, Artificial Sequence
  ENSG00000273079_117 (sequence is synthesized)
ccttgtcacagttctggctcactaatcacacagccttgtagaccccaggtggtggtccaacaggaccactgtatttcaccacacgctacttccacatttgtggccttgggggaactgtct

SEQ ID NO: 792341 - DNA, 120 bp, Artificial Sequence
  ENSG00000273079_118 (sequence is synthesized)
gtgctggtcaccaccttgtctttatatttctttcctgagttctttggcttctcaccctttctgaggctttgtctacaggatcacttctcccaaagggaggataagagttgaggtaattga

SEQ ID NO: 792342 - DNA, 120 bp, Artificial Sequence
  ENSG00000273079_119 (sequence is synthesized)
gcactttacctcttatctgtatatttacaatgaaagtaagttaggatttgaatgagctggctcagagagaatgctagtctctaaactactcctttctctgtaaatataaagggattcatt

SEQ ID NO: 792343 - DNA, 120 bp, Artificial Sequence
  ENSG00000273079_120 (sequence is synthesized)
acctcagggggagacaacatcacttctgaccttatggccctcccttatcctctggtccctgtattcttgaagccctgttaacccttcctcctcctctcttggctctacttagcaatctat

SEQ ID NO: 792344 - DNA, 120 bp, Artificial Sequence
  ENSG00000273079_121 (sequence is synthesized)
caatcattctttctagccagtgtcagtctctgtccctctgaagaaactcttggagctcgtactgtcctttcacttcagctgctctggtaaccgataatgttttcgttccttctcccggcc

SEQ ID NO: 792345 - DNA, 120 bp, Artificial Sequence
  ENSG00000273079_122 (sequence is synthesized)
agccttctctgtaaatctcattatgccattggctatgaattattcccctttgggaggcatcttctgccactgtgtgctaatttaaagcatactatagagaactgaactcaaataagttac

SEQ ID NO: 792346 - DNA, 120 bp, Artificial Sequence
  ENSG00000273079_123 (sequence is synthesized)
aggcagtgacaagtctctttttttaaaaaaaaagtgaagaaagtccactcttcattgagacaggagtgggtaggacaattattattggcaaggtagggcaaaacttgtgacaacttggga

SEQ ID NO: 792347 - DNA, 120 bp, Artificial Sequence
  ENSG00000273079_124 (sequence is synthesized)
gatacctagtgaaaattaaaatataagtctagagagataattttgcttttcaaaagtcctatggggtctagatagccttgctcctgaaaatgagaatagttaatattttagagcaaaacc

SEQ ID NO: 792348 - DNA, 120 bp, Artificial Sequence
  ENSG00000273079_125 (sequence is synthesized)
catttcattatactatgagacttttttttttagctgatgaaacaaattatctggtaaacagctggtgggagggtaggaagacagccatcctcatgaaggacgttcatgaatctcatttgg

SEQ ID NO: 792349 - DNA, 120 bp, Artificial Sequence
  ENSG00000273079_126 (sequence is synthesized)
aagtctacactggagcttccttttgtgtcaccaataaagccagaagctgacatgtgaggcacatggttcccccttggttactggcttcaatgatagcttcggaaagtagggaaacttgaa

SEQ ID NO: 792350 - DNA, 120 bp, Artificial Sequence
  ENSG00000273079_127 (sequence is synthesized)
agagcaaggaccaaagcggagatgagtgaggaacctgaatgcaaccttatgtgtgaggtcctgatatccacaaggaacctggccccatgtcattcctgcccaggtccttcagattacagc

SEQ ID NO: 792351 - DNA, 120 bp, Artificial Sequence
  ENSG00000273079_128 (sequence is synthesized)
acccaaggagcccttgatcatcaccctgggcagagggagtgacttatcacaccacccttacccacagaatttaggccaccaggctgtgactccatctgtcccccttgcagtaagagattc

SEQ ID NO: 792352 - DNA, 120 bp, Artificial Sequence
  ENSG00000273079_129 (sequence is synthesized)
atagtctctgaaatctgacaggagaacagcatcaggggaaggggccacaggaatgcgaatttgttgagctgcctgctcctctaggataagtatattacctgtttccagaggggattgttt

SEQ ID NO: 792353 - DNA, 120 bp, Artificial Sequence
  ENSG00000273079_130 (sequence is synthesized)
ttttttcgaaatgaaacaaaacatgcctgcctaaaacttcagccctattcagaacagtcttgcagttaactgtcattgtcacattttaattgtaattgattttcttttgaaatccatggc

SEQ ID NO: 792354 - DNA, 120 bp, Artificial Sequence
  ENSG00000273079_131 (sequence is synthesized)
tattttaatgctccctttgaccatgacataagaaccctctgcaaaccagagacctggccattaggttgcctctggctgagttatactctcagtagtttatactttgctctcagatattca

SEQ ID NO: 792355 - DNA, 120 bp, Artificial Sequence
  ENSG00000273079_132 (sequence is synthesized)
cctgaacagcacaactacacagaatttgatctctttgccatgagcattctgatgcctatgtacctccctaatgcacacacacaatcttaacaaatagatccaaatttcctatgtcaatca

SEQ ID NO: 792356 - DNA, 120 bp, Artificial Sequence
  ENSG00000273079_133 (sequence is synthesized)
tgttatggtagatgaaagtgttcatttagaatgggataaagagacatatcataatttatgcagccagtgttttctctttgctctacctggcttgtggatcattgatccctcaaggtttga

SEQ ID NO: 792357 - DNA, 120 bp, Artificial Sequence
  ENSG00000273079_134 (sequence is synthesized)
cagaaatattcaggcttcatgtgaaggcagcatgttctttgtgatgaaacaacctagttatcgtctccattttcccattttaccctatggaatccatgtggccttctaaggtcctgttga

SEQ ID NO: 792358 - DNA, 120 bp, Artificial Sequence
  ENSG00000273079_135 (sequence is synthesized)
tggactggtactaagaggatggagaagcagaagccagtccccctgagaacagacagtcctgttgcttagatacatacatattcgcacatgtgcccacatctcttcttggaaacatcatga

SEQ ID NO: 792359 - DNA, 120 bp, Artificial Sequence
  ENSG00000273079_136 (sequence is synthesized)
gcagaggtggagaggtctgttctcaatgggaggaataagggtaggagaattccttgagaatccctattctcaaggaatagggataaatgccttcacggattcaataatttatctgttctc

SEQ ID NO: 792360 - DNA, 120 bp, Artificial Sequence
  ENSG00000273079_137 (sequence is synthesized)
tctctcccagggtcaggagcaagaaaaatatcaaggtttcacataggcaggaagcaaggaggatagtgaagcatctaggtggaggtggaactcttactgagaaaaacatgaagtagtaaa

SEQ ID NO: 792361 - DNA, 120 bp, Artificial Sequence
  ENSG00000273079_138 (sequence is synthesized)
atcaccctttctttgatataaatgcatttagaagtcaatgagggcacttacagctgtgtttcccttcactaacttttcatctcttgcattctttacttctctttctcaatttattcatct

SEQ ID NO: 792362 - DNA, 120 bp, Artificial Sequence
  ENSG00000273079_139 (sequence is synthesized)
tgaggtatacttatcctgagttgactctgagcagcccatcctcaaaacacaaacaatgttaggatgagaagttgagtgagcacagagctcgaacacgtgcatggtacttaatgtttccaa

SEQ ID NO: 792363 - DNA, 120 bp, Artificial Sequence
  ENSG00000273079_140 (sequence is synthesized)
actcgagcccaatcagtctagcacagtcaatcccactgcattttaatgactaggatggggcctgctgtacatagctggacatcttggattacagaaaagaggctttatgtgaaggcagca

SEQ ID NO: 792364 - DNA, 120 bp, Artificial Sequence
  ENSG00000273079_141 (sequence is synthesized)
ttttctttgtggtagagcaacatagttatcctgctaactgtcctatttgacctgatggaatccataaggtcctgttgatgggttggttctaagaggatggagaagcagaagtcattctac

SEQ ID NO: 792365 - DNA, 120 bp, Artificial Sequence
  ENSG00000273079_142 (sequence is synthesized)
tgagaacagacagtcctgttgcttagatacatacatattctttatgacagaattcctcctgagactcttgcacaccttcagtgatcagcgcattcactttggttatttcttggtaacagg

SEQ ID NO: 792366 - DNA, 120 bp, Artificial Sequence
  ENSG00000273079_143 (sequence is synthesized)
cacgagaaatgggtcacatagaaatctgaagagtcatttctcgagcatttttagcttattcccatgtaaagaggcactgagctcctgcagttctagcctgcctctgctcccctccttggg

SEQ ID NO: 792367 - DNA, 120 bp, Artificial Sequence
  ENSG00000273079_144 (sequence is synthesized)
gaatggtggagtttctaggataaccagcaacccattaggctccaccacacttagcctatggtacattctgagtaaatcacagtagttggtatgtgaatacagaagaatttaccataacca

SEQ ID NO: 792368 - DNA, 120 bp, Artificial Sequence
  ENSG00000273079_145 (sequence is synthesized)
cttctccaaataacctcctttgacttggaaataagatcatctttcagttttacagatgagaagtcaaagcacaaaattggataattagccaaaagtaagattatacagaaaattcttgac

SEQ ID NO: 792369 - DNA, 120 bp, Artificial Sequence
  ENSG00000273079_146 (sequence is synthesized)
agaaccaaaacttggctgaaccaaaacttgtccaaatttctaactctcagtctagctcagcgagtaatgctgcctgaattgtctgcccccactgtaggttttcagcatctagcagtggag

SEQ ID NO: 792370 - DNA, 120 bp, Artificial Sequence
  ENSG00000273079_147 (sequence is synthesized)
aaaagtcacgaaatctaggcagctgatttagccagatcttatctatgaaatttccctttgtagacacacacacactccacatacatctacagagacaagtcaaaaagagcaagaagaaag

SEQ ID NO: 792371 - DNA, 120 bp, Artificial Sequence
  ENSG00000273079_148 (sequence is synthesized)
caaaaatttgaaaatcagaaaggttagagaggtttccacggtgaagaaaacttggtcaaataaaaatgtttttgaattctatagggtaagatattgtgaataattttttattattaaaaa

SEQ ID NO: 792372 - DNA, 120 bp, Artificial Sequence
  ENSG00000273079_149 (sequence is synthesized)
ttttttttaggtagcatgtaatccacataaataaaaaactcaagaataaactgggacagaggatttcttccagagtgctacatggcaaaagagccttcaggaacgtgtgcaggggtgtca

SEQ ID NO: 792373 - DNA, 120 bp, Artificial Sequence
  ENSG00000273079_150 (sequence is synthesized)
tgatactccgaaggtgtcagtagttttggtcagcccacagtgagcagggcagcctcaagggagagccccttacatccttttctgggcacctctgtctaattaagttcaaacatacaagcc

SEQ ID NO: 792374 - DNA, 120 bp, Artificial Sequence
  ENSG00000273079_151 (sequence is synthesized)
tgattctaggattaaggcataagttagttctgaacagaaaaatataaggcagttcacatacacaatgaattcttgaagaaagaacctatagcccccagaccgataataaataattactgc

SEQ ID NO: 792375 - DNA, 120 bp, Artificial Sequence
  ENSG00000273079_152 (sequence is synthesized)
ctgccaaaatcctgaagaaagggaagcatgggggctccaaaattaatagtctcctgagaatacttatgagaccttgattttgtcacaaggttgcaatggtgaattatttattaagcaccc

SEQ ID NO: 792376 - DNA, 120 bp, Artificial Sequence
  ENSG00000273079_153 (sequence is synthesized)
gcagatcagagaatcttgcaacaaccttctcttacaacccacctgttcacttatgaatgatatcaagctcaggatataatccatctttccaaagattttagtatctttagtttgggctgc

SEQ ID NO: 792377 - DNA, 120 bp, Artificial Sequence
  ENSG00000273079_154 (sequence is synthesized)
agaagaaattttggctcacagcattatgcttaaaccaaaaacagtgaaagagctctagtgtcctgcttaatgtagagtaactttttttttttatcagtccttcctagccctagagggaag

SEQ ID NO: 792378 - DNA, 120 bp, Artificial Sequence
  ENSG00000273079_155 (sequence is synthesized)
ataggagaggaggtaggaagatggaaaagtccttagatgaatgagtgaggagacttctataccatcaacttcagagtgtactgatccccggagcctggttcaggaggctagtttcagatg

SEQ ID NO: 792379 - DNA, 120 bp, Artificial Sequence
  ENSG00000273079_156 (sequence is synthesized)
atcggaggaaatggaggaggtagcttttattcccatgcatgaagatggggggaggaggtgggcactagactaattttttaatctaaaaaaaatcaagcctattacaaatctcatttttcc

SEQ ID NO: 792380 - DNA, 120 bp, Artificial Sequence
  ENSG00000273079_157 (sequence is synthesized)
cttgtccttttgcctcccaataattcacataaaatcgtgttatcatagtaagctaagagagaggggcagtagctatttctaccttgactccgtggtgacttcatctttttcatgagtgtc

SEQ ID NO: 792381 - DNA, 120 bp, Artificial Sequence
  ENSG00000273079_158 (sequence is synthesized)
attacagatacctggatcatgatgatcctgaaaaacaggtcacagggccaacagctgatgagtatttggagcatcttattcccccaagatgaccactccctgtcttctgctacacctata

SEQ ID NO: 792382 - DNA, 120 bp, Artificial Sequence
  ENSG00000273079_159 (sequence is synthesized)
ttcatcgggggggggaggtgggaaaatagcaggattcttggggactctgagggcatgaatggagaattatttgattgaaaccacagagctcttgtacttagtattaaatattaaaataga

SEQ ID NO: 792383 - DNA, 120 bp, Artificial Sequence
  ENSG00000273079_160 (sequence is synthesized)
aatgaaaagttcagcttttctgagctgtaccatagcggccaatggaggaagtcttacaaagaaaatctatatctgcacaagactgaagccactaaaccgagtatacacaacataaagata

SEQ ID NO: 792384 - DNA, 120 bp, Artificial Sequence
  ENSG00000273079_161 (sequence is synthesized)
tcttcctatttcaagtatcccttagggggcatgggtgcttagctatcctatgaaagacagagaagataagctcaattttagagcccagagcttgctccggaacagcaagatccacatgaa

SEQ ID NO: 792385 - DNA, 120 bp, Artificial Sequence
  ENSG00000273079_162 (sequence is synthesized)
cttaaactctttcccactgagcctaggggtggaatgtaattcctctgatggttttgatttatttccaagctagacttctctatttgatcattggcaccttggcagctcacacatctccgt

SEQ ID NO: 792386 - DNA, 120 bp, Artificial Sequence
  ENSG00000273079_163 (sequence is synthesized)
atatatatatatatatacacacacatacatacatacatacatatacataaccctgtttgggtaaggcctattgacagaagccagatatctgggtggaagttagaagatgggcaaggaatt

SEQ ID NO: 792387 - DNA, 120 bp, Artificial Sequence
  ENSG00000273079_164 (sequence is synthesized)
ccagatatctgggtggaagttagaagatgggcaaggaattcttatctcagagtttcaacactgcgacaatgtggagagaagtctcctgggaaaatgcagatgcccaataacttccaaaag

SEQ ID NO: 792388 - DNA, 120 bp, Artificial Sequence
  ENSG00000273079_165 (sequence is synthesized)
aatcagggaagttggagtatttttgagatttacagtgtctttacttcagtaaaacaagccatagcaacattatgctctgcagagtcttctgttcacctttggatggaaaagagctgcttc

SEQ ID NO: 792389 - DNA, 120 bp, Artificial Sequence
  ENSG00000273079_166 (sequence is synthesized)
tcctagggagacaactaagaccaagaacaaaactcccatctcctaggccaattattgttttctcctttcctttcttttttattctctttgttacataatggtgaaatctacctggccatt

SEQ ID NO: 792390 - DNA, 120 bp, Artificial Sequence
  ENSG00000273079_167 (sequence is synthesized)
gccagtcaaacattctaattgctaaatatcatacagaaattcatgaaaaaagagtagaatcagcagatttcatttaatcccaagggtctttgcagttttcatcctctccctcaaagttat

SEQ ID NO: 792391 - DNA, 120 bp, Artificial Sequence
  ENSG00000273079_168 (sequence is synthesized)
ctcttctttgagacacatgatcacccctttcctcttctgggtggccatgattccaaaatgaacttcagtggttggtgcttcacaaaaggaaagacagctataatataaaatagaccaaaa

SEQ ID NO: 792392 - DNA, 120 bp, Artificial Sequence
  ENSG00000273079_169 (sequence is synthesized)
tacttatatttttagccactgcaaagtgggttttatcgttgagaacaaccttccaagctccttacttggaaacccttcctcacctcccagcctcctggcagctctcctggttccccttca

SEQ ID NO: 792393 - DNA, 120 bp, Artificial Sequence
  ENSG00000273079_170 (sequence is synthesized)
tgtttttggctcccctccccgactttcctttcctatgaaaatgggatatatcccttaaactgtattcttatctaaactatcagactgttaaaagaaacccttgacagtaatttttcatgg

SEQ ID NO: 792394 - DNA, 120 bp, Artificial Sequence
  ENSG00000273079_171 (sequence is synthesized)
ttttctcatcattttttaacttaggaagttggagaaagaatgacaagcaggcaaatgaggtcttgttcctgagtgcttcaactcaagatcaagtgctgggatagtgagtggctcttagtg

SEQ ID NO: 792395 - DNA, 120 bp, Artificial Sequence
  ENSG00000273079_172 (sequence is synthesized)
gagagggatgtgctctggaatattaagccacctctgagcatgtgtcctggtgctctggtcaagatgcctgttgtgtatgtggaggtattttgtggcttttcttgttctctctttttaaat

SEQ ID NO: 792396 - DNA, 120 bp, Artificial Sequence
  ENSG00000273079_173 (sequence is synthesized)
ttatttcaaggcacaagccctttgtgatggaggatgtctagcttgaacatgctggtaatgtgacactatcctcagctccccttggccctgggttcataggaggcaagtgtttctaaattt

SEQ ID NO: 792397 - DNA, 120 bp, Artificial Sequence
  ENSG00000273079_174 (sequence is synthesized)
ctcgcccagtgagttgttgcatgttatttttaaccattaatattgtgtgtctattggaatgagaaacagaaggttgaatgggaaatagattcagtgacaagcagacaaaaagcttggttc

SEQ ID NO: 792398 - DNA, 120 bp, Artificial Sequence
  ENSG00000273079_175 (sequence is synthesized)
tgagaaatgttcttcactgagttgaaaaaaaaataatctagaaacaaagaagagggaaattggggtagaatggtttggtggtgaagagacgatgacacccacatccagatgctctggtgt

SEQ ID NO: 792399 - DNA, 120 bp, Artificial Sequence
  ENSG00000273079_176 (sequence is synthesized)
attccctcagagatttgtcattccctgtgagctctggcagaaggagaggctgtgctgccattgatggctcagaaatggtgacaggctggctttagaaagagacgtaggctttcttccaga

SEQ ID NO: 792400 - DNA, 120 bp, Artificial Sequence
  ENSG00000273079_177 (sequence is synthesized)
cagacattgataagcattgtagctcgattcttcaaaaccttgtctacaaacctttagggcagcccctctccaatgatttccattctccagtcaagaagattctgagtggaagagccttgt

SEQ ID NO: 792401 - DNA, 120 bp, Artificial Sequence
  ENSG00000273079_178 (sequence is synthesized)
gtgcattgtgattacattgacttaaattgggaagccaaggggcactgagaactgaatatatcaggggaatggagttagctgaacctttttttttcaatattggaatgattttggatcaca

SEQ ID NO: 792402 - DNA, 120 bp, Artificial Sequence
  ENSG00000273079_179 (sequence is synthesized)
aagttaggtcacctctgagagagaaaatctgttaaataaaattatatcttcccatctccagtgaaatcactaggttgttaatgtgattactgtttacttcagaaagaaaattgctagatt

SEQ ID NO: 792403 - DNA, 120 bp, Artificial Sequence
  ENSG00000273079_180 (sequence is synthesized)
cgattacaaataggcattttacagattgatttaatcctgagtcttacacatattaacatggaatttactgactcagacatgatcttctaagctataaaatattactggcgggtagtagat

SEQ ID NO: 792404 - DNA, 120 bp, Artificial Sequence
  ENSG00000273079_181 (sequence is synthesized)
catatgttctaagcaaaccaggaaagctaaaacgttaagtaatcctcccaaatattcagcgtctgtgtatttcactatagctgaaggggatttgggagttaggccgcaggggagaggagg

SEQ ID NO: 792405 - DNA, 120 bp, Artificial Sequence
  ENSG00000273079_182 (sequence is synthesized)
gacaaagtgccatagattaatgaaactcggagtaacttttttcttacctattaaaaataataattaacccaaggacaattctcaaaccagaaaaatcatgaaaagtgagctctgcacttg

SEQ ID NO: 792406 - DNA, 120 bp, Artificial Sequence
  ENSG00000273079_183 (sequence is synthesized)
ccattggttaaaatttagaaacacttagaataaatatccaggttttgggggaggagttgtttccttgcttgcattgttttgtttactggagctcttattttggggatatttggtctgtgg

SEQ ID NO: 792407 - DNA, 120 bp, Artificial Sequence
  ENSG00000273079_184 (sequence is synthesized)
cttcagagcatgttttggataaatgacttatccatgttgatatttattgagtggaaacccatgccaggctgttctaggtgctggaatataagaacgaaccacacaaagtccataccctct

SEQ ID NO: 792408 - DNA, 120 bp, Artificial Sequence
  ENSG00000273079_185 (sequence is synthesized)
tgaagtttgtatgttgatgagaggaaatggacaaaaaagcaaatcaatagatctcatgtcagatagtgcaaagtgtcatgcagaaaaatgaggcagattaagggggatagatgataggat

SEQ ID NO: 792409 - DNA, 120 bp, Artificial Sequence
  ENSG00000273079_186 (sequence is synthesized)
gggtgtggggttgctatttttgagtaagcaaagatgacatttaagtaaaggtttggaggaaatgagggagtgagacttggggctttctatgcaaaggcaaagagaaagcaattgcaaagg

SEQ ID NO: 792410 - DNA, 120 bp, Artificial Sequence
  ENSG00000273079_187 (sequence is synthesized)
ccctgctgtcaaaccaaatgcttggcaaacttgaggaagagccgggaggccaatgagggaggaggagagtatgagaggtgaggtcagagagggggcaataacgcaagtcaggtagggcct

SEQ ID NO: 792411 - DNA, 120 bp, Artificial Sequence
  ENSG00000273079_188 (sequence is synthesized)
tgtaggacactgtcaggatttggcttttaccaagagcaagatgagaagttgctagaaggttcggagcatagagtgatatgatctgacttcagttgaagaggaagctttgggactgctgtg

SEQ ID NO: 792412 - DNA, 120 bp, Artificial Sequence
  ENSG00000273079_189 (sequence is synthesized)
ttgagagtataccctgagagggcagacaatggaagcggctgaaagaccggttaggaagctcttgcaataatcctggtaagagatcatagttgcttgggccatgatgttagcaggggaggt

SEQ ID NO: 792413 - DNA, 120 bp, Artificial Sequence
  ENSG00000273079_190 (sequence is synthesized)
gataagaagcagttggattccagaaatgttttaaagaatcgatatcacacagtttgctgatgaattagacattgaataagagaaagaaaaatcttaagaataaccttagaatgtttggcc

SEQ ID NO: 792414 - DNA, 120 bp, Artificial Sequence
  ENSG00000273079_191 (sequence is synthesized)
tgagctattgaaagtttggagttgccatcagtgtaagacaggaatcctgcaggtgaggctgactgggaaggaaagccttatagtttaaggtgtctacagatgttgcaagtagaaatgatg

SEQ ID NO: 792415 - DNA, 120 bp, Artificial Sequence
  ENSG00000273079_192 (sequence is synthesized)
attaggcaattagatatatggacctggagttcagggaaaatgtatagcctgaagatacatatttaaaatttgtatgcgtttggttggtatttgaagccatgatactggaactagagaatg

SEQ ID NO: 792416 - DNA, 120 bp, Artificial Sequence
  ENSG00000273079_193 (sequence is synthesized)
agtagcgacagaagaggattctctagactgaggcccagggtggaggattgttcaaagctccaggagatgagaagggaccagcaatgggaggagtggttaatgggtaaagcaagtactatt

SEQ ID NO: 792417 - DNA, 120 bp, Artificial Sequence
  ENSG00000273079_194 (sequence is synthesized)
attgagtaggataagactatctggaaacatggaggtcatcccattgatgacctggaagagagctgtttcagtggactggtgggggcaaaagcatgatggggtggattcaagaaagagggg

SEQ ID NO: 792418 - DNA, 120 bp, Artificial Sequence
  ENSG00000273079_195 (sequence is synthesized)
aaggagaggaggtagagacaacaggaataggcaacgctttaggagtttggctgtaaagaggacatggaaatagcagatcatagagaatgtgacgcccagggagggacttctttttttaag

SEQ ID NO: 792419 - DNA, 120 bp, Artificial Sequence
  ENSG00000273079_196 (sequence is synthesized)
atgggaaaaataacagcccattttatgttgacaagactaatccaggagaaaggaaaaattgatgatgcctagggagagaggacaattgctggagtaatgtctttgatgaagtgagagggc

SEQ ID NO: 792420 - DNA, 120 bp, Artificial Sequence
  ENSG00000273079_197 (sequence is synthesized)
atgggattcaatacaaacatagagggactggcttcaggggactaaccaggtttgtttgtattaatagcagggagatagtgcatttgggcacagatgcaagtgggctggtaaatgggataa

SEQ ID NO: 792421 - DNA, 120 bp, Artificial Sequence
  ENSG00000273079_198 (sequence is synthesized)
tgggagtatgctttttctgattgatttttagtaaactatgaaaggagttcatcagttaagagtgagtataggggaagagtattggaggttttggaaggaagaaagcatgaatgagtcata

SEQ ID NO: 792422 - DNA, 120 bp, Artificial Sequence
  ENSG00000273079_199 (sequence is synthesized)
tagccatccggcaggaagagtgagaacaaaaatgtcggagacaccaaaaatataggagacatgctagggggcataaaggaattatttgagtttttatgattatgagtttaaagaaatttg

SEQ ID NO: 792423 - DNA, 120 bp, Artificial Sequence
  ENSG00000273079_200 (sequence is synthesized)
ttttcttcagtcaccttcagctgcttaaacagggtggcaagttagattggaacagggttggggtataaccaggtgaatataatgaaagcaagagatgtggagtcaagggcaactgcagtg

SEQ ID NO: 792424 - DNA, 120 bp, Artificial Sequence
  ENSG00000273079_201 (sequence is synthesized)
tgttaactataatgtttggtcatggaatctaagctgggtgtagaggaaagtgaggatttttagggaaggaggaacaatgaagcatattagaggcagaggattgagattcaagctgggatc

SEQ ID NO: 792425 - DNA, 120 bp, Artificial Sequence
  ENSG00000273079_202 (sequence is synthesized)
actcagttagtgagtcagaagcaataacgtagaaattaggaggtgggttggagaggtggatgcttgaggttatggagggcttgcagttattggtggtttggggtctgttgttggggtggt

SEQ ID NO: 792426 - DNA, 120 bp, Artificial Sequence
  ENSG00000273079_203 (sequence is synthesized)
gggctgagataagatagaggaaaaggttatagaaggagcaggggtcaaggaactgagaggccaggatatgggaattatatagatattgaagtcaacaaaatgttgacttccatatgatag

SEQ ID NO: 792427 - DNA, 120 bp, Artificial Sequence
  ENSG00000273079_204 (sequence is synthesized)
gaatgtaaattatgacaggaatgagggagagtgattcgagaacatttcaatcattgcatcaagtaaggggtgcagctagcctagtctgatgtgcatcaaagctggattttatggttgttg

SEQ ID NO: 792428 - DNA, 120 bp, Artificial Sequence
  ENSG00000273079_205 (sequence is synthesized)
catgttatttttttttaaaaaggagggaggatggtctggaatggcaatgaggggcaagaagggcatctccacctccaggccccagggcatgaggaaggtgcaagtggaaatgctcaccac

SEQ ID NO: 792429 - DNA, 120 bp, Artificial Sequence
  ENSG00000273079_206 (sequence is synthesized)
ctgggagtgattcagggtcctcaaagaggagccaggtttctgtaagagcaagaggaaaggaattgccagggttgtggctggtgatgaaccactgattcttaggcaggatttgggagttgg

SEQ ID NO: 792430 - DNA, 120 bp, Artificial Sequence
  ENSG00000273079_207 (sequence is synthesized)
taaaggaagggaaatgagctgagatgggagatgtgcatgggtatctggggatgaaagtccaagtgataagagggactgggggtcttgggcttctcgtggtgattgccctaagcgaggctg

SEQ ID NO: 792431 - DNA, 120 bp, Artificial Sequence
  ENSG00000273079_208 (sequence is synthesized)
tgggcatttggggttggccctaattgtctctatgtcagattgaggtggtgatgctgcaagtgcccggggcagggacttgatggcagcacatggaactctggtacctcttcctcagtcctg

SEQ ID NO: 792432 - DNA, 120 bp, Artificial Sequence
  ENSG00000273079_209 (sequence is synthesized)
atatttgcttttttaacttctactaaaaaccccactgctaactgtgataggccacaacatgtttttatagatgtcaacaaatgttatcctggattgagaccacattttgactatttatcc

SEQ ID NO: 792433 - DNA, 120 bp, Artificial Sequence
  ENSG00000273079_210 (sequence is synthesized)
tggaaagtacacattttcacaggaaatcttgtcctttctaaggttcccaactaagctagtctcgttgtgggggggtcataattatttgttcttacttaccttactccttgttcatcttta

SEQ ID NO: 792434 - DNA, 120 bp, Artificial Sequence
  ENSG00000273079_211 (sequence is synthesized)
aaaaaaaaatcaaataaaaaggattggaaagcaactttgcttctgcccaattctgctaaatgaaagttttctctgacagatcattttgattttgtattttcttttgtgacagaaacagtg

SEQ ID NO: 792435 - DNA, 120 bp, Artificial Sequence
  ENSG00000273079_212 (sequence is synthesized)
ggacaggagcatggaaatgaatgaaagtctttaaaagccttgagagagcgttttcaaggatcaggagagggcttagaaagaaaaggactctgagtggggctgcatgaaaagggggtaagt

SEQ ID NO: 792436 - DNA, 120 bp, Artificial Sequence
  ENSG00000273079_213 (sequence is synthesized)
gaggactcttggggagggtctgaaaaaaacaagtagtttggcaaggagagcagaaaaataaaattccactgtgtaggcatttggagatttagcaagagcaacctagagtctgcccccaga

SEQ ID NO: 792437 - DNA, 120 bp, Artificial Sequence
  ENSG00000273079_214 (sequence is synthesized)
gacactgcacgttgtttctgacacagaggatgcactaattctatttcctgtgccacctgaaaaaatcataatttgagaagagaaactgttaggccatttctagtgaactatttttccaaa

SEQ ID NO: 792438 - DNA, 120 bp, Artificial Sequence
  ENSG00000273079_215 (sequence is synthesized)
ccctcacggaaccctgaacagggtgtgaatgagatcacaactactgctgctgctggttcagcctctctgtccactaataaaggcaaacccttcagcatggtcatatcctgccagccgttt

SEQ ID NO: 792439 - DNA, 120 bp, Artificial Sequence
  ENSG00000273079_216 (sequence is synthesized)
tcccccaaaagattaaattatgttcatcttggctcatctaacgccacatcttgagttcttaaggtatcacagccaactcagtcataccttactttatgcactgagtacgcattaaactct

SEQ ID NO: 792440 - DNA, 120 bp, Artificial Sequence
  ENSG00000273079_217 (sequence is synthesized)
atttaggaaggaagagggaagcaaaggaagccagggatggttttgtcatgacctctctttgctttctgacctcccggaatccactctttggaagatgtgcagaaaacaatgtgacttcca

SEQ ID NO: 792441 - DNA, 120 bp, Artificial Sequence
  ENSG00000273079_218 (sequence is synthesized)
tttaccctgcctcagatctcccctccttcagactggctcccacccctggttaatggggtaacctgggtacgcctatttgttaaaggaatttgtgggaagtgaggggcaaaattgttggag

SEQ ID NO: 792442 - DNA, 120 bp, Artificial Sequence
  ENSG00000273079_219 (sequence is synthesized)
cagagggaatagatttatgggagctttgttacccagtgactatcccagcattaatacttcagagtagccctgacgcttgtggaaacatttcaagggagctagaggcaatgttacagtgga

SEQ ID NO: 792443 - DNA, 120 bp, Artificial Sequence
  ENSG00000273079_220 (sequence is synthesized)
gatcagagaagggatggggcagtgagctcttgtccctaggggaaatctcttttcctccacgtgacaggagccagtgctccaacagcatcagaattacacttagccacaatgactgatgcg

SEQ ID NO: 792444 - DNA, 120 bp, Artificial Sequence
  ENSG00000273079_221 (sequence is synthesized)
tgtgtgtgcctgtgcacatgtgtgtgagcgtgtgtgtgagcgcacgtgtgtaagggggtgatgatggaaacatgatatgcatccactatggggttgcgttgcaaattcacagctgcaccc

SEQ ID NO: 792445 - DNA, 120 bp, Artificial Sequence
  ENSG00000273079_222 (sequence is synthesized)
ctcccaaagtcacatggcagaggggaaatggtcatagctttcctgtgtgatgtcctctccagggagcaccgacgactcaggcttgcctcagctctgcgaggcccagactccacactcctc

SEQ ID NO: 792446 - DNA, 120 bp, Artificial Sequence
  ENSG00000273079_223 (sequence is synthesized)
cctggggccggctctccttcctcttgactctcagatccccagcccatccacctccaagttctttttttgtttatttgttttgcttctgttttctgtaaatatctatttcttattttggac

SEQ ID NO: 792447 - DNA, 120 bp, Artificial Sequence
  ENSG00000273079_224 (sequence is synthesized)
atgcagggatcaattgagattctggagtggggggaggggcggatgactgggtctttttattttttcctttctctcttggattttggtgtttgaacttgaaaaaaataattacaagtatat

SEQ ID NO: 792448 - DNA, 120 bp, Artificial Sequence
  ENSG00000273079_225 (sequence is synthesized)
atataagcaaatgacttacctttaaacaaaagaaataagttgatttcattcttttgatttatcttgtttctcattggggtcgggtgggggtggggggtcttttgggtggagggctttttt

SEQ ID NO: 792449 - DNA, 120 bp, Artificial Sequence
  ENSG00000273079_226 (sequence is synthesized)
gtgagctgtatagatttccagtttggacttgttcaaatgatgcaggaacaaaaattaaaacgaattaaaaaaaagacaacataaaaaaacaagaaaaactttgtgatgtataaaagctgt

SEQ ID NO: 792450 - DNA, 120 bp, Artificial Sequence
  ENSG00000273079_227 (sequence is synthesized)
aaatagtcaaagattctttctcttttctaatggcaaattatttctgtcactttatattcaaaaaataaagaaacctaccacaaattatcagggttaaaaaaaatccagaatcagagtttt

SEQ ID NO: 792451 - DNA, 120 bp, Artificial Sequence
  ENSG00000273079_228 (sequence is synthesized)
tttcttggtctttgtgctttctttactgtgattccaaaaagattgttaaaagtgctgtttgggaaaaaccccttgcccagttggtttccaattgttggtaggagtcttggactggcgaat

SEQ ID NO: 792452 - DNA, 120 bp, Artificial Sequence
  ENSG00000273079_229 (sequence is synthesized)
ctacttgggttgggatctgtttctactatagctggtgctggagcccttggttacactcatctccccctcatgtattattctgaaacaaatcccataattatatggtttcatctgtaaaca

SEQ ID NO: 792453 - DNA, 120 bp, Artificial Sequence
  ENSG00000273079_230 (sequence is synthesized)
ttacagtatatatctcttttactaaggactcttttttagtttaacaataccattgtgacatcataaggtagccataattccttgataagaaatatccagtgttcactaattgtctcaaat

SEQ ID NO: 792454 - DNA, 120 bp, Artificial Sequence
  ENSG00000273079_231 (sequence is synthesized)
gtaatactgttttatggggtggtggtgggtttttttcccataagtcataaggtccatacaattagttgctatttctcaaatgtattttaaatctaaagatttgctttctaactttttctt

SEQ ID NO: 792455 - DNA, 120 bp, Artificial Sequence
  ENSG00000273079_232 (sequence is synthesized)
gacatatacttgttaaaggaatagagcactttatcctttagaggttcccacagttggattttgctggttcttcccaatattaatgaagacaatgtaaattggtaattgttttactcttta

SEQ ID NO: 792456 - DNA, 120 bp, Artificial Sequence
  ENSG00000273079_233 (sequence is synthesized)
atgcatacttccattgcttggaggtgtcagaaaagcaaaccagcccttgttttgctgattgtttcccaccccactcccagtcccagtcctgttactggctttatatatggattctaaatg

SEQ ID NO: 792457 - DNA, 120 bp, Artificial Sequence
  ENSG00000273079_234 (sequence is synthesized)
atctctctttctataccttgattgctaaattatccaagttaaataatagtatctcccccttagctatcttggtaagaaaatagcatagacatatttagcttttcacatgccaatcatgag

SEQ ID NO: 792458 - DNA, 120 bp, Artificial Sequence
  ENSG00000273079_235 (sequence is synthesized)
gcacatttcaacatcactttattaaaagccacatgctcctcctatagtcctagtactggaaaggaccttctagagaccatttagaagaactctgtctcatggccaaggagcctgggtgag

SEQ ID NO: 792459 - DNA, 120 bp, Artificial Sequence
  ENSG00000273079_236 (sequence is synthesized)
ctcatgtatggcagccctggctagaagccagcagggctaatccctagttccaggaatctcccaggataatgtattgttatctctttgaagttactgtctcagagagattatctgtgaggg

SEQ ID NO: 792460 - DNA, 120 bp, Artificial Sequence
  ENSG00000273079_237 (sequence is synthesized)
tctctcttgtactttcctttgtactgaacaaaaattcttgtttctccctgaacattccagaaagtagcaagctctaacataaagccagattcttcccagatatagtgattctctttactt

SEQ ID NO: 792461 - DNA, 120 bp, Artificial Sequence
  ENSG00000273079_238 (sequence is synthesized)
ctggagatacttccttaaaccccaaattttttttggacaacagaactgctttaacaataatctgaaaattatacagtaagtttgatttgaaaatctgagatttgtttaaaaaaaaaaggg

SEQ ID NO: 792462 - DNA, 76 bp, Artificial Sequence
  ENSG00000273079_239 (sequence is synthesized)
tttgatttgaaaatctgagatttgtttaaaaaaaaaagggggaagacaagacttgaaatcttggctctgatttttc

SEQ ID NO: 792463 - DNA, 87 bp, Artificial Sequence
  ENSG00000273079_240 (sequence is synthesized)
accacctccgcctcctgtgtagctgggtactactggtgcataccaccacactgggctgattttgtattttttgtagagacggggttt

SEQ ID NO: 792464 - DNA, 87 bp, Artificial Sequence
  ENSG00000273079_241 (sequence is synthesized)
cggggtttcaccatgttgtccaggctgattctgaactcctgggttcaagtgatctgcctgcctcggcttcctatgatcttggctcta

SEQ ID NO: 792465 - DNA, 120 bp, Artificial Sequence
  ENSG00000273079_242 (sequence is synthesized)
atcttggctctagttttaaataaggaagcttgcgagtatttatctggattatggtgggaacctccagtaggatatcatgaaagctttgatcatgatcacaacaccttcaataaaacaaag

SEQ ID NO: 792466 - DNA, 120 bp, Artificial Sequence
  ENSG00000273079_243 (sequence is synthesized)
actccaatgacaagggtgagtgccagaacttcctgagactatgccaagtgtctgttctttatacagcctgcctcacccacacctggaatctcttaaatggattagctcagagcacctgtg

SEQ ID NO: 792467 - DNA, 120 bp, Artificial Sequence
  ENSG00000273079_244 (sequence is synthesized)
tcctacatgcccttgtgccaccctgaagtccactgcaagggactatcagtaagaccagtctaatgaaaggctgagggagcacccggttgtgtccccatcagccaactgttccggaaagat

SEQ ID NO: 792468 - DNA, 120 bp, Artificial Sequence
  ENSG00000273079_245 (sequence is synthesized)
gagcctccttggctgtcccaggattgacactcttcccctgcatacatcactaggaaggtagaacctaccctgaacacttgatttgaatatttctattcccctattcttttacaaatgcaa

SEQ ID NO: 792469 - DNA, 120 bp, Artificial Sequence
  ENSG00000273079_246 (sequence is synthesized)
actaattctttcaaaaatataaatgatcctctgaaagaaatttcttgtggaattctggaatgaccaagaagatgggaagagaccaccagaaaagtggttctgagagtctgcagggcctgt

SEQ ID NO: 792470 - DNA, 120 bp, Artificial Sequence
  ENSG00000273079_247 (sequence is synthesized)
caaaaaaattatgccaaagctatcatttgtggcctgcatcaaatcatctagacttccgttttcttatcttgaaacccagatgttggtctatctgccctccccatcaaaggttacctggag

SEQ ID NO: 792471 - DNA, 120 bp, Artificial Sequence
  ENSG00000273079_248 (sequence is synthesized)
cagtagttctcagttttacatagtggagtcatctgagtatttctgaaatgctgatgcctgagtctcatcccctagagagtctcattcaattgtcctgggtggctggaggggttaggggtt

SEQ ID NO: 792472 - DNA, 120 bp, Artificial Sequence
  ENSG00000273079_249 (sequence is synthesized)
gaaaacttgcccaggtgattttaatatacagccagaatgtgaaccactatgtatgtgcatctggggaaagcgggcctcctatttacttctaatcccattatatgtggcagctgtttgttg

SEQ ID NO: 792473 - DNA, 120 bp, Artificial Sequence
  ENSG00000273079_250 (sequence is synthesized)
tcactctcctctcaccatggacaactattcacagcacagacagtcaccctttggaactccaggacctctttcctcttccatttggagctgaagaatggacataacggaagcaccatttta

SEQ ID NO: 792474 - DNA, 120 bp, Artificial Sequence
  ENSG00000273079_251 (sequence is synthesized)
tgattacagcctcgttctctaattctgcctatccccagcatacacggctagatatagacatactgcaaagctcctctatgtaaaggaaattctacacataaaatttaaacttggaatcga

SEQ ID NO: 792475 - DNA, 120 bp, Artificial Sequence
  ENSG00000273079_252 (sequence is synthesized)
cagatgcacccgaaactggtgataattcttctgaacaaggagaggaagtgggaaaggaaagagacaagagggtgttttataagcccactccctcttccctgcctccacctaccagaaaac

SEQ ID NO: 792476 - DNA, 120 bp, Artificial Sequence
  ENSG00000273079_253 (sequence is synthesized)
tgatccaagaggaatatgtggaccaggtttctggcctgagcgacaaaaagatgagaacactgagacttagaagaagtatctttcccaaagtcacaaagttagtgacagagccgggattcg

SEQ ID NO: 792477 - DNA, 120 bp, Artificial Sequence
  ENSG00000273079_254 (sequence is synthesized)
gcttcgtgggtttctcctccccccggagtcagggtgtgcgaggaaatctcggggcttcgctctatcgagagtgctcgtcaagggtgattcttgatcaccaccatccagtagtgctggcgt

SEQ ID NO: 792478 - DNA, 120 bp, Artificial Sequence
  ENSG00000273079_255 (sequence is synthesized)
ccgaatgcatatccttttgccttgcaaagaagagtcatgaacttcaaaacccccgagacggatcattaatcctgctttgcaggaaaggaaaaccctccattcccagccaccggccacccc

SEQ ID NO: 792479 - DNA, 120 bp, Artificial Sequence
  ENSG00000273111_0 (sequence is synthesized)
gaccaagcccggtctgtgcacgggttgcctcgtttctggccttcccttgccttgtacctcgacttcgcgcgtggcttgtttttgctgagtggaggcctgcgttttctgttatgtctcttc

SEQ ID NO: 792480 - DNA, 120 bp, Artificial Sequence
  ENSG00000273111_1 (sequence is synthesized)
cggtgccccacaactcctgagctacccttcttttatgcgttctctcccagcgctgtgattaccgggttgcttaccgggccctccttcctcagattgcacccctttccttgtgtctcttct

SEQ ID NO: 792481 - DNA, 120 bp, Artificial Sequence
  ENSG00000273111_2 (sequence is synthesized)
tgtctttgtgtcggttgtgattttcctaatctctgattttccttttctctcggacgctctccctcttcggacccattttctcccgtgcttcatgccctgatagcctggccccttcccggc

SEQ ID NO: 792482 - DNA, 120 bp, Artificial Sequence
  ENSG00000273111_3 (sequence is synthesized)
ttccttcgctaccggggacgcctctagtttttctgaatttctggctggctccaccctccgcgttcatcttcctcaagagttcgcccctctgggggctcctctgtgtaatcgtcgccttct

SEQ ID NO: 792483 - DNA, 120 bp, Artificial Sequence
  ENSG00000273111_4 (sequence is synthesized)
ctgggtatttctgtgaactccgtctcacaccatcccgccatcttctctgccttggccccttttctctgtacagccagctctgtgtccttttcttctccccctctaaaatcgactcctctt

SEQ ID NO: 792484 - DNA, 120 bp, Artificial Sequence
  ENSG00000273111_5 (sequence is synthesized)
ctccctgagagccccacctttgtgccccactcctcattttcctacgcctccctctctctgctggtcctctctctccctgcaaggttccattccatcaatttgtttgtcttttgtaggggt

SEQ ID NO: 792485 - DNA, 120 bp, Artificial Sequence
  ENSG00000273111_6 (sequence is synthesized)
tttttttttttttttttttttgcttgaggatttcacttcaatcttttctggttgcgtctccacttgtactcagcttgttaggtccaggtccagttgttctgcatctgaggctggcgtgtg

SEQ ID NO: 792486 - DNA, 120 bp, Artificial Sequence
  ENSG00000273111_7 (sequence is synthesized)
caggtccagttgttctgcatctgaggctggcgtgtgctgtcttctctgattggcctaatctccctcacccccgtgagatctgttgtcagccttcgtttctctttcctgtgtcccagcttt

SEQ ID NO: 792487 - DNA, 120 bp, Artificial Sequence
  ENSG00000273111_8 (sequence is synthesized)
aggggagctgtcctagataaaattggaaagaaacagtgacccagagacaggtggacaaagaattcggggactgatgggaactgagcttgggatccagactgaaactgattccagactgac

SEQ ID NO: 792488 - DNA, 120 bp, Artificial Sequence
  ENSG00000273111_9 (sequence is synthesized)
ctctagcacccaggacccagacacagggccatgggaccccagcatttgagacttgtgcagctgttctgccttctaggggccatctccactctgcctcgggctggagctcttttgtgctat

SEQ ID NO: 792489 - DNA, 120 bp, Artificial Sequence
  ENSG00000273111_10 (sequence is synthesized)
gaagcaacagcctcaagattcagagctgttgctttccataactggaagtggcttctgatgaggaacatggtgtgtaagctgcaagagggctgcgaggagacgctagtgttcattgagaca

SEQ ID NO: 792490 - DNA, 120 bp, Artificial Sequence
  ENSG00000273111_11 (sequence is synthesized)
gggactgcaaggggagtcgtgggctttaaaggctgcagctcgtcttcgtcttaccctgcgcaaatctcctaccttgtttccccacccggagtgtccattgcctcctacagtcgcgtctgc

SEQ ID NO: 792491 - DNA, 120 bp, Artificial Sequence
  ENSG00000273111_12 (sequence is synthesized)
cggtcttatctctgcaacaacctcaccaatttggagccttttgtgaaactcaaggccagcactcctaagtctatcacatctgcgtcctgtagctgcccgacctgtgtgggcgagcacatg

SEQ ID NO: 792492 - DNA, 120 bp, Artificial Sequence
  ENSG00000273111_13 (sequence is synthesized)
aaggattgcctcccaaattttgtcaccactaattcttgccccttggctgcttctacgtgttacagttccaccttaaaatttcaggcagggtttctcaataccaccttcctcctcatgggg

SEQ ID NO: 792493 - DNA, 120 bp, Artificial Sequence
  ENSG00000273111_14 (sequence is synthesized)
tgtgctcgtgaacataaccagcttttagcagattttcatcatattgggagcatcaaagtgactgaggtcctcaacatcttagagaagtctcagattgttggtgcagcatcctccaggcaa

SEQ ID NO: 792494 - DNA, 120 bp, Artificial Sequence
  ENSG00000273111_15 (sequence is synthesized)
gatcctgcttggggtgtcgtcttaggcctcctgtttgccttcagggactgaccatctagctgcacccgacaagcacccagactctttcacataacaaataaaatagcagagttccctttc

SEQ ID NO: 792495 - DNA, 120 bp, Artificial Sequence
  ENSG00000273111_16 (sequence is synthesized)
aggggagctgtcctagataaaattggaaagcaccttgtccaatgggaggacctaagtgggagagtgagagtcctgctttgagaagctaagatggtggatggtgcagaaacagtgacccag

SEQ ID NO: 792496 - DNA, 120 bp, Artificial Sequence
  ENSG00000273111_17 (sequence is synthesized)
gcccctggggcgttgaccaagcccgcttttctgcgggtcttggcacctttcttggccacagatttctgggttacagagcatgtgtgtctgaggcattgcaggcagaaaagggtggccgac

SEQ ID NO: 792497 - DNA, 120 bp, Artificial Sequence
  ENSG00000273136_0 (sequence is synthesized)
aaacttccggcggcggctgaggcggcggccgaggagcggcggactcggggcgcggggagtcgaggcatttgcacctgggcttcggagcgtagcgccagggcctgagcctttgaagcagga

SEQ ID NO: 792498 - DNA, 120 bp, Artificial Sequence
  ENSG00000273136_1 (sequence is synthesized)
ggaggggaggagagagtggggctcctctatcgggaccccctccccatgtggatctgcccaggcggcggcggcggcggcggcggaggaggaggaggaggcgaccgagaagatgcccgccct

SEQ ID NO: 792499 - DNA, 120 bp, Artificial Sequence
  ENSG00000273136_2 (sequence is synthesized)
gcgtcccgctctgctgtgggcgctgctggcgctctggctgtgctgggcggcccccgcgcatgcattgcagtgtcgagatggctatgaaccctgtgtaaataaaggaatgtgtgttaccta

SEQ ID NO: 792500 - DNA, 120 bp, Artificial Sequence
  ENSG00000273136_3 (sequence is synthesized)
ccacagtggcacaggatactgcaaatgtccagaaggcttcttgggggaatattgtcaacatcgagacccctgtgagaagaaccgctgccagaatggtgggacttgtgtggcccaggccat

SEQ ID NO: 792501 - DNA, 120 bp, Artificial Sequence
  ENSG00000273136_4 (sequence is synthesized)
gctggggaaagccacgtgccggtgtgcctcagggtttacaggagaggactgccagtactcgacacctcatccatgctttgtgtctcgaccttgcctgaatggcggcacatgccatatgct

SEQ ID NO: 792502 - DNA, 120 bp, Artificial Sequence
  ENSG00000273136_5 (sequence is synthesized)
cagccgggatacctatgagtgcacctgtcaagtcgggtttacaggtaaggagtgccaatggaccgatgcctgcctgtctcatctctgtgcaaatggaagtacctgtaccactgtggccaa

SEQ ID NO: 792503 - DNA, 120 bp, Artificial Sequence
  ENSG00000273136_6 (sequence is synthesized)
ccagttctcctgcaaatgcctcacaggcttcacagggcagaagtgtgagactgatgtcaatgagtgtgacattccaggacactgccagcatggtggcacctgcctcaacctgcctggttc

SEQ ID NO: 792504 - DNA, 120 bp, Artificial Sequence
  ENSG00000273136_7 (sequence is synthesized)
ctaccagtgccagtgccttcagggcttcacaggccagtactgtgacagactgtatgtgccctgtgcacactcgccttgtgtcaatggaggcacctgtcggcagactggtgacttcacttt

SEQ ID NO: 792505 - DNA, 71 bp, Artificial Sequence
  ENSG00000273136_8 (sequence is synthesized)
tcaatggaggcacctgtcggcagactggtgacttcacttttgagtgcaactgccttccagtccctgttggt

SEQ ID NO: 792506 - DNA, 87 bp, Artificial Sequence
  ENSG00000273136_9 (sequence is synthesized)
tgagacattgcgcccccagctgccagagaacaaacagcagttgagaaacctcaaagagaaatgttttctaactcaactggccggctt

SEQ ID NO: 792507 - DNA, 82 bp, Artificial Sequence
  ENSG00000273136_10 (sequence is synthesized)
atgaggatgaagatgttcaagttgaggaggatgagaaagtactggaatcatctgcccccagggaggtgcagaagactgaaga

SEQ ID NO: 792508 - DNA, 120 bp, Artificial Sequence
  ENSG00000273136_11 (sequence is synthesized)
gcctcacaagaacatcaaaatcacatttgaggaagacgaagtcaactcaactctggttgtagacagagaatcctctcatgatgaatgtcaggatgctctaaacattctcccagtccctgg

SEQ ID NO: 792509 - DNA, 68 bp, Artificial Sequence
  ENSG00000273136_12 (sequence is synthesized)
gcgagaaggcagcgataaacattctagaaatcaatgagaaattgcgcccccagctggcagagaagaaa

SEQ ID NO: 792510 - DNA, 81 bp, Artificial Sequence
  ENSG00000273136_13 (sequence is synthesized)
tcaaagagaagcagaacaaatacaaatatgaagagtgcaaagatctcataaaatctatgctgaggaatgagcgacagttca

SEQ ID NO: 792511 - DNA, 120 bp, Artificial Sequence
  ENSG00000273136_14 (sequence is synthesized)
cagcttcgccctttacgtggacaataggttttttactttgacggtgacaagtctccacctggtgttccagatgggagtcatattcccacaataagcagcccttactaagccgagaggtgt

SEQ ID NO: 792512 - DNA, 89 bp, Artificial Sequence
  ENSG00000273136_15 (sequence is synthesized)
aagcccagacataggatggtaccatgccagtggcaacctgtgctcagtctgaagacaatggacccacgttaggtgtgacacgttcacat

SEQ ID NO: 792513 - DNA, 87 bp, Artificial Sequence
  ENSG00000273136_16 (sequence is synthesized)
gacattttaatttgaaccacgtatctctgggtagctacaaaattcctcagggatgtcattttgcaggcatgtctctgagcttctata

SEQ ID NO: 792514 - DNA, 120 bp, Artificial Sequence
  ENSG00000273136_17 (sequence is synthesized)
taatttgaaccacgtatctctgggtagctacaaaattcctcagggatgtcattttgcaggcatgtctctgagcttctatacctgctcaaggtcattgtcatctttgtgtttagctcatcc

SEQ ID NO: 792515 - DNA, 60 bp, Artificial Sequence
  ENSG00000273136_18 (sequence is synthesized)
tcttgacgtggacagcatgctgatggaagtggaagagcctgaagtcttgcaggactcact

SEQ ID NO: 792516 - DNA, 120 bp, Artificial Sequence; identical to SEQ ID NO: 791198
  ENSG00000273136_19 (sequence is synthesized)

SEQ ID NO: 792517 - DNA, 80 bp, Artificial Sequence
  ENSG00000273136_20 (sequence is synthesized)
actgtgcctttgtttttactagtgtctgctgttgcaaaaagaagaattttaatctatacaattaaaaccttttgctatca

SEQ ID NO: 792518 - DNA, 120 bp, Artificial Sequence
  ENSG00000273173_0 (sequence is synthesized)
ctgacgcatctgtctgaggagcggtcagtgacgcgatggagcgggcaagggatcgcttacacctgagacgaactacagaacagcacgtaccagaggtggaagtccaagtcaaacgcagaa

SEQ ID NO: 792519 - DNA, 120 bp, Artificial Sequence
  ENSG00000273173_1 (sequence is synthesized)
gaggcaggcattcttagctgagacaccaagaggtggttaaagccatattggagtagcgaggaatctgattccaagcaaaaaccagacaatgtaataaaaatattattcataatttttcaa

SEQ ID NO: 792520 - DNA, 120 bp, Artificial Sequence
  ENSG00000273173_2 (sequence is synthesized)
agtagcgaggaatctgattccaagcaaaaaccaggttagagctaatgcagcaatgatcaagaataaagaatcattaaagaatggggtgttgggggttctcttaattatcagtgacacatt

SEQ ID NO: 792521 - DNA, 120 bp, Artificial Sequence
  ENSG00000273173_3 (sequence is synthesized)
aatttttttccttagagcttcatacaataaacacattgcagaaagttttagaaagttttgcaggaccttaaattttctgccctgacactttcgtcatgtttctgtattccagttattgta

SEQ ID NO: 792522 - DNA, 120 bp, Artificial Sequence
  ENSG00000273173_4 (sequence is synthesized)
gcgcatgcttttcaggtagttttcttttgcgttttttttaattatataaaaatatttcactataaatggctcttgaataccctgttactgaatgtttataatttccttttgtgggaggtg

SEQ ID NO: 792523 - DNA, 120 bp, Artificial Sequence
  ENSG00000273173_5 (sequence is synthesized)
gtgatgagttcagaaagatcaagccaaagaatgcgaagcaaccagagcgtgaagaaaagcgggttttgggtctggtgttgctgcgtggggagaacttggtatccatgactgtggaggggc

SEQ ID NO: 792524 - DNA, 120 bp, Artificial Sequence
  ENSG00000273173_6 (sequence is synthesized)
caccccccaaagatactggcattgctcgggtaccacttgctggagctgctggaggccctggggttggtagggcagctggtagaggagtaccagctggtgtgccaattccccaggcccctg

SEQ ID NO: 792525 - DNA, 120 bp, Artificial Sequence
  ENSG00000273173_7 (sequence is synthesized)
ctggattggcaggccctgtccgaggagttgggggaccatcccagcaggtaatgactccacagggaagaggcactgtagcagctgctgctgttgctgcgactgccagtattgctggagccc

SEQ ID NO: 792526 - DNA, 80 bp, Artificial Sequence
  ENSG00000273238_0 (sequence is synthesized)
gaggcggaggatgcgggctccggcggcggcggcgcgggcccgggaggacgcgggaggatgaggaggaggccggcggtccg

SEQ ID NO: 792527 - DNA, 120 bp, Artificial Sequence
  ENSG00000273238_1 (sequence is synthesized)
gaagtggagcgtccgcggggcctgcgccgcgctctcctcctgcctcctgctcgcctgcgcgctcagcgccgccgccgtcggcctcaagtgcttctcgttgggctcggagctgcgcgggga

SEQ ID NO: 792528 - DNA, 120 bp, Artificial Sequence
  ENSG00000273238_2 (sequence is synthesized)
tctcgttgggctcggagctgcgcggggagccgttccgcctgggggccgccgccggcgccttctactccgggctgctgctggccgccggcctctcactgctcggcgccgccctgctctgct

SEQ ID NO: 792529 - DNA, 120 bp, Artificial Sequence
  ENSG00000273238_3 (sequence is synthesized)
gcaggcgctcccgaggccacgccgggcgagtcgggggccgcggccggggccccggggccggtgagcagccagaacctgcttctgctcggcgtcctggtcttcatgctcggggtcctcagc

SEQ ID NO: 792530 - DNA, 120 bp, Artificial Sequence
  ENSG00000273238_4 (sequence is synthesized)
tctgctcggcgtcctggtcttcatgctcggggtcctcagcgcattcgcgggcgccgtgatcgacggcgacaccgtgtccctggtggagcgcaagtactcgcactactgcctgcccccgcg

SEQ ID NO: 792531 - DNA, 80 bp, Artificial Sequence
  ENSG00000273238_5 (sequence is synthesized)
cactactgcctgcccccgcgggcgccaggttcgagccccggctcggccccgggctcaacccccggctcggccccgggctc

SEQ ID NO: 792532 - DNA, 120 bp, Artificial Sequence
  ENSG00000273238_6 (sequence is synthesized)
cagcgccacgtccgccaagtgccgccagctgaaggactaccagcgcggcctggtgctctccaccgtcttcaactcgcttgagtgcctgctgggcctgctcagcctcctgctcgtcaagaa

SEQ ID NO: 792533 - DNA, 120 bp, Artificial Sequence
  ENSG00000273238_7 (sequence is synthesized)
ctgggcctgctcagcctcctgctcgtcaagaactacaagtcgtcgcaggcccggcgcggtcggcgcggcaggcggaggggaggccgggccctggcgcggccccgcggcggctccgggctc

SEQ ID NO: 792534 - DNA, 120 bp, Artificial Sequence
  ENSG00000273238_8 (sequence is synthesized)
cgggggcggcggctgcagcagcggccgagcgaggcctccatcctgtccccggaggagtcggacctggccgcccccggggactgcgcgggcttcgcggcgcaccacgcggtctcctacatc

SEQ ID NO: 792535 - DNA, 120 bp, Artificial Sequence
  ENSG00000273238_9 (sequence is synthesized)
aggcgtcctccacgcgctggacgaggcgggcgcggaggtgcgctgcggggggcacccgtcggtggagctgccggggtacgcgccctcggaccccgacctcaacgcctcctacccctactg

SEQ ID NO: 792536 - DNA, 120 bp, Artificial Sequence
  ENSG00000273238_10 (sequence is synthesized)
ctacccctactgctgccggccgccctgcgagacgccgcggccctgggagacccatcgggcctgctgatcccgcgggccggacccccatcccgcggaccgcgcttgcgttccacccacccc

SEQ ID NO: 792537 - DNA, 120 bp, Artificial Sequence
  ENSG00000273238_11 (sequence is synthesized)
ccgcggcaagggaggacgggcagcggggcggggtccagggccaggcctcaggggcgccgcctcttccacgtggctttgcagcctccggcctggccccctctgcgggctccgtgaccacag

SEQ ID NO: 792538 - DNA, 120 bp, Artificial Sequence
  ENSG00000273238_12 (sequence is synthesized)
acaggagggggcccctgatgtgaccatttctgtatctgggaggtttctcttcttatttgtgtcgttcatatctggattccattttcaagtttacaataaatgtttgggcttggctagccc

SEQ ID NO: 792539 - DNA, 120 bp, Artificial Sequence
  ENSG00000273238_13 (sequence is synthesized)
gactgcacttttcttggcaagtccaaaccctggggctgctctgcctggtggtccgaggcgagggggacagagcgagcgccccaggacggcgacttcccacggaggaagagcagacagaga

SEQ ID NO: 792540 - DNA, 120 bp, Artificial Sequence
  ENSG00000273238_14 (sequence is synthesized)
cgcagagcagctggtaattcagaaagaagaagtgagaacacccaacagcaacactttgtacacggatgtgcctgcttttgttgatactttcttactgtaaagctctccataaatagtgaa

SEQ ID NO: 792541 - DNA, 120 bp, Artificial Sequence
  ENSG00000273238_15 (sequence is synthesized)
aatgtttggtaaatttattgcaatttaaaattggtgagttcctttattaaattaattgctatgttattggagaatattcatcaaattggaattagaggatgtctacgcacaagtcagtgt

SEQ ID NO: 792542 - DNA, 120 bp, Artificial Sequence
  ENSG00000273238_16 (sequence is synthesized)
ggggggaaatggtttcatttggtcggacaaatgttgagtttgaacagttgtattctgctagctagttgactgaatccagcctctttctaaagctaactttctgtgtgtgtagagaccctg

SEQ ID NO: 792543 - DNA, 120 bp, Artificial Sequence
  ENSG00000273238_17 (sequence is synthesized)
cttttttcttttctttttttttttttggaaactggttgtgtggtttcgactgcaaagcagatcttatttttgattaatacatatgaacaatttaatcctatttcggaaaatcagtcatag

SEQ ID NO: 792544 - DNA, 120 bp, Artificial Sequence
  ENSG00000273238_18 (sequence is synthesized)
tttcggaaaatcagtcatagtttttctggcatagataattttcctgttgattatttcattaatctggtaattttgagtatgatagcatttcatttcaaatataccccgtaatcgccttaa

SEQ ID NO: 792545 - DNA, 120 bp, Artificial Sequence
  ENSG00000273274_0 (sequence is synthesized)
gctccgtggctgcgctgctggaacccgctggaagagatacaggtttgctctggagcagcagcagctggcggagcaatggagatgcaatcctattatgccaagcttttgggggagctgaat

SEQ ID NO: 792546 - DNA, 120 bp, Artificial Sequence
  ENSG00000273274_1 (sequence is synthesized)
gaacagagaaagagggactttttctgtgactgcagcatcattgtggaagggcggatcttcaaggcccacaggaacattttgtttgctaacagcggctacttccgagccctgctcattcac

SEQ ID NO: 792547 - DNA, 120 bp, Artificial Sequence
  ENSG00000273274_2 (sequence is synthesized)
tatatccaggacagcgggcggcatagcaccgcctccttggacattgtcacctctgatgccttctccatcatcttagatttcctctattctgggaagttggatttgtgtggggagaatgtg

SEQ ID NO: 792548 - DNA, 120 bp, Artificial Sequence
  ENSG00000273274_3 (sequence is synthesized)
attgaagtgatgtcggctgccagctacctgcagatgaatgacgtggtgaacttctgcaagacatacattaggtcatccctcgacatttgccgaaagatggagaaggaggctgctgtggct

SEQ ID NO: 792549 - DNA, 120 bp, Artificial Sequence
  ENSG00000273274_4 (sequence is synthesized)
gcagcagtggcggcggcagcggcggcggctgcagcggcggcagcagcggcggctcatcaggttgacagtgaaagccccagttcaggccgggaggggacctcctgtggtaccaagagcttg

SEQ ID NO: 792550 - DNA, 120 bp, Artificial Sequence
  ENSG00000273274_5 (sequence is synthesized)
gtctcctctccagccgagggagaaaagagcgtggagtgcctgagagagtccccttgcggtgactgcggagactgccaccccttggaactggtggtgagagacagccttggcggtggctcg

SEQ ID NO: 792551 - DNA, 120 bp, Artificial Sequence
  ENSG00000273274_6 (sequence is synthesized)
gctgacagcaacctctctactccacccaaacggatagagcccaaggtggaatttgatgctgatgaagtggaggtggacgttggtgaacagctgcagcagtatgctgccccgctgaacctg

SEQ ID NO: 792552 - DNA, 120 bp, Artificial Sequence
  ENSG00000273274_7 (sequence is synthesized)
gcccacgtggaggaggccttgccaagcggccaggcggttgacttggcttacagcaactaccacgtgaagcagttcctggaggcgctcttgcgcaacagcgctgccccgagcaaggatgat

SEQ ID NO: 792553 - DNA, 120 bp, Artificial Sequence
  ENSG00000273274_8 (sequence is synthesized)
gcagaccatcacttttctaggagtttggaaggaagaccagaaggtgcaggagtagccatgagttccatgatggatgtccaggctgactggtatggagaggactcaggtgatgtgctggtg

SEQ ID NO: 792554 - DNA, 120 bp, Artificial Sequence
  ENSG00000273274_9 (sequence is synthesized)
gtccccatcaagctccacaagtgtcctttctgcccttacactgccaaacagaagggcatcctcaagcggcacatccgttcacacacaggcgagcggccctacccctgtgagacctgcggc

SEQ ID NO: 792555 - DNA, 120 bp, Artificial Sequence
  ENSG00000273274_10 (sequence is synthesized)
aagaggttcactcgacaagagcacctgcggagccacgcactgagtgtccacagatccaaccgtccaatcatctgcaagggctgcaggagaacattcacgagtcacctgtcccaggggctg

SEQ ID NO: 792556 - DNA, 120 bp, Artificial Sequence
  ENSG00000273274_11 (sequence is synthesized)
cggcgcttcgggctgtgtgacagctgcacctgcgttacagacacacccgatgatgatgatgatttgatgcccatcaaccttagcttggtggaggcttcatctgaaagccaagaaaagagc

SEQ ID NO: 792557 - DNA, 120 bp, Artificial Sequence
  ENSG00000273274_12 (sequence is synthesized)
gacacagacaatgactggccaatctatgtggagtcgggtgaggaaaatgaccctgctggagatgattctgatgacaaaccacaaattcagcctaacttatcagaccgagagacacttacg

SEQ ID NO: 792558 - DNA, 120 bp, Artificial Sequence
  ENSG00000273274_13 (sequence is synthesized)
tagcaataaattggtggggaagaggaggttttaaaacttgttagtgctcgttctgttgttgaaagataccatttgtccaattttgtggaaccctgagaggaacattttttcactgttatt

SEQ ID NO: 792559 - DNA, 120 bp, Artificial Sequence
  ENSG00000273274_14 (sequence is synthesized)
atatgtgcatttttattagactatctgatagaggttggattttgtgactcaaaggacagataacctttttgtgtggtgcccttggtttctgagggctttgctggccactccttaattctg

SEQ ID NO: 792560 - DNA, 120 bp, Artificial Sequence
  ENSG00000273274_15 (sequence is synthesized)
agtgagtcaaagcaggccctgaggtctcctgtttttcttgctgtgtgtccaaactctggttaggagaaagataagaaaatctccaggcttgtttttatattgattcagtcctctgcattc

SEQ ID NO: 792561 - DNA, 120 bp, Artificial Sequence
  ENSG00000273274_16 (sequence is synthesized)
ctttgttatcatcctctttctctaaaaaccattaagttttgggatcaagtttacctttgccaagcctttcctaatgaattccacattaaattttctggcaaagtattaaagagaaacctt

SEQ ID NO: 792562 - DNA, 120 bp, Artificial Sequence
  ENSG00000273274_17 (sequence is synthesized)
cattgatataaagcaggcagggcggtctggctacatgatcataaaaggtactccctaaatctagaacaattttaaaggcttggaatacttatgggcagacgaacatgggaatgatctgaa

SEQ ID NO: 792563 - DNA, 120 bp, Artificial Sequence
  ENSG00000273274_18 (sequence is synthesized)
aggctcattatggcatcctgacttgcccagttgaattaaattttaagttagccctgagaagggaggctatgaccccaggtctggatggtttccctgtctggtttggcatttgacgattct

SEQ ID NO: 792564 - DNA, 120 bp, Artificial Sequence
  ENSG00000273274_19 (sequence is synthesized)
acacatacaacctgttctgttatcataaaacaactcatttgggcaaaactcaaaatgctcccctactttttccagcaatttccaaaagctggagctgtgtaacttggaaatgtagctgcc

SEQ ID NO: 792565 - DNA, 120 bp, Artificial Sequence
  ENSG00000273274_20 (sequence is synthesized)
tctggcattcttttacttagtttatgctgatgtagggcaggtgagcccaaaaattggggcttagcccagaggagttcttggcttcacccaggaaagaattcaagggcaagccagtggtgt

SEQ ID NO: 792566 - DNA, 120 bp, Artificial Sequence
  ENSG00000273274_21 (sequence is synthesized)
tagacagcagcttgtattgaagcagcagtgcccaacagcagctaaggggccgctcctcgtggagcagggctacaccataggcagtgtgcccagagtagtagctcagaggcaggtcggcac

SEQ ID NO: 792567 - DNA, 120 bp, Artificial Sequence
  ENSG00000273274_22 (sequence is synthesized)
ttatatttatacccacttttagttacatgcaaattaaggggcagattatgcagcaatatttaggaaaatggtggtaacttccaagccgctgggtggttgccatgataaggggcagtgact

SEQ ID NO: 792568 - DNA, 120 bp, Artificial Sequence
  ENSG00000273274_23 (sequence is synthesized)
tccaggtgttgccatggcaatggtaattgacatggcacagtgataagtgtttcttatggaaatctgcttcctgcaccaccctcccaccaccgccctgttttagctagtcctcaatttggt

SEQ ID NO: 792569 - DNA, 120 bp, Artificial Sequence
  ENSG00000273274_24 (sequence is synthesized)
ccatgtccgagtccggcctttggagttgagtcctgccttctacctccttgcctagaactttaattggagggaaagtataagcccataatgccaagtaacatttctaaaatgttcatcttt

SEQ ID NO: 792570 - DNA, 120 bp, Artificial Sequence
  ENSG00000273274_25 (sequence is synthesized)
taaaagatcttcatgagggaaagggaaggttagtagcagaacaggtttttaaaagcagtctacctttcgcccactttccagccacacaattattgtaacaaaagaggctgaactctttaa

SEQ ID NO: 792571 - DNA, 120 bp, Artificial Sequence
  ENSG00000273274_26 (sequence is synthesized)
agggctaaagggcaggcagtgttaggaattcggaatgtaattgaaggcaatttccataattttgtcttatgttaaaatatccaaaatggattttaaaagaaatcttcttgtcttccttta

SEQ ID NO: 792572 - DNA, 120 bp, Artificial Sequence
  ENSG00000273274_27 (sequence is synthesized)
agtgtagttgtctttcaaaaggtggtaaaagtcacttttatttctacctcttgaacaacaaaaaagtcaaaaacattataaattggcttgtaaatgttagccaaagcattagacaggtgt

SEQ ID NO: 792573 - DNA, 120 bp, Artificial Sequence
  ENSG00000273274_28 (sequence is synthesized)
ttaagtcgtacttctcaatagtagttaaaactggaacagtgcaactcaaactctggcccacagagaggccctgttctgtaaactgttttctaccagtctgctacaaggaaagtcagaaat

SEQ ID NO: 792574 - DNA, 120 bp, Artificial Sequence
  ENSG00000273274_29 (sequence is synthesized)
taagaatacacatatagaaatgttgataacactttgacattgctgtgactcatggctttgtcttcttgagtgaggtatggaccagttcagttctggtcagctagagggccacatggtgca

SEQ ID NO: 792575 - DNA, 120 bp, Artificial Sequence
  ENSG00000273274_30 (sequence is synthesized)
gaggttggataccagcctgtacagcaggaccacgtattggtctgcagtagaatggaaaatttaaaacttctcttatcacaggtagttcgataaatatcattcttggctgtgtgcggtggc

SEQ ID NO: 792576 - DNA, 67 bp, Artificial Sequence
  ENSG00000273274_31 (sequence is synthesized)
cagatggaacactgcaaaaatacaaaaattagtcaggagtggtggcatgtgcctgtaatcccagcta

SEQ ID NO: 792577 - DNA, 120 bp, Artificial Sequence
  ENSG00000273274_32 (sequence is synthesized)
taatcccagctactcaggaggctgtggcgagaggaacacttgagcctggaaaaggttgcagtgagctggaatcgtgccactccactccagcctgggcaacagtgtgagaccttgtctcaa

SEQ ID NO: 792578 - DNA, 120 bp, Artificial Sequence
  ENSG00000273274_33 (sequence is synthesized)
caacagtgtgagaccttgtctcaaaaaaataataataaaataaataaataaaagaaaaatattctagatcaagagttactcattgaaaattatcagggaccagagatatttgtcttatct

SEQ ID NO: 792579 - DNA, 120 bp, Artificial Sequence
  ENSG00000273274_34 (sequence is synthesized)
gcctgggcaacaagagcgaaactgtctccaaaaatgtatacatatatttgctgttattttaaaagagggatctcagcaaaaaggaaacctaaatggatgtgtagaagatttacttggcca

SEQ ID NO: 792580 - DNA, 120 bp, Artificial Sequence
  ENSG00000273274_35 (sequence is synthesized)
ctaaatggatgtgtagaagatttacttggccaggaacagtgtttgatatttttgctttctctgtttaaattatctctgatgttttaatgacttttctacctcatagttcagcctctttgc

SEQ ID NO: 792581 - DNA, 120 bp, Artificial Sequence
  ENSG00000273274_36 (sequence is synthesized)
ctgctttctccagtggagctatgatcctcttcagtgattccgtgacctcttcatatccctgggtaaaacattttacattagagatttcactgtaggacagtgattctcagttgggggtga

SEQ ID NO: 792582 - DNA, 120 bp, Artificial Sequence
  ENSG00000273274_37 (sequence is synthesized)
tttcgtgccttgcaggtggctactggcatctagtgggtagaggccagggaagctgccaaacatcctgaaatgcacaggacagtccccacaacaatgaattctccaattcaaaatgtcagt

SEQ ID NO: 792583 - DNA, 120 bp, Artificial Sequence
  ENSG00000273274_38 (sequence is synthesized)
aataccaatgttgagaaactctgctgtaagataaagtaggattttttaaaggatctttaatgagtggacttaattttgtgttctattttaagctaccttttacctgcataatatttattt

SEQ ID NO: 792584 - DNA, 88 bp, Artificial Sequence
  ENSG00000273274_39 (sequence is synthesized)
ttctattttaagctaccttttacctgcataatatttatttatttttaattttattttatgtctttgtcacccaggctggagtgcaatg

SEQ ID NO: 792585 - DNA, 60 bp, Artificial Sequence
  ENSG00000273274_40 (sequence is synthesized)
cctcccaggttcaagagattcttctgtctcagcctcttgagtagttgggattataggcac

SEQ ID NO: 792586 - DNA, 77 bp, Artificial Sequence
  ENSG00000273274_41 (sequence is synthesized)
ccttcataatatttagtagccccttatactctcgcaaattttagaaaatagtggattagtaaaatgaagcgctgagg

SEQ ID NO: 792587 - DNA, 120 bp, Artificial Sequence
  ENSG00000273274_42 (sequence is synthesized)
attttagaaaatagtggattagtaaaatgaagcgctgaggccagatggttcatagcttgcccaagatctgatttaggtttataatgtggaaacttagaaaattctgactcattcatacac

SEQ ID NO: 792588 - DNA, 120 bp, Artificial Sequence
  ENSG00000273274_43 (sequence is synthesized)
ccagaatcgttactaggttctgatcattttgttaatttttaaagtagcagaatcactgggaagaaaacagaatgtgacacctaatgtttaaatgattctctttctttcgtaatatctcag

SEQ ID NO: 792589 - DNA, 120 bp, Artificial Sequence
  ENSG00000273274_44 (sequence is synthesized)
attgttgcatttctggtggactatttggagtttgtgtataggcactggcaataactggatcactgagttctatcacttttaaaggagatacttcctctgtctagactatcagatcataaa

SEQ ID NO: 792590 - DNA, 120 bp, Artificial Sequence
  ENSG00000273274_45 (sequence is synthesized)
ttggtcccctttaggtggtcagtatttataatcacagtgtctttgaggtttaatttgtggggttggtggtatttttatactaagtaaatttacagttgagcccaacacagaccgttagtg

SEQ ID NO: 792591 - DNA, 120 bp, Artificial Sequence
  ENSG00000273274_46 (sequence is synthesized)
gtttagtttctattctggcacattccacccaagttcacaaagggatattttcgtctcatattagatgtattgcatgaatgggaacaggactcttacttgtaatggaattccaaaatggca

SEQ ID NO: 792592 - DNA, 120 bp, Artificial Sequence
  ENSG00000273274_47 (sequence is synthesized)
ttcttgggaagttatttctcttgggggatgaggacccccttctcaaaagttgagaaggaatgtaaatagggccttacctataataattaagaaatgacatagtgcatcatgattctgatc

SEQ ID NO: 792593 - DNA, 120 bp, Artificial Sequence
  ENSG00000273274_48 (sequence is synthesized)
atttggcagaaagatgccgttctgatgtaaatattttggtggccaccagactttgaatattccttaaggaagctgctgacctagtgttctgcaacatgttatggaattgagtattctggt

SEQ ID NO: 792594 - DNA, 120 bp, Artificial Sequence
  ENSG00000273274_49 (sequence is synthesized)
ggtttggaatactgagatgggttttttttgttattgttcattgatgtcgtgacaaaccccagggagagaaaggcaacaggtagggctgcatgcactgattctgggagccgtaggaaagag

SEQ ID NO: 792595 - DNA, 120 bp, Artificial Sequence
  ENSG00000273274_50 (sequence is synthesized)
tggagtggcctttggttaactgaactcagactgttttatttggaactctagatttttcttgtgtgtgtcccttgtgcattaagagaatgatctctgtgaagtctagtgtaatggggtagg

SEQ ID NO: 792596 - DNA, 120 bp, Artificial Sequence
  ENSG00000273274_51 (sequence is synthesized)
gtgatcacactatcttctaacctgataaagggacactttattcaggtgcatatgatgggcactgttttcattgatttctgttgcttttgtagttctctccactcaacagtactgtgttcc

SEQ ID NO: 792597 - DNA, 120 bp, Artificial Sequence
  ENSG00000273274_52 (sequence is synthesized)
acaaacctttcattgtagtgctggaaatttgaattcttttcttcaaatgatgtttctgtagagaaaaacgaaaagtgttttggggtcagagtagtttggttggttcctaaacatgtccta

SEQ ID NO: 792598 - DNA, 69 bp, Artificial Sequence
  ENSG00000273274_53 (sequence is synthesized)
tggggtcagagtagtttggttggttcctaaacatgtcctagtttttgttgttgttgttgtttttctttt

SEQ ID NO: 792599 - DNA, 73 bp, Artificial Sequence
  ENSG00000273274_54 (sequence is synthesized)
atatcctagttttaaaaggtgacagtaactcacatgactgcatgatcggatgacatggaaacttcataactga

SEQ ID NO: 792600 - DNA, 120 bp, Artificial Sequence
  ENSG00000273274_55 (sequence is synthesized)
atgactgcatgatcggatgacatggaaacttcataactgaaggagaacatttagcatccgtcttgaccctccaggtagattattttactactgccaattcttcattgacaattgtggttt

SEQ ID NO: 792601 - DNA, 120 bp, Artificial Sequence
  ENSG00000273274_56 (sequence is synthesized)
tagggggggcaatttttatatccatcatttgatttctggacctttgtcagttaatcagtggaggttagggcagggattatgtgctttgatgaggaaggtttagtagtaacaagcttgggg

SEQ ID NO: 792602 - DNA, 120 bp, Artificial Sequence
  ENSG00000273274_57 (sequence is synthesized)
attttgaaggaaggcatcaatttcatatacaggtcttggtgacatgtaatggatatggattatctgtcatgcatacagtgaagggtatggtcaggatttttttggaagtagaaaaacata

SEQ ID NO: 792603 - DNA, 120 bp, Artificial Sequence
  ENSG00000273274_58 (sequence is synthesized)
ccaaacagtttcacatcttttaccatccatagcccctgaggagcatctactgccatcagaaaaacatgcaaataatactgcagtgccctccaagggtcttaggcccaactgaaggtttag

SEQ ID NO: 792604 - DNA, 120 bp, Artificial Sequence
  ENSG00000273274_59 (sequence is synthesized)
aaacattcaaatttataaactgccacacttggcatcagattcacttaaaaggatatagaatgggaagcactgcttactagcaaggcagaaccagttgctcttctctgaaagtctctgcag

SEQ ID NO: 792605 - DNA, 120 bp, Artificial Sequence
  ENSG00000273274_60 (sequence is synthesized)
ctgtctgtgtggcatagtgcaggtgcaaggagacagatctacatggggcaagtatggaagcttccccggcttaagagccccttgtcccacaggaacaagtatctcttataacagcttcat

SEQ ID NO: 792606 - DNA, 120 bp, Artificial Sequence
  ENSG00000273274_61 (sequence is synthesized)
agacatggcctccagtgtccctataaaagacatgcctgttccaagcgtcactgtacttagggatgcccagagctgaggcttcctatcaggcatttatagttctcccagtccagatgcagt

SEQ ID NO: 792607 - DNA, 120 bp, Artificial Sequence
  ENSG00000273274_62 (sequence is synthesized)
ttaccaattgggcatcatgtctaccatatgtaacattgcctagcagttgacatatgaatttttattaggttgccaggggaacagagctagaaagttaacaaaggtaaaattctcatgcag

SEQ ID NO: 792608 - DNA, 120 bp, Artificial Sequence
  ENSG00000273274_63 (sequence is synthesized)
aagggaaagaggctttgttaatactttgccaaacactatgctaagcaattgcataacagatattacacctaattcctatagaatatagccagaggaatttcctagtaaaatataacccac

SEQ ID NO: 792609 - DNA, 120 bp, Artificial Sequence
  ENSG00000273274_64 (sequence is synthesized)
cctaactcatttttcctttcttgaatagtgttgttggtgcttagttgcttgtgattaatagacagtttgcaaattttggtaaggtgtgtgtaagagttggcttaacagtcaaaatgatcc

SEQ ID NO: 792610 - DNA, 120 bp, Artificial Sequence
  ENSG00000273274_65 (sequence is synthesized)
tagccaaaatatcatgtatcctttggtgtcactcataataggtgagtatagtatgtcgtactgtagggacattattgaatggacatgtctgagtattccatcagtcatattttgatggga

SEQ ID NO: 792611 - DNA, 120 bp, Artificial Sequence
  ENSG00000273274_66 (sequence is synthesized)
tcatattttgatgggagcctttggccatctggcaaacaccaaacacaggctcttggtaaccgtgcctttttttttttttttttttttttaaagatggagtttcactcttgttgccaggct

SEQ ID NO: 792612 - DNA, 70 bp, Artificial Sequence
  ENSG00000273274_67 (sequence is synthesized)
tgacctcaggcatccggcctgctcttggaaaccgtgcctcttattcctgtgtcatgtggtgctactcttg

SEQ ID NO: 792613 - DNA, 120 bp, Artificial Sequence
  ENSG00000273274_68 (sequence is synthesized)
accgtgcctcttattcctgtgtcatgtggtgctactcttgcctgcttctgttgctcccagcagatcaatgagtgaagatggctggttactcattcagtagttatcaaacaattatttatg

SEQ ID NO: 792614 - DNA, 120 bp, Artificial Sequence
  ENSG00000273274_69 (sequence is synthesized)
gagtctttactgtatgtcaagcacgaagggtacttcagtgaaccagcaccatccctgccctcaaggatcctgcagtgtgtaatcacagagactggcagttataacacggcatgttgggtg

SEQ ID NO: 792615 - DNA, 120 bp, Artificial Sequence
  ENSG00000273274_70 (sequence is synthesized)
tgacaacagggacaagcacagggtactctgagaacgcgtgggtcgggtacctagccagtcatagagcctcagagacgctttctgtctaagctactcttcctatccagtaaacttccagct

SEQ ID NO: 792616 - DNA, 120 bp, Artificial Sequence
  ENSG00000273274_71 (sequence is synthesized)
ttggcatactatatttataagcagtttaaacagttgctgaaatttattgccttttctcaaacatggtggctttggtcactaacagtgtttaaattatgtgttttattcagttatgcaaaa

SEQ ID NO: 792617 - DNA, 120 bp, Artificial Sequence
  ENSG00000273274_72 (sequence is synthesized)
atgcaaaaatatatactatacatagaatatcagaatgttgtagtctttaggaaatatgcatcaggtttgttttttttgtttttttgacagactctcactctgtcgccaggctggagtgca

SEQ ID NO: 792618 - DNA, 68 bp, Artificial Sequence
  ENSG00000273274_73 (sequence is synthesized)
gattacaggcgtgagccactgtgcctgactgggtggttttcttttttaaaaaataatatggttttcgg

SEQ ID NO: 792619 - DNA, 120 bp, Artificial Sequence
  ENSG00000273274_74 (sequence is synthesized)
aaaataataataatatggttttcttatttaaaaaataatatagtatgtaaattatttttcaagtaaaaatgaaatgacaacaacagataacttcccattatgttgatccagtgtactgtg

SEQ ID NO: 792620 - DNA, 120 bp, Artificial Sequence
  ENSG00000273274_75 (sequence is synthesized)
tcccattatgttgatccagtgtactgtgacagatggggaggagccccactgcatctggagtgggtcttggctggccatgtgaactaattaataccccagaaatcaggatacatgccaggc

SEQ ID NO: 792621 - DNA, 120 bp, Artificial Sequence
  ENSG00000273274_76 (sequence is synthesized)
aaaaaaaaaaaaaaaaagaaatcaggatacatataggacagaaccattaaatcaagagatttgaaagttagaagggacaggagagatagtctagtccaactccatgtgacagatgaaatg

SEQ ID NO: 792622 - DNA, 120 bp, Artificial Sequence
  ENSG00000273274_77 (sequence is synthesized)
caactccatgtgacagatgaaatgacgtttctagttctcacacagctggttaggatcagaaaccaggtcctgccaggccagtcctgataatagacagacatgtttgggcaggcagaaaag

SEQ ID NO: 792623 - DNA, 120 bp, Artificial Sequence
  ENSG00000273274_78 (sequence is synthesized)
accattcatagataacatttgtttccctgggtatccatcagaccagaggcacaggagaggaaaatgctgttttggcctcatatgataaagtatgcattgtgtgattatggtctgcattct

SEQ ID NO: 792624 - DNA, 120 bp, Artificial Sequence
  ENSG00000273274_79 (sequence is synthesized)
tgcaatgcttagacagggagggggaaatcacattttgagcatgggggagttaatttctttgtcctgtaataccacacatatctaaaacataaaccaccatggaacacactcacactcaca

SEQ ID NO: 792625 - DNA, 120 bp, Artificial Sequence
  ENSG00000273274_80 (sequence is synthesized)
cactcacatacacacaaaaggcaaattaaaatatttattgtccacttaatatgtgttctgtgtttgattgtaatgtattcattttacttataaaaaatttcaaaagtaaaaatatatata

SEQ ID NO: 792626 - DNA, 120 bp, Artificial Sequence
  ENSG00000273274_81 (sequence is synthesized)
atttcaaaagtaaaaatatatatattattaacttgaagtgattttttccaacctcgctgatttttttccttctttcttttttgagacagagttccactctgtcacccaggctggagtgca

SEQ ID NO: 792627 - DNA, 76 bp, Artificial Sequence
  ENSG00000273274_82 (sequence is synthesized)
tgcagtggtgcaatctcggcccactgcaatctccgcctccagagttcaaatatgccaccatgcccggctaattttt

SEQ ID NO: 792628 - DNA, 78 bp, Artificial Sequence
  ENSG00000273274_83 (sequence is synthesized)
tccggcctctaactgatttttgaaatataaattgggtgtgattcagggaatgtaacaagaacaatcttatttgaaaca

SEQ ID NO: 792629 - DNA, 120 bp, Artificial Sequence
  ENSG00000273274_84 (sequence is synthesized)
tgattcagggaatgtaacaagaacaatcttatttgaaacagaaaaccacatatttttaagtcagcagcccacatgataagatggtattgagtaaaaatgtattcttaggtatttcttgac

SEQ ID NO: 792630 - DNA, 120 bp, Artificial Sequence
  ENSG00000273274_85 (sequence is synthesized)
tcagtggattttaatcagtctactgcaaaagctagttttatttaaagggctgcaattatatataagaattattagaaaaacagattagccacttaatctaaaaatacctagatgcagtat

SEQ ID NO: 792631 - DNA, 120 bp, Artificial Sequence
  ENSG00000273274_86 (sequence is synthesized)
tcctggtttttaatgaaatatttatctagtttgggattaaaattaacttagggccatcaaaaatgcaaattatctttaatttggttaaatcaacctgggagtaaatggaaataatctcaa

SEQ ID NO: 792632 - DNA, 120 bp, Artificial Sequence
  ENSG00000273274_87 (sequence is synthesized)
gctaaatttttgttttgatttatatacagtcagattgaaacaccctagttacaagtttagaataggagtggcctcaacaaaggaaaaagtcctttgttcctctgttgctcattttgtcct

SEQ ID NO: 792633 - DNA, 120 bp, Artificial Sequence
  ENSG00000273274_88 (sequence is synthesized)
cggaaacaaatacaatttaactattttctgtaccgtcccaaatttgaagctgacctgaatttggtacctataaatttaaaatggctaaggttaaaatagttaaaacagtttctttagaat

SEQ ID NO: 792634 - DNA, 90 bp, Artificial Sequence
  ENSG00000273274_89 (sequence is synthesized)
atggctaaggttaaaatagttaaaacagtttctttagaatgagttgttagctgggtgtggtagtgtacacctgtagtcccagctactcca

SEQ ID NO: 792635 - DNA, 120 bp, Artificial Sequence
  ENSG00000273274_90 (sequence is synthesized)
gcaacagaatgagaccctgtctcaaaaaaaaaggtttttttttaattgaatgaatgcaataaggaattgaggatcgtctcacattaatgagtgaataacccttcataattttagttactg

SEQ ID NO: 792636 - DNA, 120 bp, Artificial Sequence
  ENSG00000273274_91 (sequence is synthesized)
ttttagttactgtttttctcagggcaattattttatataaaattctaatggagaattttatggacaagattttagttaaggaaaaaaataaccccacaaaataaagagaactattagagc

SEQ ID NO: 792637 - DNA, 120 bp, Artificial Sequence
  ENSG00000273274_92 (sequence is synthesized)
tctaaacagaagaagcttccatcaaaccgtttttcccacttttttgtcccacggtcttaggaccaacaatttagtaatacgagacaatttctggcagactatcccaagctgggacatttt

SEQ ID NO: 792638 - DNA, 120 bp, Artificial Sequence
  ENSG00000273274_93 (sequence is synthesized)
agattctgtgaaagaagactgactactgtctgatgaatgggtaattgatgatgcaatgtatgaaaaaagtaaggcagacaactcaaaaatcacaggaagtgcagccattctacgtgccga

SEQ ID NO: 792639 - DNA, 120 bp, Artificial Sequence
  ENSG00000273274_94 (sequence is synthesized)
gctctacagttacacactgtccaacagctctcggaagaaaaacagaaactgactttatctttgcctgccaagtttgcaaatggattagttcattacaaaggcacttgtcaaaacatattt

SEQ ID NO: 792640 - DNA, 120 bp, Artificial Sequence
  ENSG00000273274_95 (sequence is synthesized)
attaaaaagaggagccagagttggaaatcatcttgaccattaaaaaaatagcaactgataccttgtttaacaagtaagacagtttctgctttttggaattgaattggtttttaagtggta

SEQ ID NO: 792641 - DNA, 120 bp, Artificial Sequence
  ENSG00000273274_96 (sequence is synthesized)
atgtaccaggtctgtttatataggtcagtgttgcccaggttgtattgttttgctgtttttacttttttatatataaagaactaaaattacgagagaataaattcgtggatataatctaaa

SEQ ID NO: 792642 - DNA, 73 bp, Artificial Sequence
  ENSG00000273513_0 (sequence is synthesized)
gtcatctgagcacatccagcgcatcgaccgggacgtaagcgggacattaaggaagcatatattcttcagggat

SEQ ID NO: 792643 - DNA, 67 bp, Artificial Sequence
  ENSG00000273513_1 (sequence is synthesized)
gcaagaagtcatctgagcacatccagcgcatcgaccgggacgtaagcgggacattaaggaagcatat

SEQ ID NO: 792644 - DNA, 120 bp, Artificial Sequence
  ENSG00000273514_0 (sequence is synthesized)
atcccaggcttccagctcagcccgccccaggctaggtgatcggtcgccacatcccctgcgactgaagcacctgctcctccatgaacctgccaagagctgagcgccttcgctccacaccgc

SEQ ID NO: 792645 - DNA, 120 bp, Artificial Sequence
  ENSG00000273514_1 (sequence is synthesized)
agcgcagcctccgggactccgatggggaagacggtaaaatcgatgtcctgggagaggaggaagatgaagacgaggtggaagacgaggaggaggcggcgagccagcagttcctagagcagt

SEQ ID NO: 792646 - DNA, 120 bp, Artificial Sequence
  ENSG00000273514_2 (sequence is synthesized)
cgctccagccggggctgcaggtggcccggtggggcggggttgcgcttccccgagagcacatcgagggcggcggcggcccgagcgacccctcagagtttggcaccaagttcagggcaccgc

SEQ ID NO: 792647 - DNA, 120 bp, Artificial Sequence
  ENSG00000273514_3 (sequence is synthesized)
caaggtctgcggcggcctctgaagatgcccggcagccggcaaagcccccctactcgtacatcgcgctcatcaccatggccatcctgcaaaacccgcacaagcgcctcacgctcagcggca

SEQ ID NO: 792648 - DNA, 120 bp, Artificial Sequence
  ENSG00000273514_4 (sequence is synthesized)
tctgcgccttcattagtggccgcttcccctactaccgccgcaagttccccgcctggcagaacagcatccgccacaacctctcgctgaacgactgcttcgttaagatcccccgcgagccgg

SEQ ID NO: 792649 - DNA, 120 bp, Artificial Sequence
  ENSG00000273514_5 (sequence is synthesized)
gccacccaggcaagggcaactactggagcctggaccccgcctcccaagacatgttcgacaatggcagctttctccggcgtaggaagcgtttcaagcgccaccaactgaccccgggagccc

SEQ ID NO: 792650 - DNA, 120 bp, Artificial Sequence
  ENSG00000273514_6 (sequence is synthesized)
acctgccccaccccttccctctacctgctgcacacgccgccctgcacaacccccacccaggccctctgcttggggcccctgccccgccgcagccagtcccgggggcctaccccaacaccg

SEQ ID NO: 792651 - DNA, 120 bp, Artificial Sequence
  ENSG00000273514_7 (sequence is synthesized)
cccccgggagacgcccttacgctctgctgcacccgcatcctcttcgctacctactgctctcggcccccgtctatgccggggcaccgaagaaagcagaaggcgcggccctggcgaccccgg

SEQ ID NO: 792652 - DNA, 120 bp, Artificial Sequence
  ENSG00000273514_8 (sequence is synthesized)
aggggtcaggggagcgggtacaggggctgcgcagagtttgtccccgaccgcgtggagctactgccacctgctccagcgaccatcaagcctgttgcatccccagaccgctgcccctttgct

SEQ ID NO: 792653 - DNA, 120 bp, Artificial Sequence
  ENSG00000273514_9 (sequence is synthesized)
gcaagtgtccgccgccgccgctgctcggacaattttgcagcaatagcagcagcatcaggaggaggactgcgccaacggctgcgctcccaccaagggcgcggtgctgggcgggcacctgtc

SEQ ID NO: 792654 - DNA, 120 bp, Artificial Sequence
  ENSG00000273514_10 (sequence is synthesized)
ggcctcgtcggccctgctgaggtatcaggcagtggcagagggctctaggctgacatcgctggctgcccctttgggcggagaggggacctcaccagtttttttagtatcgcccacgcccag

SEQ ID NO: 792655 - DNA, 120 bp, Artificial Sequence
  ENSG00000273514_11 (sequence is synthesized)
ttccctggccaactccgcagggccctcctagagccaggtgggagtggggagcgacccgcagctgctcacttcaccttgcgcggcccattcagggcgtgtgcatctgaatcccgctggaga

SEQ ID NO: 792656 - DNA, 120 bp, Artificial Sequence
  ENSG00000273514_12 (sequence is synthesized)
gcaaacacgaacttctgttcgctgcaaaatggttagaaagaaacagctggattacgttcctctaaaaaccacctgaacgtaaccttcgcagggcgtcaagtcatcttttcttgccttcgg

SEQ ID NO: 792657 - DNA, 120 bp, Artificial Sequence
  ENSG00000273514_13 (sequence is synthesized)
ttgtggcttctatggctgtcccgatttgcgcatttcctggggtactatgaacgtgagtggggtattttgttctggcattaaaagaaaaacaagcaagcaaacaaaaacacagcctccgat

SEQ ID NO: 792658 - DNA, 120 bp, Artificial Sequence
  ENSG00000273514_14 (sequence is synthesized)
gccaaacatgttcccccttcttcacttccttggagctggaagtattattcctaagtctagtgcaaaatgcttctactctctgtgtcttcctgatagggatgtttaatgtaagtaggatat

SEQ ID NO: 792659 - DNA, 120 bp, Artificial Sequence; identical to SEQ ID NO: 565826
  ENSG00000273514_15 (sequence is synthesized)

SEQ ID NO: 792660 - DNA, 120 bp, Artificial Sequence; identical to SEQ ID NO: 787664
  ENSG00000273520_0 (sequence is synthesized)

SEQ ID NO: 792661 - DNA, 79 bp, Artificial Sequence; identical to SEQ ID NO: 787665
  ENSG00000273520_1 (sequence is synthesized)

SEQ ID NO: 792662 - DNA, 71 bp, Artificial Sequence; identical to SEQ ID NO: 787666
  ENSG00000273520_2 (sequence is synthesized)

SEQ ID NO: 792663 - DNA, 120 bp, Artificial Sequence; identical to SEQ ID NO: 787667
  ENSG00000273520_3 (sequence is synthesized)

SEQ ID NO: 792664 - DNA, 85 bp, Artificial Sequence; identical to SEQ ID NO: 787668
  ENSG00000273520_4 (sequence is synthesized)

SEQ ID NO: 792665 - DNA, 120 bp, Artificial Sequence; identical to SEQ ID NO: 787669
  ENSG00000273520_5 (sequence is synthesized)

SEQ ID NO: 792666 - DNA, 120 bp, Artificial Sequence; identical to SEQ ID NO: 787670
  ENSG00000273520_6 (sequence is synthesized)

SEQ ID NO: 792667 - DNA, 78 bp, Artificial Sequence; identical to SEQ ID NO: 787671
  ENSG00000273520_7 (sequence is synthesized)

SEQ ID NO: 792668 - DNA, 120 bp, Artificial Sequence; identical to SEQ ID NO: 787672
  ENSG00000273520_8 (sequence is synthesized)

SEQ ID NO: 792669 - DNA, 120 bp, Artificial Sequence; identical to SEQ ID NO: 787673
  ENSG00000273520_9 (sequence is synthesized)

SEQ ID NO: 792670 - DNA, 120 bp, Artificial Sequence
  ENSG00000273540_0 (sequence is synthesized)
atggccgaacaagaagctagtgggctacaggtcctgctgcacacgcttcagagctcctctgacaaggagtccatcctgaccatcctcaaggtcctcggagatctgctttctgttggcaca

SEQ ID NO: 792671 - DNA, 120 bp, Artificial Sequence
  ENSG00000273540_1 (sequence is synthesized)
gaccggagaattcactacatgatcagcaagggtggcagtgaagctcttctgcagaccctggtagacacagcgaggacagctcctccagactatgacatcctcctgcctctcttccggctg

SEQ ID NO: 792672 - DNA, 120 bp, Artificial Sequence
  ENSG00000273540_2 (sequence is synthesized)
ctggccaaagttggcctaagagataaaaagattggacggaaggccctagaattggaagcacttgatgtgacattgattctggccaggaagaacctatcccatggccagaatctcctccac

SEQ ID NO: 792673 - DNA, 120 bp, Artificial Sequence
  ENSG00000273540_3 (sequence is synthesized)
tgtctctgggctctgcgtgtgtttgcctccagtgtctccatgggagccatgctgggaattaatggagccatggaactgcttttcaaggttattactccttacacccgaaagcgcacccaa

SEQ ID NO: 792674 - DNA, 120 bp, Artificial Sequence
  ENSG00000273540_4 (sequence is synthesized)
gcaatcagggcagccactgaagttttggcagcattgctgaaatccaagtcgaacggccgcagagcagtgaaccgaggctacgtcaccagcctgctcgggctgcaccaggactggcacagc

SEQ ID NO: 792675 - DNA, 120 bp, Artificial Sequence
  ENSG00000273540_5 (sequence is synthesized)
catgacacagccaacgcctacgtgcagatccgacggggcttgctgctctgcctcaggcacattgctgccctccggtccggcagggaggccttcctggcagcacagggcatggagatcctc

SEQ ID NO: 792676 - DNA, 120 bp, Artificial Sequence
  ENSG00000273540_6 (sequence is synthesized)
ttcagcaccacacagaactgcctggatgacaagagcatggagcccgtcatctctgtggtgcttcagatcctgaggcagtgctaccctacgagtccacttcccttggtcacagccagcagt

SEQ ID NO: 792677 - DNA, 120 bp, Artificial Sequence
  ENSG00000273540_7 (sequence is synthesized)
gcctatgccttcccggtccccgggtgcatcaccactgaacctccacatgatctacctgaagaggattttgaagatgatggcgatgatgaagtggacaaagactctgatactgaagatggg

SEQ ID NO: 792678 - DNA, 120 bp, Artificial Sequence
  ENSG00000273540_8 (sequence is synthesized)
aaagtggaagatgatgacttggaaacagacgtgaacaagctgagttccaaacctggtcttgaccgacctgaagaggaactgatgcaatatgaggtgatgtgtcttgagctctcctatagc

SEQ ID NO: 792679 - DNA, 120 bp, Artificial Sequence
  ENSG00000273540_9 (sequence is synthesized)
tttgaggaactgcagtccaaacttggagatgatttgaactctgaaaagactcagtatgccaatcaccaccacattccagccgctgcctcctcaaaacagcattgctacagcaaggaccaa

SEQ ID NO: 792680 - DNA, 120 bp, Artificial Sequence
  ENSG00000273540_10 (sequence is synthesized)
agctcctgtgggcaagaaagagaatatgctgtccagacttcccttctgtgcagggtgaagacgggaaggtccactgtgcatctaggctccaaaaaaaatcctggagtgaacctgtaccaa

SEQ ID NO: 792681 - DNA, 120 bp, Artificial Sequence
  ENSG00000273540_11 (sequence is synthesized)
aatgtgcaatccaatagtctcaggagagattcttctgaaagtgaaatccctgacattcaggcttccccgaaagcagatgcctgggacgtagatgcaattttctgcccaaggatgagtgcc

SEQ ID NO: 792682 - DNA, 120 bp, Artificial Sequence
  ENSG00000273540_12 (sequence is synthesized)
tccttttctaattccactaggactagagaagttgtcaaagtaatagataagcttctgcagacacatctgaagcgtgtccctttccacgatccctatctttatatggccaaagccagaaga

SEQ ID NO: 792683 - DNA, 120 bp, Artificial Sequence
  ENSG00000273540_13 (sequence is synthesized)
accagctctgtggtggacttcaagatgatggcatttcctgatgtctggggacactgtccccctcccaccacccagcctatgttggaacgaaaatgtggagtccaaaggatcaggatattt

SEQ ID NO: 792684 - DNA, 120 bp, Artificial Sequence
  ENSG00000273540_14 (sequence is synthesized)
gcctttgcaagacaatgcttccaattgtttacggttcttctccaaatttgagtcaggaaatcttcgcaaagccatccaagtgcgtgagttcgagtatgacttgctggtcaacgcagatgt

SEQ ID NO: 792685 - DNA, 120 bp, Artificial Sequence
  ENSG00000273540_15 (sequence is synthesized)
gaatagcacccagcaccagcagtggttctatttcaaagtgagcggtatgcaggcggccatcccttaccacttcaacatcatcaactgtgagaagcccaacagccagtttaattatgggat

SEQ ID NO: 792686 - DNA, 120 bp, Artificial Sequence
  ENSG00000273540_16 (sequence is synthesized)
gcagcccaccctatattctgtgaaggaggctcttcttggcaaacccacctggataaggacaggccatgaaatatgttattacaaaaatcattatcgccagagtacagctgttgcaggcgg

SEQ ID NO: 792687 - DNA, 120 bp, Artificial Sequence
  ENSG00000273540_17 (sequence is synthesized)
agcatctgggaagtgctactataccctcacctttgctgtcaccttcccacacagtgaggatgtctgctacctggcctaccactatccctatacctacacagccctcatgactcatcttga

SEQ ID NO: 792688 - DNA, 120 bp, Artificial Sequence
  ENSG00000273540_18 (sequence is synthesized)
catcctggaaaagagtgtcaacctcaaagaggtctacttccggcaagatgttctctgccagacgctgggagggaatccgtgtcccttggtgaccatcacggccatgcctgagtccaacag

SEQ ID NO: 792689 - DNA, 120 bp, Artificial Sequence
  ENSG00000273540_19 (sequence is synthesized)
tgatgagcatctagagcagttccgacatcgtccatatcaggtgatcactgctcgagttcatccaggagagagcaatgccagttgggtgatgaagggtaccttggagttcctggtcagcag

SEQ ID NO: 792690 - DNA, 120 bp, Artificial Sequence
  ENSG00000273540_20 (sequence is synthesized)
tgaccctgtggctaggctcttgagggaaaacttcatcttcaagatcatacccatgctcaacccagatggtgtcatcaacggcaaccacagatgctcactgagcggggaagatttgaacag

SEQ ID NO: 792691 - DNA, 120 bp, Artificial Sequence
  ENSG00000273540_21 (sequence is synthesized)
acaatggctttctcccagtgctcatctgcagccaaccatttaccatgccaaaggcctcctctaccacctgagcagcattggccgaagtcccgtggttttctgtgacttccatggccactc

SEQ ID NO: 792692 - DNA, 120 bp, Artificial Sequence
  ENSG00000273540_22 (sequence is synthesized)
ccaaaagaagaatgtgttcctttatggctgtagcatcaaggaaaccttgtggcaagcagcatgcactgtgggcacatctactatcctagaggaggtcaactacaggactcttcccaaaat

SEQ ID NO: 792693 - DNA, 120 bp, Artificial Sequence
  ENSG00000273540_23 (sequence is synthesized)
ccttgataagctagcaccagcattcacaatgagcagctgcagctttctcgtggagaaatctcgagcttccacggcccgggtggtggtgtggagagagatgggggtgtccagaagctacac

SEQ ID NO: 792694 - DNA, 120 bp, Artificial Sequence
  ENSG00000273540_24 (sequence is synthesized)
catggaaagcagctactgtggctgcaaccagggcccttatcagtgtacacagaggctgttggagaggacaaagaatgaaagggctcacccagtggatggccttcagggtctacagtttgg

SEQ ID NO: 792695 - DNA, 120 bp, Artificial Sequence
  ENSG00000273540_25 (sequence is synthesized)
taccagagaactggaggagatgggagccatgttctgtttgggcctcctcatcctggagctcaaatctgccagctgcagccatcagctcctggctcaagctgcaactctgctgagtgctga

SEQ ID NO: 792696 - DNA, 120 bp, Artificial Sequence
  ENSG00000273540_26 (sequence is synthesized)
ggaggacgctctggaccagcacctccaacgattaaaatcatccaatttcctgccaaagcatatttggtttgcttaccacttttttgccattacaaactttttcaagatgaaccttcttct

SEQ ID NO: 792697 - DNA, 120 bp, Artificial Sequence
  ENSG00000273540_27 (sequence is synthesized)
gcatgtctccccagtttgtgacacttgatgaggctcccttcaaatgagcaagtattgaagttcatgccatgtgcccagctcctcctggatctgtgaggaaatatctgaaaccttcaagat

SEQ ID NO: 792698 - DNA, 120 bp, Artificial Sequence
  ENSG00000273540_28 (sequence is synthesized)
gttgtacatgtcttatggaaaatgttgctccatcatccctgcactcccttatctagtatatctacctccataagaaaacataaggacaggcaatcttcataaaaatagactccacctatt

SEQ ID NO: 792699 - DNA, 120 bp, Artificial Sequence
  ENSG00000273540_29 (sequence is synthesized)
ataacaaattcttcactggatgggccagtgctataatttggaggcaagaaaaccatgtcctaagattctgaagaagcacatacatatcatgtcttgatgcttctcagggtggatttcctg

SEQ ID NO: 792700 - DNA, 120 bp, Artificial Sequence
  ENSG00000273540_30 (sequence is synthesized)
gcatctagagcagttccgtgagtaaaatgggatcctcttcgtagaagatttgactaagggtgtcctttatagtcttggaagcattctgtctcttttagatcaaaagctccataaagggtt

SEQ ID NO: 792701 - DNA, 120 bp, Artificial Sequence
  ENSG00000273540_31 (sequence is synthesized)
gacaacagctcagaccaggaagggagcttgtctgagctggaccggaggatccaggagtgtgccttcaataagtttgagggagaggaagaagaggaggcaccagggcagggaggagaagcc

SEQ ID NO: 792702 - DNA, 120 bp, Artificial Sequence
  ENSG00000273540_32 (sequence is synthesized)
atcccatagccccgaggttcacagcaagttctgtgtctccaaccattggattggactagcagctgtgttgctgcttcttcatcatcagacacacacaatgtatatgtcagtgcaaaaagc

SEQ ID NO: 792703 - DNA, 120 bp, Artificial Sequence
  ENSG00000273540_33 (sequence is synthesized)
cagcctgtgtgagctcagcaaccccatttccagattttgttctagtttccctatgcgtagaagctagccactttataacattttatattagagttaggtagcccttggggcctatgcaag

SEQ ID NO: 792704 - DNA, 120 bp, Artificial Sequence
  ENSG00000273540_34 (sequence is synthesized)
ctgctattgtacttagaatgggacccaatgggtagcctcaagattaccatggatcctttcaagatttttctgagttattctccattcttgtgcttgaactggagcaagctggaagtagag

SEQ ID NO: 792705 - DNA, 120 bp, Artificial Sequence
  ENSG00000273540_35 (sequence is synthesized)
gagttgggcttcttcttggcttctcagccagaattctaagtggttatttaagttgttccatatacaagtgttatcttccaatgttatctccccaccatagcatttgagcaccccagaaca

SEQ ID NO: 792706 - DNA, 120 bp, Artificial Sequence
  ENSG00000273540_36 (sequence is synthesized)
aaccactgagactctggggatcctggcagggtcttcaggtgctggggcttgaacatgaaaaactgtgcatccaagtaattgcaggtttcatctgtgatcttctcaagcagcatatatttt

SEQ ID NO: 792707 - DNA, 120 bp, Artificial Sequence
  ENSG00000273540_37 (sequence is synthesized)
acatatgtggtacaggccagaagctgcactagactcttagaaataagacattgtcactgatcttcacagattttaagatcctatgtattcagatcaccaaacataatgctaggaagtacc

SEQ ID NO: 792708 - DNA, 120 bp, Artificial Sequence
  ENSG00000273540_38 (sequence is synthesized)
agacctactggaaaatttattcatttcagaatctgacagatatggttcatatgctagatctggcagttgcttgttatgacaatttaggcaagtaattaaattttcctaaacttcagtttt

SEQ ID NO: 792709 - DNA, 120 bp, Artificial Sequence
  ENSG00000273540_39 (sequence is synthesized)
cttatatataaaatgtggataagtatatctatatcataaaattattgtaggatgaaatgagatgatatataaaagtgtatagcttagcatttggtacacaacaacattggcttatttttc

SEQ ID NO: 792710 - DNA, 120 bp, Artificial Sequence
  ENSG00000273540_40 (sequence is synthesized)
tagcatttggtacacaacaacattggcttatttttcttcataacacaaaagaacattctatataagaattctgacagttaagaaaaaattctcaccagcctggacaacatgatgaaaccc

SEQ ID NO: 792711 - DNA, 120 bp, Artificial Sequence
  ENSG00000273540_41 (sequence is synthesized)
actctgtctcaaacaacaacaacaacaacgacgacaaacccagaatccagaattctctggagtcacatggtaggaaataggccctcttactggaagggagctgggaaggagattacagag

SEQ ID NO: 792712 - DNA, 120 bp, Artificial Sequence
  ENSG00000273540_42 (sequence is synthesized)
gagattacagaggagcagaatctaggaggctggaatcacttaaaacaggtgaaaatggagcaaggccttttagcattcggaaggaagaggcttagttatttgaataatgaagtgtacgag

SEQ ID NO: 792713 - DNA, 120 bp, Artificial Sequence
  ENSG00000273540_43 (sequence is synthesized)
acctgcgaagaaaggatgagaagggacgacaaaggcagtggtagagtgagagatagaatacgctaggtcaaacttaggctgttttagatgtcatgtgtattagttaggattaggtttagc

SEQ ID NO: 792714 - DNA, 120 bp, Artificial Sequence
  ENSG00000273540_44 (sequence is synthesized)
tgcaagagatggacaacttatcatagtagtagctttcataaggcataagtctatttctctttcctgtggaattttacacactggaagaccagtcctagtgtcatggctgcatggtgtcag

SEQ ID NO: 792715 - DNA, 120 bp, Artificial Sequence
  ENSG00000273540_45 (sequence is synthesized)
agacctggcttctgcagttttctggctctactgtgtgtgcttctactcttggtctagaatggctgctgaagcatcagtcactgcatctgcatcccaggcagtagcaagaagaacacaaaa

SEQ ID NO: 792716 - DNA, 120 bp, Artificial Sequence
  ENSG00000273540_46 (sequence is synthesized)
agaaatgcctgttttctatctttccaaaagctctacataatatttcttcttaatcccaccggctgaaaaaaatgggcctatagccacaggaagctgcaagagaggttagaaaacatagtc

SEQ ID NO: 792717 - DNA, 120 bp, Artificial Sequence
  ENSG00000273540_47 (sequence is synthesized)
tttatttgaggtgggcccagctaaaatttgaagtttgaagtaaaagtctgaatactaagggaaaagataataatacatattgggagattacatatctgccaaaagacttctcctgatgtt

SEQ ID NO: 792718 - DNA, 120 bp, Artificial Sequence
  ENSG00000273540_48 (sequence is synthesized)
ccaaacaccaccaagggagttttggatatatcagaataatctcagatgacactcatagcacacacctcttgaccagcagaaagccacagaacaaaacaggattagctccaaggcatagaa

SEQ ID NO: 792719 - DNA, 120 bp, Artificial Sequence
  ENSG00000273540_49 (sequence is synthesized)
gaaaggcatctgtgttgtgattttgggagttgataacattattaatagtctcttatttttttaactcttttccaagtttccattttgtagttcagaaattgtatatccattcttcatatt

SEQ ID NO: 792720 - DNA, 120 bp, Artificial Sequence
  ENSG00000273540_50 (sequence is synthesized)
aagacatgtatgtttatgtaacatatgcaagaaatttgaagactattagcaaagataatgaaagtgaaacccaaacgctatatagctcttaactcctcccatatttaatctttccactct

SEQ ID NO: 792721 - DNA, 120 bp, Artificial Sequence
  ENSG00000273540_51 (sequence is synthesized)
taaataaaggctagcataatggtgctgatttctctttgctttgaggattcaagaagataatattgaaatgtaattgctgagagaggtgggaatgatgctagcttatcattaattattatt

SEQ ID NO: 792722 - DNA, 120 bp, Artificial Sequence
  ENSG00000273540_52 (sequence is synthesized)
tcagcccaaattagttttgggggttagcttctggtcatgaggcatgtttcttaaaaaacgtgaccatgacagataagtttttatgtggcatgttcagaaaaagccaggaacatgaagtat

SEQ ID NO: 792723 - DNA, 120 bp, Artificial Sequence
  ENSG00000273540_53 (sequence is synthesized)
ttgttgatccatctatgtaacaaatgtatatttaacccctaactgtgggtcatgcactttactaagctctacggatgcagataagaaagacctattttgtgccctcagtaaccagacaaa

SEQ ID NO: 792724 - DNA, 120 bp, Artificial Sequence
  ENSG00000273540_54 (sequence is synthesized)
gaagaacaataaacattctaagttaatgcagtatggcccatgccattatggaactctgcaaagaatattacaaaaacgcctaatctaatgggggtggcagttgtggtaaaagtctaccaa

SEQ ID NO: 792725 - DNA, 120 bp, Artificial Sequence
  ENSG00000273540_55 (sequence is synthesized)
aagaaggtcataatttgggtgattcttgaagaatatgcaggagttttcaagtataaagggagaaaagacatgcgaaggagtggaaagattttgtgcaaaggccctgtggtagagttagag

SEQ ID NO: 792726 - DNA, 120 bp, Artificial Sequence
  ENSG00000273540_56 (sequence is synthesized)
cttgaaataaaatgttcagtgtgactggtttaaaagatgtgtttgtatgtgaggaaaggaggagagtgacaagagatgaaatggaaaaactagacagcagtcagataaagctgcatttgg

SEQ ID NO: 792727 - DNA, 120 bp, Artificial Sequence
  ENSG00000273540_57 (sequence is synthesized)
cattccttgatgaaaaggctgaatttaattctgaatgtaatgggggagacttaaagagctttcagcagaggcatgcccgtgactgatatcagcgccatttttcccttgtttatggctgag

SEQ ID NO: 792728 - DNA, 120 bp, Artificial Sequence
  ENSG00000273540_58 (sequence is synthesized)
ggtttggtgctcctgctatgctggttgttcagtagtttgaggagtgccccaggtgtgatactactatatttgaagagcagaacgtttgcattcaggtcaaagataataagtgcagtttgg

SEQ ID NO: 792729 - DNA, 120 bp, Artificial Sequence
  ENSG00000273540_59 (sequence is synthesized)
ggacatgttaaatgttggtggcctacatgatagcccgttcgaaaggtttcctagaaatcagaggtacctcaggaagcagaaggagaacaaagagaggtgtacctaacacttggtgatttt

SEQ ID NO: 792730 - DNA, 120 bp, Artificial Sequence
  ENSG00000273540_60 (sequence is synthesized)
ggggacacaggtgaatgtcctgagcacctaagcccaggtgtcagtgagttgggaaggcaattgattggagggaagaggggacttgggagcagacctctctcctttcctgctaggactgaa

SEQ ID NO: 792731 - DNA, 120 bp, Artificial Sequence
  ENSG00000273540_61 (sequence is synthesized)
ggctatcttgtgtcaaatctcaccagtcttccatccagagttagagggtacttacttgagagttaactctcaatagttataagagccattcttccagtcaagccaggactttctcttgct

SEQ ID NO: 792732 - DNA, 120 bp, Artificial Sequence
  ENSG00000273540_62 (sequence is synthesized)
ggccagaccacttcagtgaattgttgggataaaacgtgttctaccaaattcaaagccaaactaagatgacccaagaattccaaggagttgtaggccataatgggaagcaaatgtggtcca

SEQ ID NO: 792733 - DNA, 120 bp, Artificial Sequence
  ENSG00000273540_63 (sequence is synthesized)
aaatgtgcagaggagagaggagagtccagagaggcgatgttggggcaggccaagtgcatgctgtcctgtaccaactgtcatccggtgctctgcatgcaggactggaactggggctgaggg

SEQ ID NO: 792734 - DNA, 120 bp, Artificial Sequence
  ENSG00000273540_64 (sequence is synthesized)
gcccaagacttgccacccacgagccctcaagggtggaaactactgaccccttcgtaacacttccctctggcaagaggctttgtggcttcacatttccttcagaaggaagtctaaatgtct

SEQ ID NO: 792735 - DNA, 120 bp, Artificial Sequence
  ENSG00000273540_65 (sequence is synthesized)
caacagatccctttatagcctggccccaatctccttgacagcctcaggttctgacattctttgttctctttgatttgccacagaacataccctctttctctctcatcgcacttatgcttg

SEQ ID NO: 792736 - DNA, 120 bp, Artificial Sequence
  ENSG00000273540_66 (sequence is synthesized)
tgagtgtctacacacatatgcacatgcacagtgcaataggggcatggaagggcacttcttaagccacacagctccctaaatgtactttttgatttttctaacattttcacatttttcctc

SEQ ID NO: 792737 - DNA, 120 bp, Artificial Sequence
  ENSG00000273540_67 (sequence is synthesized)
tgcctctgataagaatctcccattctctcatttgggaatatcaaaactcagttcaaatatcacctttcttctataaaacttgtcctcatcacccaatgccaagttatatataatctctct

SEQ ID NO: 792738 - DNA, 120 bp, Artificial Sequence
  ENSG00000273540_68 (sequence is synthesized)
tccatgcccctgttgcactgtttatatatctcttttatactatgcttatttttaacttgataaatatgtcttttatacccacacccccattcaccattgaatagtgagctctaaagtgca

SEQ ID NO: 792739 - DNA, 120 bp, Artificial Sequence
  ENSG00000273540_69 (sequence is synthesized)
caaacctgctattatcttggcatctgtccctatacctatcatacttcttaacacattgcaggtgttcaaaaatgtgtcttcccctcagcttcaaactcagacatccaatgtttcaatgaa

SEQ ID NO: 792740 - DNA, 120 bp, Artificial Sequence
  ENSG00000273540_70 (sequence is synthesized)
atctcacttattttccttaaatccctccgttttccatctcaaagaagagtttgtgttatagacagggaaacacaaagaagagtttgtgttgtagtttcactaaaaggacgtgtagcacaa

SEQ ID NO: 792741 - DNA, 120 bp, Artificial Sequence
  ENSG00000273540_71 (sequence is synthesized)
gtgcagcctggcctctcaagctggtggttgccatggaagagttcccagtgcgaggcgagcttaacaaggggcagggtgtccttttccttacctgtgttgtgcaaatgcttagagtggtga

SEQ ID NO: 792742 - DNA, 120 bp, Artificial Sequence
  ENSG00000273540_72 (sequence is synthesized)
taatggaggggtggcatctccaagggttcccaggagctgccacatttacccaggggctctgcctcctatgctccctttggtgagaactgtctgtgcagctccatggatatcatgccaact

SEQ ID NO: 792743 - DNA, 120 bp, Artificial Sequence
  ENSG00000273540_73 (sequence is synthesized)
tggctgcctgggctctccttgcaatcccatcaataagaatcagcatccaagaattccatacattggcttcagtttccttccagaaagaggattcagagccaccaagaatatttgaaatta

SEQ ID NO: 792744 - DNA, 120 bp, Artificial Sequence
  ENSG00000273540_74 (sequence is synthesized)
acctgctccctgagttacaagctcaccttgagggctgccaacacaaggaaggtcatattacaccctttcatttatcagcctggaaaatggtgccgtagagtcgatttcatatgctaaggg

SEQ ID NO: 792745 - DNA, 120 bp, Artificial Sequence
  ENSG00000273540_75 (sequence is synthesized)
cagcctctgccctatgccaagagaaggagctcccaggaaatgcctgacataagtcatccttgttagggccacagaagaatgactcgcatggtggatctcagcatttggatttgcattaaa

SEQ ID NO: 792746 - DNA, 120 bp, Artificial Sequence
  ENSG00000273540_76 (sequence is synthesized)
atgatggatttgttttgccttgctggtacagctcaccccagctccccaaactctctagtcttggaaagacatgcatagtagcctggtgcccaccaggagggcttttctgggcaaaaataa

SEQ ID NO: 792747 - DNA, 120 bp, Artificial Sequence
  ENSG00000273540_77 (sequence is synthesized)
ttcatcagctctggagcctgctgctgtcttcccaacagatgtcctcttttgtttgtgttgcagtttggttcatgctaccaatgcttgataaaaagtgttctttagaaaagaaaaaataga

SEQ ID NO: 792748 - DNA, 120 bp, Artificial Sequence
  ENSG00000273540_78 (sequence is synthesized)
gtggtaaaagggaattttgagataaaaatggattctattacaacctttcagtgcctaataataaaaagatacaattgcatataacttaaaatcatctattacacacacacaattcaacat

SEQ ID NO: 792749 - DNA, 82 bp, Artificial Sequence
  ENSG00000273540_79 (sequence is synthesized)
agggctttaagcataacaatgagtgagggaaggttgatcctcagacacatgacacatgttcatacaggtgaggggcagctgg

SEQ ID NO: 792750 - DNA, 120 bp, Artificial Sequence
  ENSG00000273540_80 (sequence is synthesized)
agacacatgacacatgttcatacaggtgaggggcagctggttgatgattttaggctctactgtcacacagatgtcaagatgaaggccttttgggcagaagacgggactcatctctcatta

SEQ ID NO: 792751 - DNA, 120 bp, Artificial Sequence
  ENSG00000273540_81 (sequence is synthesized)
gcatgtgacataaactgtacttgaagtgtgtatatattctgggccagttccaatgcaaagtaaaatgggttcagtatcattggtagagaacacagtctatgagagaattaccaaatgagc

SEQ ID NO: 792752 - DNA, 120 bp, Artificial Sequence
  ENSG00000273540_82 (sequence is synthesized)
cacatttagttcttatgacaagtagttaaacagaggagagcactgactgtttacaaggctgaagcaggcaaggcgtggtggctcacaactgtaatcccagaattatgggaggccaagctg

SEQ ID NO: 792753 - DNA, 70 bp, Artificial Sequence
  ENSG00000273540_83 (sequence is synthesized)
agaccctgaatctacaaaaaataaagaaaaaaaatagccaggcgtgatggtgcatgcctgtagtcccagc

SEQ ID NO: 792754 - DNA, 120 bp, Artificial Sequence
  ENSG00000273540_84 (sequence is synthesized)
tgaggcaggaggatcacctgagcctggaagtggaaggttgaggctacggtgagtcgtgatcgcacaactgcactcctgcctaggtggcagagtgagaccctgtactctgtctaaaagtaa

SEQ ID NO: 792755 - DNA, 120 bp, Artificial Sequence
  ENSG00000273540_85 (sequence is synthesized)
gtctaaaagtaaataaaaaggctgaagcaaagatgattctacatggggggatttcaatgatcttttatagtctctaggctcttatggggttaaaatgatttcttggtatcagacaagtat

SEQ ID NO: 792756 - DNA, 120 bp, Artificial Sequence
  ENSG00000273540_86 (sequence is synthesized)
tatgaccagctcctggcaaaataagtaacacttaagcataattatttggagctattcagttaaagtgtctgagtgtagccctggtcttgaagggcagggcaagacatggcattgagttca

SEQ ID NO: 792757 - DNA, 120 bp, Artificial Sequence
  ENSG00000273540_87 (sequence is synthesized)
attgtctctactggctgtgggacgggacaggaagcagagaagccgacaggtctgccatccaaacatccagggtatgggggttaaatgaatgaatgtcctggggtagaagactatcaacca

SEQ ID NO: 792758 - DNA, 120 bp, Artificial Sequence
  ENSG00000273540_88 (sequence is synthesized)
gaccccacccacacttcattctgaagaggaagttattttgggaggtattagaggaggaaaaatctgcctgtgtttctgctctgctcagacaatcacataagtgactcatttcactctcag

SEQ ID NO: 792759 - DNA, 120 bp, Artificial Sequence
  ENSG00000273540_89 (sequence is synthesized)
taccagctctgtgggataaatggacattatgattgccattttaaaaatgaagtgcacccatacttaaagagacacgtttagtaaatgatagagctggaatctgttcccggggaaatctga

SEQ ID NO: 792760 - DNA, 120 bp, Artificial Sequence
  ENSG00000273540_90 (sequence is synthesized)
cttcctaactcatgctccctccacttccccagaggaggtgaatatgaaccataacacagttacagctaacgtggtaattagcaacacttagtatctataatagtctaagaccatcgcagg

SEQ ID NO: 792761 - DNA, 120 bp, Artificial Sequence
  ENSG00000273540_91 (sequence is synthesized)
tgtcatcatgtttaagcctaaaacttcagcccaacgagctaaactctgttgttatgctcactttataaatgagggcattaagaatttaagggctagcctaagatgatacaggtagtaagt

SEQ ID NO: 792762 - DNA, 120 bp, Artificial Sequence
  ENSG00000273540_92 (sequence is synthesized)
agcagatcacaaccttaactcaggcaatcggactcttaaacttgctctccaaggaaaaacatctttcttcaaagacccctaagggccctctgagaggttatggagcaagtctccatttct

SEQ ID NO: 792763 - DNA, 120 bp, Artificial Sequence
  ENSG00000273540_93 (sequence is synthesized)
aggaaagtgtgttgttcttgtagatccttgactcaaatacaagtaactcctactggccatttctgcataacttcctgctccttttcaaactcaacaggttcaaagtcaaaatctcctccc

SEQ ID NO: 792764 - DNA, 120 bp, Artificial Sequence
  ENSG00000273540_94 (sequence is synthesized)
aacaaaatctctacctccaaattcctaaacttgattatgccgatagtaaaccggcgttgtttgatttatttgtgtgccagatgcagagctcactgtctggccgaggcaggtactcagatc

SEQ ID NO: 792765 - DNA, 120 bp, Artificial Sequence
  ENSG00000273540_95 (sequence is synthesized)
ttcactaaatagatgaatctgcaatgttgttgagtgtgaatcttagctttggttggagtccaaagctaagaatcagactcggtaacactgttctcacctggacttcaagttttcttacca

SEQ ID NO: 792766 - DNA, 120 bp, Artificial Sequence
  ENSG00000273540_96 (sequence is synthesized)
ctcttctcacctttggttgtgcttcctttccaaccctttcatccctgtgcagcctgatagtattaggaaggaaaaccggcttctactttcgcagtttataatttgtcagtgacctcccat

SEQ ID NO: 792767 - DNA, 120 bp, Artificial Sequence
  ENSG00000273540_97 (sequence is synthesized)
ggtcttaaggataaaatgcagacaggacctagtgcttgagccttttcagatccagccactacgtaattttctggtctcttctcttgacatcagcccctgttaaagtcataaaaacttact

SEQ ID NO: 792768 - DNA, 120 bp, Artificial Sequence
  ENSG00000273540_98 (sequence is synthesized)
ttcaattctcagaaagcaccttactcttctgttccctcttcttccatccatgtgcctagatctatccattatgtgcttaaatgtaggctcctccaagaagtctcccatgatctgattctg

SEQ ID NO: 792769 - DNA, 120 bp, Artificial Sequence
  ENSG00000273540_99 (sequence is synthesized)
agttcctactgtcatcttggagaaacccagtcacagcttttgttgtatggcattgcctgtggactttgctgtcccctcttcacctcccccccaccgccccactgcaccaagactgtaata

SEQ ID NO: 792770 - DNA, 120 bp, Artificial Sequence
  ENSG00000273540_100 (sequence is synthesized)
tcttggagaacaaagacaattttgttcactgctacatcctgagagcctagcatcgtgcccaagatgtggtgggacttccataaatatgtgttgaatggttgagatcttaatttctgttag

SEQ ID NO: 792771 - DNA, 120 bp, Artificial Sequence
  ENSG00000273540_101 (sequence is synthesized)
aacggtctcctgagaatgacctcctacccgttgcctcagtaacctcttacgcatggagagcagagctgcaggaaagcaggacacacgtgagtccagccaactcagagcttcaaggaggcg

SEQ ID NO: 792772 - DNA, 120 bp, Artificial Sequence
  ENSG00000273540_102 (sequence is synthesized)
tccaggagaaacctccctcagccccgtttgcggtgcctcctggtcggtaattttccagaagcaatttcttgtttcctccaaatggcctgtagaggtcagaaaagggccttgttttccaat

SEQ ID NO: 792773 - DNA, 120 bp, Artificial Sequence
  ENSG00000273540_103 (sequence is synthesized)
caccgactgtcctgtctacattagcattcaccccgggtgtctataattaagcaagcctaagctgggcacataggaacggaaatgcattgactttaataaaacagagtgtaaaacaacttt

SEQ ID NO: 792774 - DNA, 120 bp, Artificial Sequence
  ENSG00000273540_104 (sequence is synthesized)
gaattcaaactgtccggcagatgaaatgacagtttgctaatgatggtcacttcctctcttaaaacagaaccaggaccctgaatcatattttccaacttctaatccagggacttttctcac

SEQ ID NO: 792775 - DNA, 120 bp, Artificial Sequence
  ENSG00000273540_105 (sequence is synthesized)
tgtgctcactgctgttatgtgactctcagtcagtcaaggtttggaaagaaagaaagttgagtttttaagccctggctaaagaatccccttgataacctgaataccatttgtgtctgaagg

SEQ ID NO: 792776 - DNA, 120 bp, Artificial Sequence
  ENSG00000273540_106 (sequence is synthesized)
gctgaagatgtggacaggctctagctaagaactttgaaacaaagtcaaagccaaactcatgcacacacacgcagacacacacaaatatacgcatatggacatatagacaaacacatagac

SEQ ID NO: 792777 - DNA, 120 bp, Artificial Sequence
  ENSG00000273540_107 (sequence is synthesized)
acatgtagacacaaacatatacacagacgtgtagacacaaacatatacgcctagacgtgtatacatgtgtagacacaaacatatacacagatgtgtatacacgtatacagacacgtacac

SEQ ID NO: 792778 - DNA, 120 bp, Artificial Sequence
  ENSG00000273540_108 (sequence is synthesized)
acaaacatctttaaatgttgggcttctgtgcctaagtgcatatgtgcgactgacctgttgacctgttacgaactagcttttgaaaatggcttctgacatcatttcagaccttaggtaggc

SEQ ID NO: 792779 - DNA, 120 bp, Artificial Sequence
  ENSG00000273542_0 (sequence is synthesized)
atgtctggccgcggcaaaggcgggaagggtcttggcaaaggcggcgctaagcgccaccgtaaagtactgcgcgacaatatccagggcatcaccaagccggccatccggcgccttgctcgc

SEQ ID NO: 792780 - DNA, 120 bp, Artificial Sequence
  ENSG00000273542_1 (sequence is synthesized)
aacgtgatccgggacgccgtgacctatacagagcacgccaagcgcaagacggtcaccgccatggatgtggtctacgcgctcaagcgccagggccgcaccctctacggtttcggtggttga

SEQ ID NO: 792781 - DNA, 120 bp, Artificial Sequence
  ENSG00000273559_0 (sequence is synthesized)
agagcggtggtgaaactggcagttgacggctcctgggactagatcccgcgaggtagcccccgaactatttctctacgttttctcttgatcctcccgaaatcttccagatccgcgtagtga

SEQ ID NO: 792782 - DNA, 120 bp, Artificial Sequence
  ENSG00000273559_1 (sequence is synthesized)
ggaatcgtctccaccgtcatggggggcggagacctgaatctgaagaagagctggcacccgcagaccctcaggaatgtggagaaagtgtggaaggccgagcagaagcatgaggctgagcgg

SEQ ID NO: 792783 - DNA, 120 bp, Artificial Sequence
  ENSG00000273559_2 (sequence is synthesized)
aagaagattgaggagcttcagcgggagctgcgagaagagagagcccgggaagagatgcagcgctatgcggaggatgttggggccgtcaagaaaaaagaagaaaagttggactggatgtac

SEQ ID NO: 792784 - DNA, 120 bp, Artificial Sequence
  ENSG00000273559_3 (sequence is synthesized)
cagggtcctggtgggatggtgaaccgtgacgagtacctgctggggcgccccattgacaaatatgtttttgagaagatggaggagaaggaggcaggctgctcttctgaaacaggacttctc

SEQ ID NO: 792785 - DNA, 120 bp, Artificial Sequence
  ENSG00000273559_4 (sequence is synthesized)
ccaggctctatctttgccccatcaggtgccaattcccttcttgacatggccagcaagatccgggaggacccactcttcatcatcaggaagaaggaggaggagaaaaaacgagaggtatta

SEQ ID NO: 792786 - DNA, 120 bp, Artificial Sequence
  ENSG00000273559_5 (sequence is synthesized)
aataatccagtgaaaatgaagaaaatcaaagaattgttgcaaatgagtctggaaaaaaaggagaagaagaaaaagaaggagaagaaaaagaagcacaagaaacataagcacagaagctcg

SEQ ID NO: 792787 - DNA, 120 bp, Artificial Sequence
  ENSG00000273559_6 (sequence is synthesized)
agtagtgatcgttccagcagcgaggatgagcacagtgcagggagatcacagaagaagatggcaaattcctcccctgttttgtccaaagtccctggatatggcttacaggtccggaactct

SEQ ID NO: 792788 - DNA, 120 bp, Artificial Sequence
  ENSG00000273559_7 (sequence is synthesized)
gaccgtaaccagggtcttcagggtcctctgacagcagagcaaaagagagggcatgggatgaagaaccattccagatccagaagctcctcccactcacccccaagacatgccagcaagaag

SEQ ID NO: 792789 - DNA, 120 bp, Artificial Sequence
  ENSG00000273559_8 (sequence is synthesized)
agcaccagggaagcagggtcccgggacaggaggtctcgatccctgggcagaaggtcacggtccccaagacccagcaaactgcacaactctaaggtgaacaggagagagacaggccaaact

SEQ ID NO: 792790 - DNA, 120 bp, Artificial Sequence
  ENSG00000273559_9 (sequence is synthesized)
aggagcccatcacctaaaaaagaggtctaccaaaggcgacatgctcccggatacaccagaaaactctctgcagaggaattagagcgaaaacggcaagagatgatggaaaacgccaaatgg

SEQ ID NO: 792791 - DNA, 120 bp, Artificial Sequence
  ENSG00000273559_10 (sequence is synthesized)
agggaggaggagagactgaacatcctcaagaggcatgctaaggatgaggaacgggagcagaggctagagaagctggactcccgggatgggaagttcatccaccgcatgaagctggagagt

SEQ ID NO: 792792 - DNA, 120 bp, Artificial Sequence
  ENSG00000273559_11 (sequence is synthesized)
gcatctacttcctccctggaggatcgggtgaagcggaatatctactctttacagagaacttcggtagctctggagaagaactttatgaaaagatgaaaactgtcccctctcttattggtt

SEQ ID NO: 792793 - DNA, 120 bp, Artificial Sequence
  ENSG00000273559_12 (sequence is synthesized)
cacagatgtcaaaccaccagtgttcaaagtgaccctgcttcattgagtcctgaaacagctcacttcctttgagagctagtgtgacttgctttgtgggacactcagtaactttgggttttg

SEQ ID NO: 792794 - DNA, 120 bp, Artificial Sequence
  ENSG00000273559_13 (sequence is synthesized)
actctttaacgggtgggcactggaccatctcggtgggagtgcttgtgccactctggaaggctgttccctggggttgtgatgtttatcatgccacttccttcttacctgtgccaacagacc

SEQ ID NO: 792795 - DNA, 120 bp, Artificial Sequence
  ENSG00000273559_14 (sequence is synthesized)
tatttcactgcctcagcgtacaccagacccttcagaaacctctctggtgtcacccagatagattgtgcttactgagacaaatgaacgtttacttgatttagaagataatgtgacagaatg

SEQ ID NO: 792796 - DNA, 120 bp, Artificial Sequence
  ENSG00000273559_15 (sequence is synthesized)
atgtcaggttaggtcaaagccaagggagtgacagaatctggaaaatcaaacaatacaaaaagccctaaatgaactgttaactatttgatctttggatgtaaaattgtaatgcgtatatgt

SEQ ID NO: 792797 - DNA, 120 bp, Artificial Sequence
  ENSG00000273559_16 (sequence is synthesized)
acaaatgtacaatttttacatgcttttaaaaaaggttagctttgtgaaaataccttgtttggtcaatgactttactgggtaatagaaccacattgaaccttgatggcaagtaatacaata

SEQ ID NO: 792798 - DNA, 120 bp, Artificial Sequence
  ENSG00000273559_17 (sequence is synthesized)
aggcaggccagctcgtttttctctctgaatctggctggtttaggaggagcctgggtttatcgacgagatctggagtatctattcttttccactgcttgcagtctccaatgtaggcagtgt

SEQ ID NO: 792799 - DNA, 120 bp, Artificial Sequence
  ENSG00000273559_18 (sequence is synthesized)
aaaggtatagtaaaatgattttaggagtcagaaccaaattgccaatatgctccatggctcctaaaggaaaataaaatggaagtttttattttgcggcttcacttcttaccgtgtagtaac

SEQ ID NO: 792800 - DNA, 120 bp, Artificial Sequence
  ENSG00000273559_19 (sequence is synthesized)
acttcttaccgtgtagtaaccttactacaattacagattttcaggagttgtttgctagtctctttcagtcaggtactaaaaaaaaaacaaaaaacaggctgggcgcggtggctcacacct

SEQ ID NO: 792801 - DNA, 120 bp, Artificial Sequence
  ENSG00000273559_20 (sequence is synthesized)
aaaaacaacagcaacaaaacaaaaccctcgaggggccactctcctgtctttactccttttcccttctctattctttcaccagaagccctcatttgaccagtgaactcctaggccctcttg

SEQ ID NO: 792802 - DNA, 120 bp, Artificial Sequence
  ENSG00000273559_21 (sequence is synthesized)
acccgcacattagctgggcgatttccttgttctgctaattcctaattctgcttaaaatgtatttggatttctgtttttgaacacttatgatgccaggcactgtaatgcttgaaacccgat

SEQ ID NO: 792803 - DNA, 120 bp, Artificial Sequence
  ENSG00000273559_22 (sequence is synthesized)
ctttccctagagaatgtaacatacgtttttattcatttaatcacttcattatgccggggttaattatgtttattttataattggtaataaaggccacatttatttttgtaactgtttaaa

SEQ ID NO: 792804 - DNA, 120 bp, Artificial Sequence
  ENSG00000273559_23 (sequence is synthesized)
gcggtgagatgacgccctcccggaagtgacctctagagcggtggtgaaactggcagttgacggctcctgggactagatcccgcgagaatctgaagaagagctggcacccgcagaccctca

SEQ ID NO: 792805 - DNA, 120 bp, Artificial Sequence
  ENSG00000273559_24 (sequence is synthesized)
acacctgccctgtgctggaagctgccaggtactgggcattcagtgatgaacacttgaacatgggcccagtgcccacagagcttgccatctaatgctagagttccttggagatgctaaata

SEQ ID NO: 792806 - DNA, 120 bp, Artificial Sequence
  ENSG00000273559_25 (sequence is synthesized)
aataacctgtgactgtgggggcctggtcccagcaggcatttgtttttgcttttggtgatgtccgtccattgactttcccaaatgtctttgctttggtatttcctttacatcatttttttt

SEQ ID NO: 792807 - DNA, 120 bp, Artificial Sequence
  ENSG00000273559_26 (sequence is synthesized)
ttccacctcaatgtaaagctcaggcatccaaagccacatatctgtaggtgtattctgtgctttgggagctctggggtgagtctaacatcaaaccctatacctttgtttttctcacactta

SEQ ID NO: 792808 - DNA, 120 bp, Artificial Sequence
  ENSG00000273559_27 (sequence is synthesized)
ttggaaatgaaagcataatataaagactctgtaaaggagactcgagaagctctgagccaagatccacaccccatgttgaggaacactggttttccttataaattgctttatgaaaaaaga

SEQ ID NO: 792809 - DNA, 120 bp, Artificial Sequence
  ENSG00000273590_0 (sequence is synthesized)
ggcaggacggtagaagtcgtggtttgtgcgcggccaggcgctggagcctccgctgccgggagcaatcagaccttccagctgcctctcatgtacttgtctgttgggggcttgtgttgatca

SEQ ID NO: 792810 - DNA, 120 bp, Artificial Sequence
  ENSG00000273590_1 (sequence is synthesized)
ggagtgaattcacagtctaccatgaattggaaggttcttgagcacgtgcccctgctgctgtatatcttggcagcaaaaacattaattctctgcctgacatttgctggggtgaaaatgtat

SEQ ID NO: 792811 - DNA, 120 bp, Artificial Sequence
  ENSG00000273590_2 (sequence is synthesized)
caaagaaaaaggttggaggcaaaacaacaaaaactggaggctgaaaggaagaagcaatcagagaaaaaagataactgaagattctgccatgtaaatgtcagcttgagtggactccagctg

SEQ ID NO: 792812 - DNA, 120 bp, Artificial Sequence
  ENSG00000273590_3 (sequence is synthesized)
agaaagagaagaaagacttaattattgaataatttgtcagaggataaactcccaacctagacctttcacttaaaatagtgtgaatttgtatatgtttttaaaagaaccagtactggccgg

SEQ ID NO: 792813 - DNA, 78 bp, Artificial Sequence
  ENSG00000273590_4 (sequence is synthesized)
tgaatttgtatatgtttttaaaagaaccagtactggccgggtatgctggcttttgcctgagatcgggagtttgagacc

SEQ ID NO: 792814 - DNA, 120 bp, Artificial Sequence
  ENSG00000273590_5 (sequence is synthesized)
ccctccagcctgggtgacagagcgactgcgtctccaaaaaaaaaaaggtaaaattaaaattaaaaaaaataataataaccagtattttgtttactaaaataaaatgcctttgtaaaaaaa

SEQ ID NO: 792815 - DNA, 120 bp, Artificial Sequence
  ENSG00000273590_6 (sequence is synthesized)
cggatggagtttcccctctgcggctgcctctcactcatcctccaccactttgccgacaaggaaggaaggacaatcgggaggagggagtcttgcttggcgaccatctggacaatatctcgc

SEQ ID NO: 792816 - DNA, 120 bp, Artificial Sequence
  ENSG00000273590_7 (sequence is synthesized)
ctctactgttgaatggaggaggattttttttttttttccctcacacaggggttttcttggagctcaagtttggatgaccccagacagtaagataatctcatcatggtaaagttaatatga

SEQ ID NO: 792817 - DNA, 120 bp, Artificial Sequence
  ENSG00000273590_8 (sequence is synthesized)
aatatgtggtctccaaacagcctctcccagaggccaggatcagcaggtttgagtggataattggcttgtggtcattttctcataggatttttcttttagtagtggaaactgtttttcaaa

SEQ ID NO: 792818 - DNA, 120 bp, Artificial Sequence
  ENSG00000273590_9 (sequence is synthesized)
tcaaatttggatgccaactatgtggaacagaagtgtggctgctctggtggaagtggcaatggtagtcctagagtctccctgtcagccacaccctttgtctccccctacccaagggaccct

SEQ ID NO: 792819 - DNA, 120 bp, Artificial Sequence
  ENSG00000273590_10 (sequence is synthesized)
gtggcctggaaccgcagtgtgaaatgctatatagtgcaatgaagtcaattcgaagacaagagttctttgcctttctcatctaatttttagttatggatatgagacgcttgttcagaagta

SEQ ID NO: 792820 - DNA, 120 bp, Artificial Sequence
  ENSG00000273590_11 (sequence is synthesized)
tggaaaagtatatataatatgttatcttttagatgtgggtgtaaatatgcttatgtatgcaatatgcttatattttaacgcataaacaacatgaataaagcaaacactctagacttctcc

SEQ ID NO: 792821 - DNA, 120 bp, Artificial Sequence
  ENSG00000273590_12 (sequence is synthesized)
ttcccctccccgctgcccactccagcagaggctgccaactgcctgggagagagaagtgggcttcctggggccacctccccaactttggagtgtttggaaggtgatggagcgaccactagg

SEQ ID NO: 792822 - DNA, 120 bp, Artificial Sequence
  ENSG00000273590_13 (sequence is synthesized)
aggcagtgtggacaggtctctgtaggactgctcaggcagacacctttgcagggacctcccaggtcgggagccctccacacttttcccatgggagcttctccctccaccccgagtcactac

SEQ ID NO: 792823 - DNA, 120 bp, Artificial Sequence
  ENSG00000273590_14 (sequence is synthesized)
tatctgctttcctagaaggcacttctttacttctaattcttctccactgcccagctcctggtttgttaaggcaaacccccatctctggcttctcctggaacctcacctgggaaagaaaga

SEQ ID NO: 792824 - DNA, 120 bp, Artificial Sequence
  ENSG00000273590_15 (sequence is synthesized)
ggcagccccggagctggaagctgcttcagggctcacccggaacagcagactcaacctggacccatccaggcatctcctgggagtttcacccaattgcttctgcctggcaccagctcagag

SEQ ID NO: 792825 - DNA, 120 bp, Artificial Sequence
  ENSG00000273590_16 (sequence is synthesized)
gtaagtgtgtgacgtcggggtagaagggagtgacccaaattccaaaagctctttgggatgctgcgatgtcgcggccggccccgcgctcgggttttccctcctagacaaaagtctgccggc

SEQ ID NO: 792826 - DNA, 120 bp, Artificial Sequence
  ENSG00000273590_17 (sequence is synthesized)
tcccggtcgcgccgggtcggggatccggaaggtgaaggccgccaggccccacctgcggggcgcccctgctggacctggccgtcgggcgccgtcaacccgttgagcagcgtgttccggctg

SEQ ID NO: 792827 - DNA, 120 bp, Artificial Sequence
  ENSG00000273590_18 (sequence is synthesized)
gcacgtggcccgggcggggcccaggattggttcaagcctacggtgttggtccccggagagtctagggagacaagcaatcccctggaatggtgggggaagcgatgacagcccctggtcctc

SEQ ID NO: 792828 - DNA, 120 bp, Artificial Sequence; identical to SEQ ID NO: 749331
  ENSG00000273590_19 (sequence is synthesized)

SEQ ID NO: 792829 - DNA, 120 bp, Artificial Sequence; identical to SEQ ID NO: 749332
  ENSG00000273590_20 (sequence is synthesized)

SEQ ID NO: 792830 - DNA, 120 bp, Artificial Sequence
  ENSG00000273590_21 (sequence is synthesized)
tggccagtgggttggggtgaccaatcaatgaacaagagaggtctgagacctccctgtccgtcgggtctgaagggctgcgtgggggcatgtggcctcacctgttctctaaggtagaactgc

SEQ ID NO: 792831 - DNA, 120 bp, Artificial Sequence
  ENSG00000273590_22 (sequence is synthesized)
tccataaagggccaggtgtgcagatcctggtcctgggatgtgagtgctgctgagccaaggtgcacggagcattagttcatccttcttgaaacctgcggtggcaatggttcttgacaggta

SEQ ID NO: 792832 - DNA, 120 bp, Artificial Sequence
  ENSG00000273590_23 (sequence is synthesized)
ttgggttaagaattgaggactcagtgacagctgtggaccttcttcccagagaagcacacatactgaaaccatctgcatttgtgtgtggggagaagtttgcagatgtggggagtcacaggt

SEQ ID NO: 792833 - DNA, 120 bp, Artificial Sequence
  ENSG00000273590_24 (sequence is synthesized)
catttgaaattccaagattaagaaaccctgttacctttaagataaagtctgactccatggtatgacaaataaatcccttcccagtctggtcttaacccagacctcatttgccacatgtgc

SEQ ID NO: 792834 - DNA, 120 bp, Artificial Sequence
  ENSG00000273590_25 (sequence is synthesized)
ccactccccatccccctgcaggccattcctcagccaccatggcctttggccttgcttattaggttcttcccaaggacctcctcaccaggcctgagggtacactcatcgttgtcacccagt

SEQ ID NO: 792835 - DNA, 120 bp, Artificial Sequence
  ENSG00000273590_26 (sequence is synthesized)
gcctatcacagtgcacactggtgggcttagaacacacttggggagttacaatacatcaaggcaccagaaagttcctgttaagcccctgttacagatttaacacatgacaattcacagtta

SEQ ID NO: 792836 - DNA, 120 bp, Artificial Sequence
  ENSG00000273590_27 (sequence is synthesized)
tgacaattcacagttaccttgattccagtgtgttgatgcagtttcttcactttgcaggttgagttctgtactttaaaaatcaggggattcagccaggtgtggtgactcatgcctgtaatc

SEQ ID NO: 792837 - DNA, 68 bp, Artificial Sequence
  ENSG00000273590_28 (sequence is synthesized)
atgcctgtaatcccagtgctttgggaggcaaaggtgggaggatcacttgagccaataaaaaaaaaaaa

SEQ ID NO: 792838 - DNA, 120 bp, Artificial Sequence
  ENSG00000273590_29 (sequence is synthesized)
tggacttctggaagaaggccaggccttttcttcgagtgtgcattcactaacttcaaatcttcctcacttttcttacaaaaactatacctttaaagctttacctgcaattttgcattgtgc

SEQ ID NO: 792839 - DNA, 77 bp, Artificial Sequence
  ENSG00000273590_30 (sequence is synthesized)
actatacctttaaagctttacctgcaattttgcattgtgctttctttttttacacattttttttgtagagatagggc

SEQ ID NO: 792840 - DNA, 120 bp, Artificial Sequence
  ENSG00000273604_0 (sequence is synthesized)
agttctctataacgcggtctccgggagccagcggggaagaaagaaaccgagcgggcggaaggcgccctccccgccgcctgggcccgggcaccgggtgccgggcccggggtccttcccgcc

SEQ ID NO: 792841 - DNA, 120 bp, Artificial Sequence
  ENSG00000273604_1 (sequence is synthesized)
tcccgcggccgccggccgctttgtttcccctgcctctgcgcttcgggcgactcgagagggtctcccgccggggttgcgaaggggacgcggcggcagaagggcggccgaccccgccgggac

SEQ ID NO: 792842 - DNA, 120 bp, Artificial Sequence
  ENSG00000273604_2 (sequence is synthesized)
tcacagggacccaggagtccggccgccgggagggccgcgtgaggagagcgaagagggagcccgagctctgcggccccgggtggcgggccgggggcgcccgtgagcagagacctccccgtc

SEQ ID NO: 792843 - DNA, 120 bp, Artificial Sequence
  ENSG00000273604_3 (sequence is synthesized)
gacggggggcgatgttcccctcacccgtgggctcttcgggcagccagggcatcccgccgctgggacctggacccgctcagtgggcacccctcaggctgctccatggagaccctgtgccct

SEQ ID NO: 792844 - DNA, 120 bp, Artificial Sequence
  ENSG00000273604_4 (sequence is synthesized)
gcgccccgcctggcagtgccggcgtccccgcgagggtcgccctgctcccccacgccccggaagccgtgtcgggggacccaggaattctctccgctgtgcctgcgtgccctcgccttctgc

SEQ ID NO: 792845 - DNA, 120 bp, Artificial Sequence
  ENSG00000273604_5 (sequence is synthesized)
ttctctccgctgtgcctgcgtgccctcgccttctgcgcccttgccaagccccgggcgtcctctctgggcccggggcctggggagctggcggcgcggtccccagtgctgcggggccctcag

SEQ ID NO: 792846 - DNA, 120 bp, Artificial Sequence
  ENSG00000273604_6 (sequence is synthesized)
ctgaagcacctctgggcaccgaccgggcggcccggcgttcctaacaccgccgccggcgaggatgcggacgtcgcagcgtgcccccgccgcggagaggaggaagagggcggaggcggtttc

SEQ ID NO: 792847 - DNA, 120 bp, Artificial Sequence
  ENSG00000273604_7 (sequence is synthesized)
ccgcacttcggcgttcgctcctgtgcacctccgggccgctgccctgcgcccccgcaccctcgggaatctacgaccagcttcgcctcggccccgcctcgcccggccccgggtctcgagcct

SEQ ID NO: 792848 - DNA, 120 bp, Artificial Sequence
  ENSG00000273604_8 (sequence is synthesized)
ccagcccgcctcaggaacccagttcccggcctccgtcgccacctgcgggcctctccaccgagcccgcgggtcccgggacggcgccgcggccgttcctgcccggccagcctgccgaagtcg

SEQ ID NO: 792849 - DNA, 120 bp, Artificial Sequence
  ENSG00000273604_9 (sequence is synthesized)
cagcctgccgaagtcgatggaaaccccccgccggccgcccccgaggctccagcggccagcccctcgacggccagcccggctccggccgcacccggagatctccgccaggaacatttcgat

SEQ ID NO: 792850 - DNA, 120 bp, Artificial Sequence
  ENSG00000273604_10 (sequence is synthesized)
cgtctgatccgccggtcgaaactttggtgttacgcgaagggcttcgccttggacactccgagtttgcgccgggggccagagcggccgcctgcgaaagggccggctcggggagccgccaag

SEQ ID NO: 792851 - DNA, 120 bp, Artificial Sequence
  ENSG00000273604_11 (sequence is synthesized)
caagaaacgccggctgccggcgccccctccgcgcaccgcgcagccccgccgccctgcaccgacgctccccaccacgagcaccttcagcctcctcaactgcttcccctgccccccggccct

SEQ ID NO: 792852 - DNA, 120 bp, Artificial Sequence
  ENSG00000273604_12 (sequence is synthesized)
gtgggggaagacggagacctaaagccggcatcctcgcttcgcctccagggagactctaagcccccgcccgcccacccgctgtggaggtggcagatggggggtcccgctgtccctgagccc

SEQ ID NO: 792853 - DNA, 120 bp, Artificial Sequence
  ENSG00000273604_13 (sequence is synthesized)
tgggggatcaacatggatgaaagctgaccgtgggacttctgccaaaggggaaaagttgggaccatggccaaaccgcgggcttgaggagggagccccgtttctcacatttgtccccttcct

SEQ ID NO: 792854 - DNA, 120 bp, Artificial Sequence
  ENSG00000273604_14 (sequence is synthesized)
ttacattttaggagctgtgggcagagggacctaaataacagtgatcttcattcaagcacctaagttttcggggtgacagtccctccccctcatcctttgcagaggaacccagggctggag

SEQ ID NO: 792855 - DNA, 120 bp, Artificial Sequence
  ENSG00000273604_15 (sequence is synthesized)
tcgggagaaggctgatgacatagattccaatccctgcctccttccatctcggaccgttggaggcagggcctgcaccccagtgggagcaaaggaggccaccgctcaaagacacccccccac

SEQ ID NO: 792856 - DNA, 120 bp, Artificial Sequence
  ENSG00000273604_16 (sequence is synthesized)
ccaaaaaaaaggggagaagagagagacctcggtgatggacaaaccggttgttactgtgtctgtgggcgagcctggggtgcggggctgtggtgggggtggggagatgattggcagctccct

SEQ ID NO: 792857 - DNA, 120 bp, Artificial Sequence
  ENSG00000273604_17 (sequence is synthesized)
gggggcatcccccacccccactgtccaggcctttaaccctttgctcccctcaggccttccctaacgctccaagcaccgctggagcctttaatgggtgagggaacttgggtaagaggaaga

SEQ ID NO: 792858 - DNA, 120 bp, Artificial Sequence
  ENSG00000273604_18 (sequence is synthesized)
tcacccccttcctgtcccctttctaggccccctcaagtgcaggtgacccttaattggtgagatcttcagcctcagccgccgacctttcccttttgtccagttttggagttcccgtttttt

SEQ ID NO: 792859 - DNA, 120 bp, Artificial Sequence
  ENSG00000273604_19 (sequence is synthesized)
ccttgtttgctttccgagtgtaaggtctggccggtgagaaagatttcccccaaccttgattaatcagccccctcccccaacttacttcccttaggacgggtagggctgagggacctcctc

SEQ ID NO: 792860 - DNA, 120 bp, Artificial Sequence
  ENSG00000273604_20 (sequence is synthesized)
tcctggaaagtgcttactttgcctggggaaggggctagacactgtcccagggaaagtaatagaaggtggaagaaatcaataaaatcagaccaaacaagtcgcctttcgagggcctccacc

SEQ ID NO: 792861 - DNA, 120 bp, Artificial Sequence
  ENSG00000273604_21 (sequence is synthesized)
gatttatggatgagagggggtggaggtggaaggcaggcccaagtccattctttggacacccaaactcagcccccttaaagagtggaaacaaaacaagctgcactttgcagaggtggtaaa

SEQ ID NO: 792862 - DNA, 120 bp, Artificial Sequence
  ENSG00000273604_22 (sequence is synthesized)
tgaaaggactcttggcctaacttcaagagtcccctggggtttgaaggggcaaagtttgagtctggatggaacctgggctgaggtaccttaagcttccccccgcaacaccccagcctcagg

SEQ ID NO: 792863 - DNA, 120 bp, Artificial Sequence
  ENSG00000273604_23 (sequence is synthesized)
gattgcgggagttgtcagagatctgatggatccgaaaggggcagggccaggggattaggtttggggtcagaggttctgttttccaggggaggggtgagataggcctggatcatgccctct

SEQ ID NO: 792864 - DNA, 120 bp, Artificial Sequence
  ENSG00000273604_24 (sequence is synthesized)
gccatgccctccagctaggaggatcttgagtcagagaggattggaagtgctttctcctccacccaggtgaggtcaggggagcttaggtcttagggagatggcaagttgaggtatgaaggg

SEQ ID NO: 792865 - DNA, 120 bp, Artificial Sequence
  ENSG00000273604_25 (sequence is synthesized)
aagctggggcttttggagctgccgaacaactgagggacccagtgcgccttccatcccgcactagtgaatagcgccccctcttcccccgaaaacgaggtgcgagaggaacaattcccacgc

SEQ ID NO: 792866 - DNA, 120 bp, Artificial Sequence
  ENSG00000273604_26 (sequence is synthesized)
tggggaaggacttgtctccttttctgtgaaaatgctttgtaaaaagttgttattgtttgcatagagcagattcttgagaaaaactgttttggaccataaaagttttgtttgttttaaaaa

SEQ ID NO: 792867 - DNA, 120 bp, Artificial Sequence
  ENSG00000273611_0 (sequence is synthesized)
agtctccttccacaaaaccatggcgtcgctcaaatgtagcaccgtcgtctgcgtgatctgcttggagaagcccaaataccgctgtccagcctgccgcgtgccctactgctcggtagtctg

SEQ ID NO: 792868 - DNA, 120 bp, Artificial Sequence
  ENSG00000273611_1 (sequence is synthesized)
cttccggaagcacaaagaacagtgcaaccctgaaactcgtcctgttgagaaaaaaataagatcagctcttcctaccaaaaccgtaaagcctgtggaaaacaaagatgatgatgactctat

SEQ ID NO: 792869 - DNA, 120 bp, Artificial Sequence
  ENSG00000273611_2 (sequence is synthesized)
agctgattttctcaatagtgatgaggaagaagacagagtttctttgcagaatttaaagaatttaggggaatctgcaacattaagaagcttattgctcaatccacacctcaggcagttgat

SEQ ID NO: 792870 - DNA, 120 bp, Artificial Sequence
  ENSG00000273611_3 (sequence is synthesized)
ttgtggagtttgcagactgctgtttaggaattgtggagccatcccagaatgaggagtcttaagatggattattgtgctgcttgctcaagcgtgtgcttgactcctggaacctgcctgctc

SEQ ID NO: 792871 - DNA, 120 bp, Artificial Sequence
  ENSG00000273611_4 (sequence is synthesized)
cctctcccagaccagctagtttggggctggggagctcaggcaaaagaggtttccaggatgcagattaggtcatgcaggcctttaccggcattgatgtggctcatgtttcaggcagacttg

SEQ ID NO: 792872 - DNA, 120 bp, Artificial Sequence
  ENSG00000273611_5 (sequence is synthesized)
gggtccttaaggtggcaagtcctttatggagagaaaacttgacattcagatgattgtttttaaatgttttacttttggtacagttgatagacatcataaacgatatcaagcttacacttc

SEQ ID NO: 792873 - DNA, 120 bp, Artificial Sequence
  ENSG00000273611_6 (sequence is synthesized)
atatggagttaaacttggtcagtgttaataaaatcaaaacgtgattctactgtacattgcattattcataatttaattgtttgaaattacattaaataaatcaactaattaaatactaaa

SEQ ID NO: 792874 - DNA, 120 bp, Artificial Sequence
  ENSG00000273611_7 (sequence is synthesized)
atccagtgtatatatgtaccgcatttctttatccatctgttggtggatccttaggttcattccttatcttggctgttgtgactagcagtaaacgcaggagtgcaggtatctcttcggcag

SEQ ID NO: 792875 - DNA, 120 bp, Artificial Sequence
  ENSG00000273611_8 (sequence is synthesized)
ttgctggatcatatggtagttctattcgtagtttttttttaggaacctctatgctgttttccataatgactatactaatttacattcccaataacagtgcagtgtataagagttcccttt

SEQ ID NO: 792876 - DNA, 120 bp, Artificial Sequence
  ENSG00000273611_9 (sequence is synthesized)
tacattcccaataacagtgcagtgtataagagttcccttttctccacatccttgccaacatgtttttttctttttgataatagccattcttactgtggtgagatgatacctcattgtggt

SEQ ID NO: 792877 - DNA, 120 bp, Artificial Sequence
  ENSG00000273611_10 (sequence is synthesized)
cttgacttgcatgtccctaataattagtgatgttgaacattttttcatgtacttgttggccatttatatgtcttcttttgagaagtgtctgtttggctcatttgcccatttttttttttt

SEQ ID NO: 792878 - DNA, 89 bp, Artificial Sequence
  ENSG00000273611_11 (sequence is synthesized)
ttctttttgagacagagtcttgctcttgtcgcccgggctggagtacagtggcgcagtctctgcttactgcaacctccgcttccaaaagt

SEQ ID NO: 792879 - DNA, 120 bp, Artificial Sequence
  ENSG00000273611_12 (sequence is synthesized)
acaggggtgagccaccatgcccggcccatttgtccacttaatttttttttttttttttttttggctgttgagctccttgtgtattctagatattaatcctttgtcaagtgaatattttgc

SEQ ID NO: 792880 - DNA, 120 bp, Artificial Sequence
  ENSG00000273611_13 (sequence is synthesized)
caagtgaatattttgcaaatattttctcccatcctgtgggttgtctcttcattctattgtttcctttgttgtacagaagcttttttgtgtaatagaattccatttgcctatttttgcttt

SEQ ID NO: 792881 - DNA, 120 bp, Artificial Sequence
  ENSG00000273611_14 (sequence is synthesized)
tcttgcctgtgtttttgagattttattcataaaatctttgcctagaccaatgtcctgaagcatttcccctgtgttttcttgtagtagtttcaggtcttacatttaggtctttaatccatt

SEQ ID NO: 792882 - DNA, 120 bp, Artificial Sequence
  ENSG00000273611_15 (sequence is synthesized)
ttgatatttatatatggtgacagataaggatctagtttcattcttctgcatatggttattcttacagttatcctatttttccagtaccatttattgaagagtgcttttttccccagtata

SEQ ID NO: 792883 - DNA, 120 bp, Artificial Sequence
  ENSG00000273611_16 (sequence is synthesized)
tgctcttggtgcctttgtgaaaagtcagttggctgtaaatgtgtgaatttatatctgggttctctattctgttccattgatctatgtgtctatttttatgctagtaccatgctgtttaga

SEQ ID NO: 792884 - DNA, 120 bp, Artificial Sequence
  ENSG00000273611_17 (sequence is synthesized)
tattatagctttgtagtatatttcgaggccaagtagtggtgatgcctccagctttgttctgtttgctcaggattgctttggctattgggggtcttttgtggttccatattaattttagaa

SEQ ID NO: 792885 - DNA, 120 bp, Artificial Sequence
  ENSG00000273611_18 (sequence is synthesized)
tttttttttgacatttctgtgaacaggatcattggtattttgatagggattgcattgactctagattactttgggtagtatggtcattttaatatttatttttcttattggtggatattt

SEQ ID NO: 792886 - DNA, 120 bp, Artificial Sequence
  ENSG00000273611_19 (sequence is synthesized)
acattaattttgcctttgttgctgctataggcagtgttaaagtggtatttaataaataatttttatcagaaatttctaatagccacatctgttgtacacttttcatttgtcttttttatt

SEQ ID NO: 792887 - DNA, 90 bp, Artificial Sequence
  ENSG00000273611_20 (sequence is synthesized)
tcacccaggctggagtgcagtggtgctcactatagccttgacttcctgggctcagttgggactgcaggcgtgtgccaccatgcctggctt

SEQ ID NO: 792888 - DNA, 120 bp, Artificial Sequence
  ENSG00000273611_21 (sequence is synthesized)
agtagttgggactgcaggcgtgtgccaccatgcctggcttatttatttttaattttaatttttgtggagatgaagtctcactgtattgcctgggctggtcttgaattcctgggctcaagt

SEQ ID NO: 792889 - DNA, 120 bp, Artificial Sequence
  ENSG00000273611_22 (sequence is synthesized)
cctcccaaagcgttgggattacagacgtgagctacccatgctcagcctgtcatctttcttgattcccatgaatatctgctgtgtttggctttttctttcttgatattctttggaggctgg

SEQ ID NO: 792890 - DNA, 120 bp, Artificial Sequence
  ENSG00000273611_23 (sequence is synthesized)
gaagataccgctctgtggtattctctcctccctttctcccttcgaagtcctaaccaggcctgaccctgttacagcttctgaggtcagatgagatagggtgcattcagggtggcttagctg

SEQ ID NO: 792891 - DNA, 120 bp, Artificial Sequence
  ENSG00000273611_24 (sequence is synthesized)
tgatcctcccaccttagcctcctgagtaacggagacaaactttatctatttttcgtagagacagggtctcactgtattgtctaggctggtcttggactcctgggcttaagcagtcctcct

SEQ ID NO: 792892 - DNA, 120 bp, Artificial Sequence
  ENSG00000273611_25 (sequence is synthesized)
cttaagcagtcctcctgcctcaacctcccaaattgctgggattacaggcaggagccactgtgcccagcttctccttccttttgctagatctctctcttgaaatgtggtccttgactttta

SEQ ID NO: 792893 - DNA, 120 bp, Artificial Sequence
  ENSG00000273611_26 (sequence is synthesized)
ttcctaggtaggtgatctctctttcactttaaacttttttttttcttgctgacatccaactgtttagctccagcctctttttgagcaccttagacacaaatgtattttggggtcaggtac

SEQ ID NO: 792894 - DNA, 120 bp, Artificial Sequence
  ENSG00000273611_27 (sequence is synthesized)
aacccagaaaattcacctctccttcagtccctcctgctgtgttccttacacatatagcatagccgtaaagttagacccggattccaaatctgcctctgctacttactagctgtggacccc

SEQ ID NO: 792895 - DNA, 120 bp, Artificial Sequence
  ENSG00000273611_28 (sequence is synthesized)
aatggacaagtttattacaagaaaatttaatcctttcatctgtaagtggaattaacagtctccatgtcatgggggcttcgtaaaggttcattgagccactatgtatctcactgtgtacct

SEQ ID NO: 792896 - DNA, 120 bp, Artificial Sequence
  ENSG00000273611_29 (sequence is synthesized)
ggcacagtgctcggcacttagtcactggcagctgttgtaactgccacctacatgactagaacctttccgtagcatattgtcaaatctacattttaagtctctacaatctggtcctgcctt

SEQ ID NO: 792897 - DNA, 83 bp, Artificial Sequence
  ENSG00000273611_30 (sequence is synthesized)
caaatctacattttaagtctctacaatctggtcctgcctttatgtcctcagaaccctttcctgtgacttcatgctctgttgat

SEQ ID NO: 792898 - DNA, 84 bp, Artificial Sequence
  ENSG00000273611_31 (sequence is synthesized)
tgtgtgtaccaccatgcctggatgattttttttattttctgtagagacatagtcttgctaggttgcccaggctggtctcaaact

SEQ ID NO: 792899 - DNA, 120 bp, Artificial Sequence
  ENSG00000273611_32 (sequence is synthesized)
caagtgatcctcccaccttggcctccgaatgttaggattacaggcgtgagccagcacagctggccttctgttgactctgtaagttctttggtggttttgcccctagttttatcccatctg

SEQ ID NO: 792900 - DNA, 120 bp, Artificial Sequence
  ENSG00000273611_33 (sequence is synthesized)
tctggtatctggtttacagcagctatttcaaacacctcagttaattgtggtgagaattttgtaagattcggcagggtagggaggatggggacaggttcttggggtgcatgaatgagtcct

SEQ ID NO: 792901 - DNA, 120 bp, Artificial Sequence
  ENSG00000273611_34 (sequence is synthesized)
gctttctcagcctgctggcggttttccttaatctctctcttgctttgatctctcacttcttccacattcctgggcacccacccacatcccttaccccagacacttgcttcctacctagat

SEQ ID NO: 792902 - DNA, 120 bp, Artificial Sequence
  ENSG00000273611_35 (sequence is synthesized)
cgtcgctcaaatgtagcaccgtcgtctgcgtgatctgcttggagaagcccaaataccgctgtccagcctgccgcgtgccctaatggactctcgtcctgtcacccaggctggagtgcagcg

SEQ ID NO: 792903 - DNA, 120 bp, Artificial Sequence
  ENSG00000273611_36 (sequence is synthesized)
agaaacgcagcattgcatttggaaatgggactagaagatttagagatgctgaaataattagaagcagtttttaaaaagataaagggctctggaagattcccagttataacaaaataaata

SEQ ID NO: 792904 - DNA, 120 bp, Artificial Sequence
  ENSG00000273611_37 (sequence is synthesized)
atccaaacctgcagctgattgggacatgcagccctctggtttacccagtagggttagggatggatcttgtcccagcctcagtctcattcccgctgtgaacttgtaggctttgctcctgct

SEQ ID NO: 792905 - DNA, 120 bp, Artificial Sequence
  ENSG00000273611_38 (sequence is synthesized)
gttctcaggaacaaagctgtcatggccatcacacacaacgtacctgaggcagcgctcggatggacgtgacaccagcctggtcttgtgctgtctggacagtgtagctactggggctgcccc

SEQ ID NO: 792906 - DNA, 120 bp, Artificial Sequence
  ENSG00000273611_39 (sequence is synthesized)
gggcgtgcacgcgggcgcggctgcgtgagaggcgcgcggcggcgcagtgaacagtctccttccacaaaaccatggcgtcgctcaaatgtagcaccgtcgtctgcgtgatctgcttggaga

SEQ ID NO: 792907 - DNA, 120 bp, Artificial Sequence
  ENSG00000273611_40 (sequence is synthesized)
tctgcgtgatctgcttggagaagcccaaataccgctgtccagcctgccgcgtgccctactgctcggtagtctgcttccggaagcacaaaggggaatctgcaacattaagaagcttattgc

SEQ ID NO: 792908 - DNA, 120 bp, Artificial Sequence
  ENSG00000273611_41 (sequence is synthesized)
cttgagcatcaggagtggggccatgtcatcatgggtgatattgaggcaacagcctgaaagcagtattcaggagaagaaaaatgggcagaagacagagatgagaaaggccatggctgtggt

SEQ ID NO: 792909 - DNA, 120 bp, Artificial Sequence
  ENSG00000273611_42 (sequence is synthesized)
ttgggggtttgcggtgggccctgctggcaggagccttctctagcccatagctgctggtctccctccatgaatctggctgggactgtcagttcacctgaactcagcccaggcaggaggctt

SEQ ID NO: 792910 - DNA, 120 bp, Artificial Sequence
  ENSG00000273611_43 (sequence is synthesized)
atggcgtcgctcaaatgtagcaccgtcgtctgcgtgatctgcttggagaagcccaaataccgctgtccagcctgccgcgtgccctactgctcggtagtctgcttccggaagcacaaagtg

SEQ ID NO: 792911 - DNA, 120 bp, Artificial Sequence
  ENSG00000273611_44 (sequence is synthesized)
actgggattataggcgtgagccaccgctccaggccctaagctaaactttcatcacctcctgctcctgactcatctaaagccttggttctcacagtgtggttcatggagcatcagaatcag

SEQ ID NO: 792912 - DNA, 120 bp, Artificial Sequence
  ENSG00000273611_45 (sequence is synthesized)
tggaggcaagcccagaccactaatttcctctgaaagctgcctacacccatagccgtattggccaggaccagtcccaggggccagaggcggattattgcctccaggagcctggtctgcagc

SEQ ID NO: 792913 - DNA, 120 bp, Artificial Sequence
  ENSG00000273611_46 (sequence is synthesized)
ggcgaggtgctcagggaacagggagcttgagagaagtgtttttcttccacaccatccagctctttagcagcaaggcaggccattctgatcttaaaaagcaaatatccctttatagcttta

SEQ ID NO: 792914 - DNA, 120 bp, Artificial Sequence
  ENSG00000273611_47 (sequence is synthesized)
gatttatctagccctcttagcagaaaatggaaatcaaaactatctttaacaaatcatcttaacaaggtgaactgaaggcacctggttgcaaacagctggctgccctgaaccaaactggtt

SEQ ID NO: 792915 - DNA, 120 bp, Artificial Sequence
  ENSG00000273611_48 (sequence is synthesized)
ccatatgccacaagtctatacaccccaggcaactgtgcttaggccttacatatgctacttgaaaacaagataagagtccatcaagatataactgatatgccataaaacccagtcttctaa

SEQ ID NO: 792916 - DNA, 120 bp, Artificial Sequence
  ENSG00000273611_49 (sequence is synthesized)
agtgtacatcccagagtttggtatattcccagagttgcttataccactcttcacctacataaccaccctgcagggtaggtgttactgtgcccactgcatacatgaggaatatgaggctca

SEQ ID NO: 792917 - DNA, 120 bp, Artificial Sequence
  ENSG00000273611_50 (sequence is synthesized)
gagaggctaaacaacctgcccaaggccacctgcattgcagtggcagagccagcattcccactcgggtccatctggtccccaaaattgatccactgcccaccccgacttcttgggtcttac

SEQ ID NO: 792918 - DNA, 120 bp, Artificial Sequence
  ENSG00000273611_51 (sequence is synthesized)
ttactctccacttctgccatgcacgcttgatgactgtggcagctgcatgcagcctctggatgtgtttccgagttaaccaggaacgaatggctaagaggtttgcccagaaacaggaaagag

SEQ ID NO: 792919 - DNA, 120 bp, Artificial Sequence
  ENSG00000273611_52 (sequence is synthesized)
ataataaaggggccattagagctgtcagtgacctcgctgcagcagcaccacagttgctgtcaaagtttcaaatacgttttttttttttcaataaattgctacaaataaggttctaaaatc

SEQ ID NO: 792920 - DNA, 120 bp, Artificial Sequence
  ENSG00000273611_53 (sequence is synthesized)
gatgatgactctatagctgattttctcaatagtgatgaggaagaagacagagtttctttgcagaatttaaagaatttagatggactctcgtcctgtcacccaggctggagtgcagcggcg

SEQ ID NO: 792921 - DNA, 120 bp, Artificial Sequence
  ENSG00000273696_0 (sequence is synthesized)
gggcaggcacgctgtggctggctacttcccttcctcccatcccccttgggccaaacgggatcggtgcttctggtgagacgcctccccatgcacatcactcccaggtgccctagggggcac

SEQ ID NO: 792922 - DNA, 120 bp, Artificial Sequence
  ENSG00000273696_1 (sequence is synthesized)
atttcccacaactcccagagggcaggtttctagaaagtgccaccagtggggaggcgccacaacttcactgccattttgtgaggtgccgccgtctctcctccagcaaggaaacaatgaccg

SEQ ID NO: 792923 - DNA, 120 bp, Artificial Sequence
  ENSG00000273696_2 (sequence is synthesized)
ataaaacagagaaggtggctgtagatcctgaaactgtgtttaaacgtcccagggaatgtgacagtccttcgtatcagaaaaggcagaggatggccctgttggcaaggaaacaaggagcag

SEQ ID NO: 792924 - DNA, 120 bp, Artificial Sequence
  ENSG00000273696_3 (sequence is synthesized)
gagacagccttattgcaggctctgccatgtccaaagaaaagaagcttatgacaggacatgctattccacccagccaattggattctcagattgatgacttcactggtttcagcaaagatg

SEQ ID NO: 792925 - DNA, 120 bp, Artificial Sequence
  ENSG00000273696_4 (sequence is synthesized)
gaggaaacgttaccagcagtttctctggagatgacctagaatgcagagaaacagcctcctctcccaaaagccaacgagaaattaatgctgatataaaacgtaaattagtgaaggaactcc

SEQ ID NO: 792926 - DNA, 120 bp, Artificial Sequence
  ENSG00000273696_5 (sequence is synthesized)
gatgcgttggacaaaaatatgaaaaaatcttcgaaatgcttgaaggagtgcaaggacctactgcagtcaggaagcgattttttgaatccatcatcaaggaagcagcaagatgtatgagac

SEQ ID NO: 792927 - DNA, 120 bp, Artificial Sequence
  ENSG00000273696_6 (sequence is synthesized)
gagactttgttaagcaccttaagaagaaactgaaacgtatgatttgagaatacttgtccctggaggattatcacaccccaaatgcataatctcgttaatgattgaggagagaaaaggatc

SEQ ID NO: 792928 - DNA, 120 bp, Artificial Sequence
  ENSG00000273696_7 (sequence is synthesized)
agattgctgttttctacaatggagcaggatattgctgaagtctcctggcatatgttaccgaatcaactggccttccagaggctaagaaatttctgttagtaaaagatgttctttttccca

SEQ ID NO: 792929 - DNA, 120 bp, Artificial Sequence
  ENSG00000273703_0 (sequence is synthesized)
atgcctgaaccagtcaaatctgctccagtccctaaaaaaggctccaagaaggccattaacaaggctcagaagaaggatggaaagaagcgcaaacgcagccgcaaggagagctactctgtg

SEQ ID NO: 792930 - DNA, 120 bp, Artificial Sequence
  ENSG00000273703_1 (sequence is synthesized)
caggtccaccccgacaccggcatctcttccaaggctatgggaatcatgaactccttcgtcaacgacatctttgagcgtatcgccggagaagcgtcacgcctggcgcattacaacaagcgc

SEQ ID NO: 792931 - DNA, 120 bp, Artificial Sequence
  ENSG00000273703_2 (sequence is synthesized)
tcgaccatcacttcgagggagatccagacggccgtgcgcctactgctacccggggaattggccaagcacgccgtgtccgagggcaccaaggccgtcaccaagtataccagctccaagtga

SEQ ID NO: 792932 - DNA, 120 bp, Artificial Sequence
  ENSG00000273706_0 (sequence is synthesized)
ccaagatcttcctcctaccctcccctctttcccttctcccgcggtcggccctcgccccctcccccaggcccagcgcgggcgctcggcgcgtccagacccgcggcgcgatgccggcagttt

SEQ ID NO: 792933 - DNA, 120 bp, Artificial Sequence
  ENSG00000273706_1 (sequence is synthesized)
aggatccaaagcttctctgctccttttgttctttccttcccttttttaaaaaaagaggggggaaatcccagtggtgggcagcctggcacgcacacagtcgccctcataccccgacaaaag

SEQ ID NO: 792934 - DNA, 120 bp, Artificial Sequence
  ENSG00000273706_2 (sequence is synthesized)
cagatgcactttgacttctgacagctctacctcaagccccggagaactcagcggcgctttcctcgcaacccgagctcggcgagtcgtcgtcttcttcttctccgtttttatttatttatt

SEQ ID NO: 792935 - DNA, 120 bp, Artificial Sequence
  ENSG00000273706_3 (sequence is synthesized)
tccgttcccgccgccgttctcgctgaccttcactcctccgcgggctctgagcagaagggtcgcattctctcccgcctgagacttcttttcctcgccccgggagctcaggcggcgccgctc

SEQ ID NO: 792936 - DNA, 120 bp, Artificial Sequence
  ENSG00000273706_4 (sequence is synthesized)
cagcccggggccccgggactccccggctgcacacttcactgagacgcccccccaggccccgatcagcctcgtttcctccaccctactttgatttcctggtgcgagttttggcttgcacgg

SEQ ID NO: 792937 - DNA, 120 bp, Artificial Sequence
  ENSG00000273706_5 (sequence is synthesized)
ccgagtgtgtgtcctctttttggagagactggggagctcgtgccgattgtcttcaggagtcatcccctgggctctactttgcccctctctctctctgggcctcatcagaccaaaccaaag

SEQ ID NO: 792938 - DNA, 120 bp, Artificial Sequence
  ENSG00000273706_6 (sequence is synthesized)
accatggttcactgtgccggctgcaaaaggcccatcctggaccgctttctcttgaacgtgctggacagggcctggcacgtcaagtgcgtccagtgctgtgaatgtaaatgcaacctgacc

SEQ ID NO: 792939 - DNA, 120 bp, Artificial Sequence
  ENSG00000273706_7 (sequence is synthesized)
gagaagtgcttctccagggaaggcaaactctactgcaagaacgacttcttccggtgtttcggtaccaaatgcgcaggctgcgctcagggcatctcccctagcgacctggtgcggagagcg

SEQ ID NO: 792940 - DNA, 120 bp, Artificial Sequence
  ENSG00000273706_8 (sequence is synthesized)
cggagcaaagtgtttcacctgaactgcttcacctgcatgatgtgtaacaagcagctctccactggcgaggaactctacatcatcgacgagaataagttcgtctgcaaagaggattaccta

SEQ ID NO: 792941 - DNA, 120 bp, Artificial Sequence
  ENSG00000273706_9 (sequence is synthesized)
agtaacagcagtgttgccaaagagaacagccttcactcggccaccacgggcagtgaccccagtttgtctccggattcccaagacccgtcgcaggacgacgccaaggactcggagagcgcc

SEQ ID NO: 792942 - DNA, 120 bp, Artificial Sequence
  ENSG00000273706_10 (sequence is synthesized)
aacgtgtcggacaaggaagcgggtagcaacgagaatgacgaccagaacctgggcgccaagcggcggggaccgcgcaccaccatcaaagccaagcagctggagacgctgaaggccgccttc

SEQ ID NO: 792943 - DNA, 120 bp, Artificial Sequence
  ENSG00000273706_11 (sequence is synthesized)
gctgctacacccaagcccacccgccacatccgcgagcagctggcgcaggagaccggcctcaacatgcgcgtcattcaggtctggttccagaaccggcgctccaaggagcggaggatgaag

SEQ ID NO: 792944 - DNA, 120 bp, Artificial Sequence
  ENSG00000273706_12 (sequence is synthesized)
cagctgagcgccctgggcgcccggcgccacgccttcttccgcagtccgcgccggatgcggccgctggtggaccgcctggagccgggcgagctcatccccaatggtcccttctccttctac

SEQ ID NO: 792945 - DNA, 120 bp, Artificial Sequence
  ENSG00000273706_13 (sequence is synthesized)
ggagattaccagagcgagtactacgggcccgggggcaactacgacttcttcccgcaaggccccccgtcctcgcaggcccagacaccagtggacctacccttcgtgccgtcatctgggccg

SEQ ID NO: 792946 - DNA, 120 bp, Artificial Sequence
  ENSG00000273706_14 (sequence is synthesized)
gcggtttaccgacatcctggcgcacccacccggggactcgcccagccccgagcccagcctgcccgggcctctgcactccatgtcggccgaggtcttcggacccagcccgcccttctcgtc

SEQ ID NO: 792947 - DNA, 120 bp, Artificial Sequence
  ENSG00000273706_15 (sequence is synthesized)
gctgtcggtcaacggtggggcgagctacggaaaccacctgtcccacccccccgaaatgaacgaggcggccgtgtggtagcggggtctcgcacggtctgcggagttcgtggttgtacagaa

SEQ ID NO: 792948 - DNA, 120 bp, Artificial Sequence
  ENSG00000273706_16 (sequence is synthesized)
gaaaaatagaaaaaaaaaaacataaaaagcaagtccccacccccttcctccagcctcgagaaccattctccttctggggagaccggatggaaaagggggacacgaaataggatccaaatc

SEQ ID NO: 792949 - DNA, 120 bp, Artificial Sequence
  ENSG00000273706_17 (sequence is synthesized)
aaataggatccaaatcggcctcgaggtgggactgggatccgcgcactggctgtcgacgtgcagaactggggctccccaaaggaaacgcagacctctccccaactcccacctggacccgga

SEQ ID NO: 792950 - DNA, 120 bp, Artificial Sequence
  ENSG00000273706_18 (sequence is synthesized)
tccgtagacagaccccgcgggcgtgtgcgcctggcaggcgggcggcgaaaagacgtccagggcagccgcgggtgcgcacagccgttggcgatgccaggagccgtggggagggaggccgtg

SEQ ID NO: 792951 - DNA, 120 bp, Artificial Sequence
  ENSG00000273706_19 (sequence is synthesized)
agcacagccgggtgaaggaagtgaagcggcccagggcgctcccgggccagccaggagggttctagctctgggatatcccttattagtgttgtctcagagttcaacaacagcgacaaaaaa

SEQ ID NO: 792952 - DNA, 120 bp, Artificial Sequence
  ENSG00000273706_20 (sequence is synthesized)
ctcttatagcttcagaaacgccgacctgccgtgcatcaggtgggactatatatatattttttgtctatctggatttttggtttttgtttttgccaaaattgcaaaattctaaatgtaaag

SEQ ID NO: 792953 - DNA, 120 bp, Artificial Sequence
  ENSG00000273706_21 (sequence is synthesized)
ccctccgtatcaactcttctaccttcgcaaaactacacatacacacatacacacgtacacggacacactcggtaagatggtctccagccagaccgctcagtaaaatgacttgaacatcag

SEQ ID NO: 792954 - DNA, 120 bp, Artificial Sequence
  ENSG00000273706_22 (sequence is synthesized)
ctgtacaagaaaagtattctaccttcacacacaaaaagttaaaaaaaaaaaaaaagactattgaactaaaaacagtcaactgtttacgtataatgttaaattcaggagttcagtgtttta

SEQ ID NO: 792955 - DNA, 120 bp, Artificial Sequence
  ENSG00000273706_23 (sequence is synthesized)
ctaatatatcctgttttgaaacctcttgttcgaaaacaaaatgttttgagcaatcaaccaaaattgttccttttcttttcctgtagatgttctgacagatttgcagggctttcggctcac

SEQ ID NO: 792956 - DNA, 120 bp, Artificial Sequence
  ENSG00000273706_24 (sequence is synthesized)
tgtgctagtatgtaaaaaggtgttgtttacacgaggcaaagagaaaacatgctattcagacagttgccaaatagaataattatagcacaaatactgtaaaggtgcctggcaccagcaacc

SEQ ID NO: 792957 - DNA, 120 bp, Artificial Sequence
  ENSG00000273706_25 (sequence is synthesized)
tgagaaagtgttaaaaaaaaaaaaaaaaaagtgttacaagatttaaaaaaaaacatctttgctaatttttttgtcctgttgaacattcatggaattgttaatatgacttatatagaccca

SEQ ID NO: 792958 - DNA, 120 bp, Artificial Sequence
  ENSG00000273706_26 (sequence is synthesized)
cacaggttttatttttgtgtctttaaaataaaagtccaaaatatttaaattttatggtcaaatatgcagtcaacagctgctactttttctttatatattaaatttctcatatgtctttta

SEQ ID NO: 792959 - DNA, 120 bp, Artificial Sequence
  ENSG00000273706_27 (sequence is synthesized)
ttgttctaataaacctaagcttgtgtgacctccagtgcatattagaccattcactgtatgaaagaaaacatgttgaataaatttgtgagtttttaataaaaatagaaaatctgatgttta

SEQ ID NO: 792960 - DNA, 120 bp, Artificial Sequence
  ENSG00000273706_28 (sequence is synthesized)
aacagccaggagcagtgaccaagccgccggagctggggagagacgcaccggggcggcgactgggccaggagaccagggactgagggacgcgcccggggagggccagcaacgagccgcggc

SEQ ID NO: 792961 - DNA, 120 bp, Artificial Sequence
  ENSG00000273706_29 (sequence is synthesized)
ccgggcggcgacagcggcggtccgcgccgagccgttccagccgccggcctactgtagccgctgcgccaggacatttttttttaaagctctccaagctgcccccctcctccccgactcctc

SEQ ID NO: 792962 - DNA, 120 bp, Artificial Sequence
  ENSG00000273706_30 (sequence is synthesized)
aaggaaaaggagagaaagtcgagcgactgtggggttagacggaggcagacagagcgtgggccgagcgatgcggggctgtgcgcccaggcggccgcgagttgtgactggagccacgatgca

SEQ ID NO: 792963 - DNA, 120 bp, Artificial Sequence
  ENSG00000273706_31 (sequence is synthesized)
cggccaggcgcgctctacctcaagccccggagaactcagcggcgctttcctcgcaacccgagctcggcgagtcgtcgtcttcttcttctccgtttttatttatttatttccgttcccgcc

SEQ ID NO: 792964 - DNA, 120 bp, Artificial Sequence
  ENSG00000273706_32 (sequence is synthesized)
ccactttgggcacccaggccgagccaggagagcccagaatccagagagaagtgagagatggagtccagaggtggggtgcctagacacatcccgagcctgcgggacctatgaaatgcctga

SEQ ID NO: 792965 - DNA, 120 bp, Artificial Sequence
  ENSG00000273706_33 (sequence is synthesized)
tgccttcgagcatctagaaagtcctcttcccagcccaacagaggtgatcgtggcagtggagggggagggacgggagttcagccagaggctggaggaggagaactgttgaacactctggag

SEQ ID NO: 792966 - DNA, 120 bp, Artificial Sequence
  ENSG00000273706_34 (sequence is synthesized)
agagtggggagccctctttctgcacataccccaccccacctcgggttcggaagggtcagagaagtctcagtgtcccccagagtcaatcagtccctctgccttctgcacaaagtgaactct

SEQ ID NO: 792967 - DNA, 120 bp, Artificial Sequence
  ENSG00000273706_35 (sequence is synthesized)
tcctaagtctgcaactccaactttgtgatcgcttgctccaattagacaagccccagatcagggacttcccctccaaagagaggtggttccgccgggagtcagctctgcttccagcgggtt

SEQ ID NO: 792968 - DNA, 120 bp, Artificial Sequence
  ENSG00000273706_36 (sequence is synthesized)
ggagtgaaatttgggtatgggagcctacctggaggcagctgggcctgtgggcggaaaggaggtgagactgctgaagctccaggccagggggagtctctggctcagtgctaggtgtccggt

SEQ ID NO: 792969 - DNA, 120 bp, Artificial Sequence
  ENSG00000273706_37 (sequence is synthesized)
agttaggaactgcttctagagagggcagccaagtcccgcgggcgcccgcctctccgccagctggcgcgctgggagcccgggacgcggccctgcttgcatcctggaaactatgggtctggg

SEQ ID NO: 792970 - DNA, 120 bp, Artificial Sequence
  ENSG00000273706_38 (sequence is synthesized)
tttggctgcatgtgcctgggaagaaagggtctgagcctgactcggcccagaagccccttcaagcttggaagagacagggcagcctcgggcgttgtagcccggactgctgtctttcccgga

SEQ ID NO: 792971 - DNA, 120 bp, Artificial Sequence
  ENSG00000273706_39 (sequence is synthesized)
gccaagctctgcagcaactgcattctccaggccttcggggttgtttgccctccaggcagagcccaggctccctcccggccactaccttttccgaccccgagcggtcttggcggtgtttcg

SEQ ID NO: 792972 - DNA, 120 bp, Artificial Sequence
  ENSG00000273749_0 (sequence is synthesized)
agtgactcactcggccaaggaaactcccagggcccgcccaggacccccaagccgccgcggacgcagaatgtggctcagctgcccctggtcccatcccagggcagagctcctcctgagtac

SEQ ID NO: 792973 - DNA, 120 bp, Artificial Sequence
  ENSG00000273749_1 (sequence is synthesized)
ccttgagactggagcagattcagcagaaggcagattgccccctctccctggagctggctctgaagcccaggatggcggcccaggtgactctggaggacgcgctgtccaacgtggacctcc

SEQ ID NO: 792974 - DNA, 120 bp, Artificial Sequence
  ENSG00000273749_2 (sequence is synthesized)
tggaggagctgcccctgcccgaccagcagccctgcatcgagcccccgccatcctcgctgctctaccagccaaatttcaacactaactttgaagacagaaatgcatttgttactggcatcg

SEQ ID NO: 792975 - DNA, 120 bp, Artificial Sequence
  ENSG00000273749_3 (sequence is synthesized)
caagatacattgaacaagccaccgtccactctagcatgaacgagatgctggaggagggccaagaatatgctgtcatgctgtacacctggaggagctgctcccgggccatcccacaggtga

SEQ ID NO: 792976 - DNA, 120 bp, Artificial Sequence
  ENSG00000273749_4 (sequence is synthesized)
aatgtaacgagcagcctaacagagtggaaatctacgagaaaaccgtggaggttctggagcctgaggtcacaaaactgatgaatttcatgtacttccagagaaatgccattgagcgtttct

SEQ ID NO: 792977 - DNA, 120 bp, Artificial Sequence
  ENSG00000273749_5 (sequence is synthesized)
gcggggaagtgaggcgcctgtgccatgccgagaggaggaaggacttcgtgtcagaagcctacctgatcacactgggcaaattcatcaacatgttcgctgtgctggacgagctgaagaaca

SEQ ID NO: 792978 - DNA, 120 bp, Artificial Sequence
  ENSG00000273749_6 (sequence is synthesized)
tgaagtgcagtgtgaagaacgaccactcagcgtacaagagggccgctcagtttttacgtaaaatggcagatccacagtccatccaggaatcgcagaatctgtccatgttcctggccaatc

SEQ ID NO: 792979 - DNA, 120 bp, Artificial Sequence
  ENSG00000273749_7 (sequence is synthesized)
ataacaagatcacacagtctctgcagcagcagctcgaagtgatttctggctacgaagagctcctggcagatattgtgaatctgtgtgtggattactacgagaacaggatgtatttgacgc

SEQ ID NO: 792980 - DNA, 120 bp, Artificial Sequence
  ENSG00000273749_8 (sequence is synthesized)
ccagtgagaaacacatgcttctcaaagtcatgggatttggtctgtacctgatggatgggagtgtcagtaacatctataagttggatgccaagaaaagaataaacttatccaaaatcgaca

SEQ ID NO: 792981 - DNA, 120 bp, Artificial Sequence
  ENSG00000273749_9 (sequence is synthesized)
agtacttcaagcaactccaggtggttccgctatttggggacatgcaaatagaactggcaagatatatcaagaccagcgcccactacgaggaaaataaatctcgatggacgtgcacatcct

SEQ ID NO: 792982 - DNA, 120 bp, Artificial Sequence
  ENSG00000273749_10 (sequence is synthesized)
ccggcagcagccctcagtacaacatctgcgagcagatgatccagatccgcgaggaccacatgcgcttcatttcggagctggcgcgctacagcaacagcgaggtggtcacgggctcgggcc

SEQ ID NO: 792983 - DNA, 120 bp, Artificial Sequence
  ENSG00000273749_11 (sequence is synthesized)
gccaggaggcccagaagacggacgcggagtaccgcaagctcttcgacctggcgctgcagggcctgcagctgttgtcgcagtggagcgcgcacgtgatggaagtgtattcctggaagcttg

SEQ ID NO: 792984 - DNA, 120 bp, Artificial Sequence
  ENSG00000273749_12 (sequence is synthesized)
tgcaccccaccgacaagtactccaacaaggactgccccgacagcgctgaagagtacgagcgtgccacgcgctacaactacaccagcgaggagaagtttgccctagtggaggtgatcgcca

SEQ ID NO: 792985 - DNA, 120 bp, Artificial Sequence
  ENSG00000273749_13 (sequence is synthesized)
tgatcaaaggcctgcaggtgctgatgggcaggatggagagcgtgttcaaccacgccatccggcacaccgtctatgccgcactgcaggacttctcccaggtgacccttagggagccgctgc

SEQ ID NO: 792986 - DNA, 120 bp, Artificial Sequence
  ENSG00000273749_14 (sequence is synthesized)
ggcaggccatcaagaagaagaagaacgtcatccagagtgtcctgcaggccatcaggaagaccgtgtgtgactgggagacggggcatgagcccttcaatgacccagccttgcggggcgaga

SEQ ID NO: 792987 - DNA, 120 bp, Artificial Sequence
  ENSG00000273749_15 (sequence is synthesized)
aggaccccaagagcggcttcgacataaaagtaccacgccgcgccgtgggaccctccagcactcagctttacatggtgagaaccatgctagagtccctcattgcagacaaaagtggttcca

SEQ ID NO: 792988 - DNA, 120 bp, Artificial Sequence
  ENSG00000273749_16 (sequence is synthesized)
agaaaaccttgagaagtagccttgaggggcccaccatattggacatagaaaaatttcatcgagagtcattcttctacactcacttgataaatttcagtgaaacgctgcagcagtgctgtg

SEQ ID NO: 792989 - DNA, 120 bp, Artificial Sequence
  ENSG00000273749_17 (sequence is synthesized)
acctttcgcagctgtggttccgagagttcttcctggagctgaccatgggcaggaggatccagttccccattgagatgtcgatgccctggatcctgacggaccacatcctggagaccaagg

SEQ ID NO: 792990 - DNA, 120 bp, Artificial Sequence
  ENSG00000273749_18 (sequence is synthesized)
tcaacaagcagttcctgtacgacgaaattgaggccgaggtgaatctatgttttgaccaatttgtttacaagctagcagaccagatatttgcctattataaggttatggcaggaagtttgc

SEQ ID NO: 792991 - DNA, 120 bp, Artificial Sequence
  ENSG00000273749_19 (sequence is synthesized)
ttcttgataaacggttacgatcagaatgcaagaatcagggagccacgatccacctcccgccgtctaaccgctacgagacgctgctgaagcagaggcatgtgcagctcctcggcagatcaa

SEQ ID NO: 792992 - DNA, 120 bp, Artificial Sequence
  ENSG00000273749_20 (sequence is synthesized)
tagacctcaatcgtctgatcacccagcgcgtctcagcagccatgtataagtccctagaactggcgattggacgatttgaaagtgaagatttgacctccatagttgagctggatggcctgt

SEQ ID NO: 792993 - DNA, 120 bp, Artificial Sequence
  ENSG00000273749_21 (sequence is synthesized)
tggaaatcaaccgcatgacccacaagctgctgagccggtacctgacgctggacggcttcgacgccatgttccgggaggccaaccacaacgtgtcagcgccctacgggaggatcaccctgc

SEQ ID NO: 792994 - DNA, 120 bp, Artificial Sequence
  ENSG00000273749_22 (sequence is synthesized)
acgtcttctgggagctcaactatgacttcctgcccaactactgctacaacggctctaccaaccggtttgttcggacagtgttaccattttctcaggaatttcaaagagataagcagccta

SEQ ID NO: 792995 - DNA, 120 bp, Artificial Sequence
  ENSG00000273749_23 (sequence is synthesized)
atgcacagcctcagtatctgcatggatccaaggctttgaacttggcctactccagcatttacggcagctaccggaacttcgtgggacctccacactttcaagtcatctgccggcttctcg

SEQ ID NO: 792996 - DNA, 120 bp, Artificial Sequence
  ENSG00000273749_24 (sequence is synthesized)
gctaccagggtatcgccgtggtcatggaggagctgctgaaggtcgtcaagagcctgctgcaaggcacaatcctgcagtacgtgaagacgctgatggaggtgatgcccaagatctgccgcc

SEQ ID NO: 792997 - DNA, 120 bp, Artificial Sequence
  ENSG00000273749_25 (sequence is synthesized)
tgccccggcacgagtacggctctcctggtatcctggagttcttccaccaccagctgaaggacatcgtggagtacgcagagctgaagacggtgtgcttccagaacctgcgggaggtgggga

SEQ ID NO: 792998 - DNA, 120 bp, Artificial Sequence
  ENSG00000273749_26 (sequence is synthesized)
acgccatcctcttctgcctgctcatcgagcagagcctgtctttagaagaagtgtgtgacctgctgcacgcggctcctttccagaacatcttgccgcgagtccatgtgaaagagggggaga

SEQ ID NO: 792999 - DNA, 120 bp, Artificial Sequence
  ENSG00000273749_27 (sequence is synthesized)
gacttgatgccaaaatgaaaagactagaatcaaagtacgccccgctgcatcttgtcccactgattgaaagactggggacccctcagcaaattgccatcgcaagagagggggacctgctga

SEQ ID NO: 793000 - DNA, 120 bp, Artificial Sequence
  ENSG00000273749_28 (sequence is synthesized)
caaaggagcgcctctgctgcggcctgtccatgtttgaggtcatcctgacacggatccggagctttctggatgaccccatctggcgcgggcctctgcccagcaatggggtcatgcatgtgg

SEQ ID NO: 793001 - DNA, 120 bp, Artificial Sequence
  ENSG00000273749_29 (sequence is synthesized)
acgagtgtgtggagtttcacagactgtggagtgccatgcagtttgtctactgcattcccgtggggacacacgagttcacagtcgagcagtgctttggtgatgggctacactgggctggct

SEQ ID NO: 793002 - DNA, 120 bp, Artificial Sequence
  ENSG00000273749_30 (sequence is synthesized)
gtatgatcatcgtacttcttgggcagcagcggcgttttgctgtgctggatttctgctaccatctacttaaagtccagaaacatgatggcaaagatgagattattaaaaatgtgcctttga

SEQ ID NO: 793003 - DNA, 120 bp, Artificial Sequence
  ENSG00000273749_31 (sequence is synthesized)
agaagatggtggagagaattcgcaagttccagattctcaatgatgagatcatcaccatcctggataagtacctgaagtcaggcgacggggagggcacgccagtggagcatgtgcgctgct

SEQ ID NO: 793004 - DNA, 120 bp, Artificial Sequence
  ENSG00000273749_32 (sequence is synthesized)
tccagccgcccatccaccagtccctcgccagcagctgagggcacgcgctgcactccgtaactcaacatggcatgcctttctctccgtaaactatttagtgagatttttagggactatttt

SEQ ID NO: 793005 - DNA, 120 bp, Artificial Sequence
  ENSG00000273749_33 (sequence is synthesized)
tcagtatctctgtacctgttaaagggggtgcttttcgatctaaaaacttaattttataaaattgacttatttttctagactaaaattgtatatgcttttggtaattaggaactcttgaga

SEQ ID NO: 793006 - DNA, 120 bp, Artificial Sequence
  ENSG00000273749_34 (sequence is synthesized)
atattggctgctgattgttgccatcacgttcctacaaaattgtttttctatgggatgttctggcagctgtgtcataaaatgctgctgggttcattcattcattccataagaaacttaata

SEQ ID NO: 793007 - DNA, 120 bp, Artificial Sequence
  ENSG00000273749_35 (sequence is synthesized)
ccagcaaatgcattaaatcccttgccagttaccattaactgtaactatttagcttttgtttagggatctttctgatggtcttttatgagcaatcttagttctaagtcattgttcccatcc

SEQ ID NO: 793008 - DNA, 120 bp, Artificial Sequence
  ENSG00000273749_36 (sequence is synthesized)
cttttttgtgtgtttcagaaaatagtgaacttgattcccctgcttccactaaatccagttgtgacaaaatctaacgtgacatcagatcgaaaggttatagaaataaaactaatgagatct

SEQ ID NO: 793009 - DNA, 120 bp, Artificial Sequence
  ENSG00000273749_37 (sequence is synthesized)
attcccggccagcccgagtgactcactcggccaaggaaactcccagggcccgcccaggacccccaagccgccgcggacgcagcccaggatggcggcccaggtgactctggaggacgcgct

SEQ ID NO: 793010 - DNA, 120 bp, Artificial Sequence
  ENSG00000273749_38 (sequence is synthesized)
atttactctaaccctgtgctgcctggcttggcaaggaactctaacctgaactcacataccaggccagctgggatggaggtcacctctaaggctgaggtgggatgggaccgtgacaccatc

SEQ ID NO: 793011 - DNA, 120 bp, Artificial Sequence
  ENSG00000273749_39 (sequence is synthesized)
ccatataccgctcacctcagcacaggtttagctttatatttagggttccgcaggcaaatgaggtgtaaaacggccgtgttggctgctccaatctggatatgaagaggctactcagtgcct

SEQ ID NO: 793012 - DNA, 120 bp, Artificial Sequence
  ENSG00000273749_40 (sequence is synthesized)
ctctgttacctgtgcccatgacctggaggaagccagcaatgtgggaggagatcagtcaggcccagtgggtgctgcacaaagggaccgggagcaccgagtccagccttcagctgtccccga

SEQ ID NO: 793013 - DNA, 120 bp, Artificial Sequence
  ENSG00000273749_41 (sequence is synthesized)
tccacagggctcacatggctggagctggttcacatgatctgtcagaatgaaaaacaatcggtctagactaccagtagagtcacgaacatgtttgagaaactaaagccatattttaaaaag

SEQ ID NO: 793014 - DNA, 120 bp, Artificial Sequence
  ENSG00000273749_42 (sequence is synthesized)
tactaaggcaatgaggttctgaaaatcctaactaactgaatggaaaaagatgctatgcctgtttattgtagatgaatactacagataaacacaagtccagcatgattaactgaactcact

SEQ ID NO: 793015 - DNA, 120 bp, Artificial Sequence
  ENSG00000273749_43 (sequence is synthesized)
ttatattgtagcctggcagtcattttacattatttggagtattgcaaccttcaccaattttaaaattttctatggatgccaagttgccataaaaagcaggcctcgcctacttttccggag

SEQ ID NO: 793016 - DNA, 120 bp, Artificial Sequence
  ENSG00000273749_44 (sequence is synthesized)
gcctttggaaactgtccagaagcatatgatgcacggcacagaaaagtagtaagtgtacgaaccatcctgttacactgccaaactcactcaagtgacatgaagcctaacaaacaattattc

SEQ ID NO: 793017 - DNA, 120 bp, Artificial Sequence
  ENSG00000273749_45 (sequence is synthesized)
tttctttataaaaagttccctaaaaatgcttttggtaatgtgaattaataaccctggggccagcattctgctgcagatttagaggtggtagctgtgcttatcttagaaactacagaatag

SEQ ID NO: 793018 - DNA, 120 bp, Artificial Sequence
  ENSG00000273749_46 (sequence is synthesized)
gatgaaaaattatggtaaaacttaatcaattaccaagttttataaggcttaattatataccaaatatgtaataccttaggtataagacaatctcaagtgctacaaaatgttaaataagaa

SEQ ID NO: 793019 - DNA, 120 bp, Artificial Sequence
  ENSG00000273749_47 (sequence is synthesized)
tttattatttattaacctatgcatgttcaaatgagtctctgtcctcaagggggagaaaactggttcttttatgtacaaagcacagatgtaggtacagtatataaacagatacgtagtaca

SEQ ID NO: 793020 - DNA, 120 bp, Artificial Sequence
  ENSG00000273749_48 (sequence is synthesized)
tctgtagtattaaaatggcatgggaggaggcagttagaaaaaacatctaaaacagctccttagaaggccaataataaagttggaaaaaagggagtttccacgcagccagtggtgagctgc

SEQ ID NO: 793021 - DNA, 120 bp, Artificial Sequence
  ENSG00000273749_49 (sequence is synthesized)
atgggataccagcaccattggcaggggaggccctcggggagtgatggcttggcgctggcgcaccactgggtaacctccaggcaggagccacaggctggaacaggcgaacactttcttccc

SEQ ID NO: 793022 - DNA, 120 bp, Artificial Sequence
  ENSG00000273749_50 (sequence is synthesized)
atcacctaggtggaaattaattctgccaatacttttttttaaaggccagtcaatggttatgagtggataggttcaaagctgaatggagttcattagaccttttttattattctacctttt

SEQ ID NO: 793023 - DNA, 120 bp, Artificial Sequence
  ENSG00000273749_51 (sequence is synthesized)
ctgcatatgtttgcagttttccatcgacttcttcataaacaaacattttctagaaaccaaaatatgtagtggcccaaaggagctcttaagcaaagtacttggtacaaagagaccatattc

SEQ ID NO: 793024 - DNA, 120 bp, Artificial Sequence
  ENSG00000273749_52 (sequence is synthesized)
tataaacatgttaagtttgttctaagcattcagacttttagaataagaacttcatttcaactttttattataacatgagctaaatttaagaaacaaccctagtcttctatttcccagagc

SEQ ID NO: 793025 - DNA, 120 bp, Artificial Sequence
  ENSG00000273749_53 (sequence is synthesized)
tgttcaaagtctaaatgacaatataactcattatgaaaatatactgaaaagtacaagagctgatgtaaaacggtaatcaaggttccaggcatcatgggattagggtaactgaagaataaa

SEQ ID NO: 793026 - DNA, 120 bp, Artificial Sequence
  ENSG00000273749_54 (sequence is synthesized)
cccagccaggctgcaacagcaggcaggatgtgctggcttgatgaggtgctaaggccatcgaatgctcagaggaagccggattcacggtgatcatctcaacctgagaaatcgttccttggg

SEQ ID NO: 793027 - DNA, 120 bp, Artificial Sequence
  ENSG00000273749_55 (sequence is synthesized)
gtgatttctgcccttttttttgttttgtaagaaagaggttccttcattcagtaacttagttttcccttaataaatatttcaaaaataaaaccaatcatcatcaaacaaacaggagccact

SEQ ID NO: 793028 - DNA, 120 bp, Artificial Sequence
  ENSG00000273749_56 (sequence is synthesized)
tttgtaggtaaggtaaatcacaggataatgtattgggataactctgtttttttaaaataaaaaagccttacatggtcagggattgatggagtggggatgacaaatgcacatttcagactt

SEQ ID NO: 793029 - DNA, 120 bp, Artificial Sequence
  ENSG00000273749_57 (sequence is synthesized)
tcatcaccaatgaaaaaataaagcattttcatagacttaaaactgtcattagtgcattcggcttttggagaagggatgaaaatgtaaaatacttctacaacaataaaatgttaatagaaa

SEQ ID NO: 793030 - DNA, 120 bp, Artificial Sequence
  ENSG00000273749_58 (sequence is synthesized)
gtaccacgccgcgccgtgggaccctccagcactcagctctacctggtgcgcaccatggccgagtccttgggctctgccgagctgctcaggcagctcaagtctctgggcatggagaggctc

SEQ ID NO: 793031 - DNA, 120 bp, Artificial Sequence
  ENSG00000273749_59 (sequence is synthesized)
ttgcatgcggttaacacgtttctgaggcagtcgtgcacctacctaccccttttaacctttggtgaaacgctgcagcagtgctgtgacctttcgcagctgtggttccgagagttcttcctg

SEQ ID NO: 793032 - DNA, 120 bp, Artificial Sequence
  ENSG00000273749_60 (sequence is synthesized)
gtgtttcctggcgcattcccggccagcccgagtgactcactcggccaaggaaactcccagggcccgcccaggacccccaagccgccgcggacgcagaacaggggtccttatgtgttgttc

SEQ ID NO: 793033 - DNA, 120 bp, Artificial Sequence
  ENSG00000273749_61 (sequence is synthesized)
ggctggcggctgccggaatggacaggacagacggaagcatttccatcatcccagaaatctcttgacagagataaaataaacttacagagtttattttatgctaaaaggcaaagaagttct

SEQ ID NO: 793034 - DNA, 120 bp, Artificial Sequence
  ENSG00000273749_62 (sequence is synthesized)
aatgtctctggcccagagaaaacctttgtcagcgtttcaagggtgcacctgccctgttaatgctcattccctctccagatctgcacccacacacaccagaacgagatgctggaggagggc

SEQ ID NO: 793035 - DNA, 120 bp, Artificial Sequence
  ENSG00000273749_63 (sequence is synthesized)
ttcttgtttctggcaatgtttttcatcctagtacgtaaggtgccaccaacagaaactttcttttcgttcccaaaatgaatctaaatataattggccagtaaagcagtctggcagagaaaa

SEQ ID NO: 793036 - DNA, 120 bp, Artificial Sequence
  ENSG00000273749_64 (sequence is synthesized)
aggttctcgtcccttgagccccgcctgcaccctctccctggggggacccaccctgagctgtgagcgggtggggctggtgaggcccgggttaaatgaggtcctcgctgcctgctcaggcag

SEQ ID NO: 793037 - DNA, 120 bp, Artificial Sequence
  ENSG00000273749_65 (sequence is synthesized)
tccttacgtgagaggtggaaaatggagttgagtttctgaggtggggcgaggctgtcggagctgcgagtgagtggcagaggctgctggtcacactgctgctgtcctctgcaggtacgtgct

SEQ ID NO: 793038 - DNA, 120 bp, Artificial Sequence
  ENSG00000273749_66 (sequence is synthesized)
ccggtttaatccacaccgctgcgtctgtcctccgtcctggggctggtcttctccctcatctctgccggaggcttttaatctcttctgccactcttctggaaagtcaccagcaatgcacgc

SEQ ID NO: 793039 - DNA, 120 bp, Artificial Sequence
  ENSG00000273749_67 (sequence is synthesized)
tgctggctctgcaggagggtcagggggacggccctcggcctgtgcgtggtgccagccaccctccctgcctccctctgcgtgcgtcccgtgtccctgcctggggtgtgtgtgtcgagtgac

SEQ ID NO: 793040 - DNA, 120 bp, Artificial Sequence
  ENSG00000273749_68 (sequence is synthesized)
gctccgctacaagttgttctttccccaaagcagcagcaacgtggccgcgtagacaggcacccggacccctcggggagctggtgcggggccctcccgaccagggcgtagcggagcagtcct

SEQ ID NO: 793041 - DNA, 120 bp, Artificial Sequence
  ENSG00000273749_69 (sequence is synthesized)
tctctcatgggctttttgagtttggcataactaatgtaccatgtatattttctcccccacaaatgtttccttggataatccagctttacatggtgagaaccatgctagagtccctcattg

SEQ ID NO: 793042 - DNA, 120 bp, Artificial Sequence
  ENSG00000273749_70 (sequence is synthesized)
gatttgagaggaaatgatgttctcagatgatcatcatcatggatgatgaagattcagtgtacctgtcatacagcttcctcaagaagaaaaccaaagcaacggaacagggccgactggcat

SEQ ID NO: 793043 - DNA, 120 bp, Artificial Sequence
  ENSG00000273749_71 (sequence is synthesized)
ctatttcaagaaaatattgataaaatagaagacaccttgaaagtgtctattaaaagcatacatcatgtatttggtaaaaccgacccaagcttgtcaacacttagaaatactgcatcttag

SEQ ID NO: 793044 - DNA, 120 bp, Artificial Sequence
  ENSG00000273749_72 (sequence is synthesized)
gctggttgaagattagaaaaaataataataatacatttaaaaacggtattgcagtgaaagttttggactttccaggtgaggaagaagtccttgggctgtctgagcagggcaggcagggaa

SEQ ID NO: 793045 - DNA, 120 bp, Artificial Sequence
  ENSG00000273749_73 (sequence is synthesized)
ggaaaatccgattgtcctcagaccttcaccagagccaaggaaaggaactgtgaatcgagggtttggtcgccagccaaattgatcttctgagaataaaggctgcagacagatggtaatgaa

SEQ ID NO: 793046 - DNA, 120 bp, Artificial Sequence
  ENSG00000273749_74 (sequence is synthesized)
cgtgccagggctccagaggattgttcattcctggagaacagaccttggctggcagacactgggcgctggcgggcacagtgcgtgtccctgtgagcatctctgcacttcagagcagggccc

SEQ ID NO: 793047 - DNA, 120 bp, Artificial Sequence
  ENSG00000273749_75 (sequence is synthesized)
tgcgtattcatccttagagtcaaacaggctgggactcagagacagacctgtggcggcctttttctacgagcgtaatttggtacaggccatggtgtttctgttggcattggccaaatatga

SEQ ID NO: 793048 - DNA, 120 bp, Artificial Sequence
  ENSG00000273749_76 (sequence is synthesized)
ttttgagtaaaatcattggtcgaggctttgatcgaggccattactgtccaatagaaatagaacacaagtcagatccgtaatttgaaattttcccatagtctcattagaaaaggaaatagg

SEQ ID NO: 793049 - DNA, 120 bp, Artificial Sequence
  ENSG00000273749_77 (sequence is synthesized)
tgaagttatttttaataacatacttaatccactgtatccccatattaattcaccacgtcattcctatggcagtatagttgaggtgggtatttgctagtctgttttgtcctactcagtctt

SEQ ID NO: 793050 - DNA, 120 bp, Artificial Sequence
  ENSG00000273749_78 (sequence is synthesized)
tgaaatctggtgtctcatgtagtgcgcctcaggtgggagcagctgtgctccggccccggctgccacatcggacagtgcagcctgggcgagctccagagcagcgcacgtgagggcttgcaa

SEQ ID NO: 793051 - DNA, 120 bp, Artificial Sequence
  ENSG00000273749_79 (sequence is synthesized)
ggcctgtgggaacaagtgcacctgccctgccacccacacgtgcctttcagtgacttcaggcacctcagagaaagctggctcagctccaacgcccagggagatgcagccgccggctgggtt

SEQ ID NO: 793052 - DNA, 120 bp, Artificial Sequence
  ENSG00000273749_80 (sequence is synthesized)
atactgcagggcagggccggggctcagcgggcacatggggggaagggtggcagtagcaggccacacgtgcacgctgccccacagggtgctggacagcaggggtaggtggcgtggaggtga

SEQ ID NO: 793053 - DNA, 120 bp, Artificial Sequence
  ENSG00000273749_81 (sequence is synthesized)
ctgcagtggagaaaggcatgacccagtgggggtgactgaaaaggtggggtgccaagaagcaagctcatgtcacctgtcagagcctacgctcactgggggctgcctccgtgcagccctgcc

SEQ ID NO: 793054 - DNA, 120 bp, Artificial Sequence
  ENSG00000273749_82 (sequence is synthesized)
gtctttgtttctctctgcagagaagggcgtgtttgaaggacagatgtatactttttggtattatcccaatagactatgcagtgaggaaaaagagaagaaaatgaatgaaatgccttatat

SEQ ID NO: 793055 - DNA, 120 bp, Artificial Sequence
  ENSG00000273749_83 (sequence is synthesized)
gggctcacagggttgatgaggtggctttacctgcagctatgcccagctggtcctgtccctagtgcaaggccccggtgacccctccccactcatgtccatgctgcatggcttggggctgag

SEQ ID NO: 793056 - DNA, 120 bp, Artificial Sequence
  ENSG00000273749_84 (sequence is synthesized)
cgaggaggagcaggcacccagcacacagcccttgtgtcatctctgctaaaggtttttttttgcttgcgggagataacatggagttgtttgaaccctcccagaaacgctgcagcagtgctg

SEQ ID NO: 793057 - DNA, 120 bp, Artificial Sequence
  ENSG00000273777_0 (sequence is synthesized)
gtctgtcctgggagctgcagttactgcagtgtgtgtgtgagtttgtagcagggtgggagaggagagaagggaggtggaggggctgcacctggagtgaggactgtatctgtgtgtgcaagc

SEQ ID NO: 793058 - DNA, 120 bp, Artificial Sequence
  ENSG00000273777_1 (sequence is synthesized)
cggggcgacagacggcctggcacactgaagtcaggtgccgggacccatggggcctgctgactcatggggacaccactggatgggaatcctgctttcagcctcgctttgtaccgtatggag

SEQ ID NO: 793059 - DNA, 120 bp, Artificial Sequence
  ENSG00000273777_2 (sequence is synthesized)
tcctccagctgcagcccagctcaccctcaatgccaacccacttgatgccacccaaagtgaggatgttgttctgcctgtgtttgggacccccaggacaccccagattcatggcagatccag

SEQ ID NO: 793060 - DNA, 120 bp, Artificial Sequence
  ENSG00000273777_3 (sequence is synthesized)
agagctggccaaaccctccattgcagtcagcccaggcactgccatagagcagaaggacatggtgaccttctactgcaccactaaggacgtcaacattaccatccactgggtttccaacaa

SEQ ID NO: 793061 - DNA, 120 bp, Artificial Sequence
  ENSG00000273777_4 (sequence is synthesized)
cctctccattgtgttccatgagcgcatgcagctgtccaaggatggcaagatcctcaccattctcattgtccagcgggaggactcagggacttaccaatgtgaagctcgagatgcccttct

SEQ ID NO: 793062 - DNA, 120 bp, Artificial Sequence
  ENSG00000273777_5 (sequence is synthesized)
gagccagaggagcgaccccatcttcctggatgtgaagtatggtcctgatcctgttgaaatcaaattggagtctggtgttgccagtggggaggtggttgaggtgatggagggctccagcat

SEQ ID NO: 793063 - DNA, 120 bp, Artificial Sequence
  ENSG00000273777_6 (sequence is synthesized)
gaccttcttagcggaaacaaagtctcacccaccctgtgcctatacttggtttctccttgactccattctgtctcacaccacgagaacattcaccatccatgctgtgtccagagaacatga

SEQ ID NO: 793064 - DNA, 120 bp, Artificial Sequence
  ENSG00000273777_7 (sequence is synthesized)
gggcctgtacaggtgcttggtgtccaacagtgccacccacctgtccagcctgggtactctgaaggtccgagtacttgaaacactgaccatgcctcaagtcgtgccttcaagcctgaacct

SEQ ID NO: 793065 - DNA, 120 bp, Artificial Sequence
  ENSG00000273777_8 (sequence is synthesized)
cgtcaatcagagtgtgaatgtccagtggttcctaagtggccagcccctcctgcccagtgagcacctgcagctgtcagctgacaacaggaccctaatcatccatggcctccagcggaatga

SEQ ID NO: 793066 - DNA, 120 bp, Artificial Sequence
  ENSG00000273777_9 (sequence is synthesized)
caccgggccctatgcctgtgaggtctggaactggggcagccgggcccggagtgagccccttgagctgaccatcaactatggtcctgaccaagtgcacatcaccagggagtcggcatctga

SEQ ID NO: 793067 - DNA, 120 bp, Artificial Sequence
  ENSG00000273777_10 (sequence is synthesized)
gatgatcagcaccatagaggcagagctcaactccagcctgaccctgcagtgttgggccgagtccaagccaggtgctgagtatcgctggactcttgaacactccaccggggagcacctggg

SEQ ID NO: 793068 - DNA, 120 bp, Artificial Sequence
  ENSG00000273777_11 (sequence is synthesized)
tgagcagctgattatcagggctctgacctgggaacacgacgggatctacaactgcacagcctccaactctctcactggcctggcccgctccacttcagtcctggtcaaggtggtaggtcc

SEQ ID NO: 793069 - DNA, 120 bp, Artificial Sequence
  ENSG00000273777_12 (sequence is synthesized)
ccagtcctcctccctgtcctcaggggccatcgctggtattgtcatcgggatcctggctgtcattgctgtggcctcagaactgggctattttctctgcatcagaaatgccagacggccctc

SEQ ID NO: 793070 - DNA, 120 bp, Artificial Sequence
  ENSG00000273777_13 (sequence is synthesized)
aaggaaaacaacagaggaccccagtcatgagacctcacaacccatcccgaaggaggagcaccccacagagcccagttccgaaagcctgagtcctgagtatcgcaatatatcccagcttca

SEQ ID NO: 793071 - DNA, 120 bp, Artificial Sequence
  ENSG00000273777_14 (sequence is synthesized)
gggacggatcagagtcgaactgatgcaaccaccagaccttccagaggagacctatgagacgaagctgccttcagcaagccgtagaggcaattctttcagcccctggaagccaccacccaa

SEQ ID NO: 793072 - DNA, 120 bp, Artificial Sequence
  ENSG00000273777_15 (sequence is synthesized)
acctctgatgcccccactcagattggtctccactgtgccaaaaaacatggagtcaatctatgaggagcttgtgaatccagagcccaacacttacatccaaatcaacccctccgtctaatg

SEQ ID NO: 793073 - DNA, 120 bp, Artificial Sequence
  ENSG00000273777_16 (sequence is synthesized)
tggagtcaatctatgaggtgttggggatgcagcagtgatcaacatcgataaaatgcttttccttatggaattgacatcgtagtggtaggtcggacagtagaccaaataaataattaaaat

SEQ ID NO: 793074 - DNA, 120 bp, Artificial Sequence
  ENSG00000273802_0 (sequence is synthesized)
ttttatttaagtgcgttcattctcactgctgttattgttttctgacagcatgcctgaaccagctaagtcagctcctgctccgaagaagggttccaagaaggctgtgaccaaggcgcagaa

SEQ ID NO: 793075 - DNA, 120 bp, Artificial Sequence
  ENSG00000273802_1 (sequence is synthesized)
gaaggatggcaagaagcgcaagcgcagtcgtaaggagagctactccgtgtatgtgtacaaggtgctaaaacaggttcaccccgatactggcatctcatccaaggccatgggcatcatgaa

SEQ ID NO: 793076 - DNA, 120 bp, Artificial Sequence
  ENSG00000273802_2 (sequence is synthesized)
ttccttcgttaacgacatcttcgaacgcatcgcaggcgaggcttcccgtctggcccactacaacaagcgctcgaccattacctccagggagatccagaccgccgtgcgtctgctgcttcc

SEQ ID NO: 793077 - DNA, 120 bp, Artificial Sequence
  ENSG00000273802_3 (sequence is synthesized)
cggagagctggccaagcacgcagtgtccgaaggtaccaaggctgtcaccaagtatacaagctccaagtaaatgtgtgcttaggtgctttaaaactcaaaggctcttttcagagccactca

SEQ ID NO: 793078 - DNA, 120 bp, Artificial Sequence
  ENSG00000273802_4 (sequence is synthesized)
taaaactcaaaggctcttttcagagccactcaagtctcacataaagagctttaatattgaatttcaccgttttctagggaataatttttccgattttgtaatcccagcactttgggaggc

SEQ ID NO: 793079 - DNA, 120 bp, Artificial Sequence
  ENSG00000273802_5 (sequence is synthesized)
cgtggttaaatctcgtttctactaaaaatacaaatattagccgggcgtggggcagtcgcgtgtcatcccagagactcgggaggctgccgcaggagaatcacttaaacccagcaagcaaag

SEQ ID NO: 793080 - DNA, 120 bp, Artificial Sequence
  ENSG00000273802_6 (sequence is synthesized)
tctgtgttggcaagatcctgtaatcctagcactttgggaggtcgatgcatgaggctttcttcagctcaggagttaacagatttgcctgggcaacatagaactcgtctctgcaaaaaaatg

SEQ ID NO: 793081 - DNA, 120 bp, Artificial Sequence
  ENSG00000273802_7 (sequence is synthesized)
aagctaaccaggtgtgacggcttgcgtctgtactatcatttactcggtaggctgaggtggtaggatagcttaaactctcgggctagagactgcaggaacatgtgaatacgctagtgcaat

SEQ ID NO: 793082 - DNA, 120 bp, Artificial Sequence
  ENSG00000273802_8 (sequence is synthesized)
tccagcctgggcaacactggaaagggtaggaagagtagtctttgggtccctaaagatcacctgataacaagtttgacttttctgagcactcttgtggagtttgttgtggagggaatacca

SEQ ID NO: 793083 - DNA, 120 bp, Artificial Sequence
  ENSG00000273802_9 (sequence is synthesized)
tgtggagggaataccatgggcattggcaatgtaaagttgatctaaaaaatctcgttttccgccgtgcgcggtggctcacgcctctaatcccatcactttgggaggccgagacgggcggat

SEQ ID NO: 793084 - DNA, 88 bp, Artificial Sequence
  ENSG00000273802_10 (sequence is synthesized)
ctcaaaattagccgggcgtggtggcactcacctgtagtttcagctactctggaagctgaggctggagagtcacttgaacccgggaggc

SEQ ID NO: 793085 - DNA, 120 bp, Artificial Sequence
  ENSG00000273820_0 (sequence is synthesized)
aggagccgccgccagtggaggcggaggaggtagaggaggcggagacggcggagaaggcggagaggaaggtggaggcggaggcgaaggtggaggggaaggcggaggcggcggggaaggcgg

SEQ ID NO: 793086 - DNA, 120 bp, Artificial Sequence
  ENSG00000273820_1 (sequence is synthesized)
aggcggcggggaaggtggacgccaccgagaaggtggagacggcggggaaggtggacgccgctgggaaggtggagacggcggagggtccgggccgccgggctgagctcaagctggagcccg

SEQ ID NO: 793087 - DNA, 120 bp, Artificial Sequence
  ENSG00000273820_2 (sequence is synthesized)
aacccgagccggtccgggaggcggagcaggagccgaagcaggagctggaggatgagaacccagcgcggagcggcggtggcggcaacagcgacgaggttcctccccccacccttccctccg

SEQ ID NO: 793088 - DNA, 120 bp, Artificial Sequence
  ENSG00000273820_3 (sequence is synthesized)
cgacgaggttcctccccccacccttccctccgatccaccgcggccccccgatccctctccgcgtcgcagtcgtgcgccgcgccgccgaccccggccccggccccagacccggctccgtac

SEQ ID NO: 793089 - DNA, 120 bp, Artificial Sequence
  ENSG00000273820_4 (sequence is synthesized)
ggccccggccccggcgcggccctgggggcggatgcctggatgtggattttgccgtggggccaccaggctgttctcacgtgaacagctttaaggtgggagagaactggaggcaggaactgc

SEQ ID NO: 793090 - DNA, 120 bp, Artificial Sequence
  ENSG00000273820_5 (sequence is synthesized)
gggttatctaccagtgcttcgtgtggtgtggaaccccagagaccaggaaaagcaaggcaaagtcctgcatctgccatgtgtgtggcacccatctgaacagactccactcttgcctttcct

SEQ ID NO: 793091 - DNA, 120 bp, Artificial Sequence
  ENSG00000273820_6 (sequence is synthesized)
gtgtcttctttggctgcttcacggagaaacacattcacgagcacgcagagacgaaacaacacaacttagcagtagacctgtattacggaggtatatactgctttatgtgtaaggactatg

SEQ ID NO: 793092 - DNA, 120 bp, Artificial Sequence
  ENSG00000273820_7 (sequence is synthesized)
tatatgacaaagacattgagcaaattgccaaagaagagcaaggagaagctttgaaattacaagcctccacctcaacagaggtttctcaccagcagtgttcagtgccaggccttggtgaga

SEQ ID NO: 793093 - DNA, 120 bp, Artificial Sequence
  ENSG00000273820_8 (sequence is synthesized)
aattcccaacctgggaaacaaccaaaccagaattagaactgctggggcacaacccgaggagaagaagaatcacctccagctttacgatcggtttaagaggactcatcaatcttggcaaca

SEQ ID NO: 793094 - DNA, 120 bp, Artificial Sequence
  ENSG00000273820_9 (sequence is synthesized)
cgtgctttatgaactgcattgtccaggccctcacccacacgccgatactgagagatttctttctctctgacaggcaccgatgtgagatgccgagtcccgagttgtgtctggtctgtgaga

SEQ ID NO: 793095 - DNA, 120 bp, Artificial Sequence
  ENSG00000273820_10 (sequence is synthesized)
tgtcgtcgctgtttcgggagttgtattctggaaacccgtctcctcatgtgccctataagttactgcacctggtgtggatacatgcccgccatttagcagggtacaggcaacaggatgccc

SEQ ID NO: 793096 - DNA, 120 bp, Artificial Sequence
  ENSG00000273820_11 (sequence is synthesized)
acgagttcctcattgcagcgttagatgtcctgcacaggcactgcaaaggtgatgatgtcgggaaggcggccaacaatcccaaccactgtaactgcatcatagaccaaatcttcacaggtg

SEQ ID NO: 793097 - DNA, 120 bp, Artificial Sequence
  ENSG00000273820_12 (sequence is synthesized)
tggacttgcctggctcttgcacctccttctggcccatgagcccagggagggagagcagtgtgaacggggaaagccacataccaggaatcaccaccctcacggactgcttgcggaggttta

SEQ ID NO: 793098 - DNA, 120 bp, Artificial Sequence
  ENSG00000273820_13 (sequence is synthesized)
cgaggccagagcacttaggaagcagtgccaaaatcaaatgtggtagttgccaaagctaccaggaatctaccaaacagctcacaatgaataaattacctgtcgttgcctgttttcatttca

SEQ ID NO: 793099 - DNA, 120 bp, Artificial Sequence
  ENSG00000273820_14 (sequence is synthesized)
aacggtttgaacattcagcgaaacagaggcgcaagatcactacatacatttcctttcctctggagctggatatgacgccgtttatggcctcaagtaaagagagcagaatgaatggacaat

SEQ ID NO: 793100 - DNA, 120 bp, Artificial Sequence
  ENSG00000273820_15 (sequence is synthesized)
tgcagctgccaaccaatagtggaaacaacgaaaataagtattccttgtttgctgtggttaatcaccaaggaaccttggagagtggccactataccagcttcatccggcaccacaaggacc

SEQ ID NO: 793101 - DNA, 120 bp, Artificial Sequence
  ENSG00000273820_16 (sequence is synthesized)
agtggttcaagtgtgatgatgccgtcatcactaaggccagtattaaggacgtactggacagtgaagggtatttactgttctatcacaaacaggtgctagaacatgagtcagaaaaagtga

SEQ ID NO: 793102 - DNA, 120 bp, Artificial Sequence
  ENSG00000273820_17 (sequence is synthesized)
aagaaatgaacacacaagcctactgaagtgacacacagacctacctgcaatggaagatgacgacaccaatactacaactggcatcgagatctaaaggacctacttgaccatggcccatgg

SEQ ID NO: 793103 - DNA, 120 bp, Artificial Sequence
  ENSG00000273820_18 (sequence is synthesized)
gcctgacagagtaagaattgaacagtacccagtgtccaaaaggtcctgattggaagagaaatagaaggggagggagaagaggctctagtctaagcagttgatgaaagggaaattaaatgg

SEQ ID NO: 793104 - DNA, 120 bp, Artificial Sequence
  ENSG00000273820_19 (sequence is synthesized)
atggtagaaacactctgggtgaggaaggcaggagcaggaaaatgctgacactggtacatatcctatattcctccaaaagattgtgtgggaaagtgtgggggggaggggggtggtgggggg

SEQ ID NO: 793105 - DNA, 120 bp, Artificial Sequence
  ENSG00000273820_20 (sequence is synthesized)
tgtgcccttgtaaccgtaaaacatctttctccatgggtgtttcagcttcaattgaccaatcacataacagttatatgtttggggggaaaaagaaaagtttctaaaaaatgtagcccatta

SEQ ID NO: 793106 - DNA, 120 bp, Artificial Sequence
  ENSG00000273820_21 (sequence is synthesized)
catatatgggtatgaaagcagaaaagtggaggaggcagggatatcattgacaaacacctttgccagtttctttgtattcgtgattttttgtgctattaaatgcagtattaaaacaagaaa

SEQ ID NO: 793107 - DNA, 120 bp, Artificial Sequence
  ENSG00000273820_22 (sequence is synthesized)
agcccacctgggctagtgaaaggagaggaaataagggggcttgtaaaaggggagccgtcgctccaaaagtagagaagacaagaaatgctgtaagataagcaaccaacgcagacaggcctc

SEQ ID NO: 793108 - DNA, 120 bp, Artificial Sequence
  ENSG00000273820_23 (sequence is synthesized)
aaaaaaaaaaaaagaaaaaaaaaagctgtatgatatacttgagcaaatcaatgaacctctttgcgattgttttatcatctgtaaaatgcagataattcctaccttaaagggttattgtta

SEQ ID NO: 793109 - DNA, 120 bp, Artificial Sequence
  ENSG00000273820_24 (sequence is synthesized)
cagataattcctaccttaaagggttattgttaaagataaaatgatataaaaatgtgtcaaagtataaagtaaaaggcttggaactttgtagggactcagtaaacgtttgttggatccaaa

SEQ ID NO: 793110 - DNA, 120 bp, Artificial Sequence; identical to SEQ ID NO: 86445
  ENSG00000273841_0 (sequence is synthesized)

SEQ ID NO: 793111 - DNA, 120 bp, Artificial Sequence
  ENSG00000273841_1 (sequence is synthesized)
tacattaatgtgggtgatttagctcgagaagtctgatcatcggatatcatggagtctggcaagacggcttctcccaagagcatgccgaaagatgcacagatgatggcacaaatcctgaag

SEQ ID NO: 793112 - DNA, 120 bp, Artificial Sequence
  ENSG00000273841_2 (sequence is synthesized)
gatatggggattacagaatatgagccaagagttataaatcagatgttggagtttgccttccgatatgtgaccacaattctagatgatgcaaaaatttattcaagccatgctaagaaagct

SEQ ID NO: 793113 - DNA, 120 bp, Artificial Sequence
  ENSG00000273841_3 (sequence is synthesized)
actgttgatgcagatgatgtgcgattggcaatccagtgccgcgctgatcagtcttttacctctcctcccccaagagattttttattagatattgcaaggcaaagaaatcaaacccctttg

SEQ ID NO: 793114 - DNA, 120 bp, Artificial Sequence
  ENSG00000273841_4 (sequence is synthesized)
acagaaaaaggcatcaacttctgcgggaagaataacagtcccgcggttaagtgttggttcagttactagcagaccaagtactcccacactaggcacaccaaccccacagaccatgtctgt

SEQ ID NO: 793115 - DNA, 120 bp, Artificial Sequence
  ENSG00000273841_5 (sequence is synthesized)
ttcaactaaagtagggactcccatgtccctcacaggtcaaaggtttacagtacagatgcctacttctcagtctccagctgtaaaagcttcaattcctgcaacctcagcagttcagaatgt

SEQ ID NO: 793116 - DNA, 120 bp, Artificial Sequence
  ENSG00000273841_6 (sequence is synthesized)
tctgattaatccatcattaatcgggtccaaaaacattcttattaccactaatatgatgtcatcacaaaatactgccaatgaatcatcaaatgcattgaaaagaaaacgtgaagatgatga

SEQ ID NO: 793117 - DNA, 120 bp, Artificial Sequence
  ENSG00000273841_7 (sequence is synthesized)
tgatgacgatgatgatgatgatgactatgataatctgtaatctagccttgctgaatgtaacatgtatacttggtcttgaattcattgtactgatattaaacatgcatgctggatgttttc

SEQ ID NO: 793118 - DNA, 120 bp, Artificial Sequence
  ENSG00000273841_8 (sequence is synthesized)
aagttgtgttttagaaaactaataataatgagtaaacacagttaccatacttttcaattgaaatgaaggtttttcatcagccttaaaagtgtaagaaaaataaagttgtcattcattcga

SEQ ID NO: 793119 - DNA, 120 bp, Artificial Sequence; identical to SEQ ID NO: 86458
  ENSG00000273841_9 (sequence is synthesized)

SEQ ID NO: 793120 - DNA, 120 bp, Artificial Sequence; identical to SEQ ID NO: 86459
  ENSG00000273841_10 (sequence is synthesized)

SEQ ID NO: 793121 - DNA, 120 bp, Artificial Sequence; identical to SEQ ID NO: 86460
  ENSG00000273841_11 (sequence is synthesized)

SEQ ID NO: 793122 - DNA, 120 bp, Artificial Sequence
  ENSG00000273841_12 (sequence is synthesized)
agagtgaaactctgtctcaaaaaaaaaattttacatatgattgctaattaggaaatttttcatttcagtcgtcaagaacttttaagggcagaggccaggtgagactctgtctcaaaaata

SEQ ID NO: 793123 - DNA, 120 bp, Artificial Sequence
  ENSG00000273841_13 (sequence is synthesized)
ggccaggtgagactctgtctcaaaaataaaaggaaaggcagaaggtggaccgcagtgtgataagtagtatttcacaaacagtatttttctgtggcttgtcttacaggtacaccaggggtt

SEQ ID NO: 793124 - DNA, 120 bp, Artificial Sequence
  ENSG00000273841_14 (sequence is synthesized)
tacacgcgcgagccaccacacgtggccatgaacagtttttaaatctttataagttaaagcaaataggccaggtacaccaggggttggaaaaaccacactaggcaaagaacttgcgtcaaa

SEQ ID NO: 793125 - DNA, 120 bp, Artificial Sequence
  ENSG00000273841_15 (sequence is synthesized)
ccgaccctcgcgggcgttgcgggaggcgagggaggggacgcggaacgttaattccgttggcctgaggctccgggggggggcgggggggggtggagagaggtcggcagatccagctctcca

SEQ ID NO: 793126 - DNA, 120 bp, Artificial Sequence
  ENSG00000273841_16 (sequence is synthesized)
gccgggagggactgggctggggcaggctgggggcgcagagtgctctgggcatcgggcgcccaggtgggggcccctcactgccctcttcagaggccggccgagggccacgaggcggttgtc

SEQ ID NO: 793127 - DNA, 120 bp, Artificial Sequence
  ENSG00000273841_17 (sequence is synthesized)
gcgaaataacgtaaggccatatctgcttcccggtagagtcattaatggtggatgcctcactccttaggcctccgtgggccgtattttattttttctttgcttctgataaacgcctcagat

SEQ ID NO: 793128 - DNA, 120 bp, Artificial Sequence
  ENSG00000273841_18 (sequence is synthesized)
aaggcatatagagcatttcgggtcgtttctcgcgtaggagtgggtctttgaagccatactcagggtacaccaggggttggaaaaaccacactaggcaaagaacttgcgtcaaaatcagga

SEQ ID NO: 793129 - DNA, 120 bp, Artificial Sequence
  ENSG00000273841_19 (sequence is synthesized)
acatcctgctcaccggtcagggcgcgcggccgggagggactgggctggggcaggctgggggcgcagagtgctctgggcatcgggcgcccaggtacaccaggggttggaaaaaccacacta

SEQ ID NO: 793130 - DNA, 120 bp, Artificial Sequence
  ENSG00000273899_0 (sequence is synthesized)
gctacacccggaagtgtcttcagggagaggaagccggcggcctcactgctatgggccgcaacaagaagaagaagcgagatggtgacgaccggcggccgaggctcgttcttagcttcgacg

SEQ ID NO: 793131 - DNA, 120 bp, Artificial Sequence
  ENSG00000273899_1 (sequence is synthesized)
aggagaagaggcgggagtacctgacaggcttccacaagcggaaggtcgagcgaaagaaggcagccattgaggagattaagcagcggctgaaagaggagcagaggaagcttcgggaggagc

SEQ ID NO: 793132 - DNA, 120 bp, Artificial Sequence
  ENSG00000273899_2 (sequence is synthesized)
gccaccaggaatacttgaagatgctggcagagagagaagaggctctggaggaggcagatgagctggaccggttggtgacagcaaagacggagtcggtgcagtatgaccaccccaaccaca

SEQ ID NO: 793133 - DNA, 120 bp, Artificial Sequence
  ENSG00000273899_3 (sequence is synthesized)
cagtcaccgtgaccaccatcagtgacctggacctctcgggggcccggctgctcgggctgaccccacctgagggaggggctggagacaggtctgaggaggaggcgtcatccacggagaaac

SEQ ID NO: 793134 - DNA, 120 bp, Artificial Sequence
  ENSG00000273899_4 (sequence is synthesized)
caaccaaagccttgcccaggaagtccagagaccccctgctctctcagcggatctcctccctcacagcatcactacatgcacacagccgcaaaaaggtcaagaggaaacatccccgacggg

SEQ ID NO: 793135 - DNA, 120 bp, Artificial Sequence
  ENSG00000273899_5 (sequence is synthesized)
cccaggactccaaaaagcccccaagggcccctcgtaccagcaaggcccagcgccgccgtctcacaggcaaagcacggcacagcggggagtgagaccgagaacgaagcggtgccccagtct

SEQ ID NO: 793136 - DNA, 120 bp, Artificial Sequence
  ENSG00000273899_6 (sequence is synthesized)
aggctgcggggacctgtccttgctcagcttggctgtccctgtagcccagcctgcacctaggtaatgactgcacagctcaaggttgggaagccaggacctctctggcctggggccagctgc

SEQ ID NO: 793137 - DNA, 120 bp, Artificial Sequence
  ENSG00000273899_7 (sequence is synthesized)
ctttgcctggggtcagctgcctttgcctggggtttgaattcccgaaggagcaggcagctgagagcaggcctcccccaggaagagccttcagagccacgtgggggcatcttcccaaatgtg

SEQ ID NO: 793138 - DNA, 120 bp, Artificial Sequence
  ENSG00000273899_8 (sequence is synthesized)
caccccacctggcactcatcagatttgtgcgcttgtgatttgtttgtccttgataccacgcacaagggcaggtttttggggtggtggaaatggccagggcccatgggtctgtctccagca

SEQ ID NO: 793139 - DNA, 120 bp, Artificial Sequence
  ENSG00000273899_9 (sequence is synthesized)
gttagccctgtggctgcaataaagtacagttctccctgtgttaagatcctaaccagggttaaggatcagtgtgtccgttgctagaatccagagcccacctgctgctctgaaaagcaggct

SEQ ID NO: 793140 - DNA, 120 bp, Artificial Sequence
  ENSG00000273899_10 (sequence is synthesized)
cctgaggccagtgggggagcagtgccccccatgcccttcaccgaggagcctctgtgcctgtcccttgtcctcggccccaggagtctcctcaactgacactgaagtggtggaagcagttga

SEQ ID NO: 793141 - DNA, 80 bp, Artificial Sequence
  ENSG00000273899_11 (sequence is synthesized)
ggcagcgtccccaggcttccagcagctcccaggtgggtcccaacgtggaaggattaattaattctttctaaagcagttgc

SEQ ID NO: 793142 - DNA, 120 bp, Artificial Sequence
  ENSG00000273899_12 (sequence is synthesized)
cacgccattgcactccagcctgggcaacgttgtgaccttgtctcaaaaaaaaactaaaaaataaagcagttgcatcttgactcgtacaaaagtagcccccaccagagtagaccctgcggg

SEQ ID NO: 793143 - DNA, 120 bp, Artificial Sequence
  ENSG00000273899_13 (sequence is synthesized)
tacaaaagtagcccccaccagagtagaccctgcgggtgccagctagaactccacaaggggccatgtcttcacactccttccagatggatgagttgatggaaaccctgtcccttccttgtc

SEQ ID NO: 793144 - DNA, 120 bp, Artificial Sequence
  ENSG00000273899_14 (sequence is synthesized)
ccagcttgtcagtcctgggcaggagagaatttcaggttgtgccttggttagaggagctgtgttgggtcctaaacactaggaccacaaaggggagtgaactgtgttcccagggcttgctga

SEQ ID NO: 793145 - DNA, 120 bp, Artificial Sequence
  ENSG00000273899_15 (sequence is synthesized)
cgcccgtggactatggagtcaggatgacaggacagtgcggtgaggggcatctgcgacaggactgcgggctctacccgccctgatgtgggagctcctggagtgggggtgagcagtgagcca

SEQ ID NO: 793146 - DNA, 120 bp, Artificial Sequence
  ENSG00000273899_16 (sequence is synthesized)
gggtctgcagggctgtcctctctccacagccaacagccaggccttacagtggggcaggcttagtgactgtgcctcagttatgctgtacctgggagtgggcaggccctctcccatgtcacc

SEQ ID NO: 793147 - DNA, 120 bp, Artificial Sequence
  ENSG00000273899_17 (sequence is synthesized)
atcaaaacccactgatgaaggctggtgggagtctgagggctgcacccgggtatggtgagttcccctcagggattgtgctgagcgccttggcctggcttcttggctccgcccacctgctct

SEQ ID NO: 793148 - DNA, 120 bp, Artificial Sequence
  ENSG00000273899_18 (sequence is synthesized)
ccctgccaccaagttgtcttccccgggtggcatgtgccacttggctgcctcgtgcctgggcacagtggtgcctattatgggccctccaggtggctctggtgctcagcctgctgtgagcag

SEQ ID NO: 793149 - DNA, 120 bp, Artificial Sequence
  ENSG00000273899_19 (sequence is synthesized)
gaacagctgagtcccaggggttcttgcacacagcagggctcgggtttgaatccaggctctgctgcttggtcgctgcatgagcttctgctgtgctgacctctctggtttgtctcgtcatgt

SEQ ID NO: 793150 - DNA, 120 bp, Artificial Sequence
  ENSG00000273899_20 (sequence is synthesized)
gtaaggtgacaccagatacctacctcttagggctgccccgagactaaaataagaccatgtgcatgaaccacttaccaaagtgcctgttgctctccaggtgtgcctaccgcatgttgccgc

SEQ ID NO: 793151 - DNA, 120 bp, Artificial Sequence
  ENSG00000273899_21 (sequence is synthesized)
tgctgtttctgctgggacgtctgactccagttccttctcccctctccagtgacaaggtcatttacaacttacatttacaatttatagtgtttaccagtattaaattctcagccactcctt

SEQ ID NO: 793152 - DNA, 120 bp, Artificial Sequence
  ENSG00000273899_22 (sequence is synthesized)
ctgctctctcagcggtgagtcttggcctgctgcctccccggtcccacccctcctggctggcagtagtgacctggcccttagggtggtgtggagcaggtgtagggcccggagcagccctct

SEQ ID NO: 793153 - DNA, 120 bp, Artificial Sequence
  ENSG00000273899_23 (sequence is synthesized)
acttacacttttttggaatggtgcctagcacatagtgagcgcggcattagccatttttctcctagagcgagcccttctctccttgtataatgactctcctgtctctgccggcttccttcc

SEQ ID NO: 793154 - DNA, 120 bp, Artificial Sequence
  ENSG00000273899_24 (sequence is synthesized)
aatctccaggctctcctggggctcccaggtggccacccagaaacagcttcagaagcctggctgcagatggagtgccctctgctggacattggagaacacgtcccccaggctgccctgcct

SEQ ID NO: 793155 - DNA, 120 bp, Artificial Sequence
  ENSG00000273899_25 (sequence is synthesized)
acttgcagccttggatttccctaatagaggcagctgctggcatggggcgatgtgtgtgtgggcaggactggggaatagtttatacaggtggagactctgtgggcccgggtctgggagtga

SEQ ID NO: 793156 - DNA, 120 bp, Artificial Sequence
  ENSG00000273899_26 (sequence is synthesized)
tggaagatggagtctcctcctgatcttgcagtatggatcatggtctccctcaccctgggggtgattaataccccagcctgaggttggactgagaggccatactcactgtgttccctgcct

SEQ ID NO: 793157 - DNA, 120 bp, Artificial Sequence
  ENSG00000273962_0 (sequence is synthesized)
gatccagtgaggatattgtgatgacccagactccactctccctgcccgtcacccctggagagccggcctccatctcctgcaggtctagtcagagcctcttggatagtgatgatggaaaca

SEQ ID NO: 793158 - DNA, 120 bp, Artificial Sequence
  ENSG00000273962_1 (sequence is synthesized)
tctggagtcccagacaggttcagtggcagtgggtcaggcactgatttcacactgaaaatcagcagggtggaggctgaggatgttggagtttattactgcatgcaacgtatagagtttcct

SEQ ID NO: 793159 - DNA, 120 bp, Artificial Sequence
  ENSG00000273976_0 (sequence is synthesized)
attctagtgcagccctggttacgcctcctctggctcagtcacacagcgacgtagaggtgactggaggtatatacttgtcctcacctggatcatgctgatgtggccccaaccccacctccc

SEQ ID NO: 793160 - DNA, 120 bp, Artificial Sequence
  ENSG00000273976_1 (sequence is synthesized)
gatgtccaaagaaaccagacagagcaaattggccgaggccaaggaacagttgacagaccatcatccccagaccaaccctagtgttggtacagcagcaagcgacaccaaaaagaagaaaat

SEQ ID NO: 793161 - DNA, 120 bp, Artificial Sequence
  ENSG00000273976_2 (sequence is synthesized)
aaataatggcactaaccctgagacaaccacttctggtggttgccactcgcctgaggatgaacagaaggcaagccaccaacatcaggaagccctaaggagggagctagaggcccaggttca

SEQ ID NO: 793162 - DNA, 120 bp, Artificial Sequence
  ENSG00000273976_3 (sequence is synthesized)
taccatacgaatccttacatgtcagaaaactgagcttcagatggcactctactacagccagcatgctgtcaagcagttggaaggagaggccagggatctgatcagccgcctgcatgattc

SEQ ID NO: 793163 - DNA, 120 bp, Artificial Sequence
  ENSG00000273976_4 (sequence is synthesized)
atggaagtttgcaggagagttagagcaggctctctctgctgtcgctacacagaagaagaaggcggataggtacattgaggagttaacaaaggagagggacgccctgagtctggaactgta

SEQ ID NO: 793164 - DNA, 120 bp, Artificial Sequence
  ENSG00000273976_5 (sequence is synthesized)
caggaacaccataactgatgaggagctgaaggagaaaaatgccaaactacaagaaaaacttcaacttgtagaatctgaaaagtctgagatccagctcaacgtaaaggagctaaaaaggaa

SEQ ID NO: 793165 - DNA, 120 bp, Artificial Sequence
  ENSG00000273976_6 (sequence is synthesized)
actggagagggccaagctcctgctgccacagcagcagctgcaggcggaggctgaccacctgggtaaggagctgcagagtgtgtcagcaaagctccaagcccaggtggaagagaacgagtt

SEQ ID NO: 793166 - DNA, 83 bp, Artificial Sequence
  ENSG00000273976_7 (sequence is synthesized)
tgtcagcaaagctccaagcccaggtggaagagaacgagttgtggaaccgcctgaaccagcaaaggagtgggaggagaagatac

SEQ ID NO: 793167 - DNA, 120 bp, Artificial Sequence
  ENSG00000273976_8 (sequence is synthesized)
gatgatgtgggagaaggaggagaagatacgggagctggaagagaagatgcacgagcaggagaagatacgggagcaggaagagaagaggcaggaggaggagaagatacgcgagcaggagaa

SEQ ID NO: 793168 - DNA, 120 bp, Artificial Sequence
  ENSG00000273976_9 (sequence is synthesized)
aggaggagaagatacgggagcaggaagagaagatacgggagcaggagaaaaagatgtggaggcaggaggagaagattcacgagcaggagaagatacgggaggaggagaagaggcaggagc

SEQ ID NO: 793169 - DNA, 87 bp, Artificial Sequence
  ENSG00000273976_10 (sequence is synthesized)
aaaagatgtggaggcaggaggagaagattcacgagcaggagaagatacgggaggaggagaagaggcaggagcaggaggagatgtaga

SEQ ID NO: 793170 - DNA, 87 bp, Artificial Sequence
  ENSG00000273976_11 (sequence is synthesized)
tatggaggcaaaaggagaagatgcacgagcaggagaagatacggaagcaggaggagaaggtgtggaggcaggaggagaagatgcacg

SEQ ID NO: 793171 - DNA, 72 bp, Artificial Sequence
  ENSG00000273976_12 (sequence is synthesized)
tgatgcaggaacaggaagagaagatgtgggagcaggaggagaagatgtgtgagcaggaagagtgggagcagg

SEQ ID NO: 793172 - DNA, 120 bp, Artificial Sequence
  ENSG00000273976_13 (sequence is synthesized)
ggagcaggaagtgaggctgcggcagcaggaggagaagatgcaggaacaccaggagcacctggaagctgccatctaatgagcacatgacaagaaggcaaagacaataaacatgtaaaagcc

SEQ ID NO: 793173 - DNA, 120 bp, Artificial Sequence
  ENSG00000273976_14 (sequence is synthesized)
ggcagcaaggcctggagaagagtaagccgccatgtgactgtttagaatatagtctgagcacaaacctgaaaaaaaaattttatttattttaaattgtggcaaaatactggccaggcatgg

SEQ ID NO: 793174 - DNA, 120 bp, Artificial Sequence
  ENSG00000273976_15 (sequence is synthesized)
tcaaaaaaaaaagtttcttccttacatgtatgtttctattagttttcttcttggtctttctcatttagtcttgtgttgtcttttgacattcatagtaaacttttatctgcctccagagag

SEQ ID NO: 793175 - DNA, 120 bp, Artificial Sequence
  ENSG00000273976_16 (sequence is synthesized)
tattgactttgagtttatggcacacaattggagtaagggcagatcgccttcatctactttgggactaagctggttcaaagcaggttttaggttttctgatggctggtctatgttttattc

SEQ ID NO: 793176 - DNA, 120 bp, Artificial Sequence
  ENSG00000273976_17 (sequence is synthesized)
atttggactcccaggggtggcccttccagggtccccaccaaggtcccatctccttcctgggacccaaattctcattaggtcatttcagccctgtgagagtgccaaacattcagctaggct

SEQ ID NO: 793177 - DNA, 120 bp, Artificial Sequence
  ENSG00000273976_18 (sequence is synthesized)
ttagcctcttagccctctactgttgaccaatcaccaaatgtgggaaagcactacagactgtcaggatcacctcctaggcctggtcactcaagtcctgactgaggtctccaattaccttcc

SEQ ID NO: 793178 - DNA, 120 bp, Artificial Sequence
  ENSG00000273976_19 (sequence is synthesized)
cactcaagtcctgactgaggtctccaattaccttccaacaattgtttttgattgggggcggggcacatttttatccagtttttctaactgctcttgtggggaggcgaatctgtaacaagc

SEQ ID NO: 793179 - DNA, 120 bp, Artificial Sequence
  ENSG00000273976_20 (sequence is synthesized)
tcctctgcctttactgaaagttgaaaaccttcatctgtcctttttttgttgttgttgagatggagtcttgcgctgttgcccaggctctagtgcaatggcacgatctctgctcactgtaac

SEQ ID NO: 793180 - DNA, 90 bp, Artificial Sequence
  ENSG00000273976_21 (sequence is synthesized)
cccgcgtagcgatacctttaatagaggcaggatgtcaccatgttttccaggctggtctcgagctcctgactcaggtgatctacctgcctc

SEQ ID NO: 793181 - DNA, 79 bp, Artificial Sequence
  ENSG00000273976_22 (sequence is synthesized)
tccggcccatctgtcttttaaaacatgtttttaattggaggtataatttctattagtgaaatgcacaggtctggtttac

SEQ ID NO: 793182 - DNA, 120 bp, Artificial Sequence
  ENSG00000273976_23 (sequence is synthesized)
ggtataatttctattagtgaaatgcacaggtctggtttacattttgatgagttttaactcatttaacattactatggaacccacctcctttgaagatacagagtatttctatcatccaga

SEQ ID NO: 793183 - DNA, 120 bp, Artificial Sequence
  ENSG00000273976_24 (sequence is synthesized)
aagttctcctgtgctttcatgctgtcccgcactcccccagcagctgatgaacatgctgaggacattggtactggattctggccgccccaaaagagccgctttgaccaggcttacccagca

SEQ ID NO: 793184 - DNA, 120 bp, Artificial Sequence
  ENSG00000273976_25 (sequence is synthesized)
ctaaatccctgcctgctctctcaaaatttccatctttaaactggttgtacctataaccctccctcatcaagtcaatagataaacaaaccctgaaaaataaacaactcttcctggcccagc

SEQ ID NO: 793185 - DNA, 120 bp, Artificial Sequence
  ENSG00000273983_0 (sequence is synthesized)
gccttataatggtcaaaggtttccagctagcagcagtccaggtgactcaagaaaacggcacaagataaacttctcaaaacgtggtcctccgaatctggccccacaacacatctactgaat

SEQ ID NO: 793186 - DNA, 120 bp, Artificial Sequence
  ENSG00000273983_1 (sequence is synthesized)
gagaattagcgtcttccaagtcttaaagtagtcgtttacggactacagcttgagaagcgcagaattagaactttaagaagttaacgttcttggatcgcagactaaccgagaagagaggat

SEQ ID NO: 793187 - DNA, 120 bp, Artificial Sequence
  ENSG00000273983_2 (sequence is synthesized)
tcaaaaatgaagtgattcatccaatcagattttccagtaattcaccaatcacatcgttggactcttcagccaatggttttgttgcgcgggtcttttgaaaatcaacaaggccaattagaa

SEQ ID NO: 793188 - DNA, 120 bp, Artificial Sequence
  ENSG00000273983_3 (sequence is synthesized)
tgtttctgagtatatataagggcagtttccactctgccaagtggctgagtttttctttcaggtagtctgagatggcccgcaccaagcagactgcacgcaagtccaccggtggcaaagcgc

SEQ ID NO: 793189 - DNA, 120 bp, Artificial Sequence
  ENSG00000273983_4 (sequence is synthesized)
cgcgcaagcagctggccactaaggcggctcggaaaagcgcgccggccaccggcggcgtgaagaaacctcatcgctaccgtcccggcaccgtggctctgcgcgagattcgccgctatcaga

SEQ ID NO: 793190 - DNA, 120 bp, Artificial Sequence
  ENSG00000273983_5 (sequence is synthesized)
agtcgactgagctgctgatccgcaagttgcctttccaacgcctggtgcgagaaatcgctcaggacttcaagacagatctgcgctttcagagttccgcggtgatggccctgcaggaggcct

SEQ ID NO: 793191 - DNA, 120 bp, Artificial Sequence
  ENSG00000273983_6 (sequence is synthesized)
gcgaggcctacttggtggggctctttgaggataccaacctgtgtgccatccatgctaagcgagtgactatcatgcccaaggacattcagctcgctcgccgcattcgtggggagagagcgt

SEQ ID NO: 793192 - DNA, 120 bp, Artificial Sequence
  ENSG00000273983_7 (sequence is synthesized)
agaggtttccgggcagtaattctatccaacttaaaaaggctcttttaagagccgcctactttcacccgaaaatagctgtgattaactaatcaaatctttgaaactaaacattggttttag

SEQ ID NO: 793193 - DNA, 120 bp, Artificial Sequence
  ENSG00000273983_8 (sequence is synthesized)
tacttaagtcctcatttgattggctaaagttaatggtaagcttgctatatttgttcccgtgctttttcccgaaagtgccagattgtcagcgtccttttctaaactggcttttaggggttt

SEQ ID NO: 793194 - DNA, 120 bp, Artificial Sequence
  ENSG00000273983_9 (sequence is synthesized)
ggagcttcgatttggtagtggaaggggccacctgggggcgtttatatacattgtctcaagcgttagtcgcgttgtctacttacacccattatagatgggattttttttcgttgtgtattt

SEQ ID NO: 793195 - DNA, 120 bp, Artificial Sequence
  ENSG00000273983_10 (sequence is synthesized)
cttttaaaactttacaggtatgagcattggcagttgagagtaggtagggatatccttggttgctgctttttcgtgtctgaagcagctatttccacaattccccctttttttaaacagttc

SEQ ID NO: 793196 - DNA, 120 bp, Artificial Sequence
  ENSG00000273983_11 (sequence is synthesized)
ttggtttttctgtgaaatgatccattttttaattcaatattagaaattggcggcagaaacgaaagccagattggcctctacattactggcagcatgggcattacgtgggaacttgttaga

SEQ ID NO: 793197 - DNA, 120 bp, Artificial Sequence
  ENSG00000273983_12 (sequence is synthesized)
agctcccagggcattacatgggagcttgtttcaatccccatctagggctggagtcaatctgcatatacctcagatgattctcatgaacactgatttaggaagcctaggttgttggttttg

SEQ ID NO: 793198 - DNA, 120 bp, Artificial Sequence
  ENSG00000273983_13 (sequence is synthesized)
gtctcatcagtaaaggcatcctgcctgtgaactcttacaaggagtgagcttttgcaaaatgcatgtttatttatgttacagaatgaaatattctatgaaatgttctctaaagcaagtgca

SEQ ID NO: 793199 - DNA, 120 bp, Artificial Sequence
  ENSG00000273983_14 (sequence is synthesized)
cagaacaatcccctaaaatagtttgatttctttacagatcagttttctcaatgtaacattacagtcacatgggaaggctttagaaaaatctttacctggggttcaatgagactaatagca

SEQ ID NO: 793200 - DNA, 120 bp, Artificial Sequence
  ENSG00000273983_15 (sequence is synthesized)
atctagagtgggcccagggaatggtaattattaaaattcaggtgcttctaacagctggggctgagactccttgctacataaattttaatactcttattagctctggtttgactctaggct

SEQ ID NO: 793201 - DNA, 120 bp, Artificial Sequence
  ENSG00000273983_16 (sequence is synthesized)
tagcagttttctaattgaatcagtttccttgtagtttgccttcagagagaatatactggtctctaaagactttctggcttgcttgactatctttcaacacctggcttttataagaatttc

SEQ ID NO: 793202 - DNA, 120 bp, Artificial Sequence
  ENSG00000273983_17 (sequence is synthesized)
ttgttttgttttgttttttgtttttttgaaccaccgaggtccttttagtgattggaagtatcaggtttttagggatgttacaaggaggaacacataccatcctgggctgcttggcataca

SEQ ID NO: 793203 - DNA, 120 bp, Artificial Sequence
  ENSG00000273983_18 (sequence is synthesized)
aacacataccatcctgggctgcttggcatacaaccaagatatgttttcatatagaacccttcctttacagattagcacaaggccctgtttgggtattcagcagatccttctttatgatct

SEQ ID NO: 793204 - DNA, 120 bp, Artificial Sequence
  ENSG00000273983_19 (sequence is synthesized)
ttattaatttagcaacttgtcattttttttcacatattgcttttattttaaaaacttatttgacattccagaatatatgggaaaggagataatagtttaataaaacctatgttcctctca

SEQ ID NO: 793205 - DNA, 80 bp, Artificial Sequence
  ENSG00000274070_0 (sequence is synthesized)
cgctcggcccctcggctgctgctccgccggcgctgcctccctcgccccgcggctcccccttgcaacttggcgggcctcct

SEQ ID NO: 793206 - DNA, 120 bp, Artificial Sequence
  ENSG00000274070_1 (sequence is synthesized)
cccccgcggatgagccgccgcggacggggcgcgggcggacgatggaactccacatcctggagcaccggctgcaagttgccagcgtcgccaaggagagtatcccgctgttcacctacggcc

SEQ ID NO: 793207 - DNA, 120 bp, Artificial Sequence
  ENSG00000274070_2 (sequence is synthesized)
tgatcaaacttgccttcctgtcctccaagaccaggtgcaagttcttcagtctgactgagacgccagaggattacactatcattgtcgatgaggaaggattcctagagctgccctcctcgg

SEQ ID NO: 793208 - DNA, 120 bp, Artificial Sequence
  ENSG00000274070_3 (sequence is synthesized)
agcacctgagtgtggcagatgccacctggctggccctgaacgtggtgtccggcggtggcagcttctccagctcccagcccatcggcgtgaccaagatcgccaagtcagtcatcgccccac

SEQ ID NO: 793209 - DNA, 120 bp, Artificial Sequence
  ENSG00000274070_4 (sequence is synthesized)
tggctgaccagaacatatccgtgttcatgctgtccacgtatcagacagacttcatcctggtgcgcgagcgggacctgccctttgtcacccacacattgtcatcagagttcaccatcctgc

SEQ ID NO: 793210 - DNA, 120 bp, Artificial Sequence
  ENSG00000274070_5 (sequence is synthesized)
gggtcgtcaatggcgagaccgtggcagccgagaacctcggcatcaccaatggcttcgtgaagcccaagctggtccagaggccagtcatccacccactgtccagcccgagcaacaggttct

SEQ ID NO: 793211 - DNA, 120 bp, Artificial Sequence
  ENSG00000274070_6 (sequence is synthesized)
gtgtcaccagcctggaccctgacacgctgcctgctgttgccacactcctcatggatgtcatgttctactccaatggagtgaaggaccccatggccactggggatgactgcggccacatcc

SEQ ID NO: 793212 - DNA, 120 bp, Artificial Sequence
  ENSG00000274070_7 (sequence is synthesized)
gcttcttctccttctccctcatcgagggctacatctccctggtgatggacgtgcagacgcagcagaggtttcctagtaacttgctgttcacaagcgcatccggagagctctggaagatgg

SEQ ID NO: 793213 - DNA, 120 bp, Artificial Sequence
  ENSG00000274070_8 (sequence is synthesized)
tccggattggaggacagcccctggggtttgatgagtgtggcatcgtggcccagatctcagagcccttggctgctgcagacatcccagcctactacatcagtactttcaagtttgatcatg

SEQ ID NO: 793214 - DNA, 120 bp, Artificial Sequence
  ENSG00000274070_9 (sequence is synthesized)
cacttgtccccgaagagaacatcaatggtgtcatcagtgccctgaaggtcagccaagcagagaagcactagaagggtctcttctgctcctccctgccgccgcccgggcccagccctaacc

SEQ ID NO: 793215 - DNA, 120 bp, Artificial Sequence
  ENSG00000274070_10 (sequence is synthesized)
ctgaagattgatcttgcagtatttctctacagactggaaaatcagcctggggaccctgaggaaggggcctctgtgggagactccctcgattgccaatccctccagggcaggggcccacgc

SEQ ID NO: 793216 - DNA, 120 bp, Artificial Sequence
  ENSG00000274070_11 (sequence is synthesized)
caaggcctctccatgccctcctgccttcccggagccccccgaccctccagagaacgacctttctcttccctacctcccccaccccggaaaatgctttcggaggcccagggagcttgtgag

SEQ ID NO: 793217 - DNA, 120 bp, Artificial Sequence
  ENSG00000274070_12 (sequence is synthesized)
ctgatccgccttctcatccggcctcacccacggccaggggcagatgccgagggaagccggtccctcctgcgagacaccggtgtgccagctgtcatgtcaccttgcagggctggggctggc

SEQ ID NO: 793218 - DNA, 120 bp, Artificial Sequence
  ENSG00000274070_13 (sequence is synthesized)
ggggtggggccgagtttggggtgccctggagggtttgggggtgagtactgtggtcactggtctctgcttccatcagctcagggctggttccctcggagtggaggccagcgtggccccctc

SEQ ID NO: 793219 - DNA, 120 bp, Artificial Sequence
  ENSG00000274070_14 (sequence is synthesized)
aggtcatcggggctggtgaggctcagacaggaacccaggtgggatccccgagctgggaaggacccagactccccctgtacctcgcctgccaaccacagggcctgggcccgactcccagca

SEQ ID NO: 793220 - DNA, 120 bp, Artificial Sequence
  ENSG00000274070_15 (sequence is synthesized)
agactgccaagagggccctgtccagaccctcccccacaagcactcagtccttgggggaggagggagggtcccaggagacccaccagcctggagcaccagctcctgtcccctcggctctcc

SEQ ID NO: 793221 - DNA, 120 bp, Artificial Sequence
  ENSG00000274070_16 (sequence is synthesized)
ctggacccgacttgggcaggtagagcctcagcttcccccagtagggacatccctggctttccaggcctgaggtttcttaggtggtgtcccacctccccaacagacaactagaccagcata

SEQ ID NO: 793222 - DNA, 120 bp, Artificial Sequence
  ENSG00000274070_17 (sequence is synthesized)
ggactccccgccgtcctcctccctcctctgcccccaagtcacctgcctgcccacccgccccttggctgggggctgtggcattcatgagtacttgacccaggaggcagcttaactgagcct

SEQ ID NO: 793223 - DNA, 120 bp, Artificial Sequence
  ENSG00000274070_18 (sequence is synthesized)
taatagagaaaaccatactttgttttagttttttatttaatgtatttgcacccagggtgctcttggcggtagtttctgtttggcagggataggacctgtttgagttctgtcaagggagcc

SEQ ID NO: 793224 - DNA, 120 bp, Artificial Sequence
  ENSG00000274070_19 (sequence is synthesized)
tggaggctctgtgtcactaagctggtgctctgtggctccagggacaggcagtgggaatcgggagatgtcacaggagcctgggccctctcttctgaagggaagctaggagcagagatctgt

SEQ ID NO: 793225 - DNA, 120 bp, Artificial Sequence
  ENSG00000274070_20 (sequence is synthesized)
tacaagacgctggagccgctggcaccccacatgggaactcccaccaaccagctgtagttctatctgagcaccggagggggtgagggaacccgagggccatggggaggtggacagccaggt

SEQ ID NO: 793226 - DNA, 120 bp, Artificial Sequence
  ENSG00000274070_21 (sequence is synthesized)
ggcaggccagctgagtggtcatgtccaggaggcatggggttagccgtggtgtcccttccagtggggtggttttctgaatgagcaggaccaagggcccctgtggttttggctctggcgggg

SEQ ID NO: 793227 - DNA, 120 bp, Artificial Sequence
  ENSG00000274070_22 (sequence is synthesized)
ctgggattacaggcacgcaccaccacgtctggctagttattgtattttttaatagagacgggatttcgtaacattgctcaggctggtcttgaactcctgagttaagtgatccgcctgcct

SEQ ID NO: 793228 - DNA, 120 bp, Artificial Sequence
  ENSG00000274070_23 (sequence is synthesized)
caggcgtgagccaccacacccagccgagttgtgctgtttctgtggtcagaggagaagggatattttctagtcctgacaaagtgttccctgcttctctgagtgggaccctctgagccctgg

SEQ ID NO: 793229 - DNA, 120 bp, Artificial Sequence
  ENSG00000274070_24 (sequence is synthesized)
tccctgcttctctgagtgggaccctctgagccctggaagcccaccagaaggagaagctgttctttaaaatccttgtgggtgttgaaggcccaccacattaattagaaaccaacttttttt

SEQ ID NO: 793230 - DNA, 120 bp, Artificial Sequence
  ENSG00000274070_25 (sequence is synthesized)
tttttaagttaatttgttttgcacaaaactccagaacaaaactcgtacattgctggtcccaaaagggaggtggccaagtggggcagggctgtggtggaagccctgagtcccctttctgac

SEQ ID NO: 793231 - DNA, 120 bp, Artificial Sequence
  ENSG00000274070_26 (sequence is synthesized)
cttgcaaggccttgattttcctttctgtcatttccccctgacggtgtcacttctctgcctttccttcccgccgtgcaagtgtgtcggccccgtgaccccagagtcgtgtgtcccctagac

SEQ ID NO: 793232 - DNA, 120 bp, Artificial Sequence
  ENSG00000274070_27 (sequence is synthesized)
ttcctaggacgtatctattgtacacacctataaatacctgtgttttatgttgatagagatatatactgtaaatagcatatatacttgagcaatatatatgttaatatatactgtgtgcgc

SEQ ID NO: 793233 - DNA, 120 bp, Artificial Sequence
  ENSG00000274070_28 (sequence is synthesized)
agtccgtggacacagccccccgctgtgtgtgcacacgtgtatgggcgtgatggcctccaccccgcaccgtctgccatacacgcgggcacatttgagccaccatatatttttaattcaagt

SEQ ID NO: 793234 - DNA, 120 bp, Artificial Sequence
  ENSG00000274070_29 (sequence is synthesized)
atataggcaatacgattattacagaagccgatgggttccctcagacctgacttgagagaacaaagccagcagctcaaagagcctgtgacatgggacgtgggaagggtgctgagagcccgc

SEQ ID NO: 793235 - DNA, 120 bp, Artificial Sequence
  ENSG00000274070_30 (sequence is synthesized)
tgtggcgtgggtcatgccttctgcaccccactttccccaggcaagatccctgggcgcccttatttggggggatgttgatcccgagggaggagtatttggaatttcttgcttttaaccaga

SEQ ID NO: 793236 - DNA, 120 bp, Artificial Sequence
  ENSG00000274070_31 (sequence is synthesized)
gggccacacgctgcctgtgtcctgcctccgtgggtggcactttttacgcaggcagcttctctgttttttttgttttttgtaacctgcaagcttagaaatctcaggttgtgctcctggggc

SEQ ID NO: 793237 - DNA, 120 bp, Artificial Sequence
  ENSG00000274070_32 (sequence is synthesized)
tgctcctggggactggcctcgtgtcatggagaaaagcatgtgtgtcggggcgcgctggggccagggtatggctctccgccctggctggctctgcaggggtggtccctgttcaagcccgct

SEQ ID NO: 793238 - DNA, 120 bp, Artificial Sequence
  ENSG00000274070_33 (sequence is synthesized)
ccgtgggagctgccccctggggaccctgctcctcggtcacagggggcccctttagttttcccatccccatcctgctcgtgtaaagcttggtttatcttctcggcgttctgtgtgtagcgt

SEQ ID NO: 793239 - DNA, 120 bp, Artificial Sequence
  ENSG00000274070_34 (sequence is synthesized)
agtcttggtttggtctccacagctcttcggggtggggtgtgagtgtggtttttcccaggcaggggccgtctgcccttgtcccccagctatctcctggtctgctgggtgggagggtctctc

SEQ ID NO: 793240 - DNA, 120 bp, Artificial Sequence
  ENSG00000274070_35 (sequence is synthesized)
caggccccagaccccacttggaggggcatgtgtttctcagaggggctccatccgcagttgcatggaactccttacctgtttgccgtccatcccccggaggtaatcagaggagtgggcctg

SEQ ID NO: 793241 - DNA, 120 bp, Artificial Sequence
  ENSG00000274070_36 (sequence is synthesized)
cccggaggtaatcagaggagtgggcctgttgtcttggcgctggcggatggggcaggtgcctggcgggggaggaagagggctctctatgatgtggaatttttttttttttttttttgagac

SEQ ID NO: 793242 - DNA, 120 bp, Artificial Sequence
  ENSG00000274070_37 (sequence is synthesized)
gtgctgtggcatgatctcagctcactgcagcaacctccacttcctgggttcaagcgagtctcctacattggcctcccaagtaggtgagattacaggcactcaccaccacacgcggctaat

SEQ ID NO: 793243 - DNA, 120 bp, Artificial Sequence
  ENSG00000274070_38 (sequence is synthesized)
ccgtgcccggcctcatggaatttctaggggtgagcaggtgaccctggggctgccacttgagctcctggagtgtgtgtcttggcccctgtgtggttctccattaagaaaagctcagatagt

SEQ ID NO: 793244 - DNA, 120 bp, Artificial Sequence
  ENSG00000274070_39 (sequence is synthesized)
ctcaaccccaccctctccccttgctgcactcagagtaccagtgggagctgaaggatggggaggaacagagcagtgaccacccctccctgccactgataagttctgcctcgtcgtggggct

SEQ ID NO: 793245 - DNA, 120 bp, Artificial Sequence
  ENSG00000274070_40 (sequence is synthesized)
cccctggttcccaagacaccccttcctccctcagcccgtcgtcctaacccagcaaagatctgggcattgctgactctgcacctccttcctccatgggcatctccaggaccgccctccttc

SEQ ID NO: 793246 - DNA, 120 bp, Artificial Sequence
  ENSG00000274070_41 (sequence is synthesized)
aaggggcactgcccacaccactgtcctcagcccgaggcatgcatctgagctggagaggcttgcaggcctgaccctggtagcttcccctccccaagattcagaggcggggacccaaagcct

SEQ ID NO: 793247 - DNA, 120 bp, Artificial Sequence
  ENSG00000274070_42 (sequence is synthesized)
cactccaaaccactggcattctcacctcctctcacctccaggcaccaggctgctggtgggaaaggaaggagctgggggatcagaggcttccagtgtggcctccggaagcagcagcgtagc

SEQ ID NO: 793248 - DNA, 120 bp, Artificial Sequence
  ENSG00000274070_43 (sequence is synthesized)
cagggtgacatttgttcagcaggaggaggcttggtctggaggggcttgcccctctgaggtgacagaggatgccctggaggtcaggagagaagactgggaagacaggaagggccaggcccc

SEQ ID NO: 793249 - DNA, 120 bp, Artificial Sequence
  ENSG00000274070_44 (sequence is synthesized)
tgttaaagcccagggcactatttggtgatcttcaaaggtgaacacaggccacctcccactggccccctcctcctggccacattttccagggataccctggggagtcctaaggccaccctg

SEQ ID NO: 793250 - DNA, 120 bp, Artificial Sequence
  ENSG00000274070_45 (sequence is synthesized)
ggcccctttctgagcctagagatctggatgtggtgacaaccagggcttttcccagccccagctaagagagggggctttagggcaagagcacctcagccctgcaatggggggatctttttt

SEQ ID NO: 793251 - DNA, 120 bp, Artificial Sequence
  ENSG00000274070_46 (sequence is synthesized)
gctgggattacaggcatgagataccccgcctggccaatgggatttttgacgccacttcctgagtgaagcgctttgcatggggatgggaagaagcacccccaaccttctagtccgctccga

SEQ ID NO: 793252 - DNA, 120 bp, Artificial Sequence
  ENSG00000274070_47 (sequence is synthesized)
gcagggcctggagcattggagacattggttagtgtaataggcagagcctgagtgaggccggggggcttctccaacagagaaaagacattggctttgggtaccatgctgagggagggggtt

SEQ ID NO: 793253 - DNA, 120 bp, Artificial Sequence
  ENSG00000274070_48 (sequence is synthesized)
aaagacattggctttgggtaccatgctgagggagggggttaggcctggtgggggcccattcaaaggaggccgggctcggtggcttaggcctgtcatcccagcactttgggagaccaaggt

SEQ ID NO: 793254 - DNA, 120 bp, Artificial Sequence
  ENSG00000274070_49 (sequence is synthesized)
tcaacatagcaagaccctgcctctacaagaaaataacgaaagaggccccagggaaggaagccagccaggagcagcctggagcagaggcaggagcctgaggcctgagccatggcatccagg

SEQ ID NO: 793255 - DNA, 120 bp, Artificial Sequence
  ENSG00000274070_50 (sequence is synthesized)
gacagcctggtggccgagagagcttgtggctgtcactataagggaagaggagctatggaaattggaagtgcagggtggcctgtgtgctaggagtgggggtgcaggcctaggtgtgtttat

SEQ ID NO: 793256 - DNA, 120 bp, Artificial Sequence
  ENSG00000274070_51 (sequence is synthesized)
gcacacgtttgtgcatgtacctgtgagcgtggatgtgttcctatgcattagagtgtgtgcgtgcacgtgtgcagagcccacacctgagatatgggactggctcttggagtattttgagtt

SEQ ID NO: 793257 - DNA, 120 bp, Artificial Sequence
  ENSG00000274070_52 (sequence is synthesized)
ctcagtagcagtcttgttgtcaggccttgagtgcagaaatgattaggtgagtgagggcaggactcgaatgcagaccctggctccaggggagagggtggggcgtctctggtaggacggcct

SEQ ID NO: 793258 - DNA, 120 bp, Artificial Sequence
  ENSG00000274070_53 (sequence is synthesized)
caccccacttgtcagaactactctggaggggggcaaaggtgtcaggaacagtttgagcagttctggctcagggtcattcatgaggttgctgttgtctgaaatcttagctaaggattggag

SEQ ID NO: 793259 - DNA, 120 bp, Artificial Sequence
  ENSG00000274070_54 (sequence is synthesized)
gatgcacttctaagtgaggcctggctgtaggcaggaggcctcagtccttccccaggtgggccaacccacagggctgcttgagtgtcttcacaatatggcgctcggcttccccccagagca

SEQ ID NO: 793260 - DNA, 120 bp, Artificial Sequence
  ENSG00000274070_55 (sequence is synthesized)
agagattcaagggcccagggtaaaagccaacgtgttatttttatccctagcctcagaattcacacgccgttgcctccaccatgctctggtttgatacagcccagctctgattggaagggg

SEQ ID NO: 793261 - DNA, 120 bp, Artificial Sequence
  ENSG00000274070_56 (sequence is synthesized)
ctggggctgcccgtgctgactcttcaaaggcatcccatcctgcagatggtgttcacagggagagtttgtgggggccggcactccctcatctactggggctcattctggaagaaggtccag

SEQ ID NO: 793262 - DNA, 120 bp, Artificial Sequence
  ENSG00000274070_57 (sequence is synthesized)
aagaattggagacccctgcccctcacccaaactttggaggtggcagggtgaacagcaggccaagttcaggtcccaagacaggccaaggccagtgcggtttcccttccactgcctcagttt

SEQ ID NO: 793263 - DNA, 120 bp, Artificial Sequence
  ENSG00000274070_58 (sequence is synthesized)
acctgtattcagaagacagtctaggaagagttgagcagagttccctctaaaagagtagggagctgataacagtcccaagccctcctctttctctatgccaaaatcatttccgttatcctg

SEQ ID NO: 793264 - DNA, 120 bp, Artificial Sequence
  ENSG00000274070_59 (sequence is synthesized)
agatgggggtgagtggatggatggtgtactgaggggcctctgccctgcccagagcccccaccatcgtagtgggggcaggggacttcctgcccacaaccccctccaaccctcacctggcgt

SEQ ID NO: 793265 - DNA, 120 bp, Artificial Sequence
  ENSG00000274070_60 (sequence is synthesized)
gcccgggtcaccagcagcagcagcggcgttccatcgctcccaagatctgggtgaaggggagaacctgccatcttatccctacccccccggggccctcaagcttattttcttgttgaagaa

SEQ ID NO: 793266 - DNA, 120 bp, Artificial Sequence
  ENSG00000274070_61 (sequence is synthesized)
acacaaaaccctcgagattcatgtactgtatgttggagaaaaaaaattacctaatgttcccccaaaaaagacagtatattttgtactttgtaaagtgttaattaaaatgaaaaaaaaaaa

SEQ ID NO: 793267 - DNA, 120 bp, Artificial Sequence
  ENSG00000274070_62 (sequence is synthesized)
ggaactctgggtgaactgagtcatcatccccagggcacgggtgggcagctgccccaggggacctgcctggactaatgagatattctgtgtctgtccatccatccaggtgcaagttcttca

SEQ ID NO: 793268 - DNA, 120 bp, Artificial Sequence
  ENSG00000274102_0 (sequence is synthesized)
atggaaactgcaaattacaccaaggtgacagaatttgttctcactggcctatcccagactccagaggtccaactagtcctatttgttatatttctatccttctatttgttcatcctacca

SEQ ID NO: 793269 - DNA, 120 bp, Artificial Sequence
  ENSG00000274102_1 (sequence is synthesized)
ggaaatatccttatcatttgcaccatcagtctagaccctcatctgacctctcctatgtatttcctgttggctaatctggccttccttgatatttggtactcttccattacagcccctgaa

SEQ ID NO: 793270 - DNA, 120 bp, Artificial Sequence
  ENSG00000274102_2 (sequence is synthesized)
atgctcatagacttctttgtggagaggaagataatttcttttgatggatgcattgcacagctcttcttcttacactttgctggggcttcggagatgttcttgctcacagtgatggccttt

SEQ ID NO: 793271 - DNA, 120 bp, Artificial Sequence
  ENSG00000274102_3 (sequence is synthesized)
cattctatcatacaggtggctctcattgttcgacttcctttctgtgggcccaatgagttagacagttacttctgtgacatcacacaggttgtccggattgcctgtgccaacaccttccca

SEQ ID NO: 793272 - DNA, 120 bp, Artificial Sequence
  ENSG00000274102_4 (sequence is synthesized)
gaggagttagtgatgatctgtagtagtggtctgatctctgtggtgtgtttgattgctctgttaatgtcctatgccttccttctggccttgttcaagaaactttcaggctcaggtgagaat

SEQ ID NO: 793273 - DNA, 120 bp, Artificial Sequence
  ENSG00000274102_5 (sequence is synthesized)
accaacagggccatgtccacctgctattcccacattaccattgtggtgctaatgtttgggccatccatctacatttatgctcgcccatttgactcgttttccctagataaagtggtgtct

SEQ ID NO: 793274 - DNA, 120 bp, Artificial Sequence
  ENSG00000274102_6 (sequence is synthesized)
gtgttcaatactttaatattccctttacgtaatcccattatttacacattgagaaacaaggaagtaaaggcagccatgaggaagttggtcaccaaatatattttgtgtaaagagaagtga

SEQ ID NO: 793275 - DNA, 120 bp, Artificial Sequence
  ENSG00000274102_7 (sequence is synthesized)
ggcttatgttcctacctggcttctcctggcctccagaggattgatttttgtagttacagctcatgctgctagttagtttactgttacatcagggcagaaactgatgcataccaacatgta

SEQ ID NO: 793276 - DNA, 120 bp, Artificial Sequence
  ENSG00000274102_8 (sequence is synthesized)
cccaggataaagtcctccactgcgggtggtggaagaggcttcttctacctcctccccatagttcctgaaggcaccaagactgtcacagtaattgctatattatgaaaagagtaaattgaa

SEQ ID NO: 793277 - DNA, 120 bp, Artificial Sequence
  ENSG00000274102_9 (sequence is synthesized)
aacgtctctgctgtatcctggtggctctctcctggagggggggcttcattcattctatcatacaggaacccaaaggcacagattgacgttataagtcctgatttttgacttgacttctca

SEQ ID NO: 793278 - DNA, 120 bp, Artificial Sequence
  ENSG00000274102_10 (sequence is synthesized)
tcacctggaagtgaataaagcagtagacttctctaacattttgtaacacagcatgaaaaaatatagagtacaaaagatatatatatataatatgataaaatgatgagttacgtttctaaa

SEQ ID NO: 793279 - DNA, 80 bp, Artificial Sequence
  ENSG00000274180_0 (sequence is synthesized)
actttcagcgccgccgcctgcggtctcccaggccgtaactaccccaccgcctgccgcctgcgcccgcgctccagccccgc

SEQ ID NO: 793280 - DNA, 120 bp, Artificial Sequence
  ENSG00000274180_1 (sequence is synthesized)
agccccgcgcgcagatggcgcactcggctgccgccgtgccgctgggcgcgctggagcagggctgccccatccgcgtggagcacgaccgccggcgccgccagttcactgtccggctcaacg

SEQ ID NO: 793281 - DNA, 120 bp, Artificial Sequence
  ENSG00000274180_2 (sequence is synthesized)
tccggctcaacggatgtcatgaccgggccgtcctgctctatgagtacgtgggcaagcggatcgtggacctgcagcacaccgaggtcccagatgcctaccgtgggcgtggcatcgccaagc

SEQ ID NO: 793282 - DNA, 120 bp, Artificial Sequence
  ENSG00000274180_3 (sequence is synthesized)
accttgccaaggccgccctggacttcgtggtggaggaggacctgaaggcccatctcacctgctggtacatccagaagtacgtcaaggagaaccccctgccgcagtacctggagcgcctgc

SEQ ID NO: 793283 - DNA, 120 bp, Artificial Sequence
  ENSG00000274180_4 (sequence is synthesized)
agccgtaaccctggcctgcaggcgggagcgctccctgccggactcttccacgtggcctttgcctggccccacgtgctctcaggaacctggtcccactgggaacagactcagagttatttt

SEQ ID NO: 793284 - DNA, 120 bp, Artificial Sequence
  ENSG00000274180_5 (sequence is synthesized)
tgtaaggacactcatctgtgccccacgtccagatccctggaggcagctgaccaatgatgggcggtgacccggtaaccgaggcggcaaggaggccaggtagtcccggcacctctcactctg

SEQ ID NO: 793285 - DNA, 120 bp, Artificial Sequence
  ENSG00000274180_6 (sequence is synthesized)
cagagaccagcggcttcgtgggaggcctgtgggtcacacgtaggggctagagccagcctgcatcctgcccaccgggctccacttggagatcagcaggagggccagtgtgggacccctgct

SEQ ID NO: 793286 - DNA, 120 bp, Artificial Sequence
  ENSG00000274180_7 (sequence is synthesized)
gccacctctcctgggcctgtgtcctttctggaaattaagaaggtgtgctccagagccaagaggagcaataagaaacctcgtgtgccagcttctgagggtggcagtgccagaccccacctg

SEQ ID NO: 793287 - DNA, 120 bp, Artificial Sequence
  ENSG00000274180_8 (sequence is synthesized)
ccagcggtgctgcccctttctcagacccccatgcccagtgcaggcagggccctggaaagggtcagctctccctgacagagaccagcagagtgaaggactgagcactggccaggctcaacc

SEQ ID NO: 793288 - DNA, 120 bp, Artificial Sequence
  ENSG00000274180_9 (sequence is synthesized)
gtacgtgcggttcacacatgtgaacacacaggatgcagtctacaggcgggctggtggtgggtgccgggggtgttttcctctccttggtacccccatcttttttttggcctctcgtgtagg

SEQ ID NO: 793289 - DNA, 120 bp, Artificial Sequence
  ENSG00000274180_10 (sequence is synthesized)
ttctgcaggaaaccaaggccccatccccatgggctgctatcccctatacccctgtctgccaggaggagatccaagggggcctgagcagctgcaggcccgccccttgctggccttggccac

SEQ ID NO: 793290 - DNA, 120 bp, Artificial Sequence
  ENSG00000274180_11 (sequence is synthesized)
ctgcctgagccttctccgaggagatgccttggggctggggtgggagtgaagctgactattctccaaaaaccaccctcagcatccaagaggaagaaacatcagccacaggggtttctgtgc

SEQ ID NO: 793291 - DNA, 120 bp, Artificial Sequence
  ENSG00000274180_12 (sequence is synthesized)
tgctgccagacatcagtgtcctcttttgtggctggctacagccggatacactttgctgcccatctggccctgggctcctccccaacccagccttcctgggtgcagcctgggagacacact

SEQ ID NO: 793292 - DNA, 120 bp, Artificial Sequence
  ENSG00000274180_13 (sequence is synthesized)
agcatgctttggtgggaccagcctttccagggcatgctggcttcccctggggctgactcaggtcccgccctcttgtgtcagtgctaacaaggatcagattcgtccctgcccttctgtaga

SEQ ID NO: 793293 - DNA, 120 bp, Artificial Sequence
  ENSG00000274180_14 (sequence is synthesized)
gctggagggtgacctggagccaggggccctttagggctgagacatttgttagtcggagtgatgcatccctacccggcttcggggggagtcaggctgggctctgggcagtacagggagagg

SEQ ID NO: 793294 - DNA, 120 bp, Artificial Sequence
  ENSG00000274180_15 (sequence is synthesized)
ttcaccaggacccccatgccttcctcccccggtgcaggggcagtggtcaccatgctgactcctccctttgactccatgcacgggcgctggctggcctgtggttgcatttcccactcacct

SEQ ID NO: 793295 - DNA, 120 bp, Artificial Sequence
  ENSG00000274180_16 (sequence is synthesized)
ccttgctatccccagtcttggcaccgagaccccccacattccttctccagcaacagcagcccaggggccttcctgcctggacgcaggaccacggagacctgcatgtgcagggaggcctgg

SEQ ID NO: 793296 - DNA, 120 bp, Artificial Sequence
  ENSG00000274180_17 (sequence is synthesized)
cagcctgccgatgggggtccccgagccccggagtctcctcgaaacccctgctgtgggtcacagcatggaccaggaggggtcaccatcctgagtacccccgacatccctgccccttgacct

SEQ ID NO: 793297 - DNA, 120 bp, Artificial Sequence
  ENSG00000274180_18 (sequence is synthesized)
gtggcagatgctcctgccctggcctccaggaagtcagctcttttgcaaagggcttgtgtgagaggtcggagaaagccctgggcctccagggagatgcagctggcaggaggtgggctgagc

SEQ ID NO: 793298 - DNA, 120 bp, Artificial Sequence
  ENSG00000274180_19 (sequence is synthesized)
tgctccggggctaggggtggcccattgctggcagaatttaaggaaagagcaggttgtaggcacagaggatgggcagccaggcctgggccttccccttactgtcccagggcagcagagcta

SEQ ID NO: 793299 - DNA, 120 bp, Artificial Sequence
  ENSG00000274180_20 (sequence is synthesized)
taccctccctaaggtcacccccttcccatctacacgtccctccccaagttcaagcacatagtcaatcatgaccactcaggagctcagtgagctggggccatgtccctgtggcctccagcc

SEQ ID NO: 793300 - DNA, 120 bp, Artificial Sequence
  ENSG00000274180_21 (sequence is synthesized)
catccgcaggagggtcccttgcagtgacagcacaaagagtcccccacaggaagcccctgagggccagcatggaccttgagagccaggagggaatgggcctggtgccactctgttcccact

SEQ ID NO: 793301 - DNA, 120 bp, Artificial Sequence
  ENSG00000274180_22 (sequence is synthesized)
cccacctaagattcctacccctgtgttctagcaggtgactcttgatctggccagcccacaacaaatacttgaactaggcagcatggggtggtggaggcctgcagaggccccgggcccagg

SEQ ID NO: 793302 - DNA, 120 bp, Artificial Sequence
  ENSG00000274180_23 (sequence is synthesized)
aactgagactagggctttctcatgaggcctcatcaagctcccgcaggtatgacctggcctcctcgcctcgggctgccttaaagcaccgctaacccacgccaaggggctaggcagggcttc

SEQ ID NO: 793303 - DNA, 120 bp, Artificial Sequence
  ENSG00000274180_24 (sequence is synthesized)
gcggggcctggcccaaggtctccagcagagcaataacatcttcccaggttgggttgccacagacaccgtgccctggagcccccagcccatcccatctggtgctaccctgtctgcctggca

SEQ ID NO: 793304 - DNA, 120 bp, Artificial Sequence
  ENSG00000274180_25 (sequence is synthesized)
gcctagcctcacccctcctgtccggtcacctgggggtccttggtaaggatgccgccacatggggccggtttatgcacctgggcgagaacctgactggggcaggggatgctcaggggcctg

SEQ ID NO: 793305 - DNA, 120 bp, Artificial Sequence
  ENSG00000274180_26 (sequence is synthesized)
caggtctcccacagagctgcttttctgcccgcctcaccctgtgggtttgtatttcttgccgggtcaaaataggcagtgactcgtgccttccctcctcagggccggcggcagggtgtggac

SEQ ID NO: 793306 - DNA, 120 bp, Artificial Sequence
  ENSG00000274180_27 (sequence is synthesized)
ccagctggccgctggaccgtccccttcctcattctccaagctcatcaacaggtctcagaggaacatttccataaaaggtgtggcctggcatgcagtgctgtctgcacgctgtcgcttccc

SEQ ID NO: 793307 - DNA, 120 bp, Artificial Sequence
  ENSG00000274180_28 (sequence is synthesized)
ccacagcaacctgccggtcagccttaactggtgtggaggtcgaggtggggagggggaggcgggcttccctccctggtgtctggcctctttttgctcagccctcagcacagccttcagcgt

SEQ ID NO: 793308 - DNA, 120 bp, Artificial Sequence
  ENSG00000274180_29 (sequence is synthesized)
ggagagcgagaccctgcgtgtcactggggcttggctgaggtctccctgcaggataacagtgacttcaggaacccagaccccagtctgggcggctctaccttcccggctggcccagccccc

SEQ ID NO: 793309 - DNA, 120 bp, Artificial Sequence
  ENSG00000274180_30 (sequence is synthesized)
acaccacagttccctgccacctccaggcacaaaagcctctgaggccacagcccagctatgaagctgagtggctttgtgcggtctcctagggaaggggcagtgatgccatgcatgagatcc

SEQ ID NO: 793310 - DNA, 120 bp, Artificial Sequence
  ENSG00000274180_31 (sequence is synthesized)
gctgtgccataagaagttgcttcctttagaatttctggtccaatgcagggaggtgaggcccagcctcatgataacacatgcccatcaaggaaaagctgtggctaatgcttccaaaacaag

SEQ ID NO: 793311 - DNA, 120 bp, Artificial Sequence
  ENSG00000274180_32 (sequence is synthesized)
tgaaaatcttgcaccaggcccagggccatatctcattccgccccagctactgagggaggggacagactgctggaggacaatttctcctagttaccactaggggttacatggctactcaga

SEQ ID NO: 793312 - DNA, 72 bp, Artificial Sequence
  ENSG00000274180_33 (sequence is synthesized)
tttctcctagttaccactaggggttacatggctactcagaatgaaagataaattgccaggcctgttgcaatc

SEQ ID NO: 793313 - DNA, 83 bp, Artificial Sequence
  ENSG00000274180_34 (sequence is synthesized)
aggccccgttgcaatcttactccacttcgttttcacagcagtcccgggacatgcccattattaggcctatttgatagatgata

SEQ ID NO: 793314 - DNA, 120 bp, Artificial Sequence
  ENSG00000274180_35 (sequence is synthesized)
ccgggacatgcccattattaggcctatttgatagatgatactgaggctgagtcgggggtcacaagccaaagccacaccgctagaagggctcaggacccagcccagctcccgtcctcttgg

SEQ ID NO: 793315 - DNA, 120 bp, Artificial Sequence
  ENSG00000274180_36 (sequence is synthesized)
tggcatcaagcttgtgtgatatgaggtcttatgtctgctcatgacagccttaaaagcaataaacagatacaacttccagcaacttcccactcagctgcaaggctgcgggggggtcctgcc

SEQ ID NO: 793316 - DNA, 120 bp, Artificial Sequence
  ENSG00000274180_37 (sequence is synthesized)
tcgagccataaggtgagcagctagccagtgccgggccagtgtggagaaggctgaattgcctgtgaagctggggttgcaggcaggaatattcatggagcccctgaccatgtactcacactg

SEQ ID NO: 793317 - DNA, 120 bp, Artificial Sequence
  ENSG00000274180_38 (sequence is synthesized)
ctcttcctcagttcagggttcttggatttgctcaagtccacccaaatatccctttacgattctcagggtcccactccttccagatccaatgccctaaactttacataagagttccggcaa

SEQ ID NO: 793318 - DNA, 120 bp, Artificial Sequence
  ENSG00000274180_39 (sequence is synthesized)
ggctgtgacttcaacttgtgttgtaactgcaacctgcagaatcaaatttagggttatgttttcagttgtatcagtcttacggctacaagatattaaagagattcttttctggttatcaaa

SEQ ID NO: 793319 - DNA, 120 bp, Artificial Sequence
  ENSG00000274183_0 (sequence is synthesized)
actggacgcggtaactgtcctcttgagagccatcttgcctagctgggccaagccgagatagcacactcaacgcccagcatgccgaggaggaggagacgccgagggtcctccggtgctggc

SEQ ID NO: 793320 - DNA, 120 bp, Artificial Sequence
  ENSG00000274183_1 (sequence is synthesized)
ggccgggggcggacctgctctcgcaccgtccgagcggagctttcgttttcagtgagccaggtggagcgcagtctacgggagggccactacgctcagcgcctgagtcgcacggcgccggtc

SEQ ID NO: 793321 - DNA, 120 bp, Artificial Sequence
  ENSG00000274183_2 (sequence is synthesized)
ggtggttcacaacgacaggctactgagcacccttttcaacacgaccaccatctctcaagtggcccctggcgaggactagcttctgacacccggcccctgggacctgacaggtccactcgt

SEQ ID NO: 793322 - DNA, 120 bp, Artificial Sequence
  ENSG00000274183_3 (sequence is synthesized)
ccacccacccggccccaaatcccccggcctgaacccccggccttaaacaccctccccccacaacccaggccccaaagtcttgggccttcattaattctgtcaataaaatgtttcaaggaa

SEQ ID NO: 793323 - DNA, 120 bp, Artificial Sequence
  ENSG00000274209_0 (sequence is synthesized)
ataacagagaattctgtccccagggtgggggaagggccaggcaggtagctggaagcaagtctcccagagccagctgctgaccctagtccctgcgatctggggaggtacctggtggagggc

SEQ ID NO: 793324 - DNA, 120 bp, Artificial Sequence
  ENSG00000274209_1 (sequence is synthesized)
catagtgtgcactggtgaaagggcaggaggaggggtgtggccccgggcataaggggaggcggcaaagaaggggcctgtgctcagcctctctgggccctggcacaggcacccaagagtgag

SEQ ID NO: 793325 - DNA, 120 bp, Artificial Sequence
  ENSG00000274209_2 (sequence is synthesized)
gtggggtcacagggacagccagataatggggagccatgagtccctggggccctacttcctggtcttcctgctgctgctgctgcttcctccaccgctttttagagcaggaagccttcggta

SEQ ID NO: 793326 - DNA, 120 bp, Artificial Sequence
  ENSG00000274209_3 (sequence is synthesized)
ccatggacctgactggagaatatttcaccgcctggccctgggctccaggagagcccaccaccaccatggcccaggatggaggcagcactggcgccaggggcaagcaggtcacagatgcca

SEQ ID NO: 793327 - DNA, 120 bp, Artificial Sequence
  ENSG00000274209_4 (sequence is synthesized)
gggctcatttgacctctacttcatcttggacaagtctggcagcgtgaacaataactggattgacctttatatgtgggtggaggaaacagtggcgaggttccaaagcccaaatattcggat

SEQ ID NO: 793328 - DNA, 120 bp, Artificial Sequence
  ENSG00000274209_5 (sequence is synthesized)
gtgcttcatcacctactccacagacggccagactgtcttgccactcacctcagacaagaatagaataaaaaacggtcttgaccaacttcagaaaattgtgcctgacggtcacacattcat

SEQ ID NO: 793329 - DNA, 120 bp, Artificial Sequence
  ENSG00000274209_6 (sequence is synthesized)
gcaggcaggatttagaaaggcaattcaacagatcgaaagtttcaactccggaaacaaggttcccagcatgattattgctatgactgatggagaactggtggcacatgcatttcaggacac

SEQ ID NO: 793330 - DNA, 120 bp, Artificial Sequence
  ENSG00000274209_7 (sequence is synthesized)
tctcagagaagctcaaaaggctcggaaactgggggccaacgtttacaccctgggtgtggctgattataatctggatcagataacagcaattgcagacagccctggccacgtgtttgcagt

SEQ ID NO: 793331 - DNA, 120 bp, Artificial Sequence
  ENSG00000274209_8 (sequence is synthesized)
ggagaatggcttcaaggccctgagaagcaccattgatgccctcacgtcaaaggtctgtcttgatgtgacatcggtggagccttcctctgagtgtgtaggagaaccctaccatgtggttat

SEQ ID NO: 793332 - DNA, 120 bp, Artificial Sequence
  ENSG00000274209_9 (sequence is synthesized)
tgcagatttatcttcaatgaaagcactatcattgatgaaaagccaaccagtatcgacaataattccatgaattgccctgggccaaaactagaaaaacctggagaggagtactctattgaa

SEQ ID NO: 793333 - DNA, 120 bp, Artificial Sequence
  ENSG00000274209_10 (sequence is synthesized)
gtcagcttgaacaaaggcaaaacattcttcaagagcaatgtcagcatcaccagcaccacatgtggcattttccgcaactggctctattttgtgccactcctgctgcttgtgccactgctg

SEQ ID NO: 793334 - DNA, 120 bp, Artificial Sequence
  ENSG00000274209_11 (sequence is synthesized)
ctgtgttgtgtctggcggctgtgccgcaagcagactgtcaaggagccaccacctgtgcagaagccagaaaaggagccagagcaggaaaaaccaccatcaccaccaccaccgcctccgcct

SEQ ID NO: 793335 - DNA, 120 bp, Artificial Sequence
  ENSG00000274209_12 (sequence is synthesized)
ccaccacctccactcccgcctccgcccccagctcctgtaaacacctgccccactgtgattatttgttgctgtggatgccaaggagtgggcgggatgagaaggatagagggcaatctggat

SEQ ID NO: 793336 - DNA, 120 bp, Artificial Sequence
  ENSG00000274209_13 (sequence is synthesized)
accttttgtgacctctctcacgcaagctgccaccaggtgccatggatgtgttgtcagagcagggaccaggggaggtacctcagcttagcccttgcacagtcccaatatgcacaggctccc

SEQ ID NO: 793337 - DNA, 120 bp, Artificial Sequence
  ENSG00000274209_14 (sequence is synthesized)
tgctgcccaaggatctgctttccacacagccaggagtgcctttccctaccacaggctccctgcagcccaaggatgtgcctgagacacagccgggagtgcctcgccctcaaacaggctcgc

SEQ ID NO: 793338 - DNA, 120 bp, Artificial Sequence
  ENSG00000274209_15 (sequence is synthesized)
tgcagcccaaacatctgcctgagacacagccaacacagcagggagtgccttgcccgcaaacaggctccctgcagcccaaggatctgcctgagacacagcccggagtacttttcccaagca

SEQ ID NO: 793339 - DNA, 120 bp, Artificial Sequence
  ENSG00000274209_16 (sequence is synthesized)
cagactctgtgcaacccaaagagctgccttcaacccagccgggagtgcctccccctcacctgctcctccaggtgccgcctccccccagctaggtgcttgaggcctccctccaggatgctg

SEQ ID NO: 793340 - DNA, 120 bp, Artificial Sequence
  ENSG00000274209_17 (sequence is synthesized)
ccgctgctgtccccactgctcaggcacacggcagaaccccctttgtcactccccccctcagagcccaacttctaaggcaccaaacacccaagattaacaggcttttgttgctgaactgga

SEQ ID NO: 793341 - DNA, 120 bp, Artificial Sequence
  ENSG00000274209_18 (sequence is synthesized)
cagccgggagtgcctcgatgctgccgctgctgtccccactgctcaggcacacggcagaaccccctttgtcactccccccctcagagcccaacttctaaggcaccaaacacccaagattaa

SEQ ID NO: 793342 - DNA, 120 bp, Artificial Sequence
  ENSG00000274209_19 (sequence is synthesized)
tgggagtactctattgaagtcagcttgaacaaaggcaaaacattcttcaagagcaatgtcagcatcaccagcaccacatgtactgtcaaggagccaccacctgtgcagaagccagaaaag

SEQ ID NO: 793343 - DNA, 120 bp, Artificial Sequence
  ENSG00000274209_20 (sequence is synthesized)
gcctgagcagcctgccttcccacggatgccgcccaagattcctttattgcgaagaacacccagagaactgttcccgttgcttataccccatgtggccctggttctgagccaggacttgga

SEQ ID NO: 793344 - DNA, 120 bp, Artificial Sequence
  ENSG00000274209_21 (sequence is synthesized)
gtaaaatgaatgggcaacaagggcaggagccatggggagctccgctggggacgtatggcagcactgtcgctgagggccactgagggtcagccggcaggaaggagggtcagggagaggaag

SEQ ID NO: 793345 - DNA, 120 bp, Artificial Sequence
  ENSG00000274209_22 (sequence is synthesized)
gggaggctgtgtgcatggctgccaatagggagagtcacttgtctgagatgaaggagggatgacggagaggagagggaggagggaatggggtgaagaggcaaagaattttccagtagaagg

SEQ ID NO: 793346 - DNA, 120 bp, Artificial Sequence
  ENSG00000274209_23 (sequence is synthesized)
ccagactgtcttgccactcacctcagacaagtgagtgctgctttgagccccaaagggaggcctgatgagcttggccagagggagctccagggagctgaagggctcccggagaccttggtt

SEQ ID NO: 793347 - DNA, 120 bp, Artificial Sequence
  ENSG00000274209_24 (sequence is synthesized)
gggagcctgacagcacacagggcaggccggtcagggcaactcacagtacccacctgaccttagccccggctcccctgcatcctcctacccatggctgcaaggttacctgcaggcccctgt

SEQ ID NO: 793348 - DNA, 80 bp, Artificial Sequence
  ENSG00000274211_0 (sequence is synthesized)
ggctcgcgctgggctccgcgcgccccccgcccccctctatgaggcagaggccgcggcggccgttagcgctgtcgctccgg

SEQ ID NO: 793349 - DNA, 120 bp, Artificial Sequence
  ENSG00000274211_1 (sequence is synthesized)
ggcctagtccccaccccagcccggctcccagccgcccgccctccctccctctccccgatgcaggaggccgagctccgggatggcgaggcggcggcggcggccgcttcgtaccgcgtcctg

SEQ ID NO: 793350 - DNA, 120 bp, Artificial Sequence
  ENSG00000274211_2 (sequence is synthesized)
cgagctccgggatggcgaggcggcggcggcggccgcttcgtaccgcgtcctgagccgcctccttggctatggagaggcggcccccgagccaggccctccgccaccgcccccgggccatgg

SEQ ID NO: 793351 - DNA, 120 bp, Artificial Sequence
  ENSG00000274211_3 (sequence is synthesized)
cccggcccgcggggctcccggccgccgcagctgatggtgttccgcaacgtgggtcggccgccggaggaggaggacgtggaggcggccccggagccgggaccctcggaactgctgtgtccc

SEQ ID NO: 793352 - DNA, 120 bp, Artificial Sequence
  ENSG00000274211_4 (sequence is synthesized)
tgtgtccccggcaccgctgtgccctggaccccaaggccctgccgccgggcttggcgctcgagcggacctggggcccggcggctggactagaggcgcagttggcggctctggggctcgggc

SEQ ID NO: 793353 - DNA, 120 bp, Artificial Sequence
  ENSG00000274211_5 (sequence is synthesized)
gggccgggggtcaagacagtcggtgggggttgctgcccgtgtccgtgtcctcctcagccgccccctccgcagccccagccgcctgctgccgccccgcaggccggggaggaccccacggaa

SEQ ID NO: 793354 - DNA, 120 bp, Artificial Sequence
  ENSG00000274211_6 (sequence is synthesized)
ccacggaaacgagcgacgcgctgctggtcctggagggcttggaatcggaggccgagagcctggagactaacagctgctcggaagaggagctcagcagcccgggtcgcggaggaggagggg

SEQ ID NO: 793355 - DNA, 120 bp, Artificial Sequence
  ENSG00000274211_7 (sequence is synthesized)
gcggccggcttctgctgcagcccccaggccctgaattacctccggtgcccttcccgctgcaggacttggtccctctggggcgcctgagtagaggggagcagcagcagcagcagcagcagc

SEQ ID NO: 793356 - DNA, 120 bp, Artificial Sequence
  ENSG00000274211_8 (sequence is synthesized)
aacctcccccgcccccgcctcctcccgggcccctccggccactcgcgggtccttctcggaagggctccttcaaaatccgcctcagtcgcctctttcgcaccaagagctgcaacggtggct

SEQ ID NO: 793357 - DNA, 120 bp, Artificial Sequence
  ENSG00000274211_9 (sequence is synthesized)
ccggcggtggggatgggaccggcaagaggccttctggagagctggctgcttcagctgcgagcctgacagacatgggaggctctgcgggccgggagctggacgcggggaggaaacccaagt

SEQ ID NO: 793358 - DNA, 120 bp, Artificial Sequence
  ENSG00000274211_10 (sequence is synthesized)
tgacaagaactcaaagtgccttttctccggtctccttcagccccctgttcacaggtgaaactgtgtcgcttgtggatgtggacatttctcagcggggcctgacctctccacaccctccaa

SEQ ID NO: 793359 - DNA, 120 bp, Artificial Sequence
  ENSG00000274211_11 (sequence is synthesized)
ctccccctcctcctccgagaagaagcctcagcctcctagatgatatcagtgggacgctgcctacatctgtccttgtggctccgatggggtcttccttgcagtctttccccctacctccgc

SEQ ID NO: 793360 - DNA, 120 bp, Artificial Sequence
  ENSG00000274211_12 (sequence is synthesized)
ctcctccaccccatgccccagatgcatttccccggattgctcccatccgagcagctgaatccctgcacagccaacccccacagcacctccagtgtcccctctaccggcctgactcgagca

SEQ ID NO: 793361 - DNA, 120 bp, Artificial Sequence
  ENSG00000274211_13 (sequence is synthesized)
gctttgcagccagccttcgagagttggagaagtgtggttggtattgggggccaatgaattgggaagatgcagagatgaagctgaaagggaaaccagatggttctttcctggtacgagaca

SEQ ID NO: 793362 - DNA, 120 bp, Artificial Sequence
  ENSG00000274211_14 (sequence is synthesized)
gttctgatcctcgttacatcctgagcctcagtttccgatcacagggtatcacccaccacactagaatggagcactacagaggaaccttcagcctgtggtgtcatcccaagtttgaggacc

SEQ ID NO: 793363 - DNA, 120 bp, Artificial Sequence
  ENSG00000274211_15 (sequence is synthesized)
gctgtcaatctgttgtagagtttattaagagagccattatgcactccaagaatggaaagtttctctatttcttaagatccagggttccaggactgccaccaactcctgtccagctgctct

SEQ ID NO: 793364 - DNA, 120 bp, Artificial Sequence
  ENSG00000274211_16 (sequence is synthesized)
atccagtgtcccgattcagcaatgtcaaatccctccagcacctttgcagattccggatacgacagctcgtcaggatagatcacatcccagatctcccactgcctaaacctctgatctctt

SEQ ID NO: 793365 - DNA, 120 bp, Artificial Sequence
  ENSG00000274211_17 (sequence is synthesized)
atatccgaaagttctactactatgatcctcaggaagaggtatacctgtctctaaaggaagcgcagctcatttccaaacagaagcaagaggtggaaccctccacgtagcgaggggctccct

SEQ ID NO: 793366 - DNA, 120 bp, Artificial Sequence
  ENSG00000274211_18 (sequence is synthesized)
gctggtcaccaccaagggcatttggttgccaagctccagctttgaagaaccaaattaagctaccatgaaaagaagaggaaaagtgagggaacaggaaggttgggattctctgtgcagaga

SEQ ID NO: 793367 - DNA, 120 bp, Artificial Sequence
  ENSG00000274211_19 (sequence is synthesized)
ctttggttccccacgcagccctggggcttggaagaagcacatgaccgtactctgcgtggggctccacctcacacccacccctgggcatcttaggactggaggggctccttggaaaactgg

SEQ ID NO: 793368 - DNA, 120 bp, Artificial Sequence
  ENSG00000274211_20 (sequence is synthesized)
aagaagtctcaacactgtttctttttcagaagttttgtttttgatatttatattacttggtatggaaaactcaccttgaaggcagttggggtttgtgcccgttggattgaaagtggtgcg

SEQ ID NO: 793369 - DNA, 120 bp, Artificial Sequence
  ENSG00000274211_21 (sequence is synthesized)
aagggtgagcaggtccaaagaaggggtgggaggagggaacaggggacggccattcagctggtgccaaaggcagagttagagtctgtgctgtgggcctggaagatgggaggaggggcttga

SEQ ID NO: 793370 - DNA, 120 bp, Artificial Sequence
  ENSG00000274211_22 (sequence is synthesized)
ggtttgcaaaggactgggagttcctgaggaagggggaatctgcctcttgttgccatgggcagctgttgtaggagcaggagagaaaggagggtgggtggtctcgaaaagaatattgggcaa

SEQ ID NO: 793371 - DNA, 120 bp, Artificial Sequence
  ENSG00000274211_23 (sequence is synthesized)
aacctagccaattggccttagctgggagaagtagtgactcctgcatccttttttaaggtttaggaacctgagttcagaaacacctctcatggaagctgtactagttgtgatttacttaat

SEQ ID NO: 793372 - DNA, 120 bp, Artificial Sequence
  ENSG00000274211_24 (sequence is synthesized)
tccttaagttccatgacctgaagttaaccccgttcttcctctgctctcaacccattgccccttgagataactgtacatgtcactctgatcatggtaacagcatccctattgcttctgcca

SEQ ID NO: 793373 - DNA, 120 bp, Artificial Sequence
  ENSG00000274211_25 (sequence is synthesized)
gctgtcatggcaatcgtgtttcccatcacctgggcggttcagagccagtcatgggctgctgaatttaatggagcatgtttccaggttcttcatggcaaactgtactcatgacttaggagt

SEQ ID NO: 793374 - DNA, 120 bp, Artificial Sequence
  ENSG00000274211_26 (sequence is synthesized)
gagtgttacttccatgtgcctgtcagcttgtgagggggaatgtggaggaaggtgagaaatacagctcccacagttgtgctcttcctagaggaagctctcagaacgcagccctcacgggat

SEQ ID NO: 793375 - DNA, 120 bp, Artificial Sequence
  ENSG00000274211_27 (sequence is synthesized)
ttccttaggtcagaggagagcatcgcatctcacgtttttaggtttatcactgccatcccacttctgggatgggaggtagcaagggcttctgtattttcttgtgttcattctagcaaccca

SEQ ID NO: 793376 - DNA, 120 bp, Artificial Sequence
  ENSG00000274211_28 (sequence is synthesized)
gacatttccggatcagatcctgctggtctccactcactggaaagtctgccagatgccgatttgagagctgcctgtccctgctttcaggaggagcggggagaaaaactccaatggtcttta

SEQ ID NO: 793377 - DNA, 120 bp, Artificial Sequence
  ENSG00000274211_29 (sequence is synthesized)
atggtttctgcagctggccatggccaattcatatgacattgtgagtttgctttcttatagagctgctctggggagaggtttgctattgagatgtaacagtggagctgttgggtcttcatg

SEQ ID NO: 793378 - DNA, 120 bp, Artificial Sequence
  ENSG00000274211_30 (sequence is synthesized)
actcctttgcgtgtgttccatgggactctctttctgggttccccatgcttatagttgcctcgtgtcacaagacagatactaatgtcaggtttgtggcttcctgatggtttgggtggggcc

SEQ ID NO: 793379 - DNA, 120 bp, Artificial Sequence
  ENSG00000274211_31 (sequence is synthesized)
ccagtgtcctggtaatttataggactgcctcatctgggagcattgccttcttccttagtcccacgtggagtgaccagtcttcctccttgtagctgaacagggaggaaacttgcaccatta

SEQ ID NO: 793380 - DNA, 120 bp, Artificial Sequence
  ENSG00000274211_32 (sequence is synthesized)
cctgactgtggaagggtggcccacaagatgagctgtgcaccataaacacagcccacctctgatttgtcatgtggtacctcttctttccttggcttccatggtagtattatcaactaagca

SEQ ID NO: 793381 - DNA, 120 bp, Artificial Sequence
  ENSG00000274211_33 (sequence is synthesized)
agattgtgatcccagaaattggcttagcatgtgagtgttgcctcgtgagagtacaagtaatataactcgccatcttgcaggaagtgccaccccaatatagagcctgaagttggaatctgt

SEQ ID NO: 793382 - DNA, 120 bp, Artificial Sequence
  ENSG00000274211_34 (sequence is synthesized)
gcctggctttgcgctagatattgtagaaaacaaaaaaggtaaaagacgtaatatgtggcctaagggagcttttaggtgactgctgcacatcaagcagaaaatcaaggactatctaaagac

SEQ ID NO: 793383 - DNA, 120 bp, Artificial Sequence
  ENSG00000274211_35 (sequence is synthesized)
gtttatagtagataagatcagggtagaccagatggtctgggaaagttctgtgcctctgaggctttgggttgtagtcaatggcaggacagacagtgagatgaaaaacacatgagcaaaagc

SEQ ID NO: 793384 - DNA, 120 bp, Artificial Sequence
  ENSG00000274211_36 (sequence is synthesized)
aaggaagcagaaatctgcatggcatgtactgaacagtgcacagccctgttagagcaacatggttaaagaatcctttccagtgcggttttctagatggaagcttcccagccaccaggcaga

SEQ ID NO: 793385 - DNA, 120 bp, Artificial Sequence
  ENSG00000274211_37 (sequence is synthesized)
cctgagtgccaaggggttatgatggtgaggtggagcccaaagcccaaaggagtcagcaaggctcctgcccattgccagggcctcactatggtcagctcaggccatgtgagggaggcagag

SEQ ID NO: 793386 - DNA, 120 bp, Artificial Sequence
  ENSG00000274211_38 (sequence is synthesized)
cctctgcaccccctgtgttactggggtttcttctggagaactcatacattcaggtacaaaacaaaccaactgaggaggtgtgacccaacctcaccacccacctttctcctcctggggagt

SEQ ID NO: 793387 - DNA, 120 bp, Artificial Sequence
  ENSG00000274211_39 (sequence is synthesized)
gtcgtgttgaactgtgtctgtgtcagtgcactggtcccagccctggccgcagcctagtcctttctctgtggagtgggctgcaaaacagcagcgcaagaggagacagtcttcgtcaggtgt

SEQ ID NO: 793388 - DNA, 120 bp, Artificial Sequence
  ENSG00000274211_40 (sequence is synthesized)
gggtgtttggtgcctgcatgggtggccttgcacagagcagttaggggaagatgagggggaggcatggggctgggccagctctctgggatacagcctggtcagagagtaaatggagcagag

SEQ ID NO: 793389 - DNA, 120 bp, Artificial Sequence
  ENSG00000274211_41 (sequence is synthesized)
gagcaggtgtggcagcacctgcccttcacctccctgaccaggcccgtccctccttcgccagtgctgtgcagagctcatttaaatgtattcctttctaggtctgggcgcggtggctcacgc

SEQ ID NO: 793390 - DNA, 120 bp, Artificial Sequence
  ENSG00000274211_42 (sequence is synthesized)
agtgagactccatctcaaaaaaaataaataatttctttctggttgtattttcaagtcacaaattggaaaaggcttacatctagggacccactgttgattcctaagttgtgggtgggtgat

SEQ ID NO: 793391 - DNA, 120 bp, Artificial Sequence
  ENSG00000274211_43 (sequence is synthesized)
atcagtggcctcagtgcctgcataaccctcacctgtttatgactgatctactgtaaccttcctcaggttgagagtgagctgctgtgagccagtgacaactactgctacaacttgctgtta

SEQ ID NO: 793392 - DNA, 120 bp, Artificial Sequence
  ENSG00000274211_44 (sequence is synthesized)
cttgaaattcgtgtgctatgttggtagcacaggagtaggcgggcgggggttttggtgtgggcactaggtaagtgggtggcaaccggctctttgggaccattggtgctgacctttgcctgg

SEQ ID NO: 793393 - DNA, 120 bp, Artificial Sequence
  ENSG00000274211_45 (sequence is synthesized)
tcacctgcctgtgcctaggccaagtgaatgttacatcttggaacctgagccatggaggtggcgccacctccctgaggagaaaggtgtggccaaaggaaactcctgcatggctcctgctcc

SEQ ID NO: 793394 - DNA, 120 bp, Artificial Sequence
  ENSG00000274211_46 (sequence is synthesized)
ttccccttccctacatttcacttgggctaatgatgtaagccccccttgaggttggggatggtgtggagatagctgcagacacccctgtaacagacatccaggaagaattagggagtgggg

SEQ ID NO: 793395 - DNA, 120 bp, Artificial Sequence
  ENSG00000274211_47 (sequence is synthesized)
gtaattatagttcctaggtctaggggtgagaggtgggagtagaaccagaagtgccctggaatccagccgtgtcagccctcaccccagggcccccaggaaagcatggcctgcttgaagccc

SEQ ID NO: 793396 - DNA, 120 bp, Artificial Sequence
  ENSG00000274211_48 (sequence is synthesized)
tctgctccctgcagaaactggggcgaggaggagctttttccttcagttagatctttcccttccctgctgcctcgctcccttagctttggagccctaaagttagtggacaagacactggga

SEQ ID NO: 793397 - DNA, 120 bp, Artificial Sequence
  ENSG00000274211_49 (sequence is synthesized)
taaagctctatggctgctggaaggaggtctgagtctgtgtgtgtgcatatgcatgcatgtgtgtgtgtgtgtgtgtcctcatttgcagaagtcttgctaccagttagggtgttaagagca

SEQ ID NO: 793398 - DNA, 120 bp, Artificial Sequence
  ENSG00000274211_50 (sequence is synthesized)
tctccactgggcggagacctggcatttgttttccactgttaagagaatgacacaccccctgtcatgtaagggaggagctattgagttagacattttccctatgggaatcctcggtttggt

SEQ ID NO: 793399 - DNA, 120 bp, Artificial Sequence
  ENSG00000274211_51 (sequence is synthesized)
ttgtgggaaaggagggaatggataagtgatttttatctctaatcgtcaacacagctgttcttccactgaatttgtgctattgcatacatgtagccatctttcttttcactgcagcagtgt

SEQ ID NO: 793400 - DNA, 120 bp, Artificial Sequence
  ENSG00000274211_52 (sequence is synthesized)
tgcatacatgtagccatctttcttttcactgcagcagtgtttatcagtagttcaaaatgatttatttgctcctggggagtaaaaccttttttattaaaaaaagaaaaagaaaaaaaaaag

SEQ ID NO: 793401 - DNA, 120 bp, Artificial Sequence
  ENSG00000274211_53 (sequence is synthesized)
aaatgattgggtcacaaaggtcaagtctgcacgtccctgtggtagaccctgctttcacattggagccttcacactcagcacaaaatgattggaggccttgataaaatggagagcaaagtc

SEQ ID NO: 793402 - DNA, 120 bp, Artificial Sequence
  ENSG00000274211_54 (sequence is synthesized)
ttgggagcagtgaaatgggggttggatcatagagacaggcgctggggactcgggtactgcagttaggaaagtagcgttatgagttgtactgaaaatgttgattctctaatctgccagaaa

SEQ ID NO: 793403 - DNA, 120 bp, Artificial Sequence
  ENSG00000274211_55 (sequence is synthesized)
aggacctgtcttttcatgcagatttcatattgtctttgtccttttcattgcttcttgaccttcctggcaggtgtcgctcagtttcttcctgtttcccttcctgtcctctccacacctgct

SEQ ID NO: 793404 - DNA, 120 bp, Artificial Sequence
  ENSG00000274211_56 (sequence is synthesized)
atcccgtcccactcccatctacctcccgggaagccagccctgcatgctgagtttgtgacctgcttcattcccatttcatttctagagggtttagaggtgacctggaaccgttccctttcc

SEQ ID NO: 793405 - DNA, 120 bp, Artificial Sequence
  ENSG00000274211_57 (sequence is synthesized)
ctctcctaccccctcctctgcaacaccaagaggcctggaggggcagacagaaagcagccagccacggcgggaagacatgcatgtttggttgcagctggactgcgatcgtagttcctcctg

SEQ ID NO: 793406 - DNA, 120 bp, Artificial Sequence
  ENSG00000274211_58 (sequence is synthesized)
gagatagagtgtgaggaacttaggacactcttcctcagactctgggatcatcacataccacactgccccgctcagagtttcgtcctgagctccctaaccagctcaggtggagcagaagcc

SEQ ID NO: 793407 - DNA, 120 bp, Artificial Sequence
  ENSG00000274211_59 (sequence is synthesized)
tgctctcactcctccatctctggtgctcccttgggcggggacctgtccctcactcttaggcccagaacctgtccaagggacaggtagggtccaggtgccactttgggtagctggctgttg

SEQ ID NO: 793408 - DNA, 120 bp, Artificial Sequence
  ENSG00000274211_60 (sequence is synthesized)
gaatgcccacactggtgctgcctgtggcatagccactgctgtacgtttttggttgtttttaagaaactcgatgaagaggggtgtcattctgggctcggggtggttgccaatttttcacca

SEQ ID NO: 793409 - DNA, 120 bp, Artificial Sequence
  ENSG00000274211_61 (sequence is synthesized)
gaaagggagccaccccttgcaaccacttctgtctccgttagccccccctctgccctcctccaagccaaagcgtggcctggcttttgtcttcccatttagttttcctcttttacccttcct

SEQ ID NO: 793410 - DNA, 120 bp, Artificial Sequence
  ENSG00000274211_62 (sequence is synthesized)
tttgtgcttaatttattaaaatagttgctgtataatttattttcataaactataaaaaaatactaaatggttaaaatagacttgcaggccaatcttaaatggggtgggaggggtctgagg

SEQ ID NO: 793411 - DNA, 120 bp, Artificial Sequence
  ENSG00000274211_63 (sequence is synthesized)
gtgggatggggaaagggaaagaggttttgatataaacaaaacaaatgcactttgggtgtgttttggtatttttctggggatagagggggtggggttagggatgtccctgtagattagttc

SEQ ID NO: 793412 - DNA, 120 bp, Artificial Sequence
  ENSG00000274211_64 (sequence is synthesized)
cagaatggggtgtctgtatatactgtattaataggcatgtttgactctcgtaaagggacgttagtagctgctgcaggtcctgtttggaaaccccatgtacaattcccagttttttgtaag

SEQ ID NO: 793413 - DNA, 120 bp, Artificial Sequence
  ENSG00000274211_65 (sequence is synthesized)
tgtcagtgcgagagacatttgactcttgtgtttgtatctcctttttatgattgctgtacctacccatgtctttttggggaggggtgaaaagagatttgaaataaaaatgtttagaaatta

SEQ ID NO: 793414 - DNA, 120 bp, Artificial Sequence
  ENSG00000274211_66 (sequence is synthesized)
atggaaataacagcttagtagaaagtttaaatcttttccccttggctggaccagactccttagaaatgaggcggagaactggttttcctaacccgttttctttatggaggtcaatctgat

SEQ ID NO: 793415 - DNA, 120 bp, Artificial Sequence
  ENSG00000274211_67 (sequence is synthesized)
atgaaagactactgaatttttcatcagtctttgctgctgagactgttttgcaatccttgagtagatatcacttaagaaactgccttaatttcaggatagtgaggtttaatatgttggtgg

SEQ ID NO: 793416 - DNA, 120 bp, Artificial Sequence
  ENSG00000274211_68 (sequence is synthesized)
ttttcagcattctatggtttttctaagcttttagtatttactgcagccttgtaaataagtaccaagcatttagcagcccatacctgctttgccagcttacagtacccaaggaataaaatg

SEQ ID NO: 793417 - DNA, 120 bp, Artificial Sequence
  ENSG00000274211_69 (sequence is synthesized)
aatgaaatcagcattcttttctacttgcctggcaaaatcattactcttcctgggcaagtaagcgagtcactatttccaaggctgccttatcggcacttcacttcgaggtgggagaagttg

SEQ ID NO: 793418 - DNA, 74 bp, Artificial Sequence; identical to SEQ ID NO: 786347
  ENSG00000274226_0 (sequence is synthesized)

SEQ ID NO: 793419 - DNA, 120 bp, Artificial Sequence
  ENSG00000274252_0 (sequence is synthesized)
attgaatgcggcaagggtctggaggctgaggaccaggcagacagacattcagagttgctggaacgcgacagagacagggagtcagactggtcatgcaaggccagctctggggtctcagca

SEQ ID NO: 793420 - DNA, 120 bp, Artificial Sequence
  ENSG00000274252_1 (sequence is synthesized)
ggtggtccgcaacatgacctctgagttcttcgctgcccagctccggtcccagatctctgaccacaccactcacccgatctcctactacaagcccgagttctacacgccggatgacggggg

SEQ ID NO: 793421 - DNA, 120 bp, Artificial Sequence
  ENSG00000274252_2 (sequence is synthesized)
cactgctcacctgtctgtcgtcgcagaggacggcagtgctgtgtccgccaccagcaccatcaacctctactttggctccaaggtctgctccccggtcagtgggatcctgttcaataatga

SEQ ID NO: 793422 - DNA, 120 bp, Artificial Sequence
  ENSG00000274252_3 (sequence is synthesized)
atggacgacttcagctctcccagcattcaccaatgagtttggggcacccccctcacctgccaatttcatccagccagggaagcagccgctcttgtccatgtgcccgacgatcatggtggg

SEQ ID NO: 793423 - DNA, 85 bp, Artificial Sequence
  ENSG00000274252_4 (sequence is synthesized)
tgggccaggacggccaggtccggatggtggtgggagctgctgggggcacgcagatcaccacagacactgcacttgaagagggccg

SEQ ID NO: 793424 - DNA, 120 bp, Artificial Sequence
  ENSG00000274252_5 (sequence is synthesized)
tggttcggctatgacgtgaagagggccgtggaggagccccggctgcacaacaagcttctgcccaacgtcacgacagtggagagaaacattgaccaggcagtgactgcagccctggagacc

SEQ ID NO: 793425 - DNA, 120 bp, Artificial Sequence
  ENSG00000274252_6 (sequence is synthesized)
tggtgcaagccatcgtccgcacggctggtggctgggcagctgcctcggactccaggaaaggcggggaacctgctggctactgattgctccaggcagacaaggctgacaagcaatccaggg

SEQ ID NO: 793426 - DNA, 120 bp, Artificial Sequence
  ENSG00000274252_7 (sequence is synthesized)
acaagatactcaccaggatgaggaagaggactttgggggacgggcttcccctgtgagcagcagagcagcataataaatgaggccactgtgccaggctccaggtggcctccctggcctgtc

SEQ ID NO: 793427 - DNA, 120 bp, Artificial Sequence
  ENSG00000274276_0 (sequence is synthesized)
gcgaggccgccaccccggggtcgccgtctccgcctcgccgcagtcggggcagccgctcgcccctcttttccatgtatccgtccaggatcccatgacagattctgttgtcacgtctcctta

SEQ ID NO: 793428 - DNA, 120 bp, Artificial Sequence
  ENSG00000274276_1 (sequence is synthesized)
cagagtttgagcggtgctgaactgtcagcaccatctgtccggtcccagcatgccttctgagaccccccaggcagaagtggggcccacaggctgcccccaccgctcagggccacactcggc

SEQ ID NO: 793429 - DNA, 120 bp, Artificial Sequence
  ENSG00000274276_2 (sequence is synthesized)
gaaggggagcctggagaaggggtccccagaggataaggaagccaaggagcccctgtggatccggcccgatgctccgagcaggtgcacctggcagctgggccggcctgcctccgagtcccc

SEQ ID NO: 793430 - DNA, 120 bp, Artificial Sequence
  ENSG00000274276_3 (sequence is synthesized)
acatcaccacactgccccggcaaaatctccaaaaatcttgccagatattctgaagaaaatcggggacacccctatggtcagaatcaacaagattgggaagaagttcggcctgaagtgtga

SEQ ID NO: 793431 - DNA, 120 bp, Artificial Sequence
  ENSG00000274276_4 (sequence is synthesized)
gctcttggccaagtgtgagttcttcaacgcgggcgggagcgtgaaggaccgcatcagcctgcggatgattgaggatgctgagcgcgacgggacgctgaagcccggggacacgattatcga

SEQ ID NO: 793432 - DNA, 120 bp, Artificial Sequence
  ENSG00000274276_5 (sequence is synthesized)
gccgacatccgggaacaccgggatcgggctggccctggctgcggcagtgaggggctatcgctgcatcatcgtgatgccagagaagatgagctccgagaaggtggacgtgctgcgggcact

SEQ ID NO: 793433 - DNA, 120 bp, Artificial Sequence
  ENSG00000274276_6 (sequence is synthesized)
gggggctgagattgtgaggacgcccaccaatgccaggttcgactccccggagtcacacgtgggggtggcctggcggctgaagaacgaaatccccaattctcacatcctagaccagtaccg

SEQ ID NO: 793434 - DNA, 120 bp, Artificial Sequence
  ENSG00000274276_7 (sequence is synthesized)
caacgccagcaaccccctggctcactatgacaccaccgctgatgagatcctgcagcagtgtgatgggaagctggacatgctggtggcttcagtgggcacgggcggcaccatcacgggcat

SEQ ID NO: 793435 - DNA, 120 bp, Artificial Sequence
  ENSG00000274276_8 (sequence is synthesized)
tgccaggaagctgaaggagaagtgtcctggatgcaggatcattggggtggatcccgaagggtccatcctcgcagagccggaggagctgaaccagacggagcagacaacctacgaggtgga

SEQ ID NO: 793436 - DNA, 120 bp, Artificial Sequence
  ENSG00000274276_9 (sequence is synthesized)
agggatcggctacgacttcatccccacggtgctggacaggacggtggtggacaagtggttcaagagcaacgatgaggaggcgttcacctttgcccgcatgctgatcgcgcaagaggggct

SEQ ID NO: 793437 - DNA, 120 bp, Artificial Sequence; identical to SEQ ID NO: 474953
  ENSG00000274276_10 (sequence is synthesized)

SEQ ID NO: 793438 - DNA, 120 bp, Artificial Sequence; identical to SEQ ID NO: 474954
  ENSG00000274276_11 (sequence is synthesized)

SEQ ID NO: 793439 - DNA, 120 bp, Artificial Sequence; identical to SEQ ID NO: 474955
  ENSG00000274276_12 (sequence is synthesized)

SEQ ID NO: 793440 - DNA, 120 bp, Artificial Sequence; identical to SEQ ID NO: 474956
  ENSG00000274276_13 (sequence is synthesized)

SEQ ID NO: 793441 - DNA, 120 bp, Artificial Sequence; identical to SEQ ID NO: 474957
  ENSG00000274276_14 (sequence is synthesized)

SEQ ID NO: 793442 - DNA, 120 bp, Artificial Sequence; identical to SEQ ID NO: 474958
  ENSG00000274276_15 (sequence is synthesized)

SEQ ID NO: 793443 - DNA, 120 bp, Artificial Sequence; identical to SEQ ID NO: 474959
  ENSG00000274276_16 (sequence is synthesized)

SEQ ID NO: 793444 - DNA, 120 bp, Artificial Sequence; identical to SEQ ID NO: 474960
  ENSG00000274276_17 (sequence is synthesized)

SEQ ID NO: 793445 - DNA, 120 bp, Artificial Sequence; identical to SEQ ID NO: 474961
  ENSG00000274276_18 (sequence is synthesized)

SEQ ID NO: 793446 - DNA, 120 bp, Artificial Sequence; identical to SEQ ID NO: 474962
  ENSG00000274276_19 (sequence is synthesized)

SEQ ID NO: 793447 - DNA, 120 bp, Artificial Sequence
  ENSG00000274276_20 (sequence is synthesized)
cacgccctcggggtcggtcctcgaggacgcgcagggccccccacccaccaggacgcacgtttcaagctcatcagtaaaggttccttaaattcccgaagggcaagaagttaaccaagtaaa

SEQ ID NO: 793448 - DNA, 120 bp, Artificial Sequence
  ENSG00000274276_21 (sequence is synthesized)
ccgcgaggccgccaccccggggtcgccgtctccgcctcgccgcagtcggggcagccgctcgcccctcttttccatgtatccgtccaggaccaggcctgggcaggcgtggtgggggggcct

SEQ ID NO: 793449 - DNA, 120 bp, Artificial Sequence
  ENSG00000274276_22 (sequence is synthesized)
gcaggtaggtatcacccacccctcagaatggctctcaggctcagattcacagcctccccatggcaaatggaggccttccagggtcctggacccacccccaagcttgggtaggagggatcc

SEQ ID NO: 793450 - DNA, 120 bp, Artificial Sequence
  ENSG00000274276_23 (sequence is synthesized)
ccctcttaatctcacatttacttgtgtttgaacatctcagaaaaaaaaaaagatgcaaattccaatgtcagggtccccaaatcaagtcttcctggagcatgtccacgcttgtcaccaccg

SEQ ID NO: 793451 - DNA, 120 bp, Artificial Sequence
  ENSG00000274276_24 (sequence is synthesized)
tgctttcaagcacgtcagggctgcgtgctcataacagagacggcacagcccccaagacctaaaataccaccagctggcccttgtcggaaagtcccctggctggccctagtccattgactc

SEQ ID NO: 793452 - DNA, 120 bp, Artificial Sequence
  ENSG00000274276_25 (sequence is synthesized)
tgggccgagctgccagggccacagaagcctgcggcactcagggctcccagggctcccttctccaacagttgctgtgcctccgtttccccaaaatgcaaggagctgatctcatctgtgttc

SEQ ID NO: 793453 - DNA, 120 bp, Artificial Sequence
  ENSG00000274276_26 (sequence is synthesized)
cctatcttttcctggggctctaagtgggccaccccaagggacctctgcctacaaagagaggagtgacagccgtggcggagttgggacgggctccgagggctcttcctcacccgcaccttg

SEQ ID NO: 793454 - DNA, 120 bp, Artificial Sequence
  ENSG00000274276_27 (sequence is synthesized)
gggatcagaaaactcgctggttaatgagtggccaagaacatatcagcttaagtttgggaaaaacacacaacagggcattgtgtcagagggtgaccaaagtgactccccagcagatggaca

SEQ ID NO: 793455 - DNA, 120 bp, Artificial Sequence; identical to SEQ ID NO: 474978
  ENSG00000274276_28 (sequence is synthesized)

SEQ ID NO: 793456 - DNA, 120 bp, Artificial Sequence; identical to SEQ ID NO: 474979
  ENSG00000274276_29 (sequence is synthesized)

SEQ ID NO: 793457 - DNA, 120 bp, Artificial Sequence; identical to SEQ ID NO: 474980
  ENSG00000274276_30 (sequence is synthesized)

SEQ ID NO: 793458 - DNA, 120 bp, Artificial Sequence
  ENSG00000274276_31 (sequence is synthesized)
agcgtggagggaattcctaagggtcgctcttcaccaagagcgcagagccctggtagacctcagcatcgtcacagagaaagctgtgggtgcagaggccttggggacaaggcggggacggaa

SEQ ID NO: 793459 - DNA, 120 bp, Artificial Sequence
  ENSG00000274286_0 (sequence is synthesized)
actcccctgcaggcgcggctggggcgaaagcctgcgagctgagcgggcgcaaggtcctccgcgcctcctttaagaaccggcccagcccggcccgcgcccccagagcgtacggcatccgcg

SEQ ID NO: 793460 - DNA, 120 bp, Artificial Sequence
  ENSG00000274286_1 (sequence is synthesized)
tggcgggagggcgcgactttctccggtcccgggcgggacggggacggcggcgggacaacttgggaaacttctctggggcggacggcagggaccccgggcaccggtggaggaggatgtagg

SEQ ID NO: 793461 - DNA, 120 bp, Artificial Sequence
  ENSG00000274286_2 (sequence is synthesized)
agggcggctgctggtcctgggtgttcccgacctcctaggccccgctcgtccaggccatggggctccagcgccctcggcgccgcccgaggggcgacgctcttgtctagccgagccgggcag

SEQ ID NO: 793462 - DNA, 120 bp, Artificial Sequence
  ENSG00000274286_3 (sequence is synthesized)
cgctgtcgtccacggtgcgcactgggcgggcagcgctccctctgcccacctcccgccccgtcatggaccaccaggacccctactccgtgcaggccacagcggccatagcggcggccatca

SEQ ID NO: 793463 - DNA, 120 bp, Artificial Sequence
  ENSG00000274286_4 (sequence is synthesized)
ccttcctcattctctttaccatcttcggcaacgctctggtcatcctggctgtgttgaccagccgctcgctgcgcgcccctcagaacctgttcctggtgtcgctggccgccgccgacatcc

SEQ ID NO: 793464 - DNA, 120 bp, Artificial Sequence
  ENSG00000274286_5 (sequence is synthesized)
tggtggccacgctcatcatccctttctcgctggccaacgagctgctgggctactggtacttccggcgcacgtggtgcgaggtgtacctggcgctcgacgtgctcttctgcacctcgtcca

SEQ ID NO: 793465 - DNA, 120 bp, Artificial Sequence
  ENSG00000274286_6 (sequence is synthesized)
tcgtgcacctgtgcgccatcagcctggaccgctactgggccgtgagccgcgcgctggagtacaactccaagcgcaccccgcgccgcatcaagtgcatcatcctcactgtgtggctcatcg

SEQ ID NO: 793466 - DNA, 120 bp, Artificial Sequence
  ENSG00000274286_7 (sequence is synthesized)
ccgccgtcatctcgctgccgcccctcatctacaagggcgaccagggcccccagccgcgcgggcgcccccagtgcaagctcaaccaggaggcctggtacatcctggcctccagcatcggat

SEQ ID NO: 793467 - DNA, 120 bp, Artificial Sequence
  ENSG00000274286_8 (sequence is synthesized)
ctttctttgctccttgcctcatcatgatccttgtctacctgcgcatctacctgatcgccaaacgcagcaaccgcagaggtcccagggccaagggggggcctgggcagggtgagtccaagc

SEQ ID NO: 793468 - DNA, 120 bp, Artificial Sequence
  ENSG00000274286_9 (sequence is synthesized)
agccccgacccgaccatggtggggctttggcctcagccaaactgccagccctggcctctgtggcttctgccagagaggtcaacggacactcgaagtccactggggagaaggaggaggggg

SEQ ID NO: 793469 - DNA, 120 bp, Artificial Sequence
  ENSG00000274286_10 (sequence is synthesized)
agacccctgaagatactgggacccgggccttgccacccagttgggctgcccttcccaactcaggccagggccagaaggagggtgtttgtggggcatctccagaggatgaagctgaagagg

SEQ ID NO: 793470 - DNA, 120 bp, Artificial Sequence
  ENSG00000274286_11 (sequence is synthesized)
aggaagaggaggaggaggaggaggaagagtgtgaaccccaggcagtgccagtgtctccggcctcagcttgcagccccccgctgcagcagccacagggctcccgggtgctggccaccctac

SEQ ID NO: 793471 - DNA, 120 bp, Artificial Sequence
  ENSG00000274286_12 (sequence is synthesized)
gtggccaggtgctcctgggcaggggcgtgggtgctataggtgggcagtggtggcgtcgacgggcgcagctgacccgggagaagcgcttcaccttcgtgctggctgtggtcattggcgttt

SEQ ID NO: 793472 - DNA, 120 bp, Artificial Sequence
  ENSG00000274286_13 (sequence is synthesized)
ttgtgctctgctggttccccttcttcttcagctacagcctgggagccatctgcccgaagcactgcaaggtgccccatggcctcttccagttcttcttctggatcggctactgcaacagct

SEQ ID NO: 793473 - DNA, 120 bp, Artificial Sequence
  ENSG00000274286_14 (sequence is synthesized)
cactgaaccctgttatctacaccatcttcaaccaggacttccgccgtgccttccggaggatcctgtgccgcccgtggacccagacggcctggtgagcccgcctgcgctgcccctgtgggg

SEQ ID NO: 793474 - DNA, 120 bp, Artificial Sequence
  ENSG00000274286_15 (sequence is synthesized)
catcttaggaaccccttgggaggggtgggcaggggggctgctagcaagggtcccagtgaagcttccccttgccggcttagctgtgggggaccccttctccaccctctccctgagcacagg

SEQ ID NO: 793475 - DNA, 120 bp, Artificial Sequence
  ENSG00000274286_16 (sequence is synthesized)
ccgatggaggtggttcaaatcctctggaacatagccaagaccaggagaagagagagcactttcttcccagagccccatgctctccagaccaatgtctgggcttccctttcttgaggacct

SEQ ID NO: 793476 - DNA, 120 bp, Artificial Sequence
  ENSG00000274286_17 (sequence is synthesized)
tgtgttcctggcaggtcacttgcttgtggtgttttcgtttctttttcatctcccccccacccacaaagagcacggagccagccttccacttttcccagtggggcctgctgctgaggggga

SEQ ID NO: 793477 - DNA, 120 bp, Artificial Sequence
  ENSG00000274286_18 (sequence is synthesized)
ggaagaaacgaagactgatcacccacgctaggcactcgcggtccctggcaggcgctgggatgggggcttatggggtggcatcgtctctgggccctcctttccccctttgcctgttttcgg

SEQ ID NO: 793478 - DNA, 120 bp, Artificial Sequence
  ENSG00000274286_19 (sequence is synthesized)
atctgtggttcctttgaaagccagaacaatggatcggcttccttacccagcacccctccggtaggtgggtggccacgtggatgcctcgctggggcggtcttggaggcctggtctctgcct

SEQ ID NO: 793479 - DNA, 120 bp, Artificial Sequence
  ENSG00000274286_20 (sequence is synthesized)
cgacgggagatccccgatcactggcattcaccccctgcaaaaatcggggcgacaatagctcactgcctacttgctgcagggagatgaaaggctttgcagaaagctttgagctctgtgggg

SEQ ID NO: 793480 - DNA, 120 bp, Artificial Sequence
  ENSG00000274286_21 (sequence is synthesized)
gaacacactagagaaccaaaaatgtgattatatggtgatataaaaatccctttcctctgtgtttaccaccacctgtcttcctgtagacttttgttctgtccctggggtgtgtgaattcct

SEQ ID NO: 793481 - DNA, 120 bp, Artificial Sequence
  ENSG00000274286_22 (sequence is synthesized)
accccgaactggaagccgggagtggcagacagaatcactatttcaagttaaaggatctctttgagaatgtgttcttctggctgcaaaggtctgagttattacgctacatgacaacgtttc

SEQ ID NO: 793482 - DNA, 120 bp, Artificial Sequence
  ENSG00000274286_23 (sequence is synthesized)
gacatttcaccggcaacaccaagagggtttttagtggcttgggtctccccagtgggggataagtcttttgtcatcaaggaggcaaattgtctccccaagacagctcaaaatatccacacc

SEQ ID NO: 793483 - DNA, 120 bp, Artificial Sequence
  ENSG00000274286_24 (sequence is synthesized)
tcggcaacagtctaagatgagagcctgtgacaggtggcagcgcccccaggtggggtactggcatcagagcctggtgcgcccctaggggagcctcccactggagtgcccggccaggtctcc

SEQ ID NO: 793484 - DNA, 120 bp, Artificial Sequence
  ENSG00000274286_25 (sequence is synthesized)
aagccccaaatgagtccttgtgaaccacaactgatccccccaggtgggtgcttgtggactgcctcggacccagccacgctgctccccgcaatgctgatggggctgtgcattgaggacccc

SEQ ID NO: 793485 - DNA, 120 bp, Artificial Sequence
  ENSG00000274286_26 (sequence is synthesized)
tgcttcctggttctcagtcccaccccaaaacctggcacccagaacagttggaagtgtggaaaggaggtttatcggccttcccttggagagggcctggcttcaacattgggccagtaggca

SEQ ID NO: 793486 - DNA, 120 bp, Artificial Sequence
  ENSG00000274286_27 (sequence is synthesized)
tcttagcttggcaggtgtcgggggaatgggccagatggacctgctagatttggaagggcaccgagggagttttctgggtgtagagagaatggaggggaccaaaaagagtccttcctgggg

SEQ ID NO: 793487 - DNA, 120 bp, Artificial Sequence
  ENSG00000274286_28 (sequence is synthesized)
tgtgggaggcttcccagcttggtcctcagtgggttgttgaggccagagtatcgccctgggatgtggtggggagctgggccaggagagggactgactgtgaccctctgctggccggtcttg

SEQ ID NO: 793488 - DNA, 120 bp, Artificial Sequence
  ENSG00000274286_29 (sequence is synthesized)
tgtgcgccccatgggacccccagtgttcttgcctgtgacctcttattgcgacatgcaggtggtgttttttttttttttaaactctgagctattttatcaataaaggatattttgtaataa

SEQ ID NO: 793489 - DNA, 120 bp, Artificial Sequence
  ENSG00000274290_0 (sequence is synthesized)
caaattccgaggatcaggagatgtagatttcattttctttcctaactgcagaacagcaaagatagcatgcctgagccagcgaaatccgctcccgccccgaagaagggctccaagaaggcc

SEQ ID NO: 793490 - DNA, 120 bp, Artificial Sequence
  ENSG00000274290_1 (sequence is synthesized)
gtgaccaaggcgcagaagaaggacggcaagaagcgcaagcgcagccgcaaggagagctactccgtatacgtgtacaaggtgctgaaacaggtccaccccgacaccggcatctcctctaaa

SEQ ID NO: 793491 - DNA, 120 bp, Artificial Sequence
  ENSG00000274290_2 (sequence is synthesized)
caccggcatctcctctaaagccatggggatcatgaattcctttgtcaacgacatcttcgagcgcatcgccggcgaggcttcccgcctggcgcattacaacaagcgctcgaccatcacctc

SEQ ID NO: 793492 - DNA, 120 bp, Artificial Sequence
  ENSG00000274290_3 (sequence is synthesized)
cggggagctggccaagcacgctgtgtcagagggcaccaaggccgttaccaagtacaccagctccaagtaaacttgtccctgcaactgccttagtaaacccaaaggctcttttcagagcca

SEQ ID NO: 793493 - DNA, 120 bp, Artificial Sequence
  ENSG00000274290_4 (sequence is synthesized)
gtccgggaggttgcccgtaggccgctaactggtggttcccagtccccgccgactcggcctctttcttctgcggccaccagatcgcgggatatcggagacttcgaacaatccgctggagtc

SEQ ID NO: 793494 - DNA, 60 bp, Artificial Sequence
  ENSG00000274290_5 (sequence is synthesized)
atcgcgggatatcggagacttcgaacaatccgctggagtcctttacagtttaaaaacaga

SEQ ID NO: 793495 - DNA, 120 bp, Artificial Sequence
  ENSG00000274290_6 (sequence is synthesized)
ctccagcctaggcgacagagcgagactgcgtctcaaaacaaaaaaaacggaggatcgaaaattttgaagactgagagcaaggcaacaatcttcccttgacctttttgctcctctcacaag

SEQ ID NO: 793496 - DNA, 120 bp, Artificial Sequence
  ENSG00000274290_7 (sequence is synthesized)
tcttcccttgacctttttgctcctctcacaagggtttttcagacggctgaaaccaacgaaaagagtgaggaagcaggcagaaaatttcagctttagtctctcagcatcctcctgctttct

SEQ ID NO: 793497 - DNA, 120 bp, Artificial Sequence
  ENSG00000274290_8 (sequence is synthesized)
tctcggggagctggcacttcccccttctctagtagctgtaaatacgcctcccaactccaaggagacctttcttgcatctcccttactgttctcacgcctgtagggctcttcgtgtgagga

SEQ ID NO: 793498 - DNA, 74 bp, Artificial Sequence
  ENSG00000274290_9 (sequence is synthesized)
ccttactgttctcacgcctgtagggctcttcgtgtgaggattcagtgtattttttccctgatctaagctcatta

SEQ ID NO: 793499 - DNA, 120 bp, Artificial Sequence
  ENSG00000274290_10 (sequence is synthesized)
ctttcccaagtaacagggactacagttgcagattgtatcactggactcctctccctctggttttctttgtgtatgttcattttgtgtctctccaacgtattagttcatcctctttaggtg

SEQ ID NO: 793500 - DNA, 120 bp, Artificial Sequence
  ENSG00000274290_11 (sequence is synthesized)
aatttctttctttttatcctactcttcacgtctgtctctctttccattgtgtctgtttcttttttctctccctctgccacttttcccttaatacggtttaaattttctctcatttgtctt

SEQ ID NO: 793501 - DNA, 120 bp, Artificial Sequence
  ENSG00000274290_12 (sequence is synthesized)
tctcctttttctctactgactagatataccatcagaggttttttttttcatttctaacaacctcttatagtcattaaagaaatgcttcattttccattcttttaacataagaagaacaag

SEQ ID NO: 793502 - DNA, 120 bp, Artificial Sequence
  ENSG00000274290_13 (sequence is synthesized)
gtgatcgccggtcgcctagcttgccgttcttcaggtatctcctgctgctccagaatctacatctgaatgtcaaggcatagcttttccaggagcttttaaaccgacctttcaattcgaaga

SEQ ID NO: 793503 - DNA, 120 bp, Artificial Sequence
  ENSG00000274290_14 (sequence is synthesized)
cgtaactgcgccaggagctttgtctccctggcatataaaagcatagaagagagcaacttctggtttttaaaataagtaaactaatctgaattgtttgcaatggtaggaacttgttatata

SEQ ID NO: 793504 - DNA, 120 bp, Artificial Sequence
  ENSG00000274290_15 (sequence is synthesized)
aaatgttaattaggtggcccgtgctcgaaaactgctctcaggatatgaccaatgggagagtagacctaagctccttcatttgcatgcagacttcacgacaaaataacgaatcagagttgg

SEQ ID NO: 793505 - DNA, 120 bp, Artificial Sequence
  ENSG00000274290_16 (sequence is synthesized)
gcatgtttttaaaacttaaaatggcactcactgtctgggctggtggctttatgaaactctggtttccgtgttttatgaggtatcactcgatagtacctaagaggcaatagtaatttcata

SEQ ID NO: 793506 - DNA, 120 bp, Artificial Sequence
  ENSG00000274290_17 (sequence is synthesized)
gttttgctctacgaagagaaacttcgtttctcaagagtccttaaaaatacgggttttaccaaagaagcccatattatggggggctggagcgggggtggggaaggaggagaggagactgct

SEQ ID NO: 793507 - DNA, 120 bp, Artificial Sequence
  ENSG00000274290_18 (sequence is synthesized)
gctttcaagtagttcttaatgttgaatttgcttttttcctttcctcaattacttcaaaaaggtcttaatttggatttttattttaggttctaaaggaaaaaataaaaccctcttccctct

SEQ ID NO: 793508 - DNA, 120 bp, Artificial Sequence
  ENSG00000274349_0 (sequence is synthesized)
aacccagccccacctcctgccgtctgccctcccgggcctgaaagggacacggtgtccgagtctttaggtctgcgcgggagccgaggctgcgcacctggggcacatgaataggattacatg

SEQ ID NO: 793509 - DNA, 120 bp, Artificial Sequence
  ENSG00000274349_1 (sequence is synthesized)
ctccttgattacagtggggttatgtcgcagtaaaaccattatcaagtcgaaccatctcatgtcagggaccatctctgtaagaactgagaggcagaccaggtctctcatgaccccactgct

SEQ ID NO: 793510 - DNA, 120 bp, Artificial Sequence
  ENSG00000274349_2 (sequence is synthesized)
ctttcctcctccccagctgaacctccacagtcctctacactcttccaggagcagcagaaaatgaacatgtctcaggcatcagtgtcattccaggacgtgactgtggaattcacccgggag

SEQ ID NO: 793511 - DNA, 120 bp, Artificial Sequence
  ENSG00000274349_3 (sequence is synthesized)
gagtggcagcacctgggccctgtcgagaggacgctgtacagagatgtgatgctggagaactacagccacctcatctcagtgggatattgcattactaaacctaaggtgatctccaagttg

SEQ ID NO: 793512 - DNA, 120 bp, Artificial Sequence
  ENSG00000274349_4 (sequence is synthesized)
gagaaaggagaagagccatggtctttagaagatgaattcctgaaccagaggtacccagggtattttaaagttgatcacatcaaagggatccgggaaaaacaagaaaaacctctgtggcaa

SEQ ID NO: 793513 - DNA, 120 bp, Artificial Sequence
  ENSG00000274349_5 (sequence is synthesized)
gaaatattcatcagtgatgctgacaaaacattgagtaaagaaggacagaaagttttagaaaaaccatttaatctggaaatagctccagagctttcagaaaaaatatcctgtaaatgtgac

SEQ ID NO: 793514 - DNA, 120 bp, Artificial Sequence
  ENSG00000274349_6 (sequence is synthesized)
tcacacagaatgaatttgccagttgcttctcaattaattataagtgaaagaaaatattcaagaaagaagactgaatacatgaatgtgtgtgagaaactgcagcttgatattaagcatgag

SEQ ID NO: 793515 - DNA, 120 bp, Artificial Sequence
  ENSG00000274349_7 (sequence is synthesized)
aaagctcatgctgaagagaaatcttatgaacatggtgaaaatgctaaagctttcagttataagaaagatcagcattggaaatttcaaactttggaggaatcttttgaatgtgatggatct

SEQ ID NO: 793516 - DNA, 120 bp, Artificial Sequence
  ENSG00000274349_8 (sequence is synthesized)
ggacaaggtttatatgataagacaatttgtattacacctcagagttttctaacaggagaaaagtcctgtaaggatgatgaatttagaaaaaactttgataaaatcactttatttaaccac

SEQ ID NO: 793517 - DNA, 120 bp, Artificial Sequence
  ENSG00000274349_9 (sequence is synthesized)
atgagaactgacacaagggggaaatgctctgatcttaatgaatatgggacatcctgtgacaaaaccaccgctgttgaatacaataaagttcacatggctatgacacactatgagtgtaat

SEQ ID NO: 793518 - DNA, 120 bp, Artificial Sequence
  ENSG00000274349_10 (sequence is synthesized)
gaaagggggattaatttcagtaggaagtcacccctcactcaatctcagagaactattacaggatggagtgcttttgaaagcaataaatgtgaagaaaattttagccagagctcagcccat

SEQ ID NO: 793519 - DNA, 120 bp, Artificial Sequence
  ENSG00000274349_11 (sequence is synthesized)
atagtacatcagaaaacacaagctggagataaatttggtgaacataatgaatgtacagatgccctctaccagaaattagactttacagcacatcagagaattcacacagaagataaattc

SEQ ID NO: 793520 - DNA, 120 bp, Artificial Sequence
  ENSG00000274349_12 (sequence is synthesized)
tacctttctgatgaacatgggaaatgcagaaaatccttttaccggaaagcacacctcattcagcatcagaggccccactcaggagagaaaacttaccaatatgaggaatgtgcaaaatcc

SEQ ID NO: 793521 - DNA, 120 bp, Artificial Sequence
  ENSG00000274349_13 (sequence is synthesized)
ttttgttcaagttcacatcctattcagcatcctggaacttatgtgggattcaaactttatgaatgtaatgaatgtgggaaagctttctgtcagaattcaaacctcagtaaacatctgaga

SEQ ID NO: 793522 - DNA, 120 bp, Artificial Sequence
  ENSG00000274349_14 (sequence is synthesized)
attcacacaaaagagaaaccttgtgataacaatggctgtgggagatcttacaagtcacccctcataggacaccagaaaacagatgcagagatggaactctgtggtggcagtgaatatggg

SEQ ID NO: 793523 - DNA, 120 bp, Artificial Sequence
  ENSG00000274349_15 (sequence is synthesized)
aagacatcacatctcaaaggacatcagagaattctcatgggggagaaaccctatgaatgtattgaatgtgggaaaactttctccaagacatcacatctcagagcacatcagagaattcac

SEQ ID NO: 793524 - DNA, 120 bp, Artificial Sequence
  ENSG00000274349_16 (sequence is synthesized)
cagagaattcacacaggtgaaaaaccctatgaatgtgttgaatgtgagaaaactttctctcacaagacacacctcagtgtacatcagagagttcacacaggggagaaaccctatgaatgt

SEQ ID NO: 793525 - DNA, 120 bp, Artificial Sequence
  ENSG00000274349_17 (sequence is synthesized)
tgagaaaacttttgcccataattcagccctcagagcacatcatagaattcacacgggggagaaaccttatgaatgtaatgaatgtggaaggtcttttgcccatatttctgttctcaaggc

SEQ ID NO: 793526 - DNA, 120 bp, Artificial Sequence
  ENSG00000274349_18 (sequence is synthesized)
tcacacaggggagaaaccctatgaatgtaatgaatgtgggagatctttcacctacaattcagccctgagagcacatcagagaattcacacaggtagaaaaccctatgaatgtagtgactg

SEQ ID NO: 793527 - DNA, 120 bp, Artificial Sequence
  ENSG00000274349_19 (sequence is synthesized)
atgtagtgactgtgagaaaacttttgcccataattcagccctcaaaatacatcagagaattcacacgggggagaaaccctatgaatgtaatgaatgtgagaaaacatttgcccataattc

SEQ ID NO: 793528 - DNA, 120 bp, Artificial Sequence
  ENSG00000274349_20 (sequence is synthesized)
agcccttagagcacatcagaatatccacacaggggagaaactctatgaatgtagtgaatgtggaaaaacttttttccagaagacacgcctcagtacacatcggagaattcacacagggga

SEQ ID NO: 793529 - DNA, 120 bp, Artificial Sequence
  ENSG00000274349_21 (sequence is synthesized)
gaaaccctatgaatgtagcaagtgtgggaaaactttctcccagaaatcatacctcagtggacatgagagaattcacacaggggaaaaaccgtatgaatgtaacgtatgtgggaaaacttt

SEQ ID NO: 793530 - DNA, 120 bp, Artificial Sequence
  ENSG00000274349_22 (sequence is synthesized)
tcacacaggggagaaaccctatgaatgtaaccaatgtgggaaaactttctcccaaagaacacacctctgtgcacatcagagaattcatactggggaaaaaccctatgagtgtaatgaatg

SEQ ID NO: 793531 - DNA, 120 bp, Artificial Sequence
  ENSG00000274349_23 (sequence is synthesized)
acatcagagaattcatactggggaaaaaccctatgagtgtaatgaatgtgggaaaacgtttgctgataattcagccctcagggcacatcacagaattcacacaggggagaaaccctatga

SEQ ID NO: 793532 - DNA, 120 bp, Artificial Sequence
  ENSG00000274349_24 (sequence is synthesized)
tgggaagactttctccaagacatcacatctcagagcacatcttagaactcgctcaggggagaaaccctatgaatgcagtgaatgtgggaaaaccttctctgagaagtcatatgttagtgc

SEQ ID NO: 793533 - DNA, 120 bp, Artificial Sequence
  ENSG00000274349_25 (sequence is synthesized)
acatcagagagttcatacgggggagaaaccctacgaatgtaatgtatgtgggaagccatttgcccataattcaaccctcagagtacatcaaagaattcacacaggggagaaatcctatga

SEQ ID NO: 793534 - DNA, 120 bp, Artificial Sequence
  ENSG00000274349_26 (sequence is synthesized)
gagtacatcaaagaattcacacaggggagaaatcctatgaatgtaatgattgtgggaaaacgttctcccagaaatcacaccttagtgcacaccagagaattcacacaggggagaaaccct

SEQ ID NO: 793535 - DNA, 120 bp, Artificial Sequence
  ENSG00000274349_27 (sequence is synthesized)
tcacacaggggagaaaccctatgaatgtgatgaatgtgggaaaacttttgtccgtaaggcagctcttagggtacatcacaccagaatgcataccagagagaaaaccctagcatgtaatgg

SEQ ID NO: 793536 - DNA, 120 bp, Artificial Sequence
  ENSG00000274349_28 (sequence is synthesized)
agagaaaaccctagcatgtaatggatttgggaagtcctgagggaatgcataccttaccacataacacgtagtgcagaaactcatgtgacataggctgggaacttgtttcccttatccatt

SEQ ID NO: 793537 - DNA, 120 bp, Artificial Sequence
  ENSG00000274349_29 (sequence is synthesized)
tcctttttcattaggctcatagtttgtggaaaaatcccaatatgccgtttattcaggtggggctgaccatgggatgtggtgctaatgataaatattacatttacccttggcccttaaaaa

SEQ ID NO: 793538 - DNA, 120 bp, Artificial Sequence
  ENSG00000274349_30 (sequence is synthesized)
aaaaaaagaaaaaccctcacagtcttcctggttcataagatggatttggaggttatttctgcagcaaacttgggtcctgtgtgttcaaaaccatagagcacaaggtcaaggaagctagag

SEQ ID NO: 793539 - DNA, 120 bp, Artificial Sequence
  ENSG00000274349_31 (sequence is synthesized)
tctgaaaaacgaacaattcacttccaggtcttcatcagggttttgtttttgttgctttaaagcaagagttaagtttatagtctgttaagctcttacaaatttggcttattagttaaatgg

SEQ ID NO: 793540 - DNA, 120 bp, Artificial Sequence
  ENSG00000274349_32 (sequence is synthesized)
acgtagtttagcttaaactttatgttagagtgagatgaaaccctatgaatataatcagttttagaaaaactaatcagtttattgtgcatcagagacgtcacatgaagaagaaaacttgtc

SEQ ID NO: 793541 - DNA, 120 bp, Artificial Sequence
  ENSG00000274349_33 (sequence is synthesized)
gacatccaggatgatcaggagccttcattaaaacagaaattttagggaaaaccacaaaaaccttcgtaaagtgaattgcattaaacatcaattataataaaatttcatattttgaataaa

SEQ ID NO: 793542 - DNA, 120 bp, Artificial Sequence
  ENSG00000274349_34 (sequence is synthesized)
gcatgtgtaaacccagccccacctcctgccgtctgccctcccgggcctgaaagggacacggtgtccgagtctttaggtctgcgcgggagccgaggctgcgcacctgggctgaacctccac

SEQ ID NO: 793543 - DNA, 120 bp, Artificial Sequence
  ENSG00000274349_35 (sequence is synthesized)
gggagccgaggctgcgcacctggggtgagagcgtcggtgacagggctccgcgcggcccaggaacctggggacgggcgggcttgtgtgcggaggacagcagcaggcagtctcaggagtccc

SEQ ID NO: 793544 - DNA, 120 bp, Artificial Sequence
  ENSG00000274349_36 (sequence is synthesized)
caggatggccctcccctctcctccccggcccagtgcgcgggcccaggccgagtcctgtccgcaggtgtaggggctgccgggccccgcggggttgcgggccgggaagaggaaatgtgcgtg

SEQ ID NO: 793545 - DNA, 120 bp, Artificial Sequence
  ENSG00000274349_37 (sequence is synthesized)
cacacagggcttgctgtctgtcatgttggtatcttaatggctaccaagagtctgtttcatcagtcgtaaggtctctgttttaatgttaaatgctggtcagctgtgcctgaatcccaaagg

SEQ ID NO: 793546 - DNA, 120 bp, Artificial Sequence
  ENSG00000274349_38 (sequence is synthesized)
aacggctcaatgaagagggagtcatgaagaatttggaagagcaagtgccccagtcctatgtatttatgtctccccactgatgtacagtgctccatctgccataaatgtctattgactcaa

SEQ ID NO: 793547 - DNA, 120 bp, Artificial Sequence
  ENSG00000274349_39 (sequence is synthesized)
aaacccagccccacctcctgccgtctgccctcccgggcctgaaagggacacggtgtccgagtctttaggtctgcgcgggagccgaggctgcgcacctgggtagagacaggatttcgccat

SEQ ID NO: 793548 - DNA, 84 bp, Artificial Sequence
  ENSG00000274349_40 (sequence is synthesized)
cacccctccaccatgcccggctgagtagttctttgacattagctttaatgaagctgaacctccacagtcctctacactcttcca

SEQ ID NO: 793549 - DNA, 120 bp, Artificial Sequence
  ENSG00000274349_41 (sequence is synthesized)
aaacccagccccacctcctgccgtctgccctcccgggcctgaaagggacacggtgtccgagtctttaggtctgcgcgggagccgaggctgcgcacctggggacgtgactgtggaattcac

SEQ ID NO: 793550 - DNA, 120 bp, Artificial Sequence
  ENSG00000274386_0 (sequence is synthesized)
gtttggaggggctctggcatacgaacgtcttaggaatcccaatggctctggccatgtagctactgatcacctttggcctgctgttctgactggggcctgtcagaaccaggaccttgaggc

SEQ ID NO: 793551 - DNA, 120 bp, Artificial Sequence
  ENSG00000274386_1 (sequence is synthesized)
acctcagctgcagccctgtgcttcagaaggagtgaacttggactgtgggacaacagggcttcctggcactacttctctctcaagccaacccttcgtcagtgacaagggcccacctctcag

SEQ ID NO: 793552 - DNA, 120 bp, Artificial Sequence
  ENSG00000274386_2 (sequence is synthesized)
atgggagaagggccccataccccctgcattctgggccatggggcttcaggagaccatgaccagagccattcccagataaatgaggtttcctggaaggatgttaccagtgccttatctctg

SEQ ID NO: 793553 - DNA, 120 bp, Artificial Sequence
  ENSG00000274386_3 (sequence is synthesized)
gccaacatggtgctggggctcttctccatcatcttcagcttcagcaggaaatgccactatgcctcccggatgctcctggtcagcttcctgttagacatggcagtcagggcaatgaccagc

SEQ ID NO: 793554 - DNA, 120 bp, Artificial Sequence
  ENSG00000274386_4 (sequence is synthesized)
gggagccgagctgaatgactttgccgtcttcaccaccttcggcttggcctccgctctgctcctaggcgtggatggacttctgagtgggatcctggccatcatctatgtgtcagctgcttc

SEQ ID NO: 793555 - DNA, 120 bp, Artificial Sequence
  ENSG00000274386_5 (sequence is synthesized)
tttccacttgtgcttttattcacctggagtcccctccacatacaagggtctaccctgcccctatgcttcctgcatcttggcttccacctcccttctgaccaaaggcaacaggttcatcct

SEQ ID NO: 793556 - DNA, 120 bp, Artificial Sequence
  ENSG00000274386_6 (sequence is synthesized)
ctgctgcatggcctcactcatgattctcttcatgatggaccagagctactatccatatgacaaaatcctggagtctgagaactggaaaaaattggtttatataggaggtgtcatcatgct

SEQ ID NO: 793557 - DNA, 120 bp, Artificial Sequence
  ENSG00000274386_7 (sequence is synthesized)
gtttttctccccattgtctctgtctgctttttactgcctgatgtggtcgctctcgtacatcttctttccagatgctctgtggggcaaggcagcctgtctttcgccacagcactgaggaag

SEQ ID NO: 793558 - DNA, 120 bp, Artificial Sequence
  ENSG00000274386_8 (sequence is synthesized)
gcggacccccatctcatgtaggaatgccgtgtccccagggtgagccctcaggtaagggtaccagtttcttcctgagccatgaccagagccattcccagataaatgaggtttcctggaagg

SEQ ID NO: 793559 - DNA, 120 bp, Artificial Sequence
  ENSG00000274386_9 (sequence is synthesized)
ctttgtatgtacctgtgttgccatatactagatatatggtatgtctgttgccatgaagttagaaacccaaagcagggtcagtgaacttcacttctttgtctttattcagggttctgactc

SEQ ID NO: 793560 - DNA, 120 bp, Artificial Sequence
  ENSG00000274386_10 (sequence is synthesized)
ccttgcggacaatacttgtttatgtcatgtagagcagaatatccccccgcctcaagctcaatgtgggctgggtttgggttccagctccattaccagccgggtgactgtgtgctactaagg

SEQ ID NO: 793561 - DNA, 120 bp, Artificial Sequence
  ENSG00000274386_11 (sequence is synthesized)
tccatcccttggaaaggagtgagagccttcagaactggtattggcctcagcctcagccctgcctggtggggcttcctgaagcatttcttactcttgcagactctggctctgagagtagag

SEQ ID NO: 793562 - DNA, 120 bp, Artificial Sequence
  ENSG00000274386_12 (sequence is synthesized)
tactcttgcagactctggctctgagagtagagccaatcacaggactctcttgttgcctagtttgaatgtgtgtaggattttgtaacttcaacattctgggtttttttttttttttttttt

SEQ ID NO: 793563 - DNA, 120 bp, Artificial Sequence
  ENSG00000274386_13 (sequence is synthesized)
tctcgtgtggattttctttcctacgctggaaactactaaactctagctattcagatgccacttcatattctaaaatccaaatcaaatagaaataaacagtactgtatggcaaaggtgtac

SEQ ID NO: 793564 - DNA, 120 bp, Artificial Sequence
  ENSG00000274386_14 (sequence is synthesized)
ctcaccgagaactcaggtccactgagcccccagcgtagatagacattccacctcccagatggtggaaaaaaggattgatggctggttctgctccaccctcagagactgtgccagaacacc

SEQ ID NO: 793565 - DNA, 120 bp, Artificial Sequence
  ENSG00000274386_15 (sequence is synthesized)
ttctaccctggatataacttttttaagtttccagaacaatgtatgtggtaaatatacatctattctcaaattagatgtttaaaaataaaaacccaaagtaagatttgactgtaacagaat

SEQ ID NO: 793566 - DNA, 120 bp, Artificial Sequence
  ENSG00000274386_16 (sequence is synthesized)
agacggtgccttcctgttaaatcattcatatgttcctagttagatggatttgcctgtgtcccaggactttatatctccttcagtttaagttttgtatttttgctatctgccatagtgcct

SEQ ID NO: 793567 - DNA, 120 bp, Artificial Sequence
  ENSG00000274386_17 (sequence is synthesized)
gacactcagaaatgttccctttgtatatgaattgatttagttgtggattctagtaagttacatacaaggtttctataatgtggtaagaattttacaaatatacacgagcttagacatttc

SEQ ID NO: 793568 - DNA, 120 bp, Artificial Sequence
  ENSG00000274386_18 (sequence is synthesized)
aatacaatgtccttcaatgctgtacatccatttcaatgtgatgctccccttaatcaaagcattttaggaactccaatctgaaaatggtcttcacataaattcttaaggaccaagcagctg

SEQ ID NO: 793569 - DNA, 120 bp, Artificial Sequence
  ENSG00000274386_19 (sequence is synthesized)
gaacaacaccaccaccaccaaaagcgaaaaacaggttttattctgaactaaattttttccaaaaacctaacatttgagattagccaattatgtcgtattcttaaatcaaattaggtatca

SEQ ID NO: 793570 - DNA, 120 bp, Artificial Sequence
  ENSG00000274386_20 (sequence is synthesized)
tatttggactcaaatgccttgtggctgtttctaaaatttgaaactatgttgaaaggaaaaagatgcaattctgaaagagaatttccatgtccattttaagtgacagcagcagagagaaat

SEQ ID NO: 793571 - DNA, 120 bp, Artificial Sequence
  ENSG00000274386_21 (sequence is synthesized)
atacagacccccaggaggacagctttgaaaagtaaaatgcccatttggatgtgtaaattatcgcttgattgtaatggcaataattcatacttaattgcctccagttttttttgtaggtta

SEQ ID NO: 793572 - DNA, 120 bp, Artificial Sequence
  ENSG00000274386_22 (sequence is synthesized)
atgacactaggatagttataggtcagctgacagccggttaacagagggatctatgcttccttgcacctctctgagagtatggttatacttctatacgggcttgagggtctcagatactaa

SEQ ID NO: 793573 - DNA, 120 bp, Artificial Sequence
  ENSG00000274386_23 (sequence is synthesized)
ggctactcattcaatgccttcacttcctcagacagtggttttctaaaatagaatgtctcttcttgggcttcctcttaggaacaagggagaaggccaagactttaaaatctgcacttctca

SEQ ID NO: 793574 - DNA, 120 bp, Artificial Sequence
  ENSG00000274386_24 (sequence is synthesized)
aatgcatacatgaagccagtggggtttaggcagttctctttgtcctaagcttgagagagagtgtagatttccctcctggtcaacttctagtcccttcttcctaacctgaagtcctacttc

SEQ ID NO: 793575 - DNA, 120 bp, Artificial Sequence
  ENSG00000274386_25 (sequence is synthesized)
tgtgtctgataagcggaatcaagtgactgagaattctgctactcttttagccctgtgaccttgaataaaacgtttaatctctctaagcctattttcctatctgtaaaatggaggatttac

SEQ ID NO: 793576 - DNA, 120 bp, Artificial Sequence
  ENSG00000274386_26 (sequence is synthesized)
ttcctttcagggttgttttgtggattgaacaaccgtgatgttttatgtggatgaatgtaaaacacctagaataatgaatggcacgtaaaatatgttaaataaatgttagatggctttctg

SEQ ID NO: 793577 - DNA, 120 bp, Artificial Sequence
  ENSG00000274386_27 (sequence is synthesized)
ccggcctctgtgggatgtaaagcttcaaaaatatctctgtacctttgagaaactggggatggaccacatcaggatgagggaattctgggcagccacaggataatgtagcaagatggccct

SEQ ID NO: 793578 - DNA, 120 bp, Artificial Sequence
  ENSG00000274386_28 (sequence is synthesized)
cagcagatgtgggcccctccaccttggacatcccagcttccagaactgaggcatctgttacaacagtccagacaggaggtcgtgggaatatcgtctacagcaggcagtggtgatggaaag

SEQ ID NO: 793579 - DNA, 120 bp, Artificial Sequence
  ENSG00000274386_29 (sequence is synthesized)
aagatggcaagagacatcctcaggtgaaaggcaggctccgcaccagactggggttctgacactaacttggcatgtgattctgggctgccacctcaccattctgaacctcagtgttgtccc

SEQ ID NO: 793580 - DNA, 120 bp, Artificial Sequence
  ENSG00000274386_30 (sequence is synthesized)
ctctaaacctgggagaacacccatcctgcctggaggtggatccatggcttgacttctggatatttcttaggaggctctgatctgggtggtacagaaagaggcagatcttcaaaacaaaac

SEQ ID NO: 793581 - DNA, 120 bp, Artificial Sequence
  ENSG00000274386_31 (sequence is synthesized)
attggtttatataggagggagtagccgaaaatcatacatacatggtagagaggggtctcactcttttgtccaggctgatctcaaattcatggattcaagcaatcctcctgccttggcctc

SEQ ID NO: 793582 - DNA, 120 bp, Artificial Sequence
  ENSG00000274386_32 (sequence is synthesized)
gattacaggcatgagccaacgcgccagccatgtactttccaagacaactctggttttcagtattgtctttttgcctcaacagatcaatgactattcttgaaatacagtattccaaaatgc

SEQ ID NO: 793583 - DNA, 120 bp, Artificial Sequence
  ENSG00000274391_0 (sequence is synthesized)
gggagggcacaacagctgctacctgaacagtttctgacccaacagttacccagcgccggactcgctgcgccccggcggctctagggacccccggcgcctacacttagctccgcgcccgag

SEQ ID NO: 793584 - DNA, 120 bp, Artificial Sequence
  ENSG00000274391_1 (sequence is synthesized)
agaatgttggaccgacgacacaagacctcagacttgtgttattctagcagctgaacacaccccaggctcttctgcccggcagtggctctggaagcagtctggtgtatagagttatggatt

SEQ ID NO: 793585 - DNA, 120 bp, Artificial Sequence
  ENSG00000274391_2 (sequence is synthesized)
cactaccagattctactgtatgctcttgacaactatgaccacaatggtccacccacaaatgaattatcaggagtgaacccagaggcacgtatgaatgaaagtcctgatccgactgacctg

SEQ ID NO: 793586 - DNA, 120 bp, Artificial Sequence
  ENSG00000274391_3 (sequence is synthesized)
gcgggagtcatcattgagctcggccccaatgacagtccacagacaagtgaatttaaaggagcaaccgaggaggcacctgcgaaagaaagcccacacacaagtgaatttaaaggagcagcc

SEQ ID NO: 793587 - DNA, 120 bp, Artificial Sequence
  ENSG00000274391_4 (sequence is synthesized)
cgggtgtcacctatcagtgaaagtgtgttagcacgactttccaagtttgaagttgaagatgctgaaaatgttgcttcatatgacagcaagattaagaaaattgtgcattcaattgtatca

SEQ ID NO: 793588 - DNA, 120 bp, Artificial Sequence
  ENSG00000274391_5 (sequence is synthesized)
tcctttgcatttggactatttggagttttcctggtcttactggatgtcactctcatccttgccgacctaattttcactgacagcaaactttatattcctttggagtatcgttctatttct

SEQ ID NO: 793589 - DNA, 120 bp, Artificial Sequence
  ENSG00000274391_6 (sequence is synthesized)
ctagctattgccttattttttctcatggatgttcttcttcgagtatttgtagaaaggagacagcagtatttttctgacttatttaacattttagatactgccattattgtgattcttctg

SEQ ID NO: 793590 - DNA, 120 bp, Artificial Sequence
  ENSG00000274391_7 (sequence is synthesized)
ctggttgatgtcgtttacattttttttgacattaagttgcttaggaatattcccagatggacacatttacttcgacttctacgacttattattctgttaagaatttttcatctgtttcat

SEQ ID NO: 793591 - DNA, 120 bp, Artificial Sequence
  ENSG00000274391_8 (sequence is synthesized)
tgctatgtcatttccatcttctggaaggcagtctttctatagaaatccaatcaaggaagttgtgcggtttctagataagaaacaccgaaaccactatcgagtctacaatctatgcagtga

SEQ ID NO: 793592 - DNA, 120 bp, Artificial Sequence
  ENSG00000274391_9 (sequence is synthesized)
aagagcttacgatcctaagcacttccataatagggtcgttagaatcatgattgatgatcataatgtccccactctacatcagatggtggttttcaccaaggaagtaaatgagtggatggc

SEQ ID NO: 793593 - DNA, 120 bp, Artificial Sequence
  ENSG00000274391_10 (sequence is synthesized)
tcaagatcttgaaaacatcgtagcgattcactgtaaaggaggcacagatagaacaggaactatggtttgtgccttccttattgcctctgaaatatgttcaactgcaaaggaaagcctgta

SEQ ID NO: 793594 - DNA, 120 bp, Artificial Sequence
  ENSG00000274391_11 (sequence is synthesized)
ttattttggagaaaggcgaacagataaaacccacagcgaaaaatttcagggagtaaaaactccttctcagaagagatatgttgcatattttgcacaagtgaaacatctctacaactggaa

SEQ ID NO: 793595 - DNA, 120 bp, Artificial Sequence
  ENSG00000274391_12 (sequence is synthesized)
tctccctccaagacggatactctttataaaacacttcattatttattcgattcctcgttatgtacgtgatctaaaaatccaaatagaaatggagaaaaaggttgtcttttccactatttc

SEQ ID NO: 793596 - DNA, 120 bp, Artificial Sequence
  ENSG00000274391_13 (sequence is synthesized)
attaggaaaatgttcggtacttgataacattacaacagacaaaatattaattgatgtattcgacggtctacctctgtatgatgatgtgaaagtgcagtttttctattcgaatcttcctac

SEQ ID NO: 793597 - DNA, 120 bp, Artificial Sequence
  ENSG00000274391_14 (sequence is synthesized)
atactatgacaattgctcattttacttctggttgcacacatcttttattgaaaataacaggctttatctaccaaaaaatgaattggataatctacataaacaaaaagcacggagaattta

SEQ ID NO: 793598 - DNA, 120 bp, Artificial Sequence
  ENSG00000274391_15 (sequence is synthesized)
tccatcagattttgccgtggagatactttttggcgagaaaatgacttccagtgatgttgtagctggatccgattaagtatagctcccccttccccttctgggaaagaattatgttctttc

SEQ ID NO: 793599 - DNA, 120 bp, Artificial Sequence
  ENSG00000274391_16 (sequence is synthesized)
tttccaaccctgccacatgttcatatatcctaaatctatcctaaatgttccttgaagtatttatttatgtttatatatgtttatatatgttcttcataaatctattacatatatatagat

SEQ ID NO: 793600 - DNA, 120 bp, Artificial Sequence
  ENSG00000274391_17 (sequence is synthesized)
atttggaacacagtatgcaggaacatcaggcatcattttgaagaactttgaaatagaactttcaaagcaaaaacttgagatattcaaaaattgtgattccccaacacccacttacttaca

SEQ ID NO: 793601 - DNA, 120 bp, Artificial Sequence
  ENSG00000274391_18 (sequence is synthesized)
tatttttggtcaagtatttattccctgctttggttcacatttgtaatttcagatttattagaaagctaatttatatatttttcttccccttcatttacaaactgtctgttaacagattgg

SEQ ID NO: 793602 - DNA, 120 bp, Artificial Sequence
  ENSG00000274391_19 (sequence is synthesized)
caaccaagactaagttttaaatccagaagagagaaatgtttcacgcaagcagtcccccaactcccaacacacactccctttcattccgagcactaaataggtagcttacttgacaagctt

SEQ ID NO: 793603 - DNA, 67 bp, Artificial Sequence
  ENSG00000274419_0 (sequence is synthesized)
gcaagaggtcatctgagcacatccagcgcatcgaccgggacgtaagcgggacattaaggaagcatat

SEQ ID NO: 793604 - DNA, 120 bp, Artificial Sequence
  ENSG00000274443_0 (sequence is synthesized)
gcagcagcatctccctctcatcagcactgttgaaagaagaaaaaatgtcagtgctatctcctgaaatcaaatgtgagacttctaaattcaccagaagttcctttggcagttgtttgattt

SEQ ID NO: 793605 - DNA, 120 bp, Artificial Sequence
  ENSG00000274443_1 (sequence is synthesized)
ttgagagtagttggaagaaagcagttttagaaacacaaaagattaagaaagaatataccacagcatttggtctagaagagctcaaggaatgtatcaaaatgccatatttaccaggactgc

SEQ ID NO: 793606 - DNA, 120 bp, Artificial Sequence
  ENSG00000274443_2 (sequence is synthesized)
tgctgatgccgaggtgtctgcagtcaggctaaagaagactaaggagacatgcagtgtggcaccactttgggagaaatcaaaaggttctggcttcagtgatcctctcactggagcaccatc

SEQ ID NO: 793607 - DNA, 120 bp, Artificial Sequence
  ENSG00000274443_3 (sequence is synthesized)
tcaatacttagagagactttccaaaatagccatattggaatatgataccattcgtcaggaaacaaccacaaaatcaaaaaaaagcaagaaacgagacctccgagaccgctgaaaaatgtc

SEQ ID NO: 793608 - DNA, 120 bp, Artificial Sequence
  ENSG00000274443_4 (sequence is synthesized)
tgtcgtacagtgtgatgctttcttcagtgacttttaagctttatattttctttttttatatgatatgatgcaaaatgatttatataaaaatggaaatgtaaataaataaatattttacat

SEQ ID NO: 793609 - DNA, 74 bp, Artificial Sequence
  ENSG00000274512_0 (sequence is synthesized)
gagaagggcaagaggtcatctgagcacatccagcgcatcgaccgggacgtaagcgggacattaaggaagcatat

SEQ ID NO: 793610 - DNA, 120 bp, Artificial Sequence
  ENSG00000274523_0 (sequence is synthesized)
aggactggtgttaagggtcacgcaagatggcggcgcccagaggctgctgaggcgcggaacggaggatggcgctggtggcgttggtggctggggctcggctggggcggcggctgagcgggc

SEQ ID NO: 793611 - DNA, 120 bp, Artificial Sequence
  ENSG00000274523_1 (sequence is synthesized)
gagggcactggacggcggccgggcgctcccggagccggcgcgaagcggcagaagccgaggcggaggtgcccgtggtccagtacgtgggcgagcgcgctgcccgcgccgatcgcgtcttcg

SEQ ID NO: 793612 - DNA, 120 bp, Artificial Sequence
  ENSG00000274523_2 (sequence is synthesized)
atcgcgtcttcgtgtggggcttcagcttctcgggggcgctgggcgtgccttcctttgtggtgcccagctccgggcccgggccccgcgccggcgcccgaccgcgccgcaggatccagcccg

SEQ ID NO: 793613 - DNA, 120 bp, Artificial Sequence
  ENSG00000274523_3 (sequence is synthesized)
tgccctatcgcctggagctggaccaaaagatttcatctgctgcttgcggctatggattcacactgctgtcctctaagactgcggatgttacgaaagtctgggggatgggactcaacaaag

SEQ ID NO: 793614 - DNA, 120 bp, Artificial Sequence
  ENSG00000274523_4 (sequence is synthesized)
attctcagcttggatttcacaggagccggaaagataaaacgaggggctacgagtatgtgttggagccctcacccgtctccctgcctctggacagacctcaggagacacgggtgctgcagg

SEQ ID NO: 793615 - DNA, 120 bp, Artificial Sequence
  ENSG00000274523_5 (sequence is synthesized)
tctcctgcggccgagctcactctcttgtgttgactgacagggaaggagtcttcagcatgggaaacaattcttatgggcaatgtggaagaaaggtggtcgaaaatgaaatttacagtgaaa

SEQ ID NO: 793616 - DNA, 120 bp, Artificial Sequence
  ENSG00000274523_6 (sequence is synthesized)
gtcacagagtccacaggatgcaggacttcgatggccaggtggtccaggtcgcctgtggtcaggatcatagtctgttcctgacggataaaggagaagtctattcttgtggatggggtgctg

SEQ ID NO: 793617 - DNA, 120 bp, Artificial Sequence
  ENSG00000274523_7 (sequence is synthesized)
atgggcaaacaggtctgggtcactacaatatcaccagctcgcccaccaagctgggtggagacctggcgggagtgaacgttatccaagttgccacctacggtgattgctgcctggccgtgt

SEQ ID NO: 793618 - DNA, 120 bp, Artificial Sequence
  ENSG00000274523_8 (sequence is synthesized)
ccgccgacggaggactttttggttggggaaactcggagtacctgcagctggcctctgtcactgactccacacaggtgaatgtgccccgctgcttacacttctcaggagtggggaaggtgc

SEQ ID NO: 793619 - DNA, 120 bp, Artificial Sequence
  ENSG00000274523_9 (sequence is synthesized)
gcagtgttaaacggagaaggacatgtttttgtctggggctatggaattcttgggaaaggtccaaacctagtggaaagtgccgtccctgaaatgattccacccactctctttggcttgacg

SEQ ID NO: 793620 - DNA, 120 bp, Artificial Sequence
  ENSG00000274523_10 (sequence is synthesized)
gagttcaacccagaaatccaggtttcccgcatccgatgtggactcagccactttgctgcactgaccaacaaaggagagctgtttgtatggggcaagaacatccgagggtgcctgggaatc

SEQ ID NO: 793621 - DNA, 120 bp, Artificial Sequence
  ENSG00000274523_11 (sequence is synthesized)
ggtcgcctggaggaccagtatttcccatggagggtgacgatgcctggggagcctgtggacgtggcatgtggcgtggaccacatggtgaccctggccaagtcattcatctaaacctccctc

SEQ ID NO: 793622 - DNA, 120 bp, Artificial Sequence
  ENSG00000274523_12 (sequence is synthesized)
acctgcttgggcggccccgtcccgggaaccactggcactccttggcagaggccagcgcgtggccagccccccggggttcttggatggtggtggcggaggaccctgcgtgcagtgtgacgc

SEQ ID NO: 793623 - DNA, 120 bp, Artificial Sequence
  ENSG00000274523_13 (sequence is synthesized)
tctgtcctgaatcccttagcgggtacctaccaggaggatcagggcaaggtccctctccagctgcaggtgaggcctgcggaactcagcttggatggcagcctttggtgggccgctgtggcc

SEQ ID NO: 793624 - DNA, 120 bp, Artificial Sequence
  ENSG00000274523_14 (sequence is synthesized)
cgcacgtctctgttctctccaagtaacatgcgacggtgtctggtgtcacgtctcgcctgagaagcccgtcttaggaaagcttagcttgaacacagtgctcgggaggtttctgctctgtct

SEQ ID NO: 793625 - DNA, 120 bp, Artificial Sequence
  ENSG00000274523_15 (sequence is synthesized)
gtcatggcagtctcttggtttgtgtctggccaaggccatgcgtgtgcctcggaccgagccccagcttaggcgagggagtcaggctggcttcggccctcggttttcattcaggccaccctg

SEQ ID NO: 793626 - DNA, 120 bp, Artificial Sequence
  ENSG00000274523_16 (sequence is synthesized)
ctcatggcccttcctggccgcctgccacaccgcaagctcgctggggggacactagaagcaccgtggcctgggattccatctggagctgtccgcaggcaccagccccagcctcccaccacg

SEQ ID NO: 793627 - DNA, 120 bp, Artificial Sequence
  ENSG00000274523_17 (sequence is synthesized)
ctcactgcctggcttggaaaagttaagaagcccctcaggaagagaatcgaggccaagttcctctgcgccgagggccccgagcatatccgccaaggctcagctgcagtgccaggcggagga

SEQ ID NO: 793628 - DNA, 120 bp, Artificial Sequence
  ENSG00000274523_18 (sequence is synthesized)
ggaagatccagaaattgtgaacaatgtttgatttagtagcgtgacttgcctttccctttaaaaacatcttttacaaatctgtcttggaataaagtctattttctgccttttggtttttaa

SEQ ID NO: 793629 - DNA, 85 bp, Artificial Sequence
  ENSG00000274523_19 (sequence is synthesized)
ctcgggaggctgagacacgagagttgtcgataggtttgaggggacctgggcaggggatgcgaaggcagcagggaatcgtccactc

SEQ ID NO: 793630 - DNA, 120 bp, Artificial Sequence
  ENSG00000274523_20 (sequence is synthesized)
ctgggcaggggatgcgaaggcagcagggaatcgtccactccagctcgctgtcgctggaggacggcctggggcggcgtgggagcagaccggagcggagacggctgcagcaaggccagattt

SEQ ID NO: 793631 - DNA, 120 bp, Artificial Sequence
  ENSG00000274523_21 (sequence is synthesized)
atgcggtggcacgggctgtgcagtgttaaacgatacatggccacagagctgagtcatcctagagcaaacctctggagtggagagcgaactacttcattcccctcccttagcctgggccag

SEQ ID NO: 793632 - DNA, 120 bp, Artificial Sequence
  ENSG00000274523_22 (sequence is synthesized)
agagactccagctctgccttctccagccaaaaaatcaaaggcagatgggagaacagccttcagctttggataacgatgaaatatctggcaccactgatgaatattaaactttctataacc

SEQ ID NO: 793633 - DNA, 120 bp, Artificial Sequence
  ENSG00000274523_23 (sequence is synthesized)
cgatgtggactcagccactttgctgcactgaccagtaagttaccaagcccggtggccctggtgtgagcccagcagaggttctctgtctccagttcaaccccaaactgcgggcagctctca

SEQ ID NO: 793634 - DNA, 120 bp, Artificial Sequence
  ENSG00000274523_24 (sequence is synthesized)
ggttccacccatccaacagaacggcgcctttgtactgataactcaagcaagggctaagccagaagttgtttgcctcgaggttgtataatgtcttgttttccccccctggagttttaattt

SEQ ID NO: 793635 - DNA, 120 bp, Artificial Sequence
  ENSG00000274523_25 (sequence is synthesized)
tggttcgtttggtttgtgggtaggctaacgtgaacgtgcattttctcaagagagcacccgtcggtggtaggaaggggcattgctagtacgtcgggtgctggaggaaaccagcagaggctt

SEQ ID NO: 793636 - DNA, 120 bp, Artificial Sequence
  ENSG00000274523_26 (sequence is synthesized)
gggcacctgccccatccgccagcgccaagacaacaggcccactcctctgattacctccgggggatggacggcaaacaggtaaggagttccatgcaactgcggatggagcccctctgagaa

SEQ ID NO: 793637 - DNA, 120 bp, Artificial Sequence
  ENSG00000274523_27 (sequence is synthesized)
acacatgcccctccaagtggggtctggggcctggagagaccctcccacccagcagaccaggagatagctgggggacaagggcagacggcccctgcctgggaaaaaccacactcacacccc

SEQ ID NO: 793638 - DNA, 120 bp, Artificial Sequence
  ENSG00000274523_28 (sequence is synthesized)
accccgaagagctgtggagaccaaaccaagactacgctacacacagaacgccgagaagataaaccaagctttacacgagcaggatggggatgggaaaactaaaggggccccctgtgaccg

SEQ ID NO: 793639 - DNA, 120 bp, Artificial Sequence
  ENSG00000274523_29 (sequence is synthesized)
aggagcagggtccccagggggcagctcccacggagcgggcttgaacagggaccacccctgcagagccagccagggcggagagccataccctggccccagcgcgccccgacacacatgctt

SEQ ID NO: 793640 - DNA, 120 bp, Artificial Sequence
  ENSG00000274523_30 (sequence is synthesized)
ttctccatgacacgaggccagtccccaggagcagccccaggagcacaacctgagatttctaagcttgcaggttacaaaaaacaaaaaaaacagagaagctgcctgcgtaaaaagtgccac

SEQ ID NO: 793641 - DNA, 120 bp, Artificial Sequence
  ENSG00000274523_31 (sequence is synthesized)
ccacggaggcaggacacaggcagcgtgtggcccattcagcaggcccaggtcttcagggtgaggctgctggcgagggcaggggagagggggcattctggttaaaagcaagaaattccaaat

SEQ ID NO: 793642 - DNA, 120 bp, Artificial Sequence
  ENSG00000274523_32 (sequence is synthesized)
actcctccctcgggatcaacatccccccaaataagggcgcccagggatcttgcctggggaaagtggggtgcagaaggcatgacccacgccacagcgggctctcagcacccttcccacgtc

SEQ ID NO: 793643 - DNA, 120 bp, Artificial Sequence
  ENSG00000274523_33 (sequence is synthesized)
ccatgtcacaggctctttgagctgctggctttgttctctcaagtcaggtctgagggaacccatcggcttctgtaataatcgtattgcctatatacttgaattaaaaatatatggtggctc

SEQ ID NO: 793644 - DNA, 120 bp, Artificial Sequence
  ENSG00000274523_34 (sequence is synthesized)
cagcgagaccccttccagtcctcacattctaggatcccacaaacctgcagaactgatttgattggtggtgttatttttagtcttcagcatgggaaacaattcttatgggcaatgtggaag

SEQ ID NO: 793645 - DNA, 120 bp, Artificial Sequence
  ENSG00000274529_0 (sequence is synthesized)
atgataaaacccaaatgggggggtctggtgtgggcacagccctggcatggccctctggcacggccctctggcaccttaccctttgccagctccatgcccagccctgtggatgcatcctca

SEQ ID NO: 793646 - DNA, 120 bp, Artificial Sequence
  ENSG00000274529_1 (sequence is synthesized)
gcagacggtggcagcgggttgggttcccaccggagaaagcggaccaccttcagcaaagggcagctactggagctggagagggcgtttgcagcatggccctaccccaacatcagcacccat

SEQ ID NO: 793647 - DNA, 120 bp, Artificial Sequence
  ENSG00000274529_2 (sequence is synthesized)
gccaaaataatcaagaacaggaagtcaggaattctaagccctgggtctgagtgcccccagagctcctgttctcttccagacaccctccagcagccctgggatccccaaatgccaggccaa

SEQ ID NO: 793648 - DNA, 120 bp, Artificial Sequence
  ENSG00000274529_3 (sequence is synthesized)
cctccaccctccagcggcacacctcagcgcacctcagtgtgtcgacatagctcctgtccagctcctggcttgagtccacggcagggctgggaaggggctaaagctgtagccccatgggga

SEQ ID NO: 793649 - DNA, 120 bp, Artificial Sequence
  ENSG00000274529_4 (sequence is synthesized)
tcagctggggcttcagaggtccacccttctttagagcgagctactccccagacttcactaggcagcctgtctgacctcatctatgccttggccattgtcgtcaatgtggaccactcctag

SEQ ID NO: 793650 - DNA, 120 bp, Artificial Sequence
  ENSG00000274559_0 (sequence is synthesized)
cccgttttcacgatctgctgctcgtctcaggctcgtagttcgccttcaacatgccggagccagcgaagtccgctcccgcgcccaagaagggctcgaagaaagccgtgactaaggcgcaga

SEQ ID NO: 793651 - DNA, 120 bp, Artificial Sequence; identical to SEQ ID NO: 770168
  ENSG00000274559_1 (sequence is synthesized)

SEQ ID NO: 793652 - DNA, 120 bp, Artificial Sequence; identical to SEQ ID NO: 770169
  ENSG00000274559_2 (sequence is synthesized)

SEQ ID NO: 793653 - DNA, 120 bp, Artificial Sequence
  ENSG00000274576_0 (sequence is synthesized)
atggacatactttgttccacgctcctgctactgactgtcccgtcctgggtcttatcccaggtcaccttgagggagtctggtcctgcgctggtgaaacccacacagaccctcacactgacc

SEQ ID NO: 793654 - DNA, 120 bp, Artificial Sequence; identical to SEQ ID NO: 753198
  ENSG00000274576_1 (sequence is synthesized)

SEQ ID NO: 793655 - DNA, 120 bp, Artificial Sequence
  ENSG00000274588_0 (sequence is synthesized)
agagccaagccagccatggagtgggatgggggaaagtttggcaccctgcgaggggctgccggactggagtgggcggggcgcccgagggtactttagccttccaggcttagggactcaggc

SEQ ID NO: 793656 - DNA, 120 bp, Artificial Sequence
  ENSG00000274588_1 (sequence is synthesized)
tgcccagacctgaagcggtgtgcggccatggaccgcggagctgccgcagcccagggcactgccccgcctcaggatggagagcagcccgctgagtctccagagcctccgccgccttggccg

SEQ ID NO: 793657 - DNA, 120 bp, Artificial Sequence
  ENSG00000274588_2 (sequence is synthesized)
ccgccgccaccaccaccggctccgccgccggctccgccgctgctctccgaggcttcgccagaacccataccagagccctgtccagagcttgctccaggtccctgtccagaggcgacctca

SEQ ID NO: 793658 - DNA, 120 bp, Artificial Sequence
  ENSG00000274588_3 (sequence is synthesized)
gaatcagccacagaactgtacacagaaccgaccccagaaccagccacagagccggcctcagaaccggccccagaacctgccacagagccggccccagaacctgccacagagccggcccca

SEQ ID NO: 793659 - DNA, 120 bp, Artificial Sequence
  ENSG00000274588_4 (sequence is synthesized)
gaaccggccccagaacctgccacagagtctgccccagagccgactccagaacctgccctagagtcggtcccagagccggccccagagctgactccagaagttgccccagagctggcccca

SEQ ID NO: 793660 - DNA, 120 bp, Artificial Sequence
  ENSG00000274588_5 (sequence is synthesized)
gagccgaccccagaacctgtgacagagctggccccagagttctgccctgaggcggctccagagttccgtccaagtccagcaccatgtctattgcaatgtccggtggacactcgagagaga

SEQ ID NO: 793661 - DNA, 120 bp, Artificial Sequence
  ENSG00000274588_6 (sequence is synthesized)
ggtctaaagacctcgccatcgccatcgccatcgccatcgcccagaacgccaatgtcgtggtccagaataaagaaaatattgaaggaaggacctatgctgaagaactgtaactctttcaag

SEQ ID NO: 793662 - DNA, 120 bp, Artificial Sequence
  ENSG00000274588_7 (sequence is synthesized)
agatggaagcttagatattttctggttcaaggacagaagctctactttgcacaccatcccgcgtttgcacactttgaaacgattgatctgtctcaagccactgtggcagaaagcagctgt

SEQ ID NO: 793663 - DNA, 120 bp, Artificial Sequence
  ENSG00000274588_8 (sequence is synthesized)
agaaacctttgccacagtttttgtgttattacaccacaacgaaaaatcactctggctgcacccaaccggaaagacatggaagaatggattaacatcataaaaaccatccaacagggagaa

SEQ ID NO: 793664 - DNA, 120 bp, Artificial Sequence
  ENSG00000274588_9 (sequence is synthesized)
atttataagatacctgcagcagaaaacaacccttttcttgttggaatgcattgttggtactccagttacagccaccggacccagcactgcaatgtttgtcgagagagcattcctgcctta

SEQ ID NO: 793665 - DNA, 120 bp, Artificial Sequence
  ENSG00000274588_10 (sequence is synthesized)
tctagagatgccatcatctgtgaagtgtgcaaagtgaaatctcacagattgtgtgctttgagagcaagcaaagactgcaagtggaatacattgtctatcactgatgacctccttctgcct

SEQ ID NO: 793666 - DNA, 120 bp, Artificial Sequence
  ENSG00000274588_11 (sequence is synthesized)
gcagatgaagtaaacatgccccatcaatgggtagaaggaaacatgcctgtcagctctcagtgtgcagtgtgtcatgagagctgtggcagttatcaaagacttcaagacttccgctgcctg

SEQ ID NO: 793667 - DNA, 120 bp, Artificial Sequence
  ENSG00000274588_12 (sequence is synthesized)
tggtgtaattctacggtgcatgatgactgtaggagacggttttccaaggaatgttgcttcagaagccatcgctcatcagtcattcctcccactgctctaagcgaccccaaaggcgatggc

SEQ ID NO: 793668 - DNA, 120 bp, Artificial Sequence
  ENSG00000274588_13 (sequence is synthesized)
caattagtagtatcttcagacttctggaatcttgattggtcatcagcctgttcatgtcccttgctcatcttcatcaactccaaaagtggcgatcatcaggggatcgtcttcctccgaaaa

SEQ ID NO: 793669 - DNA, 120 bp, Artificial Sequence
  ENSG00000274588_14 (sequence is synthesized)
ttcaagcaataccttaacccatctcaagtgttcgacttattgaagggtggacctgaagcagggctgtctatgttcaagaactttgctcgctttcgcattctggtttgtggtggagatggc

SEQ ID NO: 793670 - DNA, 120 bp, Artificial Sequence
  ENSG00000274588_15 (sequence is synthesized)
agcgtgagctgggtcttatctctgattgatgcctttggattacatgaaaagtgtcagttggcagtcatcccacttggaaccggcaatgatctggctcgtgttctgggctggggtgcattc

SEQ ID NO: 793671 - DNA, 120 bp, Artificial Sequence
  ENSG00000274588_16 (sequence is synthesized)
tggaacaaaagcaagtcacctctggacatcctcaacagagtggagcaggctagtgtgaggatcctagacagatggagtgtgatgattcgtgagactcccagacaaaccccgctgctaaaa

SEQ ID NO: 793672 - DNA, 120 bp, Artificial Sequence
  ENSG00000274588_17 (sequence is synthesized)
ggacaggttgaaatggatgtaccacgatttgaggctgctgccatccaacacttagaatctgcagccaccgagttgaacaaaatcctgaaggccaagtaccccacagagatgatcatcgca

SEQ ID NO: 793673 - DNA, 120 bp, Artificial Sequence
  ENSG00000274588_18 (sequence is synthesized)
accagattcttgtgttcagctgtggaagattttgtggttgatattgtaaaggcctggggtcagataaaacagaacaacactgcaatagtgtctgtgattttgaaaagtgacttaatgtat

SEQ ID NO: 793674 - DNA, 120 bp, Artificial Sequence
  ENSG00000274588_19 (sequence is synthesized)
gataggctcagtgtcctgatcgatgtcctggctgaggaggcagcagctacttctgctgaaaaaagtgctacagaatatgcagacagcagcaaggcagataggaagcccttcattcctcaa

SEQ ID NO: 793675 - DNA, 120 bp, Artificial Sequence
  ENSG00000274588_20 (sequence is synthesized)
atagaccacatagccaagtgcaagttggagctggctacaaaggcccagagtctccagaaatccttgaaactcatcatatttcaagttgaacaagctctggatgaggaaagcagacagaca

SEQ ID NO: 793676 - DNA, 120 bp, Artificial Sequence
  ENSG00000274588_21 (sequence is synthesized)
atatctgttaagaactttagttcaactttcttcctggaagatgacccagaagatattaaccagacaagcccacgacgccgttctcgtcgtggcactttgtcttctatatcttctctcaaa

SEQ ID NO: 793677 - DNA, 120 bp, Artificial Sequence
  ENSG00000274588_22 (sequence is synthesized)
agtgaggacctggacaaccttaacttggatcacttacattttacacctgaatctatacgcttcaaagaaaaatgtgtcatgaacaactacttcggaattggactggatgctaaaatttct

SEQ ID NO: 793678 - DNA, 120 bp, Artificial Sequence
  ENSG00000274588_23 (sequence is synthesized)
ctggacttcaacaccagaagagatgaacacccagggcaatacaatagccgccttaagaacaagatgtggtatggccttctgggaaccaaagaacttttgcagcgctcttacaggaaactg

SEQ ID NO: 793679 - DNA, 120 bp, Artificial Sequence
  ENSG00000274588_24 (sequence is synthesized)
gaagaacgagtgcatttggagtgtgatggagaaaccatctccttgccaaacctgcaaggcattgtagtgctcaacattaccagctatgctggaggtatcaacttctggggaagcaacaca

SEQ ID NO: 793680 - DNA, 120 bp, Artificial Sequence
  ENSG00000274588_25 (sequence is synthesized)
gcaaccacggaatatgaggctcctgcaatcgatgatgggaaactggaggtggtggcaatctttggttctgtgcagatggcaatgtcccgtatcatcaacctgcatcatcatcgcattgcc

SEQ ID NO: 793681 - DNA, 120 bp, Artificial Sequence
  ENSG00000274588_26 (sequence is synthesized)
cagtgccatgaggtgatgataaccattgatggtgaagaaggtatcccagtgcaggtggatggggaggcctggattcagagaccaggccttatcaaaattagatacaagaacgctgcccag

SEQ ID NO: 793682 - DNA, 120 bp, Artificial Sequence
  ENSG00000274588_27 (sequence is synthesized)
atgctgacaagagatcgggactttgagaactcaatgaaaatgtgggaatacaagcatactgaaattcaagctgcccctcaaccccagctggacttccaggactctcaagagagcctctct

SEQ ID NO: 793683 - DNA, 120 bp, Artificial Sequence
  ENSG00000274588_28 (sequence is synthesized)
gacgaggagtatgcccagatgcagcacttagctcggcttgcagaaaacctcatcagcaaacttaatgacctgagcaagatccaccagcatgtgtctgtcctcatgggttctgtgaatgcc

SEQ ID NO: 793684 - DNA, 120 bp, Artificial Sequence
  ENSG00000274588_29 (sequence is synthesized)
agcgctaacatcctgaatgatatattttacggccaagacagtggcaatgagatgggtgcagcttcctgtattcccattgaaactctaagcagaaatgatgccgtagatgttacatttagt

SEQ ID NO: 793685 - DNA, 120 bp, Artificial Sequence
  ENSG00000274588_30 (sequence is synthesized)
cttaaaggtctctacgatgacaccacagctttcctggatgaaaagctgctgagaagtgctgaggatgagactgcactacaaagcgccctggatgccatgaataaggagttcaaaaagcta

SEQ ID NO: 793686 - DNA, 120 bp, Artificial Sequence
  ENSG00000274588_31 (sequence is synthesized)
actgacagtagaagcctcaggctgaaaattaagttccccaaattgggaaagaaaaaggtagaagaggaacgcaagcctaaatcaggccagagtgtccagagttttattggcaatttatgg

SEQ ID NO: 793687 - DNA, 120 bp, Artificial Sequence
  ENSG00000274588_32 (sequence is synthesized)
caccgcagacatcgtgaagatgaagcagagggtgatgatcctctaacaccatcgagatctcaactgtagcccttgaaagctggaagaactcacaacattgagaattctactaaaaaaact

SEQ ID NO: 793688 - DNA, 120 bp, Artificial Sequence
  ENSG00000274588_33 (sequence is synthesized)
ctcaaaacctcaatacaggctagactaaatcatttcagaacaaacatgagcaccaccaagaaagaccctccaattcttttcactaatgcattttcctggacttaatctggtctccttaga

SEQ ID NO: 793689 - DNA, 120 bp, Artificial Sequence
  ENSG00000274588_34 (sequence is synthesized)
ggtttacatttcctcattggccaaaggttcttgttccgagttgtcttgttcagttctccttctctttgtgcatcttgagcaactacagtatttattgggataagctctttatgaatggcc

SEQ ID NO: 793690 - DNA, 120 bp, Artificial Sequence
  ENSG00000274588_35 (sequence is synthesized)
tgggatctataaaggattcaagggagttcacctcttcagggagttttggaatggttttctctgaccagcagagaaactatcaatgctaaggaatgaatgaaagacacacagactcccagg

SEQ ID NO: 793691 - DNA, 120 bp, Artificial Sequence
  ENSG00000274588_36 (sequence is synthesized)
gagatgaagagaagggggcaggcaggacagccagacttggttgtgtgtctctccgaatccctgccaactgcaacttgcaccttcaggagatctcttctagttggctcattaaaatgagaa

SEQ ID NO: 793692 - DNA, 120 bp, Artificial Sequence
  ENSG00000274588_37 (sequence is synthesized)
ctagatcctgggggcttgtccactttcctgttaagatgaccatgtgaaatctctttttgtagatatggtaacctctctctctctctgcaaaccctttgcgtttttctatgtgtgcttgta

SEQ ID NO: 793693 - DNA, 120 bp, Artificial Sequence
  ENSG00000274588_38 (sequence is synthesized)
tgtctgcatatgtccaggtggtgctctggtgggctcattggttggaactcacccctcatggcaaccatacaggctcccctcctgctgccttgatcctagcctgcatgcctccacggagtg

SEQ ID NO: 793694 - DNA, 120 bp, Artificial Sequence
  ENSG00000274588_39 (sequence is synthesized)
tttgcctgcattcttgctggattttttaactaaatgttttgccgctgtgctgcagtatagattatgtatagagacataaagatgtatatatatatacatacgcatatatatttttaagag

SEQ ID NO: 793695 - DNA, 120 bp, Artificial Sequence
  ENSG00000274588_40 (sequence is synthesized)
ctgaaaatacaactcgacctctaagtgaccctataatttattgtgctaatccaggaatcccttcccactcccccttactctacataacaataacacatacacctctaccaactgccctat

SEQ ID NO: 793696 - DNA, 120 bp, Artificial Sequence
  ENSG00000274588_41 (sequence is synthesized)
ttcttggtggagcttctaaatcttttggtgcattttcagcgtcttagaggtggctgggatctatggcccagctgattctgacgcccccttaaaattctgagccaggccatggaaagggga

SEQ ID NO: 793697 - DNA, 120 bp, Artificial Sequence
  ENSG00000274588_42 (sequence is synthesized)
acaaaaacaccaatgccctaaagaaggggtttaagctggcatgctgcctttttttgctctatctgtcctagactcttcatcagcaactgtgcccttccccaataaaaagactatatggag

SEQ ID NO: 793698 - DNA, 120 bp, Artificial Sequence
  ENSG00000274588_43 (sequence is synthesized)
caaccaggccttgagctctgtgacttagatgcctgaactagggactgcctgacaattaagtcacagcctaggcccttccccacaagctccatcttggcctgatcttctggacaggctgtt

SEQ ID NO: 793699 - DNA, 120 bp, Artificial Sequence
  ENSG00000274588_44 (sequence is synthesized)
gggtcagtcctcaagtcaccttcaaatctcccatcttgcccttttcccttgagtacagaggggcattgaagtgatcagaaaaaacatgggcctggagaaatgaaggctagaagcctgtgc

SEQ ID NO: 793700 - DNA, 120 bp, Artificial Sequence
  ENSG00000274588_45 (sequence is synthesized)
tttcctgtggttcttcttgcaaatttctcatgaaaacaaactattcctaaatcgctccaaatactaattcacatttttcaaaaatgccttctcccagtcagggcaaatctaatcaaaccc

SEQ ID NO: 793701 - DNA, 120 bp, Artificial Sequence
  ENSG00000274588_46 (sequence is synthesized)
caatgcccagagaggttctctctggtcagccttgcatcttcaccccacccttgactcatacctttagttaactgtcccttcccacttatcaagagaaaactggcctctccctacttctca

SEQ ID NO: 793702 - DNA, 120 bp, Artificial Sequence
  ENSG00000274588_47 (sequence is synthesized)
gacaaacttagcgtgctcaattacctgattcagtccaatggctggttcattgaggtgcacaattcagattccaagcactggttctcaactctggaactccaccagcctaacccacttaaa

SEQ ID NO: 793703 - DNA, 120 bp, Artificial Sequence
  ENSG00000274588_48 (sequence is synthesized)
ccagccacctgtgctccacctccgcaggggtgaggagaaaaatattaacaaggggatagtccccaaatgtctgattgctgtgccaaactaagtcctagctctacaactagagaagaaagt

SEQ ID NO: 793704 - DNA, 120 bp, Artificial Sequence
  ENSG00000274588_49 (sequence is synthesized)
caatggaaaaagatgacagaaaacatttaaaacttatttaagcatcagaatgtgttagcttgttgtacatatttgagtagtgagtgtgctgttgttgtgtctttgactttctctgttatt

SEQ ID NO: 793705 - DNA, 120 bp, Artificial Sequence
  ENSG00000274588_50 (sequence is synthesized)
agtctttcttcccaggaggaggtattagatgaaatcagcaagctcactattgcagcctgacttggctcctctatggctgcatgcattgacacctgcacacacactcacagagtgggaacc

SEQ ID NO: 793706 - DNA, 120 bp, Artificial Sequence
  ENSG00000274588_51 (sequence is synthesized)
aagttgcattttcttcagaagagctttttccgaaggggaaaatgtccaaatgagcaaatttaggactacagaaggaagtcctgggagaagatagctttatcttggcagtgactaagcagg

SEQ ID NO: 793707 - DNA, 120 bp, Artificial Sequence
  ENSG00000274588_52 (sequence is synthesized)
gctgtgtcttataattatttttatcactgatgatagtaaactgtaataagactccatctcttgtgcttactttgctgcaataattaggtctttgtgcacagtgatgctgctgttgctctg

SEQ ID NO: 793708 - DNA, 120 bp, Artificial Sequence
  ENSG00000274588_53 (sequence is synthesized)
ttgtgccatgtggattccctttcacctaccctgtcctcccactctgagtcagaatgatattgactgaaaccactagtatttggggctagagtcagctcatggagcacagttgatagatga

SEQ ID NO: 793709 - DNA, 120 bp, Artificial Sequence
  ENSG00000274588_54 (sequence is synthesized)
caaggcccaggagcaggtgtggcttgctcaatccctcagttacctcctaaattgctaagttaccagtagtttcccaaaaaggaagatagcttgccaagcacctgttcttgcatatgctca

SEQ ID NO: 793710 - DNA, 120 bp, Artificial Sequence
  ENSG00000274588_55 (sequence is synthesized)
cttggaaacaaagcaagaagtgatgcctcaagggagttgtcttagctctgggagtgtgagctcctttaaggactttgttaaccacttgcagtaattaatacaattgcttgggtggtggga

SEQ ID NO: 793711 - DNA, 120 bp, Artificial Sequence
  ENSG00000274588_56 (sequence is synthesized)
ccaaacaccaaatatccatctcaattatgttcagacatcattaagacccaaagctctagggtttggttgtatctttggtagcactttctgacgaattggttgggtaggcaattcctggcc

SEQ ID NO: 793712 - DNA, 120 bp, Artificial Sequence
  ENSG00000274588_57 (sequence is synthesized)
agaagaatagtggagaagaaaaagccgatacatttgaactgccaccaactgcttctggtgtcaatactataggaggtaaacagttatgggtccccttctccagaaaggccctgtgctgtg

SEQ ID NO: 793713 - DNA, 120 bp, Artificial Sequence
  ENSG00000274588_58 (sequence is synthesized)
tccataagagcaggttaagaataagaaagagattttttaccttaataaaactgggccagaagaaacagtcagggtcaacgtcatcttccctcaggacacaaatggaagaatttttctttc

SEQ ID NO: 793714 - DNA, 120 bp, Artificial Sequence
  ENSG00000274588_59 (sequence is synthesized)
acgagaggtggaaaataataccaaagcaaccaaacccattagcaccattccatcctatatgagaccttgcttggctatatgatttgtggaattgcatttgtctatttgtcagtgaatctg

SEQ ID NO: 793715 - DNA, 120 bp, Artificial Sequence
  ENSG00000274588_60 (sequence is synthesized)
taacccattgttgttttctgctctgtgttttttatttcctcagaggcccctgcaaataagcagcagggccaggggctggttgggggaggaagctggggtatttacatggtaacaggaaaa

SEQ ID NO: 793716 - DNA, 120 bp, Artificial Sequence
  ENSG00000274588_61 (sequence is synthesized)
agcagaaaaaaaagatccacaaagtgtgcctattcctctccccccgccaaatggaacaccagtcctcaatgttaataaagtattgcttctttaaatattttaataaatggataaacataa

SEQ ID NO: 793717 - DNA, 120 bp, Artificial Sequence; identical to SEQ ID NO: 652669
  ENSG00000274600_0 (sequence is synthesized)

SEQ ID NO: 793718 - DNA, 120 bp, Artificial Sequence
  ENSG00000274600_1 (sequence is synthesized)
tccctcggggcaccgcggcctgcttgggactgcacagtgcctgggagggtgcctggggagggtcacaagggacttggtgctagtagcaggaaaagtgtagggaccggaaaagcccccgtg

SEQ ID NO: 793719 - DNA, 120 bp, Artificial Sequence; identical to SEQ ID NO: 652671
  ENSG00000274600_2 (sequence is synthesized)

SEQ ID NO: 793720 - DNA, 120 bp, Artificial Sequence; identical to SEQ ID NO: 652672
  ENSG00000274600_3 (sequence is synthesized)

SEQ ID NO: 793721 - DNA, 120 bp, Artificial Sequence; identical to SEQ ID NO: 652673
  ENSG00000274600_4 (sequence is synthesized)

SEQ ID NO: 793722 - DNA, 120 bp, Artificial Sequence; identical to SEQ ID NO: 652674
  ENSG00000274600_5 (sequence is synthesized)

SEQ ID NO: 793723 - DNA, 120 bp, Artificial Sequence; identical to SEQ ID NO: 652675
  ENSG00000274600_6 (sequence is synthesized)

SEQ ID NO: 793724 - DNA, 120 bp, Artificial Sequence; identical to SEQ ID NO: 652676
  ENSG00000274600_7 (sequence is synthesized)

SEQ ID NO: 793725 - DNA, 120 bp, Artificial Sequence; identical to SEQ ID NO: 652677
  ENSG00000274600_8 (sequence is synthesized)

SEQ ID NO: 793726 - DNA, 120 bp, Artificial Sequence; identical to SEQ ID NO: 652678
  ENSG00000274600_9 (sequence is synthesized)

SEQ ID NO: 793727 - DNA, 120 bp, Artificial Sequence; identical to SEQ ID NO: 652679
  ENSG00000274600_10 (sequence is synthesized)

SEQ ID NO: 793728 - DNA, 120 bp, Artificial Sequence; identical to SEQ ID NO: 652680
  ENSG00000274600_11 (sequence is synthesized)

SEQ ID NO: 793729 - DNA, 120 bp, Artificial Sequence; identical to SEQ ID NO: 652681
  ENSG00000274600_12 (sequence is synthesized)

SEQ ID NO: 793730 - DNA, 120 bp, Artificial Sequence; identical to SEQ ID NO: 652682
  ENSG00000274600_13 (sequence is synthesized)

SEQ ID NO: 793731 - DNA, 120 bp, Artificial Sequence; identical to SEQ ID NO: 652683
  ENSG00000274600_14 (sequence is synthesized)

SEQ ID NO: 793732 - DNA, 120 bp, Artificial Sequence; identical to SEQ ID NO: 652684
  ENSG00000274600_15 (sequence is synthesized)

SEQ ID NO: 793733 - DNA, 120 bp, Artificial Sequence; identical to SEQ ID NO: 652685
  ENSG00000274600_16 (sequence is synthesized)

SEQ ID NO: 793734 - DNA, 120 bp, Artificial Sequence; identical to SEQ ID NO: 652686
  ENSG00000274600_17 (sequence is synthesized)

SEQ ID NO: 793735 - DNA, 120 bp, Artificial Sequence; identical to SEQ ID NO: 652687
  ENSG00000274600_18 (sequence is synthesized)

SEQ ID NO: 793736 - DNA, 120 bp, Artificial Sequence; identical to SEQ ID NO: 652688
  ENSG00000274600_19 (sequence is synthesized)

SEQ ID NO: 793737 - DNA, 120 bp, Artificial Sequence; identical to SEQ ID NO: 652689
  ENSG00000274600_20 (sequence is synthesized)

SEQ ID NO: 793738 - DNA, 120 bp, Artificial Sequence; identical to SEQ ID NO: 652690
  ENSG00000274600_21 (sequence is synthesized)

SEQ ID NO: 793739 - DNA, 120 bp, Artificial Sequence; identical to SEQ ID NO: 652691
  ENSG00000274600_22 (sequence is synthesized)

SEQ ID NO: 793740 - DNA, 120 bp, Artificial Sequence; identical to SEQ ID NO: 652692
  ENSG00000274600_23 (sequence is synthesized)

SEQ ID NO: 793741 - DNA, 120 bp, Artificial Sequence
  ENSG00000274600_24 (sequence is synthesized)
ctactctggacagggacacagccagtgaggtggatgacctggagcctgacagcgtgtccctggccctggaaatggggggctcggcggctcctgctgcccccaagctcaagatcttcatgg

SEQ ID NO: 793742 - DNA, 120 bp, Artificial Sequence
  ENSG00000274600_25 (sequence is synthesized)
atggcttctatgagggggagcttgacgatggccggcgggggctggtgccctccaacttcgtggagcagattccggacagctacatcccaggctgcctgcctgccaaatcccctgatcttg

SEQ ID NO: 793743 - DNA, 120 bp, Artificial Sequence
  ENSG00000274600_26 (sequence is synthesized)
gccccagtcaactcccagcggggcaggatgaagctctggaggaagacagcttattatctgggaaagcccagggaatggtggacagagggctgtgccagatggtcagggtgggctccaaga

SEQ ID NO: 793744 - DNA, 120 bp, Artificial Sequence
  ENSG00000274600_27 (sequence is synthesized)
cagaagtagcaacagagatcctggataccaagacggaagcctgccagctgggcttgctgcagagcatggggaagcagggcctctccagaccccttctggggaccaaaggggtgctccgta

SEQ ID NO: 793745 - DNA, 120 bp, Artificial Sequence
  ENSG00000274600_28 (sequence is synthesized)
tggctcccatgcagctacacctgcagaatgtcacagccacatcagccaacatcacctgggtctacagcagccaccgccacccccatgtggtatatcttgatgaccgagagcatgccctga

SEQ ID NO: 793746 - DNA, 120 bp, Artificial Sequence
  ENSG00000274600_29 (sequence is synthesized)
ccccagcgggcgtgagctgctacaccttccagggcctgtgccccggcacgcactaccgggtgcgggtggaggtgcggctgccatgggacttgctgcaggtgtattggggaactatgtcct

SEQ ID NO: 793747 - DNA, 120 bp, Artificial Sequence
  ENSG00000274600_30 (sequence is synthesized)
ccaccgtcaccttcgacacactcttggcaggacctccctacccaccgctggaggtgctggtggagcgccatgcctcgccaggtgtcctggtggtcagctggctccctgtgaccattgact

SEQ ID NO: 793748 - DNA, 120 bp, Artificial Sequence
  ENSG00000274600_31 (sequence is synthesized)
cagctgggtcctccaatggagtccaggtcaccggttatgctgtgtatgcagatgggcttaaggtttgtgaggtcgccgatgccactgctgggagcaccgtattggaattctcccagctac

SEQ ID NO: 793749 - DNA, 120 bp, Artificial Sequence
  ENSG00000274600_32 (sequence is synthesized)
aggtgcccctcacgtggcagaaggtctcagtgagaaccatgtcactctgtggtgagtccctggattcagtgcctgctcagatccccgaggacttcttcatgtgtcaccgatggccagaga

SEQ ID NO: 793750 - DNA, 120 bp, Artificial Sequence
  ENSG00000274600_33 (sequence is synthesized)
ctccaccctttagctacacttgtggcgacccatccacctacagagtcaccttccccgtctgcccccagaagctgtcactggctcctccgagtgccaaggccagcccccacaaccctggaa

SEQ ID NO: 793751 - DNA, 120 bp, Artificial Sequence
  ENSG00000274600_34 (sequence is synthesized)
gctgcggggagccccaggccaagttcctagaagcattctttgaagaacccccaaggaggcaatccccagtgtccaacctgggctcagaaggagaatgtccgagttcaggggctggcagcc

SEQ ID NO: 793752 - DNA, 120 bp, Artificial Sequence
  ENSG00000274600_35 (sequence is synthesized)
aagcccaggagcttgcagaggcctgggagggctgtagaaaggacctgctctttcagaagagtccccagaaccacaggccaccttcagtcagtgaccagcctggggagaaggaaaattgct

SEQ ID NO: 793753 - DNA, 120 bp, Artificial Sequence
  ENSG00000274600_36 (sequence is synthesized)
accagcacatgggcaccagcaaaagccctgctccaggattcatccatctacgcaccgagtgtgggcccaggaaagaaccgtgtcaggaaaaggctgcccttgagagggtacttcggcaaa

SEQ ID NO: 793754 - DNA, 120 bp, Artificial Sequence
  ENSG00000274600_37 (sequence is synthesized)
agcaagatgcccaagggttcacacctccccagctgggcgccagccaacagtatgcatctgacttccataacgttttgaaggaggagcaggaggcactgtgcttggatctgcggggcacag

SEQ ID NO: 793755 - DNA, 120 bp, Artificial Sequence
  ENSG00000274600_38 (sequence is synthesized)
agaggcgagaggagaggagggagcctgagccccacagcaggcaaggacaagctctgggggtgaagagagggtgccagctccatgagcccagctcggcactgtgtccagctccatccgcca

SEQ ID NO: 793756 - DNA, 120 bp, Artificial Sequence
  ENSG00000274600_39 (sequence is synthesized)
aagtcatcaagatgcccaggggtggcccccaacagctggggacgggggccaacactccagccagggtctttgtggccctctctgattacaaccccctggtgatgtctgccaacctcaagg

SEQ ID NO: 793757 - DNA, 120 bp, Artificial Sequence
  ENSG00000274600_40 (sequence is synthesized)
ctgcagaggaggagctggtcttccagaaaaggcagttgctaagagtgtggggctctcaggacacccatgatttctacctcagcgagtgcaacaggcaagtgggcaatatccccgggcgcc

SEQ ID NO: 793758 - DNA, 120 bp, Artificial Sequence
  ENSG00000274600_41 (sequence is synthesized)
tagtggctgagatggaggtggggacagagcagactgataggaggtggcgttctccggcccaagggcacctgccttctgtggcccacctcgaggactttcaggggctcaccatcccccagg

SEQ ID NO: 793759 - DNA, 120 bp, Artificial Sequence
  ENSG00000274600_42 (sequence is synthesized)
gttcctccctggtgctccaggggaactccaagagactcccactgtggactccaaagatcatgatagcagctctggactatgatcctggggatgggcaaatggggggccaggggaagggca

SEQ ID NO: 793760 - DNA, 120 bp, Artificial Sequence
  ENSG00000274600_43 (sequence is synthesized)
ggctggcgctgagggcaggagacgtggtcatggtttacgggcccatggatgaccaaggattctattatggagagttgggcggccacaggggcctggttcctgcccacctgctggatcaca

SEQ ID NO: 793761 - DNA, 120 bp, Artificial Sequence
  ENSG00000274600_44 (sequence is synthesized)
tgtccctccatggacactgagcaagcatccttgcccaggtagtggcctctggctgctcacaccctgccagaggagaagcaagcgttcagaccctcacaccagcacccctcctcaccacca

SEQ ID NO: 793762 - DNA, 120 bp, Artificial Sequence
  ENSG00000274600_45 (sequence is synthesized)
taagtagcatgtgctccaagtgccactgtgttaaactgatggtagtccttaagcgtcccctaggctctgaaagtagcaggacttaagcctgagttatttgcaaaagcaaacacaacaagc

SEQ ID NO: 793763 - DNA, 120 bp, Artificial Sequence
  ENSG00000274600_46 (sequence is synthesized)
caacccctgagagtctgagaagccatttcaaagttgctgataactatggcaggtatacggagaagcgcctttttctgtggccaatgtgtgttttctctgggaggttaaggttatctgtcc

SEQ ID NO: 793764 - DNA, 120 bp, Artificial Sequence
  ENSG00000274600_47 (sequence is synthesized)
attgccttgtacgaaagtctcaagaaaagtctacatcttaaaaaagaaaaagcaatctgagtgttatttttgggatgtgagggtgatctggctgcgacatgtgtcaccccattgatcatc

SEQ ID NO: 793765 - DNA, 120 bp, Artificial Sequence
  ENSG00000274600_48 (sequence is synthesized)
agggttgattcggctgatctggctgactaggcgggtatccccttcctccctcaccactccatgtgcgtccctccagaagctgtgtgctcaatggaagaggatgaccatccccgatagagg

SEQ ID NO: 793766 - DNA, 120 bp, Artificial Sequence; identical to SEQ ID NO: 652718
  ENSG00000274600_49 (sequence is synthesized)

SEQ ID NO: 793767 - DNA, 74 bp, Artificial Sequence
  ENSG00000274611_0 (sequence is synthesized)
tccagcgcatcgaccgggacgtaagcgggacattaaggaagcatatattcttcagggatcgatacggaaccaag

SEQ ID NO: 793768 - DNA, 120 bp, Artificial Sequence
  ENSG00000274618_0 (sequence is synthesized)
atgtctggtagaggcaaaggtggtaaaggtttaggaaagggaggcgccaagcgccatcgcaaagtgctgcgtgacaacatacagggcatcacgaagcccgccatccgtcgcttggcccga

SEQ ID NO: 793769 - DNA, 120 bp, Artificial Sequence
  ENSG00000274618_1 (sequence is synthesized)
aatgtgatacgggacgccgtaacctacacggagcacgccaagcgtaagacagtcactgcaatggatgttgtctacgcgctcaagcgccagggacgcactctgtacggctttggtggctga

SEQ ID NO: 793770 - DNA, 120 bp, Artificial Sequence
  ENSG00000274641_0 (sequence is synthesized)
atgcccgacccggctaaatctgctcctgcccccaaaaagggctccaagaaagccgtaaccaaggcccagaaaaaggacggcaagaagcgcaagcgcagccgcaaagagagttactctatc

SEQ ID NO: 793771 - DNA, 120 bp, Artificial Sequence
  ENSG00000274641_1 (sequence is synthesized)
caagtccaccccgacaccggcatctcatcgaaggccatgggcatcatgaactccttcgtcaatgacatctttgagcgcatcgctggcgaggcttcccgcctggcgcattacaacaagcgc

SEQ ID NO: 793772 - DNA, 85 bp, Artificial Sequence
  ENSG00000274641_2 (sequence is synthesized)
gcgcctgctgctgcccggggagctggccaagcacgccgtgtccgagggcacaaaggccgtcaccaagtacaccagctccaagtga

SEQ ID NO: 793773 - DNA, 120 bp, Artificial Sequence
  ENSG00000274736_0 (sequence is synthesized)
agaactggcatcccgagaagccaggaagcagtgagcccaggagtcctcggccagccctgcctgcccaccaggaggatgaaggtctccgtggctgccctctcctgcctcatgcttgttact

SEQ ID NO: 793774 - DNA, 120 bp, Artificial Sequence
  ENSG00000274736_1 (sequence is synthesized)
gcccttggatcccaggcccgggtcacaaaagatgcagagacagagttcatgatgtcaaagcttccattggaaaatccagtacttctggacatgctctggaggagaaagattggtcctcag

SEQ ID NO: 793775 - DNA, 120 bp, Artificial Sequence
  ENSG00000274736_2 (sequence is synthesized)
atgctactagtgctgactgctgcatctcctacaccccacgaagcatcccgtgttcactcctggagagttactttgaaacgaacagcgagtgctccaagccgggtgtcatcttcctcacca

SEQ ID NO: 793776 - DNA, 120 bp, Artificial Sequence
  ENSG00000274736_3 (sequence is synthesized)
agaaggggcgacgtttctgtgccaaccccagtgataagcaagttcaggtttgcatgagaatgctgaagctggacacacggatcaagaccaggaagaattgaacttgtcaaggtgaaggga

SEQ ID NO: 793777 - DNA, 120 bp, Artificial Sequence
  ENSG00000274736_4 (sequence is synthesized)
cacaagttgccagccaccaactttcttgcctcaactaccttcctgaattatttttttaagaagcatttattcttgtgttctggatttagagcaattcatctaataaacagtttctcactt

SEQ ID NO: 793778 - DNA, 120 bp, Artificial Sequence
  ENSG00000274736_5 (sequence is synthesized)
tttgaaacgaacagcgagtgctccaagccgggtgtcatgtaggtgccaagctcaccaaacatgtgttgagggagaaggactctgtagcatcttgcagggaggacctgatagactggtgtc

SEQ ID NO: 793779 - DNA, 120 bp, Artificial Sequence
  ENSG00000274744_0 (sequence is synthesized)
atggcggcagggtccactacgctgcgcgcagtggggaagctgcaggtgcgtctggccactaagacggagccgaaaaagctagagaaatatttgcagaaactctccgccttgcccatgacc

SEQ ID NO: 793780 - DNA, 120 bp, Artificial Sequence
  ENSG00000274744_1 (sequence is synthesized)
gcagacatcctggcggagactggaatcagaaagacggtgaagcgcctgcggaagcaccagcacgtgggcgactttgccagagacttagcggcccggtggaagaagctggtgctcgtggac

SEQ ID NO: 793781 - DNA, 120 bp, Artificial Sequence
  ENSG00000274744_2 (sequence is synthesized)
cgaaacaccgggcctgacccgcaggaccctgaggagagcgcttcccgacagcgcttcggggaggctcttcaggagcgggaaaaggcctggggcttcccagaaaacgcgacggcccccagg

SEQ ID NO: 793782 - DNA, 120 bp, Artificial Sequence
  ENSG00000274744_3 (sequence is synthesized)
agcccatctcacagccctgagcacagacggacagcacgcagaacacctccggggcaacagagacctcacccgaggtctcccagtcgcgagcccagagccgagagaaagcgccccagaatg

SEQ ID NO: 793783 - DNA, 120 bp, Artificial Sequence
  ENSG00000274744_4 (sequence is synthesized)
gccccagctgattccggcccccatcgggaccctccaacgcgcaccgctcccctcccgatgcccgagggccctgagcccgctgtgcccggggagcaacccggaagaggccacgctcacgcc

SEQ ID NO: 793784 - DNA, 120 bp, Artificial Sequence
  ENSG00000274744_5 (sequence is synthesized)
gctcagggcgggcctctgctgggtcaaggctgccagggccaaccccagggggaagcggtggggagccacagcaaggggcacaaatcgtcccgcggggcttcggctcagaaatcgcctcct

SEQ ID NO: 793785 - DNA, 120 bp, Artificial Sequence
  ENSG00000274744_6 (sequence is synthesized)
tcggagctctgggacccctcagaggcctggatgcaggccaactacgatctgctgtccgcttttgaggccatgacctcccaggcaaacccagaagcactctccgcgccagcgctccaggag

SEQ ID NO: 793786 - DNA, 120 bp, Artificial Sequence; identical to SEQ ID NO: 656952
  ENSG00000274744_7 (sequence is synthesized)

SEQ ID NO: 793787 - DNA, 120 bp, Artificial Sequence
  ENSG00000274744_8 (sequence is synthesized)
aatccggacgccctcggcgacgtggaaggggtcccctactcggttcttgaacccgttctggaagggtggacgcccgatcagctgtaccgcacagagaaagacaatgccgcactcgctcga

SEQ ID NO: 793788 - DNA, 120 bp, Artificial Sequence; identical to SEQ ID NO: 656954
  ENSG00000274744_9 (sequence is synthesized)

SEQ ID NO: 793789 - DNA, 120 bp, Artificial Sequence; identical to SEQ ID NO: 656955
  ENSG00000274744_10 (sequence is synthesized)

SEQ ID NO: 793790 - DNA, 120 bp, Artificial Sequence; identical to SEQ ID NO: 656956
  ENSG00000274744_11 (sequence is synthesized)

SEQ ID NO: 793791 - DNA, 120 bp, Artificial Sequence; identical to SEQ ID NO: 656957
  ENSG00000274744_12 (sequence is synthesized)

SEQ ID NO: 793792 - DNA, 120 bp, Artificial Sequence
  ENSG00000274749_0 (sequence is synthesized)
attaacacttgggtaacttacccttcacaatccatctaaatccttctcaattgctgccaccatgactcgttacttctgctgtggaagctacttcccaggataccctatctatgggaccaa

SEQ ID NO: 793793 - DNA, 120 bp, Artificial Sequence
  ENSG00000274749_1 (sequence is synthesized)
cttccatgggaccttcagagccacccccttgaactgtgttgtgcctctgggctctcccctgaactatggctgtggatgcaatggctacagctccctgggctacagctttggtggtagcaa

SEQ ID NO: 793794 - DNA, 120 bp, Artificial Sequence
  ENSG00000274749_2 (sequence is synthesized)
catcaacaacctgggcggctgctatggtggtagcttctataggccatggggctctggctctggctttggctacagcacctactgatggaccaatggctccagtgactacaggactctcaa

SEQ ID NO: 793795 - DNA, 120 bp, Artificial Sequence
  ENSG00000274749_3 (sequence is synthesized)
taattctctgcacagaacaacctgaagagcaatgactgtcttcctaccttcccatgtgcttgggtgatacatcttccatcttcttgctgacttcttgctgtggtctttgtctttgatgct

SEQ ID NO: 793796 - DNA, 120 bp, Artificial Sequence
  ENSG00000274749_4 (sequence is synthesized)
gttggacaagtcacccaggactcaggtgctgaactgatactcatctacagacaaaggaagcaagatgcatttttttggtcatacttgaattttaacagtgaaaaagtagtttgcctccca

SEQ ID NO: 793797 - DNA, 120 bp, Artificial Sequence
  ENSG00000274749_5 (sequence is synthesized)
tggttgctctgctcatgtattattagcttctacatcaacattaatgtattacaaattgggtgtgggtagtaaggggattttctgtcagtctcttaataaatctatttccttcagcataaa

SEQ ID NO: 793798 - DNA, 120 bp, Artificial Sequence
  ENSG00000274750_0 (sequence is synthesized)
atggcgcgtactaagcagacggctcgtaaatccacaggcggtaaagcaccgcgcaaacagctggccactaaggcagctcgcaagagcgctccggccacgggcggcgtgaagaagccccat

SEQ ID NO: 793799 - DNA, 120 bp, Artificial Sequence
  ENSG00000274750_1 (sequence is synthesized)
atagctcaggacttcaagaccgacctgcgcttccagagttccgcggtgatggcgctgcaggaggcctgcgaggcctacttggtggggcttttcgaggacaccaacctgtgcgctattcat

SEQ ID NO: 793800 - DNA, 120 bp, Artificial Sequence
  ENSG00000274750_2 (sequence is synthesized)
gccaaacgcgtgaccatcatgcctaaagacatccagcttgcccgccgcattcgtggggagagggcgtgaattgttttgagtacaaaccttaaatccaaaggctcttctcagagccaacca

SEQ ID NO: 793801 - DNA, 120 bp, Artificial Sequence
  ENSG00000274750_3 (sequence is synthesized)
gtcattctttaagaatcttttccagtaaacatttgttactttttcaaagtaattgggagctgttgagtgtggaagcgaaaaccaagttaagaagtcctgttatttgggtcatggtctacg

SEQ ID NO: 793802 - DNA, 120 bp, Artificial Sequence
  ENSG00000274750_4 (sequence is synthesized)
tgaaacatcaaagaaacctgtaacggaaaacgacttgtttgaaagagccagttctctatccaaatttaccaatcagaatcttgcactgaaaaaataaaccaatcgtgaatctctacggcc

SEQ ID NO: 793803 - DNA, 120 bp, Artificial Sequence
  ENSG00000274750_5 (sequence is synthesized)
acttccggaatttagcaaccgatcactaacagggatcgtccacaatccaatcagagtgattctgttcctatatagaggggcaaaccaatcttcctaactcatttactttgcagatgaact

SEQ ID NO: 793804 - DNA, 120 bp, Artificial Sequence
  ENSG00000274750_6 (sequence is synthesized)
ctgtaatcctttgagacgcattagaccactaaactgcactgatccaaatagacatttgaaatagtggcattcagttccctcgatgcttcatttaaatttccaaatttaagcgctccctca

SEQ ID NO: 793805 - DNA, 120 bp, Artificial Sequence
  ENSG00000274750_7 (sequence is synthesized)
ggttttcgcctagggctgggcctccctacgctgttctccattggtttagctggctttgttttgctgttcaggccctctgctgctttcttgtacattgttctcgttttctaaactcctggc

SEQ ID NO: 793806 - DNA, 120 bp, Artificial Sequence
  ENSG00000274750_8 (sequence is synthesized)
cacttaattgtaccctgcttaacccatcctcttgttttctggctcaacgctctttcatgtggtggcctgcattttaggtcttaactgcataggctttcaacgccttggttttgcctttcc

SEQ ID NO: 793807 - DNA, 120 bp, Artificial Sequence
  ENSG00000274750_9 (sequence is synthesized)
ttgatgtttatttgaccttgcccgaggggccagcgcttttgatctgcatcaggctgccttactccactagtgttttgagacccagctacttgccggcgacggtcggtgccttgggtgcgg

SEQ ID NO: 793808 - DNA, 120 bp, Artificial Sequence
  ENSG00000274750_10 (sequence is synthesized)
taaggttattagctggaacacctagacccgtggcactaacacacagctcttgcagacttgacagccttgcataggttctaaactgcaggagtcaaagcaacgaaggtgcagatgggtgtg

SEQ ID NO: 793809 - DNA, 120 bp, Artificial Sequence
  ENSG00000274750_11 (sequence is synthesized)
cagatgggtgtgtctcaaacctgagtgcgaaaggaaaatgcagaaatcatgagccttttcaactttccagttgatatcttttgtttgcttttttcttttcttatttatttatttatttat

SEQ ID NO: 793810 - DNA, 120 bp, Artificial Sequence
  ENSG00000274750_12 (sequence is synthesized)
tacaggcatgagccacctcgcccggccttccggctgatatcttaaaagaacttttcaactttagtaaataccctgtcttaatcaaatctcattaaaagtaccccatatttatcaacaaaa

SEQ ID NO: 793811 - DNA, 120 bp, Artificial Sequence
  ENSG00000274750_13 (sequence is synthesized)
atatttatcaacaaaacatgaaaatccttggacggcttcaaagttcttacagaaaatattctgcctttcctttccatacaaaggcacagcttcgaaactggtaggtgaagggaaggaaaa

SEQ ID NO: 793812 - DNA, 120 bp, Artificial Sequence
  ENSG00000274750_14 (sequence is synthesized)
taaggaattctgttacgaaatcatacaggctgttatttggaaatacagaagggtgtatgtactatatgggatactgcatgctatttggaagaattttgtttatttaaacatttcagcaaa

SEQ ID NO: 793813 - DNA, 120 bp, Artificial Sequence
  ENSG00000274750_15 (sequence is synthesized)
ttcctcagttttgatatggggtgcagtatttttaactcattgagaaatttctactaacttttttgaatgtgctcttttcccactagttgcactaaggaaagaggttagtcatgtggtaaa

SEQ ID NO: 793814 - DNA, 120 bp, Artificial Sequence
  ENSG00000274750_16 (sequence is synthesized)
attaatagtgacaaagctgtaaatagctctgcaggccaaggtagccatagtaagaagtcctggagatttatggaagaaatttttgttcatggaagcctgtcagacatgaagatgtgggtc

SEQ ID NO: 793815 - DNA, 120 bp, Artificial Sequence
  ENSG00000274750_17 (sequence is synthesized)
ttgtgaattggagattcagtgcgtgaggaaaacagcctaactatccataattaaggtaactactgtcagatatttgtaacatagtgaacatcctattatgctagatagaagcattctcta

SEQ ID NO: 793816 - DNA, 120 bp, Artificial Sequence
  ENSG00000274750_18 (sequence is synthesized)
tttgaatgttgtttcctgtatcctgtactttctttaagattctagctcaacaagttttaacctgtatttctcttacagctactggaattcagtacgtgaggacttggacttggtgggcac

SEQ ID NO: 793817 - DNA, 120 bp, Artificial Sequence
  ENSG00000274750_19 (sequence is synthesized)
agaatgcatctttttatatcattaaatccaccagaacatctagcatggtcatttgcctaaaacaaagcctctggaaatttagtcaagttgagatgtaaaataaaagattactgaacagaa

SEQ ID NO: 793818 - DNA, 120 bp, Artificial Sequence
  ENSG00000274752_0 (sequence is synthesized)
ttctttgctcatgctcacagagggcctggtctagaatattccacatctgctctcactctgccatggactcctggaccttctgctgtgtgtccctttgcatcctggtagcgaagcatacag

SEQ ID NO: 793819 - DNA, 120 bp, Artificial Sequence
  ENSG00000274752_1 (sequence is synthesized)
agaagtgactctgagatgtaaaccaatttcaggccacaactcccttttctggtacagacagaccatgatgcggggactggagttgctcatttactttaacaacaacgttccgatagatga

SEQ ID NO: 793820 - DNA, 120 bp, Artificial Sequence
  ENSG00000274752_2 (sequence is synthesized)
ttcagggatgcccgaggatcgattctcagctaagatgcctaatgcatcattctccactctgaagatccagccctcagaacccagggactcagctgtgtacttctgtgccagcagtttagc

SEQ ID NO: 793821 - DNA, 120 bp, Artificial Sequence
  ENSG00000274764_0 (sequence is synthesized)
acccaaagtcttcaagcctggagttcctgcctggttcttcctgaggtctgagcaccttctaaactacatccagatctgttttccctgcagattcatgaagatgagcatccggactccacc

SEQ ID NO: 793822 - DNA, 120 bp, Artificial Sequence
  ENSG00000274764_1 (sequence is synthesized)
cagactcctggagcttgcggggcggagcctgctgagggaccaagccttggccatgtccaccctggaggagctgcccacagaacttttccccccactgttcatggaggccttcagcaggag

SEQ ID NO: 793823 - DNA, 120 bp, Artificial Sequence
  ENSG00000274764_2 (sequence is synthesized)
atgctgtgaggccctgaagctgatggtgcaggcctggcccttccgccgcctccctctgaggcctctgataaagatgccttgtctggaggccttccaagctgtgctcgatgggcttgatgc

SEQ ID NO: 793824 - DNA, 120 bp, Artificial Sequence; identical to SEQ ID NO: 742370
  ENSG00000274764_3 (sequence is synthesized)

SEQ ID NO: 793825 - DNA, 120 bp, Artificial Sequence; identical to SEQ ID NO: 742371
  ENSG00000274764_4 (sequence is synthesized)

SEQ ID NO: 793826 - DNA, 120 bp, Artificial Sequence; identical to SEQ ID NO: 742357
  ENSG00000274764_5 (sequence is synthesized)

SEQ ID NO: 793827 - DNA, 120 bp, Artificial Sequence
  ENSG00000274764_6 (sequence is synthesized)
ccaggaggtggaagtgaattgcaagtgggtactgcccatcctgacacagtttaccccatacctgggccacatgaggaatcttcagaagctcgttctctctcacatggatgtctctcgcta

SEQ ID NO: 793828 - DNA, 120 bp, Artificial Sequence; identical to SEQ ID NO: 742374
  ENSG00000274764_7 (sequence is synthesized)

SEQ ID NO: 793829 - DNA, 120 bp, Artificial Sequence; identical to SEQ ID NO: 742375
  ENSG00000274764_8 (sequence is synthesized)

SEQ ID NO: 793830 - DNA, 120 bp, Artificial Sequence; identical to SEQ ID NO: 742376
  ENSG00000274764_9 (sequence is synthesized)

SEQ ID NO: 793831 - DNA, 120 bp, Artificial Sequence; identical to SEQ ID NO: 742377
  ENSG00000274764_10 (sequence is synthesized)

SEQ ID NO: 793832 - DNA, 120 bp, Artificial Sequence
  ENSG00000274764_11 (sequence is synthesized)
gaacagatttgctcaaattagggctgagctgatgaacagagtgagggacttaaggcaccccaagaggatctttttctgtattgataactgccctgactgtggcaacaggtcattttatga

SEQ ID NO: 793833 - DNA, 120 bp, Artificial Sequence; identical to SEQ ID NO: 742379
  ENSG00000274764_12 (sequence is synthesized)

SEQ ID NO: 793834 - DNA, 120 bp, Artificial Sequence; identical to SEQ ID NO: 742380
  ENSG00000274764_13 (sequence is synthesized)

SEQ ID NO: 793835 - DNA, 120 bp, Artificial Sequence
  ENSG00000274764_14 (sequence is synthesized)
agagtcgaaaatgggaatctgaatgtctagagtggagttcaggcttgagaatacatgagggagttactcttgcatggatggttgtaaagaaacaatcagaaataaaggaaaactgagcag

SEQ ID NO: 793836 - DNA, 120 bp, Artificial Sequence
  ENSG00000274791_0 (sequence is synthesized)
atggcggcagcggctgcaggcctgggcggcggcggcgccggcccgggacccgaggccggggacttcctggcccgctaccggctggtatcgaacaagctgaagaagcggttcctgcggaag

SEQ ID NO: 793837 - DNA, 120 bp, Artificial Sequence
  ENSG00000274791_1 (sequence is synthesized)
ccgaacgtggcggaggccggcgagcagttcggacagctgggccgggagctgcgcgcccaggagtgtctgccctacgcggcctggtgccagctggcggtggcgcgctgccagcaggcgctc

SEQ ID NO: 793838 - DNA, 80 bp, Artificial Sequence
  ENSG00000274791_2 (sequence is synthesized)
ttccacgggcccggggaggcgctggccctcaccgaggccgcccgcctcttcctgcggcaggagcgcgacgcgcgccagcg

SEQ ID NO: 793839 - DNA, 80 bp, Artificial Sequence
  ENSG00000274791_3 (sequence is synthesized)
ccagcgccctgggcgccgcggtgcgtctgcacctcgagctgggccagccggccgccgccgccgccctctgcctcgagctg

SEQ ID NO: 793840 - DNA, 120 bp, Artificial Sequence
  ENSG00000274791_4 (sequence is synthesized)
ccagctgccccagctgcccctggccgcgctgcaggcgcttggcgaggccgcctcctgccagctgctggcgcgcgactacaccggcgccctggcggtcttcacgcgcatgcagcgcctggc

SEQ ID NO: 793841 - DNA, 80 bp, Artificial Sequence
  ENSG00000274791_5 (sequence is synthesized)
ccggggcgacgcccgccctaccggccgcgctgcttcctccgaactccggctcggcggcgccctctcccgccgccctgggc

SEQ ID NO: 793842 - DNA, 120 bp, Artificial Sequence
  ENSG00000274791_6 (sequence is synthesized)
gcgccctctcccgccgccctgggcgccttctcggacgtgctggtccgctgcgaggtgtcccgcgtgctgctgctgctcctcctgcaaccaccgcccgccaagctgctgccggagcacgcc

SEQ ID NO: 793843 - DNA, 120 bp, Artificial Sequence
  ENSG00000274791_7 (sequence is synthesized)
cagaccctggagaagtactcctgggaggcttttgacagccacgggcaggagagcagcggccagcttcccgaggagctctttctgctgctccagtctttggtcatggctacccacgaaaag

SEQ ID NO: 793844 - DNA, 120 bp, Artificial Sequence
  ENSG00000274791_8 (sequence is synthesized)
gacacggaagccatcaagtcgctgcaggtggagatgtggccactgttgactgctgagcagaaccacctccttcacctcgttctgcaagaaaccatctccccctcaggacagggagtctga

SEQ ID NO: 793845 - DNA, 75 bp, Artificial Sequence
  ENSG00000274808_0 (sequence is synthesized)
tccagcgcatcgaccgggacataagcgggacattaaggaagcatatgttcttcagggatcgatacggaaccaagc

SEQ ID NO: 793846 - DNA, 88 bp, Artificial Sequence
  ENSG00000274808_1 (sequence is synthesized)
taggcttaacaacccaagcaagcttcgctatgtattaagaaagagtgcagcttgagagacattcagagatggaacacaccagacccca

SEQ ID NO: 793847 - DNA, 62 bp, Artificial Sequence
  ENSG00000274808_2 (sequence is synthesized)
agcaccccaaactcatggaaggataactaccttcacgttttgaaataaatgtttcctgttga

SEQ ID NO: 793848 - DNA, 120 bp, Artificial Sequence
  ENSG00000274897_0 (sequence is synthesized)
agacagcaggagagcagagaccaccccacaggaagataccgctgcttccgaatctgcaggggtaaaatcctccacccaagaagccgccaggctcctcctacccccaagaaaggcaatggg

SEQ ID NO: 793849 - DNA, 120 bp, Artificial Sequence
  ENSG00000274897_1 (sequence is synthesized)
ggtgaggctccgagtctggccggcggctccccattcaatctcccgctgtccccgtcctcttggggcggtgctttctatcctgctggctggagggtcccggaaggggactccaactgcgcg

SEQ ID NO: 793850 - DNA, 120 bp, Artificial Sequence
  ENSG00000274897_2 (sequence is synthesized)
atgcctcggccagaggacaaaggagaagcgggttgggggccgctctctgcgctcggaggccggctcaggcccctgccctactgctggggctcagccgaccgctccgtcctccgcctggcc

SEQ ID NO: 793851 - DNA, 120 bp, Artificial Sequence
  ENSG00000274897_3 (sequence is synthesized)
accgcgactccggccacgcacgtgtccacagatgtccggtgaactcccacgtgtgcgtcccacacgggtcggcctttcttccttgggctcgggccccggacacccaccctcggggacacg

SEQ ID NO: 793852 - DNA, 120 bp, Artificial Sequence
  ENSG00000274897_4 (sequence is synthesized)
tatgtgcggggagcgcgcccggaaccgtcggggccgagcacggcgtctcacgccagagcagccgcggatcggagcatccgctggtccaggaccccccctcccgcccgccaggccacgttg

SEQ ID NO: 793853 - DNA, 120 bp, Artificial Sequence
  ENSG00000274897_5 (sequence is synthesized)
ttcgggcagctgtcacctccctcggccgccgcagcacctctcgcccccgcagcccggccgcgttcggatgggcgcagcagaagggagccgccgggcagacactcaccacgctcgccgccg

SEQ ID NO: 793854 - DNA, 120 bp, Artificial Sequence
  ENSG00000274897_6 (sequence is synthesized)
ctactgcgcccagccaggccacagccacgcgcccacccgccccctggccgtgggttcccccgggcagggtggcagttctgcgcgcagaggccgggccgcgcgtccccaaggtcctttctt

SEQ ID NO: 793855 - DNA, 120 bp, Artificial Sequence
  ENSG00000274897_7 (sequence is synthesized)
aggtcctttcttggtttccgggcctcaggcccctgcaggcacaaggacccgcggggcgcgggcaggtggcagagcgccggtggatgagggtgccctgggggaggcgtggcctccagggca

SEQ ID NO: 793856 - DNA, 120 bp, Artificial Sequence
  ENSG00000274897_8 (sequence is synthesized)
gacacaggtgatccgtggaactgctgggccagcgcaatggagaagtggaggcacaaccccacccgccgaacagcgactttgtatccaaagcaccccacttggggctgggcgcagtggctc

SEQ ID NO: 793857 - DNA, 120 bp, Artificial Sequence
  ENSG00000274897_9 (sequence is synthesized)
gaaactccatttaaaaaaaaaaaaaaagtagcccatgtgggttactttgtagcacagctcctccctcccaggaagatgaggacccacaggaggccccaggcacagtgggagaggacagga

SEQ ID NO: 793858 - DNA, 120 bp, Artificial Sequence
  ENSG00000274897_10 (sequence is synthesized)
ccaggatgtggggcacctgtgcacacaggcctccctccccgcaggggccaggcctctaccccaccaccctccgccctccaacggcttctccatccaacaaataaatcaagctctgaggtg

SEQ ID NO: 793859 - DNA, 72 bp, Artificial Sequence
  ENSG00000274933_0 (sequence is synthesized)
tccagcgcatcgaccgggacgtaagcgggacattaaggaagcatatattcttcagggatcgatacggaacca

SEQ ID NO: 793860 - DNA, 120 bp, Artificial Sequence
  ENSG00000274997_0 (sequence is synthesized)
atgtctggacgtggcaagcaaggcggtaaagctcgcgccaaggccaagacccgctcttctcgggctgggcttcagttccccgtgggccgagtgcaccgcctgctccgcaagggtaattat

SEQ ID NO: 793861 - DNA, 120 bp, Artificial Sequence
  ENSG00000274997_1 (sequence is synthesized)
gtgtacctggctgcggtgctggagtacctgaccgctgagatcctggagctggctggcaatgcggcccgcgacaacaagaagacccgtatcatcccgcgtcacctccaactggccatccgc

SEQ ID NO: 793862 - DNA, 120 bp, Artificial Sequence
  ENSG00000274997_2 (sequence is synthesized)
aacgacgaggagctcaacaagctgctgggcaaagtcaccatcgcgcagggtggtgtcttgcccaatatccaggccgtgctgctgcctaagaagactgagagccaccataaggccaaataa

SEQ ID NO: 793863 - DNA, 120 bp, Artificial Sequence
  ENSG00000275004_0 (sequence is synthesized)
aggtggcagtttatataaaggaagcattgggacttgtggccccaccattcaggaataaaaaaattagaaaatggaacaatcatgtgaggaagagaaagagcctgaaccacagaagaacat

SEQ ID NO: 793864 - DNA, 120 bp, Artificial Sequence
  ENSG00000275004_1 (sequence is synthesized)
acaagaaaccaaacaagtagatgacgaagatgctgagctcatctttgttggtgtggaacatgtaaatgaagatgctgagctaatctttgttggggtgacttcaaattcaaaaccagtcgt

SEQ ID NO: 793865 - DNA, 120 bp, Artificial Sequence
  ENSG00000275004_2 (sequence is synthesized)
ttcaaacattttgaacagagtcaccccgggttcatggtcaaggagaaaaaagtatgatcaccttagaaaagatactgctcgcaaattgcagcctaaaagtcatgagaccgttacatcaga

SEQ ID NO: 793866 - DNA, 120 bp, Artificial Sequence
  ENSG00000275004_3 (sequence is synthesized)
agcagtgaccgtcctgccagcttcccaacttgaatcgagatcaacagatagtcctattattattgagcctttgtctaaacctgattatagaaatagttcaccacaagttgtgcctaataa

SEQ ID NO: 793867 - DNA, 120 bp, Artificial Sequence
  ENSG00000275004_4 (sequence is synthesized)
ctcttcagaattaccttctcctttgattacattcacagattcattgcatcatccagtaagtacagcactttcagtaggaggtataaatgaaagtcctcgtgtatcaaagcaactttccac

SEQ ID NO: 793868 - DNA, 120 bp, Artificial Sequence
  ENSG00000275004_5 (sequence is synthesized)
tttcgaagtaaacagcataaatcccaaaagggctaaactcagggatggaattatagaaggaaattcttcagcttcattcccttcagatacctttcatacaatgaatactcagcaaagtac

SEQ ID NO: 793869 - DNA, 120 bp, Artificial Sequence
  ENSG00000275004_6 (sequence is synthesized)
accctcaaataatgttcatacctcattaagccatgttcagaatggagcaccttttccagcagcttttccaaaggacaatatccatttcaagcctataaatacaaatcttgatagggcaaa

SEQ ID NO: 793870 - DNA, 120 bp, Artificial Sequence
  ENSG00000275004_7 (sequence is synthesized)
tgaattggcaaaaacagacattttgagtctaacaagtcaaaacaagacctttgatcccaagaaagaaaatcccattgtgttacttagtgacttttactatggacagcataaaggagaagg

SEQ ID NO: 793871 - DNA, 120 bp, Artificial Sequence
  ENSG00000275004_8 (sequence is synthesized)
gcagccggaacagaagactcacaccacctttaaatgcctcagctgcgtgaaagttctaaaaaatgttaagtttatgaatcacgtgaagcatcatttggaatttgagaagcagaggaacga

SEQ ID NO: 793872 - DNA, 120 bp, Artificial Sequence
  ENSG00000275004_9 (sequence is synthesized)
cagctgggaaaaccacaccacctgccagcactgccaccggcagtttcccactcccttccagctacagtgtcacatcgaaaatgtccacactgcccaggagccctctactgtctgtaaaat

SEQ ID NO: 793873 - DNA, 120 bp, Artificial Sequence
  ENSG00000275004_10 (sequence is synthesized)
ctgtgaattgtcatttgaaacagatcaggtcctcttacaacacatgaaggaccatcataagcctggcgaaatgccctatgtgtgccaggtttgccattatagatcgtcggtctttgctga

SEQ ID NO: 793874 - DNA, 120 bp, Artificial Sequence
  ENSG00000275004_11 (sequence is synthesized)
tgtagaaacacattttagaacgtgccatgaaaacacaaagaatttgctttgtcccttttgtctcaaaattttcaaaacagcaacaccatacatgtgtcattataggggccactggggaaa

SEQ ID NO: 793875 - DNA, 120 bp, Artificial Sequence
  ENSG00000275004_12 (sequence is synthesized)
gagtgcacaccagtgttccaagtgccggctacagtttttaactttcaaggagaaaatggagcacaagacccagtgtcatcaaatgtttaagaagcctaagcaactagaaggattacctcc

SEQ ID NO: 793876 - DNA, 120 bp, Artificial Sequence
  ENSG00000275004_13 (sequence is synthesized)
tgaaacaaaagttactattcaagtgtcgctggaacctcttcagccaggatcagtggatgtagcatccataactgtgagcacatctgactctgaaccatcactccccaggtctaaaagcaa

SEQ ID NO: 793877 - DNA, 120 bp, Artificial Sequence
  ENSG00000275004_14 (sequence is synthesized)
aatttcaaaaaagtcccattaattctagtttcagtaaatctaaagcaagtatttcaaaccaaattaaaaaacctcataaaacaaaaaatacaaaccatacattattcagtagcaccaaaa

SEQ ID NO: 793878 - DNA, 120 bp, Artificial Sequence
  ENSG00000275004_15 (sequence is synthesized)
tttaaaacatctggttttcatgttaactgtatctggcttaacacataaaaggtgtttgtgtgtgtgtgtgagagagagaaaaaggtattaatttatttttttaattttaatttttttttt

SEQ ID NO: 793879 - DNA, 120 bp, Artificial Sequence
  ENSG00000275004_16 (sequence is synthesized)
aggctggagtgcagtggcgtgatcctagctcactgcaaccttgaacttccaggctcaagcattcctccgcctcagcctttggagagtagctaggactacaggcgcagccaccacacccag

SEQ ID NO: 793880 - DNA, 120 bp, Artificial Sequence
  ENSG00000275004_17 (sequence is synthesized)
cagccaccacacccagctaattttttattttaattttttgtagcgatggaatcttgttatgtcgcccagggtggtctcgaactcctgaccttaggggagcctcctgcctcagcctcccca

SEQ ID NO: 793881 - DNA, 120 bp, Artificial Sequence
  ENSG00000275004_18 (sequence is synthesized)
agtgctgggttgtgtgagtcactgcccctggcacctatttattgttttggtatttcatgttactcctaagcttgaaagctcttttttctatatacagaattcatagaatttttgaaatac

SEQ ID NO: 793882 - DNA, 120 bp, Artificial Sequence
  ENSG00000275004_19 (sequence is synthesized)
ttagttttctttacagctttttccatgcattcagcatttcatggttaactctagtcagactggaatggctttgttatgccctggcccacttgctgccgaattcccagaagtgcctctgct

SEQ ID NO: 793883 - DNA, 120 bp, Artificial Sequence
  ENSG00000275004_20 (sequence is synthesized)
gtgctggcataaaataacctgaaaagattctgaaaagccaggatgtggaattgaaagagaagctgctgcgtgagcagagaccaagaaggcggaggggctgtttcacagtattctggagta

SEQ ID NO: 793884 - DNA, 120 bp, Artificial Sequence
  ENSG00000275004_21 (sequence is synthesized)
ccttttgagtattggttcctgaacatcagcagtcttggctgcctctgtggactcccggagttgtctccctgcttgtgttctggtgccatcctttgttcctccacccctgaccaaggtgcc

SEQ ID NO: 793885 - DNA, 120 bp, Artificial Sequence
  ENSG00000275004_22 (sequence is synthesized)
cagcagcctgtcttcaccagtcaaggaatccgccatcttggctgtagacatacataggtctggagaaatctctccctttttccttgatttctttttaaaggtaccttatctctccccact

SEQ ID NO: 793886 - DNA, 120 bp, Artificial Sequence
  ENSG00000275004_23 (sequence is synthesized)
cctttcttccctcctcaatctagttaaatttcctaagctttcacaaaaatccgggaagagataattaagagcttagcatccctcttagagtagaaggcagtacagataacaaagaagttg

SEQ ID NO: 793887 - DNA, 120 bp, Artificial Sequence
  ENSG00000275004_24 (sequence is synthesized)
tgagtatattatctacattttagaaaattttctgactctagatccatagattctgttgtatttatttgccggacactcatttgattgatttgcaccttgaacactatactaggtcttttc

SEQ ID NO: 793888 - DNA, 120 bp, Artificial Sequence
  ENSG00000275004_25 (sequence is synthesized)
agttacgttgcttgggttaagacactttgctaaaattacagcctgaatcctttctttagttgaagaaagggtatgtgtgtgcaagtgggtgtgtgtgtgccagtttttcttgtctcaggt

SEQ ID NO: 793889 - DNA, 120 bp, Artificial Sequence
  ENSG00000275004_26 (sequence is synthesized)
agatactcccactgtgtataaatagatctacagacttttcatacttacctcccgtattctgtttctgtggtaaaaatatgaagtgttttagttgtatgttgagtgattggttggtattat

SEQ ID NO: 793890 - DNA, 120 bp, Artificial Sequence
  ENSG00000275004_27 (sequence is synthesized)
caacactgttgtttgcagtctcattaaagcatgctcttaaggagtacatatggtcattaattgccaactgtagattccagtgatctggcccctgcctacctccttcctctctttttcatt

SEQ ID NO: 793891 - DNA, 120 bp, Artificial Sequence
  ENSG00000275004_28 (sequence is synthesized)
ctctgtcatgcttctccactgttttccccaatgatgcactattttgacacactggccttgctattccttaagcaaatcacattcttcccaatccaaagactttgcacatgctgttgtctt

SEQ ID NO: 793892 - DNA, 120 bp, Artificial Sequence
  ENSG00000275004_29 (sequence is synthesized)
tcttagaatgcccttcccctaggcctgcatggcttgctacctcacttaattgtttgacacttcctttggttcattgagcttcaaggctcttaaaatgccactgacaatgagatctccctt

SEQ ID NO: 793893 - DNA, 120 bp, Artificial Sequence
  ENSG00000275004_30 (sequence is synthesized)
gtagtcgccgccggctgtgccccgggagcgcctccggggctggtgcgtggccggcagctcgcgaacagcagctgatccggactggatgtgaccttctgcctggaatagctcaagttctta

SEQ ID NO: 793894 - DNA, 120 bp, Artificial Sequence
  ENSG00000275004_31 (sequence is synthesized)
aaagttgcgttgtaataaacctgaggctgggaagttcaagatcaagatgctggacgatttggttccttagtgaaggctctcttcctggctggtggatgacagccttcttgctgtgttctc

SEQ ID NO: 793895 - DNA, 120 bp, Artificial Sequence
  ENSG00000275004_32 (sequence is synthesized)
gtataggcacacattcattctagtcttggggccaggtcaaaaggaacactgcttcagagtgtctttacctacctgaaaacatccaaggaagccaaaccattcaaagtaaaatgcttttgt

SEQ ID NO: 793896 - DNA, 120 bp, Artificial Sequence
  ENSG00000275004_33 (sequence is synthesized)
ttggtgaagggcccctgcagacatcaaacagccgtcatgtatcattggtttgaggtgaaatagcaataaaattaatagaatggtgcctggtactagctgacttcctgttctgtgatctaa

SEQ ID NO: 793897 - DNA, 120 bp, Artificial Sequence
  ENSG00000275004_34 (sequence is synthesized)
aggtgaatttgattcattccctctcctctcccttctggctagccgttagtggagaatgaactggccatattctcagccacagctgtaaagcaagtttcccaaggggaagaagccctaata

SEQ ID NO: 793898 - DNA, 120 bp, Artificial Sequence
  ENSG00000275004_35 (sequence is synthesized)
tctataatttgaactgtactggacccatagttttaactgaaaagggccaaacaagtggtgtctgtccagttcctggactgggctaaatttagttttcccactgttaagctggaatgagga

SEQ ID NO: 793899 - DNA, 120 bp, Artificial Sequence
  ENSG00000275004_36 (sequence is synthesized)
ctgtcccaacaacagtaggtacagtggacaaaaatagcccagggtgactgactgaatttaaacccataatggctttatatttttctgtgcatatatatcttaccctaattgaacatgtga

SEQ ID NO: 793900 - DNA, 120 bp, Artificial Sequence
  ENSG00000275004_37 (sequence is synthesized)
agcttgcaactttatgtcttgctttggacatgaatgtattacagcttgcagctattctgttaaatgtatagtttcccagttttttgacactaatgctgtttgggtcttacctgacacaca

SEQ ID NO: 793901 - DNA, 120 bp, Artificial Sequence
  ENSG00000275004_38 (sequence is synthesized)
ccagtgtgcaagaaatgtctctctaattcaataagttttaagacttagagttaatgtccttcatctgatctatcctatctaatctgtactatgggtgaatctttttcccttgctctcccc

SEQ ID NO: 793902 - DNA, 120 bp, Artificial Sequence
  ENSG00000275004_39 (sequence is synthesized)
ggttttcatgaaaaagctggaaagcgatcatcatcaagggctttgcttctgtcttagaattgagctagcttgagtcaatttctgtgcctgcaaccaaatgaaaattaatatagtgagttc

SEQ ID NO: 793903 - DNA, 120 bp, Artificial Sequence
  ENSG00000275004_40 (sequence is synthesized)
tttcaggagctttctctgtttttctattgatacctctatatatttttaaggcaatgtcactttgttttgtttacaaatatattgaatatgtcaagattactattttgttattgccctttg

SEQ ID NO: 793904 - DNA, 120 bp, Artificial Sequence
  ENSG00000275004_41 (sequence is synthesized)
tgaatttccttgtctattttgctcgcttgttctttcaggtgaaatttattattttattaatgttgccaaaaattataagtaaaatatcaattatagtaataaaatgttttgtgaaaaaaa

SEQ ID NO: 793905 - DNA, 80 bp, Artificial Sequence
  ENSG00000275023_0 (sequence is synthesized)
ggcggggcggccctaggagccgggcgagcggcgcggagggggcgagcccggcgtgcgagtctcattgttgtggggggggc

SEQ ID NO: 793906 - DNA, 120 bp, Artificial Sequence
  ENSG00000275023_1 (sequence is synthesized)
ccgtcggggcatgagggcgagagcacggcggggggggcggccagacagagcgagcgaggaggaggaggaggaggacgcggaggaggaggaaggaggaggcaaagaaaagaagcggcggcg

SEQ ID NO: 793907 - DNA, 120 bp, Artificial Sequence
  ENSG00000275023_2 (sequence is synthesized)
cgcggccccccgctccctccctcccccctgacccccgacccccgccggccggccccccgccccagccccggagggagctcatgggagtatgaaggagatggtaggaggctgctgcgtatg

SEQ ID NO: 793908 - DNA, 120 bp, Artificial Sequence
  ENSG00000275023_3 (sequence is synthesized)
atgaaggagatggtaggaggctgctgcgtatgttcggacgagaggggctgggccgagaacccgctggtctactgcgatgggcacgcgtgcagcgtggccgtccaccaagcttgctatggc

SEQ ID NO: 793909 - DNA, 120 bp, Artificial Sequence
  ENSG00000275023_4 (sequence is synthesized)
atcgttcaggtgccaacgggaccctggttctgccggaaatgtgaatctcaggagcgagcagccagggtgaggtgtgagctgtgcccacacaaagacggggcattgaagaggactgataat

SEQ ID NO: 793910 - DNA, 120 bp, Artificial Sequence
  ENSG00000275023_5 (sequence is synthesized)
ggaggctgggcacacgtggtgtgtgccctctacatccccgaggtgcaatttgccaacgtgctcaccatggagcccatcgtgctgcagtacgtgcctcatgatcgcttcaacaagacctgt

SEQ ID NO: 793911 - DNA, 120 bp, Artificial Sequence
  ENSG00000275023_6 (sequence is synthesized)
tacatctgcgaggagcagggccgggagagcaaggcggcctcgggagcctgcatgacctgtaaccgccatggatgtcgacaagctttccacgtcacctgtgcccaaatggcaggcttgctg

SEQ ID NO: 793912 - DNA, 120 bp, Artificial Sequence
  ENSG00000275023_7 (sequence is synthesized)
tgtgaggaagaagtgctggaggtggacaacgtcaagtactgcggctactgcaaataccacttcagcaagatgaagacatcccggcacagcagcgggggaggcggaggaggcgctggagga

SEQ ID NO: 793913 - DNA, 120 bp, Artificial Sequence
  ENSG00000275023_8 (sequence is synthesized)
ggaggtggcagcatggggggaggtggcagtggtttcatctctgggaggagaagccggtcagcctcaccatccacgcagcaggagaagcaccccacccaccacgagaggggccagaagaag

SEQ ID NO: 793914 - DNA, 120 bp, Artificial Sequence
  ENSG00000275023_9 (sequence is synthesized)
agtcgaaaggacaaagaacgccttaagcagaagcacaagaagcggcctgagtcgccccccagcatcctcaccccgcccgtggtccccactgctgacaaggtctcctcctcggcttcctct

SEQ ID NO: 793915 - DNA, 120 bp, Artificial Sequence
  ENSG00000275023_10 (sequence is synthesized)
tcctcccaccacgaggccagcacgcaggagacctctgagagcagcagggagtcaaaggggaaaaagtcttccagccatagcctgagtcataaagggaagaaactgagcagtgggaaaggt

SEQ ID NO: 793916 - DNA, 120 bp, Artificial Sequence
  ENSG00000275023_11 (sequence is synthesized)
gtgagcagttttacctccgcctcctcttcttcctcctcctcttcctcctcctctggggggcccttccagcctgcagtctcgtccctgcagagctcccctgacttctctgcattccccaag

SEQ ID NO: 793917 - DNA, 120 bp, Artificial Sequence
  ENSG00000275023_12 (sequence is synthesized)
ctggagcagccagaggaggacaagtactccaagcccacagcccccgccccttcagcccctccttctccctcagctcccgagccccccaaggctgacctttttgagcagaaggtggtcttc

SEQ ID NO: 793918 - DNA, 120 bp, Artificial Sequence
  ENSG00000275023_13 (sequence is synthesized)
tctggctttgggcccatcatgcgcttctccaccaccacctccagctcaggccgggcccgggcgccctcccctggggactataagtctccccacgtcacggggtctggggcctcggcaggc

SEQ ID NO: 793919 - DNA, 120 bp, Artificial Sequence
  ENSG00000275023_14 (sequence is synthesized)
acccacaaacggatgcccgcactgagtgccacccctgtgcctgctgatgagacccctgagacaggcctgaaggagaagaagcacaaagccagcaagaggagccgccatgggccaggccgt

SEQ ID NO: 793920 - DNA, 120 bp, Artificial Sequence
  ENSG00000275023_15 (sequence is synthesized)
cccaagggcagccggaacaaggagggcactgggggcccagctgccccatccttgcccagtgcccagctggctggctttaccgccactgctgcctcacccttctctggaggttccctggtc

SEQ ID NO: 793921 - DNA, 120 bp, Artificial Sequence
  ENSG00000275023_16 (sequence is synthesized)
agctccggcctgggaggtctgtcctcccgaacctttgggccttctgggagcttgcccagcttgagcctggagtcccccttactaggggcaggcatctacaccagtaataaggaccccatc

SEQ ID NO: 793922 - DNA, 120 bp, Artificial Sequence
  ENSG00000275023_17 (sequence is synthesized)
tcccacagtggcgggatgctgcgggctgtctgcagcacccctctctcctccagcctcctggggcccccagggacctcggccctgccccgcctcagccgctccccgttcaccagcaccctc

SEQ ID NO: 793923 - DNA, 120 bp, Artificial Sequence
  ENSG00000275023_18 (sequence is synthesized)
ccctcctcttctgcttctatctccaccactcaggtgttttctctggctggctctacctttagcctcccttctacccacatctttggaacccccatgggtgccgttaatcccctcctctcc

SEQ ID NO: 793924 - DNA, 120 bp, Artificial Sequence
  ENSG00000275023_19 (sequence is synthesized)
caagctgagagcagccacacagagccagacctggaggactgcagcttccggtgtcgggggacctcccctcaggagagtctgtcttccatgtcccccatcagcagcctccccgcactcttc

SEQ ID NO: 793925 - DNA, 120 bp, Artificial Sequence
  ENSG00000275023_20 (sequence is synthesized)
gaccagacagcctctgcaccctgtgggggcggccagttagacccggcggccccagggacgactaacatggagcagcttctggagaagcagggcgacggggaggccggcgtcaacatcgtg

SEQ ID NO: 793926 - DNA, 120 bp, Artificial Sequence
  ENSG00000275023_21 (sequence is synthesized)
gagatgctgaaggcgctgcacgcgctgcagaaggagaaccagcggctgcaagagcagatcctgagcctgacggccaaaaaggagcggctgcagattctcaacgtgcagctctctgtgccc

SEQ ID NO: 793927 - DNA, 120 bp, Artificial Sequence
  ENSG00000275023_22 (sequence is synthesized)
ttccctgccctgcctgctgccctgcctgccgccaacggccctgtccctgggccctatggcctgcctccccaagccggcagcagcgactccttgagcaccagcaagagccctccgggaaag

SEQ ID NO: 793928 - DNA, 120 bp, Artificial Sequence
  ENSG00000275023_23 (sequence is synthesized)
agcagcctcggcctggacaactcgctgtccacttcttctgaggacccacactcaggctgcccgagccgcagcagctcgtcgctgtccttccacagcacgcccccaccgctgcccctcctc

SEQ ID NO: 793929 - DNA, 120 bp, Artificial Sequence
  ENSG00000275023_24 (sequence is synthesized)
tccttccacagcacgcccccaccgctgcccctcctccagcagagccctgccactctgcccctggccctgcctggggcccctgccccactcccgccccagccgcagaacgggttgggccgg

SEQ ID NO: 793930 - DNA, 120 bp, Artificial Sequence
  ENSG00000275023_25 (sequence is synthesized)
gctgaggggctgttgggggggctggcaggcagtgggggcctgcccctcaatgggctccttggggggttgaatggggccgctgcccccaaccccgcaagcttgagccaggctggcggggcc

SEQ ID NO: 793931 - DNA, 120 bp, Artificial Sequence
  ENSG00000275023_26 (sequence is synthesized)
cccacgctgcagctgccaggctgtctcaacagccttacagagcagcagagacatctccttcagcagcaagagcagcagctccagcaactccagcagctcctggcctccccgcagctgacc

SEQ ID NO: 793932 - DNA, 120 bp, Artificial Sequence
  ENSG00000275023_27 (sequence is synthesized)
ccggaacaccagactgttgtctaccagatgatccagcagatccagcagaaacgggagctgcagcgcctgcagatggctgggggctcccagctgcccatggccagcctgctggcaggaagc

SEQ ID NO: 793933 - DNA, 120 bp, Artificial Sequence
  ENSG00000275023_28 (sequence is synthesized)
tccaccccgctgctgtctgcgggtacccctggcctgctgcccacagcgtctgctccacccctgctgcccgctggagccctagtggctccctcgcttggcaacaacacaagtctcatggcc

SEQ ID NO: 793934 - DNA, 120 bp, Artificial Sequence
  ENSG00000275023_29 (sequence is synthesized)
gcagcagctgcagctgcagcagtagcagcagcaggcggacctccagtcctcactgcccagaccaaccccttcctcagcctgtcgggagcagagggcagtggcggtggccccaaaggaggg

SEQ ID NO: 793935 - DNA, 120 bp, Artificial Sequence
  ENSG00000275023_30 (sequence is synthesized)
accgctgacaaaggagcctcagccaaccaggaaaaaggctaaatccacccttacccctcctgacccccccaagtggagggaacagatcctggcctgaggggtcctagcctggagcaggcg

SEQ ID NO: 793936 - DNA, 120 bp, Artificial Sequence
  ENSG00000275023_31 (sequence is synthesized)
cctgcgcccagaccctggagagccttgacccagagcctgtgctgaggtccagggagtgtggagagctcctggtgtcgaggactgagactgagaggggagccccctccatctggccccctt

SEQ ID NO: 793937 - DNA, 120 bp, Artificial Sequence
  ENSG00000275023_32 (sequence is synthesized)
gacagtctgcaagcccgcctaggaggtccatccccagcaaatgttttggaggtccccccagagagcagagtgggccatggcagaagtagggggttggttggacctgtcacatgaaatgga

SEQ ID NO: 793938 - DNA, 120 bp, Artificial Sequence
  ENSG00000275023_33 (sequence is synthesized)
tcagcacttgaatggggagaagtggagggagaggccctgggcctgtccctgcggggaaatcttttatggaagaagggctggacccactttacctgcagtttcttcccagctcgggcagat

SEQ ID NO: 793939 - DNA, 120 bp, Artificial Sequence
  ENSG00000275023_34 (sequence is synthesized)
ggcagaagggaccccttggactttttctcgccatccctccccccagcgcaggggcacaagctgagcttgtaaaagcccacagatgttgggggctggagaaggggcaggagagcatcacac

SEQ ID NO: 793940 - DNA, 120 bp, Artificial Sequence
  ENSG00000275023_35 (sequence is synthesized)
tcagccccagcctcctcaacctcttggggccccgtgatggggaggagagggcaggtgcggggaggctctggccttccttggtgccccgccctttgtttgcactattggacttaggagtgc

SEQ ID NO: 793941 - DNA, 84 bp, Artificial Sequence
  ENSG00000275023_36 (sequence is synthesized)
gtgccccgccctttgtttgcactattggacttaggagtgccgagggtggggagatggagctgcccgtctcagtgtgtgagtgtg

SEQ ID NO: 793942 - DNA, 120 bp, Artificial Sequence
  ENSG00000275023_37 (sequence is synthesized)
gcagccaagggcagggataggcgcagtggtcagatgaagcagcgccagagaggggacctcccagctcttatttgcaccctccccacctcaccaactttggtccctctctgggggcatgaa

SEQ ID NO: 793943 - DNA, 120 bp, Artificial Sequence
  ENSG00000275023_38 (sequence is synthesized)
tggttaacaaacaccagagcagtactccaatattggagagtcgctgggggcacagggctttgaatcagggtagtatcctgccttccctcccctgaccccacatggtctcagggccccctt

SEQ ID NO: 793944 - DNA, 120 bp, Artificial Sequence
  ENSG00000275023_39 (sequence is synthesized)
agggccccctaccccactgatagcttcctccttctctggcacaaggggagccccagggcttgggggagggcgtaaggtggggggaaatgccactgcttttagcaaaagcctccctcccag

SEQ ID NO: 793945 - DNA, 120 bp, Artificial Sequence
  ENSG00000275023_40 (sequence is synthesized)
aattagccagcttgcctcctgcaccccacccccaccaaccaggggagccactaagctgactaacaactgtcccctcacccaccagctatttccccagggtagagtgggcaattctcacct

SEQ ID NO: 793946 - DNA, 120 bp, Artificial Sequence
  ENSG00000275023_41 (sequence is synthesized)
tcaaagagtccccgcctgcccaggcctttggcacagaggctgagtggacagtcaggagagaggcgagaggcaaggcgaagcctgtgtccctgtttcagttgcactggggttggagcccag

SEQ ID NO: 793947 - DNA, 120 bp, Artificial Sequence
  ENSG00000275023_42 (sequence is synthesized)
gagcccagggtaggggtttccagcttccccaggctccggccttgtcagtctctttgcatgtgtggatttttctgtgtgtgtttctgtttgggtttttgttgttgggtttttttttttttt

SEQ ID NO: 793948 - DNA, 120 bp, Artificial Sequence
  ENSG00000275023_43 (sequence is synthesized)
gaaaagaagatgtgtatatttttggcaacgacagaaacgtagtgcagatatatttttgcctgtgctgctcaactgttttttttttctgatactgaaaataatattaatattcctgttgat

SEQ ID NO: 793949 - DNA, 120 bp, Artificial Sequence
  ENSG00000275023_44 (sequence is synthesized)
aagactttgtaagatgttagggagctgataatggaggggggtgggaatccttcaaaggcaatttcttaggcacttgcaagggcttgggggagggggaggcagttgtgatgacctcagaaa

SEQ ID NO: 793950 - DNA, 120 bp, Artificial Sequence
  ENSG00000275023_45 (sequence is synthesized)
tactcactttttattaatgctaaatatgttagaaagaaatgatagcattcagcattttattcttcttaatctattaagctgtgtaactccctgccccaaaccactgaaaagaaaagtaac

SEQ ID NO: 793951 - DNA, 120 bp, Artificial Sequence
  ENSG00000275023_46 (sequence is synthesized)
ctgcactccagcctgtgtgagagagtgagactctgtctcaaaagagaaaaaaaaagaaaagtaaccttcagagattcttagaagagttgctcattcacacccacgcccttgcccaaggct

SEQ ID NO: 793952 - DNA, 120 bp, Artificial Sequence
  ENSG00000275023_47 (sequence is synthesized)
ggcccacttagagcgaaacttaacttttgtctggatgggaagagaagtaagtctaccccgaggttgccatgttgaagagtgagaggtccaagtgattctgtgcattgaaaccaagacacc

SEQ ID NO: 793953 - DNA, 120 bp, Artificial Sequence
  ENSG00000275023_48 (sequence is synthesized)
ccacccagaacacttcttccctccctcagcccaaaccaaaggctggggttctcatctccaagtggctgttctccaactttcccaagccgcttgcattccccagactggactactgtggcg

SEQ ID NO: 793954 - DNA, 120 bp, Artificial Sequence
  ENSG00000275023_49 (sequence is synthesized)
gttaggttagatttgaagacggggcccaggctgggtatgaacgggtgcagccctcttctcctcttcccccccacatctctcatgagagaggtagtggcatttccttctcagggagcttca

SEQ ID NO: 793955 - DNA, 120 bp, Artificial Sequence
  ENSG00000275023_50 (sequence is synthesized)
atgggaaaggtctcgaaagcttcaggaggagcagaataccaacgcagggggatggctgtaacgatctcaccgtctcctaacctcagtcccttttttgagagtgaatggtggagggtggga

SEQ ID NO: 793956 - DNA, 120 bp, Artificial Sequence
  ENSG00000275023_51 (sequence is synthesized)
agggacccagatttgtagatctctttgtctgggggaggggaaggatgtggtttgcagagcggaagcagagtttggaaacgcatgagagcagagcttcgtgtgttcccaccctcagtgagg

SEQ ID NO: 793957 - DNA, 120 bp, Artificial Sequence
  ENSG00000275023_52 (sequence is synthesized)
aggtgtgagtgggtgagcatgtggagttgggtgttcccaccctcagtgaggaggtgtgagtgggggtgcatatagaggcagtgcctgctgtggggtcacaactggtgcatgccagcgcca

SEQ ID NO: 793958 - DNA, 120 bp, Artificial Sequence
  ENSG00000275023_53 (sequence is synthesized)
aagggacctgtctttaggggtcatttcagccagctcctcccatcacagatgacagctccaagcctagaaggggctcagtgacagggccaggacaagccctcaggactgtggcctcctggc

SEQ ID NO: 793959 - DNA, 120 bp, Artificial Sequence
  ENSG00000275023_54 (sequence is synthesized)
ccttggttcccctgccccacaacatggtctccacatggctggctggctggctgtccctgtgtgtgtgtgacacacggtgtgagtgcagggctgtgcccggggtgggagggtgtctatgtg

SEQ ID NO: 793960 - DNA, 120 bp, Artificial Sequence
  ENSG00000275023_55 (sequence is synthesized)
gcactgactgtcttagctcagagctggtggatcctctccatggacaatgacactttaaggattgtcttggtttgtttttcctatttgtggggtattttccccctcaggctcctgggtctg

SEQ ID NO: 793961 - DNA, 120 bp, Artificial Sequence
  ENSG00000275023_56 (sequence is synthesized)
ctgctgcctcaaggtgtcctgaccttgaggctgatgaggggacccctgcctgtttcccccatactgagttctagggaggtgctcaccccagactcttaggaagggtctagagaaatgaga

SEQ ID NO: 793962 - DNA, 120 bp, Artificial Sequence
  ENSG00000275023_57 (sequence is synthesized)
ggagcccaagccaggggccagctccgagaaagggtaacctccacgcttctctctcccaaattggaaatgaagacaggttttcaaaggcacaggctccccctgccagcttctaggatcttc

SEQ ID NO: 793963 - DNA, 120 bp, Artificial Sequence
  ENSG00000275023_58 (sequence is synthesized)
cttggtgtgcaatgggccagttaggggtaggcagcttgcacccagttctcctttatctcaacttattttcctggggagaggtgcctagagggattgaggtaacttcaactgggaattcca

SEQ ID NO: 793964 - DNA, 120 bp, Artificial Sequence
  ENSG00000275023_59 (sequence is synthesized)
aggaaggtgggcaagtagccttggctctctcccaccatgtccatcaggattgagagtgtgtctagctcccgaccactttgtcttgacctactgaaaagttgggaactgaggggtgccttc

SEQ ID NO: 793965 - DNA, 120 bp, Artificial Sequence
  ENSG00000275023_60 (sequence is synthesized)
attcccctttgttcactttctccagctcaacttgggacttgggtggtgggactggagacctcacccctgctcccgtcccgccccctttctatcccaacctgtttccatgtagcagaccct

SEQ ID NO: 793966 - DNA, 120 bp, Artificial Sequence
  ENSG00000275023_61 (sequence is synthesized)
tcctagggagcagggaggggaagccacagattgcaaacccaggggctcctttttcattctttctaaaaccttgatatcctcagcccaaaggcgatgcccccctgccacctccaagcctgg

SEQ ID NO: 793967 - DNA, 120 bp, Artificial Sequence
  ENSG00000275023_62 (sequence is synthesized)
aattgtgcataacccggatcttgtatctttgtataacggatgttatttgtacgaagggcagttcgtaaacagcacttgttcttttaataaaagaatgttttgcaaaaaaaaaaaaaaaaa

SEQ ID NO: 793968 - DNA, 120 bp, Artificial Sequence
  ENSG00000275023_63 (sequence is synthesized)
tcctggtcccatctcttccccgcagctattggaggctgggcaatgaagtgactgactgagcaattgattgatccattcagtcctcccttaatcaagtaatatttatgaggtgcccactta

SEQ ID NO: 793969 - DNA, 120 bp, Artificial Sequence
  ENSG00000275023_64 (sequence is synthesized)
gtgccagccattggctaagcaatcagtgagcaaaaccggcacagcgctgcttcttaagataggctaccccaagcaaagaaggagtaatcacaaactgggagatatgttagtgtggagaga

SEQ ID NO: 793970 - DNA, 120 bp, Artificial Sequence
  ENSG00000275023_65 (sequence is synthesized)
aattgagggctgtgagagagagaacgggggagggctgcttctgtggatagaaagtggttagggaaggcctctttgagaagtatttgtgaagggtttattatagcgcctcacacaaaataa

SEQ ID NO: 793971 - DNA, 120 bp, Artificial Sequence
  ENSG00000275023_66 (sequence is synthesized)
tcggacacccatcacctgcatgtgaccccagaaagaatgggagagctttctggctgccccctccctctggccattgccctccctgcaaaaacaaacaggccgggtgtggtggctcacgcc

SEQ ID NO: 793972 - DNA, 120 bp, Artificial Sequence
  ENSG00000275023_67 (sequence is synthesized)
gtgctgtctgccagatactcccatctgcctctgtccagagggcctcagccctgggctcttgtctgcagagagtgggggacggcactcaggcctgctctccaagttctagggcccctgtcc

SEQ ID NO: 793973 - DNA, 120 bp, Artificial Sequence
  ENSG00000275023_68 (sequence is synthesized)
ccagagatcggtagaggacatcccctacgccccatcaggaggacacccaaagcttgtcacccaacccaaatcccactctgtgcaggttggaggggctgaaagttctgaccaaggtggcat

SEQ ID NO: 793974 - DNA, 120 bp, Artificial Sequence
  ENSG00000275023_69 (sequence is synthesized)
ggggggcaggcccctggacagtatcccgaaactcccactcatcccaccattcccagcagggcatggtatgtcaggcctgtctccagaaatgggcaacatctggctgagcgataggcaggc

SEQ ID NO: 793975 - DNA, 120 bp, Artificial Sequence
  ENSG00000275023_70 (sequence is synthesized)
gggaggagaacctggtagggtggggggagatggagaaactgctccctcctgtcaccattattgcccattcacctccaccccatctcagacggttggcagagttctgggcaccttagcagg

SEQ ID NO: 793976 - DNA, 120 bp, Artificial Sequence
  ENSG00000275023_71 (sequence is synthesized)
aggttcaggtatcaggtttccagggtgatgttgctgtggcaactgccccagtaaacctctcccctgcttcccagggctcacctggagaccttgtcattcatgccctctgacctttccagg

SEQ ID NO: 793977 - DNA, 120 bp, Artificial Sequence
  ENSG00000275023_72 (sequence is synthesized)
ggcctgcaggcaggtggcaagaaatggccaggggtctgggagtttttccagtaactggatgtcccttggacatgccagagaactctgcccatcctcctccactcgccccagcacttcggc

SEQ ID NO: 793978 - DNA, 120 bp, Artificial Sequence
  ENSG00000275023_73 (sequence is synthesized)
tacccttccccccagcccctctcttcccttgctctcagaaccacatctggctcccttcagaactccagctgttgaaaagaacaaagaggaagacagagaccaggactccgcccgggaggg

SEQ ID NO: 793979 - DNA, 120 bp, Artificial Sequence
  ENSG00000275023_74 (sequence is synthesized)
gcagtgcagggtggctctcgtttctggtccagcctgcattcagcatttatctgttcagcacgattaactgaatacctggtcgctactaggaggaaaagggccttccctggcagcagcctg

SEQ ID NO: 793980 - DNA, 120 bp, Artificial Sequence
  ENSG00000275023_75 (sequence is synthesized)
aagcacgaacgaactcacggcatgccaggctgtgttctagaaccaggagatggaggggcatatggagattagtccatttaatactcaaaataatccaattaggttggaaatttataaacc

SEQ ID NO: 793981 - DNA, 120 bp, Artificial Sequence
  ENSG00000275023_76 (sequence is synthesized)
ccatttaatatatgaagatgatggggcacagggaggttaagtaatttgcctaaaagcacacagctagtaaagtggtagacctgagattccaatgcagtctggcttgaaggcttgtgctct

SEQ ID NO: 793982 - DNA, 120 bp, Artificial Sequence
  ENSG00000275023_77 (sequence is synthesized)
tcacctgcccacagcactgtctctgcagctgctgccactggacgtctcatcatttattgaccctataccatgtatctggcatcatgctgcttccaactcaccacatatgcatagtgctcc

SEQ ID NO: 793983 - DNA, 120 bp, Artificial Sequence
  ENSG00000275023_78 (sequence is synthesized)
atcatgctgcttccaactcaccacatatgcatagtgctccctgtaaagacactgacacttatcgacgttgagactttgcacagtataacatggcagtgaggccaggcgtggtggctcacg

SEQ ID NO: 793984 - DNA, 120 bp, Artificial Sequence
  ENSG00000275023_79 (sequence is synthesized)
gggagcagggaaagccttttgtcctgagcttttctggcaagggactttgcatattggttttgcatctcatttacttctccattggttcaggataaagatggggaatcccctcctctccaa

SEQ ID NO: 793985 - DNA, 120 bp, Artificial Sequence
  ENSG00000275023_80 (sequence is synthesized)
acctgcccccaaacccttccttcttgaaccagaactctcctctccccttcaggggccaccccaccaacctcataacagtattccttatcccctacatttgtgctgcaaggtacaattttt

SEQ ID NO: 793986 - DNA, 120 bp, Artificial Sequence
  ENSG00000275023_81 (sequence is synthesized)
caagaacccccattaacattttctcctataatcgctacagtcatctggtgaggccagtagggtgcgagttactctcccccattttattacaggtgggaaagctggaggggtcgggggtac

SEQ ID NO: 793987 - DNA, 120 bp, Artificial Sequence
  ENSG00000275023_82 (sequence is synthesized)
tcatcccaggacacagacagtggcagagctgagacaggaaaccaggcatccccattcgtggaccagagctctctcccgccagtacacgcgggagtgggagggagtgcggggatctggggt

SEQ ID NO: 793988 - DNA, 120 bp, Artificial Sequence
  ENSG00000275023_83 (sequence is synthesized)
gatgctgatggctggtccgaggaagaagctgggaaacaagtccagaaagggcgtggggggaggatcttctagaagtttaaggtcaaagactcagacttcccgccctgtttgaagtgctta

SEQ ID NO: 793989 - DNA, 120 bp, Artificial Sequence
  ENSG00000275023_84 (sequence is synthesized)
attgtgtggttgaaggctggtgttgggcggttgggcagtcctgctgtagagtgagtgacccgtagactggggagcagcccccactgctggaactggctctagtcctttggagtcaccgcc

SEQ ID NO: 793990 - DNA, 120 bp, Artificial Sequence
  ENSG00000275023_85 (sequence is synthesized)
actgagactgagaggggagccccctccatctggcccccttccctttccgcactgtccgctttgtgaggctcagaggaaggacagtctgcaagcccgcctaggagctatttccccagggta

SEQ ID NO: 793991 - DNA, 120 bp, Artificial Sequence
  ENSG00000275023_86 (sequence is synthesized)
tccaacgctctcttcatccggtgtaatttgattctgtccaacgagcactgaaagggaacttgggaggtgggtaggtacctaccagtgaaccacccttctgttgacagacacactcatgct

SEQ ID NO: 793992 - DNA, 120 bp, Artificial Sequence
  ENSG00000275023_87 (sequence is synthesized)
ctggcactcaggtgaaatagtaggctcccctgcagtagttctgccagagggtagaccttcgcagttacttcattcattcattcgctggacacattttattaagtgcctactatgtgccag

SEQ ID NO: 793993 - DNA, 120 bp, Artificial Sequence
  ENSG00000275023_88 (sequence is synthesized)
acctggtgcaaggtagctggcacacgctgttcggtgctgatcaagacaggtgtgctgcccgctcaatggaacgcaagttcttgcatgcgaagactataaatatcagtaaaaaggcaaagt

SEQ ID NO: 793994 - DNA, 120 bp, Artificial Sequence
  ENSG00000275023_89 (sequence is synthesized)
ggaagacttgctcaaggcaggaaatggcagacctaaagctcagattctgttctcctgactccaagcccagtgctttcaccggtgtagcgtgcttccccttggcttcgtagtgtgtcttgg

SEQ ID NO: 793995 - DNA, 120 bp, Artificial Sequence
  ENSG00000275023_90 (sequence is synthesized)
gatcagcgcttacggaggtctcaacctctccgggtatttacgagttaagggggcgggtcacaagcgccccgccctctccctggagagtcagcccagccccagaaagctaattggtgcagg

SEQ ID NO: 793996 - DNA, 120 bp, Artificial Sequence
  ENSG00000275023_91 (sequence is synthesized)
gagaccacctgtcaggctgggaggcggggcctacagccaggctgccgactcaggtaagccttaaaggggacaaatatgattccacgtttaagaacgacagagtagggtgatatatttgtt

SEQ ID NO: 793997 - DNA, 120 bp, Artificial Sequence
  ENSG00000275023_92 (sequence is synthesized)
aaaactcagatcaggattctgtggcccaaggaagagttttagttttgcctcctgataagggatctgatgaatgtaaaaagtcatacagagctaattatgataatagctgcagtcattaag

SEQ ID NO: 793998 - DNA, 120 bp, Artificial Sequence
  ENSG00000275023_93 (sequence is synthesized)
ggcttgctacatgctagctaaacccttcaggtaaacacttcacatttattaccttcttttaatcttaataacagtcacttcggagaggctggttaggagcccaaggtcacaaaagttgat

SEQ ID NO: 793999 - DNA, 120 bp, Artificial Sequence
  ENSG00000275023_94 (sequence is synthesized)
gtcaggtttaagttcaatccaggtctgtcttgacctcaaatttctataactctgaagatcccaggaaaggaattgggcggtggatctgaaagaagccagacagtggagccttcagcccag

SEQ ID NO: 794000 - DNA, 120 bp, Artificial Sequence
  ENSG00000275023_95 (sequence is synthesized)
aggaggaagagagcagatgcccggggtttgcctcccaggggcagggtttccaagccagggccctcagcgctggccttgaactgccagtgtggggttggggattcctggggaaagggatct

SEQ ID NO: 794001 - DNA, 120 bp, Artificial Sequence
  ENSG00000275023_96 (sequence is synthesized)
acaaaaagaaaagaaaagaaaagaaaactattgacctagtttagtgtttttcaacttgggggcgtctgtggttgtcttaggagctgaggggtgattctgtgggcagggccagagatatta

SEQ ID NO: 794002 - DNA, 120 bp, Artificial Sequence
  ENSG00000275023_97 (sequence is synthesized)
aataccctgctgttggccggcagtgctgcagctggcaaataccaatggcgtgcaaccattttcttgtctagatggggagacccaggctaagtgggaaatgcgagacagtaccttgactgt

SEQ ID NO: 794003 - DNA, 120 bp, Artificial Sequence
  ENSG00000275023_98 (sequence is synthesized)
ctcacaggcctcttgcctcctgattccagtgtgatggggtggggcctggccaggcagggcaggcaggcagcagggaagagacccccgggactgttggccaacaagcggtctggccccctt

SEQ ID NO: 794004 - DNA, 120 bp, Artificial Sequence
  ENSG00000275023_99 (sequence is synthesized)
aagtaccctgcctcagaccccagggcctctgcttgcacatgggtgccctcctgcacggccaagaaagatccgatctgagcatgggctcagaggaaaaggaccaattagaaaacagccttc

SEQ ID NO: 794005 - DNA, 120 bp, Artificial Sequence
  ENSG00000275023_100 (sequence is synthesized)
ctccgggaggaccaattagaaaaagccattttgtttctcatccgaccaattagaaaaagatgaccctctgggtaggccaatgtcagaaaggccctctccctctcctgagggcacacggcc

SEQ ID NO: 794006 - DNA, 120 bp, Artificial Sequence
  ENSG00000275023_101 (sequence is synthesized)
ttagcttgcacatgcccacgcagcccggtgctcttctgcagggtggtttcacacccctgcgcatcggccctggtgcacacccctcagagcccaggccagaggcttccattggccccgttt

SEQ ID NO: 794007 - DNA, 120 bp, Artificial Sequence; identical to SEQ ID NO: 655225
  ENSG00000275034_0 (sequence is synthesized)

SEQ ID NO: 794008 - DNA, 120 bp, Artificial Sequence; identical to SEQ ID NO: 655226
  ENSG00000275034_1 (sequence is synthesized)

SEQ ID NO: 794009 - DNA, 120 bp, Artificial Sequence; identical to SEQ ID NO: 655227
  ENSG00000275034_2 (sequence is synthesized)

SEQ ID NO: 794010 - DNA, 120 bp, Artificial Sequence; identical to SEQ ID NO: 655228
  ENSG00000275034_3 (sequence is synthesized)

SEQ ID NO: 794011 - DNA, 120 bp, Artificial Sequence; identical to SEQ ID NO: 655229
  ENSG00000275034_4 (sequence is synthesized)

SEQ ID NO: 794012 - DNA, 120 bp, Artificial Sequence; identical to SEQ ID NO: 655230
  ENSG00000275034_5 (sequence is synthesized)

SEQ ID NO: 794013 - DNA, 120 bp, Artificial Sequence; identical to SEQ ID NO: 655231
  ENSG00000275034_6 (sequence is synthesized)

SEQ ID NO: 794014 - DNA, 120 bp, Artificial Sequence; identical to SEQ ID NO: 655232
  ENSG00000275034_7 (sequence is synthesized)

SEQ ID NO: 794015 - DNA, 120 bp, Artificial Sequence
  ENSG00000275034_8 (sequence is synthesized)
ggcagacgcacaagagcagaatctccgtgggacatctctctggagcatcaatattactgcagtatttggaagaaacaaatttaaataagttctaaggtgaagaatggaacatttaagaca

SEQ ID NO: 794016 - DNA, 120 bp, Artificial Sequence
  ENSG00000275034_9 (sequence is synthesized)
agtctggaaagtcatctgcctttaataactgtcgtttgtccttaacgtcagactttctccaagaccaaaactctaagaacttatttccattcttacaaatagtaaaaatgataaatcata

SEQ ID NO: 794017 - DNA, 120 bp, Artificial Sequence
  ENSG00000275034_10 (sequence is synthesized)
tcaagtcaattgaaagtcctgcctgctgctttcctaaattgcaatatggccttggtatggttttatttgtacttttgtgggggattcgtggatctttagattaaaaaaaaaaaaataggt

SEQ ID NO: 794018 - DNA, 120 bp, Artificial Sequence
  ENSG00000275034_11 (sequence is synthesized)
ttttgaacaatttttgcaagtttgcagctgttagttattgatttatttttccaacccatctaattcttctgtctctctcctcaggctcaataattccatgggtctctaaggctgtgttta

SEQ ID NO: 794019 - DNA, 120 bp, Artificial Sequence; identical to SEQ ID NO: 655237
  ENSG00000275034_12 (sequence is synthesized)

SEQ ID NO: 794020 - DNA, 120 bp, Artificial Sequence; identical to SEQ ID NO: 655238
  ENSG00000275034_13 (sequence is synthesized)

SEQ ID NO: 794021 - DNA, 120 bp, Artificial Sequence; identical to SEQ ID NO: 655239
  ENSG00000275034_14 (sequence is synthesized)

SEQ ID NO: 794022 - DNA, 120 bp, Artificial Sequence; identical to SEQ ID NO: 655240
  ENSG00000275034_15 (sequence is synthesized)

SEQ ID NO: 794023 - DNA, 120 bp, Artificial Sequence; identical to SEQ ID NO: 655241
  ENSG00000275034_16 (sequence is synthesized)

SEQ ID NO: 794024 - DNA, 120 bp, Artificial Sequence; identical to SEQ ID NO: 655242
  ENSG00000275034_17 (sequence is synthesized)

SEQ ID NO: 794025 - DNA, 120 bp, Artificial Sequence
  ENSG00000275034_18 (sequence is synthesized)
ggtccctcccaacacatgagggtagtttgtgtggtgaggtcagggatagtgtctgcgcttctaccctgaatagggctcccttggaaaatactttaatatctctttttaaatacccccttg

SEQ ID NO: 794026 - DNA, 120 bp, Artificial Sequence
  ENSG00000275034_19 (sequence is synthesized)
ttaatatctctttttaaatacccccttggaccacttttaatagttttctgatagaactaaacagtgatcattctcttaattcatgtttccattaagtttttcaggttaagtactgcacga

SEQ ID NO: 794027 - DNA, 120 bp, Artificial Sequence
  ENSG00000275052_0 (sequence is synthesized)
agagagtcgggttacaagatggcggatctgtagtagttaccgcggcggcgggagagcaagcgagccctggggggcaaagagacgggagagtgggtgtatgcgcgggtgaagtgagaggta

SEQ ID NO: 794028 - DNA, 120 bp, Artificial Sequence
  ENSG00000275052_1 (sequence is synthesized)
acggggcctccgggcggagaggcctcagtggctcttgtcaccccttctcgcggctgaacctttggagccatggtgaattcgggcctctccgaagccgccgccgccgccaccgccactact

SEQ ID NO: 794029 - DNA, 120 bp, Artificial Sequence
  ENSG00000275052_2 (sequence is synthesized)
gcctttaccgtctcctaagagtgaggagcgcggacgaggtaagcgaggaggcggcggctagagcggtggagacagcagccaccatgtcggatacgcggcggcgagtgaaggtctataccc

SEQ ID NO: 794030 - DNA, 120 bp, Artificial Sequence
  ENSG00000275052_3 (sequence is synthesized)
tgaacgaagaccggcaatgggacgaccgaggcaccgggcacgtctcctccacttacgtggaggagctcaaggggatgtcgctgctggttcgggcagagtccgacggatcactactcttgg

SEQ ID NO: 794031 - DNA, 120 bp, Artificial Sequence
  ENSG00000275052_4 (sequence is synthesized)
aatcaaagataaatccaaatactgcatatcagaaacaacaggatacattaattgtttggtcagaagcagagaactatgatttggctctgagttttcaggagaaagctggctgtgatgaga

SEQ ID NO: 794032 - DNA, 120 bp, Artificial Sequence
  ENSG00000275052_5 (sequence is synthesized)
tctgggaaaaaatttgtcaggttcaaggtaaagacccatcagtggaagtcacacaggacctcattgatgaatctgaagaagaacgatttgaagaaatgcctgaaactagtcatctgattg

SEQ ID NO: 794033 - DNA, 120 bp, Artificial Sequence
  ENSG00000275052_6 (sequence is synthesized)
acctgcccacatgtgaactcaataaacttgaagagattgctgacttagttacctcagtgctctcctcacctatccgtagggaaaagctggctctcgccttggaaaatgaaggctatatta

SEQ ID NO: 794034 - DNA, 120 bp, Artificial Sequence
  ENSG00000275052_7 (sequence is synthesized)
aaaaactattgcagctgttccaagcttgcgagaacctagaaaacactgaaggcttacaccatttgtatgaaattattagaggaatcttattcctaaataaggcaactctttttgaggtaa

SEQ ID NO: 794035 - DNA, 120 bp, Artificial Sequence
  ENSG00000275052_8 (sequence is synthesized)
tgttttctgatgagtgtatcatggatgtcgtgggatgccttgaatatgaccctgctttggctcagccaaaaagacatagagaattcttgaccaaaactgcaaagttcaaggaagttatac

SEQ ID NO: 794036 - DNA, 120 bp, Artificial Sequence
  ENSG00000275052_9 (sequence is synthesized)
caataacagactctgaactaaggcaaaaaatacatcagacttacagggtacagtacattcaggacatcattttgcccacaccatctgtttttgaagagaattttctttctactcttacgt

SEQ ID NO: 794037 - DNA, 120 bp, Artificial Sequence
  ENSG00000275052_10 (sequence is synthesized)
cttttattttcttcaacaaagttgagatagtcagcatgttgcaggaagatgagaagtttttgtctgaagtttttgcacaattaacagatgaggctacagatgatgataaacggcgtgaat

SEQ ID NO: 794038 - DNA, 120 bp, Artificial Sequence
  ENSG00000275052_11 (sequence is synthesized)
tggttaattttttcaaggagttttgtgcattttctcagacattacaacctcaaaacagggatgcatttttcaaaacattggcaaaattgggaattcttcctgctcttgaaattgtaatgg

SEQ ID NO: 794039 - DNA, 120 bp, Artificial Sequence
  ENSG00000275052_12 (sequence is synthesized)
gcatggatgatttgcaagtcagatcagctgctacagatatattttcttatctagtagaatttagtccatctatggtccgagagtttgtaatgcaagaagctcagcagagtgatgacgata

SEQ ID NO: 794040 - DNA, 120 bp, Artificial Sequence
  ENSG00000275052_13 (sequence is synthesized)
ttcttcttattaatgtggtaattgaacaaatgatctgtgatactgatcctgagctaggaggcgctgttcagttaatgggacttcttcgtactctaattgatccagagaacatgctggcta

SEQ ID NO: 794041 - DNA, 120 bp, Artificial Sequence
  ENSG00000275052_14 (sequence is synthesized)
caactaataaaaccgaaaaaagtgaatttctaaattttttctacaaccattgtatgcatgttctcacagcaccacttttgaccaatacttcagaagacaaatgtgaaaaggataatatag

SEQ ID NO: 794042 - DNA, 120 bp, Artificial Sequence
  ENSG00000275052_15 (sequence is synthesized)
ttggatcaaacaaaaacaacacaatttgtcccgataattatcaaacagcacagctacttgccttaattttagagttactcacattttgtgtggaacatcacacatatcacataaaaaact

SEQ ID NO: 794043 - DNA, 120 bp, Artificial Sequence
  ENSG00000275052_16 (sequence is synthesized)
atattatgaacaaggacttgctaagaagagtcttggtcttgatgaattcaaagcacacttttctggccttgtgtgcccttcgctttatgaggcggataattggacttaaagatgaatttt

SEQ ID NO: 794044 - DNA, 120 bp, Artificial Sequence
  ENSG00000275052_17 (sequence is synthesized)
tttataagagtggaagatatcaagtctcttactgcccatatagttgaaaacttttataaagcacttgaatcgattgaatatgttcagacattcaaaggattgaagactaaatatgagcaa

SEQ ID NO: 794045 - DNA, 120 bp, Artificial Sequence
  ENSG00000275052_18 (sequence is synthesized)
gaaaaagacagacaaaatcagaaactgaacagtgtaccatctatattgcgtagtaacagatttcgcagagatgcaaaagccttggaagaggatgaagaaatgtggtttaatgaagatgaa

SEQ ID NO: 794046 - DNA, 120 bp, Artificial Sequence
  ENSG00000275052_19 (sequence is synthesized)
gaagaggaaggaaaagcagttgtggcaccagtggaaaaacctaagccagaagatgattttccagataattatgaaaagtttatggagactaaaaaagcaaaagaaagtgaagacaaggaa

SEQ ID NO: 794047 - DNA, 120 bp, Artificial Sequence
  ENSG00000275052_20 (sequence is synthesized)
aaccttcccaaaaggacatctcctggtggcttcaaatttactttctcccactctgccagtgctgctaatggaacaaacagtaaatctgtagtggctcagataccaccagcaacttctaat

SEQ ID NO: 794048 - DNA, 120 bp, Artificial Sequence
  ENSG00000275052_21 (sequence is synthesized)
ggatcctcttccaaaaccacaaacttgcctacgtcagtaacagccaccaagggaagtttggttggcttagtggattatccagatgatgaagaggaagatgaagaagaagaatcgtccccc

SEQ ID NO: 794049 - DNA, 120 bp, Artificial Sequence
  ENSG00000275052_22 (sequence is synthesized)
aggaaaagacctcgtcttggctcataaaatatttattaggggaccctcaacatgtggtcttacaatgctgcaactgttcagtgagctgaaaatctgaatcagaaagctttctcaattgaa

SEQ ID NO: 794050 - DNA, 120 bp, Artificial Sequence
  ENSG00000275052_23 (sequence is synthesized)
cttataaaatatacaaggagtagcaaaagacagtatatcagctaagagagtttagttctaataaaaatcaggcttcccaggaacttgattgcttgctagtaattaaggggtttgcctttt

SEQ ID NO: 794051 - DNA, 120 bp, Artificial Sequence
  ENSG00000275052_24 (sequence is synthesized)
aggctgtcaaaacaaacattagtaaccagaacctgggagacagcttctcagcaaggaaaagtcacaggtttggggacggtttaggggaggggaaaaggttgatataataatgcagggttg

SEQ ID NO: 794052 - DNA, 120 bp, Artificial Sequence
  ENSG00000275052_25 (sequence is synthesized)
ctcctcggggtgtcgatctagaaacaattttacagaacttcagttgtaaactcaataacattacttgtataatggtgctggccatgttgttgttttaatcagttgcctctttttaaaaga

SEQ ID NO: 794053 - DNA, 120 bp, Artificial Sequence
  ENSG00000275052_26 (sequence is synthesized)
aatttttatggaaaacacattcaactatcattaaaaaaatgaagttaagctgttgggaccatttctttaagatttaacaaaagttcagccttttaggtagttgaagggaagtacaccccg

SEQ ID NO: 794054 - DNA, 120 bp, Artificial Sequence
  ENSG00000275052_27 (sequence is synthesized)
tattcagcacatgttgagttttctacaccaggaattttcaatatgtatattgatgaaaacaagctcaattcaaactggacagttttaagataatgttaaaatcagcacttttagagacaa

SEQ ID NO: 794055 - DNA, 120 bp, Artificial Sequence
  ENSG00000275052_28 (sequence is synthesized)
cgaaggccaagaatcagtacagtagtattccaaaatgattttctctagaaatttgaaagtagatcgaacagaatgttgtcaaccgcctaccagtacaatcttttgtggaagatactttga

SEQ ID NO: 794056 - DNA, 120 bp, Artificial Sequence
  ENSG00000275052_29 (sequence is synthesized)
aatcactttctactttgttagtaaagttctgtctttccagagctgcaagttttaaagtgttacttatacagaccaaccaagaatagtgctgaattaagtggcatttagtatctagaagcc

SEQ ID NO: 794057 - DNA, 120 bp, Artificial Sequence
  ENSG00000275052_30 (sequence is synthesized)
attttgatccaagaagctacttaagtgtcaaagtcagcatgcagcacatgtagcttttctgtaaacaagggtgtgatatgaaagctgcttttttaagaagagtaaaagcacattccatat

SEQ ID NO: 794058 - DNA, 120 bp, Artificial Sequence
  ENSG00000275052_31 (sequence is synthesized)
acgtaagtgaattttaaaaataaattgaggcaaacagttaagttttatttttagagcaacaagttaactgtaaatattttaatgttagtttgctcatctatgatctgagatcatgccgaa

SEQ ID NO: 794059 - DNA, 120 bp, Artificial Sequence
  ENSG00000275052_32 (sequence is synthesized)
gtgagaaaaatctccccaaaatacaatttaatgcattgggaaaaaaaaactttaacagtaattccagccacaatctttagatcacccttgtaatgtgttacgggtccatttttcctggaa

SEQ ID NO: 794060 - DNA, 120 bp, Artificial Sequence
  ENSG00000275052_33 (sequence is synthesized)
tcgtttaatctaaagcagtttcccctgttttggagattttgtagttaattttaattttggctattgtttggaaaagatgagctgtctgtgtagatatgaagtatagttttttccataaaa

SEQ ID NO: 794061 - DNA, 120 bp, Artificial Sequence
  ENSG00000275052_34 (sequence is synthesized)
cagatgtttattttgtattaaaaaataccactgtacttgttttacaccatttgtatacatgtggtgatattaatgctaaactgtaaaattcaggaattaaaatgtgaccctgtaattcca

SEQ ID NO: 794062 - DNA, 120 bp, Artificial Sequence
  ENSG00000275052_35 (sequence is synthesized)
atgtttgtgtttggtttgttgtaaatataaattaactccattttgagatatgtcaattttacagtatcttttaaaagccaataaaattatccataaatatttattataaactgctagatc

SEQ ID NO: 794063 - DNA, 120 bp, Artificial Sequence
  ENSG00000275052_36 (sequence is synthesized)
ataccccaattttaatgaaataattctaaacaaatgcgggtcaatggcactttatcagtgactacttatagaaggtaagccttggggaaatcatagcatcacagtatggagcttttctca

SEQ ID NO: 794064 - DNA, 120 bp, Artificial Sequence
  ENSG00000275052_37 (sequence is synthesized)
ccttttcaattaaaggtgtacatatagtaagaaagaaagaccttccacctcataaggcaggtgactcaggatattttaaactaagatcagtaaagttcccatccactttctttgaatcat

SEQ ID NO: 794065 - DNA, 120 bp, Artificial Sequence
  ENSG00000275052_38 (sequence is synthesized)
caaattttatcgagacccatctctcagcttttagtaaatttcttcttaaaataagcccacatgtaaaacactttcctagttactttttgtttgtttgtttgagtctcgctctgttgccca

SEQ ID NO: 794066 - DNA, 120 bp, Artificial Sequence
  ENSG00000275052_39 (sequence is synthesized)
caggctggtcttaaactcctgacctcacaatccacccgcctcagcctccctatctctgtatcttatgaagacttcctttttctttctgaagagctgccataagtcttaaacatttaaatc

SEQ ID NO: 794067 - DNA, 120 bp, Artificial Sequence
  ENSG00000275052_40 (sequence is synthesized)
tctttctgaagagctgccataagtcttaaacatttaaatcatcagaaccttttcttgtagcagaaatgtgaatgttttcttgaagtacaggttacggttttcatggtacaagtgcttacc

SEQ ID NO: 794068 - DNA, 120 bp, Artificial Sequence
  ENSG00000275052_41 (sequence is synthesized)
tacgacgataagagaacaaggcttaaaatatccctcaaaagaacaattgtgagaattccatgttagcggctgtctttaaacgactaccctcaggcagatctgggtttttatatctttatc

SEQ ID NO: 794069 - DNA, 120 bp, Artificial Sequence
  ENSG00000275052_42 (sequence is synthesized)
ttcattcagtgaagcaagccaaaagcccacatttgtatgccttaggtcttcttaaaatggtatctgtaaacatgtgtccaatataaaaactatttttaataaaaagttacatgaaacaga

SEQ ID NO: 794070 - DNA, 120 bp, Artificial Sequence
  ENSG00000275052_43 (sequence is synthesized)
gcacttctggataatggaactcggtataatctgttgaattcagctgttattgagttgtttgaatttataagagtggtaagtttatataaaacagctgttattatatgtaattatatgtaa

SEQ ID NO: 794071 - DNA, 120 bp, Artificial Sequence
  ENSG00000275052_44 (sequence is synthesized)
ataattttttatgtaaaagaattacatgtaagcaaagtgacttcattcccttttcacccctgaaattatatattccatgtgtcttagaatctattctaataaacagaaattttaaaaatc

SEQ ID NO: 794072 - DNA, 120 bp, Artificial Sequence
  ENSG00000275052_45 (sequence is synthesized)
agttttcaccgatcaggctaatgagctgcacagaagtggcagctgaacaagctgagagactgtattaaagaacgaatatagcggggatggggagcaggcgtctacggtcccagctactcg

SEQ ID NO: 794073 - DNA, 120 bp, Artificial Sequence
  ENSG00000275052_46 (sequence is synthesized)
ggaggctgaggtgagaggatcgcttgagccctcaaggcggaggctacagtgagtcgagatagcgccattgcactctagcctgggaagcagagagagactatcaaaaacaacaaaacgaat

SEQ ID NO: 794074 - DNA, 120 bp, Artificial Sequence
  ENSG00000275052_47 (sequence is synthesized)
aaagggattctaccaagagtgagctggactgaaataaacgacacgctactacgacccagcgcgtgactatatccaccgcacaatgtgcgataatagcctcaatgcagagagaattcctcc

SEQ ID NO: 794075 - DNA, 120 bp, Artificial Sequence
  ENSG00000275052_48 (sequence is synthesized)
tttccttattcagtgcaagagagccctatagagaacgcaggaaatgcccgcgagaaactgagaagtatcaaaacaatcacagatatgttaggaaagtagctccccgccacttccctaaac

SEQ ID NO: 794076 - DNA, 120 bp, Artificial Sequence
  ENSG00000275052_49 (sequence is synthesized)
ttatcatagcagacttactttccaaggttacaaacacaagaagagcactgtattttcatgaagcggaaaatgtgctttacaatcgccagctactaagagccttaacggtgaagcgctctg

SEQ ID NO: 794077 - DNA, 120 bp, Artificial Sequence
  ENSG00000275052_50 (sequence is synthesized)
caagaaacaggaaatcgtcaacacactttctgcatgaattgcctggagagttgtgtccatagacaattcctggttagatgcttaattgtagcagactccataacggggtttagcgggttt

SEQ ID NO: 794078 - DNA, 120 bp, Artificial Sequence
  ENSG00000275052_51 (sequence is synthesized)
ccattcggcagaaagggctccacgttctttttcacagaaaggtttaaacttatttttcctcctcaggcggacgaagtgagcgtcgttccgtgaagagctaagttcctaggaacgtcacat

SEQ ID NO: 794079 - DNA, 120 bp, Artificial Sequence
  ENSG00000275052_52 (sequence is synthesized)
actggtgccatccaacaacatgacgacgtgcggaaccgaagtccccttccacctagcggcctctcgcggcgcaggcgtggacggggagatcgcgagaacctcccgcccaattgcgacccc

SEQ ID NO: 794080 - DNA, 120 bp, Artificial Sequence
  ENSG00000275052_53 (sequence is synthesized)
gcgccaagaggcggggccgaaagaggaggaagtcgggccgaaagaggaggaagtctcgccgaagtactcccgccccagtcggtacccctcctcgcgagagcgccgagcattccggcctgg

SEQ ID NO: 794081 - DNA, 120 bp, Artificial Sequence
  ENSG00000275052_54 (sequence is synthesized)
agctttcctgacaagaaaaaaacatgtttggtaaacaaagatcatgtgtatttctcttgcaggttaaaagtttcagactgaaaaaaagtttttgtactggtgataattatcatttttgga

SEQ ID NO: 794082 - DNA, 120 bp, Artificial Sequence
  ENSG00000275052_55 (sequence is synthesized)
ttgagccactgtcggtttattctaagatgtatttattagtattatttaactgtagttagccaagtctcttctataccttgtacatgaaaccttttattctgagtcacgtttaaaggaaat

SEQ ID NO: 794083 - DNA, 120 bp, Artificial Sequence
  ENSG00000275052_56 (sequence is synthesized)
gacatagaacaaaattcaaagggatactcttaaagcaaggaaagcctgtttgtggtgtgaaattaaatcctttgactcaagtaaaggtagaggttttgaagtagaagcattaaatcctgc

SEQ ID NO: 794084 - DNA, 120 bp, Artificial Sequence
  ENSG00000275052_57 (sequence is synthesized)
tctttaattgttgtgtatttttaatatagtaatcaatggatactttataaaaatgtacattaccaagtatgtaacatcttctgttaatattgtcttatttgggaaagaaaatgtgtattg

SEQ ID NO: 794085 - DNA, 120 bp, Artificial Sequence
  ENSG00000275052_58 (sequence is synthesized)
tattttagcacgcctgattaatctgaaaatggtagcagtgattcaatcttttttattctgtgaatgtttttgtttttattatgaaatatattaaaattgaaaagtacagagaataatcgg

SEQ ID NO: 794086 - DNA, 120 bp, Artificial Sequence
  ENSG00000275052_59 (sequence is synthesized)
tgtctactgtaacaccaccagatttaacaatgttaatgttacgccatatttgtttcaaatatttttgtaatattgaacattatggatagagttaaagcttgtttgtatccatcccgttgt

SEQ ID NO: 794087 - DNA, 120 bp, Artificial Sequence
  ENSG00000275052_60 (sequence is synthesized)
ttacattctccatcccctacataggtaaccactattctgaagttgatgtgtattctttgtgtacatgcttttataccttttctgcatatgtatgtatccataaataatatgtagtctgtt

SEQ ID NO: 794088 - DNA, 120 bp, Artificial Sequence
  ENSG00000275052_61 (sequence is synthesized)
gtgtgtttttaaactttacacagtggatgtcatactcttacatgtattctgcagcttgcatttttcacacattcattttgaatattcgttcatgttaacaatgtagatctagttttcttt

SEQ ID NO: 794089 - DNA, 120 bp, Artificial Sequence
  ENSG00000275052_62 (sequence is synthesized)
ttaaactctgtatagtattcttatgtatgacatacacttgttgttatacatttgaattatttccaggtattcttttttgtgtgtggtatgtaaagtcacgatggcagagatttttgaagg

SEQ ID NO: 794090 - DNA, 120 bp, Artificial Sequence
  ENSG00000275052_63 (sequence is synthesized)
aagataaattattttaggattacatttacagcgtcagtgcccacttcaaggtttatgaaaatttggatgcccagaaacaagtacttcgtagttggaggaataaaattctgtctgttgtgc

SEQ ID NO: 794091 - DNA, 120 bp, Artificial Sequence
  ENSG00000275066_0 (sequence is synthesized)
gtgttcagctgacagctgctgataaggtggcggcggcgaaggcagcggcaggtcgggagcaagatggcgctgcggccaggagctggttctggtggcggcggggccgcgggagctggcgcg

SEQ ID NO: 794092 - DNA, 120 bp, Artificial Sequence
  ENSG00000275066_1 (sequence is synthesized)
gggtccgccgggggaggcggcttcatgtttcctgttgcaggtgggataagaccccctcaagcaggcctgatgccgatgcagcaacaaggatttcctatggtctctgtcatgcagcctaat

SEQ ID NO: 794093 - DNA, 120 bp, Artificial Sequence
  ENSG00000275066_2 (sequence is synthesized)
atgcaaggcattatgggaatgaattacagctctcagatgtcccaaggacctattgctatgcaggcaggaataccaatgggaccaatgccagcagcgggaatgccttacctaggacaagca

SEQ ID NO: 794094 - DNA, 120 bp, Artificial Sequence
  ENSG00000275066_3 (sequence is synthesized)
cccttcctgggcatgcgtcctccaggcccacagtacactccagacatgcagaagcagtttgccgaagagcagcagaaacgatttgaacagcagcaaaaactcttagaagaagaaagaaaa

SEQ ID NO: 794095 - DNA, 120 bp, Artificial Sequence
  ENSG00000275066_4 (sequence is synthesized)
agacgccagtttgaagagcagaagcaaaagctcagacttttgagcagtgtgaaacccaagacaggagagaagagtagagatgatgctttggaagccataaaaggaaatttagatgggttt

SEQ ID NO: 794096 - DNA, 120 bp, Artificial Sequence
  ENSG00000275066_5 (sequence is synthesized)
tccagagatgcaaaaatgcaccctactccagcatcgcaccccaagaaaccaggcccttccttggaggagaagttcctagtatcttgtgatataagtacatctgggcaggaacaaattaaa

SEQ ID NO: 794097 - DNA, 120 bp, Artificial Sequence
  ENSG00000275066_6 (sequence is synthesized)
ttaaatacttctgaagttggccacaaagccctaggcccaggttccagtaagaagtatcccagtttaatggccagtaacggggttgctgtagatggatgtgtaagtggtaccaccactgca

SEQ ID NO: 794098 - DNA, 120 bp, Artificial Sequence
  ENSG00000275066_7 (sequence is synthesized)
gaggcagaaaatacttcagatcaaaacctgtcaattgaagagagtggtgtgggagtatttccctcacaggatcctgctcagcccagaatgcctccttggatttacaatgagagtttggtt

SEQ ID NO: 794099 - DNA, 120 bp, Artificial Sequence
  ENSG00000275066_8 (sequence is synthesized)
ccagatgcctataagaaaatcttagaaaccacaatgactccaactggaatagatactgccaaactgtatcccattctgatgtcatctgggcttcccagggaaactcttggacagatatgg

SEQ ID NO: 794100 - DNA, 120 bp, Artificial Sequence
  ENSG00000275066_9 (sequence is synthesized)
gccttagctaatcgaactacacctggcaaacttacaaaagaagaactttataccgttctagccatgatagcggtaacacagaggggcgttcctgcaatgagtcctgatgctttaaaccag

SEQ ID NO: 794101 - DNA, 120 bp, Artificial Sequence
  ENSG00000275066_10 (sequence is synthesized)
ttcccagcagctcctattccaactttaagtggcttttctatgactctgcctacaccggtgagtcagccaactgtgataccttcaggtcctgcgggctccatgcccctcagccttggacag

SEQ ID NO: 794102 - DNA, 120 bp, Artificial Sequence
  ENSG00000275066_11 (sequence is synthesized)
ccagtcatgggcattaaccttgttggaccagtgggtggagctgcagcccaggcttctagtggtttcataccaacctaccctgcaaatcaggtagtaaagccagaagaagatgacttccag

SEQ ID NO: 794103 - DNA, 120 bp, Artificial Sequence
  ENSG00000275066_12 (sequence is synthesized)
gattttcaagatgcttctaagtcaggatcccttgatgactcattcagtgatttccaagagttgcctgcttcttcaaaaacaagtaactcccagcatggaaacagtgccccttctttgttg

SEQ ID NO: 794104 - DNA, 120 bp, Artificial Sequence
  ENSG00000275066_13 (sequence is synthesized)
atgccacttcctggaactaaagcattgccttcaatggacaaatatgctgtgtttaaaggaattgcagctgacaagtcctctgaaaatactgttccacctggagatcctggtgataaatat

SEQ ID NO: 794105 - DNA, 120 bp, Artificial Sequence
  ENSG00000275066_14 (sequence is synthesized)
agtgctttcagagaacttgaacagacagcagagaataaacctttaggagaaagctttgcagaattcagatctgcaggaactgatgatggtttcaccgattttaaaacagccgatagtgta

SEQ ID NO: 794106 - DNA, 120 bp, Artificial Sequence
  ENSG00000275066_15 (sequence is synthesized)
tcaccactagagccaccaacaaaagacaaaacttttccaccatccttcccctcaggaactatacaacagaaacaacaaacacaagtgaaaaaccctctgaacttagcagacctagatatg

SEQ ID NO: 794107 - DNA, 120 bp, Artificial Sequence
  ENSG00000275066_16 (sequence is synthesized)
ttttcctcagttaattgcagcagcgagaaaccattgtctttttcagctgtgtttagcacatcaaaatcagtttctacaccacagtcaacaggttctgctgctactatgacagcattggca

SEQ ID NO: 794108 - DNA, 120 bp, Artificial Sequence
  ENSG00000275066_17 (sequence is synthesized)
gcaacaaaaacttctagtttggctgatgattttggagaattcagcctttttggggaatattctggtctagcacctgttggggagcaggatgactttgcagattttatggctttcagtaat

SEQ ID NO: 794109 - DNA, 120 bp, Artificial Sequence
  ENSG00000275066_18 (sequence is synthesized)
agctctatttcatctgagcaaaagccggatgacaaatatgatgcccttaaagaggaagccagtcctgttcctctaaccagcaacgtgggcagcacagtgaagggtggacaaaactcgact

SEQ ID NO: 794110 - DNA, 120 bp, Artificial Sequence
  ENSG00000275066_19 (sequence is synthesized)
gctgcgtctaccaagtacgatgtcttcagacaactttctctggaagggtctggactaggtgttgaagacctgaaagataacactccttcaggaaaaagtgatgatgattttgctgacttc

SEQ ID NO: 794111 - DNA, 120 bp, Artificial Sequence
  ENSG00000275066_20 (sequence is synthesized)
cactccagtaaattttcttccataaactcggacaaatccctgggagagaaagcagtggctttcagacacaccaaagaagactctgcatcagtgaagtccttagatctcccttccattggt

SEQ ID NO: 794112 - DNA, 120 bp, Artificial Sequence
  ENSG00000275066_21 (sequence is synthesized)
ggcagcagtgttggcaaggaggactctgaagatgcactctctgttcagtttgacatgaaattggctgatgtgggaggagatcttaagcatgtcatgtctgatagctctttggatttacca

SEQ ID NO: 794113 - DNA, 120 bp, Artificial Sequence
  ENSG00000275066_22 (sequence is synthesized)
acagttagtggccagcatcctcctgctgcagatatagaggacttaaaatatgctgcttttggaagctacagtagcaattttgcagtgagcacacttacaagctatgactggtcagacagg

SEQ ID NO: 794114 - DNA, 120 bp, Artificial Sequence
  ENSG00000275066_23 (sequence is synthesized)
gatgatgcaactcagggcagaaaactctctccatttgtcctctcagcaggaagtggatccccctcagccacctcaattcttcaaaagaaagagacttcatttggcagttctgaaaacatc

SEQ ID NO: 794115 - DNA, 120 bp, Artificial Sequence
  ENSG00000275066_24 (sequence is synthesized)
accatgacatctctctccaaagtaacgacctttgtaagtgaagatgctcttccagagaccaccttcccagctcttgccagttttaaagacacgattcctcagaccagtgagcaaaaggaa

SEQ ID NO: 794116 - DNA, 120 bp, Artificial Sequence
  ENSG00000275066_25 (sequence is synthesized)
tatgaaaacagagactataaagatttcacaaaacaggacctgcctacggctgaacggagccaggaggccacgtgtcccagcccagcgtccagtggtgcctctcaagaaaccccgaacgaa

SEQ ID NO: 794117 - DNA, 120 bp, Artificial Sequence
  ENSG00000275066_26 (sequence is synthesized)
tgttcggatgactttggagagtttcaaagtgaaaagcccaaaatcagcaaatttgacttcttagtagccacttcacaaagcaaaatgaaatccagtgaagaaatgatcaaaagtgagctg

SEQ ID NO: 794118 - DNA, 120 bp, Artificial Sequence
  ENSG00000275066_27 (sequence is synthesized)
gcaacctttgacctttctgttcaaggatcacacaagaggagtttgagccttggtgataaagaaataagccgttcttctccttctccagctttggagcagcctttcagagaccgttccaat

SEQ ID NO: 794119 - DNA, 120 bp, Artificial Sequence
  ENSG00000275066_28 (sequence is synthesized)
actctgaatgagaagcccgccctgcccgtcatccgagacaagtacaaagacctgacgggagaggtggaggaaaatgagagatatgcatatgaatggcagagatgcctggggagtgccctg

SEQ ID NO: 794120 - DNA, 120 bp, Artificial Sequence
  ENSG00000275066_29 (sequence is synthesized)
aatgtcattaagaaggcaaatgataccttaaatggaatcagtagtagttctgtttgcacagaagtaattcagtcagctcaaggcatggaatatttattaggtgttgttgaagtgtacagg

SEQ ID NO: 794121 - DNA, 120 bp, Artificial Sequence
  ENSG00000275066_30 (sequence is synthesized)
gtaaccaagcgtgtggagctggggataaaagccactgcagtgtgcagtgagaaactccagcagttgctgaaggacatcgataaagtatggaataacctaatcggcttcatgtcactcgcc

SEQ ID NO: 794122 - DNA, 120 bp, Artificial Sequence
  ENSG00000275066_31 (sequence is synthesized)
acactcacaccagatgaaaactcgctggatttttcctcctgtatgttacggcctgggattaaaaatgctcaggagcttgcctgtggagtgtgcctcttgaatgtggactcgaggagccgg

SEQ ID NO: 794123 - DNA, 120 bp, Artificial Sequence
  ENSG00000275066_32 (sequence is synthesized)
aaagaagagaagcctgcagaagaacatcctaaaaaagcattcaactcagaaacagacagtttcaagctggcctatggagggcaccagtatcacgccagctgtgccaacttctggatcaac

SEQ ID NO: 794124 - DNA, 120 bp, Artificial Sequence
  ENSG00000275066_33 (sequence is synthesized)
gacagggaccaataaatagaatgcgagcactgcacagttcgcttccctgaatcgatatgaagaacaccgcaagggacggggcccccgtcatccccacggccagtctgcaggacttcaggt

SEQ ID NO: 794125 - DNA, 120 bp, Artificial Sequence
  ENSG00000275066_34 (sequence is synthesized)
aaaattgtcccacccaaactgcacgtggcaccagaagcttgctcacttatctctacttaagattttctgaaatacggaccacggctttcttgatctaaggaagaacttgctgctgcagta

SEQ ID NO: 794126 - DNA, 120 bp, Artificial Sequence
  ENSG00000275066_35 (sequence is synthesized)
ttgaaactgtgaagaactgacatttgaagaaaaatagattaccgttgcgggactagaatgggcgactgcttggagccagtgcttgtttttatctaggacacttactgtcctgtgaagtag

SEQ ID NO: 794127 - DNA, 120 bp, Artificial Sequence
  ENSG00000275066_36 (sequence is synthesized)
aatacatttatctgcatttagtttgttaatgtctgaaatgaataaaaagaggaaattgcgattaaactgatgttctgctttttatggagaagattctgcccatctcccctggacagtagc

SEQ ID NO: 794128 - DNA, 120 bp, Artificial Sequence
  ENSG00000275066_37 (sequence is synthesized)
aggcaggtgagggcagattttacccacttggttgtcacaactgaaccagttctctactccttcccttcacttctgtccactctcaagactttttcccaaaacatgcctgggcactctgca

SEQ ID NO: 794129 - DNA, 120 bp, Artificial Sequence
  ENSG00000275066_38 (sequence is synthesized)
gccgtgaagaatgctcattttgacagaggcccaaatcctgtgtattaggataatatccttccccccgggagccttcgctgcaaacctgttctgccgcatgcaaagactgtgaccatggag

SEQ ID NO: 794130 - DNA, 120 bp, Artificial Sequence
  ENSG00000275066_39 (sequence is synthesized)
ttttctcagacaagatttggaaaggcagtggaatgaaatctctttgcagtggcctctctccaaatttccaaagatgactgcatagggaccaacactgcctgactttgcagtatctgtgag

SEQ ID NO: 794131 - DNA, 120 bp, Artificial Sequence
  ENSG00000275066_40 (sequence is synthesized)
aaaaacctgaaaattaattcagggtgaaaatgtggagctctcggcctagtgtaaagtatcaagatgtatatttatgggatagatacatgacttagaagaagtagaagaaaattgtccaga

SEQ ID NO: 794132 - DNA, 120 bp, Artificial Sequence
  ENSG00000275066_41 (sequence is synthesized)
aacagtactgaattttagatagaaaaggctcatgcttcctggagtagggaattgtctttgccatttaatgtgaatgcataaaattaggggaaaaacccaagtggctaagagctgtgttat

SEQ ID NO: 794133 - DNA, 120 bp, Artificial Sequence
  ENSG00000275066_42 (sequence is synthesized)
tcctgggaagaactaccaatctagggcacacgtctctctgaattgttgattatgcgctttatgaagagatttttcaatctcgtgtgctttactttgtgtggtttagaccctctgacctag

SEQ ID NO: 794134 - DNA, 120 bp, Artificial Sequence
  ENSG00000275066_43 (sequence is synthesized)
acttttatttttaaactgaaaaagttggtcttgtctatataattgctgcttttacataatttattttcccctctcaggacaaattctgtcttgctccatcttacagcttttccatgttct

SEQ ID NO: 794135 - DNA, 120 bp, Artificial Sequence
  ENSG00000275066_44 (sequence is synthesized)
ccaagaaaggtgtggaacattttcattaaacagctgttgctgaggcttctgcttgaccttctgcgtgcccgaatgcacagagaggcaccgaggagagaaaggcttttctcactcgctccc

SEQ ID NO: 794136 - DNA, 120 bp, Artificial Sequence
  ENSG00000275066_45 (sequence is synthesized)
gatgataccgtctctggccattcctgactgaggcagctcactctgaatgggcacctttggagcttttgcccaccacaaggctagtggggtgtttctaacaacacaagtgggacagctttt

SEQ ID NO: 794137 - DNA, 120 bp, Artificial Sequence
  ENSG00000275066_46 (sequence is synthesized)
ggcaggcttttcctgaggcctcggcgcttccatcctggacagcaccacttccacatggagctggaatgcaagcaggctgctaattggccttaaaaattctttgtttttttttgagatgga

SEQ ID NO: 794138 - DNA, 83 bp, Artificial Sequence
  ENSG00000275066_47 (sequence is synthesized)
agctaattttgtatttttagtagaggcaaggtttctccatgttggccaggcttgaactccgaccgggattacaggcgtgagcc

SEQ ID NO: 794139 - DNA, 120 bp, Artificial Sequence
  ENSG00000275066_48 (sequence is synthesized)
caggcgtgagccactgcgcctggcctaaatttcataacagaaccatgacagcagaatctacctttgcaataagaatgtttcccaggagttagagaccagccctgggcatgatggtaaaga

SEQ ID NO: 794140 - DNA, 120 bp, Artificial Sequence
  ENSG00000275066_49 (sequence is synthesized)
aagaccccagctaattatacaaaaaataattagccgggtaggtggagtgcatctgtggacattcgtggtcccagctactaggtaagctgaggcgggagatcacaagtccaggagtttgag

SEQ ID NO: 794141 - DNA, 120 bp, Artificial Sequence
  ENSG00000275066_50 (sequence is synthesized)
gctgcacgtgacagcgtaggtgatgacagagcgagacactgtctcttaaaaaaaaaaaaaaaaaagtttcccagtttgaatttgtattgctgaagcatttttttgaaatgctatatagat

SEQ ID NO: 794142 - DNA, 120 bp, Artificial Sequence
  ENSG00000275066_51 (sequence is synthesized)
gcctgtcatgtcacagtggcccagtatcaacattttaaaaagctcacttggtagctgggctggtttctattcctgagaaattccagaatgcctcagataaaattccttagtataatcccc

SEQ ID NO: 794143 - DNA, 120 bp, Artificial Sequence
  ENSG00000275066_52 (sequence is synthesized)
attttccttaccaaggatggtaggcttagtcactccttgggaggtgccacaggaaaattcagcagatgtcaacagaaaaaaagcctttgctatgaaaagtattcactacctttcatatct

SEQ ID NO: 794144 - DNA, 120 bp, Artificial Sequence
  ENSG00000275066_53 (sequence is synthesized)
cttgaatacttgaaatgtttaattagatgccaccaatagggatccaaggagtgtgggacacggttgcgctgcttttctttataaacgtttattaaaatggctcaacgctgcattcagctt

SEQ ID NO: 794145 - DNA, 120 bp, Artificial Sequence
  ENSG00000275066_54 (sequence is synthesized)
cacctcagctcttcttgtcagccaggagccccgtgtccttggaaactgtagccaaggttacttatttccatactgtgcattgtgtcagcccgcttcaccccactgcttgaatggccatta

SEQ ID NO: 794146 - DNA, 120 bp, Artificial Sequence
  ENSG00000275066_55 (sequence is synthesized)
ataagcacttttctttttttggtgggatgttttgcctttaaaatttttatggcttagtgtgtaatttaatttttgtctggacatgcttgagatagaagaggtactggatatatgaggata

SEQ ID NO: 794147 - DNA, 120 bp, Artificial Sequence
  ENSG00000275066_56 (sequence is synthesized)
ttttccatgctttatttttcctgtggctactagttagcattccataggggttgtgaatttttaattatttgaatattttgtgtacatatacatatttgaagggttttgggggggtcttat

SEQ ID NO: 794148 - DNA, 120 bp, Artificial Sequence
  ENSG00000275066_57 (sequence is synthesized)
ttgtttaaaggtgtcttctgtttgcctatttcaagtgtacttcagctttgcaaagattatagggctgtatgttacagaaataggaaatgctggccctgtactggggaccactacaaaaat

SEQ ID NO: 794149 - DNA, 66 bp, Artificial Sequence
  ENSG00000275066_58 (sequence is synthesized)
taggaaatgctggccctgtactggggaccactacaaaaattccctccgggtggatcacccgaggtc

SEQ ID NO: 794150 - DNA, 120 bp, Artificial Sequence
  ENSG00000275066_59 (sequence is synthesized)
aagagcgaaactctgtctcaaaaataaaaaattccctttaacaccttcaaggtcaaatgcctgcctttgtgaacagttaataaactgacattttcagacatttgccattcagaagggagc

SEQ ID NO: 794151 - DNA, 120 bp, Artificial Sequence
  ENSG00000275066_60 (sequence is synthesized)
cattttcagacatttgccattcagaagggagcattgtagcctgctgtagaccattccagcaaatgtcagaatgcagggcaagatgtgtgtcgactatgttttttatgtttaagttactta

SEQ ID NO: 794152 - DNA, 120 bp, Artificial Sequence
  ENSG00000275066_61 (sequence is synthesized)
cttatttcttcaggtaagtgtgtaccaaataacaatactgaaaagccctccccttgccaggccgaggaaataaagcttaagtgaaacagctcttgggggaaaaatgccactttacaaata

SEQ ID NO: 794153 - DNA, 120 bp, Artificial Sequence
  ENSG00000275066_62 (sequence is synthesized)
cttttctaacaaaatagcattataatgaagtttttacttaattccattatttatatgttgacgtgaatgtaagtggttaaaaagtattcatgtgggacatctcattactttgtagctgtg

SEQ ID NO: 794154 - DNA, 120 bp, Artificial Sequence
  ENSG00000275066_63 (sequence is synthesized)
gctttattaaccagtgaatgctgtggcccttagcgaaatgcgttgtcttctgcgtgatgtggaattcgcgcctgtattttaaaagatggtgtggtttctcccttgtttgtattttaataa

SEQ ID NO: 794155 - DNA, 120 bp, Artificial Sequence
  ENSG00000275066_64 (sequence is synthesized)
acaactgctctaattgatgtgtttagacattataaagctttacctttaaaatattttcagggtctgttctgaaatcaccccttgttaaacttctctaaccaaaatacaagtgtagaagaa

SEQ ID NO: 794156 - DNA, 120 bp, Artificial Sequence
  ENSG00000275066_65 (sequence is synthesized)
attctactaaaactgtctccccatcacctgcctttcttgatgaagaagaattcagtgactttatgcaggggcctgttgaagttcccccatgtgggccttcttccacgtcccagccctttc

SEQ ID NO: 794157 - DNA, 120 bp, Artificial Sequence
  ENSG00000275066_66 (sequence is synthesized)
agtctttccacccctccaccccacttggccagttgcatacacagaaggctgggacacagcctctccctccaagtcagagtccagtgccttttgccttacatggcgtccctgggcaaattc

SEQ ID NO: 794158 - DNA, 120 bp, Artificial Sequence
  ENSG00000275066_67 (sequence is synthesized)
ctattgtggtttttttccactgagatgttagatgttcttaagaataaaatgttgctctctggtttcgcaggaaatagattgttctaatctttgaaatcagggtcaattacagatagctat

SEQ ID NO: 794159 - DNA, 120 bp, Artificial Sequence
  ENSG00000275066_68 (sequence is synthesized)
aataaagatttccctgagacgggagtcaaaatcagcatccctcagataactgctttatgggctaaaaacaagcacagcatgcaggtattgctcattagctcgtttggttagaggtgtgct

SEQ ID NO: 794160 - DNA, 120 bp, Artificial Sequence
  ENSG00000275066_69 (sequence is synthesized)
gtgttaaaagagccagataaatggattcgagccacttgtaggcacattagctccgctcatgttccctgagcacagataatgtcttttaatccaaaggttgcaaagtgggggccggggatc

SEQ ID NO: 794161 - DNA, 120 bp, Artificial Sequence
  ENSG00000275066_70 (sequence is synthesized)
tgcatctagcctgcatatcacattgacccacacaaaagatttttaagtacgaagtaattgccagtatttaaaagacatgagatttcccaatctggatttccaacttttcttgagaagtca

SEQ ID NO: 794162 - DNA, 120 bp, Artificial Sequence
  ENSG00000275066_71 (sequence is synthesized)
taatatctggcactagtaggtctacagtcccatatgttggcagctggagccgaagagcaccactccctgtaggtgggtcattctctctctcctaccataatccccaccgcttcctgtctc

SEQ ID NO: 794163 - DNA, 120 bp, Artificial Sequence
  ENSG00000275066_72 (sequence is synthesized)
agcggacctacttaagttgttcactttacttgcctggtctctgaaggcatttgagtttgcctcttctgctttaatctcatcctgacaggaggggtcgttgatttcaactggattgagaga

SEQ ID NO: 794164 - DNA, 120 bp, Artificial Sequence
  ENSG00000275066_73 (sequence is synthesized)
ctgtgaaggaactcggttacaaatccataacaaatgactggaaaagccacacaactcttacatactgatatttagaaaggtgcttttgttctccagactccagtgattctgcactgggca

SEQ ID NO: 794165 - DNA, 120 bp, Artificial Sequence
  ENSG00000275066_74 (sequence is synthesized)
ttatggaagacttgtgatagatcagagaagagtcatgttgaaaacgaaacgcagggaaaccgtgcaagagagaacagtagaaaagatttaacatgtagcttcccagaaagaatgaatgag

SEQ ID NO: 794166 - DNA, 120 bp, Artificial Sequence
  ENSG00000275066_75 (sequence is synthesized)
aaaagatttaacatgtagcttcccagaaagaatgaatgaggaatgtgtttgtgaatgcctcatgacataagcatctgaagaagagggtcgtgggctgggcgcggtggctcacacctgtaa

SEQ ID NO: 794167 - DNA, 120 bp, Artificial Sequence
  ENSG00000275066_76 (sequence is synthesized)
actgcacctagctacttgttgtttttactctctgtctcccttcactagaatgaacctccaagaaggcaaggattttggtctgttttgttcactggtgtgtccccaacacctaatctagtg

SEQ ID NO: 794168 - DNA, 120 bp, Artificial Sequence
  ENSG00000275066_77 (sequence is synthesized)
tcttgcacgtagttggcactcaaaaatatttgctggatgagtggagagtgaagggatgtagtctctgccttactcctgccacctcacttggggtcttcttttcctgctcaaacaggcaca

SEQ ID NO: 794169 - DNA, 120 bp, Artificial Sequence
  ENSG00000275066_78 (sequence is synthesized)
gttctgcataagcagatgtccaccaggaaatggggcacctgtcttttctcctagtatccttgtatctatggaagattctcttagaagccccctcacttggcttagggtgggcagtaattt

SEQ ID NO: 794170 - DNA, 120 bp, Artificial Sequence
  ENSG00000275066_79 (sequence is synthesized)
ctgcccctctcttgggaaaggaagaagaaaagccgtagtgctgacacagggctgctgaggccccgctctgaagatcccctggaattcctccagtgttcacttagagagatcggggtcatg

SEQ ID NO: 794171 - DNA, 120 bp, Artificial Sequence
  ENSG00000275066_80 (sequence is synthesized)
tctttggtgactgttacattgcaggggttagggatgtgtctggtggctgtccttagaatgtggaggtacttagcacctctcatccttgcttcaagagttcaaccacaatttagagaccat

SEQ ID NO: 794172 - DNA, 120 bp, Artificial Sequence
  ENSG00000275066_81 (sequence is synthesized)
tattaacatttagattcttttaaatttttactatccccattttcagctagtttattgggatttcccagattcaaacagatggactcataaataaacctcccaaaaaacaaaagctaataa

SEQ ID NO: 794173 - DNA, 120 bp, Artificial Sequence
  ENSG00000275066_82 (sequence is synthesized)
cttgcatagtgcctgccattctccaagcactgttgtaagccttttaccatattaccctatttaatcctctcaaccatccttggaggagctactgttaccatcccaacttcacagatgagg

SEQ ID NO: 794174 - DNA, 120 bp, Artificial Sequence
  ENSG00000275066_83 (sequence is synthesized)
aaactgaggtacagagagattatgtgacttgcctaaggtcatgtagccagtaagaggcatagctggggtttgaacccaagcagtgcagcttctatgctcttaccagtaagctatacagca

SEQ ID NO: 794175 - DNA, 120 bp, Artificial Sequence
  ENSG00000275066_84 (sequence is synthesized)
gcattgagaagtggattggtcccaaagaatagtaagtacacctctgtccagatacacccattgtttctcacagatatcagcaagcaataatgctcccctgtctgggtcctctgtgtctcc

SEQ ID NO: 794176 - DNA, 120 bp, Artificial Sequence
  ENSG00000275066_85 (sequence is synthesized)
ttgagattttttggagtctaaaaagtgacggagagggaaacttacaagagaaagctttgcagaattcagatctgcaggaactgatgatggtttcaccgattttaaaacagccgatagtgt

SEQ ID NO: 794177 - DNA, 120 bp, Artificial Sequence
  ENSG00000275066_86 (sequence is synthesized)
tccaaacatccctgcatctctgcctcagagcttttgctcaaaatatatagtgtgcttctattttccttcaagattcagctccagagctacttccataaaacttctcaagatatagcccat

SEQ ID NO: 794178 - DNA, 120 bp, Artificial Sequence
  ENSG00000275066_87 (sequence is synthesized)
taaaattcatctttttcttctcatctctattaataatttggacctcgcttatagcagttagcacatttaccctgtggtatagttatttgcctgcatatgtgtatttttgattataagatt

SEQ ID NO: 794179 - DNA, 120 bp, Artificial Sequence
  ENSG00000275066_88 (sequence is synthesized)
ccatcatttcatgtagttgacactcaatagatgttgactgaattgaatctaaactctctcattttatagatggggaaactggaatccagagaggacacgaagtgacagagccaggactaa

SEQ ID NO: 794180 - DNA, 120 bp, Artificial Sequence
  ENSG00000275066_89 (sequence is synthesized)
tttcagggtcttctgtcttttgtttcaacaagtttccgtctgcagtagcatgctgacatgcatcctatggatgctcagtgtactgatgttgggcaattcagtattgtggtgcagaacaaa

SEQ ID NO: 794181 - DNA, 120 bp, Artificial Sequence
  ENSG00000275066_90 (sequence is synthesized)
caccaggtcccatctacaagtcttttatccatataaaaaagtacacgtgttatttgaaatctttgtacatacgaagattataatgtatttttattctgttttcagcttcatgtttcctgt

SEQ ID NO: 794182 - DNA, 120 bp, Artificial Sequence
  ENSG00000275066_91 (sequence is synthesized)
taacattgcatttaaccattaagaaagaggcatccataataggaaggctaggtgtgagaaatttaaaaattaagactccttactctactactttctgtgtttattccctctgtattaata

SEQ ID NO: 794183 - DNA, 120 bp, Artificial Sequence
  ENSG00000275066_92 (sequence is synthesized)
cttttacttttcaaacttctctcccctttgtccatcttaaacttcagctcctactgtttcctgtaagtacacacctgcctgccaatattcttttttacctgtgccaaacctttattatag

SEQ ID NO: 794184 - DNA, 120 bp, Artificial Sequence
  ENSG00000275066_93 (sequence is synthesized)
ctaagatcacctgtgcagtgatgacttcgtgttcctatattacagcaaggtcttcaactgttaaaaagttttttaggcaggagcacataattgcacatttttgtaatgttatgtactgtt

SEQ ID NO: 794185 - DNA, 120 bp, Artificial Sequence
  ENSG00000275066_94 (sequence is synthesized)
gcttttccacagaatcataattcagaactctaatcatattcattcacatttcttgtatatttgacattagtgtcttttaagccttcagatttctgttgtttgcatagacagctgcataaa

SEQ ID NO: 794186 - DNA, 120 bp, Artificial Sequence
  ENSG00000275066_95 (sequence is synthesized)
tagacagctgcataaacatttctctaaggttttacacgccaccttaaccttcaggtacagtaactgattcagtatgttgtcagcatgtttagtttttttttgagatggagtcttgctctg

SEQ ID NO: 794187 - DNA, 75 bp, Artificial Sequence
  ENSG00000275066_96 (sequence is synthesized)
tggtctcaaactcctgacctcaagtgagtctctctacttgacggcattttaaaaaaagtatttagatatttctgc

SEQ ID NO: 794188 - DNA, 120 bp, Artificial Sequence
  ENSG00000275066_97 (sequence is synthesized)
cccagacggcattttaaaaaaagtatttagatatttctgcaaagtggaacacatcagacaccagagtaagcgatatgaattcctttggttttatttttcgaatttgttattgtcagaata

SEQ ID NO: 794189 - DNA, 120 bp, Artificial Sequence
  ENSG00000275066_98 (sequence is synthesized)
catattccatgtctcctctgttcctgtttatgcagtttcgctcatctcttcccctttagccaattgattatctcttagtcagcactttgctgcatacacactgtaacaagaactaaggga

SEQ ID NO: 794190 - DNA, 120 bp, Artificial Sequence
  ENSG00000275066_99 (sequence is synthesized)
taggcattatagagaattacaaattaggaaaagagattattctcctgattttaaaaatatattaaatgcatgtacataacatatagaagaaacatataaggaatgtgaccatagagtgct

SEQ ID NO: 794191 - DNA, 120 bp, Artificial Sequence
  ENSG00000275066_100 (sequence is synthesized)
ggtatttccaggactgctgcaccaacacaagttaaaccttctagacgcataaattgtatttctacttcagatctcttccttcaaacaaaatttatatgtactactgctatctaagcatcc

SEQ ID NO: 794192 - DNA, 120 bp, Artificial Sequence
  ENSG00000275066_101 (sequence is synthesized)
ctatctgaatgagtcaaggcacctcaaattcactgcatgaaattacctttagtgttttcctactcaaagccacataaaaatgtgttaaatcgttattcccttccttggtgaatgatgtca

SEQ ID NO: 794193 - DNA, 120 bp, Artificial Sequence
  ENSG00000275066_102 (sequence is synthesized)
ccatattcagtcaccaaattaaaagcatgctatttactttggctctgtcatctctcctttaccaccattaactctgtcagctctgtgtgacagtgtgtgatcttaactcctgcccactct

SEQ ID NO: 794194 - DNA, 120 bp, Artificial Sequence
  ENSG00000275066_103 (sequence is synthesized)
caactcttgctattccccatgacttacactccagccttgccagcatgactccaaactgaccatgttctttcaagctttatccattctgttcgcttcagtctgaaatacccttacctgatc

SEQ ID NO: 794195 - DNA, 120 bp, Artificial Sequence
  ENSG00000275066_104 (sequence is synthesized)
tccctatagttatagttccatttcagaaatcagctaaatataggaagtttttcctaaccaattcccacctcctttgctactgctgtagtacctgatgaatgtctgtgccctaattgtaat

SEQ ID NO: 794196 - DNA, 120 bp, Artificial Sequence
  ENSG00000275066_105 (sequence is synthesized)
tgctggtttacctgactgtttccctttctaggctgtaagtatctgaagacaattattcatgtttatatatgtagtgcttggccccatcatatgtaattaataaagatctgttggatgact

SEQ ID NO: 794197 - DNA, 120 bp, Artificial Sequence
  ENSG00000275066_106 (sequence is synthesized)
gtgaaaagtcaatgtagaactcttccttcaagctaagtacagatttggatgttctcaaatatacagtggcttaagagctctggtctggataacaactgtcttgggaggaaaaaacctctt

SEQ ID NO: 794198 - DNA, 120 bp, Artificial Sequence
  ENSG00000275066_107 (sequence is synthesized)
tgtcttctaattaaatatcagtatgacaatttcacctgtaagttttctgtatataaatatgttaacattagtaaaatctattcactcagagcaaatgtaataaaggagtttaccatttaa

SEQ ID NO: 794199 - DNA, 120 bp, Artificial Sequence
  ENSG00000275066_108 (sequence is synthesized)
cccatcgcccggtccgcggcgaggtggggcctggtgtttgacccggaagtggctgtgttcagctgacagctgctgataaggtggcggcggcgaaggcagcggcagcttcatgtttcctgt

SEQ ID NO: 794200 - DNA, 120 bp, Artificial Sequence
  ENSG00000275074_0 (sequence is synthesized)
ctcgtgagctcccggcccgctgccgcagggactgggagcgggctccgcagcgcactctagcccgcggctcggctcagtcggtctgcgaggatccggcccgccgccccccgggggacccga

SEQ ID NO: 794201 - DNA, 120 bp, Artificial Sequence
  ENSG00000275074_1 (sequence is synthesized)
gcctggcgggggcgctggcttccgtgctggctggccaggggtccagcgtgcacagctgcgactcggcgccggccggggagccgccggcgcccgtgcggctgcggaagaacgtgtgctacg

SEQ ID NO: 794202 - DNA, 120 bp, Artificial Sequence
  ENSG00000275074_2 (sequence is synthesized)
acgtgtgctacgtggtgctggccgtgttcctcagcgagcaggatgaggtgctactgatccaggaggccaagagggagtgccgggggtcgtggtacctgcctgcggggagaatggagccag

SEQ ID NO: 794203 - DNA, 120 bp, Artificial Sequence
  ENSG00000275074_3 (sequence is synthesized)
gggagaccatcgtggaggcgctgcagcgggaggtgaaggaggaggcggggctgcactgtgagcccgagacactgctgtccgtggaggagcggggcccctcctgggtccgcttcgtgttcc

SEQ ID NO: 794204 - DNA, 120 bp, Artificial Sequence
  ENSG00000275074_4 (sequence is synthesized)
tcgctcgccccacaggtggaattctcaagacttccaaggaggccgatgcggagtccctgcaggctgcctggtacccacggacctccctgcccactccgctgcgagcccatgacatcctgc

SEQ ID NO: 794205 - DNA, 120 bp, Artificial Sequence
  ENSG00000275074_5 (sequence is synthesized)
acctggttgaactagccgcccagtatcgccagcaagccaggcaccctctcattctgccccaagagctaccctgtgatctggtctgccagcggctcgtggctacctttaccagcgcccaga

SEQ ID NO: 794206 - DNA, 120 bp, Artificial Sequence
  ENSG00000275074_6 (sequence is synthesized)
gcagaggggtggcatgaagatggccgtcctgcggctgctgcaggagtgtctgaccctgcaccacttggtggtggagatcaaggggttgcttggactgcagcacctgggccgagatcacag

SEQ ID NO: 794207 - DNA, 120 bp, Artificial Sequence
  ENSG00000275074_7 (sequence is synthesized)
tgatggcatctgtttgaatgtgctggtgaccgtggcttttcggagcccagggatccaggatgaacccccaaaagttcggggtgagaacttctcttggtggaaggtgatggaggaagacct

SEQ ID NO: 794208 - DNA, 120 bp, Artificial Sequence
  ENSG00000275074_8 (sequence is synthesized)
gcaaagccagctcctccagcggcttcagggatcctctgttgtcccagtgaacagatagagaggtgggggaggtgacagggagctaggcagccgtgctccctccagtgcggacttgtctcc

SEQ ID NO: 794209 - DNA, 120 bp, Artificial Sequence
  ENSG00000275074_9 (sequence is synthesized)
ctctgagggaggcaagaggctggcgatcagggatcttgttgcattgggagcaggggcggctctcctggtccccaggagagatgctttgaggagcattcctctagattgcacaagggacag

SEQ ID NO: 794210 - DNA, 120 bp, Artificial Sequence
  ENSG00000275074_10 (sequence is synthesized)
tgcctttaaccaagcgaggagtccaaagctcaggacctgactaccctgagggcacgctgacgcctcttcccagggggatggggagctttctgcacccccagtggcatctcctcatcacgt

SEQ ID NO: 794211 - DNA, 120 bp, Artificial Sequence
  ENSG00000275074_11 (sequence is synthesized)
tctgtgccgtccttgggaaaggcctgcattctgatccttccaggcccttcgagcatggaggggcactggggaaggtcccccgagggaggagcacgttgctgagtaaagaggtgttactca

SEQ ID NO: 794212 - DNA, 120 bp, Artificial Sequence
  ENSG00000275074_12 (sequence is synthesized)
tcgctcgccccacaggtatggcccacctggaggcagtgtgaacagggccagttgacacctttcccccagctcctcggtgaggtgagcccctctacagccagtcctgttatggctggcaca

SEQ ID NO: 794213 - DNA, 120 bp, Artificial Sequence
  ENSG00000275074_13 (sequence is synthesized)
gcctggcatgggcagattccagcctttgggctgggggcctctctcctgggtcagggatgtctgttgactctgccagagctgcacttctctccacacagaccctccctgccccatccccca

SEQ ID NO: 794214 - DNA, 120 bp, Artificial Sequence
  ENSG00000275111_0 (sequence is synthesized)
cccgacctgaagaggcgccgtcttcccgggtcccgagcactctgtgccggaggactctgcccttgtccacaaggagagcacacaggagagaatggctgctgtgtctccgaccaccagatg

SEQ ID NO: 794215 - DNA, 120 bp, Artificial Sequence
  ENSG00000275111_1 (sequence is synthesized)
ccaggaatcagtgacattcgaagacgttgccgtggttttcacagatgaagagtggagtcgtctggtccccatacagagggacctctacaaggaggtgatgctggagaactataacagcat

SEQ ID NO: 794216 - DNA, 120 bp, Artificial Sequence
  ENSG00000275111_2 (sequence is synthesized)
tgtgtcattgggccttccagttcctcaacctgatgtgattttccaattgaagagaggggacaagccgtggatggtagatcttcatgggtctgaggagagagaatggccagagagtgtctc

SEQ ID NO: 794217 - DNA, 120 bp, Artificial Sequence
  ENSG00000275111_3 (sequence is synthesized)
tctagactgggaaactaagcctgagattcacgatgcttcagacaaaaaatcagaaggatcattgagggaatgccttggaaggcaaagtcctctgtgtcctaaatttgaagttcatacacc

SEQ ID NO: 794218 - DNA, 120 bp, Artificial Sequence
  ENSG00000275111_4 (sequence is synthesized)
caatggcaggatgggaacagaaaagcaaagcccttcaggggagactcgtaagaaatccctctcccgggacaaaggcttgcggcgacggtcagccctgtccagggaaattctcactaaaga

SEQ ID NO: 794219 - DNA, 120 bp, Artificial Sequence
  ENSG00000275111_5 (sequence is synthesized)
gagacaccaggaatgcagtgactgtgggaagaccttttttgaccactcatccctcacccgccatcagaggactcacactggggagaagccctacgactgccgcgagtgtgggaaagcctt

SEQ ID NO: 794220 - DNA, 120 bp, Artificial Sequence
  ENSG00000275111_6 (sequence is synthesized)
cagccacaggagcagcctcagcagacatctgatgtcacacactggggagagcccctacgagtgcagtgtgtgctcaaaagccttctttgaccgttcgtccctaactgtccatcagcgaat

SEQ ID NO: 794221 - DNA, 120 bp, Artificial Sequence
  ENSG00000275111_7 (sequence is synthesized)
tcacactggagagaaaccctttcagtgcaacgagtgtggaaaagccttttttgaccgttcatcccttactcgacaccagagaattcacactggagaaagtccttatgaatgtcatcagtg

SEQ ID NO: 794222 - DNA, 120 bp, Artificial Sequence
  ENSG00000275111_8 (sequence is synthesized)
tgggaaagcctttagccagaaaagtattcttactcgccatcagctaatccacactggcaggaagccttatgagtgtaacgagtgcgggaaagctttctatggtgtctcgtctctgaatag

SEQ ID NO: 794223 - DNA, 120 bp, Artificial Sequence
  ENSG00000275111_9 (sequence is synthesized)
acatcagaaagctcatgctggggaccctcgctatcagtgtaacgagtgtggcaaagctttctttgaccgctcatcccttacacagcatcagaagatccacactggagacaagccatatga

SEQ ID NO: 794224 - DNA, 120 bp, Artificial Sequence
  ENSG00000275111_10 (sequence is synthesized)
atgcagcgaatgcgggaaagcctttagccagcggtgccggctcacgcggcatcagcgtgtccacacgggagagaagccctttgaatgcactgtgtgtgggaaagttttcagttcaaaatc

SEQ ID NO: 794225 - DNA, 120 bp, Artificial Sequence
  ENSG00000275111_11 (sequence is synthesized)
ttctgttattcaacatcaacggcgttacgccaaacagggaatagactgagttgggcaaaagcttgggtaggacaagaacttccatacaaatttgagatagatctcgcctgtcttaaagct

SEQ ID NO: 794226 - DNA, 120 bp, Artificial Sequence
  ENSG00000275111_12 (sequence is synthesized)
gccatttgctcattctacccactctggctgccgttgtcctgtcctgcttctgcgccagagtgtttaataagcactcccttcctgctgtgttatagaactgtaggggaggccatggaaatg

SEQ ID NO: 794227 - DNA, 120 bp, Artificial Sequence
  ENSG00000275111_13 (sequence is synthesized)
actctaaagatacaaaattttgaagaggtttgtcagacaataggatagatgttaggaggagacacacctcttgtctgagaacctaggccccaggtatcactgcactttaagaaactggag

SEQ ID NO: 794228 - DNA, 120 bp, Artificial Sequence
  ENSG00000275111_14 (sequence is synthesized)
ttttggggcactaatcttgttctcttgtgtcccagcttttagacctcttacttccactgctagtagctagcacttactgagcacctgcgatgaggtaaagactcagctaagggttttaca

SEQ ID NO: 794229 - DNA, 120 bp, Artificial Sequence
  ENSG00000275111_15 (sequence is synthesized)
ggaagtagattaattgatcctgtcaccaaccatatgaagtaggcactgttaccatctgcatctccagatgagcaccctgaggtttagagagattaaatcacttgcccaaggtgaaccagc

SEQ ID NO: 794230 - DNA, 120 bp, Artificial Sequence
  ENSG00000275111_16 (sequence is synthesized)
tggtaaaaggtgatgccaggtcttgaagacaggtccaccttcaaaatctattctctttaccattatgctcgatggtttgtttgttttataatttatgtatatgtattatcctctcaacta

SEQ ID NO: 794231 - DNA, 120 bp, Artificial Sequence
  ENSG00000275111_17 (sequence is synthesized)
gattgtaagcacttggaggtgtgacttacaggtctttgtatctcacacagtgccttgctaataggtgctcaataaatatttatatgagtgaatgacttttctacttaccaaattctctcc

SEQ ID NO: 794232 - DNA, 120 bp, Artificial Sequence
  ENSG00000275111_18 (sequence is synthesized)
attcagaacacctcttggatttgcatactttctctgaattcacagcccagcctatacttttatcatccccagctcccactcctggcagcagtagctttctaattccagttcttcctgctt

SEQ ID NO: 794233 - DNA, 120 bp, Artificial Sequence
  ENSG00000275111_19 (sequence is synthesized)
tattgaagagggatgtgctaagctgtggtacagtaacaagcccgcagagagctatgtctcccttaaaacctgacgggaaccattctgtcttattctatcctcattatttggaacatctgg

SEQ ID NO: 794234 - DNA, 120 bp, Artificial Sequence
  ENSG00000275111_20 (sequence is synthesized)
cttccaaagtcaccacaagggcggaagagaaagctagaggaatttgtaggatattttcttagacccaggcttacatcacttctgtccacatctaataagccagaacccagcacctagaag

SEQ ID NO: 794235 - DNA, 120 bp, Artificial Sequence
  ENSG00000275111_21 (sequence is synthesized)
ctaggaaagtaaacaagcacctcgaaagttggttaataccaagaacctctctcacagttatattttgcatactactgttaagccagtctttgcaaatgaccccttcctgcccatcactgc

SEQ ID NO: 794236 - DNA, 120 bp, Artificial Sequence
  ENSG00000275111_22 (sequence is synthesized)
cttcctcaagacctaaaatagctccctatttagtgaaaaattatctgaatatttaaggtctgccttaacgtgatccccattgctgaattttacctcctgactccaaaaactcttctcttc

SEQ ID NO: 794237 - DNA, 120 bp, Artificial Sequence
  ENSG00000275111_23 (sequence is synthesized)
ccaaagtgctgggattacagacgtaagtcaccgtgcccggcctatatttttattttattaaaggttaggcactagatgaccttgactctaggcatctgcattctcttgatctttgcttag

SEQ ID NO: 794238 - DNA, 120 bp, Artificial Sequence
  ENSG00000275111_24 (sequence is synthesized)
cttgactctaggcatctgcattctcttgatctttgcttagggtgaagctcagaaaaggacttggttctgaaaggctgtctggaattagattgtcctacgtgattcccagtgaattgagat

SEQ ID NO: 794239 - DNA, 120 bp, Artificial Sequence
  ENSG00000275111_25 (sequence is synthesized)
gaatttcctctggaagttcaagtcggattcgagaagctgaattaccaaacagaccctccccaacctactaacgaccctattactctgttcaccctagagcagacgaacggcagggaagac

SEQ ID NO: 794240 - DNA, 120 bp, Artificial Sequence
  ENSG00000275111_26 (sequence is synthesized)
ttgatctgtggacttttgaaagcaacttgaggaaaaacacataacagaatctataggtgtggacaatatgtgatattgctaaataatgtcaagtaggaaataaaagagactattgacaaa

SEQ ID NO: 794241 - DNA, 120 bp, Artificial Sequence
  ENSG00000275111_27 (sequence is synthesized)
tcttccccagagctggacacgaggcaccatgatcagagagacacattccctgcggacggcgctcccatcggatactggagggacgcgacactagaggcaggcagtacttcagggtgacca

SEQ ID NO: 794242 - DNA, 120 bp, Artificial Sequence
  ENSG00000275111_28 (sequence is synthesized)
taagtctcccaaacagccacaacggctcgctctcccagctaaggcgacagcgctgccattttggatcctgttcagccacgggaagccggcgtttgcacacattttcggacgtcatattaa

SEQ ID NO: 794243 - DNA, 120 bp, Artificial Sequence
  ENSG00000275111_29 (sequence is synthesized)
agcgcaccggacgccgagacttctgggagatgaagtccttgcgaaggccccgcattgattgggagcgcagtcgccaggaccctgtgcgcaggcgcgttggtttcccgacctgaagaggcg

SEQ ID NO: 794244 - DNA, 120 bp, Artificial Sequence
  ENSG00000275126_0 (sequence is synthesized)
atgtctgggcgcggcaaaggcgggaagggtctgggcaaaggaggcgctaagcgccaccgcaaagttctgcgcgacaacattcagggcatcaccaagcccgccatccgacgcctggcacgg

SEQ ID NO: 794245 - DNA, 120 bp, Artificial Sequence
  ENSG00000275126_1 (sequence is synthesized)
aatgtaatccgcgatgcagttacctacacggagcacgccaaacgcaagacagtcacagccatggacgtggtttacgcgctcaagcgccagggccgcaccctgtatggctttggcggctga

SEQ ID NO: 794246 - DNA, 120 bp, Artificial Sequence
  ENSG00000275152_0 (sequence is synthesized)
agttggcaagcggaccaccagcaacagacaacatcttcattcggctctccctgaagctgtactgcctcgctgagaggatgaaggtctccgaggctgccctgtctctccttgtcctcatcc

SEQ ID NO: 794247 - DNA, 120 bp, Artificial Sequence
  ENSG00000275152_1 (sequence is synthesized)
ttatcattacttcggcttctcgcagccagccaaaagttcctgagtgggtgaacaccccatccacctgctgcctgaagtattatgagaaagtgttgccaaggagactagtggtgggataca

SEQ ID NO: 794248 - DNA, 120 bp, Artificial Sequence
  ENSG00000275152_2 (sequence is synthesized)
gaaaggccctcaactgtcacctgccagcaatcatcttcgtcaccaagaggaaccgagaagtctgcaccaaccccaatgacgactgggtccaagagtacatcaaggatcccaacctacctt

SEQ ID NO: 794249 - DNA, 120 bp, Artificial Sequence
  ENSG00000275152_3 (sequence is synthesized)
tgctgcctaccaggaacttgtccacggttaaaattattacagcaaagaatggtcaaccccagctcctcaactcccagtgatgaccaggctttagtggaagcccttgtttacagaagagag

SEQ ID NO: 794250 - DNA, 120 bp, Artificial Sequence
  ENSG00000275152_4 (sequence is synthesized)
gggtaaacctatgaaaacaggggaagccttattaggctgaaactagccagtcacattgagagaagcagaacaatgatcaaaataaaggagaagtatttcgaatattttctcaatcttagg

SEQ ID NO: 794251 - DNA, 120 bp, Artificial Sequence
  ENSG00000275152_5 (sequence is synthesized)
gtatttcgaatattttctcaatcttaggaggaaataccaaagttaagggacgtgggcagaggtacgctcttttatttttatatttatatttttatttttttgagatagggtcttactctg

SEQ ID NO: 794252 - DNA, 120 bp, Artificial Sequence
  ENSG00000275152_6 (sequence is synthesized)
ttacaggcgtgagccaccacatccggccagtgcactcttaatacacagaaaaatatatttcacatccttctcctgctctctttcaattcctcacttcacaccagtacacaagccattcta

SEQ ID NO: 794253 - DNA, 120 bp, Artificial Sequence
  ENSG00000275152_7 (sequence is synthesized)
aattcctcacttcacaccagtacacaagccattctaaatacttagccagtttccagccttccagatgatctttgccctctgggtcttgacccattaagagccccatagaactcttgattt

SEQ ID NO: 794254 - DNA, 120 bp, Artificial Sequence
  ENSG00000275152_8 (sequence is synthesized)
ttcctgtccatctttatggatttttctggatctatattttcttcaattattctttcattttataatgcaactttttcataggaagtccggatgggaatattcacattaatcatttttgca

SEQ ID NO: 794255 - DNA, 120 bp, Artificial Sequence
  ENSG00000275152_9 (sequence is synthesized)
gagactttgctagatcctctcatattttgtcttcctcagggtggcaggggtacagagagtgcctgattggaaaaaaaaaaaaaagagagagagagagaagaagaagaagaagagacacaa

SEQ ID NO: 794256 - DNA, 120 bp, Artificial Sequence
  ENSG00000275152_10 (sequence is synthesized)
atctctacctcccatgttaagctttgcaggacagggaaagaaagggtatgagacacggctaggggtaaactcttagtccaaaacccaaacatgcaataaataaaactcccttatttgaca

SEQ ID NO: 794257 - DNA, 120 bp, Artificial Sequence
  ENSG00000275152_11 (sequence is synthesized)
tcattcggctctccctgaagctgtactgcctcgctgagaggatgaaggtctccgaggctgccctgtctctccttgtcctcatccttatcattacttcggcttctcgcagccagccaagtt

SEQ ID NO: 794258 - DNA, 120 bp, Artificial Sequence
  ENSG00000275158_0 (sequence is synthesized)
agctcctgtattcgtgcccacaagggcctcatctaggtgaaggctccacctgccccaccctgccatggccaccaggctcctctgctgtgtggttctttgtctcctgggagaagagcttat

SEQ ID NO: 794259 - DNA, 120 bp, Artificial Sequence
  ENSG00000275158_1 (sequence is synthesized)
agaagtaacaatgagatgtcagccaattttaggccacaatactgttttctggtacagacagaccatgatgcaaggactggagttgctggcttacttccgcaaccgggctcctctagatga

SEQ ID NO: 794260 - DNA, 120 bp, Artificial Sequence
  ENSG00000275158_2 (sequence is synthesized)
ttcggggatgccgaaggatcgattctcagcagagatgcctgatgcaactttagccactctgaagatccagccctcagaacccagggactcagctgtgtatttttgtgctagtggtttggt

SEQ ID NO: 794261 - DNA, 120 bp, Artificial Sequence
  ENSG00000275183_0 (sequence is synthesized)
ctttacgcagcttgctttcctggcgctgggggagggcgcagccgggaagtcccagagcagcggtgtcaggctctccaccaaggagggactgggccagagtcctcgcgagggcacgcggcg

SEQ ID NO: 794262 - DNA, 120 bp, Artificial Sequence
  ENSG00000275183_1 (sequence is synthesized)
tggtccccagagctaggccggagcgcgggccgctgacgccactgtcgggtgaggctcggtgcatccaaggggagccgccctccgtgcggggcgacctcgtctgcgcggcgggcgtgccag

SEQ ID NO: 794263 - DNA, 120 bp, Artificial Sequence
  ENSG00000275183_2 (sequence is synthesized)
ttccccgcacccatggcagcggccagagagccggagttgccgcaggaagcccccgccacggaacccgcgcccccgccggcctgccgcttcttcctggaaggccgctgccgcttcggcgcc

SEQ ID NO: 794264 - DNA, 120 bp, Artificial Sequence
  ENSG00000275183_3 (sequence is synthesized)
gccgcctggccgcgaggcgcagccggaggccggggccaagaagccgccgctgcgcacagccgcggacgtcatccagcgcatccgctgggacccgcgcctcgaccccgccgacttctcggt

SEQ ID NO: 794265 - DNA, 120 bp, Artificial Sequence
  ENSG00000275183_4 (sequence is synthesized)
gacccgcgcctcgaccccgccgacttctcggtgggctacgtcgaccgctttctgggtgtgcgcgaggagcccttcagcgccttttgctgggaccagccgctggcggcgctcgggccgggc

SEQ ID NO: 794266 - DNA, 120 bp, Artificial Sequence
  ENSG00000275183_5 (sequence is synthesized)
gtgctggcagtgccccagcaccgcgtgcgcttcttccgcttccgtggccgccttgtgtgggaccgcgcctcgcgcaccgacctcgtctttggctctggctcggcggcgggacgcgggccc

SEQ ID NO: 794267 - DNA, 120 bp, Artificial Sequence
  ENSG00000275183_6 (sequence is synthesized)
accatcctggacgcaccgaacaccgagggcgcccacggggcagagggtgccgagtggacactggcggggacaggtcaggaggcccaggctgcccccaagcgagggagcacaaggccgctc

SEQ ID NO: 794268 - DNA, 120 bp, Artificial Sequence
  ENSG00000275183_7 (sequence is synthesized)
tgcacagggcaccaggaaccaggcgtggaggaacccggagagctggaggcggcccaggagagggcgctgggcacagctgctgatttgggaacactggccccaagaggacgcctcgccgga

SEQ ID NO: 794269 - DNA, 120 bp, Artificial Sequence
  ENSG00000275183_8 (sequence is synthesized)
aggcactgaagccaacagcagccaccaggaccacattgctggggggcaaggaagcacaggccctgggagtcccggggggctccgctgagacgacagaagccgagtggggtcctgcggcct

SEQ ID NO: 794270 - DNA, 120 bp, Artificial Sequence
  ENSG00000275183_9 (sequence is synthesized)
ggcccgaggacaaaagggcccgccttagtgttgcagccccttgccaaccgcgccccacacattttgtggccctcatggtgaccgagcctgggctacaagcagaagtgaccaaggcccagg

SEQ ID NO: 794271 - DNA, 120 bp, Artificial Sequence
  ENSG00000275183_10 (sequence is synthesized)
aatacctggtccacgtggccccacactgcgccaacttcctagtgccctctcagaacctacacctgaccctggccctgctgcgactggcaggcgctggggaggaggccgctgccattggag

SEQ ID NO: 794272 - DNA, 120 bp, Artificial Sequence
  ENSG00000275183_11 (sequence is synthesized)
ctctgagacgggccctcttggccccggggctaaatgcaccccctcggctgagctttagaaagctggtcctcctgggcccgcatgtgctgtgtgccccaccctctcccacactggaaagca

SEQ ID NO: 794273 - DNA, 120 bp, Artificial Sequence
  ENSG00000275183_12 (sequence is synthesized)
tggcacaagtgctgagccagaggctggaagccgaggggctgagtacactacagtctccagggcagctgcacccccacctcaccgtggccaaggtgccccatggttcccaggtccacctcc

SEQ ID NO: 794274 - DNA, 120 bp, Artificial Sequence
  ENSG00000275183_13 (sequence is synthesized)
ccaagctggagttcaccctcagccaggaagtggggtgccagcccctgcagacactctggctgtgccgtatagggaggacaggggggcctttccagcccctggctgagatccccctggagt

SEQ ID NO: 794275 - DNA, 120 bp, Artificial Sequence
  ENSG00000275183_14 (sequence is synthesized)
gacacccccagacctctggaggagacaatggatgcaaacagcccacacaggaaagacaaagcaggagcgtgcacgctctctctttctctctttaattttggtttctctcaagcttccaaa

SEQ ID NO: 794276 - DNA, 120 bp, Artificial Sequence
  ENSG00000275183_15 (sequence is synthesized)
tggtgctcagtgctccaaggaaaggaaggaaggaaggaaaaggaggggagaggaggggaaggggaggcagaggaggaacatctggaaaaaaagcagcctgacagtccagctgtttgcaaa

SEQ ID NO: 794277 - DNA, 120 bp, Artificial Sequence
  ENSG00000275183_16 (sequence is synthesized)
ctcatagcacatcctccagttacatggcagaagagggagggagggagggccaaaaagaaaagggagaggaggaagaaaaataacttaaataaacacacacacaaagaaaagagaaggcaa

SEQ ID NO: 794278 - DNA, 120 bp, Artificial Sequence
  ENSG00000275221_0 (sequence is synthesized)
atgtcgggacgtggcaagcagggcggcaaagctcgcgccaaggctaagacccgttcttcaagggcgggtcttcagttcccagtgggccgagtgcaccgactgctccgcaagggcaactac

SEQ ID NO: 794279 - DNA, 120 bp, Artificial Sequence
  ENSG00000275221_1 (sequence is synthesized)
ctggcggcggtgttggagtacctaaccgccgagatcctggaactggctggcaacgcggcccgcgacaacaagaagacccgcatcatcccgcgccacttgcagctggccatccgcaacgac

SEQ ID NO: 794280 - DNA, 120 bp, Artificial Sequence
  ENSG00000275221_2 (sequence is synthesized)
gaggagctcaacaagctgcttggtaaagtgaccatcgcccagggtggtgtcctgcccaatatccaggccgtgctgctgcctaagaaaactgagagccaccacaaggccaagggcaagtag

SEQ ID NO: 794281 - DNA, 120 bp, Artificial Sequence
  ENSG00000275243_0 (sequence is synthesized)
atgagcccaatattcacctgcatcacaatcctttgtctgctggctgcaggttctcctggtgaagaagtcgcccagactccaaaacatcttgtcagaggggaaggacagaaagcaaaatta

SEQ ID NO: 794282 - DNA, 120 bp, Artificial Sequence
  ENSG00000275243_1 (sequence is synthesized)
aacaggtatgcccaaggaaagattttcagctaagtgcctcccaaattcaccctgtagccttgagatccaggctacgaagcttgaggattcagcagtgtatttttgtgccagcagccaatc

SEQ ID NO: 794283 - DNA, 120 bp, Artificial Sequence
  ENSG00000275302_0 (sequence is synthesized)
agcacaggacacagctgggttctgaagcttctgagttctgcagcctcacctctgagaaaacctcttttccaccaataccatgaagctctgcgtgactgtcctgtctctcctcatgctagt

SEQ ID NO: 794284 - DNA, 120 bp, Artificial Sequence
  ENSG00000275302_1 (sequence is synthesized)
agctgccttctgctctccagcgctctcagcaccaatgggctcagaccctcccaccgcctgctgcttttcttacaccgcgaggaagcttcctcgcaactttgtggtagattactatgagac

SEQ ID NO: 794285 - DNA, 120 bp, Artificial Sequence
  ENSG00000275302_2 (sequence is synthesized)
tgctgatcccagtgaatcctgggtccaggagtacgtgtatgacctggaactgaactgagctgctcagagacaggaagtcttcagggaaggtcacctgagcccggatgcttctccatgaga

SEQ ID NO: 794286 - DNA, 120 bp, Artificial Sequence
  ENSG00000275302_3 (sequence is synthesized)
cacatctcctccatactcaggactcctctccgcagttcctgtcccttctcttaatttaatcttttttatgtgccgtgttattgtattaggtgtcatttccattatttatattagtttagc

SEQ ID NO: 794287 - DNA, 120 bp, Artificial Sequence
  ENSG00000275302_4 (sequence is synthesized)
caaaggataagtgtcccctatggggatggtccactgtcactgtttctctgctgttgcaaatacatggataacacatttgattctgtgtgttttcataataaaactttaaaataaaatgca

SEQ ID NO: 794288 - DNA, 120 bp, Artificial Sequence
  ENSG00000275302_5 (sequence is synthesized)
ctccagcgctctcagcaccaagtaagtctacttttgcagctgctatttcgagtcaaggtgtaggcagagtccttttttctagtcatggctggcaaacagtgggatctggggatgggacaa

SEQ ID NO: 794289 - DNA, 120 bp, Artificial Sequence
  ENSG00000275302_6 (sequence is synthesized)
aaggcagctaggaagattgccatgtagtctgctgctaaatgtagagtctagtagatattcaataacattcaagttcctattttcttaagaattagcaaccagcagaggaaaacgatgggc

SEQ ID NO: 794290 - DNA, 120 bp, Artificial Sequence
  ENSG00000275302_7 (sequence is synthesized)
tggaagtcagactgttgaattggctctgcctttaattatttgttcaagcaagcccctgtccctctctgtgccttggtttccccatctgtcatatgaagggagtgcgatgtgttctgagac

SEQ ID NO: 794291 - DNA, 120 bp, Artificial Sequence
  ENSG00000275302_8 (sequence is synthesized)
tgaatccagttccaatcttctagatttctttctcgttcttctctgaagatccactattcaaaataagactcctgctcatgttaggtgggaatggatatttggggttctggtagctccaca

SEQ ID NO: 794292 - DNA, 120 bp, Artificial Sequence
  ENSG00000275302_9 (sequence is synthesized)
gggatgctcaatgaagatacaaaattagaagtcaaaataaacagctcccacgggcagtgttgatctcaccctggcctttcctttcagtgggctcagaccctcccaccgcctgctgctttt

SEQ ID NO: 794293 - DNA, 120 bp, Artificial Sequence
  ENSG00000275302_10 (sequence is synthesized)
cttacaccgcgaggaagcttcctcgcaactttgtggtagattactatgagaccagcagcctctgctcccagccagctgtggtgtgagtatcaacccctgggctgccctgggaggcaaggg

SEQ ID NO: 794294 - DNA, 120 bp, Artificial Sequence
  ENSG00000275302_11 (sequence is synthesized)
gtgaggacacaggtcatgaactcacttttcaagtgctgaaggcggcagagtgggagccgagagagaagggggttgctggggaggaagttattcagaggacagggaagcaggggaaggcag

SEQ ID NO: 794295 - DNA, 120 bp, Artificial Sequence
  ENSG00000275302_12 (sequence is synthesized)
acaggtcccatgagatatggaccgattccttaaaccgtgctagaaagacatgtggaaaagtcactgccaggctggcagggaatggggagatctattcatattgattgcaatgccccttgg

SEQ ID NO: 794296 - DNA, 120 bp, Artificial Sequence
  ENSG00000275302_13 (sequence is synthesized)
ttcctaatctgggcaactcctggggcccacagctaaatccagtgggtggaagttacagggagtctgcttccagtgctgctccaggaaggatcccatccaccagagctgccccacatggac

SEQ ID NO: 794297 - DNA, 120 bp, Artificial Sequence
  ENSG00000275302_14 (sequence is synthesized)
catggtcaggcagaggaagatgcaaaggataaagccagatgacctcaaaggtctcatgagattctaatctgtccgctccttgttctacagattccaaaccaaaagaagcaagcaagtctg

SEQ ID NO: 794298 - DNA, 120 bp, Artificial Sequence
  ENSG00000275342_0 (sequence is synthesized)
cccgcggccgggcacgcaccgcgcgcagaccttctgcgaacaatgctccggccgggcggctggcggctcggagaccgacggaggggccgggggagcgcagcccagaggaagccgctctgt

SEQ ID NO: 794299 - DNA, 120 bp, Artificial Sequence
  ENSG00000275342_1 (sequence is synthesized)
aagccgctctgtgacccacctctgaatcccacaaaactgcaccagagagccgggcgcaagatgaaccagcaccctgtcggctcaagatgcaccagaccctctgcctgaaccccgagagcc

SEQ ID NO: 794300 - DNA, 120 bp, Artificial Sequence
  ENSG00000275342_2 (sequence is synthesized)
tgaaaatgtctgcgtgcagtgactttgtggagcacatctggaaacccgggtcctgcaagaactgcttctgcctgcggagcgaccaccagctggtggccggccctccccagcccagagcgg

SEQ ID NO: 794301 - DNA, 120 bp, Artificial Sequence
  ENSG00000275342_3 (sequence is synthesized)
gcagcctgccccctccaccgcgcctgcctcccaggcctgagaactgccgcctggaagatgaaggtgtgaacagctcaccttactccaagcccacaattgccgtgaagcccaccatgatga

SEQ ID NO: 794302 - DNA, 120 bp, Artificial Sequence
  ENSG00000275342_4 (sequence is synthesized)
gctccgaggcctctgatgtgtggacagaggccaacctgagtgccgaagtctcgcaggtcatctggagacgagcccctggcaagctccccctcccgaagcaggaggatgcccccgtcgtct

SEQ ID NO: 794303 - DNA, 120 bp, Artificial Sequence
  ENSG00000275342_5 (sequence is synthesized)
acctgggcagcttccgaggtgtacagaagcctgctggtccctctacctcccctgatggcaattctcgctgtcccccagcttacaccatggtcggcctgcacaaccttgagccccgcggcg

SEQ ID NO: 794304 - DNA, 120 bp, Artificial Sequence
  ENSG00000275342_6 (sequence is synthesized)
agaggaacattgccttccacccggtgagcttcccggaggagaaggctgtgcacaaagaaaaaccctcatttccttaccaagaccggccctccacccaggagagcttccgccagaaactgg

SEQ ID NO: 794305 - DNA, 120 bp, Artificial Sequence
  ENSG00000275342_7 (sequence is synthesized)
ctgcctttgctgggaccacatctggctgtcaccagggccctgggcccctgcgggaatccctgccctcggaggatgacagtgatcaaaggtgctcgccctccggggacagcgagggtggag

SEQ ID NO: 794306 - DNA, 120 bp, Artificial Sequence
  ENSG00000275342_8 (sequence is synthesized)
agtactgctccatcctggactgctgccctgggagccctgttgccaaggctgcctcccagactgcaggttcccggggcaggcatggtggcagggactgctcacccacgtgctgggagcagg

SEQ ID NO: 794307 - DNA, 120 bp, Artificial Sequence
  ENSG00000275342_9 (sequence is synthesized)
ggaagtgttccgggcccgcagagcaggagaagcggggcccgagcttccccaaggagtgctgtagccagggccccactgcccacccatcctgcctgggccccaagaaactgtccctcacct

SEQ ID NO: 794308 - DNA, 120 bp, Artificial Sequence
  ENSG00000275342_10 (sequence is synthesized)
cggaggctgccatttcttccgacggcctctcttgtggcagcggcagcggcagcggcagcggcgccagtagccccttcgtcccccacctcgagagtgattactgctccctcatgaaggaac

SEQ ID NO: 794309 - DNA, 120 bp, Artificial Sequence
  ENSG00000275342_11 (sequence is synthesized)
ctgccccagagaagcagcaggaccctggctgcccaggggtgacccctagcagatgccttgggctgacgggggagccccagcccccggcccacccccgggaggctacacagcctgaaccca

SEQ ID NO: 794310 - DNA, 120 bp, Artificial Sequence
  ENSG00000275342_12 (sequence is synthesized)
tctatgctgagagcaccaagaggaagaaggcagctccggtgccttccaagtcacaggccaagatagaacatgcagctgctgcccagggccaaggccaggtatgcacaggtaatgcctggg

SEQ ID NO: 794311 - DNA, 120 bp, Artificial Sequence
  ENSG00000275342_13 (sequence is synthesized)
cccagaaagcagcatctggctggggccgggacagcccagacccaactccccaggtgtcagccaccatcacagtcatggcggcccacccggaagaggaccatcggacgatctacctgagca

SEQ ID NO: 794312 - DNA, 120 bp, Artificial Sequence
  ENSG00000275342_14 (sequence is synthesized)
gccctgactctgcagtgggggtgcagtggccacgagggcctgtgagccagaactccgaggtaggtgaagaggagacttcggctgggcaggggctgagctccagggaaagccatgctcaca

SEQ ID NO: 794313 - DNA, 120 bp, Artificial Sequence
  ENSG00000275342_15 (sequence is synthesized)
gtgccagcgagagcaagcccaaggagaggcccgccattccccccaagttgtccaagagtagccctgtagggtccccggtgtcaccgtctgctggagggcccccagtgtcaccgctggctg

SEQ ID NO: 794314 - DNA, 120 bp, Artificial Sequence
  ENSG00000275342_16 (sequence is synthesized)
accttagtgatgggagctctggcggcagcagcattgggccccagcctccatcccaaggtcctgctgaccccgctccttcctgccggaccaacggtgtcgctatcagtgacccatccaggt

SEQ ID NO: 794315 - DNA, 120 bp, Artificial Sequence
  ENSG00000275342_17 (sequence is synthesized)
gtccccagcctgccgcctcgtcagcctcggaacagaggcggcccaggttccaggcaggcacctggagtcgtcagtgccggatagaggaagaagaggaggtggagcaggaattgctgagtc

SEQ ID NO: 794316 - DNA, 120 bp, Artificial Sequence
  ENSG00000275342_18 (sequence is synthesized)
acagctggggaagagagaccaaaaatggccccacggaccattcaaactccacgacctggcaccgtctccaccccacagatggctcctctgggcagaacagcaaagttgggaccgggatga

SEQ ID NO: 794317 - DNA, 120 bp, Artificial Sequence
  ENSG00000275342_19 (sequence is synthesized)
gcaaatccgcctcttttgcctttgagttccccaaggacagaagtgggattgagacattctcacctcctcctccgcctccaaagtcgcggcaccttctaaaaatgaacaagagcagctctg

SEQ ID NO: 794318 - DNA, 120 bp, Artificial Sequence
  ENSG00000275342_20 (sequence is synthesized)
ccttcaggggtgtccacgtcagcttcaccaccggctccacggacagcctggcctcagactctaggacctgcagcgatggaggtccctcgtctgagctggctcactcgcccaccaacagcg

SEQ ID NO: 794319 - DNA, 120 bp, Artificial Sequence
  ENSG00000275342_21 (sequence is synthesized)
ggaagaagctctttgctcccgttccgtttccttcaggctccactgaggacgtgtcccccagtggcccccagcagccccctccactcccccagaaaaagatagtgagccgggcagcctctt

SEQ ID NO: 794320 - DNA, 120 bp, Artificial Sequence
  ENSG00000275342_22 (sequence is synthesized)
caccggatggcttcttctggacccaaggctcccccaagcccggaacagcaagccccaagctgaacctaagccactcggaaaccaacgtccacgacgaatctcactttagctattcgttga

SEQ ID NO: 794321 - DNA, 120 bp, Artificial Sequence
  ENSG00000275342_23 (sequence is synthesized)
gccccgggaaccgccaccatcctgtcttctcctcttccgatcctctggagaaagctttcaaaggcagtggccactggcttccggcagcagggctggcgggcaacagaggcggctgcggga

SEQ ID NO: 794322 - DNA, 120 bp, Artificial Sequence
  ENSG00000275342_24 (sequence is synthesized)
gccctggcctccagtgcaaaggggccccctccgcctcatcctcccagctgagcgtgtccagtcaagcctccaccgggagcacccagcttcagctgcacggtctcctgagcaacatcagca

SEQ ID NO: 794323 - DNA, 120 bp, Artificial Sequence
  ENSG00000275342_25 (sequence is synthesized)
gcaaggagggcacctatgccaagctggggggactctacacccagtccctggcccgccttgtagccaaatgtgaggacctcttcatgggcggccagaaaaaggagctccacttcaatgaga

SEQ ID NO: 794324 - DNA, 120 bp, Artificial Sequence
  ENSG00000275342_26 (sequence is synthesized)
ataactggtcgctcttcaagctgacttgtaacaagccctgctgtgactcgggggatgccatttattactgtgccacctgctctgaggaccccggcagcacctatgctgtgaaaatctgca

SEQ ID NO: 794325 - DNA, 120 bp, Artificial Sequence
  ENSG00000275342_27 (sequence is synthesized)
aagcccctgagcccaaaacagtctcctactgcagcccgtccgtgcccgtgcactttaacatccagcaggactgcggccacttcgtcgcctcggtgccgtccagcatgctcagctcccccg

SEQ ID NO: 794326 - DNA, 120 bp, Artificial Sequence
  ENSG00000275342_28 (sequence is synthesized)
acgcgcccaaggaccctgtgcctgccctgcccacacacccccctgcccaggagcaggactgcgtggtggtcatcacccgagaggtgccacatcagaccgcctccgacttcgtgcgggact

SEQ ID NO: 794327 - DNA, 120 bp, Artificial Sequence
  ENSG00000275342_29 (sequence is synthesized)
cggcggccagccaccaggcggagcccgaggcgtacgagcggcgcgtgtgcttcctgcttctgcaactctgcaacgggctggagcacctgaaggagcacgggatcatccaccgggacctgt

SEQ ID NO: 794328 - DNA, 120 bp, Artificial Sequence
  ENSG00000275342_30 (sequence is synthesized)
gagcacctgaaggagcacgggatcatccaccgggacctgtgcctggagaacctgctgctggtgcactgcaccctccaggccggccccgggcccgcccccgcccccgccccggctcccgcc

SEQ ID NO: 794329 - DNA, 120 bp, Artificial Sequence
  ENSG00000275342_31 (sequence is synthesized)
ctgctggtggcactctcagccccgcagccggccccgcctccccggaagggccccgggagaagcagctgccccggctcatcatcagcaactttttgaaggccaagcagaagccgggcggca

SEQ ID NO: 794330 - DNA, 120 bp, Artificial Sequence
  ENSG00000275342_32 (sequence is synthesized)
ccccaaacctgcagcagaagaagagccaggcccggctggcccccgagatcgtgtctgcttcccagtaccgcaagttcgatgagttccagacaggcatcctcatctacgagctgctgcacc

SEQ ID NO: 794331 - DNA, 120 bp, Artificial Sequence
  ENSG00000275342_33 (sequence is synthesized)
aacccaacccgttcgaggtgcgcgcccagctgcgggagagagactaccggcaggaggacctgccgccgctgcccgcgctgtccctctactcacccggcctgcagcagctggcacatctgc

SEQ ID NO: 794332 - DNA, 120 bp, Artificial Sequence
  ENSG00000275342_34 (sequence is synthesized)
tactggaggccgaccccatcaagcgtatccgcatcggcgaggccaagcgcgtgctgcagtgcctgctgtgggggcctcggcgcgagctggtgcagcagccgggcacctcggaggaggcgc

SEQ ID NO: 794333 - DNA, 120 bp, Artificial Sequence
  ENSG00000275342_35 (sequence is synthesized)
tgtgcggcacgctgcacaactggatcgacatgaagcgggccctgatgatgatgaagtttgcggagaaggcggtggatcgcaggcggggcgtggagctggaggactggctttgctgccagt

SEQ ID NO: 794334 - DNA, 120 bp, Artificial Sequence
  ENSG00000275342_36 (sequence is synthesized)
acctggcgtctgcggagcccggggccctcttacagtcgctgaagctcctgcagcttctgtgagccaagccccagcctgcaccgtcgctgccccttccctgcctaaccctttcctgtctcg

SEQ ID NO: 794335 - DNA, 120 bp, Artificial Sequence
  ENSG00000275342_37 (sequence is synthesized)
ccttggaagcacccatgtctccctgggaaatggtacagatgactgggatacctggatgtaaaatatataaatatatatatagaaaatacatataccatatataaatatgaaagactaagg

SEQ ID NO: 794336 - DNA, 120 bp, Artificial Sequence
  ENSG00000275342_38 (sequence is synthesized)
atgctgttgcccgtccacactcgtctcctctctgcactaagtcctccctgttttcttctgtaattatacacatttccagttccatgcaacgtcctgaggacagttctgtgaactgaatgc

SEQ ID NO: 794337 - DNA, 120 bp, Artificial Sequence
  ENSG00000275342_39 (sequence is synthesized)
agcctggacactggcctcaataccttgtttaggatttcttcacccttttgtcaaattgttatttaaagaaaaaaaaaaaagaagaaaattccattaaaattttttttggttgagtcatga

SEQ ID NO: 794338 - DNA, 120 bp, Artificial Sequence
  ENSG00000275356_0 (sequence is synthesized)
gctccttcattttgagccaaatcagataggcatgtaaaaagattttctgttggtatagctggcactcttgtttcagtaggaggaccacgctgggtatccaacttgagagacgttaaagtg

SEQ ID NO: 794339 - DNA, 120 bp, Artificial Sequence
  ENSG00000275356_1 (sequence is synthesized)
aagcaggcagaaatccgcttctgagagagggcttcctgagagtgatggtgaaagttactggaagtaatgggagcagaaagggtttgtaccaaggctcctgaaatcacgcaggatgaagca

SEQ ID NO: 794340 - DNA, 120 bp, Artificial Sequence
  ENSG00000275356_2 (sequence is synthesized)
ttcaaattctatcaggctcgctctcaagttcttttgtgcggtgaagtcaagaatccgtacctgctcaccagcaacaaaaccacagtgaaggagcagaatgcctgtctgactcaccctgac

SEQ ID NO: 794341 - DNA, 120 bp, Artificial Sequence
  ENSG00000275356_3 (sequence is synthesized)
agatcagctatggcaggtctgctgttgtagaaaattcttcaccccagaggctttatctctcctgcagggaaggctcatgagcaaatgctgtcattagcaaccatgcattgttgaagacat

SEQ ID NO: 794342 - DNA, 120 bp, Artificial Sequence
  ENSG00000275356_4 (sequence is synthesized)
atagtgagaaaatatgtcaggtattgtttcaatgtaccaatgttagtagaaaatcctgaagaattttcgagatattaactgtagattaaaacaacctttaacctaaatcctgagaatttc

SEQ ID NO: 794343 - DNA, 120 bp, Artificial Sequence
  ENSG00000275379_0 (sequence is synthesized)
atggcacgaacaaagcaaacagctcgcaagtccaccggcggcaaagcgccgcgcaagcagctggccaccaaggcggctcgcaagagcgctccggccaccggtggcgtcaagaagccccac

SEQ ID NO: 794344 - DNA, 120 bp, Artificial Sequence
  ENSG00000275379_1 (sequence is synthesized)
tcgaccgagctgctaatccggaagctaccttttcagcgcttggtacgggagatcgcacaggactttaagaccgatctgcgcttccagagctcggcggtgatggcgctgcaggaggcttgc

SEQ ID NO: 794345 - DNA, 120 bp, Artificial Sequence
  ENSG00000275379_2 (sequence is synthesized)
gaggcctacctggtggggctatttgaggataccaacctgtgcgccattcacgccaaacgcgtcactattatgcctaaagacatccagcttgcgcgccgcatccgaggggagagggcataa

SEQ ID NO: 794346 - DNA, 120 bp, Artificial Sequence
  ENSG00000275385_0 (sequence is synthesized)
agaaggaggccaggagttgtgagtttccaagccccagctcactctgaccacttctctgcctgcccagcatcatgaagggccttgcagctgccctccttgtcctcgtctgcaccatggccc

SEQ ID NO: 794347 - DNA, 120 bp, Artificial Sequence
  ENSG00000275385_1 (sequence is synthesized)
tctgctcctgtgcacaagttggtaccaacaaagagctctgctgcctcgtctatacctcctggcagattccacaaaagttcatagttgactattctgaaaccagcccccagtgccccaagc

SEQ ID NO: 794348 - DNA, 120 bp, Artificial Sequence
  ENSG00000275385_2 (sequence is synthesized)
caggtgtcatcctcctaaccaagagaggccggcagatctgtgctgaccccaataagaagtgggtccagaaatacatcagcgacctgaagctgaatgcctgaggggcctggaagctgcgag

SEQ ID NO: 794349 - DNA, 120 bp, Artificial Sequence
  ENSG00000275385_3 (sequence is synthesized)
ggcccagtgaacttggtgggcccaggagggaacaggagcctgagccagggcaatggccctgccaccctggaggctacctcttctaagagtcccatctgctatgcccagccacattaacta

SEQ ID NO: 794350 - DNA, 120 bp, Artificial Sequence
  ENSG00000275385_4 (sequence is synthesized)
actttaatcttagtttatgcatcatatttcattttgaaattgatttctattgttgagctgcattatgaaattagtattttctctgacatctcatgacattgtctttatcatcctttcccc

SEQ ID NO: 794351 - DNA, 120 bp, Artificial Sequence
  ENSG00000275385_5 (sequence is synthesized)
tcttcgtacattcaatgcatggatcaatcagtgtgattagctttctcagcagacattgtgccatatgtatcaaatgacaaatctttattgaatggttttgctcagcaccaccttttaata

SEQ ID NO: 794352 - DNA, 120 bp, Artificial Sequence
  ENSG00000275385_6 (sequence is synthesized)
tattggcagtacttattatataaaaggtaaaccagcattctcactgtgacgactctgttgattttgtttcactaatcggaatcacagactgagaggaattctgggggaggagtagggaaa

SEQ ID NO: 794353 - DNA, 120 bp, Artificial Sequence
  ENSG00000275385_7 (sequence is synthesized)
tatgaaaaggggcagaaacagcaagatagggaccaagtacttctacagtcataccagacatttccctggagatactttcctgaaaagttgaaacagacaccattagtttataaaccatat

SEQ ID NO: 794354 - DNA, 120 bp, Artificial Sequence
  ENSG00000275385_8 (sequence is synthesized)
tgtaactgaaatgtgatagaaaaattttctacttaaatgaatatcaagatgacgctgcaatgcatatttacgcacacaagctcattttcataaatgaagctttcctcagaatgatggcta

SEQ ID NO: 794355 - DNA, 120 bp, Artificial Sequence
  ENSG00000275385_9 (sequence is synthesized)
acatctgttgaggtcttaccaagtgctgggttttgggctaagtacttatattagtaaaagtctagcaaatactgcccatagtctagcaaggactccttacctggaagttgctgaaagcct

SEQ ID NO: 794356 - DNA, 120 bp, Artificial Sequence
  ENSG00000275385_10 (sequence is synthesized)
tggtaatgttatctttgttctccactctgcttttggggaggatgttttccatgactatacgagatgaggcttggggctgggtggccagagttagcaaataaaaatacagaatggatacta

SEQ ID NO: 794357 - DNA, 120 bp, Artificial Sequence
  ENSG00000275395_0 (sequence is synthesized)
tgcccaccccacagccactatgaggcgtgttcctacggctgcccgctgtcctgtggagacctcccagtgcccgagggctgtgagtcggcctgccgtgaaggctgtgtctgcgatgctggc

SEQ ID NO: 794358 - DNA, 120 bp, Artificial Sequence
  ENSG00000275395_1 (sequence is synthesized)
ttcgtgctcagtggtgacacgtgtgtacctgtgggccagtgtggctgcctccacgatgaccgctactacccactgggccagaccttctaccctggccctgggtgtgattccctttgccgc

SEQ ID NO: 794359 - DNA, 120 bp, Artificial Sequence
  ENSG00000275395_2 (sequence is synthesized)
tgccgggagggcggtgaggtgtcctgtgagccctccagctgcggcccgcatgagacctgccggccatccggtggcagcttgggctgcgtggccgtgggctctaccacctgccaggcgtcg

SEQ ID NO: 794360 - DNA, 120 bp, Artificial Sequence
  ENSG00000275395_3 (sequence is synthesized)
ggagatccccactacaccaccttcgatggccaccgcttcgacttcatgggcacctgcgtgtatgtgctggctcagacctgcggcacccggcctggcctgcatcggtttgccgtcctgcag

SEQ ID NO: 794361 - DNA, 120 bp, Artificial Sequence
  ENSG00000275395_4 (sequence is synthesized)
gagaacgtggcctggggtaatgggcgagtcagtgtgaccagggtgatcacggtccaggtggcaaacttcaccctgcggctggagcagagacagtggaaggtcacggtgaacggtgtggac

SEQ ID NO: 794362 - DNA, 120 bp, Artificial Sequence
  ENSG00000275395_5 (sequence is synthesized)
atgaagctgcccgtggtgctggccaacggccagatccgtgcctcccagcatggttcagatgttgtgattgagaccgacttcggcctgcgtgtggcctacgaccttgtgtactatgtgcgg

SEQ ID NO: 794363 - DNA, 120 bp, Artificial Sequence
  ENSG00000275395_6 (sequence is synthesized)
gtcaccgtccctggaaactactaccagctgatgtgtggcctgtgtgggaactacaatggcgaccccaaggatgacttccagaagcccaatggctcgcaggcaggcaacgccaatgagttc

SEQ ID NO: 794364 - DNA, 120 bp, Artificial Sequence
  ENSG00000275395_7 (sequence is synthesized)
ggcaactcctgggaggaggtggtgtccgactctccctgcctgccgccgcccacctgcccgccggggagcgagggctgtatccccagcgaggagtgtcctcccgagctggagaagaagtat

SEQ ID NO: 794365 - DNA, 120 bp, Artificial Sequence
  ENSG00000275395_8 (sequence is synthesized)
cagaaggaggagttctgtgggctcctctccagccccacagggccactgtcctcctgccacaagctggtggatccccagggtcccttgaaagattgcatctttgatctctgcctgggtggt

SEQ ID NO: 794366 - DNA, 120 bp, Artificial Sequence
  ENSG00000275395_9 (sequence is synthesized)
gggaacctgagcattctctgcagcaacatccatgcctacgtgagtgcttgccaggtggctggaggccacgtggagccctggaggaatgaaactttctgtcccatggaatgccctcagaac

SEQ ID NO: 794367 - DNA, 120 bp, Artificial Sequence
  ENSG00000275395_10 (sequence is synthesized)
agtcactacgagctctgtgcggacacctgctccctgggctgctcggctctcagtgcccctctgcagtgcccagatgggtgtgctgagggctgccagtgtgactccggcttcctctacaac

SEQ ID NO: 794368 - DNA, 120 bp, Artificial Sequence
  ENSG00000275395_11 (sequence is synthesized)
ggccaagcctgcgtgcccatccagcaatgtggctgctaccacaatggtgcctactatgagccggagcagacagtcctcattgacaactgtcggcagcagtgcacgtgccatgcgggtaaa

SEQ ID NO: 794369 - DNA, 120 bp, Artificial Sequence
  ENSG00000275395_12 (sequence is synthesized)
gtcgtggtgtgccaggaacacagctgcaagccggggcaggtgtgccagccctccggaggcatcctgagctgcgtcaccaaagacccgtgccacggcgtgacatgccggccacaggagaca

SEQ ID NO: 794370 - DNA, 120 bp, Artificial Sequence
  ENSG00000275395_13 (sequence is synthesized)
tgcaaggagcagggtggccagggcgtgtgcctgcccaactatgaggccacgtgctggctgtggggcgacccacactaccactccttcgatggccggaagtttgacttccagggcacctgt

SEQ ID NO: 794371 - DNA, 120 bp, Artificial Sequence
  ENSG00000275395_14 (sequence is synthesized)
aactatgtgctggcaacaactggctgcccgggggtcagcacccagggcctgacacccttcaccgtcaccaccaagaaccagaaccggggcaaccctgctgtgtcctacgtgagagtcgtc

SEQ ID NO: 794372 - DNA, 120 bp, Artificial Sequence
  ENSG00000275395_15 (sequence is synthesized)
accgtggctgccctcggcaccaacatctccatccacaaggacgagatcggcaaagtccgggtgaacggtgtgctcacagccttgcctgtctctgtggccgacgggcggatttcagtgacc

SEQ ID NO: 794373 - DNA, 120 bp, Artificial Sequence
  ENSG00000275395_16 (sequence is synthesized)
cagggtgcatcgaaggcactgctggtggctgactttggactgcaagtcagctatgactggaactggcgggtagacgtgacgctgcccagcagctatcatggcgcagtgtgcgggctctgc

SEQ ID NO: 794374 - DNA, 120 bp, Artificial Sequence
  ENSG00000275395_17 (sequence is synthesized)
ggtaacatggaccgcaaccccaacaatgaccaggtcttccctaatggcacactggctccctccatacccatctggggcggcagctggcgagccccaggctgggacccactgtgttgggac

SEQ ID NO: 794375 - DNA, 120 bp, Artificial Sequence
  ENSG00000275395_18 (sequence is synthesized)
gaatgtcgggggtcctgcccaacgtgccctgaggaccggttggagcagtacgagggccctggcttctgcggacccctggcccccggcacagggggccctttcaccacctgccatgctcat

SEQ ID NO: 794376 - DNA, 120 bp, Artificial Sequence
  ENSG00000275395_19 (sequence is synthesized)
gtgccacctgagagcttcttcaagggctgtgttctggacgtctgcatgggtggtggggaccgtgacattctttgcaaggctctggcttcctatgtggccgcctgccaggctgctggggtt

SEQ ID NO: 794377 - DNA, 120 bp, Artificial Sequence
  ENSG00000275395_20 (sequence is synthesized)
gaagactggcgggcacaggttggctgtgagatcacctgcccagaaaacagccactatgaggtctgtggcccaccctgcccggccagctgtccgtcccctgcaccccttacgacgccagcc

SEQ ID NO: 794378 - DNA, 120 bp, Artificial Sequence
  ENSG00000275395_21 (sequence is synthesized)
gtatgtgagggcccctgtgtggagggctgccagtgcgacgcgggtttcgtgttaagtgctgaccgctgtgttcccctcaacaacggctgcggctgctgggccaatggcacctaccacgag

SEQ ID NO: 794379 - DNA, 120 bp, Artificial Sequence
  ENSG00000275395_22 (sequence is synthesized)
gcgggcagtgagttttgggctgatggcacctgctcccagtggtgtcgctgcgggcctgggggtggctcgctggtctgcacacctgccagctgtgggctgggtgaagtgtgtggcctcctg

SEQ ID NO: 794380 - DNA, 120 bp, Artificial Sequence
  ENSG00000275395_23 (sequence is synthesized)
ccatccggccagcacggctgccagcccgtcagcacagctgagtgccaggcgtggggtgacccccattacgtcactctggatgggcaccgattcgatttccaaggcacctgcgagtacctg

SEQ ID NO: 794381 - DNA, 120 bp, Artificial Sequence
  ENSG00000275395_24 (sequence is synthesized)
ctgagtgcaccctgccacggaccacccttgggggctgagaacttcactgtcactgtagccaatgagcaccggggcagccaggctgtcagctacacccgcagtgtcaccctgcaaatctac

SEQ ID NO: 794382 - DNA, 120 bp, Artificial Sequence
  ENSG00000275395_25 (sequence is synthesized)
aaccacagcctgacactgagtgcccgctggccccggaagctacaggtggacggcgtgttcgtcactctgcccttccagctggactcgctcctgcacgcacacctgagcggcgccgacgtg

SEQ ID NO: 794383 - DNA, 120 bp, Artificial Sequence
  ENSG00000275395_26 (sequence is synthesized)
gtggtgaccacaacctcagggctctcgctggctttcgatggggacagcttcgtgcgcctgcgcgtgccggcggcgtacgcgggctctctctgtggcttatgcgggaactacaaccaggac

SEQ ID NO: 794384 - DNA, 120 bp, Artificial Sequence
  ENSG00000275395_27 (sequence is synthesized)
cccgcagacgacctgaaggcggtgggcgggaagcccgccggatggcaggtgggcggcgcccagggctgcggggaatgtgtgtccaagccatgcccgtcgccgtgcaccccagagcagcaa

SEQ ID NO: 794385 - DNA, 120 bp, Artificial Sequence
  ENSG00000275395_28 (sequence is synthesized)
gagtccttcggcggcccggacgcctgcggcgtgatctccgccaccgacggcccgctggcgccctgccacggccttgtgccgcccgcgcagtacttccagggctgcttgctggacgcctgc

SEQ ID NO: 794386 - DNA, 120 bp, Artificial Sequence
  ENSG00000275395_29 (sequence is synthesized)
caagttcagggccatcctggaggcctctgtcctgcagtggccacctacgtggcagcctgtcaggccgctggggcccagctccgcgagtggaggcggccggacttctgtcccttccagtgc

SEQ ID NO: 794387 - DNA, 120 bp, Artificial Sequence
  ENSG00000275395_30 (sequence is synthesized)
cctgcccacagccactacgagctctgcggtgactcctgtcctgggagctgcccgagcctgtcggcacccgagggctgtgagtcggcctgccgtgaaggctgtgtctgcgatgctggcttc

SEQ ID NO: 794388 - DNA, 120 bp, Artificial Sequence
  ENSG00000275395_31 (sequence is synthesized)
gtgctcagtggtgacacgtgtgtacctgtgggccagtgtggctgcctccacgatgaccgctactacccactgggccagaccttctaccctggccctgggtgtgattccctttgccgctgc

SEQ ID NO: 794389 - DNA, 120 bp, Artificial Sequence
  ENSG00000275395_32 (sequence is synthesized)
cgggagggcggtgaggtgtcctgtgagccctccagctgcggcccgcatgagacctgccggccatccggtggcagcttgggctgcgtggccgtgggctctaccacctgccaggcgtcggga

SEQ ID NO: 794390 - DNA, 120 bp, Artificial Sequence
  ENSG00000275395_33 (sequence is synthesized)
gatccccactacaccaccttcgatggccaccgcttcgacttcatgggcacctgcgtgtatgtgctggctcagacctgcggcacccggcctggcctgcatcggtttgccgtcctgcaggag

SEQ ID NO: 794391 - DNA, 120 bp, Artificial Sequence
  ENSG00000275395_34 (sequence is synthesized)
aacgtggcctggggtaatgggcgagtcagtgtgaccagggtgatcacggtccaggtggcaaacttcaccctgcggctggagcagagacagtggaaggtcacggtgaacggtgtggacatg

SEQ ID NO: 794392 - DNA, 120 bp, Artificial Sequence
  ENSG00000275395_35 (sequence is synthesized)
aagctgcccgtggtgctggccaacggccagatccgtgcctcccagcatggttcagatgttgtgattgagaccgacttcggcctgcgtgtggcctacgaccttgtgtactatgtgcgggtc

SEQ ID NO: 794393 - DNA, 120 bp, Artificial Sequence
  ENSG00000275395_36 (sequence is synthesized)
accgtccctggaaactactaccagctgatgtgtggcctgtgtgggaactacaacggcgaccccaaggatgacttccagaagcccaatggctcgcaggcaggcaacgccaatgagttcggc

SEQ ID NO: 794394 - DNA, 120 bp, Artificial Sequence
  ENSG00000275395_37 (sequence is synthesized)
aactcctgggaggaggtggtgcccgactctccctgcctgccgccgcccacctgcccgccggggagcgcgggctgtatccccagcgacaagtgtcctcccgagctggagaagaagtatcag

SEQ ID NO: 794395 - DNA, 120 bp, Artificial Sequence
  ENSG00000275395_38 (sequence is synthesized)
aaggaggagttctgtgggctcctctccagccccacagggccactgtcctcctgccacaagctggtggatccccagggtcccttgaaagattgcatctttgatctctgcctgggtggtggg

SEQ ID NO: 794396 - DNA, 120 bp, Artificial Sequence
  ENSG00000275395_39 (sequence is synthesized)
aacctgagcattctctgcagcaacatccatgcctacgtgagtgcttgccaggcggctggaggccacgtggagccctggaggaatgaaactttctgtcccatggaatgccctcagaacagt

SEQ ID NO: 794397 - DNA, 120 bp, Artificial Sequence
  ENSG00000275395_40 (sequence is synthesized)
cactacgagctctgtgcggacacctgctccctgggctgctcggctctcagtgcccctctgcagtgcccagatgggtgtgctgagggctgccagtgtgactccggcttcctctacaacggc

SEQ ID NO: 794398 - DNA, 120 bp, Artificial Sequence
  ENSG00000275395_41 (sequence is synthesized)
ctgcagccatgggtgccctatggagctggtggatactctgggctggagcaaccctcctgtggggattgacccaggaggcttcagtggacctcaagaacactggcagagaggaattcctca

SEQ ID NO: 794399 - DNA, 120 bp, Artificial Sequence
  ENSG00000275395_42 (sequence is synthesized)
cagccttcctgcagaactatcagctggcctacagcaaggcctacccccgcctccttatctccagtctgtcagagagccccgcttcagtctccatcctcagccaggcagacaacacctcaa

SEQ ID NO: 794400 - DNA, 120 bp, Artificial Sequence
  ENSG00000275395_43 (sequence is synthesized)
agaaggtcacagtgaggcccggggagtcggtcatggtcaacatcagtgccaaggctgagatgataggcagcaagatcttccagcatgcggtggtgatccattctgactatgccatctctg

SEQ ID NO: 794401 - DNA, 120 bp, Artificial Sequence
  ENSG00000275395_44 (sequence is synthesized)
tgcaggcactaaatgccaagcctgacacagcggagctgacactgctgcggcccatccaggccctaggcaccgagtattttgtgctcacaccccccggcacctcagccaggaatgtcaagg

SEQ ID NO: 794402 - DNA, 120 bp, Artificial Sequence
  ENSG00000275395_45 (sequence is synthesized)
agtttgccgtggtggccggtgccgcaggtgcctcggtcagtgtcacgctgaaggggtcagtgacattcaatggcaagttctatccagcaggcgatgtcctaagagtgactctacagccct

SEQ ID NO: 794403 - DNA, 120 bp, Artificial Sequence
  ENSG00000275395_46 (sequence is synthesized)
acaatgtggcccagctacagagctcagtggatctctcggggtcaaaggtcacagctagtagccccgtggctgtcctctctggccacagctgtgcgcagaaacatacgacctgcaaccatg

SEQ ID NO: 794404 - DNA, 120 bp, Artificial Sequence
  ENSG00000275395_47 (sequence is synthesized)
tggttgagcagctgctacccacgtctgcctggggcacccactatgtagtacccacgctggcctcccaatctcgctatgatttggccttcgttgtggccagccaggccacaaagctgacct

SEQ ID NO: 794405 - DNA, 120 bp, Artificial Sequence
  ENSG00000275395_48 (sequence is synthesized)
acaaccatgggggtatcactggctcccgtgggctccaggcaggtgatgtggtagagtttgaggtccggccatcctggccactctacctgtctgcaaatgtgggcatccaggtcctgttgt

SEQ ID NO: 794406 - DNA, 120 bp, Artificial Sequence
  ENSG00000275395_49 (sequence is synthesized)
ttggcacaggtgccataaggaatgaagtgacttatgacccctacctggtcctgatcccagatgtggcggcctactgcccagcctatgtggtcaagagtgtaccaggctgtgagggcgtgg

SEQ ID NO: 794407 - DNA, 120 bp, Artificial Sequence
  ENSG00000275395_50 (sequence is synthesized)
ccctggtagtggcacagacgaaggctatcagcgggctgaccatagatgggcatgcagtgggggccaagctcacctgggaggctgtgccaggcagtgagttctcgtatgctgaagtggagc

SEQ ID NO: 794408 - DNA, 120 bp, Artificial Sequence
  ENSG00000275395_51 (sequence is synthesized)
tcggcacagctgacatgatccacacggccgaggccaccaccaacttgggactgctcaccttcgggctggccaaggctataggctacgcaacagctgctgattgcggccggactgtactgt

SEQ ID NO: 794409 - DNA, 120 bp, Artificial Sequence
  ENSG00000275395_52 (sequence is synthesized)
ccccagtggagccctcctgcgaaggcatgcagtgcgcagccgggcagcgctgccaggtggtaggcgggaaggccgggtgtgtggcggagtccaccgctgtctgccgcgcccagggcgacc

SEQ ID NO: 794410 - DNA, 120 bp, Artificial Sequence
  ENSG00000275395_53 (sequence is synthesized)
cccattacaccaccttcgacggccgtcgctacgacatgatgggcacctgttcgtacacgatggtggagctgtgcagcgaggacgacaccctgcccgccttcagcgtggaggccaagaacg

SEQ ID NO: 794411 - DNA, 120 bp, Artificial Sequence
  ENSG00000275395_54 (sequence is synthesized)
agcaccggggcagccgccgcgtctcctacgtgggcctcgtcactgtgcgcgcctacagccactctgtgtcgctgacccgcggtgaagttggcttcgtcctggttgacaaccagcgctcgc

SEQ ID NO: 794412 - DNA, 120 bp, Artificial Sequence
  ENSG00000275395_55 (sequence is synthesized)
gcctgccagtctccctgagtgagggtcgcctgcgtgtgtaccagagcggaccacgggccgtggtggagctggtctttgggctggtggtcacttatgactgggactgccagctggcactca

SEQ ID NO: 794413 - DNA, 120 bp, Artificial Sequence
  ENSG00000275395_56 (sequence is synthesized)
gcctgcctgcacgcttccaagaccaggtgtgcgggctgtgtggcaactataatggtgacccagcagacgacttcctcacgcctgacggggctctggctcctgacgctgtggagttcgcaa

SEQ ID NO: 794414 - DNA, 120 bp, Artificial Sequence
  ENSG00000275395_57 (sequence is synthesized)
gtagctggaagctggatgatggggactacctgtgtgaggatggctgccagaacaactgtcccgcctgcaccccaggccaggcccaacactatgagggcgaccgactctgtggcatgctga

SEQ ID NO: 794415 - DNA, 120 bp, Artificial Sequence
  ENSG00000275395_58 (sequence is synthesized)
ccaagctcgatggccccttcgctgtctgccatgacaccctggaccccaggcccttcctggagcagtgtgtatatgacctgtgtgtggtcggtggggagcggctcagcctgtgccgtggcc

SEQ ID NO: 794416 - DNA, 120 bp, Artificial Sequence
  ENSG00000275395_59 (sequence is synthesized)
tcagcgcctatgcccaggcctgtctggagcttggcatctcggttggggactggagatcaccagccaactgccccctgtcctgccctgccaacagccgctatgagctctgcggccctgctt

SEQ ID NO: 794417 - DNA, 120 bp, Artificial Sequence
  ENSG00000275395_60 (sequence is synthesized)
gacctcctgcaacggggctgcggcgccgtccaactgctccgggcgcccctgcgtggagggctgcgtgtgcctcccaggcttcgtggccagcggcggcgcctgcgtgccggcctcgtcgtg

SEQ ID NO: 794418 - DNA, 120 bp, Artificial Sequence
  ENSG00000275395_61 (sequence is synthesized)
cgtgtggctgcaccttccagggtctccagctcgctccgggccaggaagtgtgggcggacgagttgtgccaaaggcgctgcacctgcaacggcgccacccatcaggtcacctgccgcgaca

SEQ ID NO: 794419 - DNA, 120 bp, Artificial Sequence
  ENSG00000275395_62 (sequence is synthesized)
agcagagctgcccggcgggtgagcgctgcagcgtccagaacggcctcctgggctgctaccccgatcgcttcgggacctgccaggggtccggggacccacactatgtgagcttcgacggcc

SEQ ID NO: 794420 - DNA, 120 bp, Artificial Sequence
  ENSG00000275395_63 (sequence is synthesized)
ggcgcttcgacttcatgggcacctgcacgtacctgctggtcggctcatgcggccagaacgcagcgctgcctgccttccgggtgctggtggaaaacgagcatcggggcagccagactgtga

SEQ ID NO: 794421 - DNA, 120 bp, Artificial Sequence
  ENSG00000275395_64 (sequence is synthesized)
gctacacgcgcgccgtgcgggtggaggcccgcggggtgaaggtggccgtgcgccgggagtaccccgggcaagtgctggtggatgacgtccttcagtatctgcccttccaagcagcagatg

SEQ ID NO: 794422 - DNA, 120 bp, Artificial Sequence
  ENSG00000275395_65 (sequence is synthesized)
ggcaggtgcaggtgttccgacagggcagggatgccgtcgtgcgcacggactttggcctgactgtcacttatgactggaatgcacgagtgactgccaaggtgcccagcagctatgctgagg

SEQ ID NO: 794423 - DNA, 120 bp, Artificial Sequence
  ENSG00000275395_66 (sequence is synthesized)
ccctgtgtggactctgtgggaacttcaacggggacccagctgatgacctggctctgcggggtgggggtcaagctgccaatgcactggcctttgggaacagctggcaagaagagacgaggc

SEQ ID NO: 794424 - DNA, 120 bp, Artificial Sequence
  ENSG00000275395_67 (sequence is synthesized)
ccggctgtggagcaactgaaccgggtgactgtcccaagctggactccctggtggcccagcagctgcagagcaagaatgagtgtggaatccttgccgaccccaaggggcccttccgggagt

SEQ ID NO: 794425 - DNA, 120 bp, Artificial Sequence
  ENSG00000275395_68 (sequence is synthesized)
gccatagcaagctggacccccagggtgccgtgcgcgactgtgtctatgaccgctgcctgctgccaggccagtctgggccactgtgtgacgcactggccacctatgctgctgcatgccagg

SEQ ID NO: 794426 - DNA, 120 bp, Artificial Sequence
  ENSG00000275395_69 (sequence is synthesized)
gagcttcttcaagggctgtgttctggacgtctgcatgggtggtggggaccgtgacattctttgcaaggctctggcttcctacgtggccgcctgccaggccgctggggttgtcatcgaaga

SEQ ID NO: 794427 - DNA, 120 bp, Artificial Sequence
  ENSG00000275395_70 (sequence is synthesized)
agacgacctcaaggctgtgggcgggaagcccgctggatggcaggtgggcggggcccagggctgcggggaatgtgtgtccaagccatgcccgtcgccgtgcaccccagagcagcaggagtc

SEQ ID NO: 794428 - DNA, 120 bp, Artificial Sequence
  ENSG00000275395_71 (sequence is synthesized)
cttcggcggcccggacgcctgcggcgtgatctccgccaccgacggcccgctggcaccctgccacggccttgtgccgcccgcgcagtacttccagggctgcttgctggacgcctgccaagt

SEQ ID NO: 794429 - DNA, 120 bp, Artificial Sequence
  ENSG00000275395_72 (sequence is synthesized)
tcagggccatcctggaggcctctgtcctgcagtggctacctacgtggcagcctgtcaggccgctggggcccagctcggcgagtggaggcggccggacttctgtcccttgcagtgccctgc

SEQ ID NO: 794430 - DNA, 120 bp, Artificial Sequence
  ENSG00000275395_73 (sequence is synthesized)
ccacagccactatgagctctgcggtgactcctgccctgtgagctgcccgagcctctcagcacccgagggctgtgagtcggcctgccgtgaaggctgtgtctgcgatgctggcttcgtact

SEQ ID NO: 794431 - DNA, 120 bp, Artificial Sequence
  ENSG00000275395_74 (sequence is synthesized)
cagtggtgacacctgcgtacccgtgggccagtgtggctgcctccatgatggccgctactacccactgggcgaggtcttctacccgggccctgagtgtgagcggcgctgtgagtgtgggcc

SEQ ID NO: 794432 - DNA, 120 bp, Artificial Sequence
  ENSG00000275395_75 (sequence is synthesized)
aggtggccatgtcacctgccaggagggcgcagcctgtgggccccatgaggagtgccggttagaggatggtgtccaggcctgtcatgccacaggctgtggccgctgcctggccaacggggg

SEQ ID NO: 794433 - DNA, 120 bp, Artificial Sequence
  ENSG00000275395_76 (sequence is synthesized)
catccactacatcacccttgatggccgtgtctacgacctgcatggctcctgctcctatgtcttggcccaagtctgccacccaaagcctggggacgaggacttttccatcgtgcttgagaa

SEQ ID NO: 794434 - DNA, 120 bp, Artificial Sequence
  ENSG00000275395_77 (sequence is synthesized)
gaatgcagctggagatctccaacgcctcctggttactgtggctggccaggttgtgagcctagctcaggggcagcaggtcaccgtggacggcgaggctgtggccctgcctgtggctgtggg

SEQ ID NO: 794435 - DNA, 120 bp, Artificial Sequence
  ENSG00000275395_78 (sequence is synthesized)
ccgcgtgcgggtgaccgccgagggccgaaacatggttctgcagacgaccaaggggctgcggcttctctttgatggcgatgcccacctcctcatgtccatccccagccccttccgtggacg

SEQ ID NO: 794436 - DNA, 120 bp, Artificial Sequence
  ENSG00000275395_79 (sequence is synthesized)
gctctgtggcctctgtgggaacttcaatggcaactggagtgacgactttgtcctgcccaatggctcagcagcgtccagtgtggagaccttcggggctgcatggcgggcgcccggctcctc

SEQ ID NO: 794437 - DNA, 120 bp, Artificial Sequence
  ENSG00000275395_80 (sequence is synthesized)
caagggctgtggcgagggctgcgggccccaaggctgcccagtgtgcttggcagaggagactgcaccctatgagagcaacgaggcctgcgggcagctccggaacccccagggccccttcgc

SEQ ID NO: 794438 - DNA, 120 bp, Artificial Sequence
  ENSG00000275395_81 (sequence is synthesized)
gacctgccaggcggtgctgagtccctctgagtacttccgccaatgcgtatacgacctgtgcgcgcaaaagggtgacaaagccttcctgtgccgcagcctggcagcctacacggcggcctg

SEQ ID NO: 794439 - DNA, 120 bp, Artificial Sequence
  ENSG00000275395_82 (sequence is synthesized)
tcaggcagctggcgtggccgtgaagccctggaggacagacagcttctgcccgctccattgccccgcccacagccactactccatctgcactcgcacctgccagggatcctgtgcggctct

SEQ ID NO: 794440 - DNA, 120 bp, Artificial Sequence
  ENSG00000275395_83 (sequence is synthesized)
ctccggcctcacgggctgcaccacccgctgttttgagggctgtgagtgcgacgaccgcttcctgctttcccagggtgtctgcatccctgtccaagattgtggctgcacccataatggccg

SEQ ID NO: 794441 - DNA, 120 bp, Artificial Sequence
  ENSG00000275395_84 (sequence is synthesized)
atacttgccggtaaactcctccctgctgacctcagactgcagcgagcgctgttcctgttcctcaagctctggcctgacatgccaggcagctggctgcccaccaggccgtgtatgtgaggt

SEQ ID NO: 794442 - DNA, 120 bp, Artificial Sequence
  ENSG00000275395_85 (sequence is synthesized)
caaggctgaagcccggaactgctgggccacccgtggtctctgtgtcctgtctgtgggtgccaacctcaccacctttgatggggcccgtggtgccaccacctctcctggtgtctatgagct

SEQ ID NO: 794443 - DNA, 120 bp, Artificial Sequence
  ENSG00000275395_86 (sequence is synthesized)
ctcttcccgctgcccaggactacagaataccatcccctggtaccgtgtagttgccgaagtccagatctgccatggcaaaacggaggctgtgggccaggtccacatcttcttccaggatgg

SEQ ID NO: 794444 - DNA, 120 bp, Artificial Sequence
  ENSG00000275395_87 (sequence is synthesized)
gatggtgacgttgactccaaacaagggtgtgtgggtgaatggtctccgagtggatctcccagctgagaagttagcatctgtgtccgtgagtcgtacacctgatggctccctgctagtccg

SEQ ID NO: 794445 - DNA, 120 bp, Artificial Sequence
  ENSG00000275395_88 (sequence is synthesized)
ccagaaggcaggggtccaggtgtggcttggagccaatgggaaggtggctgtgattgtcagcaatgaccatgctgggaaactgtgtggggcctgtggaaactttgacggggaccagaccaa

SEQ ID NO: 794446 - DNA, 120 bp, Artificial Sequence
  ENSG00000275395_89 (sequence is synthesized)
tgattggcatgactcccaggagaagccagcgatggagaaatggagagcgcaggacttctccccatgttatggctgatcagtcatccaccaggaacgaagatttcctgaagaagacctggt

SEQ ID NO: 794447 - DNA, 120 bp, Artificial Sequence
  ENSG00000275395_90 (sequence is synthesized)
ccctctggaggttgcagtggctgaaggatgcatcatgtgctcctaccctgctctaccgcttttctgggtcacagaggccaaatgtgagagcattgaataaatatcttaagctaagctgca

SEQ ID NO: 794448 - DNA, 120 bp, Artificial Sequence
  ENSG00000275395_91 (sequence is synthesized)
aaactgtttgaactcgggcaagtggctccgggggcgatcattgcttattaatggctgcagcaagcggtaaacaaaggatagctggaggcttgttacttcatcgagacctgtattcgtttc

SEQ ID NO: 794449 - DNA, 120 bp, Artificial Sequence
  ENSG00000275410_0 (sequence is synthesized)
agaagttttctgactcctttcggaggagcctccgggaccccggggagtaacaggtgtctggaggctgaagggtggaggggttcctggatttggggtttgcttgtgaaactcccctccacc

SEQ ID NO: 794450 - DNA, 120 bp, Artificial Sequence
  ENSG00000275410_1 (sequence is synthesized)
ctcctctctcgcacccacccaccccctcacccccttctttttccgtccttggaaaatggtgtccaagctcacgtcgctccagcaagaactcctgagcgccctgctgagctccggggtcac

SEQ ID NO: 794451 - DNA, 120 bp, Artificial Sequence
  ENSG00000275410_2 (sequence is synthesized)
caaggaggtgctggttcaggccttggaggagttgctgccatccccgaacttcggggtgaagctggagacgctgcccctgtcccctggcagcggggccgagcccgacaccaagccggtctt

SEQ ID NO: 794452 - DNA, 120 bp, Artificial Sequence
  ENSG00000275410_3 (sequence is synthesized)
ccatactctcaccaacggccacgccaagggccgcttgtccggcgacgagggctccgaggacggcgacgactatgacacacctcccatcctcaaggagctgcaggcgctcaacaccgagga

SEQ ID NO: 794453 - DNA, 120 bp, Artificial Sequence
  ENSG00000275410_4 (sequence is synthesized)
ggcggcggagcagcgggcggaggtggaccggatgctcagtgaggacccttggagggctgctaaaatgatcaagggttacatgcagcaacacaacatcccccagagggaggtggtcgatgt

SEQ ID NO: 794454 - DNA, 120 bp, Artificial Sequence
  ENSG00000275410_5 (sequence is synthesized)
caccggcctgaaccagtcgcacctctcccagcatctcaacaagggcacccctatgaagacccagaagcgtgccgctctgtacacctggtacgtcagaaagcaacgagagatcctccgaca

SEQ ID NO: 794455 - DNA, 120 bp, Artificial Sequence
  ENSG00000275410_6 (sequence is synthesized)
attcaaccagacagtccagagttctggaaatatgacagacaaaagcagtcaggatcagctgctgtttctctttccagagttcagtcaacagagccatgggcctgggcagtccgatgatgc

SEQ ID NO: 794456 - DNA, 120 bp, Artificial Sequence
  ENSG00000275410_7 (sequence is synthesized)
ctgctctgagcccaccaacaagaagatgcgccgcaaccggttcaaatgggggcccgcgtcccagcaaatcttgtaccaggcctacgatcggcaaaagaaccccagcaaggaagagagaga

SEQ ID NO: 794457 - DNA, 120 bp, Artificial Sequence
  ENSG00000275410_8 (sequence is synthesized)
ggccttagtggaggaatgcaacagggcagaatgtttgcagcgaggggtgtccccctccaaagcccacggcctgggctccaacttggtcactgaggtccgtgtctacaactggtttgcaaa

SEQ ID NO: 794458 - DNA, 120 bp, Artificial Sequence
  ENSG00000275410_9 (sequence is synthesized)
ccgcaggaaggaggaggcattccggcaaaagctggccatggacgcctatagctccaaccagactcacagcctgaaccctctgctctcccacggctccccccaccaccagcccagctcctc

SEQ ID NO: 794459 - DNA, 120 bp, Artificial Sequence
  ENSG00000275410_10 (sequence is synthesized)
tcctccaaacaagctgtcaggagtgcgctacagccagcagggaaacaatgagatcacttcctcctcaacaatcagtcaccatggcaacagcgccatggtgaccagccagtcggttttaca

SEQ ID NO: 794460 - DNA, 120 bp, Artificial Sequence
  ENSG00000275410_11 (sequence is synthesized)
ccacaatctcctctcacctgatggtaaaatgatctcagtctcaggaggaggtttgcccccagtcagcaccttgacgaatatccacagcctctcccaccataatccccagcaatctcaaaa

SEQ ID NO: 794461 - DNA, 120 bp, Artificial Sequence
  ENSG00000275410_12 (sequence is synthesized)
cctcatcatgacacccctctctggagtcatggcaattgcacaaagcctcaacacctcccaagcacagagtgtccctgtcatcaacagtgtggccggcagcctggcagccctgcagcccgt

SEQ ID NO: 794462 - DNA, 120 bp, Artificial Sequence
  ENSG00000275410_13 (sequence is synthesized)
ccagttctcccagcagctgcacagccctcaccagcagcccctcatgcagcagagcccaggcagccacatggcccagcagcccttcatggcagctgtgactcagctgcagaactcacacat

SEQ ID NO: 794463 - DNA, 120 bp, Artificial Sequence
  ENSG00000275410_14 (sequence is synthesized)
gtacgcacacaagcaggaacccccccagtattcccacacctcccggtttccatctgcaatggtggtcacagataccagcagcatcagtacactcaccaacatgtcttcaagtaaacagtg

SEQ ID NO: 794464 - DNA, 120 bp, Artificial Sequence
  ENSG00000275410_15 (sequence is synthesized)
tcctctacaagcctggtgatgcccacacaccacttacttcgtgcgcaacaacaaggaccctgttttccacaccatcaccctctgggcagctgtcatggaaaagcccagtgacctgaccag

SEQ ID NO: 794465 - DNA, 120 bp, Artificial Sequence
  ENSG00000275410_16 (sequence is synthesized)
cacctgcgagaggtccctgcttacctgacggacgtcctgctggcacctcagacaatccactctcaggaggcgcagcccgaagcccagtttcccttctatgcagtattgccacaatgcctc

SEQ ID NO: 794466 - DNA, 120 bp, Artificial Sequence
  ENSG00000275410_17 (sequence is synthesized)
tcccacgatgtcaaggactcctgtctgtcctggaggtgggagacaaggaacctccgaagaggaagcaagaaagccgtactgtctatgttgtgatccttcatcgaacaaactgatgcgaaa

SEQ ID NO: 794467 - DNA, 120 bp, Artificial Sequence
  ENSG00000275410_18 (sequence is synthesized)
acttgaatctgttactgaaatgaggagagaaggacatgtgctattgaactgagccaaacacactgtaaatatccacagactccctcccctgcccccatcccaaatgatcttgagatttct

SEQ ID NO: 794468 - DNA, 120 bp, Artificial Sequence
  ENSG00000275410_19 (sequence is synthesized)
tttaaagaagtaaatttgtccaatggctgtaaactataaactactgtaattaagtgcaatttcccctctgtgtcctctcccctctgccctgtatataatactaaagtgtctattagtttt

SEQ ID NO: 794469 - DNA, 120 bp, Artificial Sequence
  ENSG00000275410_20 (sequence is synthesized)
ctttgtaaaggtcagagtcaaaatttcaaaagtgatctgtcccctctcccctcatggagaaacatcctaagtgggaagtgaagccccttgtcctctcccgcgggcctggacacttatggg

SEQ ID NO: 794470 - DNA, 120 bp, Artificial Sequence
  ENSG00000275410_21 (sequence is synthesized)
gacagcataccttggactgactaccagctaactccagtctcctgacattaagacacacctctggatccctggaggggctgaatgtagtgtgtcagagtaacatgccagcttcctgtgggc

SEQ ID NO: 794471 - DNA, 120 bp, Artificial Sequence
  ENSG00000275410_22 (sequence is synthesized)
caggagctcagccgtgcactccctaagaaaccccagggcagggaaactggctgtttgatagcagaagaaaaagttgcagtctcagaaagccttccattaaaacaatttattttatcacta

SEQ ID NO: 794472 - DNA, 120 bp, Artificial Sequence
  ENSG00000275410_23 (sequence is synthesized)
tccaaacaagctgtcaggtaagcaaaggttgggcctcactgcctcggcaacccaaccatcctggttcttgccacggatcttatctggtttaagggttttcagaggagcaaacgcttttga

SEQ ID NO: 794473 - DNA, 120 bp, Artificial Sequence
  ENSG00000275410_24 (sequence is synthesized)
gatgatcctagggccgctctctcattgccagaatatactcccctggaaataatgtgtggctctgatcagtttcctccaactcctggttcagccattgccctgtgagggctcactcggctt

SEQ ID NO: 794474 - DNA, 120 bp, Artificial Sequence
  ENSG00000275410_25 (sequence is synthesized)
ccagggagccctttaccctatttgtctccttccctcttcttctccctgtgtggctgctgactcagcggtcattctacactgaggaggctgccttatgggtgggccagatccaaaccgcag

SEQ ID NO: 794475 - DNA, 120 bp, Artificial Sequence
  ENSG00000275410_26 (sequence is synthesized)
gcaaacgggtcgtgatggcgtggcaaccctcactgtgttggaggatggcactccggccacctcctccatctctggccatatcctgcccctcgctcggtccggctgcctcaggagaagctc

SEQ ID NO: 794476 - DNA, 120 bp, Artificial Sequence
  ENSG00000275410_27 (sequence is synthesized)
agtagcctttggggacggccactctgttggtggcctctgcttgttggcttccgtgtgtcatcagggttggtgggggtcagtcacttgaaatctttgcagcaatgagttgggaaaaactga

SEQ ID NO: 794477 - DNA, 120 bp, Artificial Sequence
  ENSG00000275410_28 (sequence is synthesized)
ccgagtacctgctccatcatgcttgattgagtgctcctgtgtgctgggccctggcctggattagaatgcctctgctgtgggctttgggtttgtcaggatggaatcctacagcctccttgg

SEQ ID NO: 794478 - DNA, 120 bp, Artificial Sequence
  ENSG00000275410_29 (sequence is synthesized)
gggaaagcacacctcatgctgagcgctgtgttaggcacaggctgggatggagcacttcttctggtccttcattcttctggcaaagctggcttcctagaatggatgtgctcactggggtct

SEQ ID NO: 794479 - DNA, 120 bp, Artificial Sequence
  ENSG00000275410_30 (sequence is synthesized)
gtgtggtgcccatgaggacaaagtgtagcagcctcctgcctgctccaagaaaagggcttgcgaaaggaaagccaaacactgtttctaactcaggggtgattctgaaacctgttggctccc

SEQ ID NO: 794480 - DNA, 120 bp, Artificial Sequence
  ENSG00000275410_31 (sequence is synthesized)
ctcacctgtcggttgcccttctgatgagaaaggcctgagggctgggggctgacccaagtgttgaggggaccaaagccaccaagacaggctcggagccatcagctgggtggtgtacaagca

SEQ ID NO: 794481 - DNA, 120 bp, Artificial Sequence
  ENSG00000275410_32 (sequence is synthesized)
tttgttccatgcctgctgtgccctcccatagcactgcctcttccagggcctctgggagcctgacagtgcccagcatgaaggtggggccagtgctgggggtttctgtaggtcccactccca

SEQ ID NO: 794482 - DNA, 120 bp, Artificial Sequence
  ENSG00000275410_33 (sequence is synthesized)
agaggagagaggctcagccacacaggaagaaagtcttggttacttaagaggcagagaagcccctaggcaaagactggcctgattgcagagtaacttcgcccctttagggaaattcaaagc

SEQ ID NO: 794483 - DNA, 120 bp, Artificial Sequence
  ENSG00000275410_34 (sequence is synthesized)
agggttctgagggttgtggcaaatggcacatggctggcactgagcagtaccagtgtgcttgcccaccacagcgatccacggagctgaagctgggagctacagggggcgtggttggggcaa

SEQ ID NO: 794484 - DNA, 120 bp, Artificial Sequence
  ENSG00000275410_35 (sequence is synthesized)
ggggcattactgggaagacaatggccattgtgttgggacctgtgatctccacaccaaagtcagggagcctggaagccaaacaaaggcccagcagccttctgacaagcaagggctgtgctg

SEQ ID NO: 794485 - DNA, 120 bp, Artificial Sequence
  ENSG00000275410_36 (sequence is synthesized)
aggtcaccacggggtcgttggtttaggcatcctgtgtgctgacaggagacccagagagctagggctggagggacagggagcagggcagaaaacacagcctgtgtactcctctgactggag

SEQ ID NO: 794486 - DNA, 120 bp, Artificial Sequence
  ENSG00000275410_37 (sequence is synthesized)
tctaggaagggcgtgtcccatgggaagtggatactctggggtgcccctgaagtctggatctttctaaaaatcttgtaatgttagaatttggagggaatttgaagaaaggaactgaggccc

SEQ ID NO: 794487 - DNA, 120 bp, Artificial Sequence
  ENSG00000275410_38 (sequence is synthesized)
agaaagaggcagtgatttgccaaagtgacacagagcaatggtagcaaaacaaggactagagctcaggcctgctggttcccactccatactttcccacagcactacgatgtgttgaatgct

SEQ ID NO: 794488 - DNA, 120 bp, Artificial Sequence
  ENSG00000275410_39 (sequence is synthesized)
taccaagtcctgggaatatgctagtgatgtacgagctgcgcgtcctgccctctgggaggttactgtctggtaggaaggatatcgggtcactgtcgagtccccagaaccagctgcagatgg

SEQ ID NO: 794489 - DNA, 120 bp, Artificial Sequence
  ENSG00000275410_40 (sequence is synthesized)
aggttttgtttgggggctttgtggatctttctgcggtgtaatagatcctattactgtttctggagcaacagttatgggacactgaatattatcagtggctgcctttcttctgtctttttt

SEQ ID NO: 794490 - DNA, 120 bp, Artificial Sequence
  ENSG00000275410_41 (sequence is synthesized)
ttttttttttttttttgagagacagggtctacctctgtcacccgagctagagtgcagtggtgcagtcttggctcactacagcctcgaactcctggtctcaagcagtcctcctgtcttagc

SEQ ID NO: 794491 - DNA, 120 bp, Artificial Sequence
  ENSG00000275410_42 (sequence is synthesized)
caaagtgctgggattacagttgtgagattgtgcccagcccttctgctttaattttcactctgggctcctcaacatggtccttgtcccaagcccagggactggcttctctttctctgagtg

SEQ ID NO: 794492 - DNA, 120 bp, Artificial Sequence
  ENSG00000275410_43 (sequence is synthesized)
agtgtagttatgtatctgggttctaaccagtaaggttataactgtggctaattcacataacttctctgagtctgaatttcctgcctacaaaatggagaaataggaccttccacacagggt

SEQ ID NO: 794493 - DNA, 120 bp, Artificial Sequence
  ENSG00000275410_44 (sequence is synthesized)
gcatgtgaggatgaaaggagtgaatgtataaagacacctttcccgataacccatactaccctcattatgactcttaacattagagagggctaaacaagggcagtgagaagactggcaggc

SEQ ID NO: 794494 - DNA, 120 bp, Artificial Sequence
  ENSG00000275410_45 (sequence is synthesized)
agcagaaatcattttctttttgatctcacacaccagggcattccccctaagaggcagtgagatgtagcctggccctggaactagaaacagaggtggctgctgtgctagtgcctgagatgc

SEQ ID NO: 794495 - DNA, 120 bp, Artificial Sequence
  ENSG00000275410_46 (sequence is synthesized)
acgatgctggggtcaaagacttgtgtccccacctcaggctgccaggatggcgtgtgtgccgtgacagggctcccgagtcatgcactcaggcagacagcaggctggagcccagcattcagg

SEQ ID NO: 794496 - DNA, 120 bp, Artificial Sequence
  ENSG00000275410_47 (sequence is synthesized)
ggtggcttctgtctgtagagccgcatggcactcttcccacctcagtgcccacagccaaggtagggtcactaaccaagccagaaacgtaactgtgtgcagaataccgaaaaaaaaaaaaaa

SEQ ID NO: 794497 - DNA, 120 bp, Artificial Sequence
  ENSG00000275464_0 (sequence is synthesized)
acacgtgcgacagccgtgatgaagttcgcttaccggttttcaaatttgctgggtacggtgtaccggcgtgggaacctaaattttacctgcaatggaaattcagttatcagtcccgtgggc

SEQ ID NO: 794498 - DNA, 120 bp, Artificial Sequence; identical to SEQ ID NO: 774741
  ENSG00000275464_1 (sequence is synthesized)

SEQ ID NO: 794499 - DNA, 120 bp, Artificial Sequence; identical to SEQ ID NO: 774742
  ENSG00000275464_2 (sequence is synthesized)

SEQ ID NO: 794500 - DNA, 120 bp, Artificial Sequence; identical to SEQ ID NO: 774743
  ENSG00000275464_3 (sequence is synthesized)

SEQ ID NO: 794501 - DNA, 120 bp, Artificial Sequence; identical to SEQ ID NO: 774744
  ENSG00000275464_4 (sequence is synthesized)

SEQ ID NO: 794502 - DNA, 120 bp, Artificial Sequence; identical to SEQ ID NO: 774745
  ENSG00000275464_5 (sequence is synthesized)

SEQ ID NO: 794503 - DNA, 120 bp, Artificial Sequence; identical to SEQ ID NO: 774746
  ENSG00000275464_6 (sequence is synthesized)

SEQ ID NO: 794504 - DNA, 120 bp, Artificial Sequence; identical to SEQ ID NO: 774747
  ENSG00000275464_7 (sequence is synthesized)

SEQ ID NO: 794505 - DNA, 120 bp, Artificial Sequence
  ENSG00000275464_8 (sequence is synthesized)
catgagctgccagagtttaacctcatccactccctgagcatctcagatcagagcatcgcctcagtggccatcaatagctcgggggactggattgcttttggctgttcaggcctgggccag

SEQ ID NO: 794506 - DNA, 120 bp, Artificial Sequence; identical to SEQ ID NO: 774749
  ENSG00000275464_9 (sequence is synthesized)

SEQ ID NO: 794507 - DNA, 120 bp, Artificial Sequence; identical to SEQ ID NO: 774750
  ENSG00000275464_10 (sequence is synthesized)

SEQ ID NO: 794508 - DNA, 120 bp, Artificial Sequence; identical to SEQ ID NO: 774751
  ENSG00000275464_11 (sequence is synthesized)

SEQ ID NO: 794509 - DNA, 120 bp, Artificial Sequence; identical to SEQ ID NO: 774752
  ENSG00000275464_12 (sequence is synthesized)

SEQ ID NO: 794510 - DNA, 120 bp, Artificial Sequence; identical to SEQ ID NO: 774753
  ENSG00000275464_13 (sequence is synthesized)

SEQ ID NO: 794511 - DNA, 120 bp, Artificial Sequence; identical to SEQ ID NO: 774754
  ENSG00000275464_14 (sequence is synthesized)

SEQ ID NO: 794512 - DNA, 120 bp, Artificial Sequence
  ENSG00000275464_15 (sequence is synthesized)
ccacagcatcctggcgggaggcatgtccaagttcgtgtgcatctaccacgtccgtgagcagattctcatgaagaggttcgagatctcttgcaacctgtctctggacgccatggaggaatt

SEQ ID NO: 794513 - DNA, 120 bp, Artificial Sequence; identical to SEQ ID NO: 774756
  ENSG00000275464_16 (sequence is synthesized)

SEQ ID NO: 794514 - DNA, 120 bp, Artificial Sequence; identical to SEQ ID NO: 774757
  ENSG00000275464_17 (sequence is synthesized)

SEQ ID NO: 794515 - DNA, 120 bp, Artificial Sequence; identical to SEQ ID NO: 774758
  ENSG00000275464_18 (sequence is synthesized)

SEQ ID NO: 794516 - DNA, 120 bp, Artificial Sequence; identical to SEQ ID NO: 774759
  ENSG00000275464_19 (sequence is synthesized)

SEQ ID NO: 794517 - DNA, 120 bp, Artificial Sequence; identical to SEQ ID NO: 774760
  ENSG00000275464_20 (sequence is synthesized)

SEQ ID NO: 794518 - DNA, 120 bp, Artificial Sequence; identical to SEQ ID NO: 774761
  ENSG00000275464_21 (sequence is synthesized)

SEQ ID NO: 794519 - DNA, 120 bp, Artificial Sequence; identical to SEQ ID NO: 774762
  ENSG00000275464_22 (sequence is synthesized)

SEQ ID NO: 794520 - DNA, 120 bp, Artificial Sequence; identical to SEQ ID NO: 774763
  ENSG00000275464_23 (sequence is synthesized)

SEQ ID NO: 794521 - DNA, 120 bp, Artificial Sequence; identical to SEQ ID NO: 774764
  ENSG00000275464_24 (sequence is synthesized)

SEQ ID NO: 794522 - DNA, 120 bp, Artificial Sequence
  ENSG00000275464_25 (sequence is synthesized)
gagacttatttatatttttaacataaaggtttgataaagaacttagggattaaaaaaaagatggagttttctaacgtgaggatgaagtctacacttcagattaaaaagggttatgttgta

SEQ ID NO: 794523 - DNA, 120 bp, Artificial Sequence
  ENSG00000275464_26 (sequence is synthesized)
ggtcaggatcacatgaaggcagagttgcccgcagctatggtgtctccgtcacccgggtgccccagcctgggcccctccttgctgcagttgcttagcgcctgctgtgtgcagggctctgaa

SEQ ID NO: 794524 - DNA, 120 bp, Artificial Sequence; identical to SEQ ID NO: 774767
  ENSG00000275464_27 (sequence is synthesized)

SEQ ID NO: 794525 - DNA, 120 bp, Artificial Sequence
  ENSG00000275464_28 (sequence is synthesized)
tcctggccagtgcctcctgggacaagacggtgcgcctatgggacatgtttgacagctggaggaccaaggagacgctggccctgacctctgatggtgagcacgaggcagcaggcaggagca

SEQ ID NO: 794526 - DNA, 120 bp, Artificial Sequence; identical to SEQ ID NO: 774769
  ENSG00000275464_29 (sequence is synthesized)

SEQ ID NO: 794527 - DNA, 120 bp, Artificial Sequence; identical to SEQ ID NO: 774770
  ENSG00000275464_30 (sequence is synthesized)

SEQ ID NO: 794528 - DNA, 120 bp, Artificial Sequence; identical to SEQ ID NO: 774771
  ENSG00000275464_31 (sequence is synthesized)

SEQ ID NO: 794529 - DNA, 120 bp, Artificial Sequence; identical to SEQ ID NO: 774772
  ENSG00000275464_32 (sequence is synthesized)

SEQ ID NO: 794530 - DNA, 120 bp, Artificial Sequence; identical to SEQ ID NO: 774773
  ENSG00000275464_33 (sequence is synthesized)

SEQ ID NO: 794531 - DNA, 120 bp, Artificial Sequence; identical to SEQ ID NO: 774774
  ENSG00000275464_34 (sequence is synthesized)

SEQ ID NO: 794532 - DNA, 120 bp, Artificial Sequence; identical to SEQ ID NO: 774775
  ENSG00000275464_35 (sequence is synthesized)

SEQ ID NO: 794533 - DNA, 120 bp, Artificial Sequence; identical to SEQ ID NO: 774776
  ENSG00000275464_36 (sequence is synthesized)

SEQ ID NO: 794534 - DNA, 120 bp, Artificial Sequence
  ENSG00000275464_37 (sequence is synthesized)
ttctgcactcctggctccatggggccttgggcacagttgtggtgcttgtcctgtatctaagtgcacgggcccctcacctgccccagcagagtccggccgtgaagccagcgcctgcctcag

SEQ ID NO: 794535 - DNA, 120 bp, Artificial Sequence; identical to SEQ ID NO: 774778
  ENSG00000275464_38 (sequence is synthesized)

SEQ ID NO: 794536 - DNA, 120 bp, Artificial Sequence; identical to SEQ ID NO: 774779
  ENSG00000275464_39 (sequence is synthesized)

SEQ ID NO: 794537 - DNA, 120 bp, Artificial Sequence; identical to SEQ ID NO: 774780
  ENSG00000275464_40 (sequence is synthesized)

SEQ ID NO: 794538 - DNA, 120 bp, Artificial Sequence; identical to SEQ ID NO: 774781
  ENSG00000275464_41 (sequence is synthesized)

SEQ ID NO: 794539 - DNA, 120 bp, Artificial Sequence
  ENSG00000275464_42 (sequence is synthesized)
cagggaaggagtgaacgaagagggtgctggtaggccctgcccgatggcttcctgcccagggtcctgtgtacaaggctctgccttcactgtccccactggtgcctgcccttccccctcagc

SEQ ID NO: 794540 - DNA, 120 bp, Artificial Sequence; identical to SEQ ID NO: 774783
  ENSG00000275464_43 (sequence is synthesized)

SEQ ID NO: 794541 - DNA, 120 bp, Artificial Sequence; identical to SEQ ID NO: 774784
  ENSG00000275464_44 (sequence is synthesized)

SEQ ID NO: 794542 - DNA, 120 bp, Artificial Sequence; identical to SEQ ID NO: 774785
  ENSG00000275464_45 (sequence is synthesized)

SEQ ID NO: 794543 - DNA, 120 bp, Artificial Sequence; identical to SEQ ID NO: 774786
  ENSG00000275464_46 (sequence is synthesized)

SEQ ID NO: 794544 - DNA, 120 bp, Artificial Sequence; identical to SEQ ID NO: 774787
  ENSG00000275464_47 (sequence is synthesized)

SEQ ID NO: 794545 - DNA, 120 bp, Artificial Sequence; identical to SEQ ID NO: 774788
  ENSG00000275464_48 (sequence is synthesized)

SEQ ID NO: 794546 - DNA, 120 bp, Artificial Sequence; identical to SEQ ID NO: 774789
  ENSG00000275464_49 (sequence is synthesized)

SEQ ID NO: 794547 - DNA, 120 bp, Artificial Sequence; identical to SEQ ID NO: 774790
  ENSG00000275464_50 (sequence is synthesized)

SEQ ID NO: 794548 - DNA, 120 bp, Artificial Sequence; identical to SEQ ID NO: 774791
  ENSG00000275464_51 (sequence is synthesized)

SEQ ID NO: 794549 - DNA, 120 bp, Artificial Sequence
  ENSG00000275464_52 (sequence is synthesized)
gcctgcggagctgaagacgcctgagctagacagaagacttggctggctcccggcgtcaagagaggacgacgcatgcgtgtacatatttgcttatatgtgcatccctgggagagtaacttc

SEQ ID NO: 794550 - DNA, 120 bp, Artificial Sequence; identical to SEQ ID NO: 774793
  ENSG00000275464_53 (sequence is synthesized)

SEQ ID NO: 794551 - DNA, 120 bp, Artificial Sequence
  ENSG00000275464_54 (sequence is synthesized)
agtgctccctgtcacttgttcaggagggacggggtccagaaaggagagggaaggaccagggctgagctacaacgtgacttggggaggttttgagggcgggggtgccatcagggtcacctt

SEQ ID NO: 794552 - DNA, 120 bp, Artificial Sequence
  ENSG00000275464_55 (sequence is synthesized)
cgtctgctgatggggaccgagggttccttagaggaggaagcagcaggggatgatgggattcgggtgtgcctggcggccatgccgcgcctcccgcacctcctctgcctcccatgggcactg

SEQ ID NO: 794553 - DNA, 120 bp, Artificial Sequence
  ENSG00000275464_56 (sequence is synthesized)
gcttttgcggcgtctggccgcgtgggggtcgccggctgtctgcgcgcccatggcctcggggacgcggggctgtggtggggctcctgggagagctgggacggaggcgccgacggcttctcg

SEQ ID NO: 794554 - DNA, 120 bp, Artificial Sequence
  ENSG00000275464_57 (sequence is synthesized)
aacagcagggacccggggcccgggactggtccctaacgagcgagcgtccaggtgagcggaagggcggggaacccaggtgtgagctctgtttcccgaggccggagggaattcctgaggcgg

SEQ ID NO: 794555 - DNA, 120 bp, Artificial Sequence
  ENSG00000275489_0 (sequence is synthesized)
aggggtgtccccatctagggtcctcatcccccaccagaaaggccctccgaggctacggtggttgggatggcgtacctgagcgagtgtcgcctgcgactggagaaaggctttatcttggac

SEQ ID NO: 794556 - DNA, 120 bp, Artificial Sequence
  ENSG00000275489_1 (sequence is synthesized)
ggggtggctgtgagcaccgctgcccgcgcttatgggcgctctaggcccaagctgtggtcggcgattccgccctacaacgcgcagcaggactaccacgcccgcagctacttccagagtcac

SEQ ID NO: 794557 - DNA, 120 bp, Artificial Sequence
  ENSG00000275489_2 (sequence is synthesized)
ggatcatggcggtacaggaagggatggctggatagtagactacatccacatcttcgggcaaggacaaagatacctcaacaggagaaattgggcagggacagggcattctctccagcaggt

SEQ ID NO: 794558 - DNA, 120 bp, Artificial Sequence
  ENSG00000275489_3 (sequence is synthesized)
gactgggcatgaccactacaatgctgatctgaaaccgatcgatgggttcaatggaaggtttggctaccgcaggaacactccagccctccgtcagagcacgtccgtcttcggagaggtcac

SEQ ID NO: 794559 - DNA, 120 bp, Artificial Sequence
  ENSG00000275489_4 (sequence is synthesized)
ccacttccctctgttctaacagcatcttttcccttcatagccatcgacctgaatttctaagacaaatgtttagatgaactcttagtgttattttacgttaaaaaaattaatttgtgtctc

SEQ ID NO: 794560 - DNA, 120 bp, Artificial Sequence
  ENSG00000275493_0 (sequence is synthesized)
atggggatgagatttcagttgctccgggagcgacgcatctcctcacgtgggccaggctttcaggcacccaaagcggatccgccgcggcgaaaacgattgacagccggcctcatgacccag

SEQ ID NO: 794561 - DNA, 64 bp, Artificial Sequence
  ENSG00000275493_1 (sequence is synthesized)
cacagggcacattcggccaaagacacacacgcacacgggcatacacacacaaacctgggagaca

SEQ ID NO: 794562 - DNA, 120 bp, Artificial Sequence
  ENSG00000275520_0 (sequence is synthesized)
gtgtcttcaacgaagtcctgtcggtccctaccggcacatcacacactcctggaagcatgatcttcactcccttccttccacctgctgacctgtctgtctttcagaatgtgaaagggctgc

SEQ ID NO: 794563 - DNA, 120 bp, Artificial Sequence
  ENSG00000275520_1 (sequence is synthesized)
ggacccatccggtggcacaggcttgcccagggaacctgctcttctgcgagggtcttggaggagccggttccagagagccctggcatgtttcaccaagtgtttcaggggaggataccgggc

SEQ ID NO: 794564 - DNA, 120 bp, Artificial Sequence
  ENSG00000275520_2 (sequence is synthesized)
actcggaatctgagaccaccggagccacagacacagagccatgaacggtgaccaagccccttctgctgctccatgcccctgctcgccgcagtgtcccagtcaccaggcctgaaataaatg

SEQ ID NO: 794565 - DNA, 120 bp, Artificial Sequence; identical to SEQ ID NO: 790422
  ENSG00000275520_3 (sequence is synthesized)

SEQ ID NO: 794566 - DNA, 120 bp, Artificial Sequence
  ENSG00000275572_0 (sequence is synthesized)
atggcagtgcagtctaaagccttctgtgcgggcggcctggcccccggctggaagctgctggtccagggacatgctgactctggagaggacaggttcgagactaacttcttgttggagacg

SEQ ID NO: 794567 - DNA, 120 bp, Artificial Sequence
  ENSG00000275572_1 (sequence is synthesized)
cttcccgctggccccgggggagccctttgagatagaggtcagctgggacgcggagcacttccacgtctacgccccggagcacaaggtgctacagttcccatgccgtcagaggccgctggg

SEQ ID NO: 794568 - DNA, 120 bp, Artificial Sequence
  ENSG00000275572_2 (sequence is synthesized)
cgccaccaccagggtgcgcgtgctgagtgaccactgcctggcccaggtggagctggccaagaggggcctgagctggggggaccggggctactgagtgacacctgcaccccaggagccagc

SEQ ID NO: 794569 - DNA, 120 bp, Artificial Sequence
  ENSG00000275572_3 (sequence is synthesized)
ggcagccaagcctcccctcctaagcctgcccttggccggatgggagggttcgagtccctggaggggcccgtgatcccggaggaagagccgggccagggtccctgcctagaccttgccgtc

SEQ ID NO: 794570 - DNA, 120 bp, Artificial Sequence
  ENSG00000275572_4 (sequence is synthesized)
ggtgacaggggcctgggtggggcctgggctaggcagggaaggcccgtgggggaacagggggccagtgggcagcgggttcacggtggacgcttacaggtcagtgggccagggcaaggtctg

SEQ ID NO: 794571 - DNA, 120 bp, Artificial Sequence
  ENSG00000275572_5 (sequence is synthesized)
ggtggcctccctggcctcagtttccctacgtgtgcagtaggtacccaccaccctggctaccagccaccccatcttgggagaaaggaggggactttgggctgggggctccaagccaaggga

SEQ ID NO: 794572 - DNA, 120 bp, Artificial Sequence
  ENSG00000275591_0 (sequence is synthesized)
gcgggcgcaggctgcggggtcggcacggaagatgcacgcgaggctcctggggctctcggccctgctgcaggcggccgagcagagcgcgcgcctttacaccgtggcttactacttcaccac

SEQ ID NO: 794573 - DNA, 120 bp, Artificial Sequence
  ENSG00000275591_1 (sequence is synthesized)
aggacggcttctgtgggggtggctggcccttgctgtcctcctgcccgggttcttggtccaggccctgagctacctgtggttccgagcagacgggcatccagggcattgctccttgatgat

SEQ ID NO: 794574 - DNA, 120 bp, Artificial Sequence
  ENSG00000275591_2 (sequence is synthesized)
gctgcacctcctacagcttggtgtttggaagcggcactgggacgctgcactgaccagtctgcagaaggaactggaggctccccaccgaggctggctgcagctgcaggaggccgacctgtc

SEQ ID NO: 794575 - DNA, 120 bp, Artificial Sequence
  ENSG00000275591_3 (sequence is synthesized)
ggcccttcgactcttggaggccctgctgcagactgggccccacctgctgcttcagacatatgtttttctagcctcagacttcacagatattgtgccaggggtgagcaccctgttttcctg

SEQ ID NO: 794576 - DNA, 120 bp, Artificial Sequence
  ENSG00000275591_4 (sequence is synthesized)
gtcctcactctcctgggcactggtgtcctacactcgcttcatgggcttcatgaagccaggccacctggccatgccatgggccgccctcttctgccagcagctctggaggatgggcatgtt

SEQ ID NO: 794577 - DNA, 120 bp, Artificial Sequence
  ENSG00000275591_5 (sequence is synthesized)
gggaacccgcgtgctgagtctggttctgttctacaaagcctaccacttttgggtttttgtggttgcaggtgcccactggctggtgatgacattctggcttgtcgcccagcagagtgacat

SEQ ID NO: 794578 - DNA, 120 bp, Artificial Sequence
  ENSG00000275591_6 (sequence is synthesized)
catcgacagcacctgccactggaggctgttcaacctgctcgtgggggccgtgtacatcctctgctacctcagcttctgggacagcccttctagaaataggatggtcacgttctacatggt

SEQ ID NO: 794579 - DNA, 120 bp, Artificial Sequence
  ENSG00000275591_7 (sequence is synthesized)
catgctgttggagaacatcatcctgttgctgttggccaccgactttctccagggggcatcgtggaccagcctgcagaccatagctggggtcctgtctggatttctgattggcagtgtctc

SEQ ID NO: 794580 - DNA, 120 bp, Artificial Sequence
  ENSG00000275591_8 (sequence is synthesized)
actggtaatttattacagcctgctgcatccaaaatccacagacatctggcagggctgcctaaggaagtcctgtggcattgcaggaggtgataaaacagagagaagagattctccccgggc

SEQ ID NO: 794581 - DNA, 120 bp, Artificial Sequence
  ENSG00000275591_9 (sequence is synthesized)
cacagatctagctgggaagagaaccgagagctcaggctcatgccaaggggcaagttatgaaccaaccattttagggaagccccctacccctgagcaggtccccccagaggctgggctggg

SEQ ID NO: 794582 - DNA, 120 bp, Artificial Sequence
  ENSG00000275591_10 (sequence is synthesized)
gacccaggttgctgtggaggactctttcctcagtcatcaccactggctgtgggtgaaacttgccctaaaaacaggaaatgtgtctaagatcaatgccgcctttggagataacagtcctgc

SEQ ID NO: 794583 - DNA, 120 bp, Artificial Sequence
  ENSG00000275591_11 (sequence is synthesized)
ctattgtccacctgcatgggggttgagtcaacaggactacctgcagagaaaggccttgtctgcccagcaagagctcccatcctcatcccgtgacccctcaaccttagagaacagctctgc

SEQ ID NO: 794584 - DNA, 120 bp, Artificial Sequence
  ENSG00000275591_12 (sequence is synthesized)
gtttgaaggtgtccctaaagcagaggccgacccattggaaacctcaagttacgtatcttttgccagcgatcagcaggatgaagcacctacccagaacccagcagccacgcagggggaggg

SEQ ID NO: 794585 - DNA, 120 bp, Artificial Sequence
  ENSG00000275591_13 (sequence is synthesized)
caccccaaaggaaggagctgacgctgtttctgggacacaggggaaggggacaggtgggcagcagagaggaggggaaggacagcagagttccacgttgtacttcagcgccactgcagaagt

SEQ ID NO: 794586 - DNA, 120 bp, Artificial Sequence
  ENSG00000275591_14 (sequence is synthesized)
ggccacatcctcacaacaagaaggcagcccagctactctgcaaacggcccactctggaaggaggctgggaaagagcagccctgcccagcctgcatcgccccacccagtgggcttggcgcc

SEQ ID NO: 794587 - DNA, 120 bp, Artificial Sequence
  ENSG00000275591_15 (sequence is synthesized)
cttccccgacaccatggccgacattagccccatcctaggcacaggcccatgtagaggcttctgccccagtgcaggcttccctggaagaaccctcagtatctcagagctagaggagccgct

SEQ ID NO: 794588 - DNA, 120 bp, Artificial Sequence
  ENSG00000275591_16 (sequence is synthesized)
ggagcccaaaagggagctaagtcaccatgcagctgttggtgtgtgggtgtcattgccacagctgaggactgcccatgagccctgcctcacgtccacccctaagtctgagtctatccaaac

SEQ ID NO: 794589 - DNA, 120 bp, Artificial Sequence
  ENSG00000275591_17 (sequence is synthesized)
ggactgcagctgcagggaacagatgaagcaagagccgagttttttcatctgaccacagtcatggtgggataagacaacaggctgacaaaccaagctggccatttggtaccgtgagaaagg

SEQ ID NO: 794590 - DNA, 120 bp, Artificial Sequence
  ENSG00000275591_18 (sequence is synthesized)
aaatcccacttctgacacctgtgtccttgggcacatcactgtcacctctgaatctccatctgcatccctgaaaaatgaagaaacagggctggatgattttgcaggtccaatgcaaacatc

SEQ ID NO: 794591 - DNA, 120 bp, Artificial Sequence
  ENSG00000275591_19 (sequence is synthesized)
gtaggttcccttattttatctttttgctgtggcttctaggaaacacaaaggtaaaacccagattcctattttatttgaggttcttgttacaattagctttgcctcacatttagcggttat

SEQ ID NO: 794592 - DNA, 120 bp, Artificial Sequence
  ENSG00000275591_20 (sequence is synthesized)
gaatctcattttaatatattctaactgtattatgttatgaaatctcttggtaagataatttgcatgctttctgggagtaggtaaggcctgtgtgcttgtaataactaacataactgaaag

SEQ ID NO: 794593 - DNA, 120 bp, Artificial Sequence
  ENSG00000275591_21 (sequence is synthesized)
tgcaaatgtcattctaagattcccatatcttttggttaggggacaatattagagcttttaaaaaggaagggtagactcacttagctcagcctcacccatgctaagggcacatgcacacat

SEQ ID NO: 794594 - DNA, 120 bp, Artificial Sequence
  ENSG00000275591_22 (sequence is synthesized)
tttctgcaattcactctcagaccatcagcatcctcctggccagctgcataaatgtatttttctgtgaaatgtgctgctcccctttgtgcaggctggccagccaagagttcccttccagct

SEQ ID NO: 794595 - DNA, 120 bp, Artificial Sequence
  ENSG00000275591_23 (sequence is synthesized)
cccactgctgctttccaccccatctcctttatgtccaagctttgttcccacttccattcaatgtgagacactatccatgatttaagcccatccaaaaagaagggaggaaacgtccattcc

SEQ ID NO: 794596 - DNA, 120 bp, Artificial Sequence
  ENSG00000275591_24 (sequence is synthesized)
tctcgcactctccttctctctgactcctccactctaaagtgttctttgtggctaggtatttccataatttctttaagccttcctttgtagctgattaaggaagtctagtcataaactatc

SEQ ID NO: 794597 - DNA, 120 bp, Artificial Sequence
  ENSG00000275591_25 (sequence is synthesized)
aaagagaaaggcacacagagagctggatgctatttagggatgggtatttttgttttgttttgtttcatttcatttgtttatttgttgagacagggcctctctgtcacccaggctggagtg

SEQ ID NO: 794598 - DNA, 120 bp, Artificial Sequence
  ENSG00000275591_26 (sequence is synthesized)
catggctcactgcagcctcaacctccagggcttaagcaatcctctcacctcagcctctcgagtagctgggactactggcaggtgggcaccatgcctggctacttttttgtattttttgta

SEQ ID NO: 794599 - DNA, 86 bp, Artificial Sequence
  ENSG00000275591_27 (sequence is synthesized)
ggactactggcaggtgggcaccatgcctggctacttttttgtattttttgtagagacaggttcttgccaggtggcttgcccatctc

SEQ ID NO: 794600 - DNA, 120 bp, Artificial Sequence
  ENSG00000275591_28 (sequence is synthesized)
gcccagccagaatgggtagtttttattctctccaaacacttttggattagggtacaatattagagctctaaaaaggaatagtagaataacttagctcagcctgacacatactaagggcac

SEQ ID NO: 794601 - DNA, 120 bp, Artificial Sequence
  ENSG00000275591_29 (sequence is synthesized)
ctgcagacactttctgcaataagctctcagaccatcagcatcctcctggccagccacataagccaatcggggatgcagacaagtggctacaaactttccatacaacaggtgaagataacg

SEQ ID NO: 794602 - DNA, 87 bp, Artificial Sequence
  ENSG00000275591_30 (sequence is synthesized)
aagtggctacaaactttccatacaacaggtgaagataacgagactttgggtcggatgcaggggctcacaccgagatcacttgaggcc

SEQ ID NO: 794603 - DNA, 89 bp, Artificial Sequence
  ENSG00000275591_31 (sequence is synthesized)
cccatcactactaaaaatacataaattatcctgctcgagaggctgaggcacgagaatcagttgaactgggaggcagaggttgcagtgag

SEQ ID NO: 794604 - DNA, 120 bp, Artificial Sequence
  ENSG00000275591_32 (sequence is synthesized)
gcctgggcgacagagcaagactctatctaaaaaaaaagcttgttaatagaacaaaatcattcatagttccattcactgtgctatcccagcatctcagtccttcctccatgcagtctctcg

SEQ ID NO: 794605 - DNA, 120 bp, Artificial Sequence
  ENSG00000275591_33 (sequence is synthesized)
ttcctccatgcagtctctcgcccagccaggtgagagcatgagcacttccctgagtcctcaccagccctccccatttgtcctccaagactccactcaaacatctcctcttggtgccttcct

SEQ ID NO: 794606 - DNA, 120 bp, Artificial Sequence
  ENSG00000275591_34 (sequence is synthesized)
gggccctccccagctccagctctcccagacctaccctctgtccccaggttgtattccactgccctttgccctctggtgacctcttcctaaacttgaagccctgcctccctgaaggctaat

SEQ ID NO: 794607 - DNA, 120 bp, Artificial Sequence
  ENSG00000275591_35 (sequence is synthesized)
taagggttgcagtcctccttctgggctaactccaaggtccagcagagtgtccagcaaaagtaggcgttagagcattcaacagcatgaattcactaacgagcggggctgtgggcatgaatt

SEQ ID NO: 794608 - DNA, 120 bp, Artificial Sequence
  ENSG00000275591_36 (sequence is synthesized)
tcagcttgagtgcatatcctggatcaacggcatttgtgttatggggtaaaagtaagggtgggatatggggaatttgctcattcttttcaaactttctagcccttgaatagcctggaaagc

SEQ ID NO: 794609 - DNA, 120 bp, Artificial Sequence
  ENSG00000275591_37 (sequence is synthesized)
tagaaatactcttcattcattcattcatttaaggaatattagttgagtatgacaggcactgagtatgcagaaatcaaggcatgtacttgctgttcgaggccctgtggaccaacatcggct

SEQ ID NO: 794610 - DNA, 120 bp, Artificial Sequence
  ENSG00000275591_38 (sequence is synthesized)
tctcagatggcttcctcacttcatgcctccagaaagcatattgcccggtgatgaaaaggatcagaaaatatacactatatttattagagaagactaataaatggacacttaattcaaaaa

SEQ ID NO: 794611 - DNA, 120 bp, Artificial Sequence
  ENSG00000275591_39 (sequence is synthesized)
ggaagcgcccacaaatccacttgtaaatgcagcatgagatgacagaagaaggcctatctcatccttagcatgcaccttggtttagcaatttttctttagtgaaagttcaaggttgtcaaa

SEQ ID NO: 794612 - DNA, 120 bp, Artificial Sequence
  ENSG00000275663_0 (sequence is synthesized)
atgtctgttcggggcaaggccggaaaaggccttgggaaaggcggtgccaagtgccatcgcaaggtactgagcgataatattcagggcattaccaagtgcactatccggcgcttggcccgg

SEQ ID NO: 794613 - DNA, 120 bp, Artificial Sequence
  ENSG00000275663_1 (sequence is synthesized)
aaggtgttcctggaaaatgtgatctggtacgccgtgaccaacacggagcacgccaagcgcaagacggtcaccgccatggccgtggtctacgtgctcaaacgccagggaagaaccctgtaa

SEQ ID NO: 794614 - DNA, 120 bp, Artificial Sequence
  ENSG00000275700_0 (sequence is synthesized)
gcgcctcccggaagtggccggtccagagctgtggggtggcctccgcgcggtctctggcggagtcggggaatcggatcaaggcgagaggatccggcagggaaggagcttcggggccggggg

SEQ ID NO: 794615 - DNA, 120 bp, Artificial Sequence
  ENSG00000275700_1 (sequence is synthesized)
ttgggccgcacatttacgtgcgcgaagcggagtggaccgggagctggtgacgatggcggggccgcagcccctggcgctgcaactggaacagttgttgaacccgcgaccaagcgaggcgga

SEQ ID NO: 794616 - DNA, 120 bp, Artificial Sequence
  ENSG00000275700_2 (sequence is synthesized)
ccctgaagcggaccccgaggaagccactgctgccagggtgattgacaggtttgatgaaggggaagatggggaaggtgatttcctagtagtgggtagcattagaaaactggcatcagcctc

SEQ ID NO: 794617 - DNA, 120 bp, Artificial Sequence
  ENSG00000275700_3 (sequence is synthesized)
cctcttggacacggacaaaaggtattgcggcaaaaccacctctagaaaagcatggaatgaagaccattgggagcagactctgccaggatcgtctgatgaggaaatatctgatgaggaagg

SEQ ID NO: 794618 - DNA, 120 bp, Artificial Sequence
  ENSG00000275700_4 (sequence is synthesized)
gtctggagatgaagattcagagggactgggtctggaggaatatgatgaggacgacctgggtgctgctgaggaacaggagtgtggtgatcacagggagagcaagaagagcagaagccactc

SEQ ID NO: 794619 - DNA, 120 bp, Artificial Sequence
  ENSG00000275700_5 (sequence is synthesized)
tgcaaaaacaccgggcttcagtgtccagagtatcagtgactttgagaaatttaccaagggaatggatgaccttgggagcagtgaggaggaggaagacgaagagagtggcatggaagaagg

SEQ ID NO: 794620 - DNA, 120 bp, Artificial Sequence
  ENSG00000275700_6 (sequence is synthesized)
ggatgacgcggaagactcccaaggcgagagtgaggaagacagggctggagatagaaacagtgaggatgatggtgtggtgatgaccttctctagtgtcaaagtttctgaggaagtggagaa

SEQ ID NO: 794621 - DNA, 120 bp, Artificial Sequence
  ENSG00000275700_7 (sequence is synthesized)
aggaagagccgtgaagaaccagatagcactgtgggaccagctcttggaaggaaggatcaaactacaaaaagctctgttgaccaccaaccagcttcctcaaccagatgttttcccattgtt

SEQ ID NO: 794622 - DNA, 120 bp, Artificial Sequence
  ENSG00000275700_8 (sequence is synthesized)
ttttccagtgccctgaaaaatagtcacaaggcacttaaagcattgttgaggtcattggtaggtcttcaggaagagttgcttttccagtacccagacactagatatctagtagatgggaca

SEQ ID NO: 794623 - DNA, 120 bp, Artificial Sequence
  ENSG00000275700_9 (sequence is synthesized)
aagcccaatgcgggaagtgaggagatttctagtgaagatgatgagctggtagaagagaagaagcagcaacgaagaagggtccctgcaaagaggaagctggagatggaggactatcccagc

SEQ ID NO: 794624 - DNA, 120 bp, Artificial Sequence
  ENSG00000275700_10 (sequence is synthesized)
ttcatggcaaagcgctttgccgactttacagtctacaggaaccgcacacttcagaaatggcacgataagaccaaactggcttctggaaaactggggaagggttttggtgcctttgaacgc

SEQ ID NO: 794625 - DNA, 120 bp, Artificial Sequence
  ENSG00000275700_11 (sequence is synthesized)
tcaatcttgactcagatcgaccatattctgatggacaaagagagattacttcgaaggacacagaccaagcgctctgtctatcgagttcttggcaaacctgagccagcagctcagcctgtc

SEQ ID NO: 794626 - DNA, 120 bp, Artificial Sequence
  ENSG00000275700_12 (sequence is synthesized)
ccagagagtttgccaggggaaccggagatccttcctcaagcccctgctaatgctcatctgaaggacttggatgaagaaatctttgatgatgatgacttttaccaccagctccttcgagaa

SEQ ID NO: 794627 - DNA, 120 bp, Artificial Sequence
  ENSG00000275700_13 (sequence is synthesized)
ctcatagaacggaagaccagctccttggatcccaacgatcaggtggccatgggaaggcagtggcttgcaatccagaagttacgaagcaaaatccacaaaaaagtagataggaaagccagc

SEQ ID NO: 794628 - DNA, 120 bp, Artificial Sequence
  ENSG00000275700_14 (sequence is synthesized)
aaaggcaggaaacttcggtttcatgtccttagcaagctactgagtttcatggcacctattgaccatactacaatgaatgatgatgccaggacagaactgtaccgctctctttttggccag

SEQ ID NO: 794629 - DNA, 120 bp, Artificial Sequence
  ENSG00000275700_15 (sequence is synthesized)
ctccaccctcccgacgaaggccacggggattgacatcgcccacctccgacacccagtgggcgccttggctggtgcggctgctggtccagatggaggaaaccagtgactttatggggctga

SEQ ID NO: 794630 - DNA, 120 bp, Artificial Sequence
  ENSG00000275700_16 (sequence is synthesized)
gctagtagggaagcccctggaaagatgctgcgttccgaacctgtgcctaatacacgcaagggcgctgtcccgcccaaccccgcctttaaacgccacaaataaagagcattgttaccgcca

SEQ ID NO: 794631 - DNA, 120 bp, Artificial Sequence
  ENSG00000275700_17 (sequence is synthesized)
acataatacttgctcggagaccatgatgcgctttgggaggctgcacaggctttttcggggagcagtggaatggctgtgttctctctgctgtccacctgtctttgtgggacagaactgtac

SEQ ID NO: 794632 - DNA, 120 bp, Artificial Sequence
  ENSG00000275700_18 (sequence is synthesized)
aatgtcaacatatattgtatatgtatctcgtctcttacattctggctgttatgtcatttttctttttcttctgatgattctgtttttaaggatcagaaaaataaacaatatttgaaggtt

SEQ ID NO: 794633 - DNA, 120 bp, Artificial Sequence
  ENSG00000275700_19 (sequence is synthesized)
atattctctctctctgaaaatattttaagaacccagaccactcagcttcccaggttgctttgccatgaacagctgcatatgtttgtcagctttgcccacctgagtgtgaaatgatgttct

SEQ ID NO: 794634 - DNA, 120 bp, Artificial Sequence
  ENSG00000275700_20 (sequence is synthesized)
atgaaaacatgggtttcagcatttcactctctgctcctgacacgtgaaccctgctgcggacagtaactgctgccttcggcccaggcgttgcactgatattgcgcgcagagtggaagcatt

SEQ ID NO: 794635 - DNA, 120 bp, Artificial Sequence
  ENSG00000275700_21 (sequence is synthesized)
ggaacttgagcatccgtggatttttgtatccatagagagtcctggaaccattcctccacagataccatgggatgactgtagttggtcatcccaatgacagtggtaagtgcctatgaattt

SEQ ID NO: 794636 - DNA, 120 bp, Artificial Sequence
  ENSG00000275700_22 (sequence is synthesized)
ttccctatcccactttgtacccagatgttccagtgatcagttctggagtttgttaactcactgaatgtgtttcctctcctaggttaatagttactaatgttgctgcctgttgcttcctgc

SEQ ID NO: 794637 - DNA, 120 bp, Artificial Sequence
  ENSG00000275700_23 (sequence is synthesized)
cacactgtccttttgttatggcaactctccctttcacgccatttaattttttgtgtggaaacagctagagagacttgtctttactggcaaataggcaggccatggtgtgatgaagtggag

SEQ ID NO: 794638 - DNA, 120 bp, Artificial Sequence
  ENSG00000275700_24 (sequence is synthesized)
cctgccctgggcaccgaagtatccgtgtgacggagctgctgatttggaagccgtgggtttgcatttggtctggggctgccgtccaccttggcaggcttcgtctgggctgattgaggctag

SEQ ID NO: 794639 - DNA, 120 bp, Artificial Sequence
  ENSG00000275700_25 (sequence is synthesized)
tcacatggatgtgtgtaacagaagagcagaagagatgggtggagccaagggggaagctgtgtcctttgtctgtggcctaggggtctgctgggtagttcagggtgaaggcaccagcacatt

SEQ ID NO: 794640 - DNA, 120 bp, Artificial Sequence
  ENSG00000275700_26 (sequence is synthesized)
cttgggataaaattcctgtaataaaattggaggcctgttgttttctggcctgcactttcactgcctgtccctcccgcggtccccaacatgataaggctagcttacatttgtggcttctgt

SEQ ID NO: 794641 - DNA, 120 bp, Artificial Sequence
  ENSG00000275700_27 (sequence is synthesized)
agttcttccttaagatgtttttcttttgacttttttaaagctttgatactctattccttttgttggatttcctaattgtagtacctttattcctatccataactatagtagggtgacttc

SEQ ID NO: 794642 - DNA, 120 bp, Artificial Sequence
  ENSG00000275700_28 (sequence is synthesized)
aaaaaaagaccagtagttttttgtgttgaagccttgctgtttgaaaggtggggttttttggttttgcttttaaagtctgatgtgccgatgctgaccctcagatgatgagagcacttttaa

SEQ ID NO: 794643 - DNA, 120 bp, Artificial Sequence
  ENSG00000275700_29 (sequence is synthesized)
aacaagacggcaggctggaatttgagttccatcttgagaatatccgagcaggtgtagatttcttctggggctcctggcccatgacctcagccctgtgtgcgcctgccctgtctctgtgag

SEQ ID NO: 794644 - DNA, 120 bp, Artificial Sequence
  ENSG00000275700_30 (sequence is synthesized)
ggctaccggctgggccttctgcagggcgtggacatggatggctgcctctgcggccacgtgctacacgcccacctccctgatgacagggacgtcctcacacgggtcttgcctgcttggaac

SEQ ID NO: 794645 - DNA, 120 bp, Artificial Sequence
  ENSG00000275700_31 (sequence is synthesized)
tgggtccctcatgtctctgcagggaggatctgctctgtatccacaggggaaagtgttctggagcttctgtctcaacgataggaaagatccctgccccacccacaccccttttaggttttc

SEQ ID NO: 794646 - DNA, 120 bp, Artificial Sequence
  ENSG00000275700_32 (sequence is synthesized)
caggccttgacacatggctttggccgatgtttgtgtgtatgttgcatttaaaagagtttgaaagtggtcatttacttttctttttaggggcccaagaccctggcatgttattgttttaat

SEQ ID NO: 794647 - DNA, 120 bp, Artificial Sequence
  ENSG00000275700_33 (sequence is synthesized)
gtcaaaacccaactttagaaataaattagccaatcatattatttattagactgagaatagagacagggcagctggggagtgtggaagaagcttggttctcttcctgaacaactgcacaga

SEQ ID NO: 794648 - DNA, 120 bp, Artificial Sequence
  ENSG00000275700_34 (sequence is synthesized)
tgatagtaattggaatcgtgttgctggctcattttcattgtttttcaagtactgccaagtccaagaaaatgtatgaaaactaaattatatccccctacatcccatgtctgattgaatcct

SEQ ID NO: 794649 - DNA, 120 bp, Artificial Sequence
  ENSG00000275700_35 (sequence is synthesized)
cctcatcggatggcggtctcctacatcctattaaaatattcaatcttgttttcttacttgaagagcctgtctgcaaagggcaaacttacagaacactcattccctggagacgggtgtcca

SEQ ID NO: 794650 - DNA, 120 bp, Artificial Sequence
  ENSG00000275700_36 (sequence is synthesized)
gccgcactggaccatttacatattttactgtttgattgggtttcttccttctgttgtatttgtgagtaagagctgtggggtgcatttttaattacatggctgtgttttcaacagaagaaa

SEQ ID NO: 794651 - DNA, 120 bp, Artificial Sequence
  ENSG00000275700_37 (sequence is synthesized)
cagaatggggtattttccagcttctgcgttcctttttaaccttgaatagtgaaccagtgtgttaaccagtttgctgtgtttgtcttttaggacagaactgtaccgctctctttttggcca

SEQ ID NO: 794652 - DNA, 120 bp, Artificial Sequence
  ENSG00000275713_0 (sequence is synthesized)
atgcctgatccagctaagtccgctcccgccccgaagaagggctccaagaaggcggtgaccaaggcgcagaagaaggatggcaagaagcgtaaacgcagccgcaaggagagctactccgta

SEQ ID NO: 794653 - DNA, 120 bp, Artificial Sequence
  ENSG00000275713_1 (sequence is synthesized)
tacgtttacaaggtgctgaagcaagtccaccccgacaccggcatctcctccaaagccatggggatcatgaattcctttgtcaacgatatcttcgagcgcatcgccggcgaggcttcccgc

SEQ ID NO: 794654 - DNA, 120 bp, Artificial Sequence
  ENSG00000275713_2 (sequence is synthesized)
ctggctcattacaacaagcgttcgaccatcacctccagggagatccagacagccgtgcgcctgctgctgcctggggaactggccaagcacgccgtgtccgagggcactaaggccgtcacc

SEQ ID NO: 794655 - DNA, 120 bp, Artificial Sequence
  ENSG00000275713_3 (sequence is synthesized)
aagtacaccagctccaaataaatggacgcatgttcaaacccaaaggctcttttcagagccacttaatgatttcaattaagagttttaatgctgggtgctgctgtattctatgggagaagt

SEQ ID NO: 794656 - DNA, 120 bp, Artificial Sequence
  ENSG00000275713_4 (sequence is synthesized)
gtcgccaatacaggtaaaattttcctacatcacctgtttattctgtgcgtttgacaaacactaagcttttagagtttatttgtctttataaaggtggggtacaactacattgttcaggct

SEQ ID NO: 794657 - DNA, 120 bp, Artificial Sequence
  ENSG00000275713_5 (sequence is synthesized)
ggtcttaaactcaagcgctggtcttaaactcaagcaagttttcccacctcggccttgccttgtattactgagcagataatttgacacagcaggaaaagtgggcattcttgtttaggaacc

SEQ ID NO: 794658 - DNA, 120 bp, Artificial Sequence
  ENSG00000275713_6 (sequence is synthesized)
aaaaactaagtttgcaacttaaaatgcaatcaatttggagcaacacgtccaccagtctagagctggtaagtttgagtattcaaaatgagttgaaagtacatttagtgcctataataaccc

SEQ ID NO: 794659 - DNA, 120 bp, Artificial Sequence
  ENSG00000275713_7 (sequence is synthesized)
actctagatagcataatgtggtctttgtaggagtctcgtggaagttaatgttaactgggatattgtagtttaccaagtacctgagaaaaatttaaatttcttaatagataaggattagga

SEQ ID NO: 794660 - DNA, 120 bp, Artificial Sequence
  ENSG00000275713_8 (sequence is synthesized)
aaacaaaatgccatgcaataaacctttagttatttggcaagtagtatgagggcttctagctgtctttgaaaaacttaagatttgtaagacaaggaagagcagagaatataaatagtaaag

SEQ ID NO: 794661 - DNA, 120 bp, Artificial Sequence
  ENSG00000275713_9 (sequence is synthesized)
ggcctggcaacaatgtgtctttgtttttaggtaacgttggttggcagtcagcaaaaaggccaggctcaggcagtcttaacttgaaaacgctaacaggaatcaccaaaactatgtatacaa

SEQ ID NO: 794662 - DNA, 120 bp, Artificial Sequence
  ENSG00000275713_10 (sequence is synthesized)
ctcctgctgtgggttttttaaatatcaagattaccgattttaatggtagggtaatatagactgaaatccccacattcctccaccctcatgggcatttctcttggctcataaaatatgggg

SEQ ID NO: 794663 - DNA, 120 bp, Artificial Sequence
  ENSG00000275713_11 (sequence is synthesized)
gtagcaggaggaaagggaagagtatattaagagcctatatctgagaggtacgttcagtttttcctcaaaagtatctggtggttggactagtaatttattcatttattgagaacctattaa

SEQ ID NO: 794664 - DNA, 120 bp, Artificial Sequence
  ENSG00000275713_12 (sequence is synthesized)
attacagaaaatacttagtaaagagcagtgagaaagatagaaactatccctgtcctttacctggattgaaatctaaagtggatatttgtacaataaactcacaaactaaagaaagaaacg

SEQ ID NO: 794665 - DNA, 120 bp, Artificial Sequence
  ENSG00000275713_13 (sequence is synthesized)
taagtctgaaggtcacgtttttcttttaaccggcttttgatgggactgaatttaaattgccaaaaggtgaattaacataatcttgaaaacttgcaagttcctggaggcagttctggaggg

SEQ ID NO: 794666 - DNA, 120 bp, Artificial Sequence
  ENSG00000275713_14 (sequence is synthesized)
agggtggagcaaaagagatggcagaagaagaggagccagcagcactggaattcaaaagtagacattcttgcctcctccctagtggacagggaggaggggtggggagagcacaagagagcc

SEQ ID NO: 794667 - DNA, 120 bp, Artificial Sequence
  ENSG00000275713_15 (sequence is synthesized)
gtgacagaggaagggagagagcacagagtttaagtctatattgatggaactatggttacaaataggggctacccatttatattctcatctggccatgtctcatcagtgatttacaaggat

SEQ ID NO: 794668 - DNA, 120 bp, Artificial Sequence
  ENSG00000275713_16 (sequence is synthesized)
acaaggatttcatagaagtgctttaataaaatgtacaacctcactgaaatatagaaagtaatactataagacagcaaatattgtatatttatgcaaataattttttaataaaaggttttt

SEQ ID NO: 794669 - DNA, 120 bp, Artificial Sequence
  ENSG00000275714_0 (sequence is synthesized)
atggctcgcactaagcaaactgctcggaagtctactggtggcaaggcgccacgcaaacagttggccactaaggcagcccgcaaaagcgctccggccaccggcggcgtgaaaaagccccac

SEQ ID NO: 794670 - DNA, 120 bp, Artificial Sequence
  ENSG00000275714_1 (sequence is synthesized)
tccactgaactgcttattcgtaaactacctttccagcgcctggtgcgcgagattgcgcaggactttaaaacagacctgcgtttccagagctccgctgtgatggctctgcaggaggcgtgc

SEQ ID NO: 794671 - DNA, 120 bp, Artificial Sequence
  ENSG00000275714_2 (sequence is synthesized)
gaggcctacttggtagggctatttgaggacactaacctgtgcgccatccacgccaagcgcgtcactatcatgcccaaggacatccagctcgcccgccgcatccgcggagagagggcgtga

SEQ ID NO: 794672 - DNA, 120 bp, Artificial Sequence
  ENSG00000275718_0 (sequence is synthesized)
ggggagccaggaagcagtgagcccaggagtcctcggccagccctgcctgcccaccaggaggatgaaggtctccgtggctgccctctcctgcctcatgcttgttgctgtccttggatccca

SEQ ID NO: 794673 - DNA, 120 bp, Artificial Sequence
  ENSG00000275718_1 (sequence is synthesized)
ggcccagttcacaaatgatgcagagacagagttaatgatgtcaaagcttccactggaaaatccagtagttctgaacagctttcactttgctgctgactgctgcacctcctacatctcaca

SEQ ID NO: 794674 - DNA, 120 bp, Artificial Sequence
  ENSG00000275718_2 (sequence is synthesized)
cagtggtccgggagttcaggattgcatgaaaaagctgaagccctactcaatataataataaagagacaaaagaggccagccacccacctccaacacctcctgtgagtttcttggtctgaa

SEQ ID NO: 794675 - DNA, 120 bp, Artificial Sequence
  ENSG00000275718_3 (sequence is synthesized)
atacttaaaaaatatatatattgttgtgtctggtaatgaaagtaatgcatctaataaagagtattcaattttttaactttgcttgagttttaagaggaaataaactaatataaaactgaa

SEQ ID NO: 794676 - DNA, 64 bp, Artificial Sequence
  ENSG00000275718_4 (sequence is synthesized)
ctctaggattcgattacgtgcctgccaccagacctgactaatttctgtatttttagtagagaca

SEQ ID NO: 794677 - DNA, 120 bp, Artificial Sequence
  ENSG00000275718_5 (sequence is synthesized)
cacctcggcctcccaaagtactggaattaacggcatgagccactgcactcagcctctacctacttttcaagccttcctgatactacctaaaatctttgcagtaaagtcctttttgcttaa

SEQ ID NO: 794678 - DNA, 120 bp, Artificial Sequence
  ENSG00000275718_6 (sequence is synthesized)
aaaatctttgcagtaaagtcctttttgcttaatcaaccagagtcagtttgtatagctttccaacaaaaaactccaactgatatgaacaataaactttctgggactttgaaggtctaaaaa

SEQ ID NO: 794679 - DNA, 120 bp, Artificial Sequence
  ENSG00000275722_0 (sequence is synthesized)
agaacatggagagctgttagttgggcagggctgaagtgtatgtggtgaggaagaagaggctcctactgtagacagccttgttctacagatcctcccagaaatctctgggccaggtggaac

SEQ ID NO: 794680 - DNA, 120 bp, Artificial Sequence
  ENSG00000275722_1 (sequence is synthesized)
ccagggtcagagagggatgggagagaggtttaattttccatgataaataaaaatctataaaataataaacaagagaaaagagattggaaacagccaggttggagcagtgagtgagtaagg

SEQ ID NO: 794681 - DNA, 120 bp, Artificial Sequence
  ENSG00000275722_2 (sequence is synthesized)
aaacctggctgccctctccagattccccaggctctcagagaagatcagcagaaagtctgcaagaccctaagaaccatcagccctcagctgcacctcctcccctccaaggatgacaaaggc

SEQ ID NO: 794682 - DNA, 120 bp, Artificial Sequence
  ENSG00000275722_3 (sequence is synthesized)
gctactcatctatttggtcagcagctttcttgccctaaatcaggccagcctcatcagtcgctgtgacttggcccaggtgctgcagctggaggacttggatgggtttgagggttactccct

SEQ ID NO: 794683 - DNA, 120 bp, Artificial Sequence
  ENSG00000275722_4 (sequence is synthesized)
gtgcaacgattataagagttactcggaaaacctttgccacgtagactgtcaagatctgctgaatcccaaccttcttgcaggcatccactgcgcaaaaaggattgtgtccggagcacgggg

SEQ ID NO: 794684 - DNA, 120 bp, Artificial Sequence
  ENSG00000275722_5 (sequence is synthesized)
gatgaacaactgggtagaatggaggttgcactgttcaggccggccactcttctactggctgacaggatgccgcctgagatgaaacagggtgcgggtgcaccgtggagtcattccaagact

SEQ ID NO: 794685 - DNA, 120 bp, Artificial Sequence
  ENSG00000275722_6 (sequence is synthesized)
cctgtcctcactcagggattcttcatttcttcttcctactgcctccacttcatgttattttcttcccttcccatttacaactaaaactgaccagagccccaggaataaatggttttcttg

SEQ ID NO: 794686 - DNA, 120 bp, Artificial Sequence
  ENSG00000275722_7 (sequence is synthesized)
gcttcctccttactcccatctggacccagtcccctggttcctgtctgttatttgtaaactgaggaccacaataaagaaatctttatatttatcgaaatattaaagcactcgctctgcaaa

SEQ ID NO: 794687 - DNA, 120 bp, Artificial Sequence
  ENSG00000275722_8 (sequence is synthesized)
ggtgaggaagaagaggctcctactgtagacagccttgttctacagatcctcccagaaatctctgggccaggtggaacccagggtcagagagggatgggagagagattccccaggctctca

SEQ ID NO: 794688 - DNA, 120 bp, Artificial Sequence
  ENSG00000275722_9 (sequence is synthesized)
aggcatccactgcgcaaaaaggattgtgtccggagcacgggggatgaacaactggtgaggaggacacggtgggactcagcgggcagagccccacgaaggaggacgtgacagagaaaaggg

SEQ ID NO: 794689 - DNA, 120 bp, Artificial Sequence
  ENSG00000275743_0 (sequence is synthesized)
cctttttctcatgcttgtaagctccttcatctggaaatgtgatttacctgggtcctgccatggtttccaggcttctcagtttagtgtccctttgtctcctgggagcaaagcacatagaag

SEQ ID NO: 794690 - DNA, 120 bp, Artificial Sequence
  ENSG00000275743_1 (sequence is synthesized)
gactgtgactctgagatgtgacccaatttctggacatgataatctttattggtatcgacgtgttatgggaaaagaaataaaatttctgttacattttgtgaaagagtctaaacaggatga

SEQ ID NO: 794691 - DNA, 120 bp, Artificial Sequence
  ENSG00000275743_2 (sequence is synthesized)
gtccggtatgcccaacaatcgattcttagctgaaaggactggagggacgtattctactctgaaggtgcagcctgcagaactggaggattctggagtttatttctgtgccagcagccaaga

SEQ ID NO: 794692 - DNA, 120 bp, Artificial Sequence
  ENSG00000275774_0 (sequence is synthesized)
cctggagttcctgcttggctcttcctgaggtctgagcaccttctaaactacaaccagatctgaattcttgttggcagccattttgtgaagagacgaagactgagctgttttggctgcatt

SEQ ID NO: 794693 - DNA, 120 bp, Artificial Sequence
  ENSG00000275774_1 (sequence is synthesized)
tctggcctcgagccgcagtcagtttctccccgtagaacccggcagtaggagacttagaatcgaatctcttctccctcccgcctcctgtttttggctttttgagaaaccttatcatccaac

SEQ ID NO: 794694 - DNA, 120 bp, Artificial Sequence
  ENSG00000275774_2 (sequence is synthesized)
acaatggccagcaacgttaccaacaagatggatcctcactccgtgaactcccgtgtgttcattgggaatctcaacactcttgttgtcaagaaatctgatgtggaggcgatcttttccaag

SEQ ID NO: 794695 - DNA, 120 bp, Artificial Sequence
  ENSG00000275774_3 (sequence is synthesized)
tatggcaaaattgcgggctgctctgttcataagggctttgccttcgttcaatatgataaggagaaaaatgcccgggctgctgtagcaggagaggatggcagaatgattgctagccaggtt

SEQ ID NO: 794696 - DNA, 120 bp, Artificial Sequence
  ENSG00000275774_4 (sequence is synthesized)
acggctcctcttttgacttggactatggctttcaacgggattattatgatgggatgtacagtttcccagcacgtgtacctcctcctcctcccattgctctggctgtagtgccctcgaaac

SEQ ID NO: 794697 - DNA, 120 bp, Artificial Sequence
  ENSG00000275774_5 (sequence is synthesized)
gccagcgcatatcaggaaacacctcacgaaggggcaaaagtggcttcaattctaagagtggaaagcggggatcttccaagtctggaaagctgaaaggagatgaccttcaggccattaagc

SEQ ID NO: 794698 - DNA, 120 bp, Artificial Sequence
  ENSG00000275774_6 (sequence is synthesized)
aggagttgacccagataaaacagaaagtggattctctcctggaaaacctggaaaaaattgaaaaggaacagagcaaacaagaggtagaggtgaaaaatgctaagtcagaagaggagcaga

SEQ ID NO: 794699 - DNA, 120 bp, Artificial Sequence
  ENSG00000275774_7 (sequence is synthesized)
gcagtagctccatgaagaaagatgagactcatgtaaagatggagtctgaggggggtgcagaagactctgctgaggagggggacccactggatgatgatgataatgaagatcagggggaca

SEQ ID NO: 794700 - DNA, 120 bp, Artificial Sequence
  ENSG00000275774_8 (sequence is synthesized)
accagcttcatttgatcaagaataatgaaaaagatgctgaggaaggagaggataacagagacagcaccaatggccaggatgactcttaagcacatagtggggttgagaaatcttatccca

SEQ ID NO: 794701 - DNA, 120 bp, Artificial Sequence
  ENSG00000275791_0 (sequence is synthesized)
atgagatcctggcctggacctgaaatgggcacaaggttgttcttctatgtggccctttgtctcctgtggacaggacacatggatgctggaatcacccagagcccaagacacaaggtcaca

SEQ ID NO: 794702 - DNA, 120 bp, Artificial Sequence
  ENSG00000275791_1 (sequence is synthesized)
aacaccagtgactctgagatgtcaccagactgagaaccaccgctatatgtactggtatcgacaagacccggggcatgggctgaggctgatccattactcatatggtgttaaagatactga

SEQ ID NO: 794703 - DNA, 120 bp, Artificial Sequence
  ENSG00000275791_2 (sequence is synthesized)
caaaggagaagtctcagatggctatagtgtctctagatcaaagacagaggatttcctcctcactctggagtccgctaccagctcccagacatctgtgtacttctgtgccatcagtgagtc

SEQ ID NO: 794704 - DNA, 120 bp, Artificial Sequence; identical to SEQ ID NO: 652669
  ENSG00000275793_0 (sequence is synthesized)

SEQ ID NO: 794705 - DNA, 120 bp, Artificial Sequence; identical to SEQ ID NO: 652670
  ENSG00000275793_1 (sequence is synthesized)

SEQ ID NO: 794706 - DNA, 120 bp, Artificial Sequence; identical to SEQ ID NO: 652671
  ENSG00000275793_2 (sequence is synthesized)

SEQ ID NO: 794707 - DNA, 120 bp, Artificial Sequence; identical to SEQ ID NO: 652672
  ENSG00000275793_3 (sequence is synthesized)

SEQ ID NO: 794708 - DNA, 120 bp, Artificial Sequence; identical to SEQ ID NO: 652673
  ENSG00000275793_4 (sequence is synthesized)

SEQ ID NO: 794709 - DNA, 120 bp, Artificial Sequence
  ENSG00000275793_5 (sequence is synthesized)
agctggaggcggagcgggcaggctggcgggcggaacggcggcgcttcgctgcccgggagcgccagctgcgtgaggaggccgagcgggagcggcgacagctggctgaccgtctgcgctcca

SEQ ID NO: 794710 - DNA, 120 bp, Artificial Sequence; identical to SEQ ID NO: 652675
  ENSG00000275793_6 (sequence is synthesized)

SEQ ID NO: 794711 - DNA, 120 bp, Artificial Sequence; identical to SEQ ID NO: 652676
  ENSG00000275793_7 (sequence is synthesized)

SEQ ID NO: 794712 - DNA, 120 bp, Artificial Sequence; identical to SEQ ID NO: 652677
  ENSG00000275793_8 (sequence is synthesized)

SEQ ID NO: 794713 - DNA, 120 bp, Artificial Sequence; identical to SEQ ID NO: 652678
  ENSG00000275793_9 (sequence is synthesized)

SEQ ID NO: 794714 - DNA, 120 bp, Artificial Sequence; identical to SEQ ID NO: 652679
  ENSG00000275793_10 (sequence is synthesized)

SEQ ID NO: 794715 - DNA, 120 bp, Artificial Sequence; identical to SEQ ID NO: 652680
  ENSG00000275793_11 (sequence is synthesized)

SEQ ID NO: 794716 - DNA, 120 bp, Artificial Sequence; identical to SEQ ID NO: 652681
  ENSG00000275793_12 (sequence is synthesized)

SEQ ID NO: 794717 - DNA, 120 bp, Artificial Sequence
  ENSG00000275793_13 (sequence is synthesized)
aagtcctgactccctcacccccgggcctgggccaccacgagctgataaagctgaactggctgctggccaaggcgttgtgggtgctggcgcgccgctgttataccctgcaagcggagaaca

SEQ ID NO: 794718 - DNA, 120 bp, Artificial Sequence
  ENSG00000275793_14 (sequence is synthesized)
agcagctgcggcgtgcaggctgcccctaccaggcagacgagaaggtgaagcggctcaaggtaaagcgcgcggagctgaccgggctcgcgcggcgcctagctgaccgcgcccgcaagctgc

SEQ ID NO: 794719 - DNA, 120 bp, Artificial Sequence; identical to SEQ ID NO: 652684
  ENSG00000275793_15 (sequence is synthesized)

SEQ ID NO: 794720 - DNA, 120 bp, Artificial Sequence; identical to SEQ ID NO: 652685
  ENSG00000275793_16 (sequence is synthesized)

SEQ ID NO: 794721 - DNA, 120 bp, Artificial Sequence; identical to SEQ ID NO: 652686
  ENSG00000275793_17 (sequence is synthesized)

SEQ ID NO: 794722 - DNA, 120 bp, Artificial Sequence
  ENSG00000275793_18 (sequence is synthesized)
agagcgcaacctgcgaggaggtgcgacggcagatgctggcgctggagcgcgagctggaccagcggcggcgcgagtgccaggagctgggcgcgcaggcggccccggcgcggcgacgtggcg

SEQ ID NO: 794723 - DNA, 120 bp, Artificial Sequence; identical to SEQ ID NO: 652688
  ENSG00000275793_19 (sequence is synthesized)

SEQ ID NO: 794724 - DNA, 120 bp, Artificial Sequence; identical to SEQ ID NO: 652689
  ENSG00000275793_20 (sequence is synthesized)

SEQ ID NO: 794725 - DNA, 120 bp, Artificial Sequence; identical to SEQ ID NO: 652690
  ENSG00000275793_21 (sequence is synthesized)

SEQ ID NO: 794726 - DNA, 120 bp, Artificial Sequence; identical to SEQ ID NO: 652691
  ENSG00000275793_22 (sequence is synthesized)

SEQ ID NO: 794727 - DNA, 120 bp, Artificial Sequence; identical to SEQ ID NO: 652692
  ENSG00000275793_23 (sequence is synthesized)

SEQ ID NO: 794728 - DNA, 120 bp, Artificial Sequence; identical to SEQ ID NO: 793741
  ENSG00000275793_24 (sequence is synthesized)

SEQ ID NO: 794729 - DNA, 120 bp, Artificial Sequence
  ENSG00000275793_25 (sequence is synthesized)
atggcttctatgagggggagcttgaggatggccggcgggggctggtgccctccaacttcgtggagcagattccggacagctacatcccaggctgcctgcctgccaaatcccctgatcttg

SEQ ID NO: 794730 - DNA, 120 bp, Artificial Sequence
  ENSG00000275793_26 (sequence is synthesized)
gccccagtcaactcccagcggggcaggatgaagctctggaggaagacagcttattatctgggaaagcccagggagtggtggacagagggctgtgccagatggtcagggtgggctccaaga

SEQ ID NO: 794731 - DNA, 120 bp, Artificial Sequence; identical to SEQ ID NO: 793744
  ENSG00000275793_27 (sequence is synthesized)

SEQ ID NO: 794732 - DNA, 120 bp, Artificial Sequence; identical to SEQ ID NO: 793745
  ENSG00000275793_28 (sequence is synthesized)

SEQ ID NO: 794733 - DNA, 120 bp, Artificial Sequence
  ENSG00000275793_29 (sequence is synthesized)
ccccagcgggcgtgagctgctacaccttccagggcctgtgccccggcacgcactaccgggcgcgggtggaggtgcggctgccacgggacttgctgcaggtgtattggggaactatgtcct

SEQ ID NO: 794734 - DNA, 120 bp, Artificial Sequence
  ENSG00000275793_30 (sequence is synthesized)
ccaccgtcaccttcgacacactcttggcaggacctccctacccaccgctggatgtgctggtggagcgccatgcctcgccaggtgtcctggtggtcagctggctccctgtgaccattgact

SEQ ID NO: 794735 - DNA, 120 bp, Artificial Sequence
  ENSG00000275793_31 (sequence is synthesized)
cagctgggtcctccaatggagtccaggtcaccggttatgctgtgtatgcagatgggcttaaggtttgtgaggtcgccgatgccactgctgggagcaccctattggaattctcccagctac

SEQ ID NO: 794736 - DNA, 120 bp, Artificial Sequence; identical to SEQ ID NO: 793749
  ENSG00000275793_32 (sequence is synthesized)

SEQ ID NO: 794737 - DNA, 120 bp, Artificial Sequence; identical to SEQ ID NO: 793750
  ENSG00000275793_33 (sequence is synthesized)

SEQ ID NO: 794738 - DNA, 120 bp, Artificial Sequence; identical to SEQ ID NO: 793751
  ENSG00000275793_34 (sequence is synthesized)

SEQ ID NO: 794739 - DNA, 120 bp, Artificial Sequence; identical to SEQ ID NO: 793752
  ENSG00000275793_35 (sequence is synthesized)

SEQ ID NO: 794740 - DNA, 120 bp, Artificial Sequence
  ENSG00000275793_36 (sequence is synthesized)
cccagcacatgggcaccagcaaaagccctgctccaggattcatccatctacgcaccgagtgtgggcccaggaaagaaccgtgtcaggaaaaggctgcccttgagagggtacttcggcaaa

SEQ ID NO: 794741 - DNA, 120 bp, Artificial Sequence
  ENSG00000275793_37 (sequence is synthesized)
agcaagatgcccaagggttcacacctccccagctgggcgccagccaacagtatgcatctgacttccataacgttttgaaggaggagcaggaggcactgtgcttggatctgtggggcacag

SEQ ID NO: 794742 - DNA, 120 bp, Artificial Sequence; identical to SEQ ID NO: 793755
  ENSG00000275793_38 (sequence is synthesized)

SEQ ID NO: 794743 - DNA, 120 bp, Artificial Sequence; identical to SEQ ID NO: 793756
  ENSG00000275793_39 (sequence is synthesized)

SEQ ID NO: 794744 - DNA, 120 bp, Artificial Sequence; identical to SEQ ID NO: 793757
  ENSG00000275793_40 (sequence is synthesized)

SEQ ID NO: 794745 - DNA, 120 bp, Artificial Sequence
  ENSG00000275793_41 (sequence is synthesized)
tagtggctgagatggaggtggggacagagcagactgataggaggtggcgttctccggcccaagggaacctgccttctgtggcccacctcgaggactttcaggggctcaccatcccccagg

SEQ ID NO: 794746 - DNA, 120 bp, Artificial Sequence; identical to SEQ ID NO: 793759
  ENSG00000275793_42 (sequence is synthesized)

SEQ ID NO: 794747 - DNA, 120 bp, Artificial Sequence; identical to SEQ ID NO: 793760
  ENSG00000275793_43 (sequence is synthesized)

SEQ ID NO: 794748 - DNA, 120 bp, Artificial Sequence; identical to SEQ ID NO: 793761
  ENSG00000275793_44 (sequence is synthesized)

SEQ ID NO: 794749 - DNA, 120 bp, Artificial Sequence; identical to SEQ ID NO: 793762
  ENSG00000275793_45 (sequence is synthesized)

SEQ ID NO: 794750 - DNA, 120 bp, Artificial Sequence; identical to SEQ ID NO: 793763
  ENSG00000275793_46 (sequence is synthesized)

SEQ ID NO: 794751 - DNA, 120 bp, Artificial Sequence; identical to SEQ ID NO: 793764
  ENSG00000275793_47 (sequence is synthesized)

SEQ ID NO: 794752 - DNA, 120 bp, Artificial Sequence; identical to SEQ ID NO: 793765
  ENSG00000275793_48 (sequence is synthesized)

SEQ ID NO: 794753 - DNA, 120 bp, Artificial Sequence; identical to SEQ ID NO: 652718
  ENSG00000275793_49 (sequence is synthesized)

SEQ ID NO: 794754 - DNA, 120 bp, Artificial Sequence
  ENSG00000275832_0 (sequence is synthesized)
gcagagccgccgctgccacccgatgaatggagtcgccttctgcctggtcgggatcccgccccgcccggagccccggcccccacagctgccactgggcccaagagatgggtgctctcctag

SEQ ID NO: 794755 - DNA, 120 bp, Artificial Sequence
  ENSG00000275832_1 (sequence is synthesized)
gcgccccttcccctggcaggggccgaggacgctgctgctgtacaaaagtccccaggacggctttggcttcactctgcgccacttcatcgtgtacccacccgagtcggccgtgcactgcag

SEQ ID NO: 794756 - DNA, 120 bp, Artificial Sequence
  ENSG00000275832_2 (sequence is synthesized)
cctgaaggaggaagagaatggaggccgtggaggaggaccctccccccggtaccgcctggagcccatggacaccatctttgtcaagaatgtgaaggaagacggccctgcccatagggcggg

SEQ ID NO: 794757 - DNA, 120 bp, Artificial Sequence
  ENSG00000275832_3 (sequence is synthesized)
gcttcgcacaggagaccggctggtaaaggtgaatggggaaagcgtcattgggaagacctactctcaggtcatagctctgatccagaatagtgatgacactctggagctgtctatcatgcc

SEQ ID NO: 794758 - DNA, 120 bp, Artificial Sequence
  ENSG00000275832_4 (sequence is synthesized)
caaggacgaggacatcctccagctggcctactcccaggatgcctacctgaaagggaacgagccgtattctggagaggcccgcagcatcccagagccacccccgatctgctacccccgcaa

SEQ ID NO: 794759 - DNA, 120 bp, Artificial Sequence
  ENSG00000275832_5 (sequence is synthesized)
gacctacgcccctcctgcccgggcctccaccagggccactatggtgcctgagcccacctcagcactgcccagtgacccccggagtcctgctgcctggagtgacccggggctccgtgtgcc

SEQ ID NO: 794760 - DNA, 120 bp, Artificial Sequence
  ENSG00000275832_6 (sequence is synthesized)
acctgctgcccgtgcccacctggacaactcttccttggggatgagccagccccgccccagccctggtgccttcccccacctctcctcggagccccggacgccccgtgccttcccagagcc

SEQ ID NO: 794761 - DNA, 120 bp, Artificial Sequence
  ENSG00000275832_7 (sequence is synthesized)
tggcagccgggtgccccccagcagactggagtgccagcaggccttgtcacactggctgtcaaaccaggtaccccgccgggcgggggagagacggtgcccagccatggccccccgggcccg

SEQ ID NO: 794762 - DNA, 120 bp, Artificial Sequence
  ENSG00000275832_8 (sequence is synthesized)
cagcgcctcccaggaccggttggaggaggtggctgccccccgcccgtggccctgctccacctcccaggatgctttgagccagctgggccaggagggctggcaccgagctcgctcagatga

SEQ ID NO: 794763 - DNA, 120 bp, Artificial Sequence
  ENSG00000275832_9 (sequence is synthesized)
ctacttgagccgggccacccgttctgccgaggcactggggccaggggcactggtgtcaccccgctttgagcggtgtggctgggcttcccagcgttcgtctgcccgcacccccgcctgccc

SEQ ID NO: 794764 - DNA, 120 bp, Artificial Sequence
  ENSG00000275832_10 (sequence is synthesized)
aactcgggacctgccagggccccaggccccacccccgtctggcctgcagggcctggatgacctcgggtacatcggctaccggagctacagcccatcattccagcgccggaccggcctcct

SEQ ID NO: 794765 - DNA, 120 bp, Artificial Sequence
  ENSG00000275832_11 (sequence is synthesized)
ccatgcgctctccttccgggactcaccctttggggggctgcctaccttcaacctggcccagtcccctgcgtcattcccaccagaggcctccgagccacccagggttgtacggccggaacc

SEQ ID NO: 794766 - DNA, 120 bp, Artificial Sequence
  ENSG00000275832_12 (sequence is synthesized)
cagcacccgggccctggagcctcctgcggaggatcgcggcgatgaggtggtcctgaggcagaagcccccgacgggccgcaaggttcagctgacccccgcaagacagatgaaccttggatt

SEQ ID NO: 794767 - DNA, 120 bp, Artificial Sequence
  ENSG00000275832_13 (sequence is synthesized)
tggtgacgagtccccagagccagaggccagtgggcgaggggaacgcctgggcaggaaggtggcccctttggccaccaccgaagactctctggcttccatcccctttattgatgagcccac

SEQ ID NO: 794768 - DNA, 120 bp, Artificial Sequence
  ENSG00000275832_14 (sequence is synthesized)
cagccccagcattgacctccaagccaagcacgtccctgcctctgctgtggtctccagtgccatgaactcagcccctgtcctgggcaccagcccatcttccccgaccttcactttcaccct

SEQ ID NO: 794769 - DNA, 120 bp, Artificial Sequence
  ENSG00000275832_15 (sequence is synthesized)
cggacgccattactcgcaggactgcagcagcatcaaggctggccgccgctcctcctacctgctggccatcaccacggagcgctccaagtcctgcgatgatggactcaacaccttccgcga

SEQ ID NO: 794770 - DNA, 120 bp, Artificial Sequence
  ENSG00000275832_16 (sequence is synthesized)
cgagggccgggttctgcggcgcctgccaaaccgcatacccagcctgcggatgctccggagcttcttcaccgacgggtccttggatagctggggcacctctgaagatgctgacgctccttc

SEQ ID NO: 794771 - DNA, 120 bp, Artificial Sequence
  ENSG00000275832_17 (sequence is synthesized)
taagcgacactcaacctctgacctctcagatgcgaccttcagcgatatcaggagagaaggctggttgtattataagcagattctcaccaagaaggggaagaaagcgggcagcggcctgcg

SEQ ID NO: 794772 - DNA, 120 bp, Artificial Sequence
  ENSG00000275832_18 (sequence is synthesized)
aagaaggggaagaaagcgggcagcggcctgcgccagtggaagcgggtgtacgccgcgctgcgggcgcgctcgctctcgctgagcaaggagcggcgggagcccgggccggcggcggcgggg

SEQ ID NO: 794773 - DNA, 120 bp, Artificial Sequence
  ENSG00000275832_19 (sequence is synthesized)
ggcgcccgtctgcatcggctcctgcctcgtggacatctcctacagcgagaccaagaggaggcacgtgttccggctgaccaccgctgacttctgtgaatatctctttcaggctgaggaccg

SEQ ID NO: 794774 - DNA, 120 bp, Artificial Sequence
  ENSG00000275832_20 (sequence is synthesized)
ggatgacatgctgggctggatcagagcgatccgggagaacagcagggccgagggcgaggaccccggctgtgccaaccaagctctgatcagcaagaagcttaacgattatcgcaaagtgag

SEQ ID NO: 794775 - DNA, 120 bp, Artificial Sequence
  ENSG00000275832_21 (sequence is synthesized)
ccatagctctgggcccaaagctgattcctcccccaaaggctctcgcggcctggggggcctcaagtctgagttcctcaagcagagtgcggcacgtggcctcaggactcaggacctgcccgc

SEQ ID NO: 794776 - DNA, 120 bp, Artificial Sequence
  ENSG00000275832_22 (sequence is synthesized)
agggagcaaggatgacagtgctgcagcccccaaaaccccctggggcatcaacatcatcaagaaaaataagaaggccgctccgagggcgtttggggtcaggctggaggagtgccagccagc

SEQ ID NO: 794777 - DNA, 120 bp, Artificial Sequence
  ENSG00000275832_23 (sequence is synthesized)
cacggagaaccagcgcgtccccttaatcgtggctgcatgctgtcgcattgtggaggcacgagggctggagtccacaggcatttaccgagtgcccggcaacaatgcagtggtgtccagcct

SEQ ID NO: 794778 - DNA, 120 bp, Artificial Sequence
  ENSG00000275832_24 (sequence is synthesized)
atcaacctgcaggatgagcgctggcaagacctcaatgtgatcagcagcctgctcaagtccttcttccgaaagctgcccgagcctcttttcactgatgacaaatacaacgacttcatcgag

SEQ ID NO: 794779 - DNA, 120 bp, Artificial Sequence
  ENSG00000275832_25 (sequence is synthesized)
gccaaccgcattgaggacgcgcgggagcgaatgaggacgctgcggaagctgatccgggatctcccaggacactactatgaaacgctcaaattccttgtgggccatctcaagaccatcgct

SEQ ID NO: 794780 - DNA, 120 bp, Artificial Sequence
  ENSG00000275832_26 (sequence is synthesized)
gaccactctgagaaaaacaagatggaaccccggaacctggccctggtctttgggccgacactggtgaggacgtctgaggacaacatgacagacatggtgacccacatgcctgaccgctac

SEQ ID NO: 794781 - DNA, 120 bp, Artificial Sequence
  ENSG00000275832_27 (sequence is synthesized)
aagatcgtggagacactgatccagcactcagactggttcttcagtgacgaagaggacaagggagagagaacccctgtgggcgacaaggagcctcaggcagtgcccaacattgagtacctc

SEQ ID NO: 794782 - DNA, 120 bp, Artificial Sequence
  ENSG00000275832_28 (sequence is synthesized)
ctgcccaacattggcaggacagtgccccctggcgacccggggtcagattctaccacctgtagttcagccaagtccaagggttcgtgggcccccaagaaggagccgtacgcccgggagatg

SEQ ID NO: 794783 - DNA, 120 bp, Artificial Sequence
  ENSG00000275832_29 (sequence is synthesized)
ctggcgatctccttcatctcggccgtcaaccgcaagcgcaagaagcggcgggaggcgcgggggctgggcagcagcaccgacgacgactcggagcaggaggcgcacaagcctggggcgggg

SEQ ID NO: 794784 - DNA, 120 bp, Artificial Sequence
  ENSG00000275832_30 (sequence is synthesized)
tgcctggcgccgtcgcccccgaggcccccggacgcctcagtcccccggcggcgccggaggagcggccggccgcggacacgcgctccattgtgtcgggctactccaccctgtccaccatgg

SEQ ID NO: 794785 - DNA, 120 bp, Artificial Sequence
  ENSG00000275832_31 (sequence is synthesized)
cgctccattgtgtcgggctactccaccctgtccaccatggaccgcagcgtgtgctcgggcgctagcggtcggcgggcaggggcgggggatgaggcggacgacgagcgtagcgagctgagc

SEQ ID NO: 794786 - DNA, 120 bp, Artificial Sequence
  ENSG00000275832_32 (sequence is synthesized)
cacgtggagacggacactgagggcgcggcgggcgcggggcctggggggcgcctgacacgccggccgtccttcagctcgcaccacctcatgccctgcgacactctggcgcgccgccgcctg

SEQ ID NO: 794787 - DNA, 80 bp, Artificial Sequence
  ENSG00000275832_33 (sequence is synthesized)
gctcggcgtcgtccagcagccaggagtcgctgcggcccccggcggcggcgctggcctcccggccctcgcgcatggaggcg

SEQ ID NO: 794788 - DNA, 120 bp, Artificial Sequence
  ENSG00000275832_34 (sequence is synthesized)
cgcatggaggcgctgcgtctaaggctccgcggcacggcggacgacatgctcgccgtgcgcctgcggcggccgctgtcgcccgagacccggcggcgccggagcagctggcgccgccacacc

SEQ ID NO: 794789 - DNA, 120 bp, Artificial Sequence
  ENSG00000275832_35 (sequence is synthesized)
cgccgccacaccgtggtggtgcagagcccgctgactgacctcaacttcaacgagtggaaggagctgggcggagggggccccccggagcctgcgggcgcgcgggcgcacagtgacaacaag

SEQ ID NO: 794790 - DNA, 120 bp, Artificial Sequence
  ENSG00000275832_36 (sequence is synthesized)
caaggactccggactcagcagcctggagtccaccaaggcgcgggccccgtcgtccgctgcctcgcagccgcccgcgcccggggacacggggtccctgcagagccagcccccgcgccgctc

SEQ ID NO: 794791 - DNA, 120 bp, Artificial Sequence
  ENSG00000275832_37 (sequence is synthesized)
gcctcccgcctgcatcagtgtctgtgatccccacctcccgcgccgctcgggcgccacccctccctagagcccctttggaaccaggaggcttcaccagcctgcacctcctcttctgtggcc

SEQ ID NO: 794792 - DNA, 120 bp, Artificial Sequence
  ENSG00000275832_38 (sequence is synthesized)
cctgggtgcatggtgtgggtggagggcgcagcaggcagtgtctctagttggtgtgctggaactggcagggcagaggagaaggctggggccggactaattgaatggaagggggttccagag

SEQ ID NO: 794793 - DNA, 120 bp, Artificial Sequence
  ENSG00000275832_39 (sequence is synthesized)
gtgatgagcagaagaggagggggcgtgggctgctggggtctgtgtccctgcacacatgcgcccgataggtccttctgagcctttctgtggctgcacttggggacccttgtggaccatggg

SEQ ID NO: 794794 - DNA, 120 bp, Artificial Sequence
  ENSG00000275832_40 (sequence is synthesized)
gtgtggctagggaacccctaagtttcagactaaaggaaagatcctgggtgatgctggctttttgcttctttcttctgccctcccacctcagcttgtaagcggggatgtgtgtatgtctgg

SEQ ID NO: 794795 - DNA, 120 bp, Artificial Sequence
  ENSG00000275832_41 (sequence is synthesized)
ggagaggaggtgtagggtgcgtatgtccatggggggaggggcttgtgtgtgcagtcattgtcccaaggtgtttccagtagcgacttctgtccccctatccccaccctggtccccactttg

SEQ ID NO: 794796 - DNA, 120 bp, Artificial Sequence
  ENSG00000275832_42 (sequence is synthesized)
cgcccccgggctccctgcctttggtgcacacaggatcctgcccgccccccttgccagagccagagaagggggttggggccattccaaggaggcaggactgaaaccctcaccagggttact

SEQ ID NO: 794797 - DNA, 120 bp, Artificial Sequence
  ENSG00000275832_43 (sequence is synthesized)
ccccaacatccttttgcctgagtcaccctctaagcgctttaaccacgggcagctgcctgttccccagacagtttttggtggggggggtccagggtcccccttgctggtacctccctcacc

SEQ ID NO: 794798 - DNA, 120 bp, Artificial Sequence
  ENSG00000275832_44 (sequence is synthesized)
cctctttttgtttttccatctgtgcctgttccttccacagcccaggcacacagaagcccaccttcttccccttaggaggagggatagtcaacacccctgctgtctctctgtcactcacac

SEQ ID NO: 794799 - DNA, 120 bp, Artificial Sequence
  ENSG00000275832_45 (sequence is synthesized)
actgatttatggggtctgagctgggctgttcctgcaggatggacaggacccagcgccctcttctccccacaggctgtaaatagacttccaatcaccaggccagcccccacacaccctcac

SEQ ID NO: 794800 - DNA, 120 bp, Artificial Sequence
  ENSG00000275832_46 (sequence is synthesized)
tcattccagggaagcccaggtaggtggtgaacccgctgccacgtctatcagtcctcttgttttatgcaaagatttactgtaaagtagatttctttccctccctcccccattcttttattg

SEQ ID NO: 794801 - DNA, 120 bp, Artificial Sequence
  ENSG00000275832_47 (sequence is synthesized)
taaatattgtctctaaatgtgtaacatattataaagaatttataaggatttttaaagatgttttgctcatttacaaaagtgttgtaacagtgttggacaaagccttccaccccatgtccg

SEQ ID NO: 794802 - DNA, 120 bp, Artificial Sequence
  ENSG00000275832_48 (sequence is synthesized)
catggctcctttcactgtgtccttgacacacctctctggcaacaactaaaatttcctgcttctgaaaagtcctgtcttaaaagtacagtctatatcttggaaataaatagctttcctcaa

SEQ ID NO: 794803 - DNA, 120 bp, Artificial Sequence
  ENSG00000275832_49 (sequence is synthesized)
atcggtaaatgaggggccagtggctggcagcctgatgtcacttcctgcctctagaggaagtggcagttaacatcattttctcctccatccctctcccatagatggacatcagatgtccat

SEQ ID NO: 794804 - DNA, 120 bp, Artificial Sequence
  ENSG00000275832_50 (sequence is synthesized)
gaaggatgcgtgtgtgccggtctgctgtgcatgtgtgtatctgcatgtctgtgatgcatgcgcatgcgtctgtatgtgcattgtgtgtgcaggactttgattctgtgcaactctgtgcat

SEQ ID NO: 794805 - DNA, 120 bp, Artificial Sequence
  ENSG00000275832_51 (sequence is synthesized)
atctatgtgtctacaaaagtgtgcacatgtgtactcatttgtgtgtgtgtatctgtgtgtctgcatatttgcacatgcttgtctgtatgtttgtggtatgttccgtctacatgagtgtat

SEQ ID NO: 794806 - DNA, 120 bp, Artificial Sequence
  ENSG00000275832_52 (sequence is synthesized)
gtggctggggctgtgtctgcataagtatgtgtctatctgggagtgcatatatgtgtgcatgtgtgtgtgtgagattgtgcatgagctaagacaacgacaggcacttcctgggcaggaagg

SEQ ID NO: 794807 - DNA, 80 bp, Artificial Sequence
  ENSG00000275832_53 (sequence is synthesized)
gccttcagccgggaggcgcaggaggcgcggagccaatccagccgtcctgccgccgtccgcgcgggccgtccgtcccttcg

SEQ ID NO: 794808 - DNA, 80 bp, Artificial Sequence
  ENSG00000275832_54 (sequence is synthesized)
gagcgcgccgtcggcgtggactgcagcgccccggaaccgcgctgcctctggctgccctgcctcagccacagcgaccgccg

SEQ ID NO: 794809 - DNA, 120 bp, Artificial Sequence
  ENSG00000275832_55 (sequence is synthesized)
cgcgcccgggccgcgccgggccaggctgccactgggcccaagagatgggtgctctcctaggcgccccttcccctggcaggggccgaggacgctgctgctgtacaaaagtccccaggacgg

SEQ ID NO: 794810 - DNA, 120 bp, Artificial Sequence
  ENSG00000275832_56 (sequence is synthesized)
ggacagggcgcatggaggggccgcctccccctgcgccccccggggccggcgcggcgaggacggcatagcagggcccagcatggagcagctgccactgggcccaagagatgggtgctctcc

SEQ ID NO: 794811 - DNA, 120 bp, Artificial Sequence
  ENSG00000275832_57 (sequence is synthesized)
gccccaggaagggctcggcagctttagagcatgctgctagggtggtatatactcctccaaagccatgggctgcatttcaaggcaaggcaggaatggatcctggaatccctgctgccctgg

SEQ ID NO: 794812 - DNA, 120 bp, Artificial Sequence
  ENSG00000275832_58 (sequence is synthesized)
ccgagtgcccaaggtaagctgagaaattgcttaccttggcagtgtttggtgaggcatctgctgtagtagaaggacctggcctgggagttatgtggctaggaggcaatgtcactcagtagt

SEQ ID NO: 794813 - DNA, 120 bp, Artificial Sequence
  ENSG00000275832_59 (sequence is synthesized)
tagaagcacagactctgcagtcagacagtcctgggtttgagttctggctccaccatttagtagtttgggacattgggcaagttacttaaccactttctgatccttagcttcctcatctat

SEQ ID NO: 794814 - DNA, 120 bp, Artificial Sequence
  ENSG00000275832_60 (sequence is synthesized)
aaaatgggaatatcagtaaatctgtggggtgctataataaataaaacagatatcctttaaggtctttggagagcctaaagcaagcagaaggaaataaagagaggagcagaaatccatgaa

SEQ ID NO: 794815 - DNA, 120 bp, Artificial Sequence
  ENSG00000275832_61 (sequence is synthesized)
cagctcagatggtattgcctcccaaatgaacacagctgggctaccccaggtcaggtgcacacccgagtgtagctgtgacaaatacaacgacttcatcgaggccaaccgcattgaggacgc

SEQ ID NO: 794816 - DNA, 120 bp, Artificial Sequence
  ENSG00000275835_0 (sequence is synthesized)
agacgcgcgctgcaggagcgcggaacatggcgcggcacgggccaccgtggagtcggttggacgcgcagcaggagcgcgacgtgcgggagctcgtccggggtgtcgccggcctccaggacg

SEQ ID NO: 794817 - DNA, 120 bp, Artificial Sequence
  ENSG00000275835_1 (sequence is synthesized)
aggcagaccccaacttccagctcgccctaaacttcgcctggtccaacttcagatttcatcgtttcttggatgtcaacagccacaaaatagaaaaaacaatcgaaggaatttatgaaaaat

SEQ ID NO: 794818 - DNA, 120 bp, Artificial Sequence
  ENSG00000275835_2 (sequence is synthesized)
ttgtcattcattctgatctaagcaaagctgctagttggaagagattaacggaggaatttctaaatgcaccacttcccagtataaaggaaataaagacagatgcacattattccatactgt

SEQ ID NO: 794819 - DNA, 120 bp, Artificial Sequence
  ENSG00000275835_3 (sequence is synthesized)
cacttcttctgtgtctgtcagactctccttcaaacagcagttatgtggagacaccaagaaataaagaagtggaaaagaaagatgatttcgactggggaaaatacttgatggaagatgaag

SEQ ID NO: 794820 - DNA, 120 bp, Artificial Sequence
  ENSG00000275835_4 (sequence is synthesized)
aaatggacattggtccgtacatggacacaccaaattggtctgaagaaagtgaagaggaaaatgatcaacagcccttaagcagagaggactctggaattcaggtagacaggacaccgttag

SEQ ID NO: 794821 - DNA, 120 bp, Artificial Sequence
  ENSG00000275835_5 (sequence is synthesized)
aagaacaagatcaaaacagaaaactggatccttgtatcagttggaaagatgagccagatgaccgaagctggctggaacatcatgtggtccatcagtactggacagccaggccctcccagt

SEQ ID NO: 794822 - DNA, 120 bp, Artificial Sequence
  ENSG00000275835_6 (sequence is synthesized)
ttcctcatagtttacatttgcactctaatttagctgctgtctgggaccaacacttgtacagcagtgatccattgtatgttccagatgacagggttttggttactgagactcaggttattc

SEQ ID NO: 794823 - DNA, 120 bp, Artificial Sequence
  ENSG00000275835_7 (sequence is synthesized)
gggaaaccctatggttactttcaggagtgaaaaagctctttatatttcagttgatagatgggaaggtaactgtgagaaacaatattatagtaactcatttaacacatagctgtttacgat

SEQ ID NO: 794824 - DNA, 120 bp, Artificial Sequence
  ENSG00000275835_8 (sequence is synthesized)
ctgtgctggaacaaatagcagcatatggccaggttgtgtttcgactccaggagttcattgatgaagtcatgggacacagttctgagagcatgctgcctggaagtgggtctgttcctaaga

SEQ ID NO: 794825 - DNA, 120 bp, Artificial Sequence
  ENSG00000275835_9 (sequence is synthesized)
agtcaactgaagctccctttagaacctaccaggctttcatgtgggccctgtacaaatatttcattagtttcaaagaggaacttgcagaaattgagaagtgcatcatcaataatgatacta

SEQ ID NO: 794826 - DNA, 120 bp, Artificial Sequence
  ENSG00000275835_10 (sequence is synthesized)
caataactcttgcaatagtggtggacaagttggcacctcgattgtctcagctcaaggttctgcacaaagtgtttagtactggagtagcagaagttccacctgatactcgaaatgtcgtcc

SEQ ID NO: 794827 - DNA, 120 bp, Artificial Sequence
  ENSG00000275835_11 (sequence is synthesized)
gggcctctcacctgcttaacaccctgtacaaggccattcttgaatatgacaatgttggagaagcctctgagcaaaccgtctccctccttttctctctctgggtggaaacggtgcggcctt

SEQ ID NO: 794828 - DNA, 120 bp, Artificial Sequence
  ENSG00000275835_12 (sequence is synthesized)
acctgcagacggtggacgagtggatcgtgcacgggcacctgtgggatggcgccagggagttcatcatccagagaaacaaaaatgttccagttaatcacagagacttctggtatgcaactt

SEQ ID NO: 794829 - DNA, 120 bp, Artificial Sequence
  ENSG00000275835_13 (sequence is synthesized)
acacgttatatagcgtatcagaaaagacagaaaatgaagaaaaaatgagtgataacgctagtgcgagttccggcagtgaccaggggccctccagcaggcagcacaccatggtgtccttcc

SEQ ID NO: 794830 - DNA, 120 bp, Artificial Sequence
  ENSG00000275835_14 (sequence is synthesized)
tcaaacctgtcctgaagcagatcataatggctggcaagtcgatgcagctgctgaagaacctgcagtgtgcggagagcaccacctgccaggcaggagccagagatgcagaaagaaaaagtt

SEQ ID NO: 794831 - DNA, 120 bp, Artificial Sequence
  ENSG00000275835_15 (sequence is synthesized)
tacagtcccgtcttcgacatggagaagattccactccacaggttcttactgagcaacaggcaaccaaggagaacctgatgaagatgcagtccattgctgaaagccatcttgaactggatg

SEQ ID NO: 794832 - DNA, 120 bp, Artificial Sequence
  ENSG00000275835_16 (sequence is synthesized)
atgttcatgatccactgcttgccattaactttgcaaggatgtatttggagcagagtgactttcacgagaagtttgctggtggtgatgtatgtgtggatagatcatcggaatctgtgacat

SEQ ID NO: 794833 - DNA, 120 bp, Artificial Sequence
  ENSG00000275835_17 (sequence is synthesized)
gccagacttttgaattaacgctgagatcctgcctctatcctcatattgacaagcagtatctagattgctgtggaaatctcatgcaaactctaaaaaaagattacaggttggtagaatact

SEQ ID NO: 794834 - DNA, 120 bp, Artificial Sequence
  ENSG00000275835_18 (sequence is synthesized)
tgcaagctatgaggaattttttcttaatggaaggaggagataccatgtatgacttctacacgtcaatttttgataaaataagagaaaaggaaacatggcagaatgtgtcttttcttaatg

SEQ ID NO: 794835 - DNA, 120 bp, Artificial Sequence
  ENSG00000275835_19 (sequence is synthesized)
tccaactccaagaagcagtaggacagcgttatcctgaagatagttcacgtctatctatatcttttgaaaatgttgacacagctaagaagaagctgcctgttcatatcttagatggtctga

SEQ ID NO: 794836 - DNA, 120 bp, Artificial Sequence
  ENSG00000275835_20 (sequence is synthesized)
ccctcagctacaaggtcccatggcccgtggacattgttataagtttggaatgtcaaaaaatttataatcaagtgtttcttctcttattgcaaataaagtgggcaaaatatagtctggatg

SEQ ID NO: 794837 - DNA, 120 bp, Artificial Sequence
  ENSG00000275835_21 (sequence is synthesized)
ttttactttttggtgaactggttagtactgcagaaaaaccacgacttaaagaaggccttatacatgaacaagacacagttgctcagttcggaccacaaaaagaaccagtaagacagcaga

SEQ ID NO: 794838 - DNA, 120 bp, Artificial Sequence
  ENSG00000275835_22 (sequence is synthesized)
ttcatcgcatgttcctcttaagagtgaagctcatgcatttcgtgaacagcttgcacaactacatcatgaccaggattctacacagtacagggctggagtttcaacatcaagtcgaggaag

SEQ ID NO: 794839 - DNA, 120 bp, Artificial Sequence
  ENSG00000275835_23 (sequence is synthesized)
ccaaggatttagatcaattgattaaaattcactataggtatctgtcaaccatccatgaccggtgtctgctgagagaaaaggtcagctttgtgaaagaagctatcatgaaggtgttgaact

SEQ ID NO: 794840 - DNA, 120 bp, Artificial Sequence
  ENSG00000275835_24 (sequence is synthesized)
tggctctcatgtttgcagacggttggcaggcaggcctgggcacttggcgaatggaatctatagagaaaatggaatctgattttaaaaactgccatatgtttcttgtaaccattttaaaca

SEQ ID NO: 794841 - DNA, 120 bp, Artificial Sequence
  ENSG00000275835_25 (sequence is synthesized)
aagccgtctgtagaggatcctttccccatttggaatctctagcgttgtcactcatggctggcatggaacaaagttaaatgtcttcagcgtaataaatatctccgactttgtcatcataca

SEQ ID NO: 794842 - DNA, 120 bp, Artificial Sequence
  ENSG00000275835_26 (sequence is synthesized)
tgtacatttccaccatgtgcagctgaaaagtgaaaatatttttattttggtttatttgtaaaacttgtccacagtcagcctggcacagtcgctcatgcctctaatcccagcacgatggga

SEQ ID NO: 794843 - DNA, 80 bp, Artificial Sequence
  ENSG00000275835_27 (sequence is synthesized)
ccagcctgggcaacatggtgaaacccggtgtctaccaaaaatacaaaatgtatccagaaaagatgggaggattacttgag

SEQ ID NO: 794844 - DNA, 86 bp, Artificial Sequence
  ENSG00000275835_28 (sequence is synthesized)
cactactgcagtgcaacctgggtgacagagtgagaccctgactcagaaagaaccacttgcccacagtccagacagatggattgtag

SEQ ID NO: 794845 - DNA, 120 bp, Artificial Sequence
  ENSG00000275835_29 (sequence is synthesized)
aaagaaccacttgcccacagtccagacagatggattgtaggtgggttttctggagattagtagatactgtatagagttgtatacataaaattgtgtcagtagtacaaagtgtatataggc

SEQ ID NO: 794846 - DNA, 120 bp, Artificial Sequence
  ENSG00000275835_30 (sequence is synthesized)
tgtttactcttacatttcctactgtaagatacagatttatggtactgatacctttaaattatatcatattttgaaaatgtaattactgatattcaaaataaattaaaggacttaaaatca

SEQ ID NO: 794847 - DNA, 120 bp, Artificial Sequence
  ENSG00000275835_31 (sequence is synthesized)
aactaagtgtatgtgtcattgttttgttactgatcccatgaagaattagaaattctcaccattttcaaaactgaaaagtcccttagcagttgtcccatgctttgaattgctttttaagca

SEQ ID NO: 794848 - DNA, 120 bp, Artificial Sequence
  ENSG00000275835_32 (sequence is synthesized)
ttacggtgaggtgagtgtaagcctgaggatcttactttctggtataccatttattacaacagatttctaaaactcctattaaataaagttgatggcagaatagatttctgtcacacttca

SEQ ID NO: 794849 - DNA, 120 bp, Artificial Sequence
  ENSG00000275835_33 (sequence is synthesized)
aaagtaacacatttacttgattttttttttatcgatgtgtcttatatacagcttaatgtgcttgccccttcctgccaggaagtctgttagtccagagtttggcgttcattcattcactgt

SEQ ID NO: 794850 - DNA, 120 bp, Artificial Sequence
  ENSG00000275835_34 (sequence is synthesized)
gcaagtgggcgtcctacaggattgcccccgccgtcctcttaggatcagaacgccagagtatccagccagcctttgaagaatggtactttatgaaactgtctagatgtgcttattgaagga

SEQ ID NO: 794851 - DNA, 84 bp, Artificial Sequence
  ENSG00000275835_35 (sequence is synthesized)
cccatgctggagcgcattggcacagtcttggctcactgaagcctcaacctccggggagcaagcaatggaatctcactctgtgag

SEQ ID NO: 794852 - DNA, 120 bp, Artificial Sequence
  ENSG00000275835_36 (sequence is synthesized)
tcagctcactgcaacctctgcctccagagctcaagcaatccgcccaccttgacctcccaaaatgctgggattaccgacctgtgtgtactttataaattaaactttatcataggcctgcat

SEQ ID NO: 794853 - DNA, 120 bp, Artificial Sequence
  ENSG00000275835_37 (sequence is synthesized)
atatagaaaaatatatagtctatacagtgtagagtgtgctactatctgtcctttcagacatccaccaggggtcttgaagcttatcccccagaagatgaggtgggaactactgtaaataat

SEQ ID NO: 794854 - DNA, 120 bp, Artificial Sequence
  ENSG00000275835_38 (sequence is synthesized)
tttgaccctttgaaatctgatgagacttgttttacttcctaacatatggtatattttgtgaatgttacgtgtttatttgaaaactttaattcctgtcagtaacagcttgaagtcttcagt

SEQ ID NO: 794855 - DNA, 120 bp, Artificial Sequence
  ENSG00000275835_39 (sequence is synthesized)
tcagcagataaattgtaattttatttaattttagcccttaataaaagaggttaatgggaaagggaagcatacggggatctggaaaaaaaaaaaaagttggtggttgttgatcatttttta

SEQ ID NO: 794856 - DNA, 120 bp, Artificial Sequence
  ENSG00000275835_40 (sequence is synthesized)
tgtgtacacaaatgccaaaatggtgcgtattctagcagtagttttatggacatcaaatgcctgaaagaaagatcaggaagttgtatgtacagttgatctgaaatgcaacaacttgattag

SEQ ID NO: 794857 - DNA, 120 bp, Artificial Sequence
  ENSG00000275835_41 (sequence is synthesized)
aattattgttcactttttcctttgtgtataaaattataaatattaatcatattattactttgtcttctactaaacatactgtttaaaacaattgcaaaagaagtattttacagcgagagg

SEQ ID NO: 794858 - DNA, 120 bp, Artificial Sequence
  ENSG00000275835_42 (sequence is synthesized)
aatgccacttagagtttttattatataagatttgaaagttgcctagcagataagtagttctcgtgaatgcttcttttaaaattattttaaatttatatttttaagccattcatatctcta

SEQ ID NO: 794859 - DNA, 120 bp, Artificial Sequence
  ENSG00000275835_43 (sequence is synthesized)
aaaatcaaaaaactacagaagatttagaatgaaaaatctaaattattcttcctgcaccagtaccccagccagtcagttctcctctccagagacagccaggtccttggcttcttacgcatc

SEQ ID NO: 794860 - DNA, 120 bp, Artificial Sequence
  ENSG00000275835_44 (sequence is synthesized)
cttccagaaagagtttcaacatacatgagcagtgcatatacatatacgcatacctagcagtcattacactgctctcttcaaatttttccagtttaaattttgaggataataccatacata

SEQ ID NO: 794861 - DNA, 120 bp, Artificial Sequence
  ENSG00000275835_45 (sequence is synthesized)
tatgaagagcttctgttttcctttttacaaattgagtgtttcatcatatggtcgtgtcatagcccagtccccttaatggatttaggttgttcccaggcttttgctattgccagtagtgct

SEQ ID NO: 794862 - DNA, 120 bp, Artificial Sequence
  ENSG00000275835_46 (sequence is synthesized)
gcagtgataatcacttctacatatccgttatcgtacacaggcagtgagttatctgtagggtaggttctttttttttttttttcatttgagacggagtctcgctctgttacctaggctgga

SEQ ID NO: 794863 - DNA, 120 bp, Artificial Sequence
  ENSG00000275835_47 (sequence is synthesized)
ccatcctcctgcctcagcctcccgagtaactgattacaggcacctgccaccatccccagctaatttttgtattttcaatagagacaggctttcaccatgttgaccaccttggcctcccaa

SEQ ID NO: 794864 - DNA, 120 bp, Artificial Sequence
  ENSG00000275835_48 (sequence is synthesized)
gaatatgacaatgttggagaagcctctgagcaaacctgaccagggaaccctgagagctgaccgtgcacactctctgcctcaggtctccctccttttctctctctgggtggaaacggtgcg

SEQ ID NO: 794865 - DNA, 120 bp, Artificial Sequence
  ENSG00000275895_0 (sequence is synthesized)
gacgtctcccgcgggcgtcggcagggtcggcggcgtcggcagcagtgtcgacggcagcggcggcggcgggtgggaaatggcggagtatctggcctccatcttcggcaccgagaaagacaa

SEQ ID NO: 794866 - DNA, 120 bp, Artificial Sequence
  ENSG00000275895_1 (sequence is synthesized)
agtcaactgttcattttatttcaaaattggagcatgtcgtcatggagacaggtgctctcggttgcacaataaaccgacgtttagccagaccattgccctcttgaacatttaccgtaaccc

SEQ ID NO: 794867 - DNA, 120 bp, Artificial Sequence
  ENSG00000275895_2 (sequence is synthesized)
tcaaaactcttcccagtctgctgacggtttgcgctgtgccgtgagcgatgtggagatgcaggaacactatgatgagttttttgaggaggtttttacagaaatggaggagaagtatgggga

SEQ ID NO: 794868 - DNA, 120 bp, Artificial Sequence; identical to SEQ ID NO: 474999
  ENSG00000275895_3 (sequence is synthesized)

SEQ ID NO: 794869 - DNA, 120 bp, Artificial Sequence; identical to SEQ ID NO: 475000
  ENSG00000275895_4 (sequence is synthesized)

SEQ ID NO: 794870 - DNA, 120 bp, Artificial Sequence; identical to SEQ ID NO: 475001
  ENSG00000275895_5 (sequence is synthesized)

SEQ ID NO: 794871 - DNA, 120 bp, Artificial Sequence; identical to SEQ ID NO: 475002
  ENSG00000275895_6 (sequence is synthesized)

SEQ ID NO: 794872 - DNA, 66 bp, Artificial Sequence; identical to SEQ ID NO: 475060
  ENSG00000275895_7 (sequence is synthesized)

SEQ ID NO: 794873 - DNA, 120 bp, Artificial Sequence; identical to SEQ ID NO: 475061
  ENSG00000275895_8 (sequence is synthesized)

SEQ ID NO: 794874 - DNA, 120 bp, Artificial Sequence; identical to SEQ ID NO: 475062
  ENSG00000275895_9 (sequence is synthesized)

SEQ ID NO: 794875 - DNA, 120 bp, Artificial Sequence; identical to SEQ ID NO: 475063
  ENSG00000275895_10 (sequence is synthesized)

SEQ ID NO: 794876 - DNA, 120 bp, Artificial Sequence; identical to SEQ ID NO: 475064
  ENSG00000275895_11 (sequence is synthesized)

SEQ ID NO: 794877 - DNA, 120 bp, Artificial Sequence
  ENSG00000275895_12 (sequence is synthesized)
tgatagacctgttgatcttctgtatctgtttggaaggatttaaaatgtttctctgctaataaacatacatgagttatatctaatgacactttgtagtgtataacgagtcttaaaccactg

SEQ ID NO: 794878 - DNA, 120 bp, Artificial Sequence; identical to SEQ ID NO: 475066
  ENSG00000275895_13 (sequence is synthesized)

SEQ ID NO: 794879 - DNA, 120 bp, Artificial Sequence
  ENSG00000275895_14 (sequence is synthesized)
ccagggcgagacggcggcgtggccgcttagtgtgccggggccaaggccaacaggcgaaagcgagacagtggtgcagccgcttagtgtgccggggccaaggccgacagaggatggggtgcc

SEQ ID NO: 794880 - DNA, 120 bp, Artificial Sequence
  ENSG00000275895_15 (sequence is synthesized)
tgtcgccatgcaccttgagatcctggatgctcaggcgcacagcagggctcaggtgcactggctcggcgcctaccggctgcgtcatatgtggcggtggccagcccacacgtgcgcccagcc

SEQ ID NO: 794881 - DNA, 120 bp, Artificial Sequence; identical to SEQ ID NO: 475069
  ENSG00000275895_16 (sequence is synthesized)

SEQ ID NO: 794882 - DNA, 120 bp, Artificial Sequence; identical to SEQ ID NO: 475070
  ENSG00000275895_17 (sequence is synthesized)

SEQ ID NO: 794883 - DNA, 120 bp, Artificial Sequence
  ENSG00000275895_18 (sequence is synthesized)
agttaatctcattgaaaataaaggatttttcaattatcctgtaatactattccaccttactatacctgagtgtgtatatctctctctgatacatacttggattggtaattgagaaagtct

SEQ ID NO: 794884 - DNA, 120 bp, Artificial Sequence
  ENSG00000275895_19 (sequence is synthesized)
agcccatttccagagagctgcggcgggagctgtatggccgccgtcgcaagaagtgagtattcctgtgcccgttgttaagctcagtggcttctttctcccctcacaaccctcccccttcca

SEQ ID NO: 794885 - DNA, 120 bp, Artificial Sequence
  ENSG00000275895_20 (sequence is synthesized)
aaaaaaaaattttggcataggtgttgtttctgttttttaaaaggcagtgcttagaacatagtacatatttttaaatatccaaatgtcctctttggagaagaatattcacctgcacacagg

SEQ ID NO: 794886 - DNA, 120 bp, Artificial Sequence
  ENSG00000275895_21 (sequence is synthesized)
taacttcattatccaacttctcaagtagagatcagatcttagtaatcaagcaagagggcggttagctgggcagccgcggacatgaggctcgtggtgaaagtgggcatgcagtttattctc

SEQ ID NO: 794887 - DNA, 120 bp, Artificial Sequence
  ENSG00000275895_22 (sequence is synthesized)
ccagatattacgaagaagaagaatagatgttgtaacctcctttagatcagggatggcttccctgggacacattggaagaagaattgtcttgggtcacaaataaaatacactaatgatagc

SEQ ID NO: 794888 - DNA, 120 bp, Artificial Sequence
  ENSG00000275895_23 (sequence is synthesized)
tgataactttttttttaattgcaaaaaaaatctcataatgttttaagcaagttgatgaatttgtgttgggctgcaggttggacaagcttttgctttacatatttcacatgtccactgggg

SEQ ID NO: 794889 - DNA, 120 bp, Artificial Sequence
  ENSG00000275895_24 (sequence is synthesized)
tttcttttggttttgcttgttggttttagggcatttcattatgtcttgggatcgctggcatcctcccttcgggacactggcagaatcaggcccagcggtcacatctctctgatcctacat

SEQ ID NO: 794890 - DNA, 120 bp, Artificial Sequence
  ENSG00000275895_25 (sequence is synthesized)
ttaaatgtacgacaggtcacagagcagagaaaatcaagacgtcagaatcgaaccgattgagttctgagtctggagaggttctcatccctcttctgttaaacatggactagtaaatagatg

SEQ ID NO: 794891 - DNA, 120 bp, Artificial Sequence
  ENSG00000275895_26 (sequence is synthesized)
ggtggcgattgttttattgtcagcattcaagaagcataagagaaaaacaggcctgctctccccagcccaaaaacctgatggacacagtagctatgagcgcctgaagcgtggggtcagtga

SEQ ID NO: 794892 - DNA, 120 bp, Artificial Sequence
  ENSG00000275895_27 (sequence is synthesized)
gggttgaagatggtatgtgtccagctcattttgattatgatttcctgtgaccatttgagttggttctagaagaagacagaagatgcaaggtattacacctgttcacttctaagttgcaca

SEQ ID NO: 794893 - DNA, 120 bp, Artificial Sequence
  ENSG00000275895_28 (sequence is synthesized)
tttttttctcctgaaacttttcacacctgaaatcagggtgtgtctcagtcacggcgtgcagtctcttcagcagtgtttttccttatcagtgccgttggcttgaggagctgcgcgtgttga

SEQ ID NO: 794894 - DNA, 120 bp, Artificial Sequence
  ENSG00000275895_29 (sequence is synthesized)
gagagtgggtgtggttctgtgctgcgtgccgtggtttggatggcacggttttctttattttccttggttgcaggcatagatcaagatcccgatcccgggagcgtcgttctcggtctagag

SEQ ID NO: 794895 - DNA, 120 bp, Artificial Sequence; identical to SEQ ID NO: 475003
  ENSG00000275895_30 (sequence is synthesized)

SEQ ID NO: 794896 - DNA, 120 bp, Artificial Sequence; identical to SEQ ID NO: 475004
  ENSG00000275895_31 (sequence is synthesized)

SEQ ID NO: 794897 - DNA, 120 bp, Artificial Sequence; identical to SEQ ID NO: 475005
  ENSG00000275895_32 (sequence is synthesized)

SEQ ID NO: 794898 - DNA, 120 bp, Artificial Sequence; identical to SEQ ID NO: 475006
  ENSG00000275895_33 (sequence is synthesized)

SEQ ID NO: 794899 - DNA, 120 bp, Artificial Sequence; identical to SEQ ID NO: 475007
  ENSG00000275895_34 (sequence is synthesized)

SEQ ID NO: 794900 - DNA, 120 bp, Artificial Sequence; identical to SEQ ID NO: 475008
  ENSG00000275895_35 (sequence is synthesized)

SEQ ID NO: 794901 - DNA, 120 bp, Artificial Sequence; identical to SEQ ID NO: 475009
  ENSG00000275895_36 (sequence is synthesized)

SEQ ID NO: 794902 - DNA, 120 bp, Artificial Sequence; identical to SEQ ID NO: 475010
  ENSG00000275895_37 (sequence is synthesized)

SEQ ID NO: 794903 - DNA, 120 bp, Artificial Sequence; identical to SEQ ID NO: 475011
  ENSG00000275895_38 (sequence is synthesized)

SEQ ID NO: 794904 - DNA, 87 bp, Artificial Sequence; identical to SEQ ID NO: 475012
  ENSG00000275895_39 (sequence is synthesized)

SEQ ID NO: 794905 - DNA, 120 bp, Artificial Sequence
  ENSG00000275895_40 (sequence is synthesized)
gtctggagctgctgctgccccttcttcctttactttggccgtcatcctagagggaatgtactggaattaaacgtcgagtcatattcttccctcttagagcaacaaaatttgaatgtttct

SEQ ID NO: 794906 - DNA, 120 bp, Artificial Sequence
  ENSG00000275895_41 (sequence is synthesized)
ctcactttctggaatttttaaaaagcaaactttttaagttattttttcagattttatttctcattagccttttttccttgaactccattttggagtgcaccctgtagttgtaagagcatt

SEQ ID NO: 794907 - DNA, 120 bp, Artificial Sequence
  ENSG00000275895_42 (sequence is synthesized)
gagggtctgcagcttgcactgacccctgagttcctcacccaccagccccgtgccgacccgtctaacccgtgtgggggtgctccactcaaataggcccttggcagaaaagattgtccgttc

SEQ ID NO: 794908 - DNA, 120 bp, Artificial Sequence
  ENSG00000275895_43 (sequence is synthesized)
tgtccacacactgcctggatacagtctccagctctaggagatggaattggtttgctccatttagaaatagatcaaaactgggcattcagtagatggtaccaatatcttcctgtactggga

SEQ ID NO: 794909 - DNA, 80 bp, Artificial Sequence
  ENSG00000275895_44 (sequence is synthesized)
atgataatgttcagaaaactaaaatttgatttttacagccatccaactatagaatcattagaatttagtcatttatggat

SEQ ID NO: 794910 - DNA, 120 bp, Artificial Sequence
  ENSG00000275895_45 (sequence is synthesized)
atagaatcattagaatttagtcatttatggataaattaaaatgaacacctggactcttgttaaaatcagaaagtccaaaccaaagataggcacttcccattcaccattctgttttaaagc

SEQ ID NO: 794911 - DNA, 120 bp, Artificial Sequence
  ENSG00000275895_46 (sequence is synthesized)
agtaaaaattgaggtgcccttggatatccacaagcctaaattgagtacacccttgaaccagagcccctcagttaatggggtgaccgacatggggtagctgatcccagggggcattcccct

SEQ ID NO: 794912 - DNA, 120 bp, Artificial Sequence
  ENSG00000275895_47 (sequence is synthesized)
ctcgagctggccctgcactgggtggcctggggattgtgcttccttgcacagtggtgcacatttctatgtgtggatgagattttcttgtcaacttttcctgccaagacactaaatgctttt

SEQ ID NO: 794913 - DNA, 120 bp, Artificial Sequence
  ENSG00000275895_48 (sequence is synthesized)
cagtgctaatactgacctgatagtagagatttctttccctgagtcggatggtagcaggatttacttggtaacccttggtttaaaatacctgtttttttgtttgtttgttttcttttgttt

SEQ ID NO: 794914 - DNA, 120 bp, Artificial Sequence
  ENSG00000275895_49 (sequence is synthesized)
tttaaggaaataagatcaataggcggagggaaattgtttctatatgcacttattaaataatttttgttaacaaccctgccctgggataaaagtgaatggaagtacatgactgagtaacag

SEQ ID NO: 794915 - DNA, 120 bp, Artificial Sequence
  ENSG00000275895_50 (sequence is synthesized)
taattaattctttgccctgatcgtttatttggggactgtatatgctttcttgactgacaatagaatgttgtattagttttcattgtgtctttatttgcagttcacagcacttttgttttc

SEQ ID NO: 794916 - DNA, 120 bp, Artificial Sequence
  ENSG00000275895_51 (sequence is synthesized)
catatgctacaaactaaaagtttagcaattacgttatattccaattctggagtccagattgtacaaattagatgaaattctaattcgtcattttaggaagaaatcaattacctaaaatta

SEQ ID NO: 794917 - DNA, 120 bp, Artificial Sequence
  ENSG00000275895_52 (sequence is synthesized)
ctggctcttttcaacataccctttagtatgtaaaaaaataagcttcaaatgcgtgggttaaagttaactatcaatcccagtttaagaatgatatttctgtaagaaaactgctttattttc

SEQ ID NO: 794918 - DNA, 120 bp, Artificial Sequence
  ENSG00000275895_53 (sequence is synthesized)
caagttgtagtatttaacataggctgagtcacaaataagtttttaattgtatcttaatgcagttgtctctgcctttcaagtcactttgattgaaacattttaagcagaacaaatatagcc

SEQ ID NO: 794919 - DNA, 120 bp, Artificial Sequence
  ENSG00000275895_54 (sequence is synthesized)
aataatttaaaataatcaccccaaaaccatttctcaaacctgctaaaactttgagcatgtgaataattttctcctcttcacattcttcttatgtgggaaggaagtgaatttgaaatatta

SEQ ID NO: 794920 - DNA, 120 bp, Artificial Sequence
  ENSG00000275895_55 (sequence is synthesized)
aaatctgccctttggaataggctactttggccgtttataacttgatttctactcggggaggaaggtacattcccaatagctttccaattgggatatcctgtgatatgattggcaggctgt

SEQ ID NO: 794921 - DNA, 120 bp, Artificial Sequence
  ENSG00000275895_56 (sequence is synthesized)
ccgagtagttacacttaataaaatttgggttcgaaagcagattcctggaagttcaaaaataattaaaacagccccggataggttagaaagtgaacttaaatcattctcagaattagaaaa

SEQ ID NO: 794922 - DNA, 63 bp, Artificial Sequence
  ENSG00000275895_57 (sequence is synthesized)
ttagaaaataagaagttattttttatcttcaaagataaaaaagtggatcacgaggtcgagaga

SEQ ID NO: 794923 - DNA, 120 bp, Artificial Sequence; identical to SEQ ID NO: 475037
  ENSG00000275895_58 (sequence is synthesized)

SEQ ID NO: 794924 - DNA, 120 bp, Artificial Sequence; identical to SEQ ID NO: 475038
  ENSG00000275895_59 (sequence is synthesized)

SEQ ID NO: 794925 - DNA, 120 bp, Artificial Sequence
  ENSG00000275895_60 (sequence is synthesized)
aacaatacagtttcttcttggttgctggctgacttgacccaagtcactgctcaaactctgttttcataatatgatggttttggtgtactcttcagaagacaaatgtctgacttgcgggaa

SEQ ID NO: 794926 - DNA, 120 bp, Artificial Sequence
  ENSG00000275895_61 (sequence is synthesized)
aaaaacaaacgtttagccatttgcaaacaaattgtctctttgcaattgtctaatatatgcacagcagccagtagaattcccctttttatttttttttccccgcagaccatcttgattcaa

SEQ ID NO: 794927 - DNA, 120 bp, Artificial Sequence
  ENSG00000275895_62 (sequence is synthesized)
atgtaaattataaaaacttcatgttcttttcaaagacagttaatttctacatattaagcaagtcattttttctctcgtagttgtattttccatttgtgttcataagtgtgttcttttatt

SEQ ID NO: 794928 - DNA, 120 bp, Artificial Sequence
  ENSG00000275895_63 (sequence is synthesized)
taaataatagtgaggcaggtgatcgacttccagtggaaggtctgagaccaccactccttgtttttatcattagagaaactttaaaaatcagtttttgatgtttgtgtgttggctgtgcct

SEQ ID NO: 794929 - DNA, 120 bp, Artificial Sequence
  ENSG00000275895_64 (sequence is synthesized)
gatatttgctgccctgccatcttccctaccccctctgatagacatgggtccagagggggtggccgtgccagccttgggttagcctcctccaggcaccagtggacacggagtgggctttct

SEQ ID NO: 794930 - DNA, 120 bp, Artificial Sequence
  ENSG00000275895_65 (sequence is synthesized)
gctctttgctgtctccagacagtagaggtgatggagccatcttccaagttagcgtgattgtcaccaggcccatcatgctgctcgagcttctctggctgcgtcctcactttcacatcccta

SEQ ID NO: 794931 - DNA, 120 bp, Artificial Sequence
  ENSG00000275895_66 (sequence is synthesized)
gctgaggaaacagcgagtcgcatcacgtcatggaaacatgaaaaattaagctgaaaggtagaaaatgggccgtaaattgctcttagcgggtctgtttggttaattgaggagtgcctgtta

SEQ ID NO: 794932 - DNA, 120 bp, Artificial Sequence
  ENSG00000275895_67 (sequence is synthesized)
tcttgggcttagatccgctctgagttcagttcaatcaaaagttgtgagttttgatagttttatttttggttagttgaagaaaaggcaaaggttggtacactataaaggatcacttacgga

SEQ ID NO: 794933 - DNA, 120 bp, Artificial Sequence
  ENSG00000275895_68 (sequence is synthesized)
ttaaagggagaaggcacctctaatcggagcagaaaacttgtgcccacgttgatgagaacatttgaaatttgaaaatcgatgcccaagtctttccagatggagggctggggaactccttcc

SEQ ID NO: 794934 - DNA, 120 bp, Artificial Sequence
  ENSG00000275895_69 (sequence is synthesized)
aacccacccttgaagtctaaatgtgcagcctctgagctgttgagtagctattatgcgtggtccctgggagctgccaggctctgcctttgagctcacatctgtctgtatacgttttcctgt

SEQ ID NO: 794935 - DNA, 120 bp, Artificial Sequence
  ENSG00000275895_70 (sequence is synthesized)
aagcatttaagaaaatctaccactttgtgtaagtgagctgggagaaggaaacatgggttttttccggttgaagcccatggacgaccccacagcacacagtgtttttagaagggaagagga

SEQ ID NO: 794936 - DNA, 120 bp, Artificial Sequence
  ENSG00000275895_71 (sequence is synthesized)
tgatggcttttccctccattatgctaattaccaagtggttagtataatagcagtctgtcttttgatagctctgaacatgagtttctttttacaaatttcaaaatcttggagaactagctt

SEQ ID NO: 794937 - DNA, 120 bp, Artificial Sequence
  ENSG00000275895_72 (sequence is synthesized)
tacattttctgtgtattgcaattgttttttctttaatgttttgatttatgaaccgaatctcccctaactaaaccagtggccatggattgtggtataaccaagcatcttaagtgaccaccc

SEQ ID NO: 794938 - DNA, 120 bp, Artificial Sequence
  ENSG00000275895_73 (sequence is synthesized)
agttctttgattttggggggtgtcccaagtgttgggctgagagaaatcaactgttccctattctaaaagttttctttaatctggctggaggcactttctttatgtttttctggatcatag

SEQ ID NO: 794939 - DNA, 120 bp, Artificial Sequence
  ENSG00000275895_74 (sequence is synthesized)
attacctgagaatgtgaaatgtgaagttaatttaggcattccaggtcagtgctggggagagcccattggagctcgatggggtcagtagtatgtgtcagcttaagcatcctagtttgatgc

SEQ ID NO: 794940 - DNA, 120 bp, Artificial Sequence
  ENSG00000275895_75 (sequence is synthesized)
gtgggtttgttttggttggttttaggcaatcctagccacccttggctttcccattagactgcattgcctctttacgttaagcttccttcattaaatagccactgccagaatacctgagtg

SEQ ID NO: 794941 - DNA, 120 bp, Artificial Sequence
  ENSG00000275895_76 (sequence is synthesized)
agaccaactgaattttactgttgaataattgggctcagtttagcttttcatcagggttgtcatggtacggtcatttcagttcaaagctgagtcaagtcagctttgggaagcctcccaggc

SEQ ID NO: 794942 - DNA, 120 bp, Artificial Sequence
  ENSG00000275895_77 (sequence is synthesized)
ctgagttcagttgactcagggctgtacttggcggcttatggaagaaacggggccctgatgcaggtctgagtggttcagtgtggacagtttgtcagacctccctcttaggtggggtgggct

SEQ ID NO: 794943 - DNA, 120 bp, Artificial Sequence
  ENSG00000275895_78 (sequence is synthesized)
tcccagctgcacacctttgactgaggaactcttcatacaaccactcccctttaaacagagctagaaatggagctggctggttttataaaaccaccacttacaaaactgcttcacgtggat

SEQ ID NO: 794944 - DNA, 120 bp, Artificial Sequence
  ENSG00000275895_79 (sequence is synthesized)
gcgagtgattgctttagcttgtaaatctctagcataattcagggtgggtttctttataagctgcttacagtgatatggacgttaagattcatgtaatatattagcctactaacttaaaca

SEQ ID NO: 794945 - DNA, 120 bp, Artificial Sequence
  ENSG00000275895_80 (sequence is synthesized)
tggtttgttttttcagacaacttgattttaagaagaacggtacagtgtaaggtttcaagtctgcctgatccagtttaaagcacaagggctaaaaggattttttttccttaaaagaaggat

SEQ ID NO: 794946 - DNA, 120 bp, Artificial Sequence; identical to SEQ ID NO: 475031
  ENSG00000275895_81 (sequence is synthesized)

SEQ ID NO: 794947 - DNA, 120 bp, Artificial Sequence
  ENSG00000275895_82 (sequence is synthesized)
taaggtggttcctaaggtgggtttggtcagtcccctaatagtttgttttcagtgtattgagaccaggagaattgatttacttcagacctattttttgaaactccctgttggtctggtgtc

SEQ ID NO: 794948 - DNA, 120 bp, Artificial Sequence; identical to SEQ ID NO: 475033
  ENSG00000275895_83 (sequence is synthesized)

SEQ ID NO: 794949 - DNA, 120 bp, Artificial Sequence
  ENSG00000275895_84 (sequence is synthesized)
ggcattgtcatcatttacagatgacatctgagagctagggtgacttgcccaagcccaagcagctggtagcagagttgggatcttaaccctcaccacaccggtcttttcaagagagaactt

SEQ ID NO: 794950 - DNA, 120 bp, Artificial Sequence; identical to SEQ ID NO: 475035
  ENSG00000275895_85 (sequence is synthesized)

SEQ ID NO: 794951 - DNA, 120 bp, Artificial Sequence; identical to SEQ ID NO: 475036
  ENSG00000275895_86 (sequence is synthesized)

SEQ ID NO: 794952 - DNA, 120 bp, Artificial Sequence
  ENSG00000275896_0 (sequence is synthesized)
atgaatctacttctgatccttacctttgttgcagctgctgttgctgccccctttgatgatgatgacaagatcgttgggggctacatctgtgaggagaattctgtcccctaccaggtgtcc

SEQ ID NO: 794953 - DNA, 120 bp, Artificial Sequence
  ENSG00000275896_1 (sequence is synthesized)
ttgaattctggctaccacttctgcggtggctccctcatcagcgaacagtgggtggtgtcagcaggtcactgctacaagtcccgcatccaggtgagactgggagagcacaacatcgaagtc

SEQ ID NO: 794954 - DNA, 120 bp, Artificial Sequence
  ENSG00000275896_2 (sequence is synthesized)
ctggaggggaatgaacagttcatcaatgcggccaagatcatccgccaccccaaatacaacagccggactctggacaatgacatcctgctgatcaagctctcctcacctgccgtcatcaat

SEQ ID NO: 794955 - DNA, 120 bp, Artificial Sequence
  ENSG00000275896_3 (sequence is synthesized)
aacactctgagttctggtgccgactacccagacgagctgcagtgcctggatgctcctgtgctgagccaggctgagtgtgaagcctcctaccctggaaagattaccaacaacatgttctgt

SEQ ID NO: 794956 - DNA, 120 bp, Artificial Sequence
  ENSG00000275896_4 (sequence is synthesized)
gtgggcttcctcgagggaggcaaggattcctgccagggtgattctggtggccctgtggtctccaatggagagctccaaggaattgtctcctggggctatggctgtgcccagaagaacagg

SEQ ID NO: 794957 - DNA, 120 bp, Artificial Sequence
  ENSG00000275896_5 (sequence is synthesized)
cctggagtctacaccaaggtctacaactatgtggactggattaaggacaccatagctgccaacagctaaagcccctggtccctctgcagtctctataccaataaagtgaccctgctctca

SEQ ID NO: 794958 - DNA, 120 bp, Artificial Sequence
  ENSG00000275896_6 (sequence is synthesized)
tggtggaaaagaaaacttgttggcagcagctgactctccagagcagagagtgaacacaagacaggaagccctcacacccaggcaaatccatgaaacagcaagggttgtggtcataaaagc

SEQ ID NO: 794959 - DNA, 120 bp, Artificial Sequence
  ENSG00000275896_7 (sequence is synthesized)
aggcagggatgatcttggggtggtgagagctagtgagaagagcaggctagtacttttgctggttagctacacattaaagccacctaagaatgagtacttaaaaatactgatccctgtgtt

SEQ ID NO: 794960 - DNA, 67 bp, Artificial Sequence; identical to SEQ ID NO: 793603
  ENSG00000275954_0 (sequence is synthesized)

SEQ ID NO: 794961 - DNA, 120 bp, Artificial Sequence
  ENSG00000275969_0 (sequence is synthesized)
agtccctagtccccacggggatgcccagagctcagttgcttgaaagcaacgcgcctattcacatggagaatcttccctttcctttaaaattacttagtgcctcatcgctaaacgccccca

SEQ ID NO: 794962 - DNA, 120 bp, Artificial Sequence
  ENSG00000275969_1 (sequence is synthesized)
gttccacaccatgggtgttggatatcttcctcactttggtgtttgccctggggttcttcttcctattactcccctacttatcttacttccgttgtgatgacccaccctcaccatcgcctg

SEQ ID NO: 794963 - DNA, 120 bp, Artificial Sequence
  ENSG00000275969_2 (sequence is synthesized)
ggaagagaaagtgtccagtagggcggaggcggaggcccagaggcaggatgaaaaaccacagtctgagagctggtagagagtgccggagaggcctggaggagacttcggacctgctttcac

SEQ ID NO: 794964 - DNA, 120 bp, Artificial Sequence
  ENSG00000275969_3 (sequence is synthesized)
aactgcagagcctcctggggccacaccttgacaaaggtgactttggtcagctctccggtccagaccccccaggtgaggtgggcgaaagagcacctgatggagcctcccagtcctctcatg

SEQ ID NO: 794965 - DNA, 120 bp, Artificial Sequence
  ENSG00000275969_4 (sequence is synthesized)
agcctatggaagatgctgctcccattctctccctgttagcttccccggatcctcaagccaagcatcctcaggatctggcctccaccccatcaccaggcccaatgaccacctcagtctcct

SEQ ID NO: 794966 - DNA, 120 bp, Artificial Sequence
  ENSG00000275969_5 (sequence is synthesized)
ccctaagtgcctcccagccaccagaaccttcccttcccctagaacacccctcacccgagccacctgcacttttccctcacccaccacacacccctgatcctctggcctgctctctgcctc

SEQ ID NO: 794967 - DNA, 120 bp, Artificial Sequence
  ENSG00000275969_6 (sequence is synthesized)
ctccaaaaggcttcactgctcctcccctgcgggactccacactgataactccatctcactgtgactcagtggcacttccactgggcaccgtccctcaaagcttgtctccacatgaggatt

SEQ ID NO: 794968 - DNA, 120 bp, Artificial Sequence
  ENSG00000275969_7 (sequence is synthesized)
tggtggcttctgtcccagccatctcaggccttggtggctcaaacagtcatgtttctgcctcctcccggtggcaggagactgccagaacctcgtgcgcctttaactcatcagtccagcaag

SEQ ID NO: 794969 - DNA, 120 bp, Artificial Sequence
  ENSG00000275969_8 (sequence is synthesized)
atcatctttcccgccacccaccagagacctgtcagatggaagctggtagcctgtttttgctcagctctgatggccagaatgtcgtggggatacaagtcacagaaacagccaaggtcaaca

SEQ ID NO: 794970 - DNA, 120 bp, Artificial Sequence
  ENSG00000275969_9 (sequence is synthesized)
tttgggaagaaaaagaaaatgttggatcatttacaaatcgaatgaccccagaaaagcacttaaattctttgcggaatttggctaaatcattggatgctgagcaggacaccacaaacccaa

SEQ ID NO: 794971 - DNA, 120 bp, Artificial Sequence
  ENSG00000275969_10 (sequence is synthesized)
aacccttctggaacatgggagagaactcgaaacagctgcccggacctcagaagctctcagatcctaggctctggcaggaaagtttttggaagaattatagccagcttttctggggcctcc

SEQ ID NO: 794972 - DNA, 120 bp, Artificial Sequence
  ENSG00000275969_11 (sequence is synthesized)
cctctctgcacagcgagtccctggtggctaacgcctgggtaactgacaggtcttatactttacagtctcctcctttcttgttcaatgaaatgtccaatgtctgcccaattcaaagggaga

SEQ ID NO: 794973 - DNA, 120 bp, Artificial Sequence
  ENSG00000275969_12 (sequence is synthesized)
ctacaatgtccccactgcttttccaggcccagcccctgtcccatctggggcccgagtgccaaccctttatttcatccacaccccaattccggcccacacctatggctcaggccgaggctc

SEQ ID NO: 794974 - DNA, 120 bp, Artificial Sequence
  ENSG00000275969_13 (sequence is synthesized)
aggcccatcttcaatcttctttcccagtcctatctcctgcttttccatccctgattcagaacactggagtagcttgccctgcatcgcagaataaagtgcaagctctctccctacctgaaa

SEQ ID NO: 794975 - DNA, 120 bp, Artificial Sequence
  ENSG00000275969_14 (sequence is synthesized)
ctcagcaccctgaatggcctttgttgaggagacaactagaaggtaggttggctttaccctctagggtccaaaaatctcaggacgtctttagtgtctccactcctaaccttccccaggaaa

SEQ ID NO: 794976 - DNA, 120 bp, Artificial Sequence
  ENSG00000275969_15 (sequence is synthesized)
gtttgacatccattctgcctgagaactttccagtcagtcctgaactccggagacaactggagcaacacataaaaaagtggatcatccaacactggggcaacctgggaaggatccaagagt

SEQ ID NO: 794977 - DNA, 120 bp, Artificial Sequence
  ENSG00000275969_16 (sequence is synthesized)
ctctggatctgatgcagcttcaggacgaatcaccagggacaagtcaggccaagggcaaacccagtccctggcagtcctccatgtccacaggtgaaagcagcaaggaggcacagaaggtga

SEQ ID NO: 794978 - DNA, 120 bp, Artificial Sequence
  ENSG00000275969_17 (sequence is synthesized)
ccacaaaatctatccagggatatgaaaagcttcccacggaaggttctgggggtgacttctgaggagttggaaaggaacttgaggaagcccttgaggagtgactcgggaagtgatttatta

SEQ ID NO: 794979 - DNA, 120 bp, Artificial Sequence
  ENSG00000275969_18 (sequence is synthesized)
agatgcacagagaggactcatatagaaaacatcctgaaagcccacatgggcaggaacttgggccagaccaacgagggcttgatccccgtgcgtgtgcgtcgatcctggcttgctgtcaac

SEQ ID NO: 794980 - DNA, 120 bp, Artificial Sequence
  ENSG00000275969_19 (sequence is synthesized)
caggctcttcccgtgtccaacacccatgtgaaaaccagcaatctagcagccccgaaaagtgggaaagcctgtgtgaacacagcccaggtgctttccttcctcgagccgtgtactcagcag

SEQ ID NO: 794981 - DNA, 120 bp, Artificial Sequence
  ENSG00000275969_20 (sequence is synthesized)
gggttgggagcccatattgtgaggttttgggccaaacacaggtggggtctacccctcagggtcctcaagcccattcagtgctttaaactggaaaaggtttcatccttgtcccttacacag

SEQ ID NO: 794982 - DNA, 120 bp, Artificial Sequence
  ENSG00000275969_21 (sequence is synthesized)
cttgctggtccctcctcagccacctgtgaatctggggctggctcagaagttgaggtggacatgttccttagaaagccaccaatggcaagtctgagaaagcaggtgctgaccaaagcatct

SEQ ID NO: 794983 - DNA, 120 bp, Artificial Sequence
  ENSG00000275969_22 (sequence is synthesized)
gatcacatgccagagagtcttctggcctcctcacctgcatggaagcagttccagagggcaccgcgaggaatcccatcttggaatgatcatgaacccttgaagcctcctccagctggacag

SEQ ID NO: 794984 - DNA, 120 bp, Artificial Sequence
  ENSG00000275969_23 (sequence is synthesized)
gagggcaggtggccatctaagcccctcacgtacagcctcacaggcagcacccagcagagcaggagcttaggagcccaatcttcaaaggctggagagacaagggaggcagtgccacaatgc

SEQ ID NO: 794985 - DNA, 120 bp, Artificial Sequence
  ENSG00000275969_24 (sequence is synthesized)
agagtccccttggaaacctgtatgctggcaaacctccaagccacaagtgaggatgtgcatggtttcgaggctccagggaccagcaaaagctctctacaccctagagtgtctgtctcccaa

SEQ ID NO: 794986 - DNA, 120 bp, Artificial Sequence
  ENSG00000275969_25 (sequence is synthesized)
gatccaagaaagctgtgtcttatggaggaggttgttagtgaatttgagcctggaatggccacaaagtcagagacccagcctcaagtttgtgccgctgttgtgctccttccagatgggcaa

SEQ ID NO: 794987 - DNA, 120 bp, Artificial Sequence
  ENSG00000275969_26 (sequence is synthesized)
gcatctgttgtgccccacgcttcagagaatttggtttctcaagtgccccagggccatctccagagcatgcctactgggaacatgcgggcttcccaggagctacatgacctcatggcagcc

SEQ ID NO: 794988 - DNA, 120 bp, Artificial Sequence
  ENSG00000275969_27 (sequence is synthesized)
agaaggagcaaactggtgcacgaggagcccagaaaaccaaactgtcaaggctcatgcaagagccaaaggccaatgtttccccctattcacaagagtgagaagtttaggaagcccaactta

SEQ ID NO: 794989 - DNA, 120 bp, Artificial Sequence
  ENSG00000275969_28 (sequence is synthesized)
gaaaaacatgaagaaaggcttgaaggattgaggactcctcaacttaccccagtcaggaaaacagaagacacccatcaggatgaaggcgtccagctactgccatcaaagaaacagcctcct

SEQ ID NO: 794990 - DNA, 120 bp, Artificial Sequence
  ENSG00000275969_29 (sequence is synthesized)
tcagtaagcccctttggagaaaacatcaagcaaatttttcagtggattttttcaaagaaaaaaagcaagccagcaccagtcactgctgagagccaaaaaacagtaaaaaacagatcatgt

SEQ ID NO: 794991 - DNA, 120 bp, Artificial Sequence
  ENSG00000275969_30 (sequence is synthesized)
gtgtacagcagcagtgctgaagctcagggtctcatgacggcagttggacaaatgctggacgagaaaatgtcactttgccatgcgcgccatgcctcgaaggtaaatcagcacaaacagaag

SEQ ID NO: 794992 - DNA, 120 bp, Artificial Sequence
  ENSG00000275969_31 (sequence is synthesized)
tttcaagccccagtctgtgggtttccctgcaaccacaggcacctcttctactcagaacacggcagaatactgagctatgcagccagcagtcaacaagccactctcaagagccagggttgt

SEQ ID NO: 794993 - DNA, 120 bp, Artificial Sequence
  ENSG00000275969_32 (sequence is synthesized)
cccaacagagacagacaaatcagaaatcaacagcccttgaaaagtgtgcggtgcaacaatgagcaatggggcctgcgacatccccaaatcttgcaccccaagaaagctgtatccccagtc

SEQ ID NO: 794994 - DNA, 120 bp, Artificial Sequence
  ENSG00000275969_33 (sequence is synthesized)
agtccccctcagcactggccgaagacatccggtgcctctagccaccatcaccactgtccaaggcactgtcttctttgggaaggtatctgatttggtcagtcacaaattcttttttagcct

SEQ ID NO: 794995 - DNA, 120 bp, Artificial Sequence
  ENSG00000275969_34 (sequence is synthesized)
tccctggagaaaaacaagtccccaagaaaaaattcactctatgtagagaaaaaatattttctctcatgttagtacatgcagaacatttaatattccacaatatatatggttttttattca

SEQ ID NO: 794996 - DNA, 120 bp, Artificial Sequence; identical to SEQ ID NO: 371990
  ENSG00000275993_0 (sequence is synthesized)

SEQ ID NO: 794997 - DNA, 120 bp, Artificial Sequence; identical to SEQ ID NO: 371991
  ENSG00000275993_1 (sequence is synthesized)

SEQ ID NO: 794998 - DNA, 120 bp, Artificial Sequence; identical to SEQ ID NO: 371992
  ENSG00000275993_2 (sequence is synthesized)

SEQ ID NO: 794999 - DNA, 120 bp, Artificial Sequence; identical to SEQ ID NO: 371993
  ENSG00000275993_3 (sequence is synthesized)

SEQ ID NO: 795000 - DNA, 120 bp, Artificial Sequence; identical to SEQ ID NO: 371994
  ENSG00000275993_4 (sequence is synthesized)

SEQ ID NO: 795001 - DNA, 120 bp, Artificial Sequence; identical to SEQ ID NO: 371995
  ENSG00000275993_5 (sequence is synthesized)

SEQ ID NO: 795002 - DNA, 120 bp, Artificial Sequence; identical to SEQ ID NO: 371996
  ENSG00000275993_6 (sequence is synthesized)

SEQ ID NO: 795003 - DNA, 120 bp, Artificial Sequence; identical to SEQ ID NO: 371997
  ENSG00000275993_7 (sequence is synthesized)

SEQ ID NO: 795004 - DNA, 120 bp, Artificial Sequence; identical to SEQ ID NO: 371998
  ENSG00000275993_8 (sequence is synthesized)

SEQ ID NO: 795005 - DNA, 120 bp, Artificial Sequence; identical to SEQ ID NO: 371999
  ENSG00000275993_9 (sequence is synthesized)

SEQ ID NO: 795006 - DNA, 120 bp, Artificial Sequence; identical to SEQ ID NO: 372000
  ENSG00000275993_10 (sequence is synthesized)

SEQ ID NO: 795007 - DNA, 120 bp, Artificial Sequence; identical to SEQ ID NO: 372001
  ENSG00000275993_11 (sequence is synthesized)

SEQ ID NO: 795008 - DNA, 120 bp, Artificial Sequence; identical to SEQ ID NO: 372002
  ENSG00000275993_12 (sequence is synthesized)

SEQ ID NO: 795009 - DNA, 120 bp, Artificial Sequence; identical to SEQ ID NO: 372003
  ENSG00000275993_13 (sequence is synthesized)

SEQ ID NO: 795010 - DNA, 120 bp, Artificial Sequence; identical to SEQ ID NO: 372004
  ENSG00000275993_14 (sequence is synthesized)

SEQ ID NO: 795011 - DNA, 120 bp, Artificial Sequence; identical to SEQ ID NO: 372005
  ENSG00000275993_15 (sequence is synthesized)

SEQ ID NO: 795012 - DNA, 120 bp, Artificial Sequence
  ENSG00000275993_16 (sequence is synthesized)
gaccaaagggtttctgggactgaacaaaatcaaggggctggctcgccaggtgtgccaggtccctgccagccgggccagcaggggcggcctgagccccttccacgcccctgcacagagccc

SEQ ID NO: 795013 - DNA, 120 bp, Artificial Sequence; identical to SEQ ID NO: 372007
  ENSG00000275993_17 (sequence is synthesized)

SEQ ID NO: 795014 - DNA, 120 bp, Artificial Sequence; identical to SEQ ID NO: 372008
  ENSG00000275993_18 (sequence is synthesized)

SEQ ID NO: 795015 - DNA, 120 bp, Artificial Sequence; identical to SEQ ID NO: 372009
  ENSG00000275993_19 (sequence is synthesized)

SEQ ID NO: 795016 - DNA, 120 bp, Artificial Sequence; identical to SEQ ID NO: 372010
  ENSG00000275993_20 (sequence is synthesized)

SEQ ID NO: 795017 - DNA, 120 bp, Artificial Sequence; identical to SEQ ID NO: 372011
  ENSG00000275993_21 (sequence is synthesized)

SEQ ID NO: 795018 - DNA, 120 bp, Artificial Sequence; identical to SEQ ID NO: 372012
  ENSG00000275993_22 (sequence is synthesized)

SEQ ID NO: 795019 - DNA, 120 bp, Artificial Sequence
  ENSG00000275993_23 (sequence is synthesized)
tgtgtgtgtgtgtgtgtgtgtgtgcgcgtacattgattactatccatttctttagtcaacgctctccacttcctgatttctgctttaaggaaaactgtgaactttctgcttcatgtatca

SEQ ID NO: 795020 - DNA, 120 bp, Artificial Sequence; identical to SEQ ID NO: 372014
  ENSG00000275993_24 (sequence is synthesized)

SEQ ID NO: 795021 - DNA, 120 bp, Artificial Sequence; identical to SEQ ID NO: 372015
  ENSG00000275993_25 (sequence is synthesized)

SEQ ID NO: 795022 - DNA, 120 bp, Artificial Sequence; identical to SEQ ID NO: 372016
  ENSG00000275993_26 (sequence is synthesized)

SEQ ID NO: 795023 - DNA, 120 bp, Artificial Sequence; identical to SEQ ID NO: 372017
  ENSG00000275993_27 (sequence is synthesized)

SEQ ID NO: 795024 - DNA, 120 bp, Artificial Sequence; identical to SEQ ID NO: 372018
  ENSG00000275993_28 (sequence is synthesized)

SEQ ID NO: 795025 - DNA, 120 bp, Artificial Sequence
  ENSG00000275993_29 (sequence is synthesized)
atgtatctacatgggagacaggtagacactacttatttgttacattttgtactacacgtttgtgttccaggtttcagcttccctcgctcctgttgttaagaagcgtccctgtcagcacag

SEQ ID NO: 795026 - DNA, 120 bp, Artificial Sequence; identical to SEQ ID NO: 372020
  ENSG00000275993_30 (sequence is synthesized)

SEQ ID NO: 795027 - DNA, 120 bp, Artificial Sequence
  ENSG00000275993_31 (sequence is synthesized)
ggctccaccagccagaagcctttggaaggcaacgaaggcaatgctgctccctgagtccagtccccgcccccaaacccagcccaggtgccttcagctacttcggcttcttaaaccctgcag

SEQ ID NO: 795028 - DNA, 120 bp, Artificial Sequence; identical to SEQ ID NO: 372022
  ENSG00000275993_32 (sequence is synthesized)

SEQ ID NO: 795029 - DNA, 120 bp, Artificial Sequence; identical to SEQ ID NO: 372023
  ENSG00000275993_33 (sequence is synthesized)

SEQ ID NO: 795030 - DNA, 120 bp, Artificial Sequence; identical to SEQ ID NO: 372024
  ENSG00000275993_34 (sequence is synthesized)

SEQ ID NO: 795031 - DNA, 120 bp, Artificial Sequence
  ENSG00000275993_35 (sequence is synthesized)
ttacagaggtagcacaattgattccaacacaaaactccttcccctttttaaaatgatttctgttctaatgccatagatcaaaggcctcagaaaccattgtgtgtttcctctttgaagcaa

SEQ ID NO: 795032 - DNA, 120 bp, Artificial Sequence; identical to SEQ ID NO: 372026
  ENSG00000275993_36 (sequence is synthesized)

SEQ ID NO: 795033 - DNA, 120 bp, Artificial Sequence; identical to SEQ ID NO: 372027
  ENSG00000275993_37 (sequence is synthesized)

SEQ ID NO: 795034 - DNA, 120 bp, Artificial Sequence; identical to SEQ ID NO: 372028
  ENSG00000275993_38 (sequence is synthesized)

SEQ ID NO: 795035 - DNA, 120 bp, Artificial Sequence; identical to SEQ ID NO: 372031
  ENSG00000275993_39 (sequence is synthesized)

SEQ ID NO: 795036 - DNA, 120 bp, Artificial Sequence
  ENSG00000276023_0 (sequence is synthesized)
ctcatcttctgacgcttgggggaggagaggtagttgcttggtatttttggctttccaccataaaactggagacagtttccttcattccaagtcgttttaatgtcactgttgaacgtgtgt

SEQ ID NO: 795037 - DNA, 120 bp, Artificial Sequence
  ENSG00000276023_1 (sequence is synthesized)
gtcctgagttctcatctgaaagctttcatatcggttgactgcagatttgatttgtatccactgtcaccagcactgctcacttaggactttctggatccggacccaggcagcgcacactgg

SEQ ID NO: 795038 - DNA, 120 bp, Artificial Sequence
  ENSG00000276023_2 (sequence is synthesized)
actcttgaggaagaaggagactctaattttggattccttggtggaggaaaataaaacactctggtcttgccgccaacgatgcaagtgtgactgctggcgtcttcatgagctccagaggtc

SEQ ID NO: 795039 - DNA, 120 bp, Artificial Sequence
  ENSG00000276023_3 (sequence is synthesized)
acagcacgctaccaaggactctcatggcccctcggatgatttccgagggagacataggaggcattgctcaaatcacctcctctctattcctgggcagaggcagtgtggcctccaatcggc

SEQ ID NO: 795040 - DNA, 120 bp, Artificial Sequence
  ENSG00000276023_4 (sequence is synthesized)
acctcctccaggctcgtggcatcacctgcattgttaatgctaccattgagatccctaatttcaactggccccaatttgagtatgttaaagtgcctctggctgacatgccgcatgccccca

SEQ ID NO: 795041 - DNA, 120 bp, Artificial Sequence
  ENSG00000276023_5 (sequence is synthesized)
ttggactgtactttgacaccgtggctgacaagatccacagtgtgagcaggaagcacggggccaccttggtgcactgtgctgcaggggtgagccgctcagccacgctgtgtatcgcgtacc

SEQ ID NO: 795042 - DNA, 120 bp, Artificial Sequence
  ENSG00000276023_6 (sequence is synthesized)
tttgggaagtcgacagttaaaatggtacagacaccttatggcatagttcccgacgtctatgagaaggagtcccgacacctgatgccttactgggggatttagtgccactgaagcctgcgt

SEQ ID NO: 795043 - DNA, 120 bp, Artificial Sequence
  ENSG00000276023_7 (sequence is synthesized)
cagcagcccgagcggggccggcatctgctccccgccgtctgctccctctccactctcttctcaaatggctgacttctggttctccctcaagtgttttttacactgggtgttcaaatttat

SEQ ID NO: 795044 - DNA, 120 bp, Artificial Sequence
  ENSG00000276023_8 (sequence is synthesized)
tttaagagatagggagggaggggacataaagggaatgcatacattgctagtcacatttttaaaattaacattttggaatagtgtttatggaaatctttagcttttaatcatttttaccaa

SEQ ID NO: 795045 - DNA, 120 bp, Artificial Sequence
  ENSG00000276023_9 (sequence is synthesized)
tttgaacagtttaataaactggttctgctctcttctgaatctcatgcctttggcaccttggtaggtgcaggaggagctcagtgcaaaaatcactttggggcctcattaaccctttagaga

SEQ ID NO: 795046 - DNA, 120 bp, Artificial Sequence
  ENSG00000276023_10 (sequence is synthesized)
caagctttgccccaggctgcggaccagacagatgcttagggaaggttgataaccagcttcagtctctactggattagccctactctttcctttcccctccattatttagtgactctgtaa

SEQ ID NO: 795047 - DNA, 120 bp, Artificial Sequence
  ENSG00000276023_11 (sequence is synthesized)
gtaagttaaatacacccttattatttagctgttaagtaactataatgaaatctgctgcaaaatctctcttggaatccatgtgcccaggattatattagcattatttttaataaatctata

SEQ ID NO: 795048 - DNA, 120 bp, Artificial Sequence
  ENSG00000276023_12 (sequence is synthesized)
atatgtcaagaacacctcaacagagctgtaaaaaaaacacgacaggtctgacagttacctgggaaaggtgggggaacaggtggtagaagaacacattttttatgatgttcatggtactta

SEQ ID NO: 795049 - DNA, 120 bp, Artificial Sequence
  ENSG00000276023_13 (sequence is synthesized)
cataacataaatgaataaaatagggccaacatggaaaagaaaacaaaatgaaggaaaatgtcaaattgccatcctgaacaccagcaccgcctgtaattagcgttcctggctgcagccaca

SEQ ID NO: 795050 - DNA, 120 bp, Artificial Sequence
  ENSG00000276023_14 (sequence is synthesized)
tctgcggtcctgctcctcatgaagccgtcctccgtgccatgtcccggccatgcctgtccttagcttcctggtgcacactgtcctccaccttgtgttcaggcacagggctgcttggctcac

SEQ ID NO: 795051 - DNA, 120 bp, Artificial Sequence
  ENSG00000276023_15 (sequence is synthesized)
ccttgctgcacctggcctgtccgtcctcccaccgcggtgccgcccaggccttcccactgcagggctggctaacggtgcatggaagagactcgagtccgtgttgtgtcctcatagcccacc

SEQ ID NO: 795052 - DNA, 120 bp, Artificial Sequence
  ENSG00000276023_16 (sequence is synthesized)
gaggaggcagcagtgccggacatttcgcggataggttgtggtctctgagtctcctcctctcaagaggatgagatttgtctgtgttattgtcaaaactcttatttgtcacgccgcgggtta

SEQ ID NO: 795053 - DNA, 120 bp, Artificial Sequence
  ENSG00000276023_17 (sequence is synthesized)
tgtgtcagtaacaaaaagctgagatttaggccggtgtttcttactggtgcagcctttaaatgcacacctgcgaatgttcagtgcaccttccgcttcctggctctatttcagtcaaacctg

SEQ ID NO: 795054 - DNA, 120 bp, Artificial Sequence; identical to SEQ ID NO: 794961
  ENSG00000276040_0 (sequence is synthesized)

SEQ ID NO: 795055 - DNA, 120 bp, Artificial Sequence; identical to SEQ ID NO: 794962
  ENSG00000276040_1 (sequence is synthesized)

SEQ ID NO: 795056 - DNA, 120 bp, Artificial Sequence
  ENSG00000276040_2 (sequence is synthesized)
ggaagagaaagtgtccagtagggcggaggcggaggcccagaggcaggatgaaaaaccacagtctgagagctggtagagagtgcccgagaggcctggaggagacttcggacctgctttcac

SEQ ID NO: 795057 - DNA, 120 bp, Artificial Sequence
  ENSG00000276040_3 (sequence is synthesized)
aactgcagagcctcctggggccacaccttgacaaaggtgactttggtcagctctccggtccagaccccccaggtgaggtgggtgaaagagcacctgatggagcctcccagtcctctcatg

SEQ ID NO: 795058 - DNA, 120 bp, Artificial Sequence
  ENSG00000276040_4 (sequence is synthesized)
agcctatggaagatgctgctcccattctctccccgttagcttccccggatcctcaagccaagcatcctcaggatctggcctccaccccatcaccaggcccaatgaccacctcagtctcct

SEQ ID NO: 795059 - DNA, 120 bp, Artificial Sequence; identical to SEQ ID NO: 794966
  ENSG00000276040_5 (sequence is synthesized)

SEQ ID NO: 795060 - DNA, 120 bp, Artificial Sequence
  ENSG00000276040_6 (sequence is synthesized)
ctccaaaaggcttcactgctcctcccctgcgggactccacactgataactccatctcactgtgactcagtggcatttccactgggcaccgtccctcaaagcttgtctccacatgaggatt

SEQ ID NO: 795061 - DNA, 120 bp, Artificial Sequence; identical to SEQ ID NO: 794968
  ENSG00000276040_7 (sequence is synthesized)

SEQ ID NO: 795062 - DNA, 120 bp, Artificial Sequence; identical to SEQ ID NO: 794969
  ENSG00000276040_8 (sequence is synthesized)

SEQ ID NO: 795063 - DNA, 120 bp, Artificial Sequence
  ENSG00000276040_9 (sequence is synthesized)
tttgggaagaaaaagaaaatgttggatcatttacaaatcgaatgaccccagaaaagcacttaaattatttgcggaatttggctaaatcattggatgctgagcaggacaccacaaacccaa

SEQ ID NO: 795064 - DNA, 120 bp, Artificial Sequence; identical to SEQ ID NO: 794971
  ENSG00000276040_10 (sequence is synthesized)

SEQ ID NO: 795065 - DNA, 120 bp, Artificial Sequence; identical to SEQ ID NO: 794972
  ENSG00000276040_11 (sequence is synthesized)

SEQ ID NO: 795066 - DNA, 120 bp, Artificial Sequence; identical to SEQ ID NO: 794973
  ENSG00000276040_12 (sequence is synthesized)

SEQ ID NO: 795067 - DNA, 120 bp, Artificial Sequence; identical to SEQ ID NO: 794974
  ENSG00000276040_13 (sequence is synthesized)

SEQ ID NO: 795068 - DNA, 120 bp, Artificial Sequence; identical to SEQ ID NO: 794975
  ENSG00000276040_14 (sequence is synthesized)

SEQ ID NO: 795069 - DNA, 120 bp, Artificial Sequence; identical to SEQ ID NO: 794976
  ENSG00000276040_15 (sequence is synthesized)

SEQ ID NO: 795070 - DNA, 120 bp, Artificial Sequence
  ENSG00000276040_16 (sequence is synthesized)
ctctggatctgatgcagcttcgggatgaatcaccagggacaagtcaggccaagggcaaacccagtccctggcagtcctccatgtccacaggtgaaagcagcaaggaggcacagaaggtga

SEQ ID NO: 795071 - DNA, 120 bp, Artificial Sequence; identical to SEQ ID NO: 794978
  ENSG00000276040_17 (sequence is synthesized)

SEQ ID NO: 795072 - DNA, 120 bp, Artificial Sequence
  ENSG00000276040_18 (sequence is synthesized)
agatgcacagagaggactcatatagaaaacatcctgaaagcccacatgggcaggaacttgggccagaccaacgagggcttgatccccgtgtgtgtgcgtcgatcctggcttgctgtcaac

SEQ ID NO: 795073 - DNA, 120 bp, Artificial Sequence; identical to SEQ ID NO: 794980
  ENSG00000276040_19 (sequence is synthesized)

SEQ ID NO: 795074 - DNA, 120 bp, Artificial Sequence; identical to SEQ ID NO: 794981
  ENSG00000276040_20 (sequence is synthesized)

SEQ ID NO: 795075 - DNA, 120 bp, Artificial Sequence; identical to SEQ ID NO: 794982
  ENSG00000276040_21 (sequence is synthesized)

SEQ ID NO: 795076 - DNA, 120 bp, Artificial Sequence; identical to SEQ ID NO: 794983
  ENSG00000276040_22 (sequence is synthesized)

SEQ ID NO: 795077 - DNA, 120 bp, Artificial Sequence
  ENSG00000276040_23 (sequence is synthesized)
gagggcaggtggccatctaagcccctcacgtacagcctcacaggcagcatccagcagagcaggagcttaggagcccaatcttcaaaggctggagagacaagggaggcagtgccacaatgc

SEQ ID NO: 795078 - DNA, 120 bp, Artificial Sequence; identical to SEQ ID NO: 794985
  ENSG00000276040_24 (sequence is synthesized)

SEQ ID NO: 795079 - DNA, 120 bp, Artificial Sequence
  ENSG00000276040_25 (sequence is synthesized)
gatccaagaaagctgtgtcttatggaggaggttgttaatgaatttgagcctggaatggccacaaagtcagagacccagcctcaagtttgtgccgctgttgtgctccttccagatgggcaa

SEQ ID NO: 795080 - DNA, 120 bp, Artificial Sequence; identical to SEQ ID NO: 794987
  ENSG00000276040_26 (sequence is synthesized)

SEQ ID NO: 795081 - DNA, 120 bp, Artificial Sequence
  ENSG00000276040_27 (sequence is synthesized)
agaaggagcaaactggtgcacgaggagcccagaaacccaaactgtcaaggctcatgcaagagccaaaggccaatgtttccccctattcacaagagtgagaagtctaggaaacccaactta

SEQ ID NO: 795082 - DNA, 120 bp, Artificial Sequence; identical to SEQ ID NO: 794989
  ENSG00000276040_28 (sequence is synthesized)

SEQ ID NO: 795083 - DNA, 120 bp, Artificial Sequence
  ENSG00000276040_29 (sequence is synthesized)
tcagtaagcccctttggagaaaacatcaagcaaatttttcagtggattttttcaaagaaaaaaagcaagccagcaccagtcactgctgagagccaaaaaacagtaaaaaacagatcacgt

SEQ ID NO: 795084 - DNA, 120 bp, Artificial Sequence; identical to SEQ ID NO: 794991
  ENSG00000276040_30 (sequence is synthesized)

SEQ ID NO: 795085 - DNA, 120 bp, Artificial Sequence; identical to SEQ ID NO: 794992
  ENSG00000276040_31 (sequence is synthesized)

SEQ ID NO: 795086 - DNA, 120 bp, Artificial Sequence; identical to SEQ ID NO: 794993
  ENSG00000276040_32 (sequence is synthesized)

SEQ ID NO: 795087 - DNA, 120 bp, Artificial Sequence; identical to SEQ ID NO: 794994
  ENSG00000276040_33 (sequence is synthesized)

SEQ ID NO: 795088 - DNA, 120 bp, Artificial Sequence; identical to SEQ ID NO: 794995
  ENSG00000276040_34 (sequence is synthesized)

SEQ ID NO: 795089 - DNA, 120 bp, Artificial Sequence
  ENSG00000276040_35 (sequence is synthesized)
agattccatgcgggaatgaagccatggtgggccagggactgggcgttacccagcagggggcagtgtgtgtgtcctggggagaccaatgcctgcctggatgcggaggggggtgagggggcc

SEQ ID NO: 795090 - DNA, 120 bp, Artificial Sequence
  ENSG00000276040_36 (sequence is synthesized)
tcccgctccctgggaacagctgtccaactctgctaaggctgattcctctttgagaccacctcagtcctttctccccacaggctggtagagagtgcccgagaggcctggaggagacttcgg

SEQ ID NO: 795091 - DNA, 120 bp, Artificial Sequence
  ENSG00000276040_37 (sequence is synthesized)
agcatgctgcggctgggctggggcagagagggagagccggtcctagcttctcaccctttcttgtctcccattgtcatcttgtctctctgcgtcatcttgtctccgtacgtcatcgtgtct

SEQ ID NO: 795092 - DNA, 120 bp, Artificial Sequence; identical to SEQ ID NO: 672712
  ENSG00000276040_38 (sequence is synthesized)

SEQ ID NO: 795093 - DNA, 120 bp, Artificial Sequence
  ENSG00000276040_39 (sequence is synthesized)
ccagccccctcttgctgtttttctaagaagaaaagcagtttatcatccatttaaacaagagtgggaggaagcacacagagctccctgagcaagacagagagagccatgcggttcctgagt

SEQ ID NO: 795094 - DNA, 120 bp, Artificial Sequence
  ENSG00000276043_0 (sequence is synthesized)
tgggcaccgaggggtcccggggtccgcggatctcgggtggggtttttccctctcagtggcacttggttgagttcccccgggacttctgaagttccggcccgcgctggacttctgggattc

SEQ ID NO: 795095 - DNA, 120 bp, Artificial Sequence
  ENSG00000276043_1 (sequence is synthesized)
cctcttccgtaaataggaatccgaggaatgaatgaatcaatgaatgaatgaataaacgaaccaactcggccacttggcccgggcctcctttctcctctggtcgtggggaaggagggatgg

SEQ ID NO: 795096 - DNA, 120 bp, Artificial Sequence
  ENSG00000276043_2 (sequence is synthesized)
gttggaccttctgcttttctttcaattccctcttttcattctccttcctcctcaatcttcaacacttggctagtcgttaatgccttaagtgcttaatttgttgtgtctggtcctggccag

SEQ ID NO: 795097 - DNA, 120 bp, Artificial Sequence
  ENSG00000276043_3 (sequence is synthesized)
ggtctggctgtacaggaggactggaagggcatcctgggagtttcctggtgtccacaggccggacaaaagcaaccccgactccttagagcatggcatggctcagaggtgctggtaaaactg

SEQ ID NO: 795098 - DNA, 120 bp, Artificial Sequence
  ENSG00000276043_4 (sequence is synthesized)
atgggggtttttgctgtccctcccctcagcgccgacaccatgtggatccaggttcggaccatggacgggaggcagacccacacggtggactcgctgtccaggctgaccaaggtggaggag

SEQ ID NO: 795099 - DNA, 120 bp, Artificial Sequence
  ENSG00000276043_5 (sequence is synthesized)
ctgaggcggaagatccaggagctgttccacgtggagccaggcctgcagaggctgttctacaggggcaaacagatggaggacggccataccctcttcgactacgaggtccgcctgaatgac

SEQ ID NO: 795100 - DNA, 120 bp, Artificial Sequence
  ENSG00000276043_6 (sequence is synthesized)
accatccagctcctggtccgccagagcctcgtgctcccccacagcaccaaggagcgggactccgagctctccgacaccgactccggctgctgcctgggccagagtgagtcagacaagtcc

SEQ ID NO: 795101 - DNA, 120 bp, Artificial Sequence
  ENSG00000276043_7 (sequence is synthesized)
tccacccacggtgaggcggccgccgagactgacagcaggccagccgatgaggacatgtgggatgagacggaattggggctgtacaaggtcaatgagtacgtcgatgctcgggacacgaac

SEQ ID NO: 795102 - DNA, 120 bp, Artificial Sequence
  ENSG00000276043_8 (sequence is synthesized)
atgggggcgtggtttgaggcgcaggtggtcagggtgacgcggaaggccccctcccgggacgagccctgcagctccacgtccaggccggcgctggaggaggacgtcatttaccacgtgaaa

SEQ ID NO: 795103 - DNA, 120 bp, Artificial Sequence
  ENSG00000276043_9 (sequence is synthesized)
tacgacgactacccggagaacggcgtggtccagatgaactccagggacgtccgagcgcgcgcccgcaccatcatcaagtggcaggacctggaggtgggccaggtggtcatgctcaactac

SEQ ID NO: 795104 - DNA, 120 bp, Artificial Sequence
  ENSG00000276043_10 (sequence is synthesized)
aaccccgacaaccccaaggagcggggcttctggtacgacgcggagatctccaggaagcgcgagaccaggacggcgcgggaactctacgccaacgtggtgctgggggatgattctctgaac

SEQ ID NO: 795105 - DNA, 120 bp, Artificial Sequence
  ENSG00000276043_11 (sequence is synthesized)
gactgtcggatcatcttcgtggacgaagtcttcaagattgagcggccgggtgaagggagccccatggttgacaaccccatgagacggaagagcgggccgtcctgcaagcactgcaaggac

SEQ ID NO: 795106 - DNA, 120 bp, Artificial Sequence
  ENSG00000276043_12 (sequence is synthesized)
gacgtgaacagactctgccgggtctgcgcctgccacctgtgcgggggccggcaggaccccgacaagcagctcatgtgcgatgagtgcgacatggccttccacatctactgcctggacccg

SEQ ID NO: 795107 - DNA, 120 bp, Artificial Sequence
  ENSG00000276043_13 (sequence is synthesized)
gaagatggcctcggccacatcgtcctcacagcgggactggggcaagggcatggcctgtgtgggccgcaccaaggaatgtaccatcgtcccgtccaaccactacggacccatcccggggat

SEQ ID NO: 795108 - DNA, 120 bp, Artificial Sequence
  ENSG00000276043_14 (sequence is synthesized)
ccccgtgggcaccatgtggcggttccgagtccaggtcagcgagtcgggtgtccatcggccccacgtggctggcatacacggccggagcaacgacggagcgtactccctagtcctggcggg

SEQ ID NO: 795109 - DNA, 120 bp, Artificial Sequence
  ENSG00000276043_15 (sequence is synthesized)
gggctatgaggatgatgtggaccatgggaattttttcacatacacgggtagtggtggtcgagatctttccggcaacaagaggaccgcggaacagtcttgtgatcagaaactcaccaacac

SEQ ID NO: 795110 - DNA, 120 bp, Artificial Sequence
  ENSG00000276043_16 (sequence is synthesized)
caacagggcgctggctctcaactgctttgctcccatcaatgaccaagaaggggccgaggccaaggactggcggtcggggaagccggtcagggtggtgcgcaatgtcaagggtggcaagaa

SEQ ID NO: 795111 - DNA, 120 bp, Artificial Sequence
  ENSG00000276043_17 (sequence is synthesized)
tagcaagtacgcccccgctgagggcaaccgctacgatggcatctacaaggttgtgaaatactggcccgagaaggggaagtccgggtttctcgtgtggcgctaccttctgcggagggacga

SEQ ID NO: 795112 - DNA, 120 bp, Artificial Sequence
  ENSG00000276043_18 (sequence is synthesized)
tgatgagcctggcccttggacgaaggaggggaaggaccggatcaagaagctggggctgaccatgcagtatccagaaggctacctggaagccctggccaaccgagagcgagagaaggagaa

SEQ ID NO: 795113 - DNA, 120 bp, Artificial Sequence
  ENSG00000276043_19 (sequence is synthesized)
cagcaagagggaggaggaggagcagcaggaggggggcttcgcgtcccccaggacgggcaagggcaagtggaagcggaagtcggcaggaggtggcccgagcagggccgggtccccgcgccg

SEQ ID NO: 795114 - DNA, 120 bp, Artificial Sequence
  ENSG00000276043_20 (sequence is synthesized)
gacatccaagaaaaccaaggtggagccctacagtctcacggcccagcagagcagcctcatcagagaggacaagagcaacgccaagctgtggaatgaggtcctggcgtcactcaaggaccg

SEQ ID NO: 795115 - DNA, 120 bp, Artificial Sequence
  ENSG00000276043_21 (sequence is synthesized)
gccggcgagcggcagcccgttccagttgttcctgagtaaagtggaggagacgttccagtgtatctgctgtcaggagctggtgttccggcccatcacgaccgtgtgccagcacaacgtgtg

SEQ ID NO: 795116 - DNA, 120 bp, Artificial Sequence
  ENSG00000276043_22 (sequence is synthesized)
caaggactgcctggacagatcctttcgggcacaggtgttcagctgccctgcctgccgctacgacctgggccgcagctatgccatgcaggtgaaccagcctctgcagaccgtcctcaacca

SEQ ID NO: 795117 - DNA, 120 bp, Artificial Sequence
  ENSG00000276043_23 (sequence is synthesized)
gctcttccccggctacggcaatggccggtgatctccaagcacttctcgacaggcgttttgctgaaaacgtgtcggagggctcgttcatcggcactgattttgttcttagtgggcttaact

SEQ ID NO: 795118 - DNA, 120 bp, Artificial Sequence
  ENSG00000276043_24 (sequence is synthesized)
taaacaggtagtgtttcctccgttccctaaaaaggtttgtcttcctttttttttttatttttatttttcaaatctatacattttcaggaatttatgtattctggctaaaagttggacttc

SEQ ID NO: 795119 - DNA, 120 bp, Artificial Sequence
  ENSG00000276043_25 (sequence is synthesized)
tcagtattgtgtttagttctttgaaaacataaaagcctgcaatttctcgacaaaacaacacaagattttttaaagatggaatcagaaactacgtggtgtggaggctgttgatgtttctgg

SEQ ID NO: 795120 - DNA, 72 bp, Artificial Sequence
  ENSG00000276043_26 (sequence is synthesized)
gggtgcatgccagcatgcccagctaattttttggtagagacagagtttcactgtgttggccaggatggtctc

SEQ ID NO: 795121 - DNA, 73 bp, Artificial Sequence
  ENSG00000276043_27 (sequence is synthesized)
gattgcaggcgtgagccactgcacctgggctttttctttttttgagacaaagtctcacacatctgcctcccgg

SEQ ID NO: 795122 - DNA, 120 bp, Artificial Sequence
  ENSG00000276043_28 (sequence is synthesized)
gtagctggaattacaggcatgcaccatcaccatgctttgctaatttttttttggtatttttatttattttatttttattttttgtgatggtctcactctgtcagccagactggagtgcaa

SEQ ID NO: 795123 - DNA, 120 bp, Artificial Sequence
  ENSG00000276043_29 (sequence is synthesized)
ctcgggttctggcccccaaggtcagagcaagcatcttcctgacagcattttgtcatctaaagtccagtgacatggttccccgtggtggcccgtggcagcccgtggcatggcgtggctcag

SEQ ID NO: 795124 - DNA, 120 bp, Artificial Sequence
  ENSG00000276043_30 (sequence is synthesized)
ctgtctgttgaagttgttgcaaggaaaagaggaaacatctcgggcctagttcaaacctttgcctcaaagccatcccccaccagactgcttagcgtctgagatccgcgtgaaaagtcctct

SEQ ID NO: 795125 - DNA, 120 bp, Artificial Sequence
  ENSG00000276043_31 (sequence is synthesized)
gcccacgagagcagggagttggggccacgcagaaatggcctcaaggggactctgctccacgtggggccaggcgtgtgactgacgctgtccgacgaaggcggccacggacggacgccagca

SEQ ID NO: 795126 - DNA, 120 bp, Artificial Sequence
  ENSG00000276043_32 (sequence is synthesized)
cacgaagtcacgtgcaagtgcctttgattcgttccttctttctaaagacgacagtctttgttgttagcactgaattattgaaaatgtcaaccagattctagaaactgcggtcatccagtt

SEQ ID NO: 795127 - DNA, 120 bp, Artificial Sequence
  ENSG00000276043_33 (sequence is synthesized)
cttcctgacaccggatgggtgcttgggaaccgtttgagccttatagatcatttacattcaatttttttaactcagcaagtgagaacttacaagagggtttttttaaaatttttttttctc

SEQ ID NO: 795128 - DNA, 120 bp, Artificial Sequence
  ENSG00000276043_34 (sequence is synthesized)
tttttttttctcttaatgaacacattttctaaatgaattttttttgtagttactgtatatgtaccaagaaagatataacgttagggtttggttgtttttgtttttgtattttttttcttt

SEQ ID NO: 795129 - DNA, 120 bp, Artificial Sequence
  ENSG00000276043_35 (sequence is synthesized)
ttaatttttctaattttaccaaagtttgcagcctatacctcaataaaacagggatattttaaatcacatacctgcagacaaactggagcaatgttatttttaaagggtttttttcacctc

SEQ ID NO: 795130 - DNA, 120 bp, Artificial Sequence
  ENSG00000276043_36 (sequence is synthesized)
cttattcttagattattaatgtattagggaagaatgagacaattttgtgtaggctttttctaaagtccagtactttgtccagattttagattctcagaataaatgtttttcacagataga

SEQ ID NO: 795131 - DNA, 120 bp, Artificial Sequence
  ENSG00000276043_37 (sequence is synthesized)
gggctcgctggcgcgacccgcgcgggccagtgggagtgcgggagggacgccgagggtccagggtttggaggggcgcgagctgccgggggttggaggtcgagcgccgacaccatgtggatc

SEQ ID NO: 795132 - DNA, 120 bp, Artificial Sequence
  ENSG00000276043_38 (sequence is synthesized)
gcgcccgcccccggcacggcctcctgcggccccgcaactcccaaatgccgagttttcgcgggaaaaaaatcagagcagctggcagcgcggcgggcagcgtttgccgagcgggcgctccgg

SEQ ID NO: 795133 - DNA, 120 bp, Artificial Sequence
  ENSG00000276043_39 (sequence is synthesized)
gtcgcacgcaagtccgcgcggggtccgggccacgcacgcggtttcatcgccatccccagccgggccacgcgcgcaggcagacaagctgttcgcggcgaccggagagcgccgacaccatgt

SEQ ID NO: 795134 - DNA, 120 bp, Artificial Sequence
  ENSG00000276045_0 (sequence is synthesized)
ggggcttttgccagcggcgccgcgggcctgcgtgctggggcagcgggcacttcttcgacctcgtcctcctcgtcctgtgcggccggccgggtgaggccgggcccgcgtagggggcagtcg

SEQ ID NO: 795135 - DNA, 80 bp, Artificial Sequence
  ENSG00000276045_1 (sequence is synthesized)
ggccggcccgcgcctcggcggcgtgctccatgcatccggagcccgccccgcccccgagccgcagcagtcccgagcttccc

SEQ ID NO: 795136 - DNA, 120 bp, Artificial Sequence
  ENSG00000276045_2 (sequence is synthesized)
ggcagccgccggagccgccgccgcagcggggacggggagcccccgggggccccgccaccgccgccgtccgccgtcacctacccggactggatcggccagagttactccgaggtgatgagc

SEQ ID NO: 795137 - DNA, 120 bp, Artificial Sequence
  ENSG00000276045_3 (sequence is synthesized)
cggccagagttactccgaggtgatgagcctcaacgagcactccatgcaggcgctgtcctggcgcaagctctacttgagccgcgccaagcttaaagcctccagccggacctcggctctgct

SEQ ID NO: 795138 - DNA, 120 bp, Artificial Sequence
  ENSG00000276045_4 (sequence is synthesized)
ctccggcttcgccatggtggcaatggtggaggtgcagctggacgctgaccacgactacccaccggggctgctcatcgccttcagtgcctgcaccacagtgctggtggctgtgcacctgtt

SEQ ID NO: 795139 - DNA, 120 bp, Artificial Sequence
  ENSG00000276045_5 (sequence is synthesized)
tgcgctcatgatcagcacctgcatcctgcccaacatcgaggcggtgagcaacgtgcacaatctcaactcggtcaaggagtccccccatgagcgcatgcaccgccacatcgagctggcctg

SEQ ID NO: 795140 - DNA, 120 bp, Artificial Sequence
  ENSG00000276045_6 (sequence is synthesized)
gctgggtcaagttcttgcccctcaagaagcagccaggccagccaaggcccaccagcaagccccccgccagtggcgcagcagccaacgtcagcaccagcggcatcaccccgggccaggcag

SEQ ID NO: 795141 - DNA, 120 bp, Artificial Sequence
  ENSG00000276045_7 (sequence is synthesized)
ctgccatcgcctcgaccaccatcatggtgcccttcggcctgatctttatcgtcttcgccgtccacttctaccgctcactggttagccataagactgaccgacagttccaggagctcaacg

SEQ ID NO: 795142 - DNA, 120 bp, Artificial Sequence
  ENSG00000276045_8 (sequence is synthesized)
agctggcggagtttgcccgcttacaggaccagctggaccacagaggggaccaccccctgacgcccggcagccactatgcctaggcccatgtggtctgggcccttccagtgctttggcctt

SEQ ID NO: 795143 - DNA, 120 bp, Artificial Sequence
  ENSG00000276045_9 (sequence is synthesized)
acgcccttccccttgaccttgtcctgccccagcctcacggacagcctgcgcagggggctgggcttcagcaaggggcagagcatggagggaagaggatttttataagagaaatttctgcac

SEQ ID NO: 795144 - DNA, 120 bp, Artificial Sequence
  ENSG00000276045_10 (sequence is synthesized)
tttgaaactgtcctctaagagaataagcatttcctgttcttccagctccaggtccacctcctgttgggaggcggtggggggccaaagtggggccacacactcgctgtgtcccctctcctc

SEQ ID NO: 795145 - DNA, 120 bp, Artificial Sequence
  ENSG00000276045_11 (sequence is synthesized)
ccctgtgccagtgccacctgggtgcctcctcctgtcctgtccgtctcaacctccctcccgtccagcattgagtgtgtacatgtgtgtgtgacacataaatatactcataaggacacctcc

SEQ ID NO: 795146 - DNA, 120 bp, Artificial Sequence
  ENSG00000276045_12 (sequence is synthesized)
ctgctcaccctggttaggtgagcctctaggaaaacttaaaacaaattttaagccaggtatggtggcacatacctgtggtctcagctattcaggaggccaaggcaggaggatctcttgagc

SEQ ID NO: 795147 - DNA, 120 bp, Artificial Sequence
  ENSG00000276045_13 (sequence is synthesized)
gagtttgagaccccatctcaaacaaaaaatacaaaaattagccagccacggcgcctgcacttccagctcctttgagagactgaggcaggaagattgcctaagcccaggaggccaagtctg

SEQ ID NO: 795148 - DNA, 120 bp, Artificial Sequence
  ENSG00000276045_14 (sequence is synthesized)
actgcactccaacctgggcaacagagggagactctgtctctaaaaaaatagaaaaatttgccctgcatggtggctcacgcctgtaatcctagccctttggaaggccaaggcgggcagatc

SEQ ID NO: 795149 - DNA, 120 bp, Artificial Sequence
  ENSG00000276045_15 (sequence is synthesized)
ctccggccgccctgccctgccccctctactgtcccggctgctcccgcccgcagccccgacggggctctctgggcgggccgggcgggccagagtgaggggaagagctgggagaaaccgtgg

SEQ ID NO: 795150 - DNA, 120 bp, Artificial Sequence
  ENSG00000276070_0 (sequence is synthesized)
agcacaggacacagctaggttctgaagcttctgagttctgcagcctcacctctgagaaaacctctttgccaccaataccatgaagctctgcgtgactgtcctgtctctcctcgtgctagt

SEQ ID NO: 795151 - DNA, 120 bp, Artificial Sequence
  ENSG00000276070_1 (sequence is synthesized)
agctgccttctgctctctagcactctcagcaccaatgggctcagaccctcccaccgcctgctgcttttcttacaccgcgaggaagcttcctcgcaactttgtggtagattactatgagac

SEQ ID NO: 795152 - DNA, 120 bp, Artificial Sequence
  ENSG00000276070_2 (sequence is synthesized)
cccagtgagtcctgggtccaggagtacgtgtatgacctggaactgaactgagctgctcagagacaggaagtcttcagggaaggtcacctgagcctggatgcttctccatgagccgcatct

SEQ ID NO: 795153 - DNA, 120 bp, Artificial Sequence
  ENSG00000276070_3 (sequence is synthesized)
cctccatactcaggactcctctccgcagttcctgtctcttctcttaatgtaatctcttttatgtgctgtattattgtattaggtgttatttccattatttatattagtttagccaaagga

SEQ ID NO: 795154 - DNA, 120 bp, Artificial Sequence
  ENSG00000276070_4 (sequence is synthesized)
taagtgtcccctatggggatggtccactctcactctttctctgctgttgcaaatacatggataacaccgttaattccatgtgttttcataataaaactttaaaataaaatgcaaacagtt

SEQ ID NO: 795155 - DNA, 120 bp, Artificial Sequence
  ENSG00000276070_5 (sequence is synthesized)
ctgagaggaactcctcactcagctagcttcaggagccatgacatcatctctaccatggaaattccactcactctcctgtgcccccacatttgtcctaggcctcagagtccctataaagag

SEQ ID NO: 795156 - DNA, 120 bp, Artificial Sequence
  ENSG00000276070_6 (sequence is synthesized)
gatgcctaccacaggcaagggataaagccagatgacctcaaaggtcccatgggattctaatctgtctgctccttgttctacggattccaaaccaaaagaggcaagcaagtctgcgctgac

SEQ ID NO: 795157 - DNA, 120 bp, Artificial Sequence
  ENSG00000276070_7 (sequence is synthesized)
cagcagcctctgctcccagccagctgtggtctaaatccagtgagtggaagttacagggagtctgcttccagtgctgctccgggaaggatcccatccaccagagctgccccacatggacca

SEQ ID NO: 795158 - DNA, 120 bp, Artificial Sequence
  ENSG00000276070_8 (sequence is synthesized)
cagcagcctctgctcccagccagctgtggtgtgagtatcaacccctggctgccctgggaggcaagggtgagggctggatttttaaagggggcctgttttggggagggggtgatgagcgtt

SEQ ID NO: 795159 - DNA, 120 bp, Artificial Sequence
  ENSG00000276070_9 (sequence is synthesized)
ggggaggcagctctcagggctgaagccttccctgacagcagtgaggtcacaggtcatgaactcacttttcaagtgctgaaggcggctgagtggcagccgagacagaagggggttcctggg

SEQ ID NO: 795160 - DNA, 120 bp, Artificial Sequence
  ENSG00000276070_10 (sequence is synthesized)
gaggaagttattcagaggacagggaagcaggggaaggcagacaggtcccgtgagatatggaccaattccttaaaccatgctagaaaaacatgtggaaaagtcactaccaggctggcaggg

SEQ ID NO: 795161 - DNA, 120 bp, Artificial Sequence
  ENSG00000276076_0 (sequence is synthesized)
acactgcgctgcccagaggccccgctgactcctgccagcctccaggtccccgtggtaccaaagctgaacatggatgtgaccatccagcacccctggttcaagcgcaccctggggcccttc

SEQ ID NO: 795162 - DNA, 120 bp, Artificial Sequence
  ENSG00000276076_1 (sequence is synthesized)
taccccagccggctgttcgaccagtttttcggcgagggcctttttgagtatgacctgctgcccttcctgtcgtccaccatcagcccctactaccgccagtccctcttccgcaccgtgctg

SEQ ID NO: 795163 - DNA, 120 bp, Artificial Sequence
  ENSG00000276076_2 (sequence is synthesized)
gactccggcatctctgaggttcgatccgaccgggacaagttcgtcatcttcctcgatgtgaagcacttctccccggaggacctcaccgtgaaggtgcaggacgactttgtggagatccac

SEQ ID NO: 795164 - DNA, 120 bp, Artificial Sequence
  ENSG00000276076_3 (sequence is synthesized)
ggaaagcacaacgagcgccaggacgaccacggctacatttcccgtgagttccaccgccgctaccgcctgccgtccaacgtggaccagtcggccctctcttgctccctgtctgccgatggc

SEQ ID NO: 795165 - DNA, 120 bp, Artificial Sequence; identical to SEQ ID NO: 475087
  ENSG00000276076_4 (sequence is synthesized)

SEQ ID NO: 795166 - DNA, 120 bp, Artificial Sequence; identical to SEQ ID NO: 475088
  ENSG00000276076_5 (sequence is synthesized)

SEQ ID NO: 795167 - DNA, 120 bp, Artificial Sequence; identical to SEQ ID NO: 475089
  ENSG00000276076_6 (sequence is synthesized)

SEQ ID NO: 795168 - DNA, 120 bp, Artificial Sequence; identical to SEQ ID NO: 475090
  ENSG00000276076_7 (sequence is synthesized)

SEQ ID NO: 795169 - DNA, 120 bp, Artificial Sequence; identical to SEQ ID NO: 475091
  ENSG00000276076_8 (sequence is synthesized)

SEQ ID NO: 795170 - DNA, 120 bp, Artificial Sequence; identical to SEQ ID NO: 475094
  ENSG00000276076_9 (sequence is synthesized)

SEQ ID NO: 795171 - DNA, 120 bp, Artificial Sequence
  ENSG00000276076_10 (sequence is synthesized)
tccaatgagctcggcctgcccacggctagcaaagctcttggcaagtttacttaggtgccctgccaaggctaaaaggacaggcaatggacgccccccccccccacccaaccacaggcctcc

SEQ ID NO: 795172 - DNA, 120 bp, Artificial Sequence
  ENSG00000276076_11 (sequence is synthesized)
ggcccaccagtagcattcagcccctcagctggccctgagggtttggagacaggtcgagggtcatgcctgtctgtccaggagacagtcacaggcccccgaaagctctgccccacttggtgt

SEQ ID NO: 795173 - DNA, 120 bp, Artificial Sequence
  ENSG00000276085_0 (sequence is synthesized)
agaaggacgcaggcagcaaagagtagtcagtcccttcttggctctgctgacactcgagcccacattccatcacctgctcccaatcatgcaggtctccactgctgcccttgccgtcctcct

SEQ ID NO: 795174 - DNA, 120 bp, Artificial Sequence
  ENSG00000276085_1 (sequence is synthesized)
ctgcaccatggctctctgcaaccaggtcctctctgcaccacttgctgctgacacgccgaccgcctgctgcttcagctacacctcccgacagattccacagaatttcatagctgactactt

SEQ ID NO: 795175 - DNA, 120 bp, Artificial Sequence
  ENSG00000276085_2 (sequence is synthesized)
tgagacgagcagccagtgctccaagcccagtgtcatcttcctaaccaagagaggccggcaggtctgtgctgaccccagtgaggagtgggtccagaaatacgtcagtgacctggagctgag

SEQ ID NO: 795176 - DNA, 120 bp, Artificial Sequence
  ENSG00000276085_3 (sequence is synthesized)
agcctgagccttgggaacatgcgtgtgacctccacagctacctcttctatggactggttattgccaaacagccacactgtgggactcttcttaacttaaattttaatttatttatactat

SEQ ID NO: 795177 - DNA, 120 bp, Artificial Sequence
  ENSG00000276085_4 (sequence is synthesized)
ttagtttttataatttatttttgatttcacagtgtgtttgtgattgtttgctctgagagttccccctgtcccctccaccttccctcacagtgtgtctggtgacaaccgagtggctgtcat

SEQ ID NO: 795178 - DNA, 120 bp, Artificial Sequence
  ENSG00000276085_5 (sequence is synthesized)
cggcctgtgtaggcagtcatggcaccaaagccaccagactgacaaatgtgtatcagatgcttttgttcagggctgtgatcggcctggggaaataataaagatgttcttttaaacggtaaa

SEQ ID NO: 795179 - DNA, 120 bp, Artificial Sequence
  ENSG00000276085_6 (sequence is synthesized)
ctctctgcaaccaggtcctctctgcaccacgtgagtccatgttgttgttgtgggtatcaccactctctggccatggttagaccacatcagtctttttttgtggcctgagagccccgaaga

SEQ ID NO: 795180 - DNA, 120 bp, Artificial Sequence
  ENSG00000276085_7 (sequence is synthesized)
gaaaagaaggaagttcttaaagcgctgccaaacaccttggtctttttcttcacaacttttatttttatctctagaaggggtcttagccctcctagtctccaggtatgagaatctaggcag

SEQ ID NO: 795181 - DNA, 120 bp, Artificial Sequence
  ENSG00000276085_8 (sequence is synthesized)
gggcaggggagttacagtcccttgtacagatagaaaaacagggttcaaaacgaatcagtttgcaagaggcagaatccagggctgcttacttcccagtggggtctgttcttcactctccag

SEQ ID NO: 795182 - DNA, 120 bp, Artificial Sequence
  ENSG00000276085_9 (sequence is synthesized)
ctcaccctaggtctcccaggagccctgtcccttggatgtcttatgagagatgtccagggcttctcttgggctggggtatgacttcttgaaccgacaaaattccatgaagagagctaagag

SEQ ID NO: 795183 - DNA, 120 bp, Artificial Sequence
  ENSG00000276085_10 (sequence is synthesized)
aacagtccattcaggtatctggatcacatagagaaacagagaacccactatgaagagtcaaggggaaagaggaatatagacagaaacaaagagacatttctctgcaaaaccccccaaatg

SEQ ID NO: 795184 - DNA, 120 bp, Artificial Sequence
  ENSG00000276085_11 (sequence is synthesized)
tgagcaagcctgccctcctcaaccactcagggatcagaagctgcctggccttttcttctgagctgtgactcgggcttattctctcctttctccgcagttgctgctgacacgccgaccgcc

SEQ ID NO: 795185 - DNA, 120 bp, Artificial Sequence
  ENSG00000276119_0 (sequence is synthesized)
atggaatgggaaaaccacaccattctggtggaattttttctgaagggactttctggtcacccaagacttgagttactcttttttgtgctcatcttcataatgtatgtggtcatccttctg

SEQ ID NO: 795186 - DNA, 120 bp, Artificial Sequence; identical to SEQ ID NO: 331606
  ENSG00000276119_1 (sequence is synthesized)

SEQ ID NO: 795187 - DNA, 120 bp, Artificial Sequence
  ENSG00000276119_2 (sequence is synthesized)
acgctagtgagcttcctttcagaaagaaagaccatttccctttctggctgtgcagtgcagatgttcctcggcttggccatggggacaacagagtgtgtgcttctgggcatgatggccttt

SEQ ID NO: 795188 - DNA, 120 bp, Artificial Sequence
  ENSG00000276119_3 (sequence is synthesized)
tcagtgtttgtggtacaattgcctttctgcaggaataacatcatcaatcatttcacctgtgaaattctggctgtcatgaaactggcctgtgctgacatctcagacaatgagttcatcatg

SEQ ID NO: 795189 - DNA, 120 bp, Artificial Sequence
  ENSG00000276119_4 (sequence is synthesized)
cttgtggccacaacattgttcatattgacacctttgttattaatcattgtctcttacacgttaatcattgtgagcatcttcaaaattagctcttccgaggggagaagcaaagcttcctct

SEQ ID NO: 795190 - DNA, 120 bp, Artificial Sequence
  ENSG00000276119_5 (sequence is synthesized)
acctgttcagcccatctgactgtggtcataatattctatgggaccatcctcttcatgtacatgaagcccaagtctaaagagacacttaattcggatgacttggatgctaccgacaaaatt

SEQ ID NO: 795191 - DNA, 120 bp, Artificial Sequence
  ENSG00000276119_6 (sequence is synthesized)
atatccatgttctatggggtgatgactcccatgatgaatcctttaatctacagtcttagaaacaaggatgtgaaagaggcagtaaaacacctactgaacagaaggttctttagcaagtga

SEQ ID NO: 795192 - DNA, 120 bp, Artificial Sequence
  ENSG00000276180_0 (sequence is synthesized)
ctgcagtagataatgaggtaaccgaaggcaattgtgcttcttttgataagaagctttcttggtcatatcaggaaattccagagaaagtccctccctgtatttggggaagagaaacaggac

SEQ ID NO: 795193 - DNA, 120 bp, Artificial Sequence
  ENSG00000276180_1 (sequence is synthesized)
aaagttagagggaccttgattcttagacttgtttctgagaaccctcaattttcaaaaacacccaccattaccaagctcgatatttggggggataattctccaccccaaacactagaaatg

SEQ ID NO: 795194 - DNA, 120 bp, Artificial Sequence
  ENSG00000276180_2 (sequence is synthesized)
aaaataagtagaaaagaacttagcaatatacctgaacgatctttaaattctatgagtctatcttgttctattgctaggaatttagcatatggagtatatttccattgtatattaaggaga

SEQ ID NO: 795195 - DNA, 120 bp, Artificial Sequence
  ENSG00000276180_3 (sequence is synthesized)
aaaatgccacaaaatagcatagttccatacaaataatgttaaaggaaaacatgcatatatgcagagataacattctttttgctttatgtatcttctataatgttaacatttttgttatga

SEQ ID NO: 795196 - DNA, 120 bp, Artificial Sequence
  ENSG00000276180_4 (sequence is synthesized)
ggcaggaatcatgttaaatgaaaaaaggaaaaacagcctaggtcttgaggattaaaaaggactgaaggagaacaagagggagtagagcacagcaggcctgtttcccttttaggtcccctc

SEQ ID NO: 795197 - DNA, 120 bp, Artificial Sequence
  ENSG00000276180_5 (sequence is synthesized)
agacctttgttctctgaccacttgataatgtcaggacgcggcaaaggaggtaagggcctggggaaagggggtgccaagcgccaccgcaaggtgctgcgcgacaacatccagggtatcacc

SEQ ID NO: 795198 - DNA, 120 bp, Artificial Sequence
  ENSG00000276180_6 (sequence is synthesized)
aagccagccattcggcgccttgctcgccgcggcggcgtgaagcgcatttctggcctcatctatgaggagacccgcggagtgttgaaggtgttcctggagaacgtgatccgggacgccgtg

SEQ ID NO: 795199 - DNA, 120 bp, Artificial Sequence
  ENSG00000276180_7 (sequence is synthesized)
acctacacggagcacgccaagcgcaagacggtcaccgccatggacgtggtctacgcgctcaagcgccagggccgcaccctctatggcttcggcggctaaatggcattttgaagcccagtc

SEQ ID NO: 795200 - DNA, 120 bp, Artificial Sequence
  ENSG00000276180_8 (sequence is synthesized)
attctctaaaaaggccctttttagggcccctaagctttcaacaaaagagttgaaatgactgcaaactgagtctcttaatagggccattgtcagtgagttctgtcatcctattttacaaga

SEQ ID NO: 795201 - DNA, 120 bp, Artificial Sequence
  ENSG00000276180_9 (sequence is synthesized)
ttaactcgacgccgaaaatgggctgatgactacaggtgaccttgggccgagatttttccaaggccagaagagcctctgctggccagtaacttctggcggctgcctggaaattgcctgcag

SEQ ID NO: 795202 - DNA, 120 bp, Artificial Sequence
  ENSG00000276203_0 (sequence is synthesized)
ggggatttggggctgggtcggccggggtcggggaggggggtggtgaaaaggtgacagggagctgccctcgctcaagagccggtggttgggggtctgagaagaagtcaccaatatgaagtt

SEQ ID NO: 795203 - DNA, 120 bp, Artificial Sequence; identical to SEQ ID NO: 652073
  ENSG00000276203_1 (sequence is synthesized)

SEQ ID NO: 795204 - DNA, 120 bp, Artificial Sequence
  ENSG00000276203_2 (sequence is synthesized)
aggcgacgccgcggaggtggagcgctgcctggcgcgcaggagcggagacctggacgccctggacaagcagcacagaactgctctacacttggcctgtgccagtggccatgtgcaagtggt

SEQ ID NO: 795205 - DNA, 120 bp, Artificial Sequence; identical to SEQ ID NO: 652075
  ENSG00000276203_3 (sequence is synthesized)

SEQ ID NO: 795206 - DNA, 120 bp, Artificial Sequence; identical to SEQ ID NO: 652076
  ENSG00000276203_4 (sequence is synthesized)

SEQ ID NO: 795207 - DNA, 86 bp, Artificial Sequence; identical to SEQ ID NO: 652077
  ENSG00000276203_5 (sequence is synthesized)

SEQ ID NO: 795208 - DNA, 120 bp, Artificial Sequence; identical to SEQ ID NO: 652078
  ENSG00000276203_6 (sequence is synthesized)

SEQ ID NO: 795209 - DNA, 120 bp, Artificial Sequence; identical to SEQ ID NO: 652079
  ENSG00000276203_7 (sequence is synthesized)

SEQ ID NO: 795210 - DNA, 83 bp, Artificial Sequence; identical to SEQ ID NO: 652080
  ENSG00000276203_8 (sequence is synthesized)

SEQ ID NO: 795211 - DNA, 120 bp, Artificial Sequence; identical to SEQ ID NO: 652081
  ENSG00000276203_9 (sequence is synthesized)

SEQ ID NO: 795212 - DNA, 120 bp, Artificial Sequence; identical to SEQ ID NO: 652082
  ENSG00000276203_10 (sequence is synthesized)

SEQ ID NO: 795213 - DNA, 83 bp, Artificial Sequence; identical to SEQ ID NO: 652083
  ENSG00000276203_11 (sequence is synthesized)

SEQ ID NO: 795214 - DNA, 120 bp, Artificial Sequence; identical to SEQ ID NO: 652084
  ENSG00000276203_12 (sequence is synthesized)

SEQ ID NO: 795215 - DNA, 120 bp, Artificial Sequence
  ENSG00000276203_13 (sequence is synthesized)
actcagacaggaaatatgtacaatgaaaaatgacaacttggaaaaagaaaataaatatcttaaggacattaaaattgttaaagaaacaaatgctgcccttgaaaagtatataaaactcaa

SEQ ID NO: 795216 - DNA, 120 bp, Artificial Sequence
  ENSG00000276203_14 (sequence is synthesized)
cagcattccggtatcaacaagagcttaattatctcaaggctgagaatacaaggctcaatgccgaactgttgaaggaaaaagaaagcaagaaaagactggaagctgacattgaatcttatc

SEQ ID NO: 795217 - DNA, 81 bp, Artificial Sequence
  ENSG00000276203_15 (sequence is synthesized)
actgttgaaggaaaaagaaagcaagaaaagactggaagctgacattgaatcttatcagtctagactggctgctgctataag

SEQ ID NO: 795218 - DNA, 120 bp, Artificial Sequence
  ENSG00000276203_16 (sequence is synthesized)
gaaatgagttctgctatttccaaagtaaaagatgagaatgagtttcttactgaacaactttctgaaacacaaattaaattcaatgccttaaaagataagttccgtaagacaagagatagt

SEQ ID NO: 795219 - DNA, 120 bp, Artificial Sequence
  ENSG00000276203_17 (sequence is synthesized)
tagtctcagaaaaaagtcattggctttagaaactgtacaaaacgacctaagccaaacacagcagcaaacacaggaaatgaaagagatgtatcaaaatgcagaagctaaagtgaataattc

SEQ ID NO: 795220 - DNA, 120 bp, Artificial Sequence; identical to SEQ ID NO: 581641
  ENSG00000276203_18 (sequence is synthesized)

SEQ ID NO: 795221 - DNA, 70 bp, Artificial Sequence
  ENSG00000276203_19 (sequence is synthesized)
cctcgtgctagaagagaaaatatgagagagagaaaacagaaggagtagtaagtatcaaggaagataaata

SEQ ID NO: 795222 - DNA, 70 bp, Artificial Sequence
  ENSG00000276203_20 (sequence is synthesized)
tttaaaagaaagtctctttcagtatgagagagagaaaacagaaaatttaaacatttggttctggatacat

SEQ ID NO: 795223 - DNA, 120 bp, Artificial Sequence; identical to SEQ ID NO: 581643
  ENSG00000276203_21 (sequence is synthesized)

SEQ ID NO: 795224 - DNA, 77 bp, Artificial Sequence
  ENSG00000276203_22 (sequence is synthesized)
tgcaaggggctggggctggaagctggtagtgactgctaatgggcatgaggaatcttacagtgatggaaatgctacta

SEQ ID NO: 795225 - DNA, 86 bp, Artificial Sequence
  ENSG00000276203_23 (sequence is synthesized)
tttcaacaaagctgttttaataaaaaaaggaaaaatgtgtttactatatcggcttagaaacatgcctcatttctaggaaataaaag

SEQ ID NO: 795226 - DNA, 88 bp, Artificial Sequence
  ENSG00000276203_24 (sequence is synthesized)
tgctgaaatagtaattttaatgtctttatgttgccacatgttaagaccataatgtagttataaatggaaatgtttacacctgaagtga

SEQ ID NO: 795227 - DNA, 120 bp, Artificial Sequence
  ENSG00000276203_25 (sequence is synthesized)
ataatgtagttataaatggaaatgtttacacctgaagtgagtattttcaaattaaaatttaattaagtgattttcttcgacacttaattctagattccccagatgaattgaagtgtattg

SEQ ID NO: 795228 - DNA, 120 bp, Artificial Sequence
  ENSG00000276203_26 (sequence is synthesized)
ctgtgtcttgtaataccttgctttaactagctttttatgtattttagttggtatagctttgttattattcatattaacaaatctgaaaatatgtcaaattacgtgtttttatgaccatgt

SEQ ID NO: 795229 - DNA, 120 bp, Artificial Sequence
  ENSG00000276203_27 (sequence is synthesized)
gaccatgtaatgttttaaaggcacctacttgttataaaatcataatttaggataaatgtggtaaaacttagcaaaactatatttggtttagttttcccactggtatttatagtttacttt

SEQ ID NO: 795230 - DNA, 74 bp, Artificial Sequence
  ENSG00000276203_28 (sequence is synthesized)
tgactctgtgatttacgagttaggcactacatctccattttcagactgaggggtggcaggcttcacatacagtg

SEQ ID NO: 795231 - DNA, 78 bp, Artificial Sequence
  ENSG00000276203_29 (sequence is synthesized)
cttgtagctgtctgtgatttacgagttaggcactacatctccattttcagactgaggggtggcaggcttcacctttga

SEQ ID NO: 795232 - DNA, 84 bp, Artificial Sequence
  ENSG00000276203_30 (sequence is synthesized)
aggaactttgaggctgagttgagcttctgagatgattgaatgttggaatgaatctgttgtgtaagtaagagaataccaatttgg

SEQ ID NO: 795233 - DNA, 120 bp, Artificial Sequence
  ENSG00000276203_31 (sequence is synthesized)
tgaggctgagttgagcttctgagatgattgaatgttggaatgaatctgttgtgtaagtaagagaataccaatttggcaggaagagaacatattctgcatccctcactgaattcagtaata

SEQ ID NO: 795234 - DNA, 71 bp, Artificial Sequence
  ENSG00000276203_32 (sequence is synthesized)
tggagtagattatagatttgaaatagcggagttggggttggatcggggctttggggttggataggggattt

SEQ ID NO: 795235 - DNA, 120 bp, Artificial Sequence; identical to SEQ ID NO: 581654
  ENSG00000276203_33 (sequence is synthesized)

SEQ ID NO: 795236 - DNA, 120 bp, Artificial Sequence
  ENSG00000276203_34 (sequence is synthesized)
tagggagtaattatgactgtgtgatttaaaaaggtaattttgaacctgtaactttactgaattatctctggtatccttttttataatatatattagagtgactagtaacaaaaactttag

SEQ ID NO: 795237 - DNA, 78 bp, Artificial Sequence
  ENSG00000276203_35 (sequence is synthesized)
ccaaaggaaaaataatccagaacatagaaattttattaggataataaacaacatctgcagaggtagataacaggatga

SEQ ID NO: 795238 - DNA, 120 bp, Artificial Sequence
  ENSG00000276203_36 (sequence is synthesized)
attaggataataaacaacatctgcagaggtagataacaggatgaactccttattttttaacaaaatgaattttaagacaaatgtctttatctgcagatgcaccttaaaacaagaaaatga

SEQ ID NO: 795239 - DNA, 120 bp, Artificial Sequence
  ENSG00000276203_37 (sequence is synthesized)
aatttaataaggcagtttataaaatcagtaacaaatattttatcaggtggttgtgagacaacttcaacaagaagtggctgacagcgtaaaaaaattaacgacgttagagtctccactgga

SEQ ID NO: 795240 - DNA, 120 bp, Artificial Sequence
  ENSG00000276203_38 (sequence is synthesized)
aggtatatcacgttgtcacattaatttggatgagacacaggcctcaaataagaaattatttcaagtgaaaagtcaaatatgtatggaatttaacatgtcaacagttattctgtagctagt

SEQ ID NO: 795241 - DNA, 120 bp, Artificial Sequence
  ENSG00000276203_39 (sequence is synthesized)
aattttggcagaagcttgattttttattttcattataatgaatgatttccattttactatctttataatgtactatttttttatattgtgactttcattataccattttgaaaaaccatt

SEQ ID NO: 795242 - DNA, 62 bp, Artificial Sequence
  ENSG00000276203_40 (sequence is synthesized)
tgacttttttcctgttaaacagtatttttaagtaatttgtgtattgctctgatgaggcaagc

SEQ ID NO: 795243 - DNA, 120 bp, Artificial Sequence
  ENSG00000276203_41 (sequence is synthesized)
tcctcatagaaaattgacttttttcctgttaaacagtatttttaagtaatttgtgtattgctctgatgaggcaagccagattaaatcagaggagaatgtttcatggaatgttccagaaaa

SEQ ID NO: 795244 - DNA, 67 bp, Artificial Sequence
  ENSG00000276203_42 (sequence is synthesized)
ttgtcttatttcttcacttttgtgaatggacacagaatctgtgtctatttaaatgtgcatgttttag

SEQ ID NO: 795245 - DNA, 120 bp, Artificial Sequence
  ENSG00000276203_43 (sequence is synthesized)
aaaagttaggcattttctttatcttttatttaaaatatactgtaaaactgtagaaatatttagatttgatatagcatgtacatcaaaaattaagagttgagaaaattatcttgatcctgc

SEQ ID NO: 795246 - DNA, 120 bp, Artificial Sequence
  ENSG00000276203_44 (sequence is synthesized)
gattcactgagatgtcattcacatatcagacagttcaaccatttaaaatgtacaactcagtgtctattagtatgttcacagcattttcgtcaccctgaaaagtgaccccacatctcctag

SEQ ID NO: 795247 - DNA, 120 bp, Artificial Sequence
  ENSG00000276203_45 (sequence is synthesized)
ccttcctccatgtccctccacctacccctgttgtaggcaaccaccgtctacttttgtctccatatgtttgcctgttctgcatatttcatatacatagagttatacaatatgtagtccttt

SEQ ID NO: 795248 - DNA, 120 bp, Artificial Sequence
  ENSG00000276203_46 (sequence is synthesized)
cttagcataatgttttcagaattcatgcatgttttagcacacattcgtagtttatttcttcttatagttaaatgatattctattccatggctatactggttttccattcgttcatcagtt

SEQ ID NO: 795249 - DNA, 120 bp, Artificial Sequence
  ENSG00000276203_47 (sequence is synthesized)
tattccatggctatactggttttccattcgttcatcagttgatggacctttaggttagtttccactttttagctattatgaaaaatgctgctgtgaacattcacttacaggttattatgt

SEQ ID NO: 795250 - DNA, 120 bp, Artificial Sequence
  ENSG00000276203_48 (sequence is synthesized)
cctggcagacaatttttttgttttcatgaagctttctctgactgttctgtcattgaccttatgtgttagcaatcgttgtctagtctgtgctgaaaaacttagtccttaattttacatggc

SEQ ID NO: 795251 - DNA, 90 bp, Artificial Sequence
  ENSG00000276203_49 (sequence is synthesized)
tattctaaatatatttttagcaattaaatatcaaatctaacccaattagtctaacacaggagatgcgttcaatcacgtgtttatgttttt

SEQ ID NO: 795252 - DNA, 120 bp, Artificial Sequence
  ENSG00000276203_50 (sequence is synthesized)
ctaacacaggagatgcgttcaatcacgtgtttatgtttttctctctatgaaaaagaatataaattggccttttttcactatgcagccattactgtgtttctggactgctcccagtctgtc

SEQ ID NO: 795253 - DNA, 120 bp, Artificial Sequence
  ENSG00000276203_51 (sequence is synthesized)
tgcagccattactgtgtttctggactgctcccagtctgtcagctgaacagttctgggtgcagcttgtctgatgaaggatagcacagcccctcaatctgagtgctcagcagagtgcttgtg

SEQ ID NO: 795254 - DNA, 71 bp, Artificial Sequence
  ENSG00000276203_52 (sequence is synthesized)
gtactattccatccaggaggtgctatttacattgtagtacatacacagtcattgcctaatgagtcatacag

SEQ ID NO: 795255 - DNA, 76 bp, Artificial Sequence
  ENSG00000276203_53 (sequence is synthesized)
taagaatgattcagtgcagctataggagactacttccattggcatgccacctgcgtaaatacacaattttgttaag

SEQ ID NO: 795256 - DNA, 61 bp, Artificial Sequence
  ENSG00000276203_54 (sequence is synthesized)
gtagtcttctaagtgcttcatgttagtccccatttaaacacctggttttggaaggctgagg

SEQ ID NO: 795257 - DNA, 64 bp, Artificial Sequence
  ENSG00000276203_55 (sequence is synthesized)
gtagctcactatgttccatgtagtcttctaagtgcttcatgttagtccccatttaaacacctgg

SEQ ID NO: 795258 - DNA, 120 bp, Artificial Sequence
  ENSG00000276203_56 (sequence is synthesized)
tgaacgtcaaaattgaccctgctgttaaagcttgaaacttggatctgttgtatctgagttctctcctcaaaaaaagaccttcaggaagtatcagataactgaaacataccagatcacagc

SEQ ID NO: 795259 - DNA, 120 bp, Artificial Sequence
  ENSG00000276203_57 (sequence is synthesized)
accacatgcctcctgcccctccctaatttctgttctcttatacattgttaaatttttttcctgcccctattagtcaagcccatggatttgagactgagcttccagctcctgggccgcagc

SEQ ID NO: 795260 - DNA, 120 bp, Artificial Sequence
  ENSG00000276203_58 (sequence is synthesized)
accaggttaaagctttcttccttggcagtacttgtcacctcagtgactggctttttctccgatgagcaggaggacctggacgaaacccctagtgtttggtcaaggaacttgatgctccct

SEQ ID NO: 795261 - DNA, 120 bp, Artificial Sequence
  ENSG00000276203_59 (sequence is synthesized)
aaatccaaatattacggttaaaagaagagagaggaaatgtgtgcagagaaagtgtattttacaaatgaattaaaggtggattctgagatacaggtttatagatttacctagagttttgag

SEQ ID NO: 795262 - DNA, 120 bp, Artificial Sequence
  ENSG00000276203_60 (sequence is synthesized)
ggaagccatcattctttagagggcaatgaccaaacagtaccagcagaaattgaagtaccagcagaaggctaagaagggatcatggcacaagctgcagtttccaccctgcccattgaagat

SEQ ID NO: 795263 - DNA, 120 bp, Artificial Sequence
  ENSG00000276203_61 (sequence is synthesized)
tccgttgaagatgagtctgttgaagatgagtccgcagagaacaggatggtggtgacattgctcatatcagctcttgagtccatggatcatggcacaagttgcagtttccactctgcccat

SEQ ID NO: 795264 - DNA, 120 bp, Artificial Sequence
  ENSG00000276203_62 (sequence is synthesized)
ggagagcaggatggtggtgacattcctaatgtcagctctcgagtccacggtcagaccttctgttctcacattctgtagtttggtaggactgggcagtagataaggttgacttatttttgt

SEQ ID NO: 795265 - DNA, 120 bp, Artificial Sequence
  ENSG00000276203_63 (sequence is synthesized)
aggactgggcagtagataaggttgacttatttttgtagaacttacaattttatgattttcagttgtaatgagtagacctttttcgtgaatagtagttatggttaaacacctctaaccaaa

SEQ ID NO: 795266 - DNA, 120 bp, Artificial Sequence
  ENSG00000276203_64 (sequence is synthesized)
tttttttttttttttttttagggttgggtgttttactgttgagctgctcagtgcccagcttagaggaccaggaaaaggagtcaccggccgtatgctggaggcttgagacacggcacagag

SEQ ID NO: 795267 - DNA, 120 bp, Artificial Sequence
  ENSG00000276203_65 (sequence is synthesized)
agaggcgcagctcgcctcgctatggttggtggtggcagtggagattgcgattgcagcgcggctggaaggtcctttaggttgtttgagggacattgatcaaggaaaccggagaaacttaaa

SEQ ID NO: 795268 - DNA, 120 bp, Artificial Sequence
  ENSG00000276203_66 (sequence is synthesized)
atgctcttccgcttctttggaacagtcacagagaaaagtgaactcctttcattcttgcagtaatttttcttgctgatgggaacagttcaagtcaagtgacatgaagccatcattctttag

SEQ ID NO: 795269 - DNA, 120 bp, Artificial Sequence
  ENSG00000276203_67 (sequence is synthesized)
gatgcagtcgtagctaactgcagcctcaaccacctgggctcaagcaattctcccgcctcagccttccaagcatctgggactacagaactgctctacacttggcctgtgccagtggccatg

SEQ ID NO: 795270 - DNA, 120 bp, Artificial Sequence
  ENSG00000276231_0 (sequence is synthesized)
atggagagctcagatgtggagctggacctccagaggagcgtgcaggctgtgctccgggagctcagcacccaggcccctgccctgcagagcaaccaaggcatgtggaggtggtccctgcac

SEQ ID NO: 795271 - DNA, 120 bp, Artificial Sequence
  ENSG00000276231_1 (sequence is synthesized)
aagaaggtcgagcgagatcccggtaagagcccagtgctggtccgcattcttctcagagaactggagaaggcggaaagccaggacctccggcatgtcatcattcccttgctgcacactgta

SEQ ID NO: 795272 - DNA, 120 bp, Artificial Sequence
  ENSG00000276231_2 (sequence is synthesized)
atgtacgtgctcaccaaggccacaggaatcacagaagagctctaccagagaatctatgccttttgcacaaggttactgaccctgcccaccccctactgcacagtcgccttggactgcgcg

SEQ ID NO: 795273 - DNA, 120 bp, Artificial Sequence
  ENSG00000276231_3 (sequence is synthesized)
ataaggctgaaaacggagatggctgtcccagggacactgtaccaaaggatggtcattgccgaacagaacttgacgaatgagctgtatccctaccaggagagagtgttcctcttcgtggat

SEQ ID NO: 795274 - DNA, 120 bp, Artificial Sequence
  ENSG00000276231_4 (sequence is synthesized)
cctgagctggtgtctgcgtctgtgtgcagtgctctgctactggagatcgaggcggcccaggcgcagcagacaccagagacctgcatgcgccacgtggtctcccacgccctgcaggcggct

SEQ ID NO: 795275 - DNA, 120 bp, Artificial Sequence
  ENSG00000276231_5 (sequence is synthesized)
ctgggggaggcctgtcacgcaggcgctctgcacaggaagctgcaggccagccctcgccgcaccctggagcactatttccacgccgtggtggccgccttggagcagatggccagcgaggcc

SEQ ID NO: 795276 - DNA, 120 bp, Artificial Sequence
  ENSG00000276231_6 (sequence is synthesized)
agcccgagccgggagggacacgtagagaggctggaggagatttactgctcgctgctgggtcccgcggcggggcgctgcggtggtgaccttgtccaagagcggccaccaagcattcccctg

SEQ ID NO: 795277 - DNA, 120 bp, Artificial Sequence
  ENSG00000276231_7 (sequence is synthesized)
cccagcccctacatcaccttccacttgtggaccggtgaggagcagctctggaaggaactggtgctcttcctccgcccaagatcccagctgcgcctcagtgctgacttggaggtcttggat

SEQ ID NO: 795278 - DNA, 120 bp, Artificial Sequence
  ENSG00000276231_8 (sequence is synthesized)
ctgcagggcctccggccggaccgggagttggcccgggtttctgtgctgtccactgacagcggcattgagcgggaccttcccacgggggctgatgagctgcctgcacccggcagccctgag

SEQ ID NO: 795279 - DNA, 120 bp, Artificial Sequence
  ENSG00000276231_9 (sequence is synthesized)
aggacaggccggcccagtggggatggggaaatgctgcccggcgtgtcccggctgcacacagcccgggtacttgtgctcggagatgacaggatgctggggcgcctggcccaggcctaccac

SEQ ID NO: 795280 - DNA, 120 bp, Artificial Sequence
  ENSG00000276231_10 (sequence is synthesized)
agactcaggaaacgggagacccagaagttctgcctcactcccagactcagcctgcagctctactacatccccgtgctggcgcctgagaagcctgcagcatccaggcagccggagctggga

SEQ ID NO: 795281 - DNA, 120 bp, Artificial Sequence
  ENSG00000276231_11 (sequence is synthesized)
gagctggctacgttcctgggccgcgtagacccgtggtaccagagcaacgtcaacacgctgtgccccgccatccacaagctggctgagatgcctccttccctggacacatcccggactgtg

SEQ ID NO: 795282 - DNA, 120 bp, Artificial Sequence
  ENSG00000276231_12 (sequence is synthesized)
gaccccttcatcctagacgtcatcacctactacatccgcatgggcacccaacccatctatttccagatctacacagtcaagatctttttcagtgacctgagccaagaccctactgaggac

SEQ ID NO: 795283 - DNA, 120 bp, Artificial Sequence
  ENSG00000276231_13 (sequence is synthesized)
attttcctcattgaactgaaggtgaagatccaagattctaaattccccaaagatggcttttcacccaggaggagaggcgtggctgagggcccaggggcagagctctccctatgctaccag

SEQ ID NO: 795284 - DNA, 120 bp, Artificial Sequence
  ENSG00000276231_14 (sequence is synthesized)
aaggccttgcttagccaccggccccgagaggtcaccgtttccctgcgggccactgggctgatcctgaaggccattccagccagcgacacagaagtttcagggtctagccattgccccctg

SEQ ID NO: 795285 - DNA, 120 bp, Artificial Sequence
  ENSG00000276231_15 (sequence is synthesized)
cctgctgctcctgtcacagaccacacatgtctgaatgtcaacgtgacagaggttgtcaagtcctccaacttggcgggaaagtccttctctacagtgaccaacaccttcaggacgaacaat

SEQ ID NO: 795286 - DNA, 120 bp, Artificial Sequence
  ENSG00000276231_16 (sequence is synthesized)
atccagatccagagccgggaccagaggctgctgacactgtcgctggacaaggacgatcaacgcactttcagggatgtggtcagattcgaggttgctccctgcccagaaccatgttctggg

SEQ ID NO: 795287 - DNA, 120 bp, Artificial Sequence
  ENSG00000276231_17 (sequence is synthesized)
gcccagaagtccaaggcaccgtggctcaatttgcatgggcaacaggaggtggaagcaatcaaagccaagcccaagccccttctgatgcccatcaacacattctctggtattgtccagtga

SEQ ID NO: 795288 - DNA, 120 bp, Artificial Sequence
  ENSG00000276231_18 (sequence is synthesized)
tttgcagatctgaagagcacagtcaagaccacagacacccgtggaggctcccccaagacatctgcttctctgggactggggacctcgctcaggaccgtggggagttggctgaaggacttg

SEQ ID NO: 795289 - DNA, 120 bp, Artificial Sequence
  ENSG00000276231_19 (sequence is synthesized)
gggagcccagaagctgccaccgaaccaagaaccacctctgtgcagaaaagcaaccaccttgttctctattctgctgcccgagacaaccacatcctcctcctcctacacccaaaggctccc

SEQ ID NO: 795290 - DNA, 120 bp, Artificial Sequence
  ENSG00000276231_20 (sequence is synthesized)
actcacaccaacagccagagcaaggcccggctccacacggcagctttggccttgaccaggagccagcgagtgcctgggagcacagggagcctaccctggggactgtgatgaggaagggcc

SEQ ID NO: 795291 - DNA, 120 bp, Artificial Sequence
  ENSG00000276231_21 (sequence is synthesized)
cacatggaggtctacggatggcccaggcaatgctgtcgctgcttgagaacatacacaccaagcccagcttctcatacaaatgtctactccttcatttagcttcaattcccacttctccca

SEQ ID NO: 795292 - DNA, 120 bp, Artificial Sequence
  ENSG00000276231_22 (sequence is synthesized)
ctgtcctctcccacccaagctccccatccagcccttaaaaccagggttaaagctgctgtcttggccagagccctgtggcctaggggaaaattggaagcaaggaacagcaacagcaccacc

SEQ ID NO: 795293 - DNA, 120 bp, Artificial Sequence
  ENSG00000276231_23 (sequence is synthesized)
tccctcccaagtctcttcccttcccactctcaggccactgcccacctcactcagcccaggcaggtgtctctatcaggtgagagaaaaatgtcagactcaataaatgtacactgaagtctt

SEQ ID NO: 795294 - DNA, 120 bp, Artificial Sequence
  ENSG00000276231_24 (sequence is synthesized)
cagtcctggcagcgctatatctcataagctttggttgcctgcatgatttttaccatatgcatctccctcctgtacttttacgtaagcagtattttctttacgtcgactctcattgtttta

SEQ ID NO: 795295 - DNA, 120 bp, Artificial Sequence
  ENSG00000276231_25 (sequence is synthesized)
cttgaataaacatctttcaaaaagaagcactataacgcgaccacaaatggaaaacccgcatcacttgtcagaaacagaaggcggaaagccaggacctccggcatgtcatcattcccttgc

SEQ ID NO: 795296 - DNA, 120 bp, Artificial Sequence
  ENSG00000276231_26 (sequence is synthesized)
gcatacactcagcctgcagcctcctgatccagtcccctctgcaggcacgggcccctcccacacaggctgacctgtggcatctgtgttccagttagctgacccttactggcttcccctcgg

SEQ ID NO: 795297 - DNA, 120 bp, Artificial Sequence
  ENSG00000276234_0 (sequence is synthesized)
atttcccgctcagccctggagcgcgtagctctaccaagaatggccactgtgccagatgcccctgaccagcgttgcccatttgaatttcctagcaggccccccaaagtaggtatttcagta

SEQ ID NO: 795298 - DNA, 120 bp, Artificial Sequence
  ENSG00000276234_1 (sequence is synthesized)
ccctgttagagctgaggcgcaggtaaaatgactggcccaggccggtcccaccccgtaaggatttgaacgttggctccacaactcgggagcctgcgcctttcctcctcccaacgtggactc

SEQ ID NO: 795299 - DNA, 120 bp, Artificial Sequence
  ENSG00000276234_2 (sequence is synthesized)
ctgcccggcgaagtgcctcacttccttctcccgggagtcatcaagctttggtgtatgtgttggccggttctgaagtcttgaagaagctctgctgaggaagaccaaagcagcactcgttgc

SEQ ID NO: 795300 - DNA, 120 bp, Artificial Sequence
  ENSG00000276234_3 (sequence is synthesized)
caattagggaatggaccgtttgggttcctttagcaatgatccctctgataagccaccttgccgaggctgctcctcctacctcatggagccttatatcaagtgtgctgaatgtgggccacc

SEQ ID NO: 795301 - DNA, 120 bp, Artificial Sequence
  ENSG00000276234_4 (sequence is synthesized)
tccttttttcctctgcttgcagtgtttcactcgaggctttgagtacaagaaacatcaaagcgatcatacttatgaaataatgacttcagattttcctgtccttgatcccagctggactgc

SEQ ID NO: 795302 - DNA, 120 bp, Artificial Sequence
  ENSG00000276234_5 (sequence is synthesized)
tcaagaagaaatggcccttttagaagctgtgatggactgtggctttggaaattggcaggatgtagccaatcaaatgtgcaccaagaccaaggaggagtgtgagaagcactatatgaagca

SEQ ID NO: 795303 - DNA, 120 bp, Artificial Sequence
  ENSG00000276234_6 (sequence is synthesized)
tttcatcaataaccctctgtttgcatctaccctgctgaacctgaaacaagcagaggaagcaaaaactgctgacacagccattccatttcactctacagatgaccctccccgacctacctt

SEQ ID NO: 795304 - DNA, 120 bp, Artificial Sequence
  ENSG00000276234_7 (sequence is synthesized)
tgactccttgctttctcgggacatggccgggtacatgccagctcgagcagatttcattgaggaatttgacaattatgcagaatgggacttgagagacattgattttgttgaagatgactc

SEQ ID NO: 795305 - DNA, 120 bp, Artificial Sequence
  ENSG00000276234_8 (sequence is synthesized)
gtggtagatatctatcattccaggttaaaggagagacaaagacgaaaaaaaattataagagaccatggattaatcaaccttagaaagtttcaattaatggaacggcggtatcccaaggag

SEQ ID NO: 795306 - DNA, 120 bp, Artificial Sequence
  ENSG00000276234_9 (sequence is synthesized)
gtccaggacctgtatgaaacaatgaggcgatttgcaagaattgtggggccagtggaacatgacaaattcattgaaagccatgcattggaatttgaactccgaagggaaatcaagaggctc

SEQ ID NO: 795307 - DNA, 120 bp, Artificial Sequence
  ENSG00000276234_10 (sequence is synthesized)
caagaatacaggacagcaggcattaccaatttttgtagtgccagaacctacgatcacctcaagaagacacgggaggaagagcgccttaaacgcactatgctctcagaagttctccagtat

SEQ ID NO: 795308 - DNA, 120 bp, Artificial Sequence
  ENSG00000276234_11 (sequence is synthesized)
atccaggacagtagtgcttgccagcagtggctccgccggcaagctgacattgattccggcctgagtccttccattccaatggcttcgaattcaggtagacggagtgcaccacccttgaac

SEQ ID NO: 795309 - DNA, 120 bp, Artificial Sequence
  ENSG00000276234_12 (sequence is synthesized)
ctcactggcctccctggcacagagaagctgaatgaaaaagaaaaggagctctgtcagatggtgaggttggtccctggagcctatttagaatacaaatctgctctattgaacgaatgtaac

SEQ ID NO: 795310 - DNA, 120 bp, Artificial Sequence
  ENSG00000276234_13 (sequence is synthesized)
aagcaaggaggcttaagactggcgcaggcaagagcactcatcaagatagatgtgaacaaaacccggaaaatctatgatttcctcatcagagaaggatacatcactaaaggctaaggctcc

SEQ ID NO: 795311 - DNA, 120 bp, Artificial Sequence
  ENSG00000276234_14 (sequence is synthesized)
aagagcttgggatcagaagtcagaagtttggaatgtggtgggtcaaaggacaatatgggtgggcattctggagagttgtttttcagctgaattctcatggtgaaaacaggggaaaggaca

SEQ ID NO: 795312 - DNA, 120 bp, Artificial Sequence
  ENSG00000276234_15 (sequence is synthesized)
aaggaaaccttaagttgtattgtctactttcttctccatcctgctttaaaacactcctgttgttggtattatgctgcagagttgtgtgctacataagctattattaaatgtgagtgggca

SEQ ID NO: 795313 - DNA, 120 bp, Artificial Sequence
  ENSG00000276234_16 (sequence is synthesized)
gaaatggaactaaaccacagtctgtaatcccaggagtccagctcagatccttatattgcgaggtaagtttgctgattatctgtcttgccttcaaacactgcagacagatttaaaataaag

SEQ ID NO: 795314 - DNA, 120 bp, Artificial Sequence
  ENSG00000276234_17 (sequence is synthesized)
tgtcttgccttcaaacactgcagacagatttaaaataaagagaaaggttttagagcataagaaagctctcgttgaaggattttttaagctgacaactttttttttttttttttgagacag

SEQ ID NO: 795315 - DNA, 88 bp, Artificial Sequence
  ENSG00000276234_18 (sequence is synthesized)
agtactaaagctgacaacttttatgagtaaaggggaagaaaatatccttatgatggtcttatcccaaactgcatctttaacttcggcc

SEQ ID NO: 795316 - DNA, 86 bp, Artificial Sequence
  ENSG00000276234_19 (sequence is synthesized)
agctgacaacttttatgagtaaaggggaagaaaatatccttatgatggtcttatcccaaactgcatctttaacttcggccgggcaa

SEQ ID NO: 795317 - DNA, 65 bp, Artificial Sequence
  ENSG00000276234_20 (sequence is synthesized)
cctttaatgtctggctttgtactttgcagtctgcctgtctaatctgcagtagtcttttgaggagg

SEQ ID NO: 795318 - DNA, 120 bp, Artificial Sequence
  ENSG00000276234_21 (sequence is synthesized)
gcagtctgcctgtctaatctgcagtagtcttttgaggaggtggcaccggatataacatgtctctgttatttttagaattaattaaaatgttttgctatttaatttgtgggtgtgtcaaat

SEQ ID NO: 795319 - DNA, 120 bp, Artificial Sequence
  ENSG00000276234_22 (sequence is synthesized)
attctggtaactgaaacacacttaaggtgttggatgcctgccccatcacgctgcactgtctgctgtcacatgtgtcctgaactcaccctgtttttgccctgggtttcccaggataccaag

SEQ ID NO: 795320 - DNA, 120 bp, Artificial Sequence
  ENSG00000276234_23 (sequence is synthesized)
cccctgaggatggagatgatgcaacaaacctcagctttgcttggattgtgacttgaaccctatttctcaatggtgaaaggctagcctgcaataaaagctgcttttaaaacagaagtaaag

SEQ ID NO: 795321 - DNA, 120 bp, Artificial Sequence
  ENSG00000276234_24 (sequence is synthesized)
cagctttatatatgggactcactagatatgagggtaagtagccccaccacatgtaaaacttggtcctcaaacgtttctgcagaataagaagccaaacttatggttatcttgtttctgtta

SEQ ID NO: 795322 - DNA, 120 bp, Artificial Sequence
  ENSG00000276234_25 (sequence is synthesized)
gaaacaaagttgtatatagaaataacttcgtcagaatcgacacaaatcacatcgaatagttgactgtttaattccttctacattcaaatatctaattaaaatactgtgtgctttgttgga

SEQ ID NO: 795323 - DNA, 120 bp, Artificial Sequence
  ENSG00000276234_26 (sequence is synthesized)
agcatctgctcaaacttttgactgttgtaaatatgcatgcagctgggaagggattcatctaagggataagaaatgaaaaagacactctaaggacctgagggaattcaaatagaggacttc

SEQ ID NO: 795324 - DNA, 120 bp, Artificial Sequence
  ENSG00000276234_27 (sequence is synthesized)
gattttttaaaaagaatgacgtggaaatgacctgttttccttgtaaaatcatatctcgtagaaaacattttaccactaccatcacccctagttggttgtgaagtgattgcctcttatccc

SEQ ID NO: 795325 - DNA, 120 bp, Artificial Sequence
  ENSG00000276234_28 (sequence is synthesized)
tgaaaggaaactcctgttctgaaaagttgggatgcattagccatcagtgttaggtgacgtctgttgtagtctgaagagtccttaaccttgattaaggaaggcttcctgggagaggtgggc

SEQ ID NO: 795326 - DNA, 120 bp, Artificial Sequence
  ENSG00000276234_29 (sequence is synthesized)
ttttggggcaattatatgatagagaagagagagaaaaatggcagatggaagtgggagacaattccacacacagggggtggagaatgatgtggaggcagcagtgggtgtaaggacaatggt

SEQ ID NO: 795327 - DNA, 120 bp, Artificial Sequence
  ENSG00000276234_30 (sequence is synthesized)
gccaagagatttatttggctagaacacaaggggcagctgggtagttaggagtgggaggatggtaggacagtctgacagaaaccttggaaacagttgaactctgaaaagctgatggcaaat

SEQ ID NO: 795328 - DNA, 120 bp, Artificial Sequence
  ENSG00000276234_31 (sequence is synthesized)
cagatttcatgaggaaaatggcatggttgaaaatagtaatagaaaaataagactgaagttttaaatgactggatttttgaaagtaggattattatttctttggtataccgaactttgcaa

SEQ ID NO: 795329 - DNA, 120 bp, Artificial Sequence
  ENSG00000276234_32 (sequence is synthesized)
agatacgtagcattgcatccttcctctttgcttctagacagggttggccataaaccaactacactgatagaggtctctccagattgtctcagaagagagagtttaccctgaaacttaatg

SEQ ID NO: 795330 - DNA, 120 bp, Artificial Sequence
  ENSG00000276234_33 (sequence is synthesized)
acatgaataaaacctgtttactgaaatttttattgcaatttaacgttaaaagtttctgctggagttttatgcatatttttctctctaagtggtgggaaataaagaacaaatctctttcca

SEQ ID NO: 795331 - DNA, 86 bp, Artificial Sequence
  ENSG00000276234_34 (sequence is synthesized)
atcaagtgtgctgaatgtgggccacctccttttttcctctgcttgcagctgcagacaagattaaatgaatccttaaaaaattgttg

SEQ ID NO: 795332 - DNA, 120 bp, Artificial Sequence
  ENSG00000276234_35 (sequence is synthesized)
tgggaggccaagaaaggtgaatcacaagatcaggagttcgaggccagcctggccaaggtggtgaaatcccgtctctgctaaaaatacgaaaattagctgagtgttgtgccggctgcctgt

SEQ ID NO: 795333 - DNA, 120 bp, Artificial Sequence
  ENSG00000276234_36 (sequence is synthesized)
ccatgcatgtaggtggtttttgagccttgagcagtatttgtgtgtgtatatttatataaataggagagataatggtgtgttttatgtgaagttctataaataaataaatggatatttctc

SEQ ID NO: 795334 - DNA, 120 bp, Artificial Sequence
  ENSG00000276234_37 (sequence is synthesized)
gagcttggtgttaagagttgtcctgccctagtggactcagagaagaagctgttgttgaagagtaaaggaaggaacctcaggaagagaaagtatgtgttgctttcctatcaacccatgatt

SEQ ID NO: 795335 - DNA, 120 bp, Artificial Sequence
  ENSG00000276234_38 (sequence is synthesized)
tagaggcaagttagtcccctctgtacattatttttccagtgtcgaaatgtgtcacgaggatatgggatgtttagcggtccatgactgagcagctttaaaaggccactttggatgtatcaa

SEQ ID NO: 795336 - DNA, 120 bp, Artificial Sequence
  ENSG00000276234_39 (sequence is synthesized)
attgattgattcattcgttcagcaaatagtcatggagagtctactatgcccaacaagaggaaaaacccgtgatgcctgagagtctaaaattgggttagtgattcactgacctgcagaaat

SEQ ID NO: 795337 - DNA, 120 bp, Artificial Sequence
  ENSG00000276234_40 (sequence is synthesized)
ttgtgggagtgacttctttggacctctgtattgtattccacctcagcatgtttatgtctgatgatagctatatgtgtaaagcattagtaaatgtgaaaataattctaatgcacaaattat

SEQ ID NO: 795338 - DNA, 65 bp, Artificial Sequence
  ENSG00000276234_41 (sequence is synthesized)
gtcttgcttgttgcccacgctggggttcagtgctatgatctcggctcactgcagcctccaccttc

SEQ ID NO: 795339 - DNA, 120 bp, Artificial Sequence
  ENSG00000276240_0 (sequence is synthesized)
tctttctctacagattccccttcagtacttgaaggtggaataatccacctgaaactggcaatacaaaacttgcacctaaacagtgtgctgcaaaggaaataggatgcttctgccgcactg

SEQ ID NO: 795340 - DNA, 120 bp, Artificial Sequence
  ENSG00000276240_1 (sequence is synthesized)
gttttctgaataattagatcaagttttgtgttagaagtgtcctaataaacctgaagggcctgcaaaagtggctgactctttttttttttttttttttttggacagggtcgttgtgttgct

SEQ ID NO: 795341 - DNA, 81 bp, Artificial Sequence
  ENSG00000276240_2 (sequence is synthesized)
tttttttttttttttttttggacagggtcgttgtgttgctcaggatggagtgcagtggtaaaaatcctcctgcctcagcct

SEQ ID NO: 795342 - DNA, 120 bp, Artificial Sequence
  ENSG00000276240_3 (sequence is synthesized)
gtagagacggggtttcgccatgttgcccgggcttgactgtggcttttaatctcctctactcaccactacaatctggaaaagtgaaaacatatatattatttctgtactacattttctgtt

SEQ ID NO: 795343 - DNA, 120 bp, Artificial Sequence
  ENSG00000276240_4 (sequence is synthesized)
tctgtactacattttctgttaactggaaaccaatcctagaaaatcttggtgcagaattacatattttgacatattgaaaaatatgataataatatagctacaaaggtgtgatttttacag

SEQ ID NO: 795344 - DNA, 120 bp, Artificial Sequence
  ENSG00000276240_5 (sequence is synthesized)
acagcctgaaatagtaccttttaccagaaaatatcgccaaatacatctactgtgacatcaccaaaactgtgaacaagacctaaggagggaacttcaagggctctcacctttcttattgga

SEQ ID NO: 795345 - DNA, 120 bp, Artificial Sequence
  ENSG00000276240_6 (sequence is synthesized)
gaaagcaaggttgtctaacaaagagaatggaagaggccatcctactcaatcaaacttctttagtgacatattttcggcttagaggtttatctgtaaatcataaggcacggatagctatgt

SEQ ID NO: 795346 - DNA, 120 bp, Artificial Sequence
  ENSG00000276240_7 (sequence is synthesized)
tttccatgttcctcattttttatgtcctgacactgattgggaatgttctcattgtcataactattatctatgaccaccggctccatactcccatgtatttcttcctcagcaacctgtcct

SEQ ID NO: 795347 - DNA, 120 bp, Artificial Sequence
  ENSG00000276240_8 (sequence is synthesized)
ttattgatgtctgccactccactgtcactgtccccaagatgctgagagacgtgtggtcagaggaaaagctcatctcttttgatgcctgtgtgacccagatgttcttcctgcacctctttg

SEQ ID NO: 795348 - DNA, 120 bp, Artificial Sequence
  ENSG00000276240_9 (sequence is synthesized)
cctgcacagagatcttcctcctcaccgtcatggcctatgatcggtatgtggccatctgtaaacccctgcagtacatgatagtgatgaactggaaggtatgtgtgctgctggctgtggccc

SEQ ID NO: 795349 - DNA, 120 bp, Artificial Sequence
  ENSG00000276240_10 (sequence is synthesized)
tctggacaggagggaccatccactccatagccctcacctcccttaccatcaagctgccctactgtggtcctgatgagattgacaacttcttctgtgatgtacctcaggtgatcaagctgg

SEQ ID NO: 795350 - DNA, 120 bp, Artificial Sequence
  ENSG00000276240_11 (sequence is synthesized)
cctgcattgacacccacgtcattgagatcctcattgtctccaacagtggattgatctccgtggtctgttttgtggtcctggtggtgtcctacgcagtcatcctggtgagtctgaggcagc

SEQ ID NO: 795351 - DNA, 120 bp, Artificial Sequence
  ENSG00000276240_12 (sequence is synthesized)
agatctccaagggcaagcggaaggccctgtccacctgtgcagcccatctcactgtagttacactgttcctgggacactgcatcttcatctattcccgcccatccaccagcctcccagagg

SEQ ID NO: 795352 - DNA, 120 bp, Artificial Sequence
  ENSG00000276240_13 (sequence is synthesized)
acaaggtagtatctgtgtttttcactgcagtcacccccctgctgaaccccattatctatacccttaggaatgaagaaatgaagagtgccttaaacaagttagtggggagaaaagagagaa

SEQ ID NO: 795353 - DNA, 120 bp, Artificial Sequence
  ENSG00000276240_14 (sequence is synthesized)
aagaagaaaaatgaaaatgtctacgtccttaggatacgtggtgctccaaattaaagaagcgccttgcaaagaataagttacataccatatttatcagactatgtgacttataaaactatc

SEQ ID NO: 795354 - DNA, 120 bp, Artificial Sequence
  ENSG00000276240_15 (sequence is synthesized)
atagcaatcgttatggttattaatatcttctctgtgctggaaattattctaggcactgtgcatttacttaattctcacaactttgaaaggtagatattatgatgcttgtttgtacatgaa

SEQ ID NO: 795355 - DNA, 120 bp, Artificial Sequence
  ENSG00000276240_16 (sequence is synthesized)
gaaactaaagctcgaggagagtaaataacatgcccaaagtcactcagctagaaaacaatgaaggcagcatgtgaatccaagtggatcaacagaaactcaagctcttttcacaacatatgc

SEQ ID NO: 795356 - DNA, 120 bp, Artificial Sequence
  ENSG00000276240_17 (sequence is synthesized)
tgcctctttctgcttttctgttggagtgataaccaaggtctaaacaaaccttcagatttctgggcagcccttgcctgcatcattcactcagatgcttatgtaaacagcttagcaaacact

SEQ ID NO: 795357 - DNA, 120 bp, Artificial Sequence
  ENSG00000276240_18 (sequence is synthesized)
agtgaagcagataaagtgagtttccacatgactttggtgacagagaaagaagactttgaacaggtgaagttactgacactctcaagtatccaggcaaaatctgccatcagagcaatgaaa

SEQ ID NO: 795358 - DNA, 120 bp, Artificial Sequence
  ENSG00000276240_19 (sequence is synthesized)
tggggatatcttactattcattcatttgacaaatatttactgagcacttattatgtaccagatactaggtttatagccataaataagacatacatgtagtccttccttcatggagtttag

SEQ ID NO: 795359 - DNA, 120 bp, Artificial Sequence
  ENSG00000276240_20 (sequence is synthesized)
ggtctagtgaaaatagaaaacaaaaatatgaacaaataaattttaactacagattgtgataaatgctataaaacagcagggtgctgttagagagtatggaagagacttgctttagtggtc

SEQ ID NO: 795360 - DNA, 120 bp, Artificial Sequence
  ENSG00000276240_21 (sequence is synthesized)
aaggatggcctctctgaggaagttacatttaagattaaaaggagccagccataagagaggtgatggacattctagacaggggaaatggccggtgcaaagatctatgctgggaaagacctt

SEQ ID NO: 795361 - DNA, 120 bp, Artificial Sequence
  ENSG00000276240_22 (sequence is synthesized)
ggcttgttcaaggaagtaaatgatcagtgtgattacagcttagactataaggcagagagtggcaagagagtgatatcagagagctaaaaagaatctttccatattctctcaagaagttta

SEQ ID NO: 795362 - DNA, 120 bp, Artificial Sequence
  ENSG00000276240_23 (sequence is synthesized)
gaatcttttccagtacaataagaagccaccagaatgatttaagcacaggtgtggcatgaaataatttatgttttaataaaattattttagttattatgtagagaattcactcaactaagc

SEQ ID NO: 795363 - DNA, 120 bp, Artificial Sequence
  ENSG00000276240_24 (sequence is synthesized)
aacagcatccaatattgttcttagagcaatggatgactgttaagtacttagtcataaatacttagaaaacaacttggtagaaacttggtagaaaacaccaagttggataaaccattgtct

SEQ ID NO: 795364 - DNA, 120 bp, Artificial Sequence
  ENSG00000276240_25 (sequence is synthesized)
ataaaccaacatcttaaatctcactgtggcggcacatagtgtagcagaatggaatgtggtgaatcaactgggatatgaagaggatatcccagataacggcatctcatattcatgtttaca

SEQ ID NO: 795365 - DNA, 120 bp, Artificial Sequence
  ENSG00000276240_26 (sequence is synthesized)
aaagagcatgacacattggaaatcatcagtttgttctcacatcatcgctaaaaaaggcatgcttaaatgcagctgggatttcctaggcactcagtgagtgtatgatcaataaacctgtga

SEQ ID NO: 795366 - DNA, 120 bp, Artificial Sequence
  ENSG00000276240_27 (sequence is synthesized)
gccacaaggtctacatcatgatttttaggaggaaaatttttatttgctaggaaatgtgttaggaaggatattcaagtgacacaagaattataaaatttatgtaaaataaatgccctttta

SEQ ID NO: 795367 - DNA, 120 bp, Artificial Sequence
  ENSG00000276240_28 (sequence is synthesized)
ttataggcaatggcagacaataaggagaaatatctaaatatctttccaatgagcccaaatggaactgcttgtgcaggaatcagccatacagaggaacacgtgcaaaattgtcatattgtc

SEQ ID NO: 795368 - DNA, 120 bp, Artificial Sequence
  ENSG00000276240_29 (sequence is synthesized)
tgtcaacaacacaatgcttcaacgtagccattaagattgtagctggtaaaactataacggaacaacgttgtgatgtttgcttatttttttcatagcagcaagcaaaatttctgacactac

SEQ ID NO: 795369 - DNA, 120 bp, Artificial Sequence
  ENSG00000276240_30 (sequence is synthesized)
ccgtttttagtcacactaatttttcaactctctggggacgtaaaaataaaacattttgtctccgttttacagaaaaaagcttttcagactcagagacaagataaaaatgtatttaattac

SEQ ID NO: 795370 - DNA, 120 bp, Artificial Sequence
  ENSG00000276289_0 (sequence is synthesized)
gggctgtctgtggcctcagcgctcggcaggcgcgcactcagctccacacccggctctctcggcatctcagacccggtttcacacaatcatcaggtgagccgaggatccattggaggaagg

SEQ ID NO: 795371 - DNA, 120 bp, Artificial Sequence
  ENSG00000276289_1 (sequence is synthesized)
cattatctgtatccagaggaaatagccaaggatattcagaggtgtgcctgggaagtttgagctgcagcagtggaaccttaatgcccaggatgatcctgtctaacaccacagcggtgacgc

SEQ ID NO: 795372 - DNA, 120 bp, Artificial Sequence
  ENSG00000276289_2 (sequence is synthesized)
cctttctgaccaagctgtggcaggagacagttcagcagggtggcaacatgtcgggcctggcccgcaggtccccccgcagcggtgacggcaagctggaggccctctacgtcctcatggtac

SEQ ID NO: 795373 - DNA, 120 bp, Artificial Sequence
  ENSG00000276289_3 (sequence is synthesized)
tgggattcttcggcttcttcaccctgggcatcatgctgagctacatccgctccaagaagctggagcactcgaacgacccattcaacgtctacatcgagtccaatgcctggcaagagaagg

SEQ ID NO: 795374 - DNA, 120 bp, Artificial Sequence
  ENSG00000276289_4 (sequence is synthesized)
acaaggcctatgtccaggcccgggtcctggagagctacaggtcgtgctatgtcgttgaaaaccatctggccatagaacaacccaacacacaccttcctgagacgaagccttccccatgaa

SEQ ID NO: 795375 - DNA, 120 bp, Artificial Sequence
  ENSG00000276289_5 (sequence is synthesized)
ccccaccactggctaaaactggacacatcctgcctggcaacctgattttctaatcacattcctctcatactctttattgtgatggataccactggatttctttttggctgttgtaagggg

SEQ ID NO: 795376 - DNA, 120 bp, Artificial Sequence
  ENSG00000276289_6 (sequence is synthesized)
tggggggtggattaatgacactgtttcactgtttctctaaaatcacgttcttttgtgatagactgtcagtggttcccccatatctgtccctgccttgctaaatttagcagaatccctgag

SEQ ID NO: 795377 - DNA, 120 bp, Artificial Sequence
  ENSG00000276289_7 (sequence is synthesized)
gacatggcctctgagaatagcagctgcatttcccagactcccttgcagctagcaaggttgtgtgactaagccctggccagtaggcatggaagtgaagactgtaatgtccaagtaatcctt

SEQ ID NO: 795378 - DNA, 120 bp, Artificial Sequence
  ENSG00000276289_8 (sequence is synthesized)
ggaaagaaaagaacgtgcccttaactaactttgtcctgcttcccagtggctggatgtggaggaggtggagagcagttatgagactgggaaagaatggggcactcaaagagccacacacat

SEQ ID NO: 795379 - DNA, 120 bp, Artificial Sequence
  ENSG00000276289_9 (sequence is synthesized)
ctgggcctgggcgacgtggatcctccttaccacccaccaggccagatttacaggagagagaaatccactccactcttccttaagccactgttattctgatctctgttaaggtcgcagaat

SEQ ID NO: 795380 - DNA, 120 bp, Artificial Sequence
  ENSG00000276289_10 (sequence is synthesized)
caatgcccttactgatacacctaccttataggactgaacctaaaggcatgacatttccatacttgtcacaagcacacactgattctgcccttgtcacttctgtgctcactcttgtggctc

SEQ ID NO: 795381 - DNA, 120 bp, Artificial Sequence
  ENSG00000276289_11 (sequence is synthesized)
tatcctcctcctgcccttccgccttccactcctcccttgcacccatcctgcacacatctccctgaaaacacacaggcacatacactcatatacatagacacacatacacacctcaatcta

SEQ ID NO: 795382 - DNA, 120 bp, Artificial Sequence
  ENSG00000276289_12 (sequence is synthesized)
gaaagaacttgctttgtacagggctgagatggaggagaaaaaaatgcccccttcagaatgcataccaaggggaaggtgctcggtcactgtgggagcagggaaaggtgcccccactccccg

SEQ ID NO: 795383 - DNA, 120 bp, Artificial Sequence
  ENSG00000276289_13 (sequence is synthesized)
ggacacatagcactggggtggcaggtccttttgaggtgatgggccggttttgtgagatgaattgtatcccccaaaaagacaggtaccttcaatgtgacctaattgggaaatagagtcttt

SEQ ID NO: 795384 - DNA, 120 bp, Artificial Sequence
  ENSG00000276289_14 (sequence is synthesized)
gcagatgatctagttgagatgaggtcattggggtgggccctcacccaatatgactggagtccttatcggaagagggaaattcagacacagatgcatagggagggcaccatgccgtgacag

SEQ ID NO: 795385 - DNA, 120 bp, Artificial Sequence
  ENSG00000276289_15 (sequence is synthesized)
aggcagagggtgcagtgacacagccacaaaccaaggaaggccgaggatggatgcgcatccccatcccaagaagtcgggaagaagccaggaaggctcctctcccacaggtttcagaggaag

SEQ ID NO: 795386 - DNA, 120 bp, Artificial Sequence
  ENSG00000276289_16 (sequence is synthesized)
cacagccctgcttgaattcaaacttttggcctccagaactgtgagtcagtacctgttgttgaagccacccagcttaggatactctggcagcctactgccatacagtattgggatactata

SEQ ID NO: 795387 - DNA, 120 bp, Artificial Sequence
  ENSG00000276289_17 (sequence is synthesized)
gtgagcccatgcagcacctctcacccacccagagatggagctgctctgccttccagcggggcacccggaggggctgccccagcagatagagagggcctccgttctgccacctgccttgaa

SEQ ID NO: 795388 - DNA, 120 bp, Artificial Sequence
  ENSG00000276289_18 (sequence is synthesized)
agggtctccagctgccatatgtagcattggagtcctctgcaatgcgacatcctgaaagctcagctgcctgggcattcctgaagagtatggaatatttaaatgaaacatatttttttaaaa

SEQ ID NO: 795389 - DNA, 120 bp, Artificial Sequence
  ENSG00000276289_19 (sequence is synthesized)
cctgcgcataagataaaagcagcccgtgtgcatcttgggccatcctcaaatggacagacttggtcttgtgaggttccagtccttgtttcacataataaacactggcatggctcagcccct

SEQ ID NO: 795390 - DNA, 120 bp, Artificial Sequence
  ENSG00000276289_20 (sequence is synthesized)
gagttaccacagtccttgagatgagtggttctttgggttacaaagtcctctgaaagtctagtgagagctgtgatctttgccccacccgaataatgcatatggacaccacaccttgcctgc

SEQ ID NO: 795391 - DNA, 120 bp, Artificial Sequence
  ENSG00000276289_21 (sequence is synthesized)
cgtgtccaggattcatgaccagtagcagcccagctatgcctgccacgtctcacggcccctgtgtaagccagacccttcttaggcagttgcatattcccagactgaggcagggcaggtttg

SEQ ID NO: 795392 - DNA, 120 bp, Artificial Sequence
  ENSG00000276289_22 (sequence is synthesized)
cagagagagacccagagtgcacgtgacccgcagtgtgatccctggcacgcactgactttgatattccaggcacacggactggctatttatcaccacttctttttccccactaagattcct

SEQ ID NO: 795393 - DNA, 120 bp, Artificial Sequence
  ENSG00000276289_23 (sequence is synthesized)
gtgccttttaaggcagagggagatccctatggcgttagtcttcccaggccttaaagggcccttgtcttcactcacaaacctcttatctcttcttctccttcctctacattttaaaggggg

SEQ ID NO: 795394 - DNA, 120 bp, Artificial Sequence
  ENSG00000276289_24 (sequence is synthesized)
agagggaaaagtaaccgggagacaaattgagccacatattttcagacacttgttaccatattttaaaatctggcttcacatacacagagtctttgctatgcaccatgtactgttctaagc

SEQ ID NO: 795395 - DNA, 120 bp, Artificial Sequence
  ENSG00000276289_25 (sequence is synthesized)
ttcttaaaaatagaatctcaattattattttgcaggcaatactctgtgcattcattagctaggacaacaatgcatttgcagtagtgagatttcgttaaaaaattaaagccatttactatg

SEQ ID NO: 795396 - DNA, 120 bp, Artificial Sequence
  ENSG00000276289_26 (sequence is synthesized)
gtctgtggcctcagcgctcggcaggcgcgcactcagctccacacccggctctctcggcatctcagacccgggaaaaatccctctgctttctctggccagtttcacacaatcatcaggtga

SEQ ID NO: 795397 - DNA, 120 bp, Artificial Sequence
  ENSG00000276289_27 (sequence is synthesized)
ctcttctcccctgggttcagctgggggccttacggaactccagggtgctggaggccccgttggtctccatttgcaggtgtctcgctcagcgcagctgcccagagccctgtgtcctgagtg

SEQ ID NO: 795398 - DNA, 120 bp, Artificial Sequence
  ENSG00000276289_28 (sequence is synthesized)
atttccagtagattagcagctctgggtctaagcttttaagaaaaaaaaaaaattgcactacccttcagtaggggcagcattcacatctcacacccaggcagaagcagaaacggccaggaa

SEQ ID NO: 795399 - DNA, 120 bp, Artificial Sequence
  ENSG00000276289_29 (sequence is synthesized)
tccaccccactttctgggcctgacaaggccacagtttgagaacgttcagcacaggccaagcatcagatggattttgaacatctctggctcctaccatttctgcctccaccatccctttac

SEQ ID NO: 795400 - DNA, 120 bp, Artificial Sequence
  ENSG00000276293_0 (sequence is synthesized)
cggggagcccctcccgcggtccacagcgacgcctgcccagccctcctccccttccggctccggcacggggccccgaggcgttcggaggccaggcgggtttctgtcaggcccggggaggag

SEQ ID NO: 795401 - DNA, 80 bp, Artificial Sequence
  ENSG00000276293_1 (sequence is synthesized)
ggcgttcggaggccaggcgggtttctgtcaggcccggggaggaggggcgggcggggcggccgctgcctccccgggacggg

SEQ ID NO: 795402 - DNA, 80 bp, Artificial Sequence
  ENSG00000276293_2 (sequence is synthesized)
gcggggcgggagggcggggcgtggggcggacggaaccaccggggcggggtgggaggtaacgggacgggcgcgaccatggc

SEQ ID NO: 795403 - DNA, 120 bp, Artificial Sequence
  ENSG00000276293_3 (sequence is synthesized)
taacgggacgggcgcgaccatggcgcggtgagggagcgggggtggggatcggtccgggggaggcctgaggccgctggcttgtgcgctgtctccgccgcccccctctttcgccgccgccgc

SEQ ID NO: 795404 - DNA, 120 bp, Artificial Sequence
  ENSG00000276293_4 (sequence is synthesized)
catgtcgtccaactgcaccagcaccacggcggtggcggtggcgccgctcagcgccagcaagaccaagaccaagaagaagcatttcgtgtgccagaaagtgaagctattccgggccagcga

SEQ ID NO: 795405 - DNA, 120 bp, Artificial Sequence
  ENSG00000276293_5 (sequence is synthesized)
gccgatcctcagcgtcctgatgtggggggtgaaccacacgatcaatgagctgagcaatgttcctgttcctgtcatgctaatgccagatgacttcaaagcctacagcaagatcaaggtgga

SEQ ID NO: 795406 - DNA, 120 bp, Artificial Sequence
  ENSG00000276293_6 (sequence is synthesized)
caatcatctcttcaataaggagaacctgcccagccgctttaagtttaaggagtattgccccatggtgttccgaaaccttcgggagaggtttggaattgatgatcaggattaccagaattc

SEQ ID NO: 795407 - DNA, 120 bp, Artificial Sequence
  ENSG00000276293_7 (sequence is synthesized)
agtgacgcgcagcgcccccatcaacagtgacagccagggtcggtgtggcacgcgtttcctcaccacctacgaccggcgctttgtcatcaagactgtgtccagcgaggacgtggcggagat

SEQ ID NO: 795408 - DNA, 120 bp, Artificial Sequence
  ENSG00000276293_8 (sequence is synthesized)
gcacaacatcttaaagaaataccaccagtttatagtggagtgtcatggcaacacgcttttgccacagttcctgggcatgtaccgcctgaccgtggatggtgtggaaacctacatggtggt

SEQ ID NO: 795409 - DNA, 120 bp, Artificial Sequence
  ENSG00000276293_9 (sequence is synthesized)
taccaggaacgtgttcagccatcggctcactgtgcatcgcaagtatgacctcaagggttctacggttgccagagaagcgagcgacaaggagaaggccaaggacttgccaacattcaaaga

SEQ ID NO: 795410 - DNA, 120 bp, Artificial Sequence
  ENSG00000276293_10 (sequence is synthesized)
caatgacttcctcaatgaagggcagaagctgcatgtgggagaggagagtaaaaagaacttcctggagaaactgaagcgggacgttgagttcttggcacagctgaagatcatggactacag

SEQ ID NO: 795411 - DNA, 120 bp, Artificial Sequence
  ENSG00000276293_11 (sequence is synthesized)
cctgctggtgggcatccacgacgtggaccgggcagagcaggaggagatggaggtggaggagcgggcagaggacgaggagtgtgagaatgatggggtgggtggcaacctactctgctccta

SEQ ID NO: 795412 - DNA, 120 bp, Artificial Sequence
  ENSG00000276293_12 (sequence is synthesized)
tggcacacctccggacagccctggcaacctcctcagctttcctcggttctttggtcctggggaattcgacccctctgttgacgtctatgccatgaaaagccatgaaagttcccccaagaa

SEQ ID NO: 795413 - DNA, 120 bp, Artificial Sequence
  ENSG00000276293_13 (sequence is synthesized)
ggaggtgtatttcatggccatcattgatatcctcacgccatacgatacaaagaagaaagctgcacatgctgccaaaacggtgaaacacggggcaggggccgagatctcgactgtgaaccc

SEQ ID NO: 795414 - DNA, 120 bp, Artificial Sequence
  ENSG00000276293_14 (sequence is synthesized)
tgagcagtactccaaacgcttcaacgagtttatgtccaacatcctgacgtagttctcttctaccttcagccagagccagagagctggatatggggtcggggatcgggagttagggagaag

SEQ ID NO: 795415 - DNA, 120 bp, Artificial Sequence
  ENSG00000276293_15 (sequence is synthesized)
ggtgtatttgggctagatgggagggtgggagcagagtcgggtttgggagggctttagcaatgagactgcagcctgtgacaccgaaagagactttagctgaagaggagggggatgtgctgt

SEQ ID NO: 795416 - DNA, 120 bp, Artificial Sequence
  ENSG00000276293_16 (sequence is synthesized)
gtgtgcacctgctcacaggatgtaaccccaccttctgcttacccttgattttttctccccatttgacacccaggttaaaaaggggttccctttttggtaccttgtaaccttttaagatac

SEQ ID NO: 795417 - DNA, 120 bp, Artificial Sequence
  ENSG00000276293_17 (sequence is synthesized)
cttggggctagagatgacttcgtgggtttatttgggttttgtttctgaaatttcattgctccaggtttgctatttataatcatatttcatcagcctacccaccctccccatctttgctga

SEQ ID NO: 795418 - DNA, 120 bp, Artificial Sequence
  ENSG00000276293_18 (sequence is synthesized)
gctctcagttcccttcaattaaagagatacccggtagacccagcacaagggtccttccagaaccaagtgctatggatgccagattggagaggtcagacacctcgccctgctgcatttgct

SEQ ID NO: 795419 - DNA, 120 bp, Artificial Sequence
  ENSG00000276293_19 (sequence is synthesized)
cttgtctggattaactttgtaatttatggagtattgtgcacaacttcctccacctttcccttggattcaagtgaaaactgttgcattattcctccatcctgtctggaatacaccaggtca

SEQ ID NO: 795420 - DNA, 120 bp, Artificial Sequence
  ENSG00000276293_20 (sequence is synthesized)
acaccagagatctcagatcagaatcagagatctcagaggggaataagttcatcctcatgggatggtgaggggcaggaaagcggctgggctcttggacacctggttctcagagaaccctgt

SEQ ID NO: 795421 - DNA, 120 bp, Artificial Sequence
  ENSG00000276293_21 (sequence is synthesized)
gatgatcacccaagccccaggctgtcttagcccctggagttcagaagtcctctctgtaaagcctgcctcccactaggtcaagaggaactagagtacctttggatttatcaggaccctcat

SEQ ID NO: 795422 - DNA, 120 bp, Artificial Sequence
  ENSG00000276293_22 (sequence is synthesized)
gtttaaatggttatttccctttgggaaaacttcagaaactgatgtatcaaatgaggccctgtgccctcgatctatttccttcttccttctgacctcctcccaggcactcttacttctagc

SEQ ID NO: 795423 - DNA, 120 bp, Artificial Sequence
  ENSG00000276293_23 (sequence is synthesized)
tctccctgtgcctggagagttacagccagcaaggtgcccccatcttagagtgtggtgtccaaacgtgaggtggcttcctagttacatgaggatgtgatccaggaaatccagtttggaggc

SEQ ID NO: 795424 - DNA, 120 bp, Artificial Sequence
  ENSG00000276293_24 (sequence is synthesized)
ttgatgtgggttttgacctggcctcagccttggggctgtttttccttgttgccccgctctagacttttagcagatctgcagcccacaggcttttttggaaggagtggcttcctgcaggtg

SEQ ID NO: 795425 - DNA, 120 bp, Artificial Sequence
  ENSG00000276293_25 (sequence is synthesized)
ttccacctgccttcggagcctgccacccaggccctcagaactgagccacaggctgctctggccaggagagaaacagctctgttgttctgcattgggggaggtacattcctgcatcttctc

SEQ ID NO: 795426 - DNA, 120 bp, Artificial Sequence
  ENSG00000276293_26 (sequence is synthesized)
accccctcaaccaggaactggggatttgggatgagatatggtcagacttgtagataaccccaaagatgtgaagatcgcttgtgaaaccattttgaatgaatagattggtttcctgtggct

SEQ ID NO: 795427 - DNA, 120 bp, Artificial Sequence
  ENSG00000276293_27 (sequence is synthesized)
ccctccaaacctggccaagcccagcttccgaagcaggaaccagcactgtctctgtgcctgactcacagcatataggtcaggaaagaatggagacggcattcttggacttcactggggctg

SEQ ID NO: 795428 - DNA, 120 bp, Artificial Sequence
  ENSG00000276293_28 (sequence is synthesized)
ctggattggatgggaaaccttctggaagaggcagatgggggtcaaaccactgccttggccccaggaaggggccataggtaggtctgaacaactgccgcaagaccactacatgacttaggg

SEQ ID NO: 795429 - DNA, 120 bp, Artificial Sequence
  ENSG00000276293_29 (sequence is synthesized)
aacttgaaaccaactggctcatggagaaaacaaatttgacttgggaaagggattatgtaggaataatgtttggacttgatttccccacgtcataatgaagaatggaagtttggatctgct

SEQ ID NO: 795430 - DNA, 120 bp, Artificial Sequence
  ENSG00000276293_30 (sequence is synthesized)
cctcgtcaggcgcagcatctctgaagcttggaaagctgtcttccagcagcctccgtggcctcgggttcctaccggcttctctgcatttggtctgctgatcatgttgccataatgtgtatg

SEQ ID NO: 795431 - DNA, 120 bp, Artificial Sequence
  ENSG00000276293_31 (sequence is synthesized)
gaaagtgtaacacattcttactggttaaagacgactaccaggtatctaacttgtttaacattgagtttgtgtgtgtgtgtgtatgtttgtgtgttttgtatattgtttacattttgagag

SEQ ID NO: 795432 - DNA, 120 bp, Artificial Sequence
  ENSG00000276293_32 (sequence is synthesized)
gtagcattctgtttcaaatgctttttgtttttctgacagtattgttgactgggtcataacattttgagctgtggtttggtggattttcaatttttttttttaaaggtcattcgctgtgct

SEQ ID NO: 795433 - DNA, 120 bp, Artificial Sequence
  ENSG00000276293_33 (sequence is synthesized)
atcttcaaaaccttgagtttggcccccaatttttggcattcaaatgtttaaaagctatttatcttggtttatacaagtttcctttctcttctttttgtcatggtattctatttggtctgc

SEQ ID NO: 795434 - DNA, 120 bp, Artificial Sequence
  ENSG00000276293_34 (sequence is synthesized)
agtttgaatgtagagaaagtggactgatcccccaagcgttgtctgcccccactctttcctccttgggtcccgccattcttttactgggcagtcgagggcattggaggggaagtgactgcc

SEQ ID NO: 795435 - DNA, 120 bp, Artificial Sequence
  ENSG00000276293_35 (sequence is synthesized)
ctcagcctcactccctggggccatgaagaaaagctaaacagtctcatggcatctcagaataatgttgggtctcccaagaagaaaggtgtaagaataacgacatggctgattaggcgaggc

SEQ ID NO: 795436 - DNA, 120 bp, Artificial Sequence
  ENSG00000276293_36 (sequence is synthesized)
caggatagggctaaggccaggattcctggctggcatccagtcaccccttctcccatccttccccctcttcttccacaagtccgcagccgagacactgtagtctcccagccacagtgatga

SEQ ID NO: 795437 - DNA, 120 bp, Artificial Sequence
  ENSG00000276293_37 (sequence is synthesized)
gtgccctggagactccactgacctctagatgaaggcccctggccctggttcctgttaattaacctctgggtctttgagtcccccagcacaaacttctttcctgtaccctgcggcttgggg

SEQ ID NO: 795438 - DNA, 120 bp, Artificial Sequence
  ENSG00000276293_38 (sequence is synthesized)
tcacagggcatgccgggaagccacagctgaggggcgcagactgaagcagtgctccacctctccttctttagctcaggggttgctggtctgtggcaggcgccacgagtggcccctgtggct

SEQ ID NO: 795439 - DNA, 120 bp, Artificial Sequence
  ENSG00000276293_39 (sequence is synthesized)
gttctcagtggcagtctcttaagttcccaccacaggcagctctttatcccctctccctacttgactctttctcttgcctgtgcttttggcctcaaacaggcctgctggtagcgctcaggg

SEQ ID NO: 795440 - DNA, 120 bp, Artificial Sequence
  ENSG00000276293_40 (sequence is synthesized)
cgtgaggctacactcctgccctgcctttcctgtcttcatggtctgccagggcataccttggggaggtggaccaaagacccaggactttttgcagtagccagtcctaccccccagttgtct

SEQ ID NO: 795441 - DNA, 120 bp, Artificial Sequence
  ENSG00000276293_41 (sequence is synthesized)
ttttaccaattcagggtgggagagaaaactgcagcaccccagcatgtgagttactcaggtgttgggggctagaagggacagtgcgtttaaacaacactcagagctctggccttaaacctg

SEQ ID NO: 795442 - DNA, 120 bp, Artificial Sequence
  ENSG00000276293_42 (sequence is synthesized)
tggccccccaagtctaggagcctcatctcttcctggcagtcatgcgggcaggaggtcctgaaagggaaaacccattcagacaactgttccccaatctaccagccatctgcaggggtcagt

SEQ ID NO: 795443 - DNA, 120 bp, Artificial Sequence
  ENSG00000276293_43 (sequence is synthesized)
gaccgtggccctctccctcctctagaatgtgccacttatgaagagtgccccatggggaaaaggagactcagctgtcccttggcagcttgtgccagtatcccagggcagaagtttccacag

SEQ ID NO: 795444 - DNA, 120 bp, Artificial Sequence
  ENSG00000276293_44 (sequence is synthesized)
gagcctcttgcccttgcgcagagccactgtgagaggcggtgggagccaacacccttgggggagggggcagtactgctcggcacatcccagcatcaggtcagatcattgaaattaaaaaat

SEQ ID NO: 795445 - DNA, 120 bp, Artificial Sequence
  ENSG00000276293_45 (sequence is synthesized)
gtgaattaagttcatatccaccttttggggaagcaggacaaaccaccaccccaccaagtgtgtgacttctccatatcccactgcagtttccattttttaaatgggaattttcaatcccct

SEQ ID NO: 795446 - DNA, 120 bp, Artificial Sequence
  ENSG00000276293_46 (sequence is synthesized)
gtgcttgtctaacgtctgctttaaaaagtttgagaccctgttactgtttgaaaatgcatgcatgttacgatgaatctccaacctgaggaaaaaaataaaactcaaaaagctttgtgtaca

SEQ ID NO: 795447 - DNA, 120 bp, Artificial Sequence
  ENSG00000276293_47 (sequence is synthesized)
gtgccccgcgggtggagcgcgcccggggcccagcagagtgggcagatccacgcttaggtggagcgagggggcgttccttggctttctaggctggactttctcttccccttgctgcgtccc

SEQ ID NO: 795448 - DNA, 120 bp, Artificial Sequence
  ENSG00000276293_48 (sequence is synthesized)
tcctctcccccggggtgggcatggccttcccacctcacagggagcagtgggactcaaacagcaggagaaggagaaagcaagatatggaaaggaggagtaaacaccggtagatttattggc

SEQ ID NO: 795449 - DNA, 120 bp, Artificial Sequence
  ENSG00000276368_0 (sequence is synthesized)
atgtctgggcgtggtaagcagggaggcaaagctcgcgccaaggccaagacccgctcttctcgggccgggcttcagtttcccgtaggccgagtgcatcgcctgctccgcaaaggcaactat

SEQ ID NO: 795450 - DNA, 120 bp, Artificial Sequence
  ENSG00000276368_1 (sequence is synthesized)
gtgtacctggcggcggtgctggagtacctgaccgccgagatcctggagctggctggcaacgcggcccgcgacaacaagaagactcgcatcatcccgcgtcacctccagctggccatccgc

SEQ ID NO: 795451 - DNA, 120 bp, Artificial Sequence
  ENSG00000276368_2 (sequence is synthesized)
aacgatgaggagctcaacaagcttctgggcaaagtcaccatcgcacagggtggcgtcctgcccaacatccaggccgtgctgctgccaaagaaaactgagagccaccacaagactaagtaa

SEQ ID NO: 795452 - DNA, 120 bp, Artificial Sequence
  ENSG00000276405_0 (sequence is synthesized)
atgcttagtcctgacctgcctgactctgcctggaacaccaggctcctctgccgtgtcatgctttgtctcctgggagcaggttcagtggctgctggagtcatccagtccccaagacatctg

SEQ ID NO: 795453 - DNA, 120 bp, Artificial Sequence
  ENSG00000276405_1 (sequence is synthesized)
ggaaacagccactctgaaatgctatcctatccctagacacgacactgtctactggtaccagcagggtccaggtcaggacccccagttcctcatttcgttttatgaaaagatgcagagcga

SEQ ID NO: 795454 - DNA, 120 bp, Artificial Sequence
  ENSG00000276405_2 (sequence is synthesized)
taaaggaagcatccctgatcgattctcagctcaacagttcagtgactatcattctgaactgaacatgagctccttggagctgggggactcagccctgtacttctgtgccagcagcttagg

SEQ ID NO: 795455 - DNA, 120 bp, Artificial Sequence
  ENSG00000276409_0 (sequence is synthesized)
atttctcaacaattcctcaccgcaggagcctctgaagctcccaccaggccagctctcctcccacaacagcttcccacagcatgaagatctccgtggctgccattcccttcttcctcctca

SEQ ID NO: 795456 - DNA, 120 bp, Artificial Sequence
  ENSG00000276409_1 (sequence is synthesized)
tcaccatcgccctagggaccaagactgaatcctcctcacggggaccttaccacccctcagagtgctgcttcacctacactacctacaagatcccgcgtcagcggattatggattactatg

SEQ ID NO: 795457 - DNA, 120 bp, Artificial Sequence
  ENSG00000276409_2 (sequence is synthesized)
agaccaacagccagtgctccaagcccggaattgtcttcatcaccaaaaggggccattccgtctgtaccaaccccagtgacaagtgggtccaggactatatcaaggacatgaaggagaact

SEQ ID NO: 795458 - DNA, 120 bp, Artificial Sequence
  ENSG00000276409_3 (sequence is synthesized)
gagacataaagagaagatgccaaggccccctcctccacccaccgctaactctcagccccagtcaccctcttggagcttccctgctttgaattaaagaccactcatgctcttccctggcct

SEQ ID NO: 795459 - DNA, 120 bp, Artificial Sequence
  ENSG00000276409_4 (sequence is synthesized)
cattcctttctacgggatttactcattggccatgcactgaggacaccagggtgtggcaccctcggcatcaagcctcgctctgcagaagttttgctggagcctggtacaaaaaataggtca

SEQ ID NO: 795460 - DNA, 120 bp, Artificial Sequence
  ENSG00000276409_5 (sequence is synthesized)
ggcctgcaatgcaggtagtgagaagcagaaagtgagaaagaaaagcagtgtaaagaccgtctcctcctcagcaacaacagtagcagaccccgttttcttaatgctttctatactccaagc

SEQ ID NO: 795461 - DNA, 120 bp, Artificial Sequence
  ENSG00000276409_6 (sequence is synthesized)
actctgctaggcagtctgtatgcattatcttatttaagcttcatgacaagtgtaaaagctacaaatcatcatttgattttttaggtaacacttcataaagggctctctatagcagtcaaa

SEQ ID NO: 795462 - DNA, 120 bp, Artificial Sequence
  ENSG00000276409_7 (sequence is synthesized)
acatccagccttgagatcttttgctaagtgtgacacagtgcccccagccctgtgctcatgttcatgcctagggaaaggcttctatcaaaagagttgaacttcttcccactggggatggaa

SEQ ID NO: 795463 - DNA, 120 bp, Artificial Sequence
  ENSG00000276409_8 (sequence is synthesized)
gaccatttcctcccttaaaccttggctctccctgcttccttcaggccaccaacaacacatgtgcaggatatgaaattgctgaggcatcactgctttcctacttcccttccaagtctcagc

SEQ ID NO: 795464 - DNA, 120 bp, Artificial Sequence
  ENSG00000276409_9 (sequence is synthesized)
aataagcaggagtgaggttggggctcaggggaagaccaggagcagggactcagaaaggagggctggtatcttcttgaaattgtgtgtatagcaacattatataaatgaattatctactga

SEQ ID NO: 795465 - DNA, 120 bp, Artificial Sequence
  ENSG00000276409_10 (sequence is synthesized)
gcaccacagcacttcaccccatggtgtggtgagcaggatggagatgagacttaggactgtaggttctgcttaagagtttaagttgggatcttccagccttgaccaatgagacttgacttg

SEQ ID NO: 795466 - DNA, 120 bp, Artificial Sequence
  ENSG00000276409_11 (sequence is synthesized)
ggagactccaggcttcattccactaccccaaatgccctctagtctccaaataaacagatcctgaatctccaggcctcacatggccttgatctcttatcattgccccccaggaccagtccc

SEQ ID NO: 795467 - DNA, 120 bp, Artificial Sequence
  ENSG00000276409_12 (sequence is synthesized)
cccttgccctcaaggacatggagtgagaccagcctgcctctctactccctcaatttctctctctttgccgctaagcaaaagagtggcccaccccatttggggtatatttcctcagggaga

SEQ ID NO: 795468 - DNA, 120 bp, Artificial Sequence
  ENSG00000276409_13 (sequence is synthesized)
ttaggagcagtgtcttgagcccctcaagggcatttttctattggcctcctgaggtttgggcccagcctgcttccagcgtcacctgtgcccagtgagtgcagcattgcttgggtatgggct

SEQ ID NO: 795469 - DNA, 120 bp, Artificial Sequence
  ENSG00000276409_14 (sequence is synthesized)
ggggggaaacacgacagtgtggggtccatcctaggcccccttttctcagctgatttcttagaataagctgcctttagagataaccaaaactatttatcactcttccattttacctactct

SEQ ID NO: 795470 - DNA, 120 bp, Artificial Sequence
  ENSG00000276409_15 (sequence is synthesized)
ccttttcagaaactggggggaaaccgaaggttgttaaaatacagctaaagttggtgggtatgtgcacagtttgacttgccctctccgatgtcatttgtcagctcagaggaacaaggtggg

SEQ ID NO: 795471 - DNA, 120 bp, Artificial Sequence
  ENSG00000276409_16 (sequence is synthesized)
agagtataggagctctgactgggtctcaggaaacaggggccccttatgccgttctttggatcgtgaggatgctgcctggaatggagctggaaaacaggatgagacccttccacccagaca

SEQ ID NO: 795472 - DNA, 120 bp, Artificial Sequence
  ENSG00000276409_17 (sequence is synthesized)
tctggccaccctcagtgacctctgaggccattgtgatgcacatccatgattctatgaagcagggtcacataacatgcacacacctgatttctccactccataaccacaacatgtgcctgt

SEQ ID NO: 795473 - DNA, 120 bp, Artificial Sequence
  ENSG00000276409_18 (sequence is synthesized)
gtccttcctgctacctctataattcaagcttggggtggctgctgtcaccttgcttctcctataaaagccatgaaacttctcaatcagaaaatagatgaaaaaatcacccaatccagtgat

SEQ ID NO: 795474 - DNA, 120 bp, Artificial Sequence
  ENSG00000276409_19 (sequence is synthesized)
ttttaaaactttttagaccacaaaaccttttcttcaagcaatatcttccacagaggcccaatatgtaaaacagaaaaaatgggttgagtagggtacaagacaccactctcaaatgcagca

SEQ ID NO: 795475 - DNA, 120 bp, Artificial Sequence
  ENSG00000276409_20 (sequence is synthesized)
aggcctccacaatagtccctgaggcccccagagctccagggagctcagtgtaaaaaccactgatgcagtccaagggcctcatttacagaggagggaacagggggaaagtaaaatggccac

SEQ ID NO: 795476 - DNA, 120 bp, Artificial Sequence
  ENSG00000276409_21 (sequence is synthesized)
agtacacaggaagcacaggcaaggttaggttaggatttgggtgccctgactctgtggcctttgtccttggggcttgctgtgggcatcctgctctctctgcaggttgtcggttcaatgggg

SEQ ID NO: 795477 - DNA, 120 bp, Artificial Sequence
  ENSG00000276409_22 (sequence is synthesized)
acatgggcagggtggagcactaggaggggctgggtttgcattcccaaatggcatgtctccaaatccctattgggatttcttccaaatattcctcctatttggagcacctttcccgaataa

SEQ ID NO: 795478 - DNA, 120 bp, Artificial Sequence
  ENSG00000276409_23 (sequence is synthesized)
ggcatgaaggctgcatgatattggccaagtccctagccttctctgccagtcggcccccagagatggtgtaagaagatctgagtgtgctgctcttcaatcctggagttgaaagtcatccac

SEQ ID NO: 795479 - DNA, 120 bp, Artificial Sequence
  ENSG00000276409_24 (sequence is synthesized)
cagtctttccaagaggggttgaagaaaaggaggaagggtgattgatgatgagggaggagaaaaagaagagcccaggagtaccatggagaaggagaagagaagatgaggaaagcctactct

SEQ ID NO: 795480 - DNA, 120 bp, Artificial Sequence
  ENSG00000276409_25 (sequence is synthesized)
cccctccaagttctgaggggctgtctcctccttccttccctcctccatgccctcagcttgcaggagcagccaatggtatggcctttaacaaggggcccctcctcagcatctgatgctctc

SEQ ID NO: 795481 - DNA, 120 bp, Artificial Sequence
  ENSG00000276409_26 (sequence is synthesized)
atgaagatctccgtggctgccattcccttcttcctcctcatcaccatcgccctagggaccaagactgaatcctcctcacaaactggggggaaaccgaaggttgttaaaatacagctaaag

SEQ ID NO: 795482 - DNA, 120 bp, Artificial Sequence
  ENSG00000276410_0 (sequence is synthesized)
atgcctgaaccctctaagtctgctccagcccctaaaaagggttctaagaaggctatcactaaggcgcagaagaaggatggtaagaagcgtaagcgcagccgcaaggagagctattctatc

SEQ ID NO: 795483 - DNA, 120 bp, Artificial Sequence
  ENSG00000276410_1 (sequence is synthesized)
caggtccaccccgacaccggcatctcatccaaggccatggggatcatgaattccttcgtcaacgacatcttcgagcgcatcgcgggcgaggcttctcgcctggctcactacaataagcgc

SEQ ID NO: 795484 - DNA, 120 bp, Artificial Sequence
  ENSG00000276410_2 (sequence is synthesized)
tcgaccatcacctccagggagattcagacggctgtgcgcctgctgctgcctggggagctggctaagcatgctgtgtccgagggcactaaggcagttaccaagtacactagctctaaataa

SEQ ID NO: 795485 - DNA, 120 bp, Artificial Sequence
  ENSG00000276430_0 (sequence is synthesized)
agttcgccactgtctgctgccacacgatgctgggaggcctggggaagctggctgccgagggcctggcccaccgcaccgagaaggccaccgagggagccattcatgccgtggaggaagtgg

SEQ ID NO: 795486 - DNA, 120 bp, Artificial Sequence; identical to SEQ ID NO: 697321
  ENSG00000276430_1 (sequence is synthesized)

SEQ ID NO: 795487 - DNA, 120 bp, Artificial Sequence; identical to SEQ ID NO: 781791
  ENSG00000276547_0 (sequence is synthesized)

SEQ ID NO: 795488 - DNA, 120 bp, Artificial Sequence; identical to SEQ ID NO: 781792
  ENSG00000276547_1 (sequence is synthesized)

SEQ ID NO: 795489 - DNA, 120 bp, Artificial Sequence; identical to SEQ ID NO: 781793
  ENSG00000276547_2 (sequence is synthesized)

SEQ ID NO: 795490 - DNA, 120 bp, Artificial Sequence
  ENSG00000276547_3 (sequence is synthesized)
gtggagatcgaggacattaatgaccacacgccaaaattcacgcaaaattcctttgagctgcaaataagtgagtctgcacagcctggcacaagatttatactagaagtagcagaagatgca

SEQ ID NO: 795491 - DNA, 120 bp, Artificial Sequence
  ENSG00000276547_4 (sequence is synthesized)
gatattggcttaaactctctgcagaagtataaactctctcttaacccaagtttctcattaataattaaggagaaacaggatggtagtaaatacccggaactggcactggagaaaacctta

SEQ ID NO: 795492 - DNA, 120 bp, Artificial Sequence
  ENSG00000276547_5 (sequence is synthesized)
gaccgggaacaacagagttaccatcgtttagtcctgactgccttggacggtggacatccacccctaagcggcaccactgagctccggatccaggtaaccgacgccaatgataatcccccg

SEQ ID NO: 795493 - DNA, 120 bp, Artificial Sequence
  ENSG00000276547_6 (sequence is synthesized)
gtattcaaccgagacgtgtacagagtcagccttcgggaaaacgtgccaccaggcaccactgtgttgcaagtgtcagccactgaccaagacgagggcatcaactcagaaattacttattcc

SEQ ID NO: 795494 - DNA, 120 bp, Artificial Sequence
  ENSG00000276547_7 (sequence is synthesized)
ttctacagaaccgggcaaatctttagtctgaattcaaagagcggagaaattaccactcaaaagaaactggattttgaagagaccaaggaatattcaatggttgtagaagggagggatggt

SEQ ID NO: 795495 - DNA, 120 bp, Artificial Sequence
  ENSG00000276547_8 (sequence is synthesized)
ggtggactggttgcacaatgtacagttgaaattaatattcaagatgaaaatgacaatagcccagaagttacattccattctctacttgaaatgattctggaaaacgcggtgcctggaaca

SEQ ID NO: 795496 - DNA, 120 bp, Artificial Sequence
  ENSG00000276547_9 (sequence is synthesized)
ctaattgctttgatcaaaatacatgaccaagattctggggaaaatggggaggttaattgtcaattacaaggcgaagtcccttttaagattatctcttcatccaaaaattcgtataagttg

SEQ ID NO: 795497 - DNA, 120 bp, Artificial Sequence
  ENSG00000276547_10 (sequence is synthesized)
gtaacagatggaaccctagaccgagagcaaaccccggagtacaatgtcaccatcacagccacagacaggggcaagccgcccctctcctccagcataagcgtcatcctacatatcagagac

SEQ ID NO: 795498 - DNA, 120 bp, Artificial Sequence
  ENSG00000276547_11 (sequence is synthesized)
gtcaacgataacgctccggttttccaccaggcgtcctacttagtcagtgtacccgaaaacaaccctcctggggcctccatcgcgcaagtctgcgcctcggacctggacttggggttgaac

SEQ ID NO: 795499 - DNA, 120 bp, Artificial Sequence
  ENSG00000276547_12 (sequence is synthesized)
ggccaagtctcctactctatcatggccagcgacctagagcctctggcactggcctcttacgtgtccatgagcgcgcaaagtggggtggtgttcgcgcagcgcgcctttgactacgagcag

SEQ ID NO: 795500 - DNA, 120 bp, Artificial Sequence
  ENSG00000276547_13 (sequence is synthesized)
ctgcgcaccttcgaactcacactacaggcccgcgaccagggctcgcctgcgctcagcgcaaacgtgagcctgcgcgtgttggtgggcgaccgaaacgacaacgcaccgcgggtgctgtac

SEQ ID NO: 795501 - DNA, 120 bp, Artificial Sequence
  ENSG00000276547_14 (sequence is synthesized)
cccgcgctgggtcccgacggctctgcgctcttcgatatggtgccgcgcgctgcagagcccggctacctggtgaccaaggtagtggccgtggacgcagactcaggacacaacgcctggctg

SEQ ID NO: 795502 - DNA, 120 bp, Artificial Sequence
  ENSG00000276547_15 (sequence is synthesized)
tcctaccacgtgctgcaggctagcgagcccgggctcttcagcctggggctgcgcacaggagaggtgcgcacagcgcgtgccttgggcgacagggacgcggcccgccagcgcctgctggtt

SEQ ID NO: 795503 - DNA, 120 bp, Artificial Sequence
  ENSG00000276547_16 (sequence is synthesized)
gctgtgcgtgatggtggacagccgccactctccgccaccgccacgctgcacttggtctttgctgacagcttgcaggaggtgctgccggatatcactgaccgccctgtaccctctgacccc

SEQ ID NO: 795504 - DNA, 120 bp, Artificial Sequence
  ENSG00000276547_17 (sequence is synthesized)
caggctgagctgcagttttacctagtggtggccttggccttgatctcagtgctcttcctcctggccgtgattctggccgttgccttgcgcctgcgacgctcctccagccctgccgcctgg

SEQ ID NO: 795505 - DNA, 120 bp, Artificial Sequence
  ENSG00000276547_18 (sequence is synthesized)
agctgcttccaacctggtctctgtgtcaagtctggacctgtggttccccccaactacagtcaggggactttgccttattcctacaacctatgtgttgcacatacaggaaagacggagttt

SEQ ID NO: 795506 - DNA, 120 bp, Artificial Sequence
  ENSG00000276547_19 (sequence is synthesized)
gagcaattgagttcaggacaagacatactttgtggtgattcatctggggccttatttccactttgtaattccagcgagtcgacttcccatcctgagttgcaagccccgcccaacacggac

SEQ ID NO: 795507 - DNA, 120 bp, Artificial Sequence; identical to SEQ ID NO: 773797
  ENSG00000276547_20 (sequence is synthesized)

SEQ ID NO: 795508 - DNA, 120 bp, Artificial Sequence; identical to SEQ ID NO: 773798
  ENSG00000276547_21 (sequence is synthesized)

SEQ ID NO: 795509 - DNA, 120 bp, Artificial Sequence; identical to SEQ ID NO: 773799
  ENSG00000276547_22 (sequence is synthesized)

SEQ ID NO: 795510 - DNA, 120 bp, Artificial Sequence; identical to SEQ ID NO: 773800
  ENSG00000276547_23 (sequence is synthesized)

SEQ ID NO: 795511 - DNA, 120 bp, Artificial Sequence; identical to SEQ ID NO: 773801
  ENSG00000276547_24 (sequence is synthesized)

SEQ ID NO: 795512 - DNA, 120 bp, Artificial Sequence; identical to SEQ ID NO: 773802
  ENSG00000276547_25 (sequence is synthesized)

SEQ ID NO: 795513 - DNA, 120 bp, Artificial Sequence; identical to SEQ ID NO: 773803
  ENSG00000276547_26 (sequence is synthesized)

SEQ ID NO: 795514 - DNA, 120 bp, Artificial Sequence; identical to SEQ ID NO: 773804
  ENSG00000276547_27 (sequence is synthesized)

SEQ ID NO: 795515 - DNA, 120 bp, Artificial Sequence; identical to SEQ ID NO: 773805
  ENSG00000276547_28 (sequence is synthesized)

SEQ ID NO: 795516 - DNA, 120 bp, Artificial Sequence; identical to SEQ ID NO: 773806
  ENSG00000276547_29 (sequence is synthesized)

SEQ ID NO: 795517 - DNA, 120 bp, Artificial Sequence; identical to SEQ ID NO: 773807
  ENSG00000276547_30 (sequence is synthesized)

SEQ ID NO: 795518 - DNA, 120 bp, Artificial Sequence; identical to SEQ ID NO: 773808
  ENSG00000276547_31 (sequence is synthesized)

SEQ ID NO: 795519 - DNA, 120 bp, Artificial Sequence; identical to SEQ ID NO: 773809
  ENSG00000276547_32 (sequence is synthesized)

SEQ ID NO: 795520 - DNA, 120 bp, Artificial Sequence; identical to SEQ ID NO: 773810
  ENSG00000276547_33 (sequence is synthesized)

SEQ ID NO: 795521 - DNA, 120 bp, Artificial Sequence; identical to SEQ ID NO: 773811
  ENSG00000276547_34 (sequence is synthesized)

SEQ ID NO: 795522 - DNA, 120 bp, Artificial Sequence; identical to SEQ ID NO: 773812
  ENSG00000276547_35 (sequence is synthesized)

SEQ ID NO: 795523 - DNA, 120 bp, Artificial Sequence; identical to SEQ ID NO: 773813
  ENSG00000276547_36 (sequence is synthesized)

SEQ ID NO: 795524 - DNA, 120 bp, Artificial Sequence; identical to SEQ ID NO: 773814
  ENSG00000276547_37 (sequence is synthesized)

SEQ ID NO: 795525 - DNA, 120 bp, Artificial Sequence
  ENSG00000276547_38 (sequence is synthesized)
gcttcctcctcggaaaaagaatcgtttcctaaactggaactggaactaaagcccgttcggagatccaaaaatctacaatacagaggttatttgtaacctggcgtctccaggctggtgagc

SEQ ID NO: 795526 - DNA, 120 bp, Artificial Sequence
  ENSG00000276547_39 (sequence is synthesized)
tatgtctattctttttcattacccacccaattttctgtatttacatgaaactatcgtacattttcaagtccaatgagttgtcttagggaagtcagagctgctcagaaagctgtcctacca

SEQ ID NO: 795527 - DNA, 120 bp, Artificial Sequence
  ENSG00000276557_0 (sequence is synthesized)
agctgtgaggtctggttccccgacgtgctgcagcaagtgcctttgccctgcctgtgggctccctccatggccaactctgctatggacaccagactactctgctgtgcggtcatctgtctt

SEQ ID NO: 795528 - DNA, 120 bp, Artificial Sequence
  ENSG00000276557_1 (sequence is synthesized)
ggaggcaagactgagatgcagcccaatgaaaggacacagtcatgtttactggtatcggcagctcccagaggaaggtctgaaattcatggtttatctccagaaagaaaatatcatagatga

SEQ ID NO: 795529 - DNA, 120 bp, Artificial Sequence
  ENSG00000276557_2 (sequence is synthesized)
gtcaggaatgccaaaggaacgattttctgctgaatttcccaaagagggccccagcatcctgaggatccagcaggtagtgcgaggagattcggcagcttatttctgtgccagctcaccacc

SEQ ID NO: 795530 - DNA, 71 bp, Artificial Sequence
  ENSG00000276566_0 (sequence is synthesized)
cccactgctgctctggctcccaggtgccagatgtgccatccagttgacccagtctccatcctccctgtctg

SEQ ID NO: 795531 - DNA, 120 bp, Artificial Sequence
  ENSG00000276566_1 (sequence is synthesized)
acagagtcaccatcacttgccgggcaagtcagggcattagcagtgctttagcctggtatcagcagaaaccagggaaagctcctaagctcctgatctatgatgcctccagtttggaaagtg

SEQ ID NO: 795532 - DNA, 120 bp, Artificial Sequence; identical to SEQ ID NO: 794961
  ENSG00000276581_0 (sequence is synthesized)

SEQ ID NO: 795533 - DNA, 120 bp, Artificial Sequence; identical to SEQ ID NO: 794962
  ENSG00000276581_1 (sequence is synthesized)

SEQ ID NO: 795534 - DNA, 120 bp, Artificial Sequence; identical to SEQ ID NO: 794963
  ENSG00000276581_2 (sequence is synthesized)

SEQ ID NO: 795535 - DNA, 120 bp, Artificial Sequence; identical to SEQ ID NO: 794964
  ENSG00000276581_3 (sequence is synthesized)

SEQ ID NO: 795536 - DNA, 120 bp, Artificial Sequence; identical to SEQ ID NO: 795058
  ENSG00000276581_4 (sequence is synthesized)

SEQ ID NO: 795537 - DNA, 120 bp, Artificial Sequence; identical to SEQ ID NO: 794966
  ENSG00000276581_5 (sequence is synthesized)

SEQ ID NO: 795538 - DNA, 120 bp, Artificial Sequence; identical to SEQ ID NO: 795060
  ENSG00000276581_6 (sequence is synthesized)

SEQ ID NO: 795539 - DNA, 120 bp, Artificial Sequence; identical to SEQ ID NO: 794968
  ENSG00000276581_7 (sequence is synthesized)

SEQ ID NO: 795540 - DNA, 120 bp, Artificial Sequence; identical to SEQ ID NO: 794969
  ENSG00000276581_8 (sequence is synthesized)

SEQ ID NO: 795541 - DNA, 120 bp, Artificial Sequence; identical to SEQ ID NO: 794970
  ENSG00000276581_9 (sequence is synthesized)

SEQ ID NO: 795542 - DNA, 120 bp, Artificial Sequence; identical to SEQ ID NO: 794971
  ENSG00000276581_10 (sequence is synthesized)

SEQ ID NO: 795543 - DNA, 120 bp, Artificial Sequence; identical to SEQ ID NO: 794972
  ENSG00000276581_11 (sequence is synthesized)

SEQ ID NO: 795544 - DNA, 120 bp, Artificial Sequence; identical to SEQ ID NO: 794973
  ENSG00000276581_12 (sequence is synthesized)

SEQ ID NO: 795545 - DNA, 120 bp, Artificial Sequence; identical to SEQ ID NO: 794974
  ENSG00000276581_13 (sequence is synthesized)

SEQ ID NO: 795546 - DNA, 120 bp, Artificial Sequence; identical to SEQ ID NO: 794975
  ENSG00000276581_14 (sequence is synthesized)

SEQ ID NO: 795547 - DNA, 120 bp, Artificial Sequence; identical to SEQ ID NO: 794976
  ENSG00000276581_15 (sequence is synthesized)

SEQ ID NO: 795548 - DNA, 120 bp, Artificial Sequence
  ENSG00000276581_16 (sequence is synthesized)
ctctggatctgatgcagcttcgggatgaatcaccagggacaagtcaggccaagggcaaacccagtccctggcagtcctccatgtccacaggtgaaggcagcaaggaggcacagaaggtga

SEQ ID NO: 795549 - DNA, 120 bp, Artificial Sequence; identical to SEQ ID NO: 794978
  ENSG00000276581_17 (sequence is synthesized)

SEQ ID NO: 795550 - DNA, 120 bp, Artificial Sequence; identical to SEQ ID NO: 795072
  ENSG00000276581_18 (sequence is synthesized)

SEQ ID NO: 795551 - DNA, 120 bp, Artificial Sequence; identical to SEQ ID NO: 794980
  ENSG00000276581_19 (sequence is synthesized)

SEQ ID NO: 795552 - DNA, 120 bp, Artificial Sequence; identical to SEQ ID NO: 794981
  ENSG00000276581_20 (sequence is synthesized)

SEQ ID NO: 795553 - DNA, 120 bp, Artificial Sequence; identical to SEQ ID NO: 794982
  ENSG00000276581_21 (sequence is synthesized)

SEQ ID NO: 795554 - DNA, 120 bp, Artificial Sequence; identical to SEQ ID NO: 794983
  ENSG00000276581_22 (sequence is synthesized)

SEQ ID NO: 795555 - DNA, 120 bp, Artificial Sequence; identical to SEQ ID NO: 795077
  ENSG00000276581_23 (sequence is synthesized)

SEQ ID NO: 795556 - DNA, 120 bp, Artificial Sequence; identical to SEQ ID NO: 794985
  ENSG00000276581_24 (sequence is synthesized)

SEQ ID NO: 795557 - DNA, 120 bp, Artificial Sequence; identical to SEQ ID NO: 795079
  ENSG00000276581_25 (sequence is synthesized)

SEQ ID NO: 795558 - DNA, 120 bp, Artificial Sequence; identical to SEQ ID NO: 794987
  ENSG00000276581_26 (sequence is synthesized)

SEQ ID NO: 795559 - DNA, 120 bp, Artificial Sequence; identical to SEQ ID NO: 795081
  ENSG00000276581_27 (sequence is synthesized)

SEQ ID NO: 795560 - DNA, 120 bp, Artificial Sequence; identical to SEQ ID NO: 794989
  ENSG00000276581_28 (sequence is synthesized)

SEQ ID NO: 795561 - DNA, 120 bp, Artificial Sequence; identical to SEQ ID NO: 795083
  ENSG00000276581_29 (sequence is synthesized)

SEQ ID NO: 795562 - DNA, 120 bp, Artificial Sequence; identical to SEQ ID NO: 794991
  ENSG00000276581_30 (sequence is synthesized)

SEQ ID NO: 795563 - DNA, 120 bp, Artificial Sequence; identical to SEQ ID NO: 794992
  ENSG00000276581_31 (sequence is synthesized)

SEQ ID NO: 795564 - DNA, 120 bp, Artificial Sequence; identical to SEQ ID NO: 794993
  ENSG00000276581_32 (sequence is synthesized)

SEQ ID NO: 795565 - DNA, 120 bp, Artificial Sequence; identical to SEQ ID NO: 794994
  ENSG00000276581_33 (sequence is synthesized)

SEQ ID NO: 795566 - DNA, 120 bp, Artificial Sequence; identical to SEQ ID NO: 794995
  ENSG00000276581_34 (sequence is synthesized)

SEQ ID NO: 795567 - DNA, 120 bp, Artificial Sequence
  ENSG00000276597_0 (sequence is synthesized)
agtgaccctgatctggcaaagcttccatcctgccctgaccctgccatgggtaccaggctcctctgctgggtggccttctgtctcctggtggaagaactcatagaagctggagtggttcag

SEQ ID NO: 795568 - DNA, 120 bp, Artificial Sequence
  ENSG00000276597_1 (sequence is synthesized)
gcctgtggctttttggtgcaatcctatttctggccacaataccctttactggtacctgcagaacttgggacagggcccggagcttctgattcgatatgagaatgaggaagcagtagacga

SEQ ID NO: 795569 - DNA, 120 bp, Artificial Sequence
  ENSG00000276597_2 (sequence is synthesized)
ttcacagttgcctaaggatcgattttctgcagagaggctcaaaggagtagactccactctcaagatccagcctgcagagcttggggactcggccgtgtatctctgtgccagcagcttaga

SEQ ID NO: 795570 - DNA, 120 bp, Artificial Sequence
  ENSG00000276600_0 (sequence is synthesized)
aacagactttcttttgcctgtctttgtcccagagcctcttccctggccctgctgagaccactgctctaagaagagaccaccagactgagagaggactcccagctgccctcagagcggagg

SEQ ID NO: 795571 - DNA, 120 bp, Artificial Sequence
  ENSG00000276600_1 (sequence is synthesized)
ccgagtgctgcacagccacagctgctctgaagcccttccatgaatccccggaagaaggtggacctgaaactcattatcgtcggagccattggtgtgggaaagacctccctccttcaccaa

SEQ ID NO: 795572 - DNA, 120 bp, Artificial Sequence
  ENSG00000276600_2 (sequence is synthesized)
tatgtgcacaagacgttttatgaggaataccagaccacactgggggccagcatcctctccaagattatcatattgggtgacacaactttgaagttacagatctgggacacgggcggtcag

SEQ ID NO: 795573 - DNA, 120 bp, Artificial Sequence
  ENSG00000276600_3 (sequence is synthesized)
gagcggttccgctccatggtgtccacgttctacaagggctccgatggctgcatcctagcttttgatgtcaccgacctggagtcttttgaagccctggatatctggcggggtgatgtcctg

SEQ ID NO: 795574 - DNA, 120 bp, Artificial Sequence
  ENSG00000276600_4 (sequence is synthesized)
gccaagattgtccccatggagcagtcctaccccatggtgttgttggggaacaagatcgatctggcagaccggaaggtaccccaggaagtagctcaaggctggtgtagagagaaagatatt

SEQ ID NO: 795575 - DNA, 120 bp, Artificial Sequence
  ENSG00000276600_5 (sequence is synthesized)
ccttactttgaagtcagtgccaagaatgacatcaatgtggtgcaagcgtttgagatgctggccagtagggctctgtcgaggtaccagagcatcttagaaaatcacctcacagaatccatc

SEQ ID NO: 795576 - DNA, 120 bp, Artificial Sequence
  ENSG00000276600_6 (sequence is synthesized)
aagctctcgccagaccagtcaaggagcagatgctgctgacctccagacgcctgctctggaagcccagaaacagagcctgccccgagcctggtcaccccaggcttgagaacaggtgaccat

SEQ ID NO: 795577 - DNA, 120 bp, Artificial Sequence
  ENSG00000276600_7 (sequence is synthesized)
ccccctccagccccactgcctgcccaagcacagtgcagggggcctaagctctgcggcagagcccttgaccctggtgctgggcccagagtcagagggcagcccctggctcaggctgagtat

SEQ ID NO: 795578 - DNA, 120 bp, Artificial Sequence
  ENSG00000276600_8 (sequence is synthesized)
agtgagagcgtctggatgaagcccggaatgtcagagccaaaccctggtcctgcagaagtcaccgtttccgcagtggctccagctttccccacccatccacccctcaaacactcccgctcc

SEQ ID NO: 795579 - DNA, 120 bp, Artificial Sequence
  ENSG00000276600_9 (sequence is synthesized)
agaacacacatctccgcagaccggccactgattggagtctggttacatcctcctgtggacagaccttcctcacccgctcccacctcacacccctcagccacaagcaaagctttggacaat

SEQ ID NO: 795580 - DNA, 120 bp, Artificial Sequence
  ENSG00000276600_10 (sequence is synthesized)
ggcacagctcagcctccttcaacgagcagactaaggagtaaaggtctggaccccacatgctgggcccgcctcagctcctggcagaagctgtcgtgcctgagaccccctctgctccctcca

SEQ ID NO: 795581 - DNA, 120 bp, Artificial Sequence
  ENSG00000276600_11 (sequence is synthesized)
tgtcctgtgggggtgagatgtgccttgccccctgtatcacagtgtggttttgaggaccagaagctgtgcttaaatccagtagctgttgtcaatatgcatttatttacttctttgacaagt

SEQ ID NO: 795582 - DNA, 120 bp, Artificial Sequence
  ENSG00000276600_12 (sequence is synthesized)
ttatttttgcgtatctactatgtacgatgcattgaagtccagtgacaaacaaaacacagggactctgccctcctggagccgacatctggtgagggagagacgcagactctagacagatat

SEQ ID NO: 795583 - DNA, 120 bp, Artificial Sequence
  ENSG00000276600_13 (sequence is synthesized)
ttccaaatagcaggtaagtgctataaacaaagggaaacagggtaatgggatagagtgacagggggtgggatgagttgctattttagatgaagtggtccaggagggcttccctgaggaggt

SEQ ID NO: 795584 - DNA, 120 bp, Artificial Sequence
  ENSG00000276600_14 (sequence is synthesized)
ggcatttggtctgagggctagagaatgagaaagcagctgtcacctgagagctggagaaagaacattccagggagagggagcatcaagacccaaagccctgaggcaaaaacaagcttgcca

SEQ ID NO: 795585 - DNA, 120 bp, Artificial Sequence
  ENSG00000276600_15 (sequence is synthesized)
tgttccaggaacagtgaaaggacatccattgacctaatactcaaagctgctgtcccaaagacaaagcaaaggggacccagctcccttgggtggctcctagatgctctgctgcctgaccac

SEQ ID NO: 795586 - DNA, 120 bp, Artificial Sequence
  ENSG00000276600_16 (sequence is synthesized)
cagagggcagcagtgctccttctcttccaggctgagcagaaagtggatgctcatgaaggttttaggagctggggttttgtccttcagatgctcaaagcttgttcatgggcttggaggcat

SEQ ID NO: 795587 - DNA, 120 bp, Artificial Sequence
  ENSG00000276600_17 (sequence is synthesized)
gtttagccctttgggatttgtaaggcagagaattccaatttcttaagcctagtaagaaatgagcaaaaacttcaatatatatgactcaggcaagaaatcagcatctgtggcaaatactag

SEQ ID NO: 795588 - DNA, 120 bp, Artificial Sequence
  ENSG00000276600_18 (sequence is synthesized)
aatgaaatgcaagaaagctcactgcaaggagtctccctccctgcagattccaaggctggaatctttttcttctggctccaggcagcacagacagggcctagcctggagagggtggacaag

SEQ ID NO: 795589 - DNA, 120 bp, Artificial Sequence
  ENSG00000276600_19 (sequence is synthesized)
atgtcctctcagggtcttcaatggccaagtccatgcccactgcagaatctttctgtctacccgtaagtatcctttcctgagttccaggcaaagctggggatgttagcctatgactgtcat

SEQ ID NO: 795590 - DNA, 120 bp, Artificial Sequence
  ENSG00000276600_20 (sequence is synthesized)
ctgacttggaaggtacacctaggggccggggggaggtcagcaggggagtttgggagccacttctccccccacgtggcactggagtgtgaactggctcattctggacaccagcatggagcc

SEQ ID NO: 795591 - DNA, 120 bp, Artificial Sequence
  ENSG00000276600_21 (sequence is synthesized)
agcacgggaacaggggggcagcctagagcacaagctctatctgtgtccttcagagctcctgggaaacatgatgcgccctcatgggaatggcattttgcatatcacacaggctgtcctggg

SEQ ID NO: 795592 - DNA, 120 bp, Artificial Sequence
  ENSG00000276600_22 (sequence is synthesized)
agtcaggcagactggattgtcacgtgcggtgtgcatgcagcagcttgtgcactgcagtggacctgtggaccatttctaaaggtgcacaacaaataataaatgtgtccttctttgttttta

SEQ ID NO: 795593 - DNA, 120 bp, Artificial Sequence
  ENSG00000276600_23 (sequence is synthesized)
tggcactccaggctgcctccaagagcagggttggtagagctgagggatgagagatttgcctgtcctggagagtcaccacccttccagctttggggaggcccccagggaaagtgagggaga

SEQ ID NO: 795594 - DNA, 120 bp, Artificial Sequence
  ENSG00000276600_24 (sequence is synthesized)
agatatatgaagattgctgaattacgtgcctccttcggagaaccccacccagtcccgggcccagggcagtaacttgcccattggaaaggggaaagcagaggccacactcagtgacaatgg

SEQ ID NO: 795595 - DNA, 120 bp, Artificial Sequence
  ENSG00000276600_25 (sequence is synthesized)
gcacaggcgtgcctgctcttgctgtcctcctggagtgctgaggaatgctgtttgaccttggtggtgatattgatcaataatcctccacaagcacagtgcagcgactgccaaatgcttagt

SEQ ID NO: 795596 - DNA, 120 bp, Artificial Sequence
  ENSG00000276600_26 (sequence is synthesized)
caccaggaagtgtccatcagcccacagcccgtgtctgtgcatgcttagcacctgtcctatctggggaaggagtatcctttattcttcaaatggtgtccttcctactatattgtggttaaa

SEQ ID NO: 795597 - DNA, 120 bp, Artificial Sequence
  ENSG00000276600_27 (sequence is synthesized)
tcaggtccttctgactgtgtcgctgttatgacatggtgctgttagtagacagtggcttgtctgcttgcattttttttataacaccctttcttggcaaaagaataaatgggtagcaatcca

SEQ ID NO: 795598 - DNA, 120 bp, Artificial Sequence
  ENSG00000276644_0 (sequence is synthesized)
attcccctctcaatctttgatcaatgtacttgccagggagagcccaagtccttcaaacctcctccttttcaccttcatccttaactttgtgctagagcgagacccacacaacaacagccg

SEQ ID NO: 795599 - DNA, 120 bp, Artificial Sequence
  ENSG00000276644_1 (sequence is synthesized)
accctccccgccccacccccacccccaaaccagccctcgatcccagcccccggagaggactcgcatttcgacttgcgggacacttttgtgcgttcctctccagagcgcctctcgtgctcg

SEQ ID NO: 795600 - DNA, 120 bp, Artificial Sequence
  ENSG00000276644_2 (sequence is synthesized)
cccctcttgcgctcgctctttattaccttcacctccttttctcccccttctctccctttctccttctcgttctctcccggagttgttgttgcccccctcgctccttctcccccctttttt

SEQ ID NO: 795601 - DNA, 120 bp, Artificial Sequence
  ENSG00000276644_3 (sequence is synthesized)
ccccttcccctcccgggggtgtgtggcaacttttcctctcgcttctcctccgtctgtttccccttatatgtgaccatggcagtgccggcggctttgatccctccgacccagctggtcccc

SEQ ID NO: 795602 - DNA, 120 bp, Artificial Sequence
  ENSG00000276644_4 (sequence is synthesized)
cctcaacccccaatctccacgtctgcttcctcctctggcaccaccacctccacctcttcggcgacttcgtctccggctccttccatcggacccccggcgtcctctgggccaactctgttc

SEQ ID NO: 795603 - DNA, 120 bp, Artificial Sequence
  ENSG00000276644_5 (sequence is synthesized)
ttccatcggacccccggcgtcctctgggccaactctgttccgcccggagcccatcgcttcggcggcggcggcggcggccacagtcacctctaccggcggcggcggcggcggcggcggcag

SEQ ID NO: 795604 - DNA, 120 bp, Artificial Sequence
  ENSG00000276644_6 (sequence is synthesized)
cggcggtggcagcaactgcaaccccaacctggcggccgcgagcaacggcagcggcggcggcggcggcggcatcagcgctggcggcggcgtcgcttccagcacccccatcaacgccagcac

SEQ ID NO: 795605 - DNA, 120 bp, Artificial Sequence
  ENSG00000276644_7 (sequence is synthesized)
gccagcaccggcagcagcagcagcagcagtagcagcagcagcagcagcagcagtagtagcagcagcagcagtagcagcagcagctgcggccccctccccgggaaacccgtgtactcaacc

SEQ ID NO: 795606 - DNA, 120 bp, Artificial Sequence
  ENSG00000276644_8 (sequence is synthesized)
ccgtccccagtggaaaacacccctcagaataatgagtgcaaaatggtggatctgaggggggccaaagtggcttccttcacggtggagggctgcgagctgatctgcctgccccaggctttc

SEQ ID NO: 795607 - DNA, 120 bp, Artificial Sequence
  ENSG00000276644_9 (sequence is synthesized)
gacctgttcctgaagcacttggtggggggcttgcatacggtctacaccaagctgaagcggctggagatcacgccggtggtgtgcaatgtggaacaagttcgcatcctgaggggactgggc

SEQ ID NO: 795608 - DNA, 120 bp, Artificial Sequence
  ENSG00000276644_10 (sequence is synthesized)
gccatccagccaggagtgaaccgctgcaaactcatctccaggaaggacttcgagaccctctacaatgactgcaccaacgcaagttctagacctggaaggcctcctaagaggactcaaagt

SEQ ID NO: 795609 - DNA, 120 bp, Artificial Sequence
  ENSG00000276644_11 (sequence is synthesized)
gtcacctccccagagaactctcacatcatgccgcattctgtccctggtctcatgtctcctgggataattccaccaacaggtctgacagcagccgctgcagcagctgctgctgctaccaat

SEQ ID NO: 795610 - DNA, 120 bp, Artificial Sequence
  ENSG00000276644_12 (sequence is synthesized)
gcagctattgctgaagcaatgaaggtgaaaaaaatcaaattagaagccatgagcaactatcatgccagtaataaccaacatggagcagactctgaaaacggggacatgaattcaagtgtc

SEQ ID NO: 795611 - DNA, 120 bp, Artificial Sequence
  ENSG00000276644_13 (sequence is synthesized)
ggactggaacttccttttatgatgatgccccaccctctaattcctgtcagcctacctccagcatctgtcaccatggcaatgagccagatgaaccacctcagcaccattgcaaatatggca

SEQ ID NO: 795612 - DNA, 120 bp, Artificial Sequence
  ENSG00000276644_14 (sequence is synthesized)
gcagcagcacaagttcagagtcccccatccagagttgagacatcagttattaaggagcgtgttcctgatagcccctcacctgccccctctctggaggaggggagaaggcctggcagtcac

SEQ ID NO: 795613 - DNA, 120 bp, Artificial Sequence
  ENSG00000276644_15 (sequence is synthesized)
ccatcatcacatcgcagcagcagcgtgtccagctcccctgctcggactgagagctcttctgacagaatcccggtccatcagaatgggttgtccatgaaccagatgctgatgggcttatca

SEQ ID NO: 795614 - DNA, 120 bp, Artificial Sequence
  ENSG00000276644_16 (sequence is synthesized)
ccaaatgtacttcctgggcccaaagagggagatttggccggtcatgacatgggacatgagtcaaaaaggatgcatattgaaaaagatgagaccccgctttctacaccaaccgcaagagac

SEQ ID NO: 795615 - DNA, 120 bp, Artificial Sequence
  ENSG00000276644_17 (sequence is synthesized)
agccttgacaaactctctctaactgggcatggacaaccactgcctccaggttttccatctccttttctgtttcctgatggactgtcttccatcgagactcttctgactaacatacagggg

SEQ ID NO: 795616 - DNA, 120 bp, Artificial Sequence
  ENSG00000276644_18 (sequence is synthesized)
ctgttgaaagttgccatagataatgccagagctcaagagaaacaggtccaactggaaaaaactgagctgaagatggattttttaagggaaagagaactaagggaaacacttgagaagcag

SEQ ID NO: 795617 - DNA, 120 bp, Artificial Sequence
  ENSG00000276644_19 (sequence is synthesized)
ttggctatggaacaaaagaatagagccatagttcaaaagaggctaaagaaggagaagaaggcaaagagaaaattgcaggaagcacttgagtttgagacgaaacggcgtgaacaagcagaa

SEQ ID NO: 795618 - DNA, 120 bp, Artificial Sequence
  ENSG00000276644_20 (sequence is synthesized)
cagacgctaaaacaggcagcttcaacagatagtctcagggtcttaaatgactctctgaccccagagatagaggctgaccgcagtggcggcagaacagatgctgaaaggacaatacaagat

SEQ ID NO: 795619 - DNA, 120 bp, Artificial Sequence
  ENSG00000276644_21 (sequence is synthesized)
gacattcgtcatgggaaagttcagaaaaaaataaagtccttttaagggaacttcctgaattttgtgtattaatgttctttaaaagtttaagtattctacaaaaaaaaaaaaagttttctc

SEQ ID NO: 795620 - DNA, 120 bp, Artificial Sequence
  ENSG00000276644_22 (sequence is synthesized)
cattgattttcacctgtggttcataccagagacctgagaatgtttgtaaatgtacaagtatcaaagttcttacagttaattactgcaacttgctgctggacaattgtatacagagttaaa

SEQ ID NO: 795621 - DNA, 120 bp, Artificial Sequence
  ENSG00000276644_23 (sequence is synthesized)
ggcaggtctgaataagacctagctttgtttttttctaatggaatgaaccattttcctcttctgaaaattctgtatctgagcacatcaagagactcttgtagcagtggttacccagactta

SEQ ID NO: 795622 - DNA, 120 bp, Artificial Sequence
  ENSG00000276644_24 (sequence is synthesized)
cagaattatgtcctccagaaaccagcaagaacacttggaatgaacgaatgaacttgtagggggcatagaggattcttgaaaaaaaaaaatgcaagagtgattttctgttacattcaattt

SEQ ID NO: 795623 - DNA, 120 bp, Artificial Sequence
  ENSG00000276644_25 (sequence is synthesized)
caaactctctaattgtgggttttctcctgaagaattttttttcacatactttccaaaagaccaacaaatggatgttgacaacaacccaatgaaataacattttgcatatctgaaaagaag

SEQ ID NO: 795624 - DNA, 120 bp, Artificial Sequence
  ENSG00000276644_26 (sequence is synthesized)
cattgaatataagccaaaagctttcactgaaggtttttttttcttaaaaataaaaaaaaatatataagtgtaacatgttttcattccaaactggtagtggtatgtagaattaaagataat

SEQ ID NO: 795625 - DNA, 120 bp, Artificial Sequence
  ENSG00000276644_27 (sequence is synthesized)
aatgttgcttcttattcaaactgttggtcatatgtacagtatataaacataaaacacacaaggaaggtattatgtatgcagtagtatactagagtttaggaaaatgaaaattttagaaaa

SEQ ID NO: 795626 - DNA, 120 bp, Artificial Sequence
  ENSG00000276644_28 (sequence is synthesized)
tatgttttgtcaccctgttggtcagaaagatgtctttctggttttaacgcatgcaggcatgtaaatatttgtctggagtcacagtattaatgaatgagatcttaagcatctggtgacatc

SEQ ID NO: 795627 - DNA, 120 bp, Artificial Sequence
  ENSG00000276644_29 (sequence is synthesized)
agaactctgtgtcagccacttttatttgtatattgaaccctagctagtgccccaagctgcactattgggaatggattgtggctgaacagcaaatcaaaacaccagaaatatttttatatg

SEQ ID NO: 795628 - DNA, 120 bp, Artificial Sequence
  ENSG00000276644_30 (sequence is synthesized)
ttaacgtcatattatgttaatgttgctgaaaacaaaacctaacaaaccttgatgtaccagtccaataccatgtagcgctgagtgataaagttaaaatgtgctgtgcttcccacccttgtc

SEQ ID NO: 795629 - DNA, 120 bp, Artificial Sequence
  ENSG00000276644_31 (sequence is synthesized)
agagggaagggtggctatgtgttattttcactgtctttttgaaagttacagtatgtgttttcactttcgtgcagataactggaagtaaagcggcaaacagtgcttattacatgctaaagt

SEQ ID NO: 795630 - DNA, 120 bp, Artificial Sequence
  ENSG00000276644_32 (sequence is synthesized)
taccttctctttgttttttgcatatctggaattacacctttaaagactgatatgaatcagtacggtcactatacattttatgatttttctgtcatcttaaaattgtatgatcgtaacatt

SEQ ID NO: 795631 - DNA, 120 bp, Artificial Sequence
  ENSG00000276644_33 (sequence is synthesized)
atttattaccacaaaacagcaaaatcttcaatgtctaagaaaactagcttaaaatgtttaaatatagttctgattgggtattaattacttgattaagaaaaaattaacattatagatact

SEQ ID NO: 795632 - DNA, 120 bp, Artificial Sequence
  ENSG00000276644_34 (sequence is synthesized)
ctggcattacgcttctataccttttaggtcttccttgcaatactggaacataattcttttgtgtagctcactattagccagctaagttcatctttttaataccataaaaaggttatatgt

SEQ ID NO: 795633 - DNA, 120 bp, Artificial Sequence
  ENSG00000276644_35 (sequence is synthesized)
acagttcctattttagcttgcttacaaagggagcattatttttatttaaagtattgctagtaaatgatttgtagaaacttggttttctaagcatagttcttccataaccaccttttgttg

SEQ ID NO: 795634 - DNA, 120 bp, Artificial Sequence
  ENSG00000276644_36 (sequence is synthesized)
tttgagcacaagggattcttttcctagttctatgtgtttgtttccctatatgcagtctttaaaggattacaacacttaaaattgaatggacttgtgtcaagctttttgcatcatacattt

SEQ ID NO: 795635 - DNA, 120 bp, Artificial Sequence
  ENSG00000276644_37 (sequence is synthesized)
tttgaaagatttttaaaaaagcctacaacttacatatgtagtagaatcagccattgctctgctcctggcatagagtcacctgtttgttatgtggattaaatagttttaaaatacatattt

SEQ ID NO: 795636 - DNA, 120 bp, Artificial Sequence
  ENSG00000276644_38 (sequence is synthesized)
gaagacctttgagaatgctttagtgtttgatttgaaataaaaggaaattttagcaaggattaaagaaaaaagctatcagctgtatgttaagagagactcttactaacatgttgtaaatat

SEQ ID NO: 795637 - DNA, 120 bp, Artificial Sequence
  ENSG00000276644_39 (sequence is synthesized)
tacaattcatgaaatgttattgtaagtctgtaacttaattttttccctgttttagttatacaggttggtttggaaatttgtgttttggcataaacaagtaaaatgtgcccattttatggt

SEQ ID NO: 795638 - DNA, 120 bp, Artificial Sequence
  ENSG00000276644_40 (sequence is synthesized)
ttccatgcttttgtaatcctaaaaatattaatgtctagttgttctatattataaccacatttgcgctctatgcaagcccttggaacagaacatactcatcttcatgtaggacctatgaaa

SEQ ID NO: 795639 - DNA, 120 bp, Artificial Sequence
  ENSG00000276644_41 (sequence is synthesized)
attgtctatttttatctatatatttaaagttttctaaaaatgataaaaggttattacgaattttgttgtacaaaatctgtacaaaaatctgtttttacatcataatgcaagaattggaaa

SEQ ID NO: 795640 - DNA, 120 bp, Artificial Sequence
  ENSG00000276644_42 (sequence is synthesized)
tttttctatggtagcctagttatttgagcctggtttcaatgtgagaaccacgtttactgttattgtatttaattttcttttccttttcaacaatctcctaataaaactgtctgaaatctc

SEQ ID NO: 795641 - DNA, 120 bp, Artificial Sequence
  ENSG00000276747_0 (sequence is synthesized)
gggcgtctgaggctgctgtgctgagtgagggctgcggtgcaggcctgaggatggtcagcgtggagggccgagccatgtccttccagagtatcatccacctgtccctggacagccctgtcc

SEQ ID NO: 795642 - DNA, 120 bp, Artificial Sequence
  ENSG00000276747_1 (sequence is synthesized)
atgccgtttgtgtgttgggcacagaaatctgcttggatctcagcgggtgtgccccccagaagtgccagtgcttcaccatccatggctctgggagggtcttgatcgatgtggccaacacgg

SEQ ID NO: 795643 - DNA, 120 bp, Artificial Sequence
  ENSG00000276747_2 (sequence is synthesized)
tgatttctgagaaggaggacgccaccatctggtggcccctgtctgatcccacgtacgccacagtgaagatgacatcgcccagcccttccgtggatgcggataaggtctcggtcacatact

SEQ ID NO: 795644 - DNA, 120 bp, Artificial Sequence
  ENSG00000276747_3 (sequence is synthesized)
atgggcccaacgaggatgcccccgtgggcacagctgtgctgtacctcactggcattgaggtctctctagaggtagacatctaccgcaatgggcaagttgagatgtcaagtgacaaacagg

SEQ ID NO: 795645 - DNA, 120 bp, Artificial Sequence
  ENSG00000276747_4 (sequence is synthesized)
ctaagaaaaaatggatctggggtcccagcggttggggtgccatcctgcttgtgaattgcaaccctgctgatgtgggccagcaacttgaggacaagaaaaccaagaaagtgatcttttcag

SEQ ID NO: 795646 - DNA, 120 bp, Artificial Sequence
  ENSG00000276747_5 (sequence is synthesized)
aggaaataacgaatctgtcccagatgactctgaatgtccaaggccccagctgtatcttaaagaaatatcggctagtcctccatacctccaaggaagagtcgaagaaggcgagagtctact

SEQ ID NO: 795647 - DNA, 120 bp, Artificial Sequence
  ENSG00000276747_6 (sequence is synthesized)
ggccccaaaaagacaactccagtacctttgagttggtgctggggcccgaccagcacgcctataccttggccctcctcgggaaccacttgaaggagactttctacgttgaagctatagcat

SEQ ID NO: 795648 - DNA, 120 bp, Artificial Sequence
  ENSG00000276747_7 (sequence is synthesized)
tcccatctgccgaattctcaggcctcatctcctactctgtgtccctggtggaggagtctcaagacccgtcaattccagagactgtgctgtacaaagacacggtggtgttccgggtggctc

SEQ ID NO: 795649 - DNA, 120 bp, Artificial Sequence
  ENSG00000276747_8 (sequence is synthesized)
cctgtgtcttcattccctgtacccaggtgcctctggaggtttacctgtgcagggagctgcagctgcagggttttgtggacacagtgacgaagctgagtgagaagagcaacagccaggtgg

SEQ ID NO: 795650 - DNA, 120 bp, Artificial Sequence
  ENSG00000276747_9 (sequence is synthesized)
gccgatctcgatgagttccccatgaagtactcactgagccctggtattggctacatgatccaggacactgaggaccataaagtggccagcatggattccattgggaacctgatggtgtcc

SEQ ID NO: 795651 - DNA, 120 bp, Artificial Sequence
  ENSG00000276747_10 (sequence is synthesized)
ccacctgtcaaggtccaagggaaagagtacccgctgggcagagtcctcattggcagcagcttttaccccagcgcagagggccgggccatgagtaagaccctccgagacttcctctatgcc

SEQ ID NO: 795652 - DNA, 120 bp, Artificial Sequence
  ENSG00000276747_11 (sequence is synthesized)
cagcaggtccaagcgccggtggagctctactcagattggctaatgactggccacgtggatgagttcatgtgcttcatccccacagatgacaagaatgagggcaaaaagggcttcctgctg

SEQ ID NO: 795653 - DNA, 120 bp, Artificial Sequence
  ENSG00000276747_12 (sequence is synthesized)
ctcctggccagccccagtgcctgctataaactgttccgagagaaacagaaggaaggctatggcgacgctcttctgtttgatgagcttagagcagatcagctcctgtctaatggaagggaa

SEQ ID NO: 795654 - DNA, 120 bp, Artificial Sequence
  ENSG00000276747_13 (sequence is synthesized)
gccaaaaccatcgaccaacttctggctgatgaaagcctgaagaagcagaatgaatacgtggagaagtgcattcacctgaaccgtgacatcctgaagacggagctgggcctggtggaacag

SEQ ID NO: 795655 - DNA, 120 bp, Artificial Sequence
  ENSG00000276747_14 (sequence is synthesized)
gacatcatcgagattccccagctgttctgcttggagaagctgactaacatcccctctgaccagcagcccaagaggtcctttgcgaggccatacttccctgacctgttgcggatgattgtg

SEQ ID NO: 795656 - DNA, 120 bp, Artificial Sequence
  ENSG00000276747_15 (sequence is synthesized)
atgggcaagaacctggggatccccaagccttttgggccccaaatcaaggggacctgctgcctggaagaaaagatttgctgcttgctggagcccctgggcttcaagtgcaccttcatcaat

SEQ ID NO: 795657 - DNA, 120 bp, Artificial Sequence
  ENSG00000276747_16 (sequence is synthesized)
gactttgactgttacctgacagaggtcggagacatctgtgcctgtgccaacatccgccgggtgccctttgccttcaaatggtggaagatggtaccttagacccaggccctggagctgcca

SEQ ID NO: 795658 - DNA, 120 bp, Artificial Sequence
  ENSG00000276747_17 (sequence is synthesized)
gctctgccccagcgtggatggcccactgtcaccatgcaacagcatgattctttgcccagtagaggaggctggagagtccaggcaacagaaccctttcttccctgtctgccccgaccgacc

SEQ ID NO: 795659 - DNA, 120 bp, Artificial Sequence
  ENSG00000276747_18 (sequence is synthesized)
ctcggacccagtaggatggcaaatgccgccagcttgaacccctatggggaaaagatgcaaaagtgttcagccaagtgacgtttactaaatagccaataaagggctggtgggtgtgaatgc

SEQ ID NO: 795660 - DNA, 120 bp, Artificial Sequence
  ENSG00000276775_0 (sequence is synthesized)
aaattcagggtccagctcacatgggaaatactttctgagagtcatggacctcctgcacaagaacatgaaacacctgtggttcttcctcctcctggtggcagctcccagatgggtcctgtc

SEQ ID NO: 795661 - DNA, 120 bp, Artificial Sequence
  ENSG00000276775_1 (sequence is synthesized)
cctcacctgcgctgtctctggtggctccatcagcagtagtaactggtggagttgggtccgccagcccccagggaaggggctggagtggattggggaaatctatcatagtgggagcaccaa

SEQ ID NO: 795662 - DNA, 120 bp, Artificial Sequence
  ENSG00000276775_2 (sequence is synthesized)
ctacaacccgtccctcaagagtcgagtcaccatatcagtagacaagtccaagaaccagttctccctgaagctgagctctgtgaccgccgcggacacggccgtgtattactgtgcgagaga

SEQ ID NO: 795663 - DNA, 120 bp, Artificial Sequence
  ENSG00000276819_0 (sequence is synthesized)
actcccacctctcaacccaggaatcagagcctgagacagacagatgcttcattcctgtatggggtggtattcctgccatgggtcctgggcttctccactggatggccctttgtctccttg

SEQ ID NO: 795664 - DNA, 120 bp, Artificial Sequence
  ENSG00000276819_1 (sequence is synthesized)
aaagccagtgaccctgagttgttctcagactttgaaccataacgtcatgtactggtaccagcagaagtcaagtcaggccccaaagctgctgttccactactatgacaaagattttaacaa

SEQ ID NO: 795665 - DNA, 120 bp, Artificial Sequence
  ENSG00000276819_2 (sequence is synthesized)
tgaagcagacacccctgataacttccaatccaggaggccgaacacttctttctgctttcttgacatccgctcaccaggcctgggggacgcagccatgtacctgtgtgccaccagcagaga

SEQ ID NO: 795666 - DNA, 120 bp, Artificial Sequence
  ENSG00000276903_0 (sequence is synthesized)
atgtcgggacgcggcaagcagggaggcaaagctcgcgccaaagccaagacccgctcttctcgtgccggtctccagttccccgtgggccgagtgcaccgactgctccgcaagggcaactat

SEQ ID NO: 795667 - DNA, 120 bp, Artificial Sequence
  ENSG00000276903_1 (sequence is synthesized)
ctggcggcggtgctggagtacctgactgccgagatcctggagctggcgggcaacgccgcccgcgacaacaagaagacccgcattatcccgcgccacttgcagctggccatccgcaacgac

SEQ ID NO: 795668 - DNA, 120 bp, Artificial Sequence
  ENSG00000276903_2 (sequence is synthesized)
gaggagctcaacaagctgctgggcaaagtaaccatcgctcagggtggtgtcctgcccaacatccaggctgtgctactgcccaagaagaccgagagtcaccacaaggccaaaggcaaataa

SEQ ID NO: 795669 - DNA, 120 bp, Artificial Sequence
  ENSG00000276950_0 (sequence is synthesized)
cccaggtctgtggctggccaactgcggctgtggggcctggcatgtgtctcaacatggcactggagctctacatggacctgctgtcagcaccctgccgtgccgtctacatcttctcgaaga

SEQ ID NO: 795670 - DNA, 120 bp, Artificial Sequence
  ENSG00000276950_1 (sequence is synthesized)
agcatgacatccagttcaactttcagtttgtggatctgctgaaaggtcaccaccacagcaaaggatacattgacatcaaccccctcaggaagctgcccagcctcaaagatgggaaattta

SEQ ID NO: 795671 - DNA, 120 bp, Artificial Sequence
  ENSG00000276950_2 (sequence is synthesized)
tcttaagtgaaagcgcggccatcctttactacctgtgccgcaagtacagcgcaccatcgcactggtgcccgccagacccgcacgcacgtgcccgtgtggatgagttcgtggcttggcaac

SEQ ID NO: 795672 - DNA, 120 bp, Artificial Sequence
  ENSG00000276950_3 (sequence is synthesized)
gctgagaagatggagcatgcagtggaagaggtgaagaacagcctgcagctctttgaggagtattttctgcaggataagatgttcatcaccgggaaccaaatctcactggctgacctggtg

SEQ ID NO: 795673 - DNA, 120 bp, Artificial Sequence
  ENSG00000276950_4 (sequence is synthesized)
gccgtggtggagatgatgcagcccatggcagccaactataatgtcttcctcaacagctccaagctagctgagtggcgtatgcaggtggagctgaatattggctctggcctctttagggag

SEQ ID NO: 795674 - DNA, 120 bp, Artificial Sequence
  ENSG00000276950_5 (sequence is synthesized)
gcccatgatcgactaatgcagttggccgactgggacttttcaacattggattcaatggtcaaggagaatatttctgagttgctgaagaagagcaggtgaccctaggcgcagcctgtcccg

SEQ ID NO: 795675 - DNA, 88 bp, Artificial Sequence
  ENSG00000276950_6 (sequence is synthesized)
gctgaagaagagcaggtgaccctaggcgcagcctgtcccgcagggcctggctggcttagcaatctgagccaccttccttaaaggaaat

SEQ ID NO: 795676 - DNA, 120 bp, Artificial Sequence
  ENSG00000276950_7 (sequence is synthesized)
tcaacatggcactggagctctacatggacctgctgtcagcaccctgccgtgccgtctacatcttctcgaagaagcatgacatccagttcaactttcagtttgtggatctgctgaaaggtt

SEQ ID NO: 795677 - DNA, 89 bp, Artificial Sequence
  ENSG00000276950_8 (sequence is synthesized)
tgctgaaaggtcaactcccactgctgcctggcaggcctggtcctggggggaggcaggacacacagattgcggcttttctttttttcttg

SEQ ID NO: 795678 - DNA, 78 bp, Artificial Sequence
  ENSG00000276950_9 (sequence is synthesized)
catggagtacggtggtgctatctcggctcactgcaacctctgctgggttcaagtgcatgccaccacgcccagctaatt

SEQ ID NO: 795679 - DNA, 79 bp, Artificial Sequence
  ENSG00000276950_10 (sequence is synthesized)
gcccctgataggggcgtttctgaggagcagagacagagacaagggaatcaccccagaggtccacagggaaggaaaagat

SEQ ID NO: 795680 - DNA, 120 bp, Artificial Sequence
  ENSG00000276950_11 (sequence is synthesized)
caagggaatcaccccagaggtccacagggaaggaaaagatgccacgcggcttgtaggctgcatccttgtccagcctaccttagtcagtgctcactaatgacagtccccacgccacagatg

SEQ ID NO: 795681 - DNA, 120 bp, Artificial Sequence
  ENSG00000276950_12 (sequence is synthesized)
aacaggcttttcgaggagaagggggaaggaacagtagctgggactccctgggctcccaccaggcaccctggcttccttgtgggattctaggaccttgtgaactcagcacctgcccaccag

SEQ ID NO: 795682 - DNA, 120 bp, Artificial Sequence
  ENSG00000276950_13 (sequence is synthesized)
caactccatccccagcacagagggactccaaaagctcagcctgcaaaagcagaagcctctagaacacagaggaagagacagggaagctgtggaaatgaacgggctgcgagtggagccccc

SEQ ID NO: 795683 - DNA, 120 bp, Artificial Sequence
  ENSG00000276950_14 (sequence is synthesized)
agaaatgtttccaactggaggcggctggtccaggaagagtttcagttcctgcccccacctcaggttccctgttaagatgaccctgattgtgtccgagaagcttccctttggatgtccagc

SEQ ID NO: 795684 - DNA, 120 bp, Artificial Sequence
  ENSG00000276950_15 (sequence is synthesized)
tgtgtgctgggcctggcttccttaaagtggagacagagtgagagcgatgggattgcggatgggacccaggccctcagggcttcaggtcaccaccacagcaaaggatacattgacatcaac

SEQ ID NO: 795685 - DNA, 120 bp, Artificial Sequence
  ENSG00000276953_0 (sequence is synthesized)
tttgctcatgttcacagagggcctggtctggaatattccacatctgctctcactctgccatgggctcctggaccctctgctgtgtgtccctttgcatcctggtagcaaagcacacagatg

SEQ ID NO: 795686 - DNA, 120 bp, Artificial Sequence
  ENSG00000276953_1 (sequence is synthesized)
agaagtgactctgagatgtaaaccaatttcaggacacgactaccttttctggtacagacagaccatgatgcggggactggagttgctcatttactttaacaacaacgttccgatagatga

SEQ ID NO: 795687 - DNA, 120 bp, Artificial Sequence; identical to SEQ ID NO: 793820
  ENSG00000276953_2 (sequence is synthesized)

SEQ ID NO: 795688 - DNA, 120 bp, Artificial Sequence
  ENSG00000276966_0 (sequence is synthesized)
agtcttcatttaggtccgaattcccggcatataagaatactaccgtcgcttgtttttcagatttttgcggctattttcgttggtgtgttggtcatgtctggtcgcggcaaaggcggaaag

SEQ ID NO: 795689 - DNA, 120 bp, Artificial Sequence
  ENSG00000276966_1 (sequence is synthesized)
ggactgggtaaaggaggcgctaagcgtcaccgtaaggtcctgcgagataacatccagggcattaccaagcctgccatccggcgccttgctcgtcgcgggggtgtcaagcgcatttctggt

SEQ ID NO: 795690 - DNA, 120 bp, Artificial Sequence
  ENSG00000276966_2 (sequence is synthesized)
ctcatctacgaggagactcgcggggttctgaaggtgtttctggaaaacgtgattcgtgatgctgtgacttacacggagcacgccaaacgcaagacagtgacagcgatggatgtggtctac

SEQ ID NO: 795691 - DNA, 120 bp, Artificial Sequence
  ENSG00000276966_3 (sequence is synthesized)
gcgctgaagagacagggacgcactctttacggcttcggcggctaatgctaccgcttaaacgactcagcatctcgacttcccaaatcaaaggcccttttcagggccgcccacagttttccg

SEQ ID NO: 795692 - DNA, 120 bp, Artificial Sequence
  ENSG00000276966_4 (sequence is synthesized)
caaaagagctcatgacttgttagacgattggttggtctctttataagttaattgttcctgtcaacaggtacgtatatttttcagccgttttttttttttcgttccaaattacatttgggg

SEQ ID NO: 795693 - DNA, 120 bp, Artificial Sequence
  ENSG00000276966_5 (sequence is synthesized)
tttcggcatacgattttttaggctacgatccttttatgtttattgtagtagggccttagattgcactgaaaaggctagggtaatagtgtctgtttaccttaccacttttattttgagtac

SEQ ID NO: 795694 - DNA, 120 bp, Artificial Sequence
  ENSG00000276966_6 (sequence is synthesized)
gcgtaaccgctcaaaatggcggagagcgaagaacaaagccggtgcctggcaatgggccggacccgcgaattagcgcaaccaatcatcttcctggaaaggagtgtgggccttaaattctag

SEQ ID NO: 795695 - DNA, 120 bp, Artificial Sequence
  ENSG00000276966_7 (sequence is synthesized)
cggcctgttttctattacttaacctaacgaccgagtttaggtgtgtagaagttcctggggtagataagctcacgcaaggagaggttgcaagcattcatttcggaattctattaagccaac

SEQ ID NO: 795696 - DNA, 120 bp, Artificial Sequence
  ENSG00000276966_8 (sequence is synthesized)
ccagttgtcccttagaagttatgatatttgctgttttttgaataaaagaatttgactctctttaaaccctaaagcttgaaatttagcatttatctcacatgagacaaatgtttaggaact

SEQ ID NO: 795697 - DNA, 120 bp, Artificial Sequence
  ENSG00000276966_9 (sequence is synthesized)
catgtttaggaactcatgttcctgcctgaggcaggaactgaaacaccagatcacttgcatcgagaccgtgagactccctatgtttcatccatcatgattgcgtccttatccctccctgat

SEQ ID NO: 795698 - DNA, 120 bp, Artificial Sequence
  ENSG00000276966_10 (sequence is synthesized)
ttcctgttttctcgcccttctcgctacataagccccccaattttggtcggggagacggatttgtgatttcatctcctccctcatgaatactcatagaatttttccaaacctactgaatct

SEQ ID NO: 795699 - DNA, 120 bp, Artificial Sequence
  ENSG00000276966_11 (sequence is synthesized)
gtatgtaaggttgactctgtaaggcatatatatattccagctccccttcactgccacagagcgctcattccatcctgggattacttctccctctgaaaataaagtctttgttacttcctg

SEQ ID NO: 795700 - DNA, 120 bp, Artificial Sequence
  ENSG00000277058_0 (sequence is synthesized)
cctggagttcctgcttggttcttcctgaggtctgaacaccctgcaaactgagcccagatctgaattcttgttgggagccattttgtgaagagacgaagactgagctggtttggctgcatt

SEQ ID NO: 795701 - DNA, 120 bp, Artificial Sequence
  ENSG00000277058_1 (sequence is synthesized)
tctggcctcgagccgcagtcagcttctccacgtagaacccggcagtaggagacttagaatcgaatctcttctccctcccgcctcctgtttttggctttttgagaaaccttatcatccaac

SEQ ID NO: 795702 - DNA, 120 bp, Artificial Sequence
  ENSG00000277058_2 (sequence is synthesized)
acaatggccagcaacgttaccaacaagatggatcctcactccatgaactcccgtgtgttcattgggaatctcaacactcttgttgtcaagaaatcggatgtggaggcgatcttttccaag

SEQ ID NO: 795703 - DNA, 120 bp, Artificial Sequence; identical to SEQ ID NO: 794695
  ENSG00000277058_3 (sequence is synthesized)

SEQ ID NO: 795704 - DNA, 120 bp, Artificial Sequence
  ENSG00000277058_4 (sequence is synthesized)
agagatgtacggctcctcttttgacttggactataacttgcaacgggattattatggtgggatgtacagtttcccagcacgtgtacctcctcctcctcccattgctctggctgtagtgcc

SEQ ID NO: 795705 - DNA, 120 bp, Artificial Sequence
  ENSG00000277058_5 (sequence is synthesized)
ctcgaaacgccagcgcatatcaggaaacacctcacgaaggggcaaaagtggcttcaattctaagagtggaaagcggggatcttccaagtctggaaagctgaaaggagatgaccttcaggc

SEQ ID NO: 795706 - DNA, 120 bp, Artificial Sequence
  ENSG00000277058_6 (sequence is synthesized)
cattaagcaggagttgacccagataaaacagaaagtggattctctcctggaaaacctggaaaaaattgaaaaggaacattgcaagcaaggagtagaggtaaagaatgctaagtctgaaga

SEQ ID NO: 795707 - DNA, 120 bp, Artificial Sequence
  ENSG00000277058_7 (sequence is synthesized)
ggagcagaccagcagctcctcgaagaaggataagactcacgtgaagatggagtctgaggggggtgcagatgactctgttgaggagggggacctactgtgtgatgatgataatgaagatca

SEQ ID NO: 795708 - DNA, 120 bp, Artificial Sequence
  ENSG00000277058_8 (sequence is synthesized)
gggggacaaccagctggagttgatcaaggatgatgaaaaaggggctgaggaaggagaggatgacagagacagggcgaatggccaggatgactcttaagcacatagtggggttgagaaatc

SEQ ID NO: 795709 - DNA, 120 bp, Artificial Sequence
  ENSG00000277075_0 (sequence is synthesized)
atgtctggacgtggaaagcaaggcggcaaagctcgggcaaaagctaaaacgcgttcttccagggccggtcttcagtttccagttggccgtgtgcaccgcctcctccgcaaaggcaactac

SEQ ID NO: 795710 - DNA, 120 bp, Artificial Sequence
  ENSG00000277075_1 (sequence is synthesized)
tccgaacgagtcggggccggcgctccagtgtacctggcagcggtgctggaatatctgacggccgagatcttagagctagctggcaacgcggctcgcgacaataagaagacccgcatcatc

SEQ ID NO: 795711 - DNA, 120 bp, Artificial Sequence
  ENSG00000277075_2 (sequence is synthesized)
cgacgaggagctaaataagcttctaggtcgcgtgaccatcgcgcagggcggtgtcctgcccaacatccaggccgtattgctgcctaagaagacggagagccaccataaggccaagggcaa

SEQ ID NO: 795712 - DNA, 120 bp, Artificial Sequence
  ENSG00000277075_3 (sequence is synthesized)
gtgaaatgattactagtcaaatccgtcagtgatcccgagtcccagaaaccaaaggctcttttcagagccacccaccttttctgtaaagtgctggaatacacatacgatgcctgaaatctc

SEQ ID NO: 795713 - DNA, 120 bp, Artificial Sequence
  ENSG00000277117_0 (sequence is synthesized)
agagcctcgggcgcggcgggagcgcagttagagccgatctcccgcgccccgaggttgctcctctccgaggtctcccgcggcccaagttctccgcgccccgaggtctccgcgccccgaggt

SEQ ID NO: 795714 - DNA, 120 bp, Artificial Sequence
  ENSG00000277117_1 (sequence is synthesized)
ctccgcggcccgaggtctccgcccgcaccatgcggctgggcagtcctggactgctcttcctgctcttcagcagccttcgagctgatactcaggagaaggaagtcagagcgatggtaggca

SEQ ID NO: 795715 - DNA, 120 bp, Artificial Sequence
  ENSG00000277117_2 (sequence is synthesized)
gcgacgtggagctcagctgcgcttgccctgaaggaagccgttttgatttaaatgatgtttacgtatattggcaaaccagtgagtcgaaaaccgtggtgacctaccacatcccacagaaca

SEQ ID NO: 795716 - DNA, 120 bp, Artificial Sequence
  ENSG00000277117_3 (sequence is synthesized)
gctccttggaaaacgtggacagccgctaccggaaccgagccctgatgtcaccggccggcatgctgcggggcgacttctccctgcgcttgttcaacgtcaccccccaggacgagcagaagt

SEQ ID NO: 795717 - DNA, 120 bp, Artificial Sequence
  ENSG00000277117_4 (sequence is synthesized)
ttcactgcctggtgttgagccaatccctgggattccaggaggttttgagcgttgaggttacactgcatgtggcagcaaacttcagcgtgcccgtcgtcagcgccccccacagcccctccc

SEQ ID NO: 795718 - DNA, 120 bp, Artificial Sequence
  ENSG00000277117_5 (sequence is synthesized)
aggatgagctcaccttcacgtgtacatccataaacggctaccccaggcccaacgtgtactggatcaataagacggacaacagcctgctggaccaggctctgcagaatgacaccgtcttct

SEQ ID NO: 795719 - DNA, 120 bp, Artificial Sequence
  ENSG00000277117_6 (sequence is synthesized)
tgaacatgcggggcttgtatgacgtggtcagcgtgctgaggatcgcacggacccccagcgtgaacattggctgctgcatagagaacgtgcttctgcagcagaacctgactgtcggcagcc

SEQ ID NO: 795720 - DNA, 120 bp, Artificial Sequence
  ENSG00000277117_7 (sequence is synthesized)
agacaggaaatgacatcggagagagagacaagatcacagagaatccagtcagtaccggcgagaaaaacgcggccacgtggagcatcctggctgtcctgtgcctgcttgtggtcgtggcgg

SEQ ID NO: 795721 - DNA, 120 bp, Artificial Sequence
  ENSG00000277117_8 (sequence is synthesized)
tggccataggctgggtgtgcagggaccgatgcctccaacacagctatgcaggtgcctgggctgtgagtccggagacagagctcactggccacgtttgaccggagctcaccgcccagagcg

SEQ ID NO: 795722 - DNA, 120 bp, Artificial Sequence
  ENSG00000277117_9 (sequence is synthesized)
tggacagggcttccgtgagacgccaccgtgagaggccaggtggcagcttgagcatggactcccagactgcaggggagcacttggggcagcccccagaaggaccactgctggatcccaggg

SEQ ID NO: 795723 - DNA, 120 bp, Artificial Sequence
  ENSG00000277117_10 (sequence is synthesized)
agaacctgctggcgttggctgtgatcctggaatgaggccctttcaaaagcgtcatccacaccaaaggcaaatgtccccaagtgagtgggctccccgctgtcactgccagtcacccacagg

SEQ ID NO: 795724 - DNA, 120 bp, Artificial Sequence
  ENSG00000277117_11 (sequence is synthesized)
aagggactggtgatgggctgtctctacccggagcgtgcgggattcagcaccaggctcttcccagtaccccagacccactgtgggtcttcccgtgggatgcgggatcctgagaccgaaggg

SEQ ID NO: 795725 - DNA, 120 bp, Artificial Sequence
  ENSG00000277117_12 (sequence is synthesized)
tgtttggtttaaaaagaagactgggcgtccgctcttccaggacggcctctgtgctgctggggtcacgcgaggctgtttgcaggggacacggtcacaggagctcttctgccctgaacgctc

SEQ ID NO: 795726 - DNA, 120 bp, Artificial Sequence
  ENSG00000277117_13 (sequence is synthesized)
ccacattccctgggaggaacaatgtccctcggctgttccggtgaaaagttgagccacctttggaagacgcacgggtggagtttgccagaagaaaggctgtgccagggccgtgtttggcta

SEQ ID NO: 795727 - DNA, 120 bp, Artificial Sequence
  ENSG00000277117_14 (sequence is synthesized)
caggggctgccggggctcttggctctgcagcgagaaagacacagcccagcagggctggagacgcccatgtccagcaggcgcaggcctggcaacacggtccccagagtcctgagcagcagt

SEQ ID NO: 795728 - DNA, 120 bp, Artificial Sequence
  ENSG00000277117_15 (sequence is synthesized)
taggtgcatggagagggtatcacctggtggccacagtcccccttctcacctcagcaatgatccccaaagtgagaggtggctcccccggcccccaccaccctcagcagccccaccccactc

SEQ ID NO: 795729 - DNA, 120 bp, Artificial Sequence
  ENSG00000277117_16 (sequence is synthesized)
aaccctgagggtccccagggtcctgatgaagacctccgaccccagcgccaggctcctcggagcccaacagtcccaagggggcagtgctgaggggtacagccctgggccctgaccagcccc

SEQ ID NO: 795730 - DNA, 120 bp, Artificial Sequence
  ENSG00000277117_17 (sequence is synthesized)
ggcacctgccatgctggttcccggaatgaatcagctgctgactgtctccagaagggctggaaaggatgctgccaggtgacccgaggtgcactcgccccagggagatggagtagacagcct

SEQ ID NO: 795731 - DNA, 120 bp, Artificial Sequence
  ENSG00000277117_18 (sequence is synthesized)
ggcctggccctcgggacacattgtctgccccggggctatgggcaaatgcccctccttcttacttcccagaatcccctgacattcccagggtcagccaggacctgttacagccctggtcac

SEQ ID NO: 795732 - DNA, 120 bp, Artificial Sequence
  ENSG00000277117_19 (sequence is synthesized)
ttggaactgacagctgtgtgaggcctgcacttctcagacccagacttagaacaaaaggaggagtgaggactcaaggctacaatgaggttccagtacttgttacaagaaattggttttctg

SEQ ID NO: 795733 - DNA, 120 bp, Artificial Sequence
  ENSG00000277117_20 (sequence is synthesized)
caaaaaaagtccctacctgggcctttaggtgaatgtgggatccactcccgcttttaacatgaaagcattagaagatgtgtggtgtttataaaagaacagttgtcatcaccgggcattgat

SEQ ID NO: 795734 - DNA, 120 bp, Artificial Sequence
  ENSG00000277117_21 (sequence is synthesized)
tggcagggacaaggagctgcttgggtgtggaaagttggggcgttggaaagtgggctgtggtgcccatttgcagtgactgtgaagtgactccaggacggacctgcgggggcacccagagat

SEQ ID NO: 795735 - DNA, 120 bp, Artificial Sequence
  ENSG00000277117_22 (sequence is synthesized)
cctaagccccaggactgagggtcgtgcatcaccactcgggtgtcccgggaggtgccctgggcccggggacctcacaggcaggacggcgacactaatgcagggagagggagtctggcccca

SEQ ID NO: 795736 - DNA, 120 bp, Artificial Sequence
  ENSG00000277117_23 (sequence is synthesized)
gcttttcctatcagaggcgattttccttcaccaggggatgggcaggaaagaggcaggggccccagaagcttctgtccctcatgcctgagggcacgggggacacttggaggctgctgtcac

SEQ ID NO: 795737 - DNA, 120 bp, Artificial Sequence
  ENSG00000277117_24 (sequence is synthesized)
cactgtgcgtccaaggccatgctctctgcgggtcagtgcctgagtctcgcctccctgctggtccctgaagccccctcagaagccctgcctgtcacgtcggcatttgtgagacctaccctg

SEQ ID NO: 795738 - DNA, 120 bp, Artificial Sequence
  ENSG00000277117_25 (sequence is synthesized)
taacgcctgcccctctcagcccaacatcagcttcctctttctcccttgctgtagacaggctggattccagtgttgggacagccatctccagaaacctgacttaagagagtaagatgcaaa

SEQ ID NO: 795739 - DNA, 120 bp, Artificial Sequence
  ENSG00000277149_0 (sequence is synthesized)
acagttctgcagccactcggtacggcgctaacgccgcgaggtagctcggtgcgtctcgcagtaccagtgcgaacctttgggctctccaggtccgagatcctagtctcctgtcggctctga

SEQ ID NO: 795740 - DNA, 120 bp, Artificial Sequence
  ENSG00000277149_1 (sequence is synthesized)
ggaggatggatccttctgcggatacatgggacctctcctcacctttaatatcattatggataaacaggttttacatttatctgggctttgctgttagcattagcctttggatttgtgtcc

SEQ ID NO: 795741 - DNA, 120 bp, Artificial Sequence
  ENSG00000277149_2 (sequence is synthesized)
agattgtcatcgagatgcagggatttgcaacagttcttgctgaagcagttacgtccctggatctgcctgtggccattattaatctaaaagaatatgatccagatgatcatctgatagaag

SEQ ID NO: 795742 - DNA, 120 bp, Artificial Sequence
  ENSG00000277149_3 (sequence is synthesized)
aggtgactagtaaaaatgtctgtgtcttcctggttgcgacatacactgacggcctaccaaccgaaagtgcagagtggttctgcaaatggttagaggaagcatccattgattttcgatttg

SEQ ID NO: 795743 - DNA, 120 bp, Artificial Sequence
  ENSG00000277149_4 (sequence is synthesized)
gcaaaacttacctgaagggtatgagagatgcggtatttggcctgggaaattctgcctatgctagccacttcaacaaggttggcaaaaatgttgacaagtggctctggatgcttggcgtgc

SEQ ID NO: 795744 - DNA, 120 bp, Artificial Sequence
  ENSG00000277149_5 (sequence is synthesized)
atcgtgtgatgagtcgaggggagggcgactgcgacgtggttaaaagcaagcacggcagcattgaggccaacttcagagcatggaagaccaagttcatctcccagctgcaggcacttcaga

SEQ ID NO: 795745 - DNA, 120 bp, Artificial Sequence
  ENSG00000277149_6 (sequence is synthesized)
aaggggagagaaagaagtcctgtggcggccactgcaagaaaggcaaatgtgaatctcaccaacatggctcagaggagagggaggaaggatctcaagagcaggacgaattgcatcacagag

SEQ ID NO: 795746 - DNA, 120 bp, Artificial Sequence
  ENSG00000277149_7 (sequence is synthesized)
acaccaaggaggaagaacccttcgagagctccagtgaagaagagtttggtggtgaggaccatcagagcctaaattccattgttgatgttgaagatttgggcaaaattatggatcacgtga

SEQ ID NO: 795747 - DNA, 120 bp, Artificial Sequence
  ENSG00000277149_8 (sequence is synthesized)
agaaagaaaagagagaaaaggaacagcaggaagagaagtctggtttgttcaggaacatggggaggaatgaagatggtgaaagaagagctatgataactcctgctctccgagaagccctta

SEQ ID NO: 795748 - DNA, 120 bp, Artificial Sequence
  ENSG00000277149_9 (sequence is synthesized)
ctaaacaagtcgatgctccgagggagaggagcttgttacaaacacacattctatggaatgagagccatcgctgcatggaaaccaccccgagcttggcgtgtgctaataaatgtgtcttct

SEQ ID NO: 795749 - DNA, 120 bp, Artificial Sequence
  ENSG00000277149_10 (sequence is synthesized)
gttggtggcaccacaacaaccctgtgggcactgaatggttgtggaagatggaccagcctgaaatgatcttgaaggaagccattgaaaaccatcagaacatgattaagcagtttaaaggag

SEQ ID NO: 795750 - DNA, 120 bp, Artificial Sequence
  ENSG00000277149_11 (sequence is synthesized)
taccgggcgtcaaagcagaacgctttgaagaaggaatgacggtaaagcactgtgcattgtccctcgtgggagaaccaataatgtacccagagatcaacaggtttttgaagctactccacc

SEQ ID NO: 795751 - DNA, 120 bp, Artificial Sequence
  ENSG00000277149_12 (sequence is synthesized)
agaaaatcgaccgcccactcttcaaggatttctggcagcaattccttgacagtttaaaagccttggcagtcaagcaacaacgaactgtctacagactgatgctcgtgaaagcatggaacg

SEQ ID NO: 795752 - DNA, 120 bp, Artificial Sequence
  ENSG00000277149_13 (sequence is synthesized)
tggacgagctccaggcctacgcgcagctcgtgtccctggggaatcctgacttcatcgaagtgaagggcgttacctactgcagagaaagttcagcaagcagtcttaccatggcccatgtgc

SEQ ID NO: 795753 - DNA, 120 bp, Artificial Sequence
  ENSG00000277149_14 (sequence is synthesized)
cctggcatgaggaagtggtacagtttgtccgcgagctggtggatctgatccccgaatatgaaattgcatgtgaacacgaacactctaattgcctcctgatagcacacagaaagtttaaaa

SEQ ID NO: 795754 - DNA, 120 bp, Artificial Sequence; identical to SEQ ID NO: 734785
  ENSG00000277149_15 (sequence is synthesized)

SEQ ID NO: 795755 - DNA, 120 bp, Artificial Sequence
  ENSG00000277149_16 (sequence is synthesized)
actgggcattatttggtgccaatgaaagaagctttgatcccaaggacacaagacatcagagaaagaacaaatcaaaggctatttctggatgttgagattatctgatttcaaggtactgaa

SEQ ID NO: 795756 - DNA, 120 bp, Artificial Sequence
  ENSG00000277149_17 (sequence is synthesized)
ggacaaaaacttggatggcctcaaaaggttcttgaacaccactctgattctccaaggacgaattacgtaaattatactttcatacaaaggagacgataaggcagtaaacatggagacacg

SEQ ID NO: 795757 - DNA, 120 bp, Artificial Sequence; identical to SEQ ID NO: 734788
  ENSG00000277149_18 (sequence is synthesized)

SEQ ID NO: 795758 - DNA, 120 bp, Artificial Sequence
  ENSG00000277149_19 (sequence is synthesized)
cgtgattagaatttaactgatggttttgtattataacttctaagacctgccagaatgctagtcctgagagtgtcagacaaggaagaaatccctgggcctcttcccctcacctggcccttg

SEQ ID NO: 795759 - DNA, 120 bp, Artificial Sequence
  ENSG00000277149_20 (sequence is synthesized)
gatttcatggagcagccacttagcattgaattgcactaccctgagctaaacgtgtctgtgctttctaagataagagcttgatccctttcttctgtcttaagacagcacctcctgaaaaga

SEQ ID NO: 795760 - DNA, 120 bp, Artificial Sequence
  ENSG00000277149_21 (sequence is synthesized)
atcgaagttgtcacaactctcaattattttttaaatactgcatagattgagttttggtttattactaacccttcccaaaattgcatcggatctaaaactactagatctcatcccattccc

SEQ ID NO: 795761 - DNA, 120 bp, Artificial Sequence; identical to SEQ ID NO: 734792
  ENSG00000277149_22 (sequence is synthesized)

SEQ ID NO: 795762 - DNA, 120 bp, Artificial Sequence
  ENSG00000277149_23 (sequence is synthesized)
aggatcatttctttttgttcgtgaggtcactgtccgggcctctcatatcacgaccagacggcgggtctccatcttctttgactcctgtggccctcgctgctttacacaatctgttctata

SEQ ID NO: 795763 - DNA, 120 bp, Artificial Sequence
  ENSG00000277149_24 (sequence is synthesized)
aggttcaggtgttttcaagttggaaagatcataaatactcaaaattgttttcaagttagcaaattcttttaacagtcttttatgcaaaaattgaattaataaaataatattttgtaaaga

SEQ ID NO: 795764 - DNA, 120 bp, Artificial Sequence
  ENSG00000277149_25 (sequence is synthesized)
ggccatggagtcacagaaatccagtgggaagagtggatcaagaaaagactaatcagccaggcacggtggctcatatctgttatcccagcacattgagaggctgaggcaggcagatcactt

SEQ ID NO: 795765 - DNA, 120 bp, Artificial Sequence
  ENSG00000277150_0 (sequence is synthesized)
cccgaggccggggacttcctggcccgctaccggctggtatcgaacaagctgaagaagcggttcctgcggaagccgaacgtggcggaggccggcgagcagttcggacagctgggccgggag

SEQ ID NO: 795766 - DNA, 120 bp, Artificial Sequence
  ENSG00000277150_1 (sequence is synthesized)
gcgcccaggagtgtctgccctacgcggcctggtgccagctggcggtggcgcgctgccagcaggcgctcttccacgggcccggggaggcgctggccctcaccgaggccgcccgcctcttcc

SEQ ID NO: 795767 - DNA, 80 bp, Artificial Sequence
  ENSG00000277150_2 (sequence is synthesized)
ttcctgcggcaggagcgcgacgcgcgccagcgcctggtctgccccgccgcctacggggagccgctgcaggccgccgccag

SEQ ID NO: 795768 - DNA, 80 bp, Artificial Sequence
  ENSG00000277150_3 (sequence is synthesized)
ccgccctgcgcgacctgggccagccggccgccgccgccggtcacttccagcgcgccgcccagctccagctgccccagctg

SEQ ID NO: 795769 - DNA, 120 bp, Artificial Sequence
  ENSG00000277150_4 (sequence is synthesized)
cccctggccgcgctgcaggcgcttggcgaggccgcctcctgccagctgctggcgcgcgactacaccggcgccctggcggtcttcacgcgcatgcagcgcctggcgcgggagcacggcagc

SEQ ID NO: 795770 - DNA, 80 bp, Artificial Sequence; identical to SEQ ID NO: 793841
  ENSG00000277150_5 (sequence is synthesized)

SEQ ID NO: 795771 - DNA, 120 bp, Artificial Sequence
  ENSG00000277150_6 (sequence is synthesized)
cgcccgccaagctgctgccggagcacgcccagaccctggagaagtactcctgggaggcttttgacagccacgggcaggagagcagcggccagcttcccgaggagctctttctgctgctcc

SEQ ID NO: 795772 - DNA, 120 bp, Artificial Sequence
  ENSG00000277150_7 (sequence is synthesized)
agtctttggtcatggctacccacgaaaaggacacggaagccatcaagtcgctgcaggtggagatgtggccactgttgactgctgagcagaaccacctccttcacctcgttctgcaagaaa

SEQ ID NO: 795773 - DNA, 120 bp, Artificial Sequence
  ENSG00000277150_8 (sequence is synthesized)
ccatctccccctcaggacagggagtctgatccatcccattcacccagtgacttctttttgcccaggccgggactttttgcatcagtcacgttaaccagatgactttgcctgttaccaaac

SEQ ID NO: 795774 - DNA, 120 bp, Artificial Sequence
  ENSG00000277150_9 (sequence is synthesized)
ctcatgcatccacgtttgcgtctggggaggaataaaaagacatcgttcccgcttctgcgttttgttattcctactgccgccataggaattatttcgttggctgaacgttaccagcacccc

SEQ ID NO: 795775 - DNA, 120 bp, Artificial Sequence
  ENSG00000277150_10 (sequence is synthesized)
gagaacacattttgatagaatcagagtagaggacatggctgtcttctaaaaagccacgacatgaaaatgacaatccctttcgtctccttcctccgctgcttccacccaacgcagcctcct

SEQ ID NO: 795776 - DNA, 120 bp, Artificial Sequence
  ENSG00000277150_11 (sequence is synthesized)
gcctccgcctttgtttcatagtgaggattttattttgcacggcgccctccctctaaatacctaccctagatgatttcatcctgcccctcacttcttaacatattcctgtgtctttgtaat

SEQ ID NO: 795777 - DNA, 120 bp, Artificial Sequence
  ENSG00000277150_12 (sequence is synthesized)
ggccaaatttctccttccactcgtccgcacggtacgtcttcatgggagtcattttattccttacagcttccttgtaaccacagccctaaatccatgataaagctactcttgtactcctca

SEQ ID NO: 795778 - DNA, 120 bp, Artificial Sequence
  ENSG00000277157_0 (sequence is synthesized)
atgtctggccgcggtaagggcggaaagggtctaggtaagggtggcgccaagcgtcaccgtaaggtattgcgtgacaatatccaaggaatcaccaagcccgctatccgccgcctggctcgc

SEQ ID NO: 795779 - DNA, 120 bp, Artificial Sequence
  ENSG00000277157_1 (sequence is synthesized)
aatgtaatccgcgatgctgtcacctacacggaacacgccaaacgcaagacagtcacagccatggacgtggtgtacgcgctcaagcgccagggacgcactctttatggcttcggcggctga

SEQ ID NO: 795780 - DNA, 120 bp, Artificial Sequence
  ENSG00000277161_0 (sequence is synthesized)
actcgcggcgcggggcgcgcacgtggcttggccgggacgcctggtccggcttgctggcttcaactacggtgagatgttttgcgaccctggggtaaaatgagggtaaagcggcagcttccc

SEQ ID NO: 795781 - DNA, 120 bp, Artificial Sequence
  ENSG00000277161_1 (sequence is synthesized)
acgttctgggggagaagcgcggaagcacggtttcctgggccttcgggcgacaccaggactgggggtctttcagtagaggtcgccgcggcggagtcttgtgcgagtgcggcggagtgttgt

SEQ ID NO: 795782 - DNA, 120 bp, Artificial Sequence
  ENSG00000277161_2 (sequence is synthesized)
gcgaggccggcggacaccattaccctgatagggcctcgccgtgaggtctgaggggccgtgtgaggtgcatggcgcgccgtttcctctccaggcgctcctctcagggctacggccctagaa

SEQ ID NO: 795783 - DNA, 120 bp, Artificial Sequence
  ENSG00000277161_3 (sequence is synthesized)
gatctggcctgcaccagcccaaaggacatgacaggagtgggtagcccacgggacactggcacgagcgccatgatgggcggagacgcgcggaatcggccggcccggaagtgccagctgcct

SEQ ID NO: 795784 - DNA, 120 bp, Artificial Sequence
  ENSG00000277161_4 (sequence is synthesized)
gcgtcggccggaagtgccgcgcgggaggcggaagcggctggttcccgcgtggtttggcgggtgcagcggcagtccggctgcccttcccacgtagaccgtctgctgggggcgccggcacca

SEQ ID NO: 795785 - DNA, 120 bp, Artificial Sequence
  ENSG00000277161_5 (sequence is synthesized)
tttggagaagaaaaatgtctgaaaagcagatgaaggaagcttttgtcagtaacctcaatggaaccaccgtgctggaaatcacccagggattgtgctttcctgcattctgtatcctgtgca

SEQ ID NO: 795786 - DNA, 120 bp, Artificial Sequence
  ENSG00000277161_6 (sequence is synthesized)
gagggttcctgatcattttctcacagtacttgtgttctttttcacctacctggaaaactagattcctcactgactttgttgtcctaatagttcccatggtagccactttgaccatttggg

SEQ ID NO: 795787 - DNA, 120 bp, Artificial Sequence
  ENSG00000277161_7 (sequence is synthesized)
cttcatttatcctccttgagcttctcggtgtaattatctttggggcagggctgttgtatcaaatataccgaaggaggacctgctatgccagactgcctttcctaaaaatccttgaaaaat

SEQ ID NO: 795788 - DNA, 120 bp, Artificial Sequence
  ENSG00000277161_8 (sequence is synthesized)
tcttgaacatcagtctagaatcagaatacaatccagccatctcctgtttccgtgtaattaccagtgcgtttactgctattgctattttggctgtggacttcccactttttcccagaagat

SEQ ID NO: 795789 - DNA, 120 bp, Artificial Sequence
  ENSG00000277161_9 (sequence is synthesized)
ttgccaaaactgagctctatgggacaggagcaatggattttggagtaggtggctttgtttttgggtctgcaatggtttgtctagaggtcaggaggagaaaatatatggaagggtccaaat

SEQ ID NO: 795790 - DNA, 120 bp, Artificial Sequence
  ENSG00000277161_10 (sequence is synthesized)
tgcattactttacaaactcattgtactctgtttggccattagtcttcctaggaatcggacgattagccattataaaatcaataggctatcaggaacatttaacagagtatggagttcact

SEQ ID NO: 795791 - DNA, 120 bp, Artificial Sequence
  ENSG00000277161_11 (sequence is synthesized)
atttttcccctaaataagtcctggattattgccctcggcattactgtattataccagctagcccttgactttacctcactgaagaggttaatattatatggcactgatggtagtggcaca

SEQ ID NO: 795792 - DNA, 120 bp, Artificial Sequence
  ENSG00000277161_12 (sequence is synthesized)
cgggttggtctattaaatgccaaccgcgaaggaataatctctaccctggggtatgtggcaatacacatggctggtgtgcaaacagggttatatatgcataagaaccgatcacatatcaaa

SEQ ID NO: 795793 - DNA, 120 bp, Artificial Sequence
  ENSG00000277161_13 (sequence is synthesized)
gacttgataaaagtagcctgttttcttttactggcagctattagcctcttcatatctctttacgtagttcaagtaaatgtagaagcagtatctcgaagaatggcaaatttagccttttgt

SEQ ID NO: 795794 - DNA, 120 bp, Artificial Sequence
  ENSG00000277161_14 (sequence is synthesized)
atttggatagttgcttctagcctgatccttcttagtagtttattactgggtgatataattttgagttttgccaaatttctaattaaaggagctctagtaccatgttcttggaaacttatc

SEQ ID NO: 795795 - DNA, 120 bp, Artificial Sequence
  ENSG00000277161_15 (sequence is synthesized)
cagtcacctgttacaaataaaaagcattcagaatctctagtccctgaagccgaaagaatggaacccagtctttgtttaatcacagctctaaacagaaaacagttaatatttttcttgctg

SEQ ID NO: 795796 - DNA, 120 bp, Artificial Sequence
  ENSG00000277161_16 (sequence is synthesized)
tcaaatataacaactggcctgatcaacctgatggtagatacattacacagcagtaccttgtgggccttatttgtggtcaatctctatatgttttccaactgtttaattgtatatgtacta

SEQ ID NO: 795797 - DNA, 120 bp, Artificial Sequence
  ENSG00000277161_17 (sequence is synthesized)
tatttgcaagataagactgtacaattttggtgatcagcaggagtaggatatataagtatttgggcaatatttaatgaggaatattaattgtaaagaaattgtgcttttggcaacagtgtt

SEQ ID NO: 795798 - DNA, 120 bp, Artificial Sequence
  ENSG00000277161_18 (sequence is synthesized)
taattgtaaagaaattgtgcttttggcaacagtgttaaccatattttattataaaatagtttcagtcatctaaacagcagtgatgcttaattatttttttttttgagacagagtcttgct

SEQ ID NO: 795799 - DNA, 62 bp, Artificial Sequence
  ENSG00000277161_19 (sequence is synthesized)
actcctgaactcaagtgatacaatgcttaatattttaatgtatctcaacaataaaaccaaga

SEQ ID NO: 795800 - DNA, 120 bp, Artificial Sequence
  ENSG00000277161_20 (sequence is synthesized)
tattttaatgtatctcaacaataaaaccaagaagaaacaaagccttttgacttgttagaatgtattaagtagtattttaaagaaactttatagttgtgacattgaaagactgttggggtg

SEQ ID NO: 795801 - DNA, 120 bp, Artificial Sequence
  ENSG00000277161_21 (sequence is synthesized)
gggggaggaaaatttttactttccatcttaatgtaaccttatgctattctgtatttttactgtatattgcttttacaataaatataaaatgaaatgtttatgttgacatttcagtgtgaa

SEQ ID NO: 795802 - DNA, 120 bp, Artificial Sequence
  ENSG00000277203_0 (sequence is synthesized)
gtcgggaagtgcttggggcggcgagcatggcggcagcggctgcaggcctgggcggcggcggcgccggcccgggacccgaggccggggacttcctggcccgctaccggctggtatcgaaca

SEQ ID NO: 795803 - DNA, 120 bp, Artificial Sequence
  ENSG00000277203_1 (sequence is synthesized)
agctgaagaagcggttcctgcggaagccgaacgtggcggaggccggcgagcagttcggacagctgggccgggagctgcgcgcccaggagtgtctgccctacgcggcctggtgccagctgg

SEQ ID NO: 795804 - DNA, 120 bp, Artificial Sequence
  ENSG00000277203_2 (sequence is synthesized)
gtgtctgccctacgcggcctggtgccagctggcggtggcgcgctgccagcaggcgctcttccacgggcccggggaggcgctggccctcaccgaggccgcccgcctcttcctgcggcagga

SEQ ID NO: 795805 - DNA, 80 bp, Artificial Sequence
  ENSG00000277203_3 (sequence is synthesized)
ccgcctacggggagccgctgcaggccgccgccagcgccctgggcgccgcggtgcgtctgcacctcgagctgggccagccg

SEQ ID NO: 795806 - DNA, 80 bp, Artificial Sequence
  ENSG00000277203_4 (sequence is synthesized)
ccagcgcgccgcccagctccagctgccccagctgcccctggccgcgctgcaggcgcttggcgaggccgcctcctgccagc

SEQ ID NO: 795807 - DNA, 120 bp, Artificial Sequence
  ENSG00000277203_5 (sequence is synthesized)
cctcctgccagctgctggcgcgcgactacaccggcgccctggcggtcttcacgcgcatgcagcgcctggcgcgggagcacggcagccacccggtgcagtcactgccgccgcccccgccgc

SEQ ID NO: 795808 - DNA, 120 bp, Artificial Sequence
  ENSG00000277203_6 (sequence is synthesized)
ggggcgacgcccgccctaccggccgcgctgcttcctccgaactccggctcggcggcgccctctcccgccgccctgggcgccttctcggacgtgctggtccgctgcgaggtgtcccgcgtg

SEQ ID NO: 795809 - DNA, 120 bp, Artificial Sequence; identical to SEQ ID NO: 795771
  ENSG00000277203_7 (sequence is synthesized)

SEQ ID NO: 795810 - DNA, 120 bp, Artificial Sequence; identical to SEQ ID NO: 795772
  ENSG00000277203_8 (sequence is synthesized)

SEQ ID NO: 795811 - DNA, 120 bp, Artificial Sequence
  ENSG00000277203_9 (sequence is synthesized)
ccatctccccctcaggacagggagtctgatccatcccattcacccagtgacttctttttgcccaggcctggactttttgcatcagtcacgttaaccagatgactttgcctgttaccaaac

SEQ ID NO: 795812 - DNA, 120 bp, Artificial Sequence; identical to SEQ ID NO: 795774
  ENSG00000277203_10 (sequence is synthesized)

SEQ ID NO: 795813 - DNA, 120 bp, Artificial Sequence
  ENSG00000277203_11 (sequence is synthesized)
gagaacacattttgatagaatcagagtagaggacatggctgtcttctaaaaagccacgacatgaaaatgacaatccctttcgtctccttcctccgctgcttccacctaacgcagcctcct

SEQ ID NO: 795814 - DNA, 120 bp, Artificial Sequence; identical to SEQ ID NO: 795776
  ENSG00000277203_12 (sequence is synthesized)

SEQ ID NO: 795815 - DNA, 120 bp, Artificial Sequence; identical to SEQ ID NO: 795777
  ENSG00000277203_13 (sequence is synthesized)

SEQ ID NO: 795816 - DNA, 120 bp, Artificial Sequence
  ENSG00000277224_0 (sequence is synthesized)
gcatttctctttaggttgtggacgaagtgtttatttatcatgcctgaacctgctaagtccgctcctgctccaaaaaagggctccaaaaaggcggtgaccaaggcgcagaagaaggatggt

SEQ ID NO: 795817 - DNA, 120 bp, Artificial Sequence
  ENSG00000277224_1 (sequence is synthesized)
aagaagcgcaagcgtagccgcaaggagagctattccgtgtacgtgtacaaggtgctaaagcaggtccaccccgacaccggcatctcatccaaggccatgggcatcatgaactccttcgtc

SEQ ID NO: 795818 - DNA, 120 bp, Artificial Sequence
  ENSG00000277224_2 (sequence is synthesized)
ggccatgggcatcatgaactccttcgtcaacgatatcttcgagcgcatcgctggcgaggcttcccgcctggcgcattacaacaagcgctccaccatcacctccagggagatccagacggc

SEQ ID NO: 795819 - DNA, 120 bp, Artificial Sequence
  ENSG00000277224_3 (sequence is synthesized)
gctaagcacgccgtgtcagagggcaccaaggccgtcaccaagtacaccagctctaagtaattctaacgtcttcatacccaatcccaaaggctcttttaagagccacccactttttcagct

SEQ ID NO: 795820 - DNA, 120 bp, Artificial Sequence
  ENSG00000277224_4 (sequence is synthesized)
aaggaaaatgctatacttaaccgtagcatgtttgttttaccccaagtgctggttagaaggctagcccattgtgctgataagcacatttttcttatgttgtgctgtgatgtgtcccttgtc

SEQ ID NO: 795821 - DNA, 120 bp, Artificial Sequence
  ENSG00000277224_5 (sequence is synthesized)
aaattggtttcataagaaaagaacttttgaaatatctcttttgctactgacatagtgtgagggaaaggaatgtcttccttaattccggtttagtcatcgcagcattggcgaatttagctg

SEQ ID NO: 795822 - DNA, 120 bp, Artificial Sequence
  ENSG00000277224_6 (sequence is synthesized)
gttaaaataatgtaatcaaattctttaaaatataaggaaagcaagacaagtaatgtgcatgaaaactgaaaaaatgtgaacacccgagcctggatgcagcactaataatcaacattgttc

SEQ ID NO: 795823 - DNA, 120 bp, Artificial Sequence
  ENSG00000277224_7 (sequence is synthesized)
ttggtttagttaaagaaaatttggccactggcaaaataccatttgggagtaatgagacacacccctaatcctaaaatattttcttgtcacttcctcaaagttgtttttgactttttttcc

SEQ ID NO: 795824 - DNA, 120 bp, Artificial Sequence
  ENSG00000277224_8 (sequence is synthesized)
ttcagggttgacttcatatgtgttcattttattctaataagcaaaagttgtaatttttaagtgaaaaaataatttatgtcattctacttacaaatacaatttttctattctatatactca

SEQ ID NO: 795825 - DNA, 120 bp, Artificial Sequence
  ENSG00000277258_0 (sequence is synthesized)
gagagcccgaacaggaagagggtacagctttgtgcaggtcacatgcccactgcagccctccagcctctggtccccagagcggactttggaagctgaactgcttttgttgctggaagactt

SEQ ID NO: 795826 - DNA, 120 bp, Artificial Sequence
  ENSG00000277258_1 (sequence is synthesized)
atgttataatttaccctgggtggaccagggtcgtacaaaagggcaacgctccccagtccccccacccccgaccccggaatcatgcatcggactacacggatcaaaatcacagagctgaac

SEQ ID NO: 795827 - DNA, 120 bp, Artificial Sequence
  ENSG00000277258_2 (sequence is synthesized)
ccccacctcatgtgtgccctctgcggggggtacttcatcgacgccaccactatcgtggagtgcctgcattccttctgcaaaacctgcatcgtgcgctacctggagaccaacaaatactgc

SEQ ID NO: 795828 - DNA, 120 bp, Artificial Sequence
  ENSG00000277258_3 (sequence is synthesized)
cccatgtgtgacgtgcaggtccataaaacccggccgctgctgagcatcaggtctgacaaaacacttcaagacattgtctacaaattggtccctgggctttttaaagatgagatgaaacgg

SEQ ID NO: 795829 - DNA, 120 bp, Artificial Sequence
  ENSG00000277258_4 (sequence is synthesized)
cggcgggatttctatgcagcgtaccccctgacggaggtccccaacggctccaatgaggaccgcggcgaggtcttggagcaggagaagggggctctgagtgatgatgagattgtcagcctc

SEQ ID NO: 795830 - DNA, 120 bp, Artificial Sequence
  ENSG00000277258_5 (sequence is synthesized)
tccatcgaattctacgaaggtgccagggaccgggacgagaagaagggccccctggagaatggggatggggacaaagagaaaacaggggtgcgcttcctgcgatgcccagcagccatgacc

SEQ ID NO: 795831 - DNA, 120 bp, Artificial Sequence
  ENSG00000277258_6 (sequence is synthesized)
gtcatgcatcttgccaagtttctccgcaacaagatggatgtgcccagcaagtacaaggtggaggttctgtacgaggacgagccactgaaggaatactacaccctcatggacatcgcctac

SEQ ID NO: 795832 - DNA, 120 bp, Artificial Sequence
  ENSG00000277258_7 (sequence is synthesized)
atctacccctggcggcggaacgggcctctccccctcaagtaccgtgtccagccagcctgcaagcggctcaccctagccacggtgcccaccccctccgagggcaccaacaccagcggggcg

SEQ ID NO: 795833 - DNA, 120 bp, Artificial Sequence
  ENSG00000277258_8 (sequence is synthesized)
tccgagtgtgagtcagtcagcgacaaggctcccagccctgccaccctgccagccacctcctcctccctgcccagcccagccaccccatcccatggctctcccagttcccatgggcctcca

SEQ ID NO: 795834 - DNA, 120 bp, Artificial Sequence
  ENSG00000277258_9 (sequence is synthesized)
ccactcccccttcgacagccagtggggccaccacagctgccaacgggggtagcttgaactgcctgcagacaccatcctccaccagcagggggcgcaagatgactgtcaacggcgctcccg

SEQ ID NO: 795835 - DNA, 120 bp, Artificial Sequence
  ENSG00000277258_10 (sequence is synthesized)
tgccccccttaacttgaggccagggaccctctcccttcttccagccaagcctctccactccttccactttttctgggcccttttttccacctcttctactttccccagctcttcccacct

SEQ ID NO: 795836 - DNA, 120 bp, Artificial Sequence
  ENSG00000277258_11 (sequence is synthesized)
tgggggtggggggcgggttttataaataaatatatatatatatgtacataggaaaaaccaaatatacatacttattttctatggaccaaccagattaatttaaatgccacaggaaacaaa

SEQ ID NO: 795837 - DNA, 120 bp, Artificial Sequence
  ENSG00000277258_12 (sequence is synthesized)
ctttatgtgtgtgtgtatgtgtggaaaatggtgttcattttttttggggggggtcttgtgtaatttgctgtttttgggggtgcctggagatgaactggatgggccactggagtctcaata

SEQ ID NO: 795838 - DNA, 120 bp, Artificial Sequence
  ENSG00000277258_13 (sequence is synthesized)
aagctctgcaccatcctcgctgtttcccaaggcaggtggtgtgttgggggccccttcagacccaaagctttaggcatgattccaactggctgcatataggagtcagttagaatcgtttct

SEQ ID NO: 795839 - DNA, 120 bp, Artificial Sequence
  ENSG00000277258_14 (sequence is synthesized)
ttctctccccgtttctctccccatcttggctgctgtcctgcctctgaccagtggccgccccccacgttgttgaatgtccagaaattgctaagaacagtgccttttacaaatgcagtttat

SEQ ID NO: 795840 - DNA, 120 bp, Artificial Sequence
  ENSG00000277258_15 (sequence is synthesized)
ccctggttctgaggagcaagtgcagggtggaggtggcacctgcatcacctcctcctcttgcagtggaaactttgtgcaaagaatagatagttctgcctctttttttttttttcctgtgtg

SEQ ID NO: 795841 - DNA, 120 bp, Artificial Sequence
  ENSG00000277258_16 (sequence is synthesized)
tgtggcctttgcatcatttatcttgtggaaaagaagattcaggccctgagaggtctcagctcttggaggagggctaaggctttagcattgtgaagcgctgcacccccaccaaccttaccc

SEQ ID NO: 795842 - DNA, 120 bp, Artificial Sequence
  ENSG00000277258_17 (sequence is synthesized)
tcaccggggaaccctcactagcaggactggtggtggagtctcacctggggcctagagtggaagtgggggtgggttaacctcacacaagcacagatcccagactttgccagaggcaaacag

SEQ ID NO: 795843 - DNA, 120 bp, Artificial Sequence
  ENSG00000277258_18 (sequence is synthesized)
gtggctgcaggctcgagctggggtcactcggcggccagtgtgcgcaggtctcctggtcgccggccagagggcgaaagcattcacccgaggcccccagcttcgcggctgccttggctgcga

SEQ ID NO: 795844 - DNA, 120 bp, Artificial Sequence
  ENSG00000277258_19 (sequence is synthesized)
gcaacgagggaagaggaggcaggcgctccaaaactgggcgaagattcctatcctaatttctaactcgagcctcccaccgtcagtgcgcttaatggcgctgctggccggatggataatcga

SEQ ID NO: 795845 - DNA, 120 bp, Artificial Sequence
  ENSG00000277258_20 (sequence is synthesized)
gctctctggagggacagacgcggccgccatccctaataaatcgtgaataacgaatgagggaatcgaccatcctcatgaggcccacgggcgtccagtaacgcagtatcgattcgcttcccc

SEQ ID NO: 795846 - DNA, 120 bp, Artificial Sequence
  ENSG00000277258_21 (sequence is synthesized)
ggcgtcggcctcaccgctactcccggcgtttccaagcctccctcctcgttctctccctcctgccggagccactgcggaccggagccccagcgccaggtttctcccctcccgccgcccggg

SEQ ID NO: 795847 - DNA, 120 bp, Artificial Sequence
  ENSG00000277258_22 (sequence is synthesized)
cgagcgacacggctgcggcccccctcccctcccttccctccctccctcccatccccccctccccgagacccaccggaccccgaacccagatggccgaaacgggctccccgtcttaacgat

SEQ ID NO: 795848 - DNA, 120 bp, Artificial Sequence
  ENSG00000277258_23 (sequence is synthesized)
ccagctgaggcccggtcacctggtcaggacagagcaactgcatctaaaagcacaagaagacagaaacctgtaagctctgaccccacccccaccccttgagaggtcagcggaccacctcct

SEQ ID NO: 795849 - DNA, 120 bp, Artificial Sequence
  ENSG00000277258_24 (sequence is synthesized)
tagggacagaccctggcaggtcgctgcccaccgagatttcctcaagtgtgcatagatctgagaggagtcgggagtcgagactcgagattccatcatagcgtaggtgtgtggggttgggag

SEQ ID NO: 795850 - DNA, 120 bp, Artificial Sequence
  ENSG00000277258_25 (sequence is synthesized)
ccccctgatgggcttgtctgtgtttgcaccttgtcctgtgtctgaggtcctgtgactgtaccctcctttgccctgggacatctgtatctcttggctttgtaataaatgctgcatactttc

SEQ ID NO: 795851 - DNA, 120 bp, Artificial Sequence
  ENSG00000277258_26 (sequence is synthesized)
ggactccccctgcctttccctctcctggcctgtaaccctctggggattgggatgggggccggccgttcttcgcaagccccgatgggagggggaggctctgagccgatcctgccttcgcac

SEQ ID NO: 795852 - DNA, 120 bp, Artificial Sequence
  ENSG00000277258_27 (sequence is synthesized)
cccccgcgccccgtcagtccctagcccagcttgccccgtccgcctttctttctcccttttttctgtccctttttccctttcctctcttccaagatggccgaaacgggctccccgtcttaa

SEQ ID NO: 795853 - DNA, 120 bp, Artificial Sequence
  ENSG00000277277_0 (sequence is synthesized)
agatgcagatgtgcaagcttttaaaaacacttgagaagccaccatgcctcgctttgcaagccctcttttaagaaatgtcattatcagaagtcaatttgatggcatcaagaggaagcaatg

SEQ ID NO: 795854 - DNA, 120 bp, Artificial Sequence
  ENSG00000277277_1 (sequence is synthesized)
cctccaatatctgaaaaccctgagaacactgcaatatgatggatttaagaccgtatattttggggaaaccaatatcccagaaagtctcgtaactggggaagatattagtgatggatattt

SEQ ID NO: 795855 - DNA, 120 bp, Artificial Sequence
  ENSG00000277277_2 (sequence is synthesized)
catacaaaccccaacttggtgtattgtgcatgctgcgggtagtcaaggatgggtgccttggaaatatcgggtgttcctaagagacgagctgtgtatcaaacaagaagacagcctcttctc

SEQ ID NO: 795856 - DNA, 120 bp, Artificial Sequence
  ENSG00000277277_3 (sequence is synthesized)
tgagttctgtgatgtggtgaggaaggcctatggaaagtgtgtcatcgtggtcaaagagagaaggcagcaggaagagcagaggccaaaggaagacagagaggctgagggccagttctatat

SEQ ID NO: 795857 - DNA, 120 bp, Artificial Sequence
  ENSG00000277277_4 (sequence is synthesized)
ccctacagtcattagcttagcaagcattatgtgttgcccagaggtggccaagtcctgtggccatgaactactctctctgccttccccttgtaattatctgaaccctttagactcagcctg

SEQ ID NO: 795858 - DNA, 120 bp, Artificial Sequence
  ENSG00000277277_5 (sequence is synthesized)
gtcttctctgaaatggtttatcatcaataacagaaacgagttttgtttgcagtccattgacagtggctattcttaccaatgtatacttttcagcaatttaattagcaaaggaattgaaag

SEQ ID NO: 795859 - DNA, 120 bp, Artificial Sequence
  ENSG00000277277_6 (sequence is synthesized)
gataaacgcaagcaagtggagaacattaactagcaaagtacggagatgggaaaactactatcttgggaaattttcttaagggtggttcctccaacaagcagtgaggctgctacatgtctg

SEQ ID NO: 795860 - DNA, 120 bp, Artificial Sequence
  ENSG00000277277_7 (sequence is synthesized)
attccacaccactgcagccaaagatacttcaacagcgacctcacatggggtgctgcgagaactgggttgctcctaaggatgttggcaaagcgctttgagtttactagaagtttcattaaa

SEQ ID NO: 795861 - DNA, 120 bp, Artificial Sequence
  ENSG00000277277_8 (sequence is synthesized)
atttgttggtaagttaggggtctcgactcttatcttgtgaaggctactttgagggctttgtcaaggggaggattaggtctaacccagcccaaaggtggatggcaataagcaggggtgagc

SEQ ID NO: 795862 - DNA, 120 bp, Artificial Sequence
  ENSG00000277277_9 (sequence is synthesized)
aggctgaaagttgagtggtcgaaatttaggtctgagaaaaaaagagaaccagtgtgcagtcatcccccaaaaagcccaaattaaatagtgtgccaagtttccacccaccaaagtaatcca

SEQ ID NO: 795863 - DNA, 120 bp, Artificial Sequence
  ENSG00000277277_10 (sequence is synthesized)
cagggatccagcttgccatgggcgagatattgtccagatggtcgccaagcaagactccctcctcccgattgtccttccttccttgtcggcaaagtggtggaggatgagtgagaggcagcc

SEQ ID NO: 795864 - DNA, 120 bp, Artificial Sequence
  ENSG00000277277_11 (sequence is synthesized)
gcagaggggaaactccatccggaccctccaaggggagtaggtggtcccagttaggacctggaaagttatgacagtggtgggttcaagtgggctatggtgggcaaaggggtggcacgcatg

SEQ ID NO: 795865 - DNA, 120 bp, Artificial Sequence
  ENSG00000277277_12 (sequence is synthesized)
ggggtctgcagagaccacttatccagccaatctccccgccaactccaggaattccagcaggtcattagactgtgccgtggagtttcatctcgagaccctgtagctgagccacttgcagct

SEQ ID NO: 795866 - DNA, 120 bp, Artificial Sequence
  ENSG00000277277_13 (sequence is synthesized)
gggacaacacctccctatttaggtttggggctgctgccgatgtctgttgtaagaatctgtggttgtctttttcatttttatagaaaaagactacccctattaaacatatcataaaattca

SEQ ID NO: 795867 - DNA, 62 bp, Artificial Sequence
  ENSG00000277282_0 (sequence is synthesized)
atggactggaattggaggatcctgtttttggtggtcatagctgcgggtgcccagtcccaggt

SEQ ID NO: 795868 - DNA, 120 bp, Artificial Sequence
  ENSG00000277282_1 (sequence is synthesized)
ctatgcacagaagttccaggccagagtcaccataaccagggacacatccatgagcacagcctacatggagctaagcagtctgagatctgaggacacggccatgtattactgtgtgagaga

SEQ ID NO: 795869 - DNA, 120 bp, Artificial Sequence
  ENSG00000277288_0 (sequence is synthesized)
gagaagacaaaatgaggatgtactcctcagatgctcacgaaaggcctccttccccttctttgggaacgacccccccccaccccctccccccaacaggcagtcccaggccgcgccaggact

SEQ ID NO: 795870 - DNA, 120 bp, Artificial Sequence
  ENSG00000277288_1 (sequence is synthesized)
cggccgcaggcaactcggaggagcgggagcccaggggcctcaggagggcctcgggagtggggagcagctgtaagcgccctacagtttgcatgggaaggcaacagggacttcccttttgca

SEQ ID NO: 795871 - DNA, 120 bp, Artificial Sequence
  ENSG00000277288_2 (sequence is synthesized)
ctgtctgcgggtaccgctgttccagccctgagaggacgaggggacgctgcgctgtggggaaagtccgggtggcaggaggtggcggggctcctggaggaggtgctgggatgcgctgctgtg

SEQ ID NO: 795872 - DNA, 120 bp, Artificial Sequence
  ENSG00000277288_3 (sequence is synthesized)
gctgcagagaaagaaatataaacaaagagcttgaattattttgaaataactgttggtagctggactgtgttctcttgaccgcaacattgctctgggactgaatcgcgtgggtctctgctc

SEQ ID NO: 795873 - DNA, 120 bp, Artificial Sequence
  ENSG00000277288_4 (sequence is synthesized)
catgaggtcagcttctaaaccagtttcttcccataacctcctggaccaagtcccaagcaaggcccagaggagctcaaggacccactctccccgggacactcctcgctctctagttggaag

SEQ ID NO: 795874 - DNA, 120 bp, Artificial Sequence
  ENSG00000277288_5 (sequence is synthesized)
gaggaaatgaatgtcccccagtaattgaaggctgctcatgtttgtgtagaaaagccaagcacaggcccatattctagagggttgcttgcggcaggcggaaggccatcgaaggcaaaacga

SEQ ID NO: 795875 - DNA, 120 bp, Artificial Sequence
  ENSG00000277288_6 (sequence is synthesized)
aacaaatgaaaaggcatcttttgaagctaatggaacagatcaggtggtcaaaaatggataaacaatggcatttggagcaaaactttcagcttcttcgttttagttcgacagccccaggag

SEQ ID NO: 795876 - DNA, 120 bp, Artificial Sequence
  ENSG00000277288_7 (sequence is synthesized)
ggcatggaagcttctcgccctcctcatatgtcttgccccaggcatctctgtgtctctctcctctgtaacatcctttatagtaaatgtaagtaggcctttccctgagctctgtgagctgct

SEQ ID NO: 795877 - DNA, 120 bp, Artificial Sequence
  ENSG00000277288_8 (sequence is synthesized)
ctagcgaattattcaagtgttaggaggcgtcctgggaacattgattcgtgggaacgccagtgggtcagaagcacaggtaagaccaccttgccattggcattggaagtggagggcaggctt

SEQ ID NO: 795878 - DNA, 120 bp, Artificial Sequence
  ENSG00000277288_9 (sequence is synthesized)
gcagcatggatgctcaggcaactgacccgtcaggactgcagcaaatgaacagaagctgggggagagcgcgggctggtgctgtacggagctctggcgcagaaggcgctcaccaggggtgcc

SEQ ID NO: 795879 - DNA, 120 bp, Artificial Sequence
  ENSG00000277288_10 (sequence is synthesized)
tctcagggttgcggggagcagaggcgttctgggtggtgaacgtccccagcctgccctccctgctcactgcgaggtcgcgcaccggctctgctccaggccttccctcagccctggcctcca

SEQ ID NO: 795880 - DNA, 120 bp, Artificial Sequence
  ENSG00000277288_11 (sequence is synthesized)
ggcagtttccatttttgccaggtggattctgtacggcttcatttattcagaatctggatcaacaaatgaacactcagagaggaaaagggtgtttggaggggtggagaggtttccaagcag

SEQ ID NO: 795881 - DNA, 120 bp, Artificial Sequence
  ENSG00000277288_12 (sequence is synthesized)
gtgcccacctgagggccccctgaaaggggacttaaagccgagtttccagctgggccaccctttttttttctttctttctttcagaaatataaacaaagagcttgaattattttgaaataa

SEQ ID NO: 795882 - DNA, 120 bp, Artificial Sequence; identical to SEQ ID NO: 793159
  ENSG00000277322_0 (sequence is synthesized)

SEQ ID NO: 795883 - DNA, 78 bp, Artificial Sequence
  ENSG00000277322_1 (sequence is synthesized)
atgatgtccaaagaaaccagacagagcaaattggccgaggccaaggaacagttgacagaccatcatccccagaccaac

SEQ ID NO: 795884 - DNA, 120 bp, Artificial Sequence
  ENSG00000277322_2 (sequence is synthesized)
ggccaaggaacagttgacagaccatcatccccagaccaaccctagtgttggtacagcagcaagcgacaccaaaaagaagaaaataaataatggcactaaccctgagacaaccacttctgg

SEQ ID NO: 795885 - DNA, 120 bp, Artificial Sequence
  ENSG00000277322_3 (sequence is synthesized)
tggttgccactcgcctgaggatgaacagaaggcaagccatcaacatcaggaagccctaaggagggagctagaggcccaggttcataccatacgaatccttacatgtcagaaaactgagct

SEQ ID NO: 795886 - DNA, 120 bp, Artificial Sequence
  ENSG00000277322_4 (sequence is synthesized)
tcagatggcactctactacagccagcatgctgtcaagcagttggaaggagaggccagggatctgatcagccgcctgcatgattcatggaagtttgcaggagagttagagcaggctctctc

SEQ ID NO: 795887 - DNA, 120 bp, Artificial Sequence
  ENSG00000277322_5 (sequence is synthesized)
tgctgtcgctacacagaagaagaaggcagataggtacattgaggagttaacaaaggagagggacgccctgagtctggaactgtacaggaacacgataactgatgaggagctgaaggagaa

SEQ ID NO: 795888 - DNA, 120 bp, Artificial Sequence
  ENSG00000277322_6 (sequence is synthesized)
aaatgccgaactacaagaaaaacttcaacttgtagaatctgaaaagtctgagatccagctcaacgtaaaggagctaaaaaggaaactggagagggccaagctcctgctgccacagcagca

SEQ ID NO: 795889 - DNA, 120 bp, Artificial Sequence
  ENSG00000277322_7 (sequence is synthesized)
gctgcaggcggaggctgaccacctgggtaaggagctgcagagtgtgtcagcaaagctccaagcccaggtggaagagaacgagttgtggaaccgcctgaaccagcaacaggaggagaagat

SEQ ID NO: 795890 - DNA, 120 bp, Artificial Sequence
  ENSG00000277322_8 (sequence is synthesized)
ggaagagaagatgcacgagcaggagaagatacgggagcaggaagagaagaggcaggaggaggagaagatacgcgagcaggagaagaggcaggagcaggaggcgaagatgtggaggcagga

SEQ ID NO: 795891 - DNA, 120 bp, Artificial Sequence
  ENSG00000277322_9 (sequence is synthesized)
ggagaagatacgggagcaggaagagaagatacgggagcaggagaaaaagatgtggaggcaggaggagaagattcatgagcaggagaagatacgggaggaggagaagaggcaggagcagga

SEQ ID NO: 795892 - DNA, 120 bp, Artificial Sequence
  ENSG00000277322_10 (sequence is synthesized)
gcaggaggagaagataagggagcaggaggagatatggaggcaaaaggagaagatgcacgagcaggaggagaagatacggaagcaggaggagaaggtgtggaggcaggaggagaagatacg

SEQ ID NO: 795893 - DNA, 70 bp, Artificial Sequence
  ENSG00000277322_11 (sequence is synthesized)
gtggagggaggaagagaagatgcatgagcaggagaagatatgggaggaggagaagaggcaggagcaggag

SEQ ID NO: 795894 - DNA, 83 bp, Artificial Sequence
  ENSG00000277322_12 (sequence is synthesized)
aggaggagatgtggagggaggaagagaagatgcatgagcaggagaagatatgggaggaggagaagaggcaggagcaggaggat

SEQ ID NO: 795895 - DNA, 83 bp, Artificial Sequence
  ENSG00000277322_13 (sequence is synthesized)
gaaggaaagaggcaggagcaggaggagaagatgtggaagcaggaggagaagataagggagcaggaggagaagatacgggagca

SEQ ID NO: 795896 - DNA, 86 bp, Artificial Sequence
  ENSG00000277322_14 (sequence is synthesized)
atgacgagaagatgtgtgagcaggaagagaagatgcaagaacaggaggagacgatgtggaggcaggaggagaagataagggagcag

SEQ ID NO: 795897 - DNA, 72 bp, Artificial Sequence
  ENSG00000277322_15 (sequence is synthesized)
atgatgcaggaacaggaagagaagatgtgggagcaggaggagaagatgtgtgagcaggaagagtgggagcag

SEQ ID NO: 795898 - DNA, 120 bp, Artificial Sequence
  ENSG00000277322_16 (sequence is synthesized)
gggagcaggaagtgaggctgcggcagcaggaggagaagatgcaggaacactaggagcacctggaagctgccatctaatgagcacatgacaagaaggcaaagacaataaacatgtaaaagc

SEQ ID NO: 795899 - DNA, 120 bp, Artificial Sequence
  ENSG00000277322_17 (sequence is synthesized)
cggcagcaaggcctggagaagagtaagccgccatgtgactgtttagaatatagtctgagcacaaacctgaaaaaaaaattttatttattttaaattgtggcaaaatactggccaggcatg

SEQ ID NO: 795900 - DNA, 78 bp, Artificial Sequence
  ENSG00000277322_18 (sequence is synthesized)
caggcatggtagctcacgcctgtaatcctagcaatttgggaggccgaggtaaatcaaaaattagccgggcatggtggc

SEQ ID NO: 795901 - DNA, 120 bp, Artificial Sequence; identical to SEQ ID NO: 793174
  ENSG00000277322_19 (sequence is synthesized)

SEQ ID NO: 795902 - DNA, 120 bp, Artificial Sequence; identical to SEQ ID NO: 793175
  ENSG00000277322_20 (sequence is synthesized)

SEQ ID NO: 795903 - DNA, 120 bp, Artificial Sequence; identical to SEQ ID NO: 793176
  ENSG00000277322_21 (sequence is synthesized)

SEQ ID NO: 795904 - DNA, 120 bp, Artificial Sequence; identical to SEQ ID NO: 793177
  ENSG00000277322_22 (sequence is synthesized)

SEQ ID NO: 795905 - DNA, 120 bp, Artificial Sequence
  ENSG00000277322_23 (sequence is synthesized)
cactcaagtcctgactgaggtctccaattaccttccaacaattgtttttgattgggggcggggcacatttttatccagtttttctaactgctcttgtggggaggcgaatccgtaacaagc

SEQ ID NO: 795906 - DNA, 120 bp, Artificial Sequence
  ENSG00000277322_24 (sequence is synthesized)
tcctctgcctttactgaaagttgaaaaccttcatctgtcctttttttgttgtttttgagatggagtattgcgctgttgcccaggctctagtgcaatggcacgatctctgctcactgtaac

SEQ ID NO: 795907 - DNA, 90 bp, Artificial Sequence
  ENSG00000277322_25 (sequence is synthesized)
cccgagtagcgatacctttaatagaggcaggatttcaccatgttttccaggctggtctcgagctcctgactcaggtgatctacctgcctc

SEQ ID NO: 795908 - DNA, 79 bp, Artificial Sequence
  ENSG00000277322_26 (sequence is synthesized)
tctggcccatctgtcttttaaaacatgtttttaattggaggtataatttctattagtgaaatgcacaggtctggtttac

SEQ ID NO: 795909 - DNA, 120 bp, Artificial Sequence; identical to SEQ ID NO: 793182
  ENSG00000277322_27 (sequence is synthesized)

SEQ ID NO: 795910 - DNA, 120 bp, Artificial Sequence; identical to SEQ ID NO: 793183
  ENSG00000277322_28 (sequence is synthesized)

SEQ ID NO: 795911 - DNA, 120 bp, Artificial Sequence; identical to SEQ ID NO: 793184
  ENSG00000277322_29 (sequence is synthesized)

SEQ ID NO: 795912 - DNA, 120 bp, Artificial Sequence
  ENSG00000277363_0 (sequence is synthesized)
agacacacactcaaacacacacacactcgctctcgcacactcggtgacacgcccgcgcgcgcgctcacccacacgcccggccgccggcgccctcccagctggtccaccccggcggggccc

SEQ ID NO: 795913 - DNA, 120 bp, Artificial Sequence
  ENSG00000277363_1 (sequence is synthesized)
ccgcccgatggggaacgctccgtcccaagatccggagcggagcagcccccccatgctgtctgcggacgatgcggagtacccgcgggagtaccggaccctggggggcgggggcggcggggg

SEQ ID NO: 795914 - DNA, 120 bp, Artificial Sequence
  ENSG00000277363_2 (sequence is synthesized)
cagcgggggccggcgcttctccaacgtggggctggtgcacacgtccgagcggcggcacacggtgatcgcggcccagagtctggaggcgctcagcgggctccagaaggcggacgccgaccg

SEQ ID NO: 795915 - DNA, 120 bp, Artificial Sequence
  ENSG00000277363_3 (sequence is synthesized)
caagcgtgatgccttcatggaccacctgaagagcaagtacccacagcacgccctggccctgcgaggccagcaggacaggatgcgagagcagccaaactactggagtttcaagacccgcag

SEQ ID NO: 795916 - DNA, 120 bp, Artificial Sequence
  ENSG00000277363_4 (sequence is synthesized)
ctcacgccacactcagggagcccagcccgggctggcagaccaggcggcaaagctgtcctacgcctccgccgagtcgctggagaccatgtcggaggccgagctgcccctgggcttcagcag

SEQ ID NO: 795917 - DNA, 120 bp, Artificial Sequence
  ENSG00000277363_5 (sequence is synthesized)
gatgaaccgcttccgacagagcctgcctctctcccgctcggccagccagaccaagctgcgctccccaggggtgctgttcctgcagttcggggaggagactcggcgcgtgcacatcacgca

SEQ ID NO: 795918 - DNA, 120 bp, Artificial Sequence
  ENSG00000277363_6 (sequence is synthesized)
cgaggtcagcagcctggacacgctgcacgcactcatcgcgcacatgttcccgcagaagctcaccatgggcatgcttaagtcgcccaataccgccatcctcatcaaagacgaggctcgcaa

SEQ ID NO: 795919 - DNA, 120 bp, Artificial Sequence
  ENSG00000277363_7 (sequence is synthesized)
cgtcttctacgagctggaggacgtccgggacatccaggaccgcagtattatcaagatctacagaaaggagcccctctacgctgccttccctggctcacatctcaccaacggggacctccg

SEQ ID NO: 795920 - DNA, 120 bp, Artificial Sequence
  ENSG00000277363_8 (sequence is synthesized)
gagagagatggtgtacgcatcgcgggagtcctcgcccacgcggcgcctcaacaacctgtcaccagcgccgcacctggcatccggctcgccgccgcccgggctgccgtcggggctgccgtc

SEQ ID NO: 795921 - DNA, 120 bp, Artificial Sequence
  ENSG00000277363_9 (sequence is synthesized)
cgtccgggctgcagtccggttcgccgtcgcgttcgcgcctatcgtacgccggggggcgcccgccttcgtacgccggcagcccggtgcaccacgcggccgagaggctgggaggcgccccgg

SEQ ID NO: 795922 - DNA, 120 bp, Artificial Sequence
  ENSG00000277363_10 (sequence is synthesized)
ccagggcgtcagccccagccccagcgccatcctggagcggcgcgacgtgaagccggacgaggacctggcgagcaaggcgggcggcatggtgctggtgaaaggcgagggcctctatgctga

SEQ ID NO: 795923 - DNA, 120 bp, Artificial Sequence
  ENSG00000277363_11 (sequence is synthesized)
cccctacgggctgctgcacgagggccgtctgagcctggccgcggccgccggcgacccgttcgcctacccgggcgccggcggcctctacaagcgcggctcggtgcgctcgctcagcaccta

SEQ ID NO: 795924 - DNA, 120 bp, Artificial Sequence
  ENSG00000277363_12 (sequence is synthesized)
ctcggccgccgcgctgcagtccgatctggaggactccctgtacaaggcggcgggcggcggcggcccgctgtacggcgacggctacggcttccgcctgccgccttcgtcaccgcagaagct

SEQ ID NO: 795925 - DNA, 120 bp, Artificial Sequence
  ENSG00000277363_13 (sequence is synthesized)
ggccgacgtggcagcaccccccggaggtcccccgccaccgcacagcccctactcggggccgcccagccgcggctcgccagtgcgccagtccttccgcaaggactcgggctcctcgtccgt

SEQ ID NO: 795926 - DNA, 120 bp, Artificial Sequence
  ENSG00000277363_14 (sequence is synthesized)
ctttgccgagagtcctggagggaagacccgcagcgcggggagcgcctcgacggccggagctcccccttcggagctcttccctgggcctggggaacgctcgctggttgggttcgggccgcc

SEQ ID NO: 795927 - DNA, 120 bp, Artificial Sequence
  ENSG00000277363_15 (sequence is synthesized)
agtgccagccaaggacacggagaccagggagcgcatggaggccatggagaagcagattgccagcctcacaggcctggtgcagagcgccttactgcgaggctctgagcctgagacccccag

SEQ ID NO: 795928 - DNA, 120 bp, Artificial Sequence
  ENSG00000277363_16 (sequence is synthesized)
cgagaagattgaaggctccaatggagcagccaccccctcagcaccctgtgggtcaggcggccggagcagcggggccaccccggtgtccggcccgcccccgccctcggccagcagcacccc

SEQ ID NO: 795929 - DNA, 120 bp, Artificial Sequence
  ENSG00000277363_17 (sequence is synthesized)
cgcaggtcagcctaccgccgttagccggctgcagatgcagcttcacctgcgaggcctgcagaacagcgccagtgacttgcgcggccagctccagcagttgcgcaagctccagctacagaa

SEQ ID NO: 795930 - DNA, 120 bp, Artificial Sequence
  ENSG00000277363_18 (sequence is synthesized)
ccaggagtcggtgcgcgcgctgctgaagcgcacggaggcagagctgagcatgcgcgtgtcggaggcggcgcggcggcaggaggacccgctgcagcggcagcgcaccctggtggaagagga

SEQ ID NO: 795931 - DNA, 120 bp, Artificial Sequence
  ENSG00000277363_19 (sequence is synthesized)
acggctgcgctatctcaacgacgaggagcttattacccagcagctcaatgacctggagaaatcggtggagaagatccagagagacgtgtcccacaaccaccggctggtgcccggccctga

SEQ ID NO: 795932 - DNA, 120 bp, Artificial Sequence
  ENSG00000277363_20 (sequence is synthesized)
gctggaggagaaggcactggtgctgaagcagctcggggagacgctgacagagctcaaggctcacttcccgggcctgcagagcaagatgcgggtggtgctgcgcgtggaggtggaggcggt

SEQ ID NO: 795933 - DNA, 120 bp, Artificial Sequence
  ENSG00000277363_21 (sequence is synthesized)
gaagttcctgaaggaggagccccagcgcctggatgggctcctcaagcgctgccgcggggtcacggacacgctggcccagatccgaaggcaagtggatgagggtgtgtggccaccccccaa

SEQ ID NO: 795934 - DNA, 120 bp, Artificial Sequence
  ENSG00000277363_22 (sequence is synthesized)
caatctcctgagtcagtcccccaagaaggtgacggcagagactgacttcaacaagagcgtggacttcgaaatgccaccccccagccccccgctgaacctgcatgagctgagcgggccagc

SEQ ID NO: 795935 - DNA, 120 bp, Artificial Sequence
  ENSG00000277363_23 (sequence is synthesized)
tgaaggagcctctcttacccccaaggggggcaaccccaccaaaggcctggacactcctggcaagagaagcgtggacaaagctgtgtctgttgaggctgcagagcgagactgggaggagaa

SEQ ID NO: 795936 - DNA, 120 bp, Artificial Sequence
  ENSG00000277363_24 (sequence is synthesized)
gcgggcagccctgacccagtacagtgccaaggacatcaaccggctgctggaagagacacaggcagagctgctcaaggccatccctgacctggactgtgccagcaaggcccatccaggccc

SEQ ID NO: 795937 - DNA, 120 bp, Artificial Sequence
  ENSG00000277363_25 (sequence is synthesized)
ggcccccactccagatcacaagccccccaaggccccccacggccagaaggcagccccccgaacggagcccagtgggaggaggggctcagatgagttgaccgtgccccgataccgcacaga

SEQ ID NO: 795938 - DNA, 120 bp, Artificial Sequence
  ENSG00000277363_26 (sequence is synthesized)
gaagccctccaagtcgcccccaccgccccctccccgccggagcttcccctcctcccatggcctgaccaccacacgtaccggagaggtggtggtcaccagcaagaaggactcggccttcat

SEQ ID NO: 795939 - DNA, 120 bp, Artificial Sequence
  ENSG00000277363_27 (sequence is synthesized)
caagaaggctgagtccgaggagctggaggtgcagaagccccaggtgaagctgcgccgggctgtgtctgaggtggcccgcccagcctccacaccacccatcatggcctcggccatcaagga

SEQ ID NO: 795940 - DNA, 120 bp, Artificial Sequence
  ENSG00000277363_28 (sequence is synthesized)
gggccaggcgggcagccccgacaaaagcaaacatggcaagcagagggccgagtacatgcggatccaggcccagcagcaggccactaaaccatctaaagagatgagcgggtcgaatgagac

SEQ ID NO: 795941 - DNA, 120 bp, Artificial Sequence
  ENSG00000277363_29 (sequence is synthesized)
ctcgagcccagtctcagaaaagccctcggcttccagaacctctatccctgtattgacttcctttggggcaaggaattcttccatctccttctagaagcccctcaccccgctgccccgcct

SEQ ID NO: 795942 - DNA, 120 bp, Artificial Sequence
  ENSG00000277363_30 (sequence is synthesized)
gtccccctccctcactcctgccatttctcccctctcttccttcatctccaccccaccccaccctactctccagacgccctgaggggtgtgccctgaagaggagggtgcggccctcctcag

SEQ ID NO: 795943 - DNA, 120 bp, Artificial Sequence
  ENSG00000277363_31 (sequence is synthesized)
tttggttttgtttttttttttttttttaacaattaacttttaattatctttttttaaacagtaaaactaaaaaccaaacacaccaccttccttgatcccagctggcctctcgctggccgc

SEQ ID NO: 795944 - DNA, 120 bp, Artificial Sequence
  ENSG00000277363_32 (sequence is synthesized)
tgatcccagctggcctctcgctggccgcacctgtcacatctctccttcttctctttcaccactctttcccccagtccatcctgaagctcctgcacccccttcccgccttcccctcacttc

SEQ ID NO: 795945 - DNA, 120 bp, Artificial Sequence
  ENSG00000277363_33 (sequence is synthesized)
ccaagaatactccaaacaaactctgaaccacggagacttggagcagtgggagacccctctcccgtttctcgataccttcctggaggaacgcggggacatcggaccaacccatacatcaag

SEQ ID NO: 795946 - DNA, 120 bp, Artificial Sequence
  ENSG00000277363_34 (sequence is synthesized)
ccagagagcggggcttagggagactggccttggagatgccccactccctgtctaagctccgacaagactgtgacttcctctgtggctgctctgcctcctcccactcacacccaagtgggc

SEQ ID NO: 795947 - DNA, 120 bp, Artificial Sequence
  ENSG00000277363_35 (sequence is synthesized)
ctggagtagagacggacaggctggagacgaggccggagtttgagaggcctcagggtgggtgtgaggccatggagtctgtatccctggggaggcgctggcctcctgggccttgccgtccag

SEQ ID NO: 795948 - DNA, 120 bp, Artificial Sequence
  ENSG00000277363_36 (sequence is synthesized)
tggggagtggagggcagaggccctttggtctgctggctgtggagggtgggttgcacggacagccggatatcggggacactgccttgggagagggcggcccggacgggtatttggtacttt

SEQ ID NO: 795949 - DNA, 120 bp, Artificial Sequence
  ENSG00000277363_37 (sequence is synthesized)
tagtttcctgatttagcactttaaatggcattaacttattgaatggggatggggtgggcaagagtgaggggcctagaaaaccaggttttgtggcttgcagttgggggaagggtctggttt

SEQ ID NO: 795950 - DNA, 120 bp, Artificial Sequence
  ENSG00000277363_38 (sequence is synthesized)
gagggaaatgggagggtcgagaggggcttgacggggagcactgaagacacctgggacccgcaggtggggtgacttgaacttcagtcatcctcttggcaatttgagggttttcccaggaaa

SEQ ID NO: 795951 - DNA, 120 bp, Artificial Sequence
  ENSG00000277363_39 (sequence is synthesized)
ggatgagacgtagtttttcaatggggctctggtgaccctggtgagatgtctgaaggtccctgaggcctgaccatccagccagcgcccctggcctgtggacgccctgcctgccctgcagag

SEQ ID NO: 795952 - DNA, 120 bp, Artificial Sequence
  ENSG00000277363_40 (sequence is synthesized)
gcggttggcagtgccgcctggcttttggccgggtcctggggaggcagagagaggccaattttggttctcactcctggccccccagagggcacagtgaggagccggtagggagaggatagg

SEQ ID NO: 795953 - DNA, 120 bp, Artificial Sequence
  ENSG00000277363_41 (sequence is synthesized)
agaagaggaggaggaggagcggggtccccggccgcaggattcccacttggagcacaaagtgaagtaagcacaggggagggggactagaatcagtcccccatagcaagcacagaaaggagg

SEQ ID NO: 795954 - DNA, 120 bp, Artificial Sequence
  ENSG00000277363_42 (sequence is synthesized)
agctgcgcagaaggcagagccccccagaccctggggcctggctggggaaggtccgcacctggggagagctgggagctgttgaaggtttggggggaggggaaacgggttgtgtttcttcat

SEQ ID NO: 795955 - DNA, 120 bp, Artificial Sequence
  ENSG00000277363_43 (sequence is synthesized)
ttctttttttgtttttgcctttgttggttcatccttgttttctagctttggatcatttttgtaccaaggcgagcaagcctttttgaaaaataacaaaagaggaaaaaaaaaatccctcct

SEQ ID NO: 795956 - DNA, 120 bp, Artificial Sequence
  ENSG00000277363_44 (sequence is synthesized)
ggaaaaaaaaaaaaaccctggaaaatagaaaaaaaaaaaaggacctcataaatgatgcaattacttttaattgcaggcaactctttacatttaagtgaagtgtcttaacattttatattg

SEQ ID NO: 795957 - DNA, 120 bp, Artificial Sequence
  ENSG00000277363_45 (sequence is synthesized)
ttttaaaaatatatttacatattatatatataatatacgtaatataaatatatataaatatttaaaaaagaaaaaaaaaagaaaaccacggcactctccctggccactgttttggcgggg

SEQ ID NO: 795958 - DNA, 120 bp, Artificial Sequence
  ENSG00000277363_46 (sequence is synthesized)
gaggggggctggggggcgggcacgtcggcctggcttctgtggtcccagtgaaatggtctggtttgatttggctgtacagagaccccctgacttgggaggggaggggggagtggtgccccc

SEQ ID NO: 795959 - DNA, 120 bp, Artificial Sequence
  ENSG00000277363_47 (sequence is synthesized)
tcctccctccactccattactctctgcttgctacttcgcttgcccccagctcccaccctcagccctgtgactggaatgtgtgccccaccgtcattgtcctgagttgaatgtccctttgtg

SEQ ID NO: 795960 - DNA, 120 bp, Artificial Sequence
  ENSG00000277363_48 (sequence is synthesized)
ggggaggtggggggggcagtgtccatccacgaaggggcagaaggagggagccacgtgccccgccccacccgctcgggtgaagcccagtgggatttgcatctttctttctctttggttcct

SEQ ID NO: 795961 - DNA, 120 bp, Artificial Sequence
  ENSG00000277363_49 (sequence is synthesized)
gcacatttatgggctgggaggcatccgtgtggaattgcgtgcagcctgtgtgtgtgctggcacaagcccatgcactgtgtgtgcagacgcatggggcctgcacccacaggcatggccgag

SEQ ID NO: 795962 - DNA, 120 bp, Artificial Sequence
  ENSG00000277363_50 (sequence is synthesized)
cacatgtgtgggggaaggcgtgggcacataggtgcatgtaacctgtttgggcattggcacgtgcctacctgcatgttagcgtgagaggagctttgtgtgtgagaacatgtgtaatgtgtg

SEQ ID NO: 795963 - DNA, 120 bp, Artificial Sequence
  ENSG00000277363_51 (sequence is synthesized)
tgcagacatgccgagagccagagacttgtgtgtgggccacgtacatgtggatagagacgcatacatggaggtgcatgtaatctgtgtctccgagtgtgtgtgtgcaggtatgtgtgctgg

SEQ ID NO: 795964 - DNA, 120 bp, Artificial Sequence
  ENSG00000277363_52 (sequence is synthesized)
tgcagacccaagtgtgtgggtgtgcctctgtgtgcgtgtgttccatcatccctgcaccactggctccagatcccttcctgagcccccgtccccgctggccctctcacagcctgcagcaca

SEQ ID NO: 795965 - DNA, 120 bp, Artificial Sequence
  ENSG00000277363_53 (sequence is synthesized)
tcagtgcccccagctgcatgcgcctcgctgctctgtccatcagtgtgtgcttgaccaagagaaaactaagacgtctcgggggacccctgtacctggtcctctcagcccccgcccactgtg

SEQ ID NO: 795966 - DNA, 120 bp, Artificial Sequence
  ENSG00000277363_54 (sequence is synthesized)
ctgtgttactcgcatgggggatttcctgccccttccacaatatgctgtttccccaggagcctcaggcctgaggctctgagtggggtccccagggggccccccggggtgagccccggctcc

SEQ ID NO: 795967 - DNA, 120 bp, Artificial Sequence
  ENSG00000277363_55 (sequence is synthesized)
acaccctgccccatccaccctgtagggcccatgttggtgtagcagtgatggcttctgtggatattctgtgacctctgtcggtgtaacttgacaatttctaaatggaaaagggttgctgtg

SEQ ID NO: 795968 - DNA, 120 bp, Artificial Sequence
  ENSG00000277363_56 (sequence is synthesized)
ttttctctgtctctcttttttaatgtccttttttcttctcccccgctccctgctctctttccttttcagtttttctagccaagtgtttggggctttaataaaacttgtttctttttcctc

SEQ ID NO: 795969 - DNA, 120 bp, Artificial Sequence
  ENSG00000277363_57 (sequence is synthesized)
ggcacagagcagtgcgaggaacctctaggatgagctgtatggaaggggcgcctcctgggctggccatgcccttggcactttggcccctcccatccaagccctgcccctttccggctctgg

SEQ ID NO: 795970 - DNA, 120 bp, Artificial Sequence
  ENSG00000277363_58 (sequence is synthesized)
cgtgaggttgccctctctgccttcccagtcagcaccccccacttccaggctgccccaggtcccagggccttctgcgtcccaaggatcatcttgacagagtgtgcccccaaccctccctcc

SEQ ID NO: 795971 - DNA, 120 bp, Artificial Sequence
  ENSG00000277363_59 (sequence is synthesized)
ccgccagaggccagacttgaggaactgggacccaggacagctcccaccccaagacctcagaccctggctgacagcacgaggggctgggatggcccacagtccccaccaggggtagtgggg

SEQ ID NO: 795972 - DNA, 120 bp, Artificial Sequence
  ENSG00000277363_60 (sequence is synthesized)
gtttactgcccttgtggcctggtcagaggctgcagggtggctcctggacccagatgttgtgagagacccttagtgcactcgtttgatttagttaatatttatgagcagctcctgtatgac

SEQ ID NO: 795973 - DNA, 120 bp, Artificial Sequence
  ENSG00000277363_61 (sequence is synthesized)
aggcccattctgggtgtgagggtgggggctgtgatatgtccagatgctctcacttaaagaaggttctagactcagaggcaagacgttagagaaggttctagactcagaggcaagaggtta

SEQ ID NO: 795974 - DNA, 120 bp, Artificial Sequence
  ENSG00000277363_62 (sequence is synthesized)
gagatgggtgagtccatctctttttcagatgagggggcagctcagaggaggagaggggcttcccaaaggtgcacagcaaggtggcatcacagccaggatcgggacctaggaatcttggaa

SEQ ID NO: 795975 - DNA, 120 bp, Artificial Sequence
  ENSG00000277363_63 (sequence is synthesized)
cccttccctgcactggccctgggacagccctgggcacccaaggccctgcctccctactggctcccaggagaatttctcaaaaagcagccctccagccccccgcagcctctccacagctcc

SEQ ID NO: 795976 - DNA, 120 bp, Artificial Sequence
  ENSG00000277363_64 (sequence is synthesized)
cacctgcctcctcatggcccccagacaccctgcgagccccacctccagatctttttcctgccactgccagggatgagttccccttgtcctgtccgggctggaccctcctgggtgcccagc

SEQ ID NO: 795977 - DNA, 120 bp, Artificial Sequence
  ENSG00000277363_65 (sequence is synthesized)
agagcagctgacactgacagagctttcgctggggccaggcatgcgcattatctcatctcacactcaccacactgaggaaggtctattacccccatgtgacgggggcggaaactgaggctt

SEQ ID NO: 795978 - DNA, 120 bp, Artificial Sequence
  ENSG00000277363_66 (sequence is synthesized)
aatccaaggccacacggctagcaagtggggggcaggacacaagtccagactgcctccctccccaccacaaagtgcttcagcctctccagcagccccttccctcagctctaatgatgttgc

SEQ ID NO: 795979 - DNA, 120 bp, Artificial Sequence
  ENSG00000277363_67 (sequence is synthesized)
actgtttcccaccctagtccctccctccccagagcccagctcctccgctgtggtgtcagcctcatgcctttatggcccagcctccaccccatctccggggttgcctgggtctccagtgac

SEQ ID NO: 795980 - DNA, 120 bp, Artificial Sequence
  ENSG00000277363_68 (sequence is synthesized)
atcgagatgggctcttttcacccccctcccccactgctctgcagcatgtggccttgtagaccccccccacacctgcatagggctgtgcagaccctctgttcctcagcatcctctccccag

SEQ ID NO: 795981 - DNA, 85 bp, Artificial Sequence
  ENSG00000277363_69 (sequence is synthesized)
ggctgtgcagaccctctgttcctcagcatcctctccccagcctccacctggagcctctgggctcctttctgggtgactccctcta

SEQ ID NO: 795982 - DNA, 74 bp, Artificial Sequence
  ENSG00000277363_70 (sequence is synthesized)
tgcctgggcgactctcctttgcctgcctcttcccttcctgtgccccactcctcagcctcttctcctcacaccat

SEQ ID NO: 795983 - DNA, 120 bp, Artificial Sequence
  ENSG00000277363_71 (sequence is synthesized)
ttcctgtgccccactcctcagcctcttctcctcacaccatgccttcctctcctcaggcaccaggtgcactgcttagtccctgcccccacccaggtctccattctgagctccagtcaccca

SEQ ID NO: 795984 - DNA, 120 bp, Artificial Sequence
  ENSG00000277363_72 (sequence is synthesized)
cacacgcttccccgggcatccccaggctcctcgaatgcgtgtgtccagacataatgctcccccgaccacgctgccccagccggtacgaggctgccccagctgctgtctccctcaggaagg

SEQ ID NO: 795985 - DNA, 120 bp, Artificial Sequence
  ENSG00000277363_73 (sequence is synthesized)
gtcgcccacccccagccttcccaagcccctccgtgcccctgtctcacttccagtgctccagtagcctttcttataaacatggcttctttcttgtaaagtaataaatgtttacagtggaaa

SEQ ID NO: 795986 - DNA, 120 bp, Artificial Sequence
  ENSG00000277363_74 (sequence is synthesized)
cgcccgagtccttcgccgctcactggcctctctccgaaccctttctccccttcccctttcttgagcttccgctccctcgctgaacctccacttcctcaccaaggccttatccctcgcccg

SEQ ID NO: 795987 - DNA, 120 bp, Artificial Sequence
  ENSG00000277363_75 (sequence is synthesized)
tgaccccctcattgagccctccttctccttccctgagtccccatcgccctcctggagccccagtcacccactgagcccctccgtcgtcagtatccctcggggcagttccagttccttcct

SEQ ID NO: 795988 - DNA, 120 bp, Artificial Sequence
  ENSG00000277363_76 (sequence is synthesized)
gccctgcatccctttccctgagtcagcgagagcccttcccccaagtcctctcagctcctccctcctgagccccaacagtctccccggccctgcttggcagatggtcccacctgtcaggag

SEQ ID NO: 795989 - DNA, 120 bp, Artificial Sequence
  ENSG00000277363_77 (sequence is synthesized)
ctgtgggtctttttccttgggggaggagggccagtgccctaatggaagcctaagaagcataatgagggtgacattagccctcctagacagaaagcgtattataaagctacaataatcaaa

SEQ ID NO: 795990 - DNA, 120 bp, Artificial Sequence
  ENSG00000277363_78 (sequence is synthesized)
cgcggctgcggaggcggccgggggagagaagagcccgggcgggtgggagtaggggccctccctccccagccggacgcaggacctggggctggggaccccgcacgtacacctgtggccgca

SEQ ID NO: 795991 - DNA, 120 bp, Artificial Sequence
  ENSG00000277363_79 (sequence is synthesized)
cgaggatgacgaggatcgcatcatcgcagagctagaggtgtttgagagaagctcagtgtcttccctcccccccacgccccgccgccagctgatccccaccttgctgtccccccaggacct

SEQ ID NO: 795992 - DNA, 120 bp, Artificial Sequence
  ENSG00000277363_80 (sequence is synthesized)
ggaggagccagagtacagtgtcctcagggaccagcccaggatgggactccagagacctctactgctgacacctacccagaggagatcctcaaggactctggacatgatgcccaaacctgc

SEQ ID NO: 795993 - DNA, 120 bp, Artificial Sequence
  ENSG00000277363_81 (sequence is synthesized)
agtagggagcatcagggccaggctgctgccaactcaggccgcaccacgtggggcgccactgcccagcagatggacagcttggaggagacgctccgggagctggaagccaccctgagcaac

SEQ ID NO: 795994 - DNA, 120 bp, Artificial Sequence
  ENSG00000277363_82 (sequence is synthesized)
atgggcacaggccctgccatggggtcccctggcagccccccacccctacccctccgcccccaggtggctgcccgcttttcatcctcctctgctgccttcctcctccatttccagagtcag

SEQ ID NO: 795995 - DNA, 120 bp, Artificial Sequence
  ENSG00000277363_83 (sequence is synthesized)
acagagtagggggcagcagaaatgccaggccagccccctcctcccaccggccttctctcagctcttaccactctcctgggagcctggtgccagagcagggtttgcaggcagagtccgggg

SEQ ID NO: 795996 - DNA, 120 bp, Artificial Sequence
  ENSG00000277363_84 (sequence is synthesized)
gaggctgggaagccggcctacccaggggccggccaatccccagccttggcaagaaccagggcctcccccttctgctctgtatctgtaaaccaacaaataaagttctctccccaccttcca

SEQ ID NO: 795997 - DNA, 120 bp, Artificial Sequence
  ENSG00000277363_85 (sequence is synthesized)
cagccccttctccccaagcaaccccagctctctccatctctctctcgccctcagcatccccacccgacccctttccctccaagcctcctctctccctcttgcttccttttctgtcccttt

SEQ ID NO: 795998 - DNA, 120 bp, Artificial Sequence
  ENSG00000277363_86 (sequence is synthesized)
ctttcatccctcccttctctcccatctcccttctctaactctctccaacctctctctccctcagctcacttcccctcagtttccgccccacctgctctgcccccacttccatttccttgt

SEQ ID NO: 795999 - DNA, 120 bp, Artificial Sequence
  ENSG00000277363_87 (sequence is synthesized)
ccaagttccttcaactgcctggagtccagtgggtgccttgagaggctggagagccggcctggcgcccccgccggcagcatgagaggtgcctgggtgcatctgcactcgggggcggcgtct

SEQ ID NO: 796000 - DNA, 120 bp, Artificial Sequence
  ENSG00000277363_88 (sequence is synthesized)
agcctcagaccctgccgctgcggggctggcgcagctccgaaaagctccccgcgctctcctggagggcggcgtggagacggcagcagtgacagcgagggcggcgtctccttcgcaggggtg

SEQ ID NO: 796001 - DNA, 120 bp, Artificial Sequence
  ENSG00000277363_89 (sequence is synthesized)
acgcgtccccatgcagccctggcagtgcctccggcgctttgccctggcctggtgggagaggacggcggagggcagagcccgctctcccagggaggaggctggaccgagggaccctggggg

SEQ ID NO: 796002 - DNA, 120 bp, Artificial Sequence
  ENSG00000277399_0 (sequence is synthesized)
gtcctgagagctgccccaaggatgggcaccaggggagcggtcatgccccctcctatgtgggggctgctgggctgctgttttgtctgtgcctgggctctggggggtccacggcccatccgc

SEQ ID NO: 796003 - DNA, 120 bp, Artificial Sequence
  ENSG00000277399_1 (sequence is synthesized)
tctctgccccctctgtcttcccaagtcaagccaggatctgtacccatgcaggtgcccctagagggggccgaggccgccctcgcttatctctactctggagatgcccagcagctatcacag

SEQ ID NO: 796004 - DNA, 120 bp, Artificial Sequence
  ENSG00000277399_2 (sequence is synthesized)
gtgaattgcagtgagcgctatgaagcgcgtggggcaggagccatgccagggctccccccaagcctacagggggcagcgggcacccttgcccaggccgccaattttctcaacatgctgctg

SEQ ID NO: 796005 - DNA, 120 bp, Artificial Sequence
  ENSG00000277399_3 (sequence is synthesized)
caagccaacgacatccgtgagtccagtgtggaggaggatgtggaatggtaccaggcactggtccgcagcgtggccgagggggacccaagagtgtacagggctttgctgacctttaaccct

SEQ ID NO: 796006 - DNA, 120 bp, Artificial Sequence
  ENSG00000277399_4 (sequence is synthesized)
ccaccaggggccagccacctacagctggccctgcaggccacccggactggggaggaaaccatcctgcaggacttgtctgggaactgggtgcaggaggagaaccctcctggggacctggac

SEQ ID NO: 796007 - DNA, 120 bp, Artificial Sequence
  ENSG00000277399_5 (sequence is synthesized)
acccctgccctgaagaagcgagtgttgaccaatgacctagggagcctcggcagccccaagtggccgcaggcagatggatatgtgggggacacgcagcaggtgaggctgtctcctcctttc

SEQ ID NO: 796008 - DNA, 120 bp, Artificial Sequence
  ENSG00000277399_6 (sequence is synthesized)
ctggaatgccaggagggacggctccgacctggatggctgatcacactctctgccaccttctatggactcaagccagacctcagcccagaagtcagggggcaggtgcagatggacgtagat

SEQ ID NO: 796009 - DNA, 120 bp, Artificial Sequence
  ENSG00000277399_7 (sequence is synthesized)
ctccagagtgtggacatcaatcagtgtgcaagtggcccaggctggtactctaacacacacctgtgtgatctcaacagcacccagtgtgtccccctggagagtcagggctttgttcttggc

SEQ ID NO: 796010 - DNA, 120 bp, Artificial Sequence
  ENSG00000277399_8 (sequence is synthesized)
cgctacctctgccgctgccgacctggattctacggggcaagcccctctggggggttagaggagagtgacttccagactaccgggcaattcgggttcccagaaggcagatctgggagactg

SEQ ID NO: 796011 - DNA, 120 bp, Artificial Sequence
  ENSG00000277399_9 (sequence is synthesized)
ctgcagtgtctgccatgtcctgagggctgcaccagctgcatggatgccacaccgtgcctggtggaagaggccgcggtgctgcgggccgctgtgctggcctgccaggcctgctgcatgctg

SEQ ID NO: 796012 - DNA, 120 bp, Artificial Sequence
  ENSG00000277399_10 (sequence is synthesized)
gccatcttcctgagcatgctggtctcctaccgctgccgccggaacaagaggatctgggcatctggagtggtcctgctggaaactgtcctttttggattcctgctgctttactttcctgtc

SEQ ID NO: 796013 - DNA, 120 bp, Artificial Sequence
  ENSG00000277399_11 (sequence is synthesized)
ttcatcctatacttcaagcccagtgtattccgctgcatcgctcttcgctgggtgcggctgctgggttttgccatcgtctacggcaccatcatactcaagctttacagagtgctgcagctg

SEQ ID NO: 796014 - DNA, 120 bp, Artificial Sequence
  ENSG00000277399_12 (sequence is synthesized)
tttctgtctcgaacggcccagcggagtgcccttctgagcagcgggcggctgctgcggcacctggggctgctcctgctacctgtgctgggcttcctggctgtgtggaccgtgggcgccctg

SEQ ID NO: 796015 - DNA, 120 bp, Artificial Sequence
  ENSG00000277399_13 (sequence is synthesized)
gagcgaggcatccagcacgcacctctggtgatccgaggccacactcccagtggccgccatttctacctctgtcaccacgaccgctgggactacatcatggttgtggctgagctgctgctg

SEQ ID NO: 796016 - DNA, 120 bp, Artificial Sequence
  ENSG00000277399_14 (sequence is synthesized)
ctgtgctggggcagcttcctctgctacgccacacgggctgtgctctcggccttccatgagccacgctacatgggcatcgccctgcacaatgagctactgctttccgctgccttccacaca

SEQ ID NO: 796017 - DNA, 120 bp, Artificial Sequence
  ENSG00000277399_15 (sequence is synthesized)
gccaggtttgtgctggttccctctctgcacccggactggaccctcctcctcttcttcttccacacccacagcacagtcaccaccacgctggctctgatcttcatccctaagttctggaag

SEQ ID NO: 796018 - DNA, 120 bp, Artificial Sequence
  ENSG00000277399_16 (sequence is synthesized)
ctgggggctcctccccgggaggagatggtggatgaggtgtgtgaggacgagctggacctgcagcactcaggctcctaccttggcagcagcatcgcctcagcctggagtgagcacagcctg

SEQ ID NO: 796019 - DNA, 120 bp, Artificial Sequence
  ENSG00000277399_17 (sequence is synthesized)
gaccctggagacattcgggacgagctgaagaagctctatgcccagctagaggtccacaaaaccaaggaaatggccgcaaacaacccccacctgcccaagaagcgaggcagctcatgccag

SEQ ID NO: 796020 - DNA, 120 bp, Artificial Sequence
  ENSG00000277399_18 (sequence is synthesized)
ggactgggccgctccttcatgaggtacctggcggaattccccgaggccctggccaggcagcactcccgggactcaggatccccaggccacggcagcctgcccggctcctcccgccgccgg

SEQ ID NO: 796021 - DNA, 120 bp, Artificial Sequence
  ENSG00000277399_19 (sequence is synthesized)
ctcctcagctccagcctccaggaacccgaggggacaccagctctgcacaagtcccgcagcacctatgaccagcgcagggagcaggacccgcctcttcttgactcactgctgaggaggaag

SEQ ID NO: 796022 - DNA, 120 bp, Artificial Sequence
  ENSG00000277399_20 (sequence is synthesized)
ctggccaagaaggcctctcgaacagagagccgggagtcggtggaggggccccctgccctgggcttcaggtcagccagcgcccacaacctgacggtgggagagaggctacccagagcccgg

SEQ ID NO: 796023 - DNA, 120 bp, Artificial Sequence
  ENSG00000277399_21 (sequence is synthesized)
cccgcctctctgcagaagtcgctcagtgtggccagctccagggaaaaggccttgctcatggccagccaggcctacctggaggagacctaccggcaagcaaaggagcgggaggagcggaag

SEQ ID NO: 796024 - DNA, 120 bp, Artificial Sequence
  ENSG00000277399_22 (sequence is synthesized)
aaggccaaggcagccatggccagcctggtgcggaggccatcagccaggaggctggagcggcctcgaggggcccccctgtcagctccaccttcccctgccaagagcagcagcgtggacagc

SEQ ID NO: 796025 - DNA, 120 bp, Artificial Sequence
  ENSG00000277399_23 (sequence is synthesized)
tctcacacctctgggaggcttcatgaggaggctaggagaaggctgcctcatccacccatcaggcaccaggtttctacccccatcttggccctgtctgggggcctgggagagccaaggatg

SEQ ID NO: 796026 - DNA, 120 bp, Artificial Sequence
  ENSG00000277399_24 (sequence is synthesized)
ctatctcccacctccaccttggctccagctctgctgccagctctagctccaaccccagcccctgccctggcaccagtcccagtatccccacaaagccccaacttactcacctacatctgc

SEQ ID NO: 796027 - DNA, 120 bp, Artificial Sequence
  ENSG00000277399_25 (sequence is synthesized)
ccctgggagaacgcagaactgccagccaagcaagaaaatgtgccccaggaaggcccctcagggccagagcgaggccaccactcccctgccccagctcgagccaggctctggagggccctc

SEQ ID NO: 796028 - DNA, 120 bp, Artificial Sequence
  ENSG00000277399_26 (sequence is synthesized)
tctgttgcagtagagaaaagcagggctggggagaatgagatggacgcagaggatgcacatcaccagagggaagctaatgatgtggacgaagacaggcccaagatcttccctaaatcccac

SEQ ID NO: 796029 - DNA, 120 bp, Artificial Sequence
  ENSG00000277399_27 (sequence is synthesized)
agcctcaaggcccctgttcagcagggttccatgcgcagcctggggctggcgattaaagctctgacccgttctcggagcacctacagagagaaggagagtgtggaggagagtcccgagggg

SEQ ID NO: 796030 - DNA, 120 bp, Artificial Sequence
  ENSG00000277399_28 (sequence is synthesized)
cagaacagcgggactgcgggagagagtatgggggcaccctcccgatcgcccaggctaggccggcccaaggcggtgagtaagcaggccgctcttatcccctccgatgacaaggagtccctc

SEQ ID NO: 796031 - DNA, 120 bp, Artificial Sequence
  ENSG00000277399_29 (sequence is synthesized)
cagaaccaacagaacgctcacaccagcaggatgctccaagtctgtcaacgggagggcagcagggaacaagaagacagaggcaggaggatgacccagggtctaggggaacggaaagctgag

SEQ ID NO: 796032 - DNA, 120 bp, Artificial Sequence
  ENSG00000277399_30 (sequence is synthesized)
agagcaggtaaaacagggcttgccatgctgaggcaagtttccagggacaaaaacatcaagcaatcaaaagaaacccctgtcgggtggcaggaactgcccaaagctggcctccagtccctg

SEQ ID NO: 796033 - DNA, 120 bp, Artificial Sequence
  ENSG00000277399_31 (sequence is synthesized)
ggcagcgctgaccacagggtggcagaggtatgcccctgggaggtcactgaatcagaaacgcgtcagccagacagtggcaacaaggccgaaatctgcccctgggagacgagtgaaggagcc

SEQ ID NO: 796034 - DNA, 120 bp, Artificial Sequence
  ENSG00000277399_32 (sequence is synthesized)
ccagagtcgagggcactaagacaagacccaggtgactcccaaaaaaagagaggggaggcccggggaaaatcagagcccatagatgtggttcccatgatgcggaaaaagccagagaggctg

SEQ ID NO: 796035 - DNA, 120 bp, Artificial Sequence
  ENSG00000277399_33 (sequence is synthesized)
gggtcagctcctcaggaccctggcagaatcagagacaaatctgaggcgggggacagtgtggaggccaggaaggtggagaagcctgggtgggaagctgctggcccagaagctcatacccct

SEQ ID NO: 796036 - DNA, 120 bp, Artificial Sequence
  ENSG00000277399_34 (sequence is synthesized)
gacatcaccaaggcagagccgtgtccctgggaggcaagtgaaggaggcgaggatgggaaaccagcccaagaggcagtgaaggatctccctcaggaaaagcagaaaaccaggaaagcaacc

SEQ ID NO: 796037 - DNA, 120 bp, Artificial Sequence
  ENSG00000277399_35 (sequence is synthesized)
ttttggaaagaacagaaaccgggaggagacttggagtctctttgtccatgggagagtacagatttccggggcccctcagcagtctcaattcaggccccaggaagctcagagtgttcaggg

SEQ ID NO: 796038 - DNA, 120 bp, Artificial Sequence
  ENSG00000277399_36 (sequence is synthesized)
agtttgggcagtggcattgctgaagtgtgtctgtgggaggcaggagatgctcctgctatccagaaagcagagatctgtccctgggagctggatgataacgtgatggggcaggaaatgctg

SEQ ID NO: 796039 - DNA, 120 bp, Artificial Sequence
  ENSG00000277399_37 (sequence is synthesized)
agtctggggacaggtagagaatctcttcaagaaaaggaaaaagcctccagaaaaggaagctttggagagatgggggaacaaactgtgaaagcagtgcagaaattaagtcaacagcaggag

SEQ ID NO: 796040 - DNA, 120 bp, Artificial Sequence
  ENSG00000277399_38 (sequence is synthesized)
tcagtttgtcccagggagagcacggtccctgggcactccagcccatgtctagacaattcctcatccaaagctggtagccaattcctatgcaatggaggaagcagagcaacgcaggtgtgt

SEQ ID NO: 796041 - DNA, 120 bp, Artificial Sequence
  ENSG00000277399_39 (sequence is synthesized)
ccacaggaagatctcaggccggaggcacaggaagcaacacctgccaaaacagaaatctgtccctgggaggtaaatgaaagaacaagagaggaatggacatcagcacaggtgccaagagga

SEQ ID NO: 796042 - DNA, 120 bp, Artificial Sequence
  ENSG00000277399_40 (sequence is synthesized)
ggagaatctcaaaaggacaaggagaaaatgcctggaaaatcggaaatcgaagatgtcacagcttgggaaaagcctgaggggcagatccaaaagcaagaagcggtcggcccctgggagagt

SEQ ID NO: 796043 - DNA, 120 bp, Artificial Sequence
  ENSG00000277399_41 (sequence is synthesized)
gtggaccctggcagcttctccccacaaccacgtcctcaagacacagagagaccccaaacccttctccagatgtcaggcagtgtgggaagcaaagctgccgacatttgccctttggatgtg

SEQ ID NO: 796044 - DNA, 120 bp, Artificial Sequence
  ENSG00000277399_42 (sequence is synthesized)
gaggaaaacttgactgctgggaaggcagaaatctgtccctgggaggtgggtgctggagcaggggaggaaagggctttgggagctgaggccattaggaaatctccaaatgatacaggcaag

SEQ ID NO: 796045 - DNA, 120 bp, Artificial Sequence
  ENSG00000277399_43 (sequence is synthesized)
gtttctgcagatcttggacccagggagagagctgttactgctccagagaagccacagaagccaaccccagagtgggaggtggcttgtccctgggggagtgtgggtccaggggcctgttct

SEQ ID NO: 796046 - DNA, 120 bp, Artificial Sequence
  ENSG00000277399_44 (sequence is synthesized)
cagcatccaggtactctagatgctgatggaccaaaagctgggttccaggaactggatcatatgggctgcaggccaggtgaagtgtgtccctgggaagcacaggaagctgctaccagtgaa

SEQ ID NO: 796047 - DNA, 120 bp, Artificial Sequence
  ENSG00000277399_45 (sequence is synthesized)
aaagccaagatctgtccctgggaggtaagtgaaggaactactgggaagggattggaccaaaaggcagggagtgaatcagcagagcagagggagaaagctctagaaaaggggagactcact

SEQ ID NO: 796048 - DNA, 120 bp, Artificial Sequence
  ENSG00000277399_46 (sequence is synthesized)
tccctgggagaagacgtatcaaaagggatggcaaaactgtgtcaacaacaggaaactatttgtatttgggagaacaaggacttgagggaatcccctgctcaggcccccaagatctcagac

SEQ ID NO: 796049 - DNA, 120 bp, Artificial Sequence
  ENSG00000277399_47 (sequence is synthesized)
ttgcccagcagcatgagtagtgaagtggcagagggacattccttggaagcaacagagaagggggacctgagacaagacccaaagacaggttccttcccagaacacataacccaagaaaaa

SEQ ID NO: 796050 - DNA, 120 bp, Artificial Sequence
  ENSG00000277399_48 (sequence is synthesized)
gctccagctgcagacacagaagaattcactactgaagatggggaaaaaacaagccatgagctacaatccgtctgtccatgggagaccactgccccagcagattccgtctctcacctagac

SEQ ID NO: 796051 - DNA, 120 bp, Artificial Sequence
  ENSG00000277399_49 (sequence is synthesized)
agacagcgccctgaccaacctaaagctagctcccagagactggtcagcactgggggcagggccgctgacgtgtgcccatgggatgttcctgatgcaggtgtgtataaatctgacagcagt

SEQ ID NO: 796052 - DNA, 120 bp, Artificial Sequence
  ENSG00000277399_50 (sequence is synthesized)
gccaaggctgagacctgtccctgggaagtgactgaaagaatccctgtcaaaggggtgtcaaggcaggatggaaaaggggactctcaagaagagaaaggcagagccccagaaaaatcagag

SEQ ID NO: 796053 - DNA, 120 bp, Artificial Sequence
  ENSG00000277399_51 (sequence is synthesized)
ccaaaaggtgtgccagttcagaaaaagccagagatggcagacttcaggcagcaggaggctgtgtgtccctgggagagtcaagatggcaagggtctgtccccacagccagccccagatgct

SEQ ID NO: 796054 - DNA, 120 bp, Artificial Sequence
  ENSG00000277399_52 (sequence is synthesized)
tctgacagaagcagaggcagttctgaggcagcaggcagtgtggagaccagggtagcggaagtgtgtctgtgggaagtggtagaggctccctctgccaagaaagcagagatctgcccttgg

SEQ ID NO: 796055 - DNA, 120 bp, Artificial Sequence
  ENSG00000277399_53 (sequence is synthesized)
gaggcgggtggaggagcagcagaggaaggggaacaggaaagagaatcacaagggcaaggagagatgttccttcagaaggcaggacctggagggacggaagaacacttctcaaaagcagca

SEQ ID NO: 796056 - DNA, 120 bp, Artificial Sequence
  ENSG00000277399_54 (sequence is synthesized)
gcaaagcccagagagcaggaggcagtctgccctggggaaggcacaggctcaggagggctcttgccccagtcaggtgccctggacccagaactcaaagtcagccccaaggaagcaggcagc

SEQ ID NO: 796057 - DNA, 120 bp, Artificial Sequence
  ENSG00000277399_55 (sequence is synthesized)
atgggaagcaggatggcagagctgtgccaatgggaaatcacagatccagaaggaaataaaataaagggtaccatggcagacatctgtcctggggaggaaactggagtcccatctgaggaa

SEQ ID NO: 796058 - DNA, 120 bp, Artificial Sequence
  ENSG00000277399_56 (sequence is synthesized)
tctggcctcctggctttaacagcaactcggagagaatttttccccacagctcctgaaaaaccactatgccttttagtccatgggcctctggatcacttctttccagaaagcaaaatcccc

SEQ ID NO: 796059 - DNA, 120 bp, Artificial Sequence
  ENSG00000277399_57 (sequence is synthesized)
tgccccaaggtaagcaggccagccagtactttcactctagaaggtgtcagagaactacaaggaccttcagggcttgagccaaggaccagcttagccccagagccaagtctccaggaagct

SEQ ID NO: 796060 - DNA, 120 bp, Artificial Sequence
  ENSG00000277399_58 (sequence is synthesized)
gagtctcagtcttcgtccttaactgaagactcaggccaagtggcttttgaagctcagtatgaagaattcacccctcccactgtctatccttgggattgggagtaacagccttattaggtg

SEQ ID NO: 796061 - DNA, 120 bp, Artificial Sequence
  ENSG00000277399_59 (sequence is synthesized)
aggtcaaacacagagctagctttcaggagccaaggccctttccaagtccaggtgttcccaaagagctgaatcaaagacagcttggccacttcccctccttgagaagaccagaagtcaacc

SEQ ID NO: 796062 - DNA, 120 bp, Artificial Sequence
  ENSG00000277399_60 (sequence is synthesized)
catcccaaagacaaactgcatgaaaagggtacagcttagaccccaatgggaaggcccaccctctctttacttctaacttttcttcctgtttgaggaaacaaagactggacactctacttc

SEQ ID NO: 796063 - DNA, 120 bp, Artificial Sequence
  ENSG00000277399_61 (sequence is synthesized)
taaggacgcctcccatccacctacagtactcacaacacaaaccacccgagtctggacactcacccacaaagccactgttagggatgaaaaaagtcagttgtgcccagcctaccttctctc

SEQ ID NO: 796064 - DNA, 120 bp, Artificial Sequence
  ENSG00000277399_62 (sequence is synthesized)
acagggggacccaattctctgaagtctacgatggagcattttttgagaagaaactaaaccatacaaagtgttggcaacgtagggatggtggaccacagaaggctataaaggccaccatag

SEQ ID NO: 796065 - DNA, 120 bp, Artificial Sequence
  ENSG00000277399_63 (sequence is synthesized)
aaagctgaagagccatttaattgaagcggaagataaattgggggaaaagctaaaatgactcaaaataggggcctgaaaatgctttaaggaccttgtcattttgactttgaatctcctgtt

SEQ ID NO: 796066 - DNA, 120 bp, Artificial Sequence
  ENSG00000277399_64 (sequence is synthesized)
tctgctttattgcttctcatacctgccctgcttgactgctgaagcagaaacaatcaggcacgctgacacccttatcagcatctggcatccaaagcaacatcagagagagagaacacagaa

SEQ ID NO: 796067 - DNA, 120 bp, Artificial Sequence
  ENSG00000277399_65 (sequence is synthesized)
gaaaagcaattgccccaggtcctccccacagtcaagggagctcttccttccagacatccttgtgtgcctcttgctagttttttagggggtctccccctcttcctgccctagctctcacca

SEQ ID NO: 796068 - DNA, 120 bp, Artificial Sequence
  ENSG00000277399_66 (sequence is synthesized)
tttagggggtctccccctcttcctgccctagctctcaccagtctccagagctcgtctcactggctcatttccttccccctagcttttcagcgctgccatcaacaggacctctctcttttg

SEQ ID NO: 796069 - DNA, 120 bp, Artificial Sequence
  ENSG00000277443_0 (sequence is synthesized)
gcacttgggcgttggaccccgcatcttattagcaaccagggagatttctccattttcctcttgtctacagtgcggctacaaatctgggatttttttattacttctttttttttcgaacta

SEQ ID NO: 796070 - DNA, 120 bp, Artificial Sequence
  ENSG00000277443_1 (sequence is synthesized)
cacttgggctcctttttttgtgctcgacttttccaccctttttccctccctcctgtgctgctgctttttgatctcttcgactaaaatttttttatccggagtgtatttaatcggttctgt

SEQ ID NO: 796071 - DNA, 120 bp, Artificial Sequence
  ENSG00000277443_2 (sequence is synthesized)
tctgtcctctccaccacccccacccccctccctccggtgtgtgtgccgctgccgctgttgccgccgccgctgctgctgctgctcgccccgtcgttacaccaacccgaggctctttgtttc

SEQ ID NO: 796072 - DNA, 120 bp, Artificial Sequence
  ENSG00000277443_3 (sequence is synthesized)
ccctcttggatctgttgagtttctttgttgaagaagccagcatgggtgcccagttctccaagaccgcagcgaagggagaagccgccgcggagaggcctggggaggcggctgtggcctcgt

SEQ ID NO: 796073 - DNA, 120 bp, Artificial Sequence
  ENSG00000277443_4 (sequence is synthesized)
cgccttccaaagcgaacggacaggagaatggccacgtgaaggtaaacggcgacgcttcgcccgcggccgccgagtcgggcgccaaggaggagctgcaggccaacggcagcgccccggccg

SEQ ID NO: 796074 - DNA, 80 bp, Artificial Sequence
  ENSG00000277443_5 (sequence is synthesized)
gtcgccctccgcggccgagaaaggtgagccggccgccgccgctgcccccgaggccggggccagcccggtagagaaggagg

SEQ ID NO: 796075 - DNA, 120 bp, Artificial Sequence
  ENSG00000277443_6 (sequence is synthesized)
cgcggaaggcgaggctgccgagcccggctcgcccacggccgcggagggagaggccgcgtcggccgcctcctcgacttcttcgcccaaggccgaggacggggccacgccctcgcccagcaa

SEQ ID NO: 796076 - DNA, 120 bp, Artificial Sequence
  ENSG00000277443_7 (sequence is synthesized)
gcaacgagaccccgaaaaaaaaaaagaagcgcttttccttcaagaagtctttcaagctgagcggcttctccttcaagaagaacaagaaggaggctggagaaggcggtgaggctgaggcgc

SEQ ID NO: 796077 - DNA, 80 bp, Artificial Sequence
  ENSG00000277443_8 (sequence is synthesized)
gagaaggcggtgaggctgaggcgcccgctgccgaaggcggcaaggacgaggccgccgggggcgcagctgcggccgccgcc

SEQ ID NO: 796078 - DNA, 120 bp, Artificial Sequence
  ENSG00000277443_9 (sequence is synthesized)
agggggcggcgggtggcgacccgcaggaggccaagccccaggaggccgctgtcgcgccagagaagccgcccgccagcgacgagaccaaggccgccgaggagcccagcaaggtggaggaga

SEQ ID NO: 796079 - DNA, 80 bp, Artificial Sequence
  ENSG00000277443_10 (sequence is synthesized)
agcaaggtggaggagaaaaaggccgaggaggccggggccagcgccgccgcctgcgaggccccctccgccgccgggcccgg

SEQ ID NO: 796080 - DNA, 120 bp, Artificial Sequence
  ENSG00000277443_11 (sequence is synthesized)
cgtcagcctgcgcagccccctcacaggaggcccagcccgagtgcagtccagaagcccccccagcggaggcggcagagtaaaagagcaagcttttgtgagataatcgaagaacttttctcc

SEQ ID NO: 796081 - DNA, 120 bp, Artificial Sequence
  ENSG00000277443_12 (sequence is synthesized)
cccgtttgtttgttggagtggtgccaggtactggttttggagaacttgtctacaaccagggattgattttaaagatgtctttttttattttacttttttttaagcaccaaattttgttgt

SEQ ID NO: 796082 - DNA, 120 bp, Artificial Sequence
  ENSG00000277443_13 (sequence is synthesized)
tttttttttttctcccctccccacagatcccatctcaaatcattctgttaaccaccattccaacaggtcgaggagagcttaaacaccttcttcctctgccttgtttctcttttatttttt

SEQ ID NO: 796083 - DNA, 120 bp, Artificial Sequence
  ENSG00000277443_14 (sequence is synthesized)
attttttcgcatcagtattaatgtttttgcatactttgcatctttattcaaaagtgtaaactttctttgtcaatctatggacatgcccatatatgaaggagatgggtgggtcaaaaaggg

SEQ ID NO: 796084 - DNA, 120 bp, Artificial Sequence
  ENSG00000277443_15 (sequence is synthesized)
atatcaaatgaagtgatggggtcacaatggggaaattgaagtggtgcataacattgccaaaatagtgtgccactagaaatggtgtaaaggctgtcttttttttttttttaaaagaaaagt

SEQ ID NO: 796085 - DNA, 120 bp, Artificial Sequence
  ENSG00000277443_16 (sequence is synthesized)
tattaccatgtattttgtgaggcaggtttacaacactacaagtcttgagttaagaaggaaagaggaaaaaagaaaaaacaccaatacccagatttaaaaaaaaaaaaacgatcatagtct

SEQ ID NO: 796086 - DNA, 120 bp, Artificial Sequence
  ENSG00000277443_17 (sequence is synthesized)
gtttattgctggtttatgaccttaataaagtgtaattatgtattaccagcagggtgtttttaactgtgactattgtataaaaacaaatcttgatatccagaagcacatgaagtttgcaac

SEQ ID NO: 796087 - DNA, 120 bp, Artificial Sequence
  ENSG00000277443_18 (sequence is synthesized)
tttccaccctgcccatttttgtaaaactgcagtcatcttggaccttttaaaacacaaattttaaactcaaccaagctgtgataagtggaatggttactgtttatactgtggtatgttttt

SEQ ID NO: 796088 - DNA, 120 bp, Artificial Sequence
  ENSG00000277443_19 (sequence is synthesized)
gattacagcagataatgctttcttttccagtcgtctttgagaataaaggaaaaaaaatcttcagatgcaatggttttgtgtagcatcttgtctatcatgttttgtaaatactggagaagc

SEQ ID NO: 796089 - DNA, 120 bp, Artificial Sequence
  ENSG00000277443_20 (sequence is synthesized)
tttgaccaatttgacttagagatggaatgtaactttgcttacaaaaattgctattaaactcctgcttaaggtgttctaattttctgtgagcacactaaaagcgaaaaataaatgtgaata

SEQ ID NO: 796090 - DNA, 120 bp, Artificial Sequence
  ENSG00000277443_21 (sequence is synthesized)
aaatgtacaaatttgttgtgtttttttatgttctaataatactgagacttctaggtcttaggttaatttttaggaagatcttgcatgccatcaggagtaaattttattgtggttcttaat

SEQ ID NO: 796091 - DNA, 120 bp, Artificial Sequence
  ENSG00000277443_22 (sequence is synthesized)
ctgaagttttcaagctctgaaattcataatccgcagtgtcagattacgtagaggaagatcttacaacatttccatgtcaaatctgttaccatttattggcatttagttttcatttaagaa

SEQ ID NO: 796092 - DNA, 120 bp, Artificial Sequence
  ENSG00000277443_23 (sequence is synthesized)
ttgaacataattatttttattgtagctatatagcatgtcagattaaatcatttacaacaaaaggggtgtgaacctaagactatttaaatgtcttatgagaaaatttcataaagccattct

SEQ ID NO: 796093 - DNA, 120 bp, Artificial Sequence
  ENSG00000277443_24 (sequence is synthesized)
cttgtcattcaggtccagaaacaaattttaaactgagtgagagtctatagaatccatactgcagatgggtcatgaaatgtgaccaaatgtgtttcaaaaattgatggtgtattacctgct

SEQ ID NO: 796094 - DNA, 120 bp, Artificial Sequence
  ENSG00000277443_25 (sequence is synthesized)
attgtaattgcttagtgcttggctaatttccaaattattgcataatatgttctaccttaagaaaacaggtttatgtaacaaagtaatggtgttgaatggatgatgtcagttcatgggcct

SEQ ID NO: 796095 - DNA, 120 bp, Artificial Sequence
  ENSG00000277443_26 (sequence is synthesized)
ttagcatagttttaagcatccttttttttttttttttttgaaagtgtgttagcatcttgttactcaaaggataagacagacaataatacttcactgaatcttaataatctttactagttt

SEQ ID NO: 796096 - DNA, 120 bp, Artificial Sequence
  ENSG00000277443_27 (sequence is synthesized)
acctcctctgctctttgccacccgataactggatatcttttccttcaaaggaccctaaactgattgaaatttaagatatgtatcaaaaacattatttcatttaatgcacatctgttttgc

SEQ ID NO: 796097 - DNA, 120 bp, Artificial Sequence
  ENSG00000277443_28 (sequence is synthesized)
tgtttttgagcagtgtgcagtttagggttcatgataaatcattgaaccacatgtgtaacaactgaatgccaaatcttaaactcattagaaaaataacaaattaggttttgacacgcattc

SEQ ID NO: 796098 - DNA, 120 bp, Artificial Sequence
  ENSG00000277443_29 (sequence is synthesized)
ttaattggaataatggatcaaaaatagtggttcatgaccttaccaaacacccttgctactaataaaatcaaataacacttagaagggtatgtatttttagttagggtttcttgatcttgg

SEQ ID NO: 796099 - DNA, 120 bp, Artificial Sequence
  ENSG00000277443_30 (sequence is synthesized)
aggatgtttgaaagttaaaaattgaatttggtaaccaaaggactgatttatgggtctttcctatcttaaccaacgttttcttagttacctagatggccaagtacagtgcctggtatgtag

SEQ ID NO: 796100 - DNA, 120 bp, Artificial Sequence
  ENSG00000277443_31 (sequence is synthesized)
taagactcagtaaaaaagtggatttttaaaaataactcccaaagtgaatagtcaaaaatcctgttagcaaactgttatatattgctaagtttgttcttttaacagctggaatttattaag

SEQ ID NO: 796101 - DNA, 120 bp, Artificial Sequence
  ENSG00000277443_32 (sequence is synthesized)
atgcattattttgattttattcactgcctaaaacactttgggtggtattgatggagttggtggattttcctccaagtgattaaatgaaatttgacgtatcttttcatccaaagttttgta

SEQ ID NO: 796102 - DNA, 120 bp, Artificial Sequence
  ENSG00000277443_33 (sequence is synthesized)
catcatgttttctaacggaaaaaaatgttaatatggcttttttgtattactaaaaatagctttgagattaaggaaaaataaataactcttgtacagttcagtattgtctattaaatctgt

SEQ ID NO: 796103 - DNA, 120 bp, Artificial Sequence
  ENSG00000277443_34 (sequence is synthesized)
attggcagtatgtataatggcatttgctgtggttacaaaatacttcctctgggttataataatcatttgatccaattcctattgcttgtaaaataaagttttaccagttgatataatcaa

SEQ ID NO: 796104 - DNA, 120 bp, Artificial Sequence
  ENSG00000277462_0 (sequence is synthesized)
actctcaagcgcgccgcgaaaggagggagcagcttccgggacctggcgcggcttttgtgttgggcagcgcgaatgtggcgagctcggtgcgtctccgctgctccttccccttatccctgg

SEQ ID NO: 796105 - DNA, 120 bp, Artificial Sequence
  ENSG00000277462_1 (sequence is synthesized)
gaggtccaagtggtcccgcggcagcttctgttgctctgggacctgcaggtcccggaaggtccttagggaggaccccagacaccggagactgggaaatggattcagtgtcatttgaagatg

SEQ ID NO: 796106 - DNA, 120 bp, Artificial Sequence
  ENSG00000277462_2 (sequence is synthesized)
tggctgtggcctttactcaggaggagtgggctttgctggatccttctcaaaagaatctctacagagatgtgatgcaagaaatcttcaggaacctggcttctgtaggaaacaaatcagaag

SEQ ID NO: 796107 - DNA, 120 bp, Artificial Sequence
  ENSG00000277462_3 (sequence is synthesized)
accagaatatccaagatgacttcaaaaatcctgggagaaatctaagcagtcatgtggtagagagactgtttgaaattaaagaaggcagtcaatatggagaaaccttcagccaggattcaa

SEQ ID NO: 796108 - DNA, 120 bp, Artificial Sequence
  ENSG00000277462_4 (sequence is synthesized)
atttgaatctgaataagaaagtttctactggagtaaagccatgtgaatgcagtgtgtgtggaaaagtcttcatatgtcattcagcccttcataggcacatcctgtctcacattggaaaca

SEQ ID NO: 796109 - DNA, 120 bp, Artificial Sequence
  ENSG00000277462_5 (sequence is synthesized)
aactatttgagtgtgaggaatgtccagagaagttatatcattgcaaacaatgtgggaaagcctttatctctctcaccagtgttgacagacacatggtaacacacactagtaatgggcctt

SEQ ID NO: 796110 - DNA, 120 bp, Artificial Sequence
  ENSG00000277462_6 (sequence is synthesized)
ataagggtccagtgtatgagaagccttttgattttcctagtgtatttcaaatgcctcagagcacttacactggagagaaaacatataaatgtaaacattgtgataaagccttcaattatt

SEQ ID NO: 796111 - DNA, 120 bp, Artificial Sequence
  ENSG00000277462_7 (sequence is synthesized)
caagttatcttcgtgaacatgaaagaactcatactggagagaaaccctatgcatgtaagaaatgtggtaaatcattcactttttccagttctcttcgccaacatgaaagatctcatactg

SEQ ID NO: 796112 - DNA, 120 bp, Artificial Sequence
  ENSG00000277462_8 (sequence is synthesized)
gagagaaaccctatgaatgtaaggaatgtggcaaagccttcagtcgttccacttacttgggaatacatgaaagaacgcatactggagaaaaaccctatgaatgtataaaatgtggcaaag

SEQ ID NO: 796113 - DNA, 120 bp, Artificial Sequence
  ENSG00000277462_9 (sequence is synthesized)
cctttagatgttccagagtcctcagagtccatgaaaggactcacagtggagaaaagccctatgaatgtaaacaatgtggtaaagccttcaaatattctagtaacctatgtgagcatgaaa

SEQ ID NO: 796114 - DNA, 120 bp, Artificial Sequence
  ENSG00000277462_10 (sequence is synthesized)
gaactcacactggagtgaaaccttatggatgtaaggaatgtggtaagtcgtttacttcttccagtgcccttcgaagccatgaaaggactcatactggagaaaaaccctatgaatgtaaga

SEQ ID NO: 796115 - DNA, 120 bp, Artificial Sequence
  ENSG00000277462_11 (sequence is synthesized)
aatgtggtaaagccttcagttgttccagttcccttcgaaagcatgaaagagcttatatgtggtaaaaaacaacaacaacaaaacacctctgtcaatgtaagaagtgtgttaaagctttca

SEQ ID NO: 796116 - DNA, 120 bp, Artificial Sequence
  ENSG00000277462_12 (sequence is synthesized)
gttattctagtttcattagaacacgtgaaaaaattaaaaactcaaattagagagaaacccaacacatgtaaggaagattagaatgtatgcaattttcctagttcccttctaaaacttaga

SEQ ID NO: 796117 - DNA, 120 bp, Artificial Sequence
  ENSG00000277462_13 (sequence is synthesized)
aggacccgtcctgggaaagaacgtcataaaatacgaaaaatgtgttagaacactttattttcccagccgctttcaaatatatttttatcagtggttcattgttaaagaaggtgtctatac

SEQ ID NO: 796118 - DNA, 120 bp, Artificial Sequence
  ENSG00000277462_14 (sequence is synthesized)
tttagattttcagttttttgcagggaatcatggagctgagaatttcacagatactttataagccatagtacatgagcttaataggctgtgttttgtttctcatcagttaacataattttt

SEQ ID NO: 796119 - DNA, 120 bp, Artificial Sequence
  ENSG00000277462_15 (sequence is synthesized)
gtctattcatttaaaaatttgttggatccctagactaagttgaaatgtatttctaatagtaggcaattttaattttcatgtagttgtttaattgttctctaattaatggaccaatgaaaa

SEQ ID NO: 796120 - DNA, 120 bp, Artificial Sequence
  ENSG00000277462_16 (sequence is synthesized)
gtgtgtgtgtgtgtgtgtgtgtattctacctttttatgggaaaactacttttttgttgtaaagattttcttctgttttctttgctaataaagaattgttattaatttgcatgtatgtgaa

SEQ ID NO: 796121 - DNA, 120 bp, Artificial Sequence
  ENSG00000277462_17 (sequence is synthesized)
tacttgcatagttcacttttttaaaaaatgttatgtttttagagagggtctcactttgtcagctaggctgaagtgtagtggtaataatagtcttagctcactgcagcctcaaattcctgg

SEQ ID NO: 796122 - DNA, 120 bp, Artificial Sequence
  ENSG00000277462_18 (sequence is synthesized)
ctatgtagctggagctacagacacatgccaccatgctcagctaattatataattttaaaaattttttatagagatgggatctcgctgtattgtctaggctggtattgaattcctggcctc

SEQ ID NO: 796123 - DNA, 120 bp, Artificial Sequence
  ENSG00000277462_19 (sequence is synthesized)
aagctatcctcctgcctcagcctgtctacatgttggggttactgacatgagctaccacacctggcccactttttactttgaattaagaagagagaactgtgattggacagtatgcttgtc

SEQ ID NO: 796124 - DNA, 120 bp, Artificial Sequence
  ENSG00000277462_20 (sequence is synthesized)
taatctgcgtgtgaaagcattcagtctcaccatcaagtatattgtggatttttcataaatattctcaaacaggctcaggaagttttcttgtgttttttatttattgtttcatggtaaagg

SEQ ID NO: 796125 - DNA, 120 bp, Artificial Sequence
  ENSG00000277462_21 (sequence is synthesized)
agtgttgaactcttatgacatgtttttttctgcatctattgagatgatttgtggtttttggcattctactgatagtctattacgttaactggctttcagatataaatatattatggttat

SEQ ID NO: 796126 - DNA, 120 bp, Artificial Sequence
  ENSG00000277462_22 (sequence is synthesized)
ctgggtgaaatttgtcttcatcatggaatataagtattttatctacaggttgaacatctgtaaaccccagattccaataccaaatctgaaatgctccgaagtcaaaaactgtttgagcac

SEQ ID NO: 796127 - DNA, 120 bp, Artificial Sequence
  ENSG00000277462_23 (sequence is synthesized)
cagtcttatgctcaacagaaatgctcattagaggatttttgatatttggattagggatgctcatccagtaagttttctgcaaatattccaaaatgttaaaagtctgaaatccaaagcact

SEQ ID NO: 796128 - DNA, 120 bp, Artificial Sequence
  ENSG00000277462_24 (sequence is synthesized)
tccgttcccaagtatttcagataagaaacactcaacccatattgataacgttcaattttccagtgtattgttggggccttttgcatttatagtcaaattggtgtgccctagtataccata

SEQ ID NO: 796129 - DNA, 120 bp, Artificial Sequence
  ENSG00000277462_25 (sequence is synthesized)
tagtatagcatcatctgtatatatagcatgtctacatgtatacttatatgtgtataagtagctatataatatgtggtatagtacagttttgtaagttactatgaattatgcataactagt

SEQ ID NO: 796130 - DNA, 120 bp, Artificial Sequence
  ENSG00000277462_26 (sequence is synthesized)
ttatattatgtgtaattagcactacaataaattgtatattacaggattatggcattataacatactattttgatcttatcagtctgtagcctaacatatttcagttgcctaccattccac

SEQ ID NO: 796131 - DNA, 120 bp, Artificial Sequence
  ENSG00000277462_27 (sequence is synthesized)
agatgcatttaaacaaaccaattgcatccttatgagaaccaagaagcatctcacgttcttgatactacaaagcattccccttacaccctgtttgttctatctgctccgtagtgcaagtct

SEQ ID NO: 796132 - DNA, 120 bp, Artificial Sequence
  ENSG00000277462_28 (sequence is synthesized)
tgtgtggaccagcctcgtttacagaaccctcccttttttgtctatgaatgtatgtaactaataacttctctcaatcttatctgtacactcatgggtgtcacgtgtttttcccagtagtct

SEQ ID NO: 796133 - DNA, 120 bp, Artificial Sequence
  ENSG00000277462_29 (sequence is synthesized)
tagggtcctaatttttcctgtcacccatgagactgtgaaaacaattggcattaccaacagaatgaaccaaccatgactgatgatatcttttcagctttaactacctgcttttgtctaact

SEQ ID NO: 796134 - DNA, 120 bp, Artificial Sequence
  ENSG00000277462_30 (sequence is synthesized)
ggttccataatataacagaagtcacctgaattagaaacagcaattgatggtggactttcactttggtctacacagtgctttgtgttatcagctgttgccacctcttcccacagtagaact

SEQ ID NO: 796135 - DNA, 120 bp, Artificial Sequence
  ENSG00000277462_31 (sequence is synthesized)
ctcaactcctagacatgactggttgaccagccgttccccaggaggatgtatgttccaccttgacctgtgtttggcaggcagtttccaaggtaccccacattgaggcagtgacccagcacc

SEQ ID NO: 796136 - DNA, 120 bp, Artificial Sequence
  ENSG00000277462_32 (sequence is synthesized)
ttcaccactgggttctttattcctgattatcaaaagtcagactactgctctgtggtaactgcatctcgtttggttgccatcactggatgcttggagtagccatgtgaacgttattactgt

SEQ ID NO: 796137 - DNA, 120 bp, Artificial Sequence
  ENSG00000277462_33 (sequence is synthesized)
acacacttgggacagctccagggattttgtgtgtgtgaagttgcagaaaggaagaatgtccccatgctggggagaattaagcatgtcacctaattgtgtaacaagatgacttgtgcaaga

SEQ ID NO: 796138 - DNA, 120 bp, Artificial Sequence
  ENSG00000277481_0 (sequence is synthesized)
atgttcttcaaaggaggaagctggctttggttatacatcagaacaagtattattctaggaagtgagctaaacagcccagcaccacatgggcaaaataattgttaccagcttaacagattt

SEQ ID NO: 796139 - DNA, 120 bp, Artificial Sequence
  ENSG00000277481_1 (sequence is synthesized)
caatgcagctttgaggaagcacagcattactgtcatgtgcagagaggattcctagctcatatttggaacaaggaagttcaagatctcatccgggactatctggaagaaggaaagaagtgg

SEQ ID NO: 796140 - DNA, 120 bp, Artificial Sequence
  ENSG00000277481_2 (sequence is synthesized)
tggattgggcaaaatgtaatgccattgaaaaagcatcaagacaacaaatacccagcagacgttgcagccaacgggcccccaaagcccctcagctgcacctacctgtccagaaacttcatt

SEQ ID NO: 796141 - DNA, 120 bp, Artificial Sequence
  ENSG00000277481_3 (sequence is synthesized)
cggatctcatccaaaggggacaagtgcttactgaaatactatttcatttgccagactggtgactttttggacggagatgcccattatgaaagaaatggaaataattcccatttgtaccag

SEQ ID NO: 796142 - DNA, 120 bp, Artificial Sequence
  ENSG00000277481_4 (sequence is synthesized)
agacacaagaagacaaaaagaggagttgcaatagcaagagacaaaatgcccccaggacctggtcatcttccaaccacatgtcactatcctcttcctgctcatctttccaagaccctgtgt

SEQ ID NO: 796143 - DNA, 120 bp, Artificial Sequence
  ENSG00000277481_5 (sequence is synthesized)
catcccatcagccagtttccttcagtactatcaagtatcacatcacaggtaacatcagccgcatctgaacccagcagccagcctctccctgtgataacacagctcaccatgcccgtgtct

SEQ ID NO: 796144 - DNA, 120 bp, Artificial Sequence
  ENSG00000277481_6 (sequence is synthesized)
gtcacgcatgctgggcaatctctggcagaaacaacttcaagcccaaaggaagaaggtcatccgaataccttcacctcttatctacaagtgtcattgcagaaggcatctggtcaggtcata

SEQ ID NO: 796145 - DNA, 120 bp, Artificial Sequence
  ENSG00000277481_7 (sequence is synthesized)
gatgagatagcagggaacttcagcagagcagttcatggtttgcaagctcttaacaaactacaggaagcttgtgagttcctccagaaactaacagccttaaccccaagattttctaagcca

SEQ ID NO: 796146 - DNA, 120 bp, Artificial Sequence
  ENSG00000277481_8 (sequence is synthesized)
gctcaggttaatctcatcaattcccttatttacctgagtgaggagttactcaggatcccatttcagaacaacaacagtctgggcttcaaagttcctccaactgtctgcccctttcattcc

SEQ ID NO: 796147 - DNA, 120 bp, Artificial Sequence
  ENSG00000277481_9 (sequence is synthesized)
ctcaacaatgtcaccaaagctggagaaggaagttggctggaatccaagcgtcatactgagccggtagaagacatcctggaaatgtccttggtggagtttgggaatatcggggaagcattt

SEQ ID NO: 796148 - DNA, 120 bp, Artificial Sequence
  ENSG00000277481_10 (sequence is synthesized)
ctagagcagaaccagtctcccgagtcttcagtgactttgacctctgccaatgctactctgctgctgagcagacaaaacatatcaactttaccgctgagctcttacactctgggtcaccca

SEQ ID NO: 796149 - DNA, 120 bp, Artificial Sequence
  ENSG00000277481_11 (sequence is synthesized)
gcccctgtgaggctaggctttccgtcggctttagctttgaaggagctcttgaataaacatccaggagttaatgtccaaataacaggactagctttcaatcccttcaaggatttggacaac

SEQ ID NO: 796150 - DNA, 120 bp, Artificial Sequence
  ENSG00000277481_12 (sequence is synthesized)
agaaacattgttggaagcattggaagtgtgttactaagcgctaatcgtaaattgctccaagtccatgatttaatggaggacattgagatcatgctctggagaaatgttagcttggaaacc

SEQ ID NO: 796151 - DNA, 120 bp, Artificial Sequence
  ENSG00000277481_13 (sequence is synthesized)
catcccaccagcctcaacatgagcacacatcagcttacaatcacagtgaacgtcacttccttggagaaatccttgatagtgagcatagatcctgacagtccccttttaatgacactctac

SEQ ID NO: 796152 - DNA, 120 bp, Artificial Sequence
  ENSG00000277481_14 (sequence is synthesized)
ctggggttccagtatcagcctaactgcactcacttccacctgaacatcacccttccaaaggataaggtgtggcaaaaagatgaggagtacacgtgggtgctgaatccagagcatctgcag

SEQ ID NO: 796153 - DNA, 120 bp, Artificial Sequence
  ENSG00000277481_15 (sequence is synthesized)
cacgggattggcacctactatataacagctgtgctgagtgagaggcaggagggtgctcagcagacacccagcttggtctcggtcatcaccgccgtcactcagtgttactactgggagatc

SEQ ID NO: 796154 - DNA, 120 bp, Artificial Sequence
  ENSG00000277481_16 (sequence is synthesized)
cacaaccagacatggagcagcgccggatgccaagttgggccacagagcacaattctgaggacacagtgtctctgtaaccacctgaccttctttgccagcgacttctttgtcgtgcccagg

SEQ ID NO: 796155 - DNA, 120 bp, Artificial Sequence
  ENSG00000277481_17 (sequence is synthesized)
accgtgaatgttgaagacacgatcaaactgttccttcgcgtgaccaacaatcctgttggggtgtcactgctggccagccttttaggattttatgtgatcacagttgtgtgggctcggaaa

SEQ ID NO: 796156 - DNA, 120 bp, Artificial Sequence
  ENSG00000277481_18 (sequence is synthesized)
aaggatcaagcagatatgcagaaggtgaaggtcactgtcctggctgataatgaccccagcgctcaatttcactaccttattcaggtctacaccggatatcgaagaagcgctgctacaaca

SEQ ID NO: 796157 - DNA, 120 bp, Artificial Sequence
  ENSG00000277481_19 (sequence is synthesized)
gctaaggttgtcatcaccctctatggatcagagggacggagtgagccccatcacctctgtgacccccagaagacagtctttgaacgagggggcctggatgtcttccttctcaccacttgg

SEQ ID NO: 796158 - DNA, 120 bp, Artificial Sequence
  ENSG00000277481_20 (sequence is synthesized)
acctctctagggaacctgcacagccttcggctctggcatgacaattctggcgtcagtccctcctggtatgtcagccaggtaattgtctgtgacatggcagttaagaggaagtggcatttc

SEQ ID NO: 796159 - DNA, 120 bp, Artificial Sequence
  ENSG00000277481_21 (sequence is synthesized)
gagcttgaccgggtcttcatcccagtttcaaagagagagctcttttcctttagacatctgttttcctccatgattgtggaaaagttcacccaggattatctgtggctttcaattgcaact

SEQ ID NO: 796160 - DNA, 120 bp, Artificial Sequence
  ENSG00000277481_22 (sequence is synthesized)
cggcatccctggaaccagtttacaagggtccaacggctgtcttgctgcatgacactgctactctgcaacatggtcatcaatgttatgttctggaagataaacagcaccactgccaagaga

SEQ ID NO: 796161 - DNA, 120 bp, Artificial Sequence
  ENSG00000277481_23 (sequence is synthesized)
gatgagcaaatgcgtccatttgctgtggcctggtctgaactgctggtcagcatccatactgctgtcatcctcttcccaatcaatcttgtcatagggcggctcttcccgttgattgagcca

SEQ ID NO: 796162 - DNA, 120 bp, Artificial Sequence
  ENSG00000277481_24 (sequence is synthesized)
caggagactctgcccctctttcctcccatccaggcctcctgcctctcagatgcttctgttgagcctctctctgccacaatggtagttgaggaattaaaggaaactgtgagattcctgctc

SEQ ID NO: 796163 - DNA, 120 bp, Artificial Sequence
  ENSG00000277481_25 (sequence is synthesized)
aggagaaatacatacctactctccaagtgtgagcagccgccatggagttcttgggacattactaagctggtgaaacttttatccagcctcgtatcatctcacttggagggtcaaggctgt

SEQ ID NO: 796164 - DNA, 120 bp, Artificial Sequence
  ENSG00000277481_26 (sequence is synthesized)
catcagcagggagagcgccactgggcacgtgttgttcctgaaaaccaccatcatttctgctgttacctgcatagagttctgcagaggctgaaatctcacttaggcacgctgggtctcacc

SEQ ID NO: 796165 - DNA, 120 bp, Artificial Sequence
  ENSG00000277481_27 (sequence is synthesized)
cagggtcaccagtcctgtgacttcctagatgcagccagccaacttcaaaaactccaggaactcttggaaacacatattcttcccacggagcaagagccatccagggaagtcaccagtttt

SEQ ID NO: 796166 - DNA, 120 bp, Artificial Sequence
  ENSG00000277481_28 (sequence is synthesized)
gccatcctgagctcagaagaaggaaaaaagcccatctcaaatggcctgtccaaatggttgacttcagtctgctggctcctcttaggtttcactagcctggcttcagccttttttacagca

SEQ ID NO: 796167 - DNA, 120 bp, Artificial Sequence
  ENSG00000277481_29 (sequence is synthesized)
ctttatagcttggaattgagcaaagaccaagccaccagctggatgatttcaattattttatcagtgcttcagaacatcttcatcagccagccagtaaaggtggtcttcttcacattctta

SEQ ID NO: 796168 - DNA, 120 bp, Artificial Sequence
  ENSG00000277481_30 (sequence is synthesized)
tactcactgatgatgagcaggatgccacggcttaacaaagagaatgaacaacaaacaaagaggatcttggcactcttggcaaaatgttcttcgtcagtaccaggttcaagagataagaac

SEQ ID NO: 796169 - DNA, 120 bp, Artificial Sequence
  ENSG00000277481_31 (sequence is synthesized)
aaccccgtctatgtagccccagctataaatagtccaactaagcacccagaaagaaccttgaaaaagaagaaactcttcaagctgactggagatattttggtacaaatcctcttccttacc

SEQ ID NO: 796170 - DNA, 120 bp, Artificial Sequence
  ENSG00000277481_32 (sequence is synthesized)
ctgttgatgactgcaatctactctgcaaagaactccaatagattttacctccaccaagctatctggaagacattttcgcaccagttctcggaaatcaaacttcttcaggatttctacccc

SEQ ID NO: 796171 - DNA, 120 bp, Artificial Sequence
  ENSG00000277481_33 (sequence is synthesized)
tgggccaatcatatccttcttcctagcctgtatggggattacagaggtaagaatgcagtcctggagcccagtcattgcaaatgtggggtacaattaattttccaaataccccgtaccaag

SEQ ID NO: 796172 - DNA, 120 bp, Artificial Sequence
  ENSG00000277481_34 (sequence is synthesized)
acctatgagaaagtggacgaaggtcagctggcgttttgtgataacggccatacctgtgggcgtcccaagagcctattccctggacttcatctaaggaggttcagttacatctgttcaccc

SEQ ID NO: 796173 - DNA, 120 bp, Artificial Sequence
  ENSG00000277481_35 (sequence is synthesized)
aggcccatggtgctgattcccactgatgagcttcacgaaaggctgacaagcaagaatgagaatggattcagttacatcatgagaggtgctttcttcacctctttgagactggaaagcttc

SEQ ID NO: 796174 - DNA, 120 bp, Artificial Sequence
  ENSG00000277481_36 (sequence is synthesized)
acttcccttcagatgtcaaagaagggctgtgtctggtctatcatctcacaagtcatctattatctactggtctgttactatgccttcatacagggttgtcagctgaaacagcagaagtgg

SEQ ID NO: 796175 - DNA, 120 bp, Artificial Sequence
  ENSG00000277481_37 (sequence is synthesized)
aggttcttcactgggaaaagaaacattctggacacaagtataatcctcattagcttcatcctcctggggcttgacatgaagagtatttctctacataagaaaaacatggcacgataccgc

SEQ ID NO: 796176 - DNA, 120 bp, Artificial Sequence
  ENSG00000277481_38 (sequence is synthesized)
gatgaccaggacagattcatcagcttctatgaggcagtaaaagtgaactctgctgcgactcaccttgtgggcttcccggttctcctggcaactgttcagttatggaacctgctgcgtcat

SEQ ID NO: 796177 - DNA, 120 bp, Artificial Sequence
  ENSG00000277481_39 (sequence is synthesized)
agccccaggctgcgggtcatcagcaggacactgagccgagcctgggacgaggtggtgggctttctgctgatcatcctaatcctgctgacaggctatgccattgcctttaacctgctgttt

SEQ ID NO: 796178 - DNA, 120 bp, Artificial Sequence
  ENSG00000277481_40 (sequence is synthesized)
ggatgcagcatctctgactaccggacatttttcagctcagcagtgactgttgttggtctcctgatgggaatttctcaccaagaggaggttttcgctttagacccagtcctgggcaccttt

SEQ ID NO: 796179 - DNA, 120 bp, Artificial Sequence
  ENSG00000277481_41 (sequence is synthesized)
ctgatcctcaccagtgtcatcttgatggtacttgtggtaattaatcttttcgtttcggccattctcatggcctttggaaaagaaagaaagtcgcttaagaaagaagctgcactaatagat

SEQ ID NO: 796180 - DNA, 120 bp, Artificial Sequence
  ENSG00000277481_42 (sequence is synthesized)
acactgctacagaagctctcaaatttgttaggaatcagttggccccaaaaaacctcatctgagcaagcagccacgacagcagtgggcagtgacactgaagttttagatgaactaccttaa

SEQ ID NO: 796181 - DNA, 120 bp, Artificial Sequence
  ENSG00000277494_0 (sequence is synthesized)
agagccctgcgggaggactcagagtcagggacacagcagcgtccggcgagatgaaggcgctcggggctgtcctgcttgccctcttgctgttcgggcggccagggagagggcagacacagc

SEQ ID NO: 796182 - DNA, 120 bp, Artificial Sequence
  ENSG00000277494_1 (sequence is synthesized)
aggaggaagaggaagaggacgaggaccacgggccagatgactacgacgaggaagatgaggatgaggtggaagaggaggagaccaacaggctccctggtggcaggagcagagtgctgctgc

SEQ ID NO: 796183 - DNA, 120 bp, Artificial Sequence
  ENSG00000277494_2 (sequence is synthesized)
ggtgctacacctgcaagtccctgcccagggacgagcgctgcaacctgacgcagaactgctcacatggccagacctgcacaaccctcattgcccacgggaacaccgagtcaggcctcctga

SEQ ID NO: 796184 - DNA, 120 bp, Artificial Sequence
  ENSG00000277494_3 (sequence is synthesized)
ccacccactccacgtggtgcacagacagctgccagcccatcaccaagacggtggaggggacccaggtgaccatgacctgctgccagtccagcctgtgcaatgtcccaccctggcaaagct

SEQ ID NO: 796185 - DNA, 120 bp, Artificial Sequence
  ENSG00000277494_4 (sequence is synthesized)
cccgagtccaggacccaacaggcaagggggcaggcggcccccggggcagctccgaaactgtgggcgcagccctcctgctcaacctccttgccggccttggagcaatgggggccaggagac

SEQ ID NO: 796186 - DNA, 120 bp, Artificial Sequence
  ENSG00000277494_5 (sequence is synthesized)
cctgacccacggcccctccccacccccacccggctcacccccggccctgccagcactctgtctggtaccttcccctcctgcccctgcaccagctttggagaatggatttggagtgtcttg

SEQ ID NO: 796187 - DNA, 120 bp, Artificial Sequence
  ENSG00000277494_6 (sequence is synthesized)
ggcgatccagccagcgcaggccccccggcccggttgcttcctcagttcccggctgtgtccttggtgtcctttctccaccacctgtgagcagcaagactgccgcacgtgggcgctgggtcc

SEQ ID NO: 796188 - DNA, 120 bp, Artificial Sequence
  ENSG00000277494_7 (sequence is synthesized)
agacctcggctgccacgccccaggacctgcagccctcatgggggctggggatccccatcagcacagccaggcagagatgatacccaccacacacctgggggcccccacacccagtcctca

SEQ ID NO: 796189 - DNA, 120 bp, Artificial Sequence
  ENSG00000277494_8 (sequence is synthesized)
cccttaacttctgccatgggaattcctccatctgcagcggtcacacgggcccaccctgcccttccccaggtcggcctctccgctgtctggagggaaggggatttggagggaggctgtcgt

SEQ ID NO: 796190 - DNA, 120 bp, Artificial Sequence
  ENSG00000277494_9 (sequence is synthesized)
aggggcggggcgggggggggctggggggacaggcaccaagtatgaagaggatggggccagcggggcctgtctggctatggcgtgagcaccgctatgggagaccctggcttggaaagtgaa

SEQ ID NO: 796191 - DNA, 120 bp, Artificial Sequence
  ENSG00000277494_10 (sequence is synthesized)
tgaacttgcagccttggatggggaagggccagatgctgggtgggtgcctgtcaccttgaggtgaccatctagggtcagtacctgctgggcttaggacagcgcctgaggctgggaatacct

SEQ ID NO: 796192 - DNA, 120 bp, Artificial Sequence
  ENSG00000277494_11 (sequence is synthesized)
gtctctgctctagcagaggctaaagcaggctagagcagtggaggggtggagttgatgaaaggagaggagtagatgagatggaatttttccagcctcatcctggcctgccctctagactcc

SEQ ID NO: 796193 - DNA, 120 bp, Artificial Sequence
  ENSG00000277494_12 (sequence is synthesized)
agtccccaagccctcagcctagtgggtgtcatggatggatctgggggtgtcagacaggctaccctgtgccagggagggggcagaatgggcctgcagcttcctgcagaggaagcaggactg

SEQ ID NO: 796194 - DNA, 120 bp, Artificial Sequence
  ENSG00000277494_13 (sequence is synthesized)
ggtagcagagccgggaaggtgggtggcccattacaggggggtccccagggtgtcctctggcagggctgtgactgctgcaagctctgccttcaccagtagctggtgccaggacagagctct

SEQ ID NO: 796195 - DNA, 120 bp, Artificial Sequence
  ENSG00000277494_14 (sequence is synthesized)
gggacagcaggcagaggccgagcctgggccacagctcagccactgacttgggtatcagtttccccttctgagaagtacagagtgagacttaaagaacccctagatccccaccagttcaac

SEQ ID NO: 796196 - DNA, 120 bp, Artificial Sequence
  ENSG00000277494_15 (sequence is synthesized)
actccattaactgggaagcccagagtcctgtccggcctgccaagttcatcctggtggacagcgggaggcctccgctaactgttctcttcttttccttattaataaaacacacaatgccta

SEQ ID NO: 796197 - DNA, 120 bp, Artificial Sequence
  ENSG00000277494_16 (sequence is synthesized)
gctggggggtcggaaggcaaatgccctagatggtggggtcacgtctttctccttctccttcctccttctgctggctgaagtgatgactggagctcagcaaccactttgcaccatgaggca

SEQ ID NO: 796198 - DNA, 120 bp, Artificial Sequence
  ENSG00000277494_17 (sequence is synthesized)
gcactgagcacggtagggcagcctggtgagaggggcctagctcgctgccgacagaagtcactgcctacctcagggtccccttacctgggtgggaaataaatttctgctgtgttgaagcta

SEQ ID NO: 796199 - DNA, 120 bp, Artificial Sequence
  ENSG00000277531_0 (sequence is synthesized)
gcggaaggaggcggtgacgtcaccgcgggagcaagtgcagcggccacatcctcgtcctagtccggcgacagggcactgagtgcaacctctgggccagcggtgagggacgcgcctccctgc

SEQ ID NO: 796200 - DNA, 120 bp, Artificial Sequence
  ENSG00000277531_1 (sequence is synthesized)
ctgccagggccgcgcctacgacactctgttggcagttgtcccagggagatcagcagtcccagatccggagagaccgttggggcctgtgagaccttcggaggccacgccaagaaaggggaa

SEQ ID NO: 796201 - DNA, 120 bp, Artificial Sequence
  ENSG00000277531_2 (sequence is synthesized)
gcatcatctttagaccctccttggtgcagccttgcccaggacccgggagccacgagtcaggtggcaaacaccgccttctgcttctccagcacgcgtaagtccctgggaatcttcgagccc

SEQ ID NO: 796202 - DNA, 120 bp, Artificial Sequence
  ENSG00000277531_3 (sequence is synthesized)
actcagagggagccacagaagccccgacgttgcacagccctgcaggcaggggctgggggcatccttcactgagctggacgaaggggtcctgggagcggcctccggcccctgaggcctcac

SEQ ID NO: 796203 - DNA, 120 bp, Artificial Sequence
  ENSG00000277531_4 (sequence is synthesized)
tctctcgtagcctttgggaaggaatcgcggcatcctggataatttcgtggattcccgaggcagctcaggtgtccaccagcgggcatactgctgcctcaaagagttgggcaagatgctgtt

SEQ ID NO: 796204 - DNA, 120 bp, Artificial Sequence
  ENSG00000277531_5 (sequence is synthesized)
cggggtgaaggacattgcactgttggagcacgggtgcaaggccctggaggtggacagttacaagtccctgatgatcctggggatcccggaggactgcaaccacgaggaattcgaagagat

SEQ ID NO: 796205 - DNA, 120 bp, Artificial Sequence
  ENSG00000277531_6 (sequence is synthesized)
tattcggctgcccctcaaacctctaggcaagttcgaagtggctgggaaggcctatctggaagaagataaatccaaggcggccatcattcagctgacggaggacatcaattacgccgtggt

SEQ ID NO: 796206 - DNA, 120 bp, Artificial Sequence
  ENSG00000277531_7 (sequence is synthesized)
ccccagggagatcaagggcaagggcggtgtgtggagagtggtctacatgccccggaagcaggacattgaattcctgaccaagctgaacctctttctgcagagcgagggcaggacggtgga

SEQ ID NO: 796207 - DNA, 120 bp, Artificial Sequence
  ENSG00000277531_8 (sequence is synthesized)
ggatatggcccgggtcctgaggcaggaactgtgtcccccagccacgggccccagagagctgcctgcaagaaagtgctctgtgcctgggctgggggagaaaccggaggctggggccaccgt

SEQ ID NO: 796208 - DNA, 120 bp, Artificial Sequence
  ENSG00000277531_9 (sequence is synthesized)
ccagatggacgtggtgccacctctggactcctccgagaaggagagcaaggctggagttggcaagaggggcaaaaggaagaacaagaaaaaccgccggcggcatcacgcctcagacaagaa

SEQ ID NO: 796209 - DNA, 120 bp, Artificial Sequence
  ENSG00000277531_10 (sequence is synthesized)
gctgtgaggtggtggcatcgggtgggcgtggggagtgtctgagggggtgtgggtgatgactgtgggagggtaggtaccacctcactacgtttaaggagtgcgagtgagtgtgggtaatgc

SEQ ID NO: 796210 - DNA, 120 bp, Artificial Sequence
  ENSG00000277531_11 (sequence is synthesized)
aagggagggtgggaatgactctagtgagtgggtaactttggagtaagaatgggtatcatttggatagcacaggtaacatctgactagtgcgaaagaggtggatatctttatctgagttaa

SEQ ID NO: 796211 - DNA, 120 bp, Artificial Sequence
  ENSG00000277531_12 (sequence is synthesized)
ctaacttgtgggttacatctgagtgggtgtggttaacgtctgggtgcccgtggctcatttattcatcttacagatatttattgcatacctactatgttccaggagctggggatatggaag

SEQ ID NO: 796212 - DNA, 120 bp, Artificial Sequence
  ENSG00000277531_13 (sequence is synthesized)
ggagtaaactcaataaaaatccctgccttcatggcactcagagtaagtgggtaatatttgaattacttggagacatcagagtgagcgtaggtagcatttgagtacatgtgggtaacagct

SEQ ID NO: 796213 - DNA, 120 bp, Artificial Sequence
  ENSG00000277531_14 (sequence is synthesized)
gaatgatcataaaatctggttgagtgtggattgctcattcatccatgtatccatgcaaccaacaaaatttcctgaggacctacagtgtgccaggcactggggatacagaaggggaataaa

SEQ ID NO: 796214 - DNA, 120 bp, Artificial Sequence
  ENSG00000277531_15 (sequence is synthesized)
cagaccaaaaccttgcccgtgactctcatagtagctatttgagtaggtgcgggtaacatttgggttacttgaatacacgttagtgagtgtgggtagcattagagtgtgtgggtggcatcc

SEQ ID NO: 796215 - DNA, 120 bp, Artificial Sequence
  ENSG00000277531_16 (sequence is synthesized)
gcgtataattgaaagtagttgtgggtaatatttgagagtgtgcgggtaacacctgaatatgtgtatgggtatcatttgagtagatgagagtaatttctaagcgaggaagggtctcaaaga

SEQ ID NO: 796216 - DNA, 120 bp, Artificial Sequence
  ENSG00000277531_17 (sequence is synthesized)
agtcagagccagaacctagcagcgcgtccgaccgttgctatggagaccacaggctgaccccaggcgcctgcgccctttgcagaaaatggaggaggtggaaacggtcctggattccaaggt

SEQ ID NO: 796217 - DNA, 120 bp, Artificial Sequence
  ENSG00000277531_18 (sequence is synthesized)
tttgcagatctcttactggagttgaagaaaactcacgcagacccaggaggaacgtgtcagggagatccctactcgggagaagggccgccatcctccttcggctgtcacccacggcctgat

SEQ ID NO: 796218 - DNA, 120 bp, Artificial Sequence
  ENSG00000277531_19 (sequence is synthesized)
tctggggacagcctctcttgctggggggaggcgggcggcacggacccctctagctttgcgccctcctggaaatcctgttattgcaaagtctagagccgttttctgtgtttcaaaagcatg

SEQ ID NO: 796219 - DNA, 120 bp, Artificial Sequence
  ENSG00000277531_20 (sequence is synthesized)
taccttgaatgtacctctggcacaaacttgttcggagtgggccaccctgttttgcgcatgtcaagcagaaaccatggctgagagtgagttgcctgctccccacctctgaggaactcactg

SEQ ID NO: 796220 - DNA, 120 bp, Artificial Sequence
  ENSG00000277531_21 (sequence is synthesized)
atctgtaagcggctcttgaaaagctgtcgtctttctctacacgctgagtctctcttacagaagtggtcagaagcgggacccttctgccccgattggcgcctggggtgagggtgtgagtct

SEQ ID NO: 796221 - DNA, 120 bp, Artificial Sequence
  ENSG00000277531_22 (sequence is synthesized)
ccccaagttaaattccagaagctctggcttggtgaggaggagtgaactccactctctaaagaagaggcaaggcttctgggcaatggtccaaaaggaggtaaatcattaagaggccatttt

SEQ ID NO: 796222 - DNA, 120 bp, Artificial Sequence
  ENSG00000277531_23 (sequence is synthesized)
caagagttaccaatgaacgacgttaacactgaggtgaagaagaattttaaaaatcaggtaaaatccaaatacatgtgagtaggcagatcttttgctcagagacaacggacctgtcaattt

SEQ ID NO: 796223 - DNA, 120 bp, Artificial Sequence
  ENSG00000277531_24 (sequence is synthesized)
gcaaacttgttagttcaaggatctgcaaaggtttgactgaatctcttttcaaaaatgtaacttacacacaacacaaagactcagcctaccaaattgtaatgtcagagactcctaacgtct

SEQ ID NO: 796224 - DNA, 75 bp, Artificial Sequence
  ENSG00000277531_25 (sequence is synthesized)
ccctagtagctaggattacaggcatgaaccaccacgtccagctaaattttgtatttttaccgccttggtctccca

SEQ ID NO: 796225 - DNA, 71 bp, Artificial Sequence
  ENSG00000277531_26 (sequence is synthesized)
ccgccttggtctcccaaagtgctgggattgcaggtgtaagccactgcgcccagcttccttctgtagcccag

SEQ ID NO: 796226 - DNA, 120 bp, Artificial Sequence
  ENSG00000277531_27 (sequence is synthesized)
ttccttgtaaatgcccagcctgggcatacccactcgcagaatattgtactactgtgttcgttattgcatcccagagtctgagcttgaataaatgctacgaaagcctccagcgtgtttgtt

SEQ ID NO: 796227 - DNA, 120 bp, Artificial Sequence
  ENSG00000277531_28 (sequence is synthesized)
gcatgctgctctcccatcaaggcataatcgttgtataataagggatagtgtgacatttcttatcatattgcagcatgaagactgtattttgtgcttattgtggatttcaggggtataaca

SEQ ID NO: 796228 - DNA, 120 bp, Artificial Sequence
  ENSG00000277531_29 (sequence is synthesized)
tttatatttgtgatacacaacatgcgtggttgttcaatgttgcccatgaaatcaaaatcctaccacttctctttcaagattttctggaccaaagtgtatcctgggactccaatgcaagtt

SEQ ID NO: 796229 - DNA, 120 bp, Artificial Sequence
  ENSG00000277531_30 (sequence is synthesized)
gtcatgcaaaactgtcaccatttgaagctacttagctgagtgaaaacatcactggtagggcaaatcccaagcaaaaattcacaagtaaattgaatgtgccagctgttggagggctgcatc

SEQ ID NO: 796230 - DNA, 120 bp, Artificial Sequence
  ENSG00000277531_31 (sequence is synthesized)
tggcttctgtaaacccctgatttcaaaagggggttcagctaaaactcttcattgttctttgtgattgagatgctcttttgtacaaatatgaactcataaaataaatgtatgctaatgaaa

SEQ ID NO: 796231 - DNA, 120 bp, Artificial Sequence
  ENSG00000277535_0 (sequence is synthesized)
atgtctgccacaggggatcaagacctgatccaagaggaccaggaggctccagtgaaccaggagggagcgcaggccgaggccgtaggtgaccgggagggcggtgactctggccccgacagt

SEQ ID NO: 796232 - DNA, 88 bp, Artificial Sequence
  ENSG00000277535_1 (sequence is synthesized)
ttggccgcagcccccgggggtgggaacgccgaggaagactcagagatcaggatagtagtggagatggtggaggaggaggaggatgagg

SEQ ID NO: 796233 - DNA, 120 bp, Artificial Sequence
  ENSG00000277535_2 (sequence is synthesized)
aggaggaagaggaggaggaggaggaagagaggaacgaggcggacaacttcgacttggtcgcggccgcccgtcgctaccccataagaggctttcgcatggagtttctggacatggtccact

SEQ ID NO: 796234 - DNA, 120 bp, Artificial Sequence
  ENSG00000277535_3 (sequence is synthesized)
ataagaggctttcgcatggagtttctggacatggtccactcccttctcctccgcatctatcacaacgaccacatcctgatcaggatgcgtggcggccgcctgatgcggaggcgccgcact

SEQ ID NO: 796235 - DNA, 120 bp, Artificial Sequence
  ENSG00000277535_4 (sequence is synthesized)
cgggtcctgagggcgagggcctgggcctgctccaggaggccgcgttggtcccagagcctgaggtgccagcagacctggccgagatggccagggagcctgcagaagagcccgcagaggagg

SEQ ID NO: 796236 - DNA, 120 bp, Artificial Sequence
  ENSG00000277535_5 (sequence is synthesized)
cctcagagaagcccacagaggaggccgcagaagagcccgcagaggaggcctcagagaagcccacagaggaggccgcagaggaggagctcgcagaggaggccgcagaggaaccggccaaag

SEQ ID NO: 796237 - DNA, 120 bp, Artificial Sequence
  ENSG00000277535_6 (sequence is synthesized)
ggccaaagaggaaccggctgcagaggaggagtccgcagaggaaccggccacagaggaggctgctgcccctgaggaagtcactaaatatcagcatgaaaagtgggatgaagaggcccaaga

SEQ ID NO: 796238 - DNA, 79 bp, Artificial Sequence
  ENSG00000277535_7 (sequence is synthesized)
gaagctgagaaaatccagatgcctgtgagaattttaacacatatcattccaaagttcattaccttaaaagtgatatcta

SEQ ID NO: 796239 - DNA, 120 bp, Artificial Sequence
  ENSG00000277535_8 (sequence is synthesized)
catatcattccaaagttcattaccttaaaagtgatatctagtgacatctaacttttatctttcacaaatgtatttgacagtgtttgttcaagttagaaataaaagtttgttttaaatgaa

SEQ ID NO: 796240 - DNA, 120 bp, Artificial Sequence; identical to SEQ ID NO: 795185
  ENSG00000277556_0 (sequence is synthesized)

SEQ ID NO: 796241 - DNA, 120 bp, Artificial Sequence; identical to SEQ ID NO: 331606
  ENSG00000277556_1 (sequence is synthesized)

SEQ ID NO: 796242 - DNA, 120 bp, Artificial Sequence
  ENSG00000277556_2 (sequence is synthesized)
acgctagtgagcttcctttcagaaagaaagaccatttccctttctggctgtgcagtgcagatgttcctcagcttggccatggggacaacagagtgtgtgcttctgggcgtgatggccttt

SEQ ID NO: 796243 - DNA, 120 bp, Artificial Sequence
  ENSG00000277556_3 (sequence is synthesized)
acagtgtttgtggtacaattgcctttctgcaggaataacatcatcaatcatttcacctgtgaaattctagctgtcatgaaactggcctgtgctgacatctcaggcaatgagttcatcctg

SEQ ID NO: 796244 - DNA, 120 bp, Artificial Sequence
  ENSG00000277556_4 (sequence is synthesized)
cttgtgaccacaacattgttcctattgacacctttgttattaattattgtctcttacacgttaatcattttgagcatcttcaaaattagctcttcggaggggagaagcaaaccttcctct

SEQ ID NO: 796245 - DNA, 120 bp, Artificial Sequence
  ENSG00000277556_5 (sequence is synthesized)
acctgctcagctcgtctgactgtggtgataacattctgtgggaccatcttcctcatgtacatgaagcccaagtctcaagagacacttaattcagatgacttggatgccactgacaaactt

SEQ ID NO: 796246 - DNA, 120 bp, Artificial Sequence
  ENSG00000277556_6 (sequence is synthesized)
atattcatattctacagggtgatgactcccatgatgaatcctttaatctacagtcttagaaacaaggatgtgaaggaggcagtaaaacacctactgagaagaaaaaattttaacaagtaa

SEQ ID NO: 796247 - DNA, 120 bp, Artificial Sequence
  ENSG00000277586_0 (sequence is synthesized)
tacacataacctagcctatttatttgtatctaaaattccctagccgcaccatcaccgtaaacaccaagggaaaaaattaaggaggttcctggtgggaaaagggcgagttggggggacagg

SEQ ID NO: 796248 - DNA, 120 bp, Artificial Sequence
  ENSG00000277586_1 (sequence is synthesized)
gtgtctgcgaggtgacgggatacagaaaactagggtgtcaaaagggagcaagaacctgttttgggggcaacttaaggatccaagtgtcacggggtctgggcaatgcaggacgggaggggc

SEQ ID NO: 796249 - DNA, 120 bp, Artificial Sequence
  ENSG00000277586_2 (sequence is synthesized)
tgcgtgagtgagtacagaagggaaatgagtgagggggcatgggatctcagagaaaatcagggccctctgagcaaagtggaaaggacgaccgccgcagctcctcgggccgtagctcgaccc

SEQ ID NO: 796250 - DNA, 120 bp, Artificial Sequence
  ENSG00000277586_3 (sequence is synthesized)
cgccttcccttttgcgcagaatcctcgccttggctgcagcagcgcgctgcccccactggccggcgtgccgtgatcgatcgcaggctgcgtcaggagcctcccggcgtataaataggggtg

SEQ ID NO: 796251 - DNA, 120 bp, Artificial Sequence
  ENSG00000277586_4 (sequence is synthesized)
gcagaacggcgccgagccgcacacagccatccatcctcccccttccctctctcccctgtcctctctctccgggctcccaccgccgccgcgggccggggagccaccggccgccaccatgag

SEQ ID NO: 796252 - DNA, 120 bp, Artificial Sequence
  ENSG00000277586_5 (sequence is synthesized)
ttccttcagctacgagccgtactactcgacctcctacaagcggcgctacgtggagacgccccgggtgcacatctccagcgtgcgcagcggctacagcaccgcacgctcagcttactccag

SEQ ID NO: 796253 - DNA, 120 bp, Artificial Sequence
  ENSG00000277586_6 (sequence is synthesized)
ctactcggcgccggtgtcttcctcgctgtccgtgcgccgcagctactcctccagctctggatcgttgatgcccagtctggagaacctcgacctgagccaggtagccgccatcagcaacga

SEQ ID NO: 796254 - DNA, 120 bp, Artificial Sequence
  ENSG00000277586_7 (sequence is synthesized)
cctcaagtccatccgcacgcaggagaaggcgcagctccaggacctcaatgaccgcttcgccagcttcatcgagcgcgtgcacgagctggagcagcagaacaaggtcctggaagccgagct

SEQ ID NO: 796255 - DNA, 120 bp, Artificial Sequence
  ENSG00000277586_8 (sequence is synthesized)
gctggtgctgcgccagaagcactccgagccatcccgcttccgggcgctgtacgagcaggagatccgcgacctgcgcctggcggcggaagatgccaccaacgagaagcaggcgctccaggg

SEQ ID NO: 796256 - DNA, 120 bp, Artificial Sequence
  ENSG00000277586_9 (sequence is synthesized)
cgagcgcgaagggctggaggagaccctgcgcaacctgcaggcgcgctatgaagaggaggtgctgagccgcgaggacgccgagggccggctgatggaagcgcgcaaaggcgccgacgaggc

SEQ ID NO: 796257 - DNA, 120 bp, Artificial Sequence
  ENSG00000277586_10 (sequence is synthesized)
ggcgctcgctcgcgccgagctcgagaagcgcatcgacagcttgatggacgaaatctcttttctgaagaaagtgcacgaagaggagatcgccgaactgcaggcgcagatccagtacgcgca

SEQ ID NO: 796258 - DNA, 120 bp, Artificial Sequence
  ENSG00000277586_11 (sequence is synthesized)
gatctccgtggagatggacgtgaccaagcccgacctttccgccgcgctcaaggacatccgcgcgcagtacgagaagctggccgccaagaacatgcagaacgctgaggaatggttcaagag

SEQ ID NO: 796259 - DNA, 120 bp, Artificial Sequence
  ENSG00000277586_12 (sequence is synthesized)
ccgcttcaccgtgctgaccgagagcgccgccaagaacaccgacgccgtgcgcgccgccaaggacgaggtgtccgagagccgtcgtctgctcaaggccaagaccctggaaatcgaagcatg

SEQ ID NO: 796260 - DNA, 120 bp, Artificial Sequence
  ENSG00000277586_13 (sequence is synthesized)
ccggggcatgaatgaagcgctggagaagcagctgcaggagctggaggacaagcagaacgccgacatcagcgctatgcaggacacgatcaacaaattagaaaatgaattgaggaccacaaa

SEQ ID NO: 796261 - DNA, 120 bp, Artificial Sequence
  ENSG00000277586_14 (sequence is synthesized)
gagtgaaatggcacgatacctaaaagaataccaagacctcctcaacgtgaagatggctttggatattgagattgcagcttacaggaaactcttggaaggcgaggagacccgactcagttt

SEQ ID NO: 796262 - DNA, 120 bp, Artificial Sequence
  ENSG00000277586_15 (sequence is synthesized)
caccagcgtgggaagcataaccagtggctactcccagagctcccaggtctttggccgatctgcctacggcggtttacagaccagctcctatctgatgtccacccgctccttcccgtccta

SEQ ID NO: 796263 - DNA, 120 bp, Artificial Sequence
  ENSG00000277586_16 (sequence is synthesized)
ctacaccagccatgtccaagaggagcagatcgaagtggaggaaaccattgaggctgccaaggctgaggaagccaaggatgagcccccctctgaaggagaagccgaggaggaggagaagga

SEQ ID NO: 796264 - DNA, 120 bp, Artificial Sequence
  ENSG00000277586_17 (sequence is synthesized)
aggaagaggccgaggaagaggaggcagctgaagaggaagaagctgccaaggaagagtctgaagaagcaaaagaagaagaagaaggaggtgaaggtgaagaaggagaggaaaccaaagaag

SEQ ID NO: 796265 - DNA, 120 bp, Artificial Sequence
  ENSG00000277586_18 (sequence is synthesized)
ctgaagaggaggagaagaaagttgaaggtgctggggaggaacaagcagctaagaagaaagattgaacccccatttccttaattatttcaggaataattctcccgaaatcaggtcaacccc

SEQ ID NO: 796266 - DNA, 120 bp, Artificial Sequence
  ENSG00000277586_19 (sequence is synthesized)
atcaccaaccaaccaaccagttgagttccagattctatgtgaattaaaaagtcaatatatgtataattctgagatgacttaggttggacattcaatgttgtgctatgaatttcctcttta

SEQ ID NO: 796267 - DNA, 120 bp, Artificial Sequence
  ENSG00000277586_20 (sequence is synthesized)
tgcagagtatctgtttgcttgcagagtggctttctggcttgctgccagcctgtgcatggaccacgcttatgagttcaggatctacggcaatgtgaatcattcagatgtttacaataaaaa

SEQ ID NO: 796268 - DNA, 120 bp, Artificial Sequence
  ENSG00000277586_21 (sequence is synthesized)
acaccacatgagtaaatgaattcactaatgttaatgttaaacttcatggaaaaatagtcctttgaaccttcggtggttagcaattaaagaccctgagttatgtgcaataaatagtaaata

SEQ ID NO: 796269 - DNA, 120 bp, Artificial Sequence
  ENSG00000277586_22 (sequence is synthesized)
aagttataccgaatgatgtattttttgctgtggttgttacttaattaaaataccttaaagatggcaccaatataaagtatataccagtggactattgacctccaattttttaaaaagttg

SEQ ID NO: 796270 - DNA, 120 bp, Artificial Sequence
  ENSG00000277586_23 (sequence is synthesized)
aaattttaacaattaccaatacttttttttcttccttcaattggaaattctgagggatacagttatgtcatgattacttgtgaaatctctccccacaaaaattttactgataataaacat

SEQ ID NO: 796271 - DNA, 120 bp, Artificial Sequence
  ENSG00000277586_24 (sequence is synthesized)
gagtaaatgagaaagtctataaataacaatagactttgcctcataacacgtgttgtgttaggttttgggatggctttctagggagcaattctgaaattacttgacagatacactctttat

SEQ ID NO: 796272 - DNA, 120 bp, Artificial Sequence
  ENSG00000277586_25 (sequence is synthesized)
ggtaaacaggtcatttcagagtctagagtgctaaccattacactatggaaccatgataaataggtcatttcaaactgatatgtcacaatgcaatatggatagaatatgaatcccatacat

SEQ ID NO: 796273 - DNA, 120 bp, Artificial Sequence
  ENSG00000277586_26 (sequence is synthesized)
tcatccctataactgcattttaaaatatagtctaaatatcatgggaggaggttaaaacctgagaacatggtacaataagaaggaataattttttatctatatataatttcaggagaaggg

SEQ ID NO: 796274 - DNA, 120 bp, Artificial Sequence
  ENSG00000277586_27 (sequence is synthesized)
attaaaactaccaaaggttatttgccactccactgcaaacatgttgcctgcaatcctgagctcatgatttagtgtgttgttaagcgtaattctgttgcctcaagtaaataccacttaatg

SEQ ID NO: 796275 - DNA, 120 bp, Artificial Sequence
  ENSG00000277586_28 (sequence is synthesized)
ctacacatttttaaacctttaaaagctacagacacaagtaatgaaattatgagtcacttaaggggggaggtaatatgcttgtatgttacattgacattgctctgcatgtctctactggga

SEQ ID NO: 796276 - DNA, 120 bp, Artificial Sequence
  ENSG00000277586_29 (sequence is synthesized)
gatatttggatttcaatgatagcttgactggttggacattgcatcaaatacacgccccatgtatcctttctgtcgtaaagttaagaacgctcttgcatttgatgtggaataaatatagat

SEQ ID NO: 796277 - DNA, 120 bp, Artificial Sequence
  ENSG00000277586_30 (sequence is synthesized)
gatattactatctgctattctgcctttgttctgaaacaattgctttgtcagctaatttcattcaatatttgttttttagacgatctctataagttattaatttaacctgaaaccaaagtg

SEQ ID NO: 796278 - DNA, 120 bp, Artificial Sequence
  ENSG00000277586_31 (sequence is synthesized)
gtctccatttaaagttacttaatccctttgtaccacctatttctagttaaatatatgttgctatgcaaataggtaaagtgcttccttgccatgatggtaatggattggaactatgaaggc

SEQ ID NO: 796279 - DNA, 120 bp, Artificial Sequence
  ENSG00000277586_32 (sequence is synthesized)
tctcagtgtattggcttctgtaaagatgaggcgtctcctcagaaacaaaacttttcacatttctgcttactagacctgggttgatgtacatggtaagtctcaaacagatgcaagctatgt

SEQ ID NO: 796280 - DNA, 120 bp, Artificial Sequence
  ENSG00000277586_33 (sequence is synthesized)
gcaaaaagtaactttagccaaatggaaatagctggatgctttgagaattacttggttgaagtaagaaaactgtaccatcctctatcctgtgtgccataataaaatagtaaaaaacctaaa

SEQ ID NO: 796281 - DNA, 120 bp, Artificial Sequence
  ENSG00000277586_34 (sequence is synthesized)
acggccagaaacacaggggggcgggggactcgagcaagggggggagttggtgcgcccagaaagtggagaccaggggtggtgcggctgcacgcagctcttagggatagggcttggctcctt

SEQ ID NO: 796282 - DNA, 120 bp, Artificial Sequence
  ENSG00000277586_35 (sequence is synthesized)
ggccactgtgtgggaggggtggggcacttgaagggcgtgagtgcgggcgccactgtagtctgggagtgtgctccgtgctgctgcaccggcgttccgcattaaagctgcccagcccttgtt

SEQ ID NO: 796283 - DNA, 120 bp, Artificial Sequence
  ENSG00000277632_0 (sequence is synthesized)
agaaggacacgggcagcagacagtggtcagtcctttcttggctctgctgacactcgagcccacattccgtcacctgctcagaatcatgcaggtctccactgctgcccttgctgtcctcct

SEQ ID NO: 796284 - DNA, 120 bp, Artificial Sequence
  ENSG00000277632_1 (sequence is synthesized)
ctgcaccatggctctctgcaaccagttctctgcatcacttgctgctgacacgccgaccgcctgctgcttcagctacacctcccggcagattccacagaatttcatagctgactactttga

SEQ ID NO: 796285 - DNA, 120 bp, Artificial Sequence
  ENSG00000277632_2 (sequence is synthesized)
gacgagcagccagtgctccaagcccggtgtcatcttcctaaccaagcgaagccggcaggtctgtgctgaccccagtgaggagtgggtccagaaatatgtcagcgacctggagctgagtgc

SEQ ID NO: 796286 - DNA, 120 bp, Artificial Sequence
  ENSG00000277632_3 (sequence is synthesized)
gagcctgagccttgggaacatgcgtgtgacctccacagctacctcttctatggactggttgttgccaaacagccacactgtgggactcttcttaacttaaattttaatttatttatacta

SEQ ID NO: 796287 - DNA, 120 bp, Artificial Sequence
  ENSG00000277632_4 (sequence is synthesized)
tttagtttttgtaatttattttcgatttcacagtgtgtttgtgattgtttgctctgagagttcccctgtcccctcccccttccctcacaccgcgtctggtgacaaccgagtggctgtcat

SEQ ID NO: 796288 - DNA, 120 bp, Artificial Sequence
  ENSG00000277632_5 (sequence is synthesized)
cagcctgtgtaggcagtcatggcaccaaagccaccagactgacaaatgtgtatcggatgcttttgttcagggctgtgatcggcctggggaaataataaagatgctcttttaaaaggtaaa

SEQ ID NO: 796289 - DNA, 120 bp, Artificial Sequence
  ENSG00000277632_6 (sequence is synthesized)
caatcttttcttgtggcctaaaagcccccaagagaaaagagaacttcttaaagggctgccaaacatcttggtctttctctttaagacttttatttttatctctagaaggggtcttagccc

SEQ ID NO: 796290 - DNA, 120 bp, Artificial Sequence
  ENSG00000277632_7 (sequence is synthesized)
cctagtctccaggtatgagaatctaggcaggggcaggggagttacagtcccttttacagatagaaaaacagggttcgaaacgaatcagttagcaagaggcagaatccagggctgcttact

SEQ ID NO: 796291 - DNA, 120 bp, Artificial Sequence
  ENSG00000277632_8 (sequence is synthesized)
tcccagtggggtatgttgttcactctccagctcactctaggtctcccaggagctctgtcccttggatgtcttatgagagatgtccaaggcttctcttgggttggggtatgacttcttgaa

SEQ ID NO: 796292 - DNA, 120 bp, Artificial Sequence
  ENSG00000277632_9 (sequence is synthesized)
ccagacaaaattccctgaagagaactgagataagagaacagtccgttcaggtatctggatcacacagagaaacagagaacccactatgaagagtcaaggagaaagaaggatacagacaga

SEQ ID NO: 796293 - DNA, 120 bp, Artificial Sequence
  ENSG00000277632_10 (sequence is synthesized)
tgagcaagcctgccttcctcaactgctcggggatcagaagctgcctggccttttcttctgagctgtgactcgggctcattctcttcctttctccacagttgctgctgacacgccgaccgc

SEQ ID NO: 796294 - DNA, 120 bp, Artificial Sequence
  ENSG00000277639_0 (sequence is synthesized)
gtcactaaaaggaaccagccccagctacttcactgcaggctggtgccctggtgaaggtgaatcagtcagaggagtgctgactgcccatggggctgcaccatatcatggttcccactagca

SEQ ID NO: 796295 - DNA, 120 bp, Artificial Sequence
  ENSG00000277639_1 (sequence is synthesized)
atatatgagagttccagttgctccacaacctcgccaacatatgacaggtgctgcaagaggatggttatttaacgctggcccccaaggaggaaggcacagaccttcctcctcctggaacat

SEQ ID NO: 796296 - DNA, 120 bp, Artificial Sequence
  ENSG00000277639_2 (sequence is synthesized)
ccaagggcactggatcctctgtgtccctctgagatggggtgccactccagcaagagcaccacggtggcagctgagtcccagaagcttgaagaagagcgcgagggaagagagccaggtctg

SEQ ID NO: 796297 - DNA, 120 bp, Artificial Sequence
  ENSG00000277639_3 (sequence is synthesized)
gagaccggcacccaggcagcagactgcaaggatgccccgctgaaggatggaacccctgagccaaagagctgaaatgcctctctccagagtcggaccctcacctccttcctggaactgcct

SEQ ID NO: 796298 - DNA, 120 bp, Artificial Sequence
  ENSG00000277639_4 (sequence is synthesized)
ttggccccagaaccatgagacaatccccaccctgagaagctccgatcactgggaggagagagaaagcctccagctttgggattcaggcttcagaagtttttagcagcctttgctcattgg

SEQ ID NO: 796299 - DNA, 120 bp, Artificial Sequence
  ENSG00000277639_5 (sequence is synthesized)
agaggtggggaggataagtctataaggaatcctatttccccagctctcccacagagaggacaaaagaagtcttcacacgttgtggaactttcctgcaacttctggatgcagacaagcctc

SEQ ID NO: 796300 - DNA, 120 bp, Artificial Sequence
  ENSG00000277639_6 (sequence is synthesized)
agagcagactgttctggctccagtgaatatcggctgccaagctgtgagcatccagggatccccgtctgcctggctttcctgaagtcagaaggcgccttggtcatactgtgtggggtgtgt

SEQ ID NO: 796301 - DNA, 120 bp, Artificial Sequence
  ENSG00000277639_7 (sequence is synthesized)
agtttgctctctttctttctccttttttcaacagctggcggagtagccaacacccctgacagcaatgtgttgcacttggctcactccacaccctatgaataattttaatatttaacttga

SEQ ID NO: 796302 - DNA, 120 bp, Artificial Sequence
  ENSG00000277639_8 (sequence is synthesized)
aatgttgttaagaaactatggaaaatatcaggatcccactgggatcccgtaaattgaaggcaacaaggtcttggtcctccagtaaggggggcatggagccctggtgggaaggaaagaaga

SEQ ID NO: 796303 - DNA, 120 bp, Artificial Sequence
  ENSG00000277639_9 (sequence is synthesized)
gaaatttgtgttcctgattccttaatccccaagaaaggtccctctgctaacattcacatatctcttcctagccaaagtctgtccatttcaaccctctagcatctgagctatctgcatcca

SEQ ID NO: 796304 - DNA, 120 bp, Artificial Sequence
  ENSG00000277639_10 (sequence is synthesized)
gctttcaaaaatatttcgctgtttactaacatgtctgtcagcctctcttttctcccccgcatgtgttttgtttttaaatccactcaaaagcgttttcatttgaaatcaaatagacatgtt

SEQ ID NO: 796305 - DNA, 120 bp, Artificial Sequence
  ENSG00000277639_11 (sequence is synthesized)
tgcaaataaatgttgacacaacacatttgaaagacagaattggggatctgagattaagagtatcagcagagaagagtgggtgtaattctgtggaacaggagtgagaacagaggcgaggga

SEQ ID NO: 796306 - DNA, 120 bp, Artificial Sequence
  ENSG00000277639_12 (sequence is synthesized)
gccgttgctttgtgccaggcgccatgctgaggactttccatagacggtttaatgccacccaactactcccattttatagatgaggaaatggaggaaataaagtcacttgcctgagtttgg

SEQ ID NO: 796307 - DNA, 120 bp, Artificial Sequence
  ENSG00000277639_13 (sequence is synthesized)
gcagccaggaaggagcagaacccacagttgagccccagcagtttggcttgggaaacgcatgtagagtgcttcttaaagcagagagcctttctcatgattaaactgaaatactagtccctt

SEQ ID NO: 796308 - DNA, 82 bp, Artificial Sequence
  ENSG00000277639_14 (sequence is synthesized)
ccaaactcctaggcacaagtcatcctcccacctcagccttccaagtggctaaaactacaggcatgtgccaccatgcctggct

SEQ ID NO: 796309 - DNA, 120 bp, Artificial Sequence
  ENSG00000277734_0 (sequence is synthesized)
atatccagaaccctgaccctgccgtgtaccagctgagagactctaaatccagtgacaagtctgtctgcctattcaccgattttgattctcaaacaaatgtgtcacaaagtaaggattctg

SEQ ID NO: 796310 - DNA, 120 bp, Artificial Sequence
  ENSG00000277734_1 (sequence is synthesized)
atgtgtatatcacagacaaaactgtgctagacatgaggtctatggacttcaagagcaacagtgctgtggcctggagcaacaaatctgactttgcatgtgcaaacgccttcaacaacagca

SEQ ID NO: 796311 - DNA, 120 bp, Artificial Sequence
  ENSG00000277734_2 (sequence is synthesized)
ttattccagaagacaccttcttccccagcccagaaagttcctgtgatgtcaagctggtcgagaaaagctttgaaacagatacgaacctaaactttcaaaacctgtcagtgattgggttcc

SEQ ID NO: 796312 - DNA, 120 bp, Artificial Sequence
  ENSG00000277734_3 (sequence is synthesized)
gaatcctcctcctgaaagtggccgggtttaatctgctcatgacgctgcggctgtggtccagctgagatctgcaagattgtaagacagcctgtgctccctcgctccttcctctgcattgcc

SEQ ID NO: 796313 - DNA, 120 bp, Artificial Sequence
  ENSG00000277734_4 (sequence is synthesized)
acagagggaactctcctacccccaaggaggtgaaagctgctaccacctctgtgcccccccggcaatgccaccaactggatcctacccgaatttatgattaagattgctgaagagctgcca

SEQ ID NO: 796314 - DNA, 120 bp, Artificial Sequence
  ENSG00000277734_5 (sequence is synthesized)
aacactgctgccaccccctctgttcccttattgctgcttgtcactgcctgacattcacggcagaggcaaggctgctgcagcctcccctggctgtgcacattccctcctgctccccagaga

SEQ ID NO: 796315 - DNA, 120 bp, Artificial Sequence
  ENSG00000277734_6 (sequence is synthesized)
ctgcctccgccatcccacagatgatggatcttcagtgggttctcttgggctctaggtcctgcagaatgttgtgaggggtttatttttttttaatagtgttcataaagaaatacatagtat

SEQ ID NO: 796316 - DNA, 120 bp, Artificial Sequence
  ENSG00000277734_7 (sequence is synthesized)
tcttcttctcaagacgtggggggaaattatctcattatcgaggccctgctatgctgtgtatctgggcgtgttgtatgtcctgctgccgatgccttcattaaaatgatttggaagagcaga

SEQ ID NO: 796317 - DNA, 120 bp, Artificial Sequence; identical to SEQ ID NO: 793319
  ENSG00000277745_0 (sequence is synthesized)

SEQ ID NO: 796318 - DNA, 120 bp, Artificial Sequence; identical to SEQ ID NO: 793320
  ENSG00000277745_1 (sequence is synthesized)

SEQ ID NO: 796319 - DNA, 120 bp, Artificial Sequence
  ENSG00000277745_2 (sequence is synthesized)
gttcacaacgacaggctactgagcacccttttcaacacgaccaccatctctcaagtggcccctggcgaggactagcttctgacacccggcccctgggacctgacaggtccactcgtccac

SEQ ID NO: 796320 - DNA, 120 bp, Artificial Sequence
  ENSG00000277745_3 (sequence is synthesized)
ccacccggccccaaatcccccggcctgaacccccggccttaaacaccctccccccacaacccaggccccaaagtcttgggccttcattaattctgtcaataaaatgtttcaaggaagcca

SEQ ID NO: 796321 - DNA, 120 bp, Artificial Sequence; identical to SEQ ID NO: 739734
  ENSG00000277758_0 (sequence is synthesized)

SEQ ID NO: 796322 - DNA, 120 bp, Artificial Sequence
  ENSG00000277758_1 (sequence is synthesized)
ttctttacatgcttcttaagttaccggcaggccagccgcccttacgagagcccctcacggacattaacccaattgagaagactgaacccagcatacgaacgttaagttgtcccaaatcgc

SEQ ID NO: 796323 - DNA, 120 bp, Artificial Sequence; identical to SEQ ID NO: 739736
  ENSG00000277758_2 (sequence is synthesized)

SEQ ID NO: 796324 - DNA, 120 bp, Artificial Sequence
  ENSG00000277758_3 (sequence is synthesized)
cccaaggccatcaggcaggcagcgctggggcccgggacccgcgcggagactccaccccgggatccgggaaggctcccccgagccggggtcggagctgcggctggaggggcctcggcttga

SEQ ID NO: 796325 - DNA, 120 bp, Artificial Sequence; identical to SEQ ID NO: 739738
  ENSG00000277758_4 (sequence is synthesized)

SEQ ID NO: 796326 - DNA, 120 bp, Artificial Sequence
  ENSG00000277758_5 (sequence is synthesized)
ctctcaccgcaccctgccccaagccgcagggagcccctggcgcccctggcgcccgggacccgccctggctggagccctgcggtttccgggagctcacggtcggctctgcgcccctccacc

SEQ ID NO: 796327 - DNA, 80 bp, Artificial Sequence; identical to SEQ ID NO: 739740
  ENSG00000277758_6 (sequence is synthesized)

SEQ ID NO: 796328 - DNA, 120 bp, Artificial Sequence; identical to SEQ ID NO: 739741
  ENSG00000277758_7 (sequence is synthesized)

SEQ ID NO: 796329 - DNA, 120 bp, Artificial Sequence
  ENSG00000277758_8 (sequence is synthesized)
ccaccagctgtgccattcgtggtgcccccaacccttcaaggccgagattgggtgcccctgcacagtggagagtgggccgatgccccatgggacccctgcccggcatcagagctgctgcct

SEQ ID NO: 796330 - DNA, 120 bp, Artificial Sequence
  ENSG00000277758_9 (sequence is synthesized)
cacacctccagcggcggccttggagatgcatgtatggtgggggccatcaacccagagctgtacaagttcccagaggacaaaagtgagaccgacttccccgacggctgcctggggcggctg

SEQ ID NO: 796331 - DNA, 120 bp, Artificial Sequence
  ENSG00000277758_10 (sequence is synthesized)
tggttctcggtggaatatgagcaggaggctgagcggctgctggtgggcttgatcaaggcacagcacctgcaagccccctcggagacctgcagccccctggtgaagctctacctgctgccc

SEQ ID NO: 796332 - DNA, 120 bp, Artificial Sequence
  ENSG00000277758_11 (sequence is synthesized)
gatgagcggcgcttcctccaatccaagaccaaacgcaaaacctccaacccgcagtttgacgagcacttcatctttcaggtgtccagcaagaccatcacccagagggtgctgaagttctcc

SEQ ID NO: 796333 - DNA, 120 bp, Artificial Sequence
  ENSG00000277758_12 (sequence is synthesized)
gtctaccacgtggacaggcagaggaagcaccagctcctgggccaggtgctcttccccttgaagaatgagaccctagtgggggactgccggcgtgtcatctggagagacctggaggctgag

SEQ ID NO: 796334 - DNA, 120 bp, Artificial Sequence
  ENSG00000277758_13 (sequence is synthesized)
agcctggagcccccctcggagtttggcgacctccagttctgcctcagctacaacgactacctgagccgcctgacggtggttgtgctgcgtgccaagggcctccggctccaggaggacaga

SEQ ID NO: 796335 - DNA, 120 bp, Artificial Sequence
  ENSG00000277758_14 (sequence is synthesized)
ggcattgtcagtgtgtttgtcaaagtgtctctgatgaaccacaacaagtttgtcaagtgcaagaagacttcagctgtgctgggctccatcaaccctgtgtacaatgagaccttcagcttc

SEQ ID NO: 796336 - DNA, 120 bp, Artificial Sequence
  ENSG00000277758_15 (sequence is synthesized)
aaggccgatgccaccgagctggataccgctagcctcagcctgactgtggtgcagaacatggaaggggacaagagccagcagctgggccgagtggtggtgggcccctacatgtacacccgc

SEQ ID NO: 796337 - DNA, 120 bp, Artificial Sequence
  ENSG00000277758_16 (sequence is synthesized)
ggcagagagctggagcactgggacgagatgctcagcaagcccaaggagctggtgaagcgctggcatgcgctctgccgcaccacggagccctgacccttcgcccagcaccgcggttccgct

SEQ ID NO: 796338 - DNA, 120 bp, Artificial Sequence
  ENSG00000277758_17 (sequence is synthesized)
ttgggagccgaccatcctcgcagttgcatgtgacagccacagccacacgcatggacgtttcatccaacagctccccgagctgccagccagcccgagccaggaggacgtgagtgctgatat

SEQ ID NO: 796339 - DNA, 120 bp, Artificial Sequence
  ENSG00000277758_18 (sequence is synthesized)
gcaggagagaagaggggacaaagaagccctggcccggtcagcggctctggccatacagccttccgacacactccctcctccttatctgcggggctgcctgggctcggaatcccggctcct

SEQ ID NO: 796340 - DNA, 120 bp, Artificial Sequence
  ENSG00000277758_19 (sequence is synthesized)
ggtcctcacagccctgatttggaccagaatctcagatgctcagaagaaagatcctgtttagtgatgacccagctctacctgctgaatggacctgcagggtaaacttgggtgcctccatct

SEQ ID NO: 796341 - DNA, 120 bp, Artificial Sequence
  ENSG00000277758_20 (sequence is synthesized)
gggaaagctgatgatgtgttcatgcagtcgatgaccctcactgctttttcagccagggtttctctgccttctgcctggcagagaaaacacactgctatggggaaaatcacagggagggcg

SEQ ID NO: 796342 - DNA, 120 bp, Artificial Sequence
  ENSG00000277758_21 (sequence is synthesized)
ctgtgaccagcgcactcaggcaccaagtgtcggcatggctcactgtgctgggtgaaggcctccccgagcattaggtcctccacggggctgtgtcaaatgccctcccacattgtatcaagt

SEQ ID NO: 796343 - DNA, 120 bp, Artificial Sequence
  ENSG00000277758_22 (sequence is synthesized)
ccctggttctccagctgttctgctgctgtttctgtgctctccctgattaagagcattcagttcctgggctctccctttgagcaggaaatggtgaaagcatgtggctatggtatagcccac

SEQ ID NO: 796344 - DNA, 120 bp, Artificial Sequence
  ENSG00000277758_23 (sequence is synthesized)
agggctgagattgctgtgttgcagtattgatgtaaaatttgttaagaaggaagtacccacagatcactgccatcaactccccagaagttgcactcaagctagtgagcagcccttgtgctt

SEQ ID NO: 796345 - DNA, 120 bp, Artificial Sequence
  ENSG00000277758_24 (sequence is synthesized)
gtcacagttactgtaacaggtagtgtgtatttgcacctggcatcgtgcagcctgcacgtcaacacgttgttttgtgtaactagaacagcacatggaaccactatctctttctcttttttc

SEQ ID NO: 796346 - DNA, 81 bp, Artificial Sequence
  ENSG00000277758_25 (sequence is synthesized)
cgaccagtatctttttcttatgcagtgaaacaactttagcaaaagaggcaatgaatgttatactgagtttctacctcttta

SEQ ID NO: 796347 - DNA, 120 bp, Artificial Sequence
  ENSG00000277758_26 (sequence is synthesized)
aaagaggcaatgaatgttatactgagtttctacctctttaactccacctccaatttctgtcaatctacaaacacaagtgtcgcctcgcagtgtttcgtatgaacagaatatcttgtgttt

SEQ ID NO: 796348 - DNA, 67 bp, Artificial Sequence
  ENSG00000277758_27 (sequence is synthesized)
cgcctcgcagtgtttcgtatgaacagaatatcttgtgtttgctttttgtcacttatttcacttgcac

SEQ ID NO: 796349 - DNA, 71 bp, Artificial Sequence
  ENSG00000277758_28 (sequence is synthesized)
ccaggctggagtgcggtggcgcgatctaggcttactgcaagctccgcctcccgggtttacttacaccactg

SEQ ID NO: 796350 - DNA, 120 bp, Artificial Sequence
  ENSG00000277758_29 (sequence is synthesized)
attttcaaagtagtccgcaaagctgtagtttctaatagcttcatagctcacatgtaataggggttctctgtgtgtttatagagcaggctactacagtggaactgtttctgtttcatctga

SEQ ID NO: 796351 - DNA, 120 bp, Artificial Sequence
  ENSG00000277758_30 (sequence is synthesized)
catccggatagatgccagccacccccacattccaaggtgagatttctgactagcagtgacttttctagggccgcttggaaaagttgataagtatccttttctgcaggacagagtagactg

SEQ ID NO: 796352 - DNA, 120 bp, Artificial Sequence
  ENSG00000277758_31 (sequence is synthesized)
gtatctctgactcatccctgaaaaatctaaatggcaagagactagctggctctctgctctgatggggaggaggttgttgtttgggctgttctctacagacatagtcagggcaaaaagcat

SEQ ID NO: 796353 - DNA, 120 bp, Artificial Sequence
  ENSG00000277758_32 (sequence is synthesized)
acgcatgcttcccatggaccagagaaacctggcctgggttgtctcaaatcctgtccacaaggcaactccagaagaaagaagccctttacatttccataaaacactttagaatcagctagt

SEQ ID NO: 796354 - DNA, 120 bp, Artificial Sequence
  ENSG00000277758_33 (sequence is synthesized)
caatttccacaaaataaagtgctagaatttgattggatttaattgattatgtagaacaatttgggggccatttgacatcattaaaatattcaatcttcctattcattaacatggtatatc

SEQ ID NO: 796355 - DNA, 120 bp, Artificial Sequence
  ENSG00000277758_34 (sequence is synthesized)
tcttcactttaagtcttttgtatgtttctcagaactatttttgtggttttcagtaaagtgttcttgcacatccttcaatagatttattcttagacgttttatatttgtttatggctagta

SEQ ID NO: 796356 - DNA, 120 bp, Artificial Sequence
  ENSG00000277758_35 (sequence is synthesized)
tatacagattctgttgctacaaaactatgttgaccttgttatccagtgagaggctttgtgacattcatttaaattgtaataatttgcagattatttttgtataatcatgtcctctgtgaa

SEQ ID NO: 796357 - DNA, 120 bp, Artificial Sequence
  ENSG00000277758_36 (sequence is synthesized)
tgacagttttatttcttcctttcttaatctttatgccttatttagctcttgccaaactgcagtggctgagcaattggacaagataaagaaataaaagtgatccagatcataaagaaagaa

SEQ ID NO: 796358 - DNA, 120 bp, Artificial Sequence
  ENSG00000277758_37 (sequence is synthesized)
gtaaaactatatctgcacatgacataatcttgtctatggaaaatcctaaggaatccacacacaaaaaaactactagagctaataagtttggcaaggttgcaagatataaaattggtatac

SEQ ID NO: 796359 - DNA, 120 bp, Artificial Sequence
  ENSG00000277758_38 (sequence is synthesized)
aaattgcagtggctaggacctccagcagaatgctgactataagtagtgatagtgggtattcttgtccatcctcaatctcaggggtggtgggtgtggcatgtggagagttgtcaatattca

SEQ ID NO: 796360 - DNA, 120 bp, Artificial Sequence
  ENSG00000277758_39 (sequence is synthesized)
ccatgaagtttgatggttgttataggatttttaatgtactcattaacatatattctcaagctgttaaaaagatttttttaattacaaataaggttaaatttctctcaaatacttactctg

SEQ ID NO: 796361 - DNA, 120 bp, Artificial Sequence
  ENSG00000277758_40 (sequence is synthesized)
caccttttgaaataattttatttttctcctttattctttggatgtgatgacttatactaattgactgttgaatgtcaaaccaaacttaacattcttgtaatagaaaccagcagggtgtgt

SEQ ID NO: 796362 - DNA, 120 bp, Artificial Sequence
  ENSG00000277758_41 (sequence is synthesized)
agaaggttctgtgccaccctcacctatgaggagctgcctgggacaccagccatggccaccacagctgcctccagtgggcagcgggacaggccctgccagccgcatgctaggacccaactg

SEQ ID NO: 796363 - DNA, 120 bp, Artificial Sequence
  ENSG00000277758_42 (sequence is synthesized)
agcctgactgtggtgcagaacatggaaggggacaagcaggctactacagtggaactgtttctgtttcatctgacatccggatagatgccagccacccccacattccaaggtgagatttct

SEQ ID NO: 796364 - DNA, 120 bp, Artificial Sequence
  ENSG00000277775_0 (sequence is synthesized)
atggcacgcacgaagcaaacagctcgtaagtccactggcggcaaagccccgcgcaagcagctggccactaaggcggctcgcaaaagcgcgccagccaccggtggcgtgaagaagccccac

SEQ ID NO: 796365 - DNA, 120 bp, Artificial Sequence
  ENSG00000277775_1 (sequence is synthesized)
tcgactgagctactgattcgcaagctaccattccagcgtctggtacgtgagatcgcgcaggacttcaagaccgacctgcgcttccagagctcggctgtgatggcgctgcaggaggcctgc

SEQ ID NO: 796366 - DNA, 120 bp, Artificial Sequence
  ENSG00000277775_2 (sequence is synthesized)
gaggcttacctggtggggctctttgaggacaccaacctgtgtgctatccacgccaagcgagtgactatcatgcccaaggacatccagctcgctcgccgcattcgcggagagagggcataa

SEQ ID NO: 796367 - DNA, 120 bp, Artificial Sequence
  ENSG00000277791_0 (sequence is synthesized)
agcagtgagagcggttgcgcagtgaaggctagacccggtttactggaattgctctggcgatcgagggatcctagtacaccgcaatcatgtctattatgtcctataacggaggggccgtca

SEQ ID NO: 796368 - DNA, 120 bp, Artificial Sequence
  ENSG00000277791_1 (sequence is synthesized)
tggccatgaaggggaagaactgtgtggccatcgctgcagacaggcgcttcgggatccaggcccagatggtgaccacggacttccagaagatctttcccatgggtgaccggctgtacatcg

SEQ ID NO: 796369 - DNA, 120 bp, Artificial Sequence
  ENSG00000277791_2 (sequence is synthesized)
gtctggccgggctcgccactgacgtccagacagttgcccagcgcctcaagttccggctgaacctgtatgagttgaaggaaggtcggcagatcaaaccttataccctcatgagcatggtgg

SEQ ID NO: 796370 - DNA, 120 bp, Artificial Sequence
  ENSG00000277791_3 (sequence is synthesized)
agccagtcattgccgggttggacccgaagacctttaagcccttcatttgctctctagacctcatcggctgccccatggtgactgatgactttgtggtcagtggcacctgcgccgaacaaa

SEQ ID NO: 796371 - DNA, 120 bp, Artificial Sequence
  ENSG00000277791_4 (sequence is synthesized)
tgtacggaatgtgtgagtccctctgggagcccaacatggatccggatcacctgtttgaaaccatctcccaagccatgctgaatgctgtggaccgggatgcagtgtcaggcatgggagtca

SEQ ID NO: 796372 - DNA, 120 bp, Artificial Sequence
  ENSG00000277791_5 (sequence is synthesized)
ttgtccacatcatcgagaaggacaaaatcaccaccaggacactgaaggcccgaatggactaaccctgttcccagagcccacttttttttctttttttgaaataaaatagcctgtctttca

SEQ ID NO: 796373 - DNA, 120 bp, Artificial Sequence
  ENSG00000277791_6 (sequence is synthesized)
aggatcagagcccatcagacagctgctaaagcacactggagctaaatagggattcttctccctattttacagagaaactgaggctcagtgaagagagacatactatttgcccaatgtcac

SEQ ID NO: 796374 - DNA, 120 bp, Artificial Sequence
  ENSG00000277791_7 (sequence is synthesized)
actgctgattagtaaaagaaattcagggcttgaagtctctttcactttcctttacataattctgcttccttccaaggaaggagctgagaggggcttcccacatcctgggaatcatccctt

SEQ ID NO: 796375 - DNA, 120 bp, Artificial Sequence
  ENSG00000277858_0 (sequence is synthesized)
atgccgaggaggaggagacgccgagggtcctccggtgctggcggccgggggcggacctgctctcgcaccgtccgagcggagctttcgttttcagtgagccaggtggagcgcagtctacgg

SEQ ID NO: 796376 - DNA, 120 bp, Artificial Sequence
  ENSG00000277858_1 (sequence is synthesized)
aacagcggagagcggaacatcactcccctgctgctggacatggtggttcacaacgacaggctactgagcacccttttcaacacgaccaccatctctcaagtggcccctggcgaggactag

SEQ ID NO: 796377 - DNA, 120 bp, Artificial Sequence
  ENSG00000277865_0 (sequence is synthesized)
atgatgtccaaagaaaccagacagagcaaattggccgaggccaaggaacagttgacagaccatcatccccagaccaaccctagtgttggtacagcagcaagcgacaccaaaaagaagaaa

SEQ ID NO: 796378 - DNA, 120 bp, Artificial Sequence
  ENSG00000277865_1 (sequence is synthesized)
ataaataatggcactagccctgagacaaccacttctggtggttgccactcgcctgaggatgaacagaaggcaagccaccaacatcaggaagccctaaggagggagctagaggcccaggtt

SEQ ID NO: 796379 - DNA, 120 bp, Artificial Sequence
  ENSG00000277865_2 (sequence is synthesized)
cataccatacgaatccttacatgtcagaaaactgagcttcagatggcactctactacagccagcatgctgtcaagcagttggaaggagaggccagggatctgatcagccgcctgcatgat

SEQ ID NO: 796380 - DNA, 120 bp, Artificial Sequence
  ENSG00000277865_3 (sequence is synthesized)
tcatggaagtttgcaggagagttagagcaggctctctctgctgtcactacacagaagaagaaggcggataggtacattgaggagttaacaaaggagagggacgccctgagtctggaactg

SEQ ID NO: 796381 - DNA, 120 bp, Artificial Sequence
  ENSG00000277865_4 (sequence is synthesized)
tacaggaacaccataactgatgaggagctgaaggagaaaaatgccaaactacaagaaaaacttcaacttgtagaatctgaaaagtctgagatccagctcaacgtaaaggagctaaaaagg

SEQ ID NO: 796382 - DNA, 120 bp, Artificial Sequence
  ENSG00000277865_5 (sequence is synthesized)
aaactggagagggccaagctcctgctgccacagcagctgcaggcggaggctgaccacctgggtaaggagctgcagagtgtgtcagcaaagctccaagcccaggtggaagagaacgagttg

SEQ ID NO: 796383 - DNA, 83 bp, Artificial Sequence
  ENSG00000277865_6 (sequence is synthesized)
gtcagcaaagctccaagcccaggtggaagagaacgagttgtggaaccgcctgaaccagcaaaggagtgggaggagaagataca

SEQ ID NO: 796384 - DNA, 63 bp, Artificial Sequence
  ENSG00000277865_7 (sequence is synthesized)
tgtgggagcgggagctggaagagaagatgcacgagcaggagaagatacgggagcaggaagaga

SEQ ID NO: 796385 - DNA, 120 bp, Artificial Sequence
  ENSG00000277865_8 (sequence is synthesized)
aagatgcacgagcaggagaagatacgggagcaggaagagaagaggcaggaggaggagaagatacgcgagcaggagaagaggcaggagcaggaggcgaagatgtggaggcaggaggagaag

SEQ ID NO: 796386 - DNA, 120 bp, Artificial Sequence
  ENSG00000277865_9 (sequence is synthesized)
atacgggagcaggaagagaagatacgggagcaggagaaaaagatgtggaggcaggaggagaagattcacgagcaggagaagatacgggaggaggagaagaggcaggagcaggaggagatg

SEQ ID NO: 796387 - DNA, 120 bp, Artificial Sequence
  ENSG00000277865_10 (sequence is synthesized)
ggaggagaagataagggagcaggaggagatatggaggcaaaaggagaagatgcacgagcaggaggagaagatacggaagcaggaggagaaggtgtggaggcaggaggagaagatgcacga

SEQ ID NO: 796388 - DNA, 120 bp, Artificial Sequence
  ENSG00000277865_11 (sequence is synthesized)
aggagaagatacgggagcaggaggagatgtggagggaggaagagaagatgcatgagcaggagaagatatgggaggaggagaagaggcaggagcaggaggataagatgtggaggcaggagg

SEQ ID NO: 796389 - DNA, 83 bp, Artificial Sequence
  ENSG00000277865_12 (sequence is synthesized)
gagaaggaaagaggcaggagcaggaggagaagatgtggaagcaggaggagaagataagggagcaggaggagaagatacgggag

SEQ ID NO: 796390 - DNA, 60 bp, Artificial Sequence
  ENSG00000277865_13 (sequence is synthesized)
aaggagaagatacgagagcaggaggagaagatatgggagcaggaggagaagatacgagag

SEQ ID NO: 796391 - DNA, 72 bp, Artificial Sequence
  ENSG00000277865_14 (sequence is synthesized)
gatgcaggaacaggaagagaagatgtgggagcaggaggagaagatgtgtgagcaggaagagtgggagcagga

SEQ ID NO: 796392 - DNA, 120 bp, Artificial Sequence
  ENSG00000277865_15 (sequence is synthesized)
gtgggagcaggaagtgaggctgcggcagcaggaggagaagatgcaggaacactaggagcacctggaagctgccatctaatgagcacatgacaagaaggcaaagacaataaacatgtaaaa

SEQ ID NO: 796393 - DNA, 120 bp, Artificial Sequence
  ENSG00000277865_16 (sequence is synthesized)
gccggcagcaaggcctggagaagagtaagccgccatgtgactgtttagaatatagtctgagcacaaacctgaaaaaaaaattttatttattttaaattgtggcaaaatactggccaggca

SEQ ID NO: 796394 - DNA, 120 bp, Artificial Sequence
  ENSG00000277865_17 (sequence is synthesized)
gtctcaaaaaaaaaagtttcttccttacatgtatgtttctattagttttcttcttggtctttctcatttagtcttgtgttgtcttttgacattcatagtaaacttttatctgcctccaga

SEQ ID NO: 796395 - DNA, 120 bp, Artificial Sequence
  ENSG00000277865_18 (sequence is synthesized)
gagtattgactttgagtttatggcacacaattggagtaagggcagatcgccttcatctactttgggactaagctggttcaaagcaggttttaggttttctgatggctggtctatgtttta

SEQ ID NO: 796396 - DNA, 120 bp, Artificial Sequence
  ENSG00000277865_19 (sequence is synthesized)
ttcatctggactcccaggggtggcccttccagggtccccaccaaggtcccatctccttcctgggacccaaattctcattaggtcatttcagccctgtgagagtgccaaacattcagctag

SEQ ID NO: 796397 - DNA, 120 bp, Artificial Sequence
  ENSG00000277865_20 (sequence is synthesized)
tagcctcttagccctctactgttgaccaatcaccaaatgtgggaaagcactacagactgtcaggatcacctcctaggcctggtcactcaagtcctgactgaggtctccaattaccttcca

SEQ ID NO: 796398 - DNA, 120 bp, Artificial Sequence
  ENSG00000277865_21 (sequence is synthesized)
ggtcactcaagtcctgactgaggtctccaattaccttccaacaattgtttttgattgggggcggggcacatttttatccagtttttctaactgctcttgtggggaggcgaatctgtaaca

SEQ ID NO: 796399 - DNA, 120 bp, Artificial Sequence
  ENSG00000277865_22 (sequence is synthesized)
agctcctctgcctttattgaaagttgaaaaccttcatctgtcctttttttgttgttgttgagatggagtcttgcgctgttgcccaggctctagtgcaatggcacgatctctgctcactgt

SEQ ID NO: 796400 - DNA, 90 bp, Artificial Sequence
  ENSG00000277865_23 (sequence is synthesized)
cttcccgagtagcgatacctttaatagaggcaggatttcaccatgttttccaggctggtctcgagctcctgactcaggtgatctacctgc

SEQ ID NO: 796401 - DNA, 76 bp, Artificial Sequence
  ENSG00000277865_24 (sequence is synthesized)
tccggcccatctgtcttttaaaacatgtttttaattggaggtataatttctattagtgaaatgcacaggtctggtt

SEQ ID NO: 796402 - DNA, 120 bp, Artificial Sequence
  ENSG00000277865_25 (sequence is synthesized)
ggaggtataatttctattagtgaaatgcacaggtctggtttacattttgatgagttttaactcatttaacattactatggaacccacctcctttgaagatacagagtatttctatcatcc

SEQ ID NO: 796403 - DNA, 120 bp, Artificial Sequence
  ENSG00000277865_26 (sequence is synthesized)
agaaagttctcctgtgctttcatgctgtcccgcactcccccagccagctgatgaacatgctgaggacattggtactggattctggccgccccaaaagagccactttgaccaggcttaccc

SEQ ID NO: 796404 - DNA, 120 bp, Artificial Sequence
  ENSG00000277865_27 (sequence is synthesized)
agcactaaatccctgcctgctctctcaaaatttccatctttaaactggttgtacctataaccctccctcatcaagtcaatagataaacaaaccctgaaaaataaacaactcttcctggcc

SEQ ID NO: 796405 - DNA, 120 bp, Artificial Sequence; identical to SEQ ID NO: 793159
  ENSG00000277865_28 (sequence is synthesized)

SEQ ID NO: 796406 - DNA, 120 bp, Artificial Sequence
  ENSG00000277880_0 (sequence is synthesized)
atggatatctggctcctctgctgggtgaccctgtgtctcttggcggcaggacactcggagcctggagtcagccagacccccagacacaaggtcaccaacatgggacaggaggtgattctg

SEQ ID NO: 796407 - DNA, 120 bp, Artificial Sequence
  ENSG00000277880_1 (sequence is synthesized)
tgattcagggatgcccaaggaacgattcacagctgaaagacctaacggaacgtcttccacactgaagatccatcccgcagagccgagggactcagccgtgtatctctacagtagcggtgg

SEQ ID NO: 796408 - DNA, 120 bp, Artificial Sequence
  ENSG00000277893_0 (sequence is synthesized)
ctgggagggcagcggccaccggcgaggaacacggcgcgatgcaggttcagtgccagcagagcccagtgctggcaggcagcgccactttggtcgcccttggggcactggccttgtacgtcg

SEQ ID NO: 796409 - DNA, 120 bp, Artificial Sequence
  ENSG00000277893_1 (sequence is synthesized)
cgaagccctccggctacgggaagcacacggagagcctgaagccggcggctacccgcctgccagcccgcgccgcctggttcctgcaggagctgccttccttcgcggtgcccgcggggatcc

SEQ ID NO: 796410 - DNA, 120 bp, Artificial Sequence
  ENSG00000277893_2 (sequence is synthesized)
tcgcccggcagcccctctccctcttcgggccacctgggacggtacttctgggcctcttctgcctacattacttccacaggacatttgtgtactcactgctcaatcgagggaggccttatc

SEQ ID NO: 796411 - DNA, 120 bp, Artificial Sequence
  ENSG00000277893_3 (sequence is synthesized)
cagctatactcattctcagaggcactgccttctgcactggaaatggagtccttcaaggctactatctgatttactgtgctgaataccctgatgggtggtacacagacatacggtttagct

SEQ ID NO: 796412 - DNA, 120 bp, Artificial Sequence
  ENSG00000277893_4 (sequence is synthesized)
tgggtgtcttcttatttattttgggaatgggaataaacattcatagtgactatatattgcgccagctcaggaagcctggagaaatcagctacaggattccacaaggtggcttgtttacgt

SEQ ID NO: 796413 - DNA, 120 bp, Artificial Sequence
  ENSG00000277893_5 (sequence is synthesized)
atgtttctggagccaatttcctcggtgagatcattgaatggatcggctatgccctggccacttggtccctcccagcacttgcatttgcatttttctcactttgtttccttgggctgcgag

SEQ ID NO: 796414 - DNA, 120 bp, Artificial Sequence
  ENSG00000277893_6 (sequence is synthesized)
cttttcaccaccataggttctacctcaagatgtttgaggactaccccaaatctcggaaagcccttattccattcatcttttaaaggaaccaaattaaaaaggagcagagctcccacaatg

SEQ ID NO: 796415 - DNA, 120 bp, Artificial Sequence
  ENSG00000277893_7 (sequence is synthesized)
ctgatgaaaactgtcaagctgctgaaactgtaattttcatgatataatagtcccgtatatatgtaatagtaggtctcctggcgttctgccagctggcctggggattctgagtggtgtctg

SEQ ID NO: 796416 - DNA, 120 bp, Artificial Sequence
  ENSG00000277893_8 (sequence is synthesized)
cttagagtttactcctacccttccagggacccctatcctgatccccaactgaagcttcaaaaagccacttttccaaatggcgacagttgcttcttagctattgctctgagaaagtacaaa

SEQ ID NO: 796417 - DNA, 120 bp, Artificial Sequence
  ENSG00000277893_9 (sequence is synthesized)
cttctcctatgtctttcaccgggcaatccaagtacatgtggcttcatacccactccctgtcaatgcaggacaactctgtaatcaagaattttttgacttgaaggcagtacttatagacct

SEQ ID NO: 796418 - DNA, 120 bp, Artificial Sequence
  ENSG00000277893_10 (sequence is synthesized)
tattaaaggtatgcattttatacatgtaacagagtagcagaaatttaaactctgaagccacaaagacccagagcaaacccactcccaaatgaaaaccccagtcatggcttcctttttctt

SEQ ID NO: 796419 - DNA, 120 bp, Artificial Sequence
  ENSG00000277893_11 (sequence is synthesized)
ggttaattaggaaagatgagaaattattaggtagaccttgaatacaggagccctctcctcatagtgctgaaaagatactgatgcattgacctcatttcaaatttgtgcagtgtcttagtt

SEQ ID NO: 796420 - DNA, 120 bp, Artificial Sequence
  ENSG00000277893_12 (sequence is synthesized)
gatgagtgcctctgttttccagaagatttcacaatccccggaaaactggtatggctattcttgaaggccaggttttaataaccacaaacaaaaaggcatgaacctgggtggcttatgaga

SEQ ID NO: 796421 - DNA, 120 bp, Artificial Sequence
  ENSG00000277893_13 (sequence is synthesized)
gagtagagaacaacatgaccctggatggctactaagaggatagagaacagttttacaatagacattgcaaactctcatgtttttggaaactagtggcaatatccaaataatgagtagtgt

SEQ ID NO: 796422 - DNA, 120 bp, Artificial Sequence
  ENSG00000277893_14 (sequence is synthesized)
aaaacaaagagaattaatgatgaggttacatgctgcttgcctccaccagatgtccacaacaatatgaagtacagcagaagccccaagcaactttcctttcctggagcttcttccttgtag

SEQ ID NO: 796423 - DNA, 120 bp, Artificial Sequence
  ENSG00000277893_15 (sequence is synthesized)
ttctcaggacctgttcaagaaggtgtctcctaggggcagcctgaatgcctccctcaaaggacctgcaggcagagactgaaaattgcagacagaggggcacgtctgggcagaaaacctgtt

SEQ ID NO: 796424 - DNA, 120 bp, Artificial Sequence
  ENSG00000277893_16 (sequence is synthesized)
ttgtttggctcagacatatagttttttttttttttacaaagtttcaaaaacttaaaaatcaggagattccttcataaaactctagcattctagtttcatttaaaaagttggaggatctga

SEQ ID NO: 796425 - DNA, 120 bp, Artificial Sequence
  ENSG00000277893_17 (sequence is synthesized)
acatacagagcccacatttccacaccagaactggaactacgtagctagtaagcatttgagtttgcaaactcttgtgaaggggtcaccccagcatgagtgctgagatatggactctctaag

SEQ ID NO: 796426 - DNA, 120 bp, Artificial Sequence
  ENSG00000277893_18 (sequence is synthesized)
tatttagcaaactgttttgacaaatgagcaccagtggtactaagcacagaaactcactatataagtcacataggaaacttgaaaggtctgaggatgatgtagattactgaaaaatgcaaa

SEQ ID NO: 796427 - DNA, 120 bp, Artificial Sequence
  ENSG00000277893_19 (sequence is synthesized)
ttgcaatcatataaataagtgtttttgttgttcattaaatacctttaaatcatggatgttaagcagttttgtttgaattaaaatatcctgggacttctggagattttcacaaggtattgg

SEQ ID NO: 796428 - DNA, 120 bp, Artificial Sequence
  ENSG00000277893_20 (sequence is synthesized)
ggtgtgcttccctgtcccgcctgtccctcattcccattcaccctgtctgtagtgtcgtttcctttcttctcttctctcttcatgaaattaggggctgtgtgctggaaataaagaagtatg

SEQ ID NO: 796429 - DNA, 120 bp, Artificial Sequence
  ENSG00000277893_21 (sequence is synthesized)
acttatacagcctctcagccacaattcagaactacaaggaagtacaataaaggtgcaggaaaacgtcatgaggttagatgccactcctggtgctgaggaatacacagggggaatgaacac

SEQ ID NO: 796430 - DNA, 120 bp, Artificial Sequence
  ENSG00000277893_22 (sequence is synthesized)
acttggtgaagtaaatcttcaggtgtagcttgagctctgtgacataaaagacttccagttctctccatgacattgaaaactaccttgcttaagtcctttattttactaccatgtaaaaca

SEQ ID NO: 796431 - DNA, 120 bp, Artificial Sequence
  ENSG00000277893_23 (sequence is synthesized)
tccaggccggtccttgagatgaaataaatatacaataaatggcagtactcagtctcaggacaaaaccgccatttggcaatttcactttttgccacaagagggcgctttctaaaatagtat

SEQ ID NO: 796432 - DNA, 120 bp, Artificial Sequence
  ENSG00000277893_24 (sequence is synthesized)
ttagtccaaccttgacttaattaggtccaaccccagtcctgttgcctgatcgtggacctttcaagttagcatgatcgtggaacttcttaatctgaatatagggtagagtagcgtgaactc

SEQ ID NO: 796433 - DNA, 120 bp, Artificial Sequence
  ENSG00000277893_25 (sequence is synthesized)
tatgaaagctgaaaccttcccttgataattcaggtattctcagtgttctagggctgttgtgttcaatgacagtttgtcattgtttagggctaggatatgtatgtggattaaatacagtaa

SEQ ID NO: 796434 - DNA, 120 bp, Artificial Sequence
  ENSG00000277893_26 (sequence is synthesized)
aggtctgaacatgtgctcatctctaaacatatttcttcccacttttaaaaatagggtgcaacaaaattatagttaattgaggtttccatggactgttttttggctaaaataatctaacag

SEQ ID NO: 796435 - DNA, 120 bp, Artificial Sequence
  ENSG00000277893_27 (sequence is synthesized)
tgtcctagctcacaagatactctatcttggtcttgctgaagctttcacggaagaggcgttttcctgccaaccttgaagaaaatgttgagttttgtttgtttttcagaatttagacttaaa

SEQ ID NO: 796436 - DNA, 120 bp, Artificial Sequence
  ENSG00000277893_28 (sequence is synthesized)
gagctgaagcagacctcagacatcagctattcctaccacttcacattataggtagtgacactgagacccacagagttaaaaggcctcctcacagctggtacagagctggtcagagcagcc

SEQ ID NO: 796437 - DNA, 120 bp, Artificial Sequence
  ENSG00000277893_29 (sequence is synthesized)
atctcattttgtccctttgagggtcagatgtatgcttcttctgcttaaggcacagcctttagggctgccatctggatttctacagagctcatgcaggagaaaaatagccagagcttaagt

SEQ ID NO: 796438 - DNA, 120 bp, Artificial Sequence
  ENSG00000277893_30 (sequence is synthesized)
gctgttgcatagttcagtttatacacctattgtcccatgcctgtttgtgtgtgaggcttccctcgctccgtgggagcaccaggctcatgccctttcataaacctatttgacagaatagag

SEQ ID NO: 796439 - DNA, 120 bp, Artificial Sequence
  ENSG00000277893_31 (sequence is synthesized)
agttttccctcattggtgtagtcaagacaacatgtgtgttcagcatggaaaaaaggtttcaggtcataaacccccttatccctaatgcttactttcataaagaacaacagtggctccact

SEQ ID NO: 796440 - DNA, 120 bp, Artificial Sequence
  ENSG00000277893_32 (sequence is synthesized)
gtattctaaaaggaaaaaggagctctaatgagaaatacgcaattaaacagctatttaggcggcttagaccctttcaggaacaaataaataaatccgtggttttacaaccctgaagtttga

SEQ ID NO: 796441 - DNA, 120 bp, Artificial Sequence
  ENSG00000277893_33 (sequence is synthesized)
taatagctctcttggatttttgtggttacctcatggcaatctcactaagaagcaggggagcaagctcttggcacatgaaggaataggctcatgaagattcatttcttttcccgcttggcc

SEQ ID NO: 796442 - DNA, 120 bp, Artificial Sequence
  ENSG00000277893_34 (sequence is synthesized)
ttttggttctctaataagctgtgagctgaggtccatgcagggaaaacaaggagggtaacggcaaatgtaaagtgaatttttctggagaaggatgctgattattttatagcatctacacta

SEQ ID NO: 796443 - DNA, 120 bp, Artificial Sequence
  ENSG00000277893_35 (sequence is synthesized)
tcctatgatgaaagaggcatagagccgggtggcaatgtgagttcttgggtgatttaataagccatcgagtggatttaatttctaagtaagacatttgtttattctttgtacaagtccatg

SEQ ID NO: 796444 - DNA, 120 bp, Artificial Sequence
  ENSG00000277893_36 (sequence is synthesized)
gagttgtgatcttaaagagttctgtgttatttgcattgtgcctcatttctccccatcaaccttagcttgagatttggatgaataaaataaataactggagaaggttaaagtatgcaccaa

SEQ ID NO: 796445 - DNA, 120 bp, Artificial Sequence
  ENSG00000277932_0 (sequence is synthesized)
catacaggttgcagtctggggtatccggtccttcacagacaatttctcagatgcggggcagagcaggatgatcatcttattggcatttatggttgacccctgcggaagcattacattgga

SEQ ID NO: 796446 - DNA, 120 bp, Artificial Sequence
  ENSG00000277932_1 (sequence is synthesized)
ggaaacacaataactgaaaaaccaagtctcttatgctatattatggagttaaagaatggattttctgtttccccaagaaatagacaccatgctgtgaaagaagttatggtttctcactgg

SEQ ID NO: 796447 - DNA, 120 bp, Artificial Sequence
  ENSG00000277932_2 (sequence is synthesized)
aagcaagaaaactcatgcaagaaatgtgtctgtagggaatggccaccaatatgcttcataccaacaatacacagtttcacccttccaccttcctcgtagtgggggtcccagggctggaag

SEQ ID NO: 796448 - DNA, 120 bp, Artificial Sequence
  ENSG00000277932_3 (sequence is synthesized)
atgtgcatgtatggattggcttccccttctttgcagtgtatctaacagcccttctagggaacatcattatcctgtttgtgatacagactgaacagagcctccaccaacccatgttttact

SEQ ID NO: 796449 - DNA, 120 bp, Artificial Sequence
  ENSG00000277932_4 (sequence is synthesized)
tcctagccatgttggccggcactgatctgggcttgtctacagcaaccatccccaagatgctgggaattttctggtttaatcttggagagattgcatttggtgcctgcatcacacagatgt

SEQ ID NO: 796450 - DNA, 120 bp, Artificial Sequence
  ENSG00000277932_5 (sequence is synthesized)
ataccattcatatatgcactggcctggagtctgtggtactgacagtcacgggcatagatcgctatattgccatctgcaaccccctgagatatagcatgatccttaccaacaaggtaatag

SEQ ID NO: 796451 - DNA, 120 bp, Artificial Sequence
  ENSG00000277932_6 (sequence is synthesized)
ccattctgggcatagtcatcattgtcaggactttggtatttgtgactccattcacatttctcatcctgagattgcctttctgtggtgtccggattatccctcatacctattgtgaacaca

SEQ ID NO: 796452 - DNA, 120 bp, Artificial Sequence
  ENSG00000277932_7 (sequence is synthesized)
tgggcttggcaaagttagcttgtgccagtattaatgttatatatggattgattgccttctcagtgggatacattgacatttctgtgattggattttcctatgtccagatcctccgagctg

SEQ ID NO: 796453 - DNA, 120 bp, Artificial Sequence
  ENSG00000277932_8 (sequence is synthesized)
tcttccatctcccagcctgggatgcccggcctaaggcactcagcacatgtggctctcacgtctgtgttatgttggctttctacctgccagccctcttttccttcatgacacaccgctttg

SEQ ID NO: 796454 - DNA, 120 bp, Artificial Sequence
  ENSG00000277932_9 (sequence is synthesized)
gggtcaaaacaaaacagatacgagagcaggtacttaggatactcaaccctaaaagcttttggcattttgaccccaagaggatcttccacaacaattcagttagacaataatgagatcata

SEQ ID NO: 796455 - DNA, 120 bp, Artificial Sequence
  ENSG00000277932_10 (sequence is synthesized)
acaaaataaacactggaaacattttttttactacttctcttgcattcccacatgagccaatagcattatatcccctacaacgtctcatgatttcagtacggtctgttggaagttatagct

SEQ ID NO: 796456 - DNA, 120 bp, Artificial Sequence
  ENSG00000277932_11 (sequence is synthesized)
caaagattccaaaacaatctctctgtttcacccattaaaagtgcaaaaagtactcacacttaagccccatgatactacaaaatgcctaaagagaaacaaaggctttgtaaaagttattgc

SEQ ID NO: 796457 - DNA, 120 bp, Artificial Sequence
  ENSG00000277932_12 (sequence is synthesized)
ccagtaattgtcttgaatagcctttccacatgaagattctctgtatttacatatccaaagctgaagttcatgacgattaaaatgatgtggtatttcatcaaaaccaggcaggatacagtg

SEQ ID NO: 796458 - DNA, 120 bp, Artificial Sequence
  ENSG00000277932_13 (sequence is synthesized)
gcaagagaaattaactaggagtcataagatctagatttaaatacaggttatggccttacctaaaattttgacctgagcatttcacttagactctttgagttcacaataacaaattcatac

SEQ ID NO: 796459 - DNA, 120 bp, Artificial Sequence
  ENSG00000277932_14 (sequence is synthesized)
tgatttatagcattttatgagcagggatattgaagcttaaagtgaatgttgtgaaaatctgtgcagcttgtaaaacattaaaagatttggaaacaaaatgagtgcttactaaacataatt

SEQ ID NO: 796460 - DNA, 120 bp, Artificial Sequence
  ENSG00000277932_15 (sequence is synthesized)
atagtgtaattgttatttctaatgtatgtagatttcatttactaatccactctagtatacaatccctggtttgaggtcagctctccagatccagattatcccaacgcatgggcctcttca

SEQ ID NO: 796461 - DNA, 120 bp, Artificial Sequence
  ENSG00000277932_16 (sequence is synthesized)
tggacctctcagctcttaccttcgtgaaagagactttcagtcaggagactataaagcttgaagagttaacaggtttctgtcttgggcttaaggactcagggaaatcccatcctccacagt

SEQ ID NO: 796462 - DNA, 120 bp, Artificial Sequence
  ENSG00000277932_17 (sequence is synthesized)
ctttgctagagtgggttttagggcagactgtaatagtgtggctgctgaaataatataaagtcattcttaataaggtatagaagataaataggacaatttatttctttgggtattctagga

SEQ ID NO: 796463 - DNA, 120 bp, Artificial Sequence
  ENSG00000277972_0 (sequence is synthesized)
cgcgggaggcgaccatgcgcggcgcgggggcgatcctgcggccggcggcgcgtggtgcccgggacctgaacccgcggcgggacatctcctcctggctggcccagtggttccctagaaccc

SEQ ID NO: 796464 - DNA, 120 bp, Artificial Sequence
  ENSG00000277972_1 (sequence is synthesized)
accccagccaggtccgtggtggccctgaagacccccatcaaggtggagctggtggcagggaaaacctacaggtggtgtgtgtgtggccgcagcaagaagcagcccttctgtgacggctcc

SEQ ID NO: 796465 - DNA, 120 bp, Artificial Sequence
  ENSG00000277972_2 (sequence is synthesized)
cacttcttccaacgcactggcctatctccactcaagttcaaggcccaagagacccgcatggtggcactctgtacctgcaaggccactcagaggcccccgtactgcgatggcacccacagg

SEQ ID NO: 796466 - DNA, 120 bp, Artificial Sequence
  ENSG00000277972_3 (sequence is synthesized)
agtgagcgcgtgcagaaggcagaagtgggctccccactctgagggggctgctgctgtccagccacaggtggccttggctccaggcctctgacaggcacccccttctgtgggaaaggaaac

SEQ ID NO: 796467 - DNA, 120 bp, Artificial Sequence
  ENSG00000277972_4 (sequence is synthesized)
aggtgctgagcccaagagactctggtacccactgctggctcatgaaggaagaattattccttataacctaaaagtctccagtctggggcaggcgggagtgggccctggttcaatgtttgc

SEQ ID NO: 796468 - DNA, 120 bp, Artificial Sequence
  ENSG00000277972_5 (sequence is synthesized)
tgatggggaagatggcaaaaacaagcctgcccaaccagactggtagtcctgcagtcactgctatgaggcccacgtgctgcctcctgctccagattttaacctctctgtgggctgggggca

SEQ ID NO: 796469 - DNA, 120 bp, Artificial Sequence
  ENSG00000277972_6 (sequence is synthesized)
cctgaccagccacaggagagggcagttcagattcattctgtatggggtccccaagccaggctaaacccagagatgagaggcacccttcccttcttccctccaccccaaagaactacaggc

SEQ ID NO: 796470 - DNA, 120 bp, Artificial Sequence
  ENSG00000277972_7 (sequence is synthesized)
tccagaaagtatgcagcatttattacaaagccaagagatacagatgtcccagggcaaaggagggtacagtcacaggacctcagacacaggacaaggtgcaaacacagacaagcccatcag

SEQ ID NO: 796471 - DNA, 120 bp, Artificial Sequence
  ENSG00000277972_8 (sequence is synthesized)
ggggctcccaaccccacacacctacgctatgatggaatctcgagtctcgactcccgactcctctcagatctatgcacacttgaggaaatctcggtgggcagcgacctgccagggtctgtc

SEQ ID NO: 796472 - DNA, 120 bp, Artificial Sequence
  ENSG00000277972_9 (sequence is synthesized)
cctaaggaggtggtccgctgacctctcaaggggtgggggtggggtcagagcttacaggtttctgtcttcttgtgcttttagatgcagttgctctgtcctgaccaggtgaccgggcctcag

SEQ ID NO: 796473 - DNA, 120 bp, Artificial Sequence
  ENSG00000277972_10 (sequence is synthesized)
gcctctggcaaagtctgggatctgtgcttgtgtgaggttaacccacccccacttccactctaggccccaggtgagactccaccaccagtcctgctagtgagggttccccggtgagggtaa

SEQ ID NO: 796474 - DNA, 120 bp, Artificial Sequence
  ENSG00000277972_11 (sequence is synthesized)
ggttggtgggggtgcagcgcttcacaatgctaaagccttagccctcctccaagagctgagacctctcagggcctgaatcttcttttccacaagataaatgatgcaaaggccacacacaca

SEQ ID NO: 796475 - DNA, 120 bp, Artificial Sequence
  ENSG00000277972_12 (sequence is synthesized)
ggaaaaaaaaaaaaagaggcagaactatctattctttgcacaaagtttccactgcaagaggaggaggtgatgcaggtgccacctccaccctgcacttgctcctcagaaccagggataaac

SEQ ID NO: 796476 - DNA, 120 bp, Artificial Sequence
  ENSG00000277972_13 (sequence is synthesized)
tgcatttgtaaaaggcactgttcttagcaatttctggacattcaacaacgtggggggcggccactggtcagaggcaggacagcagccaagatggggagagaaacggggagagaaagaaac

SEQ ID NO: 796477 - DNA, 120 bp, Artificial Sequence
  ENSG00000277972_14 (sequence is synthesized)
gattctaactgactcctatatgcagccagttggaatcatgcctaaagctttgggtctgaaggggcccccaacacaccacctgccttgggaaacagcgaggatggtgcagagctttattga

SEQ ID NO: 796478 - DNA, 120 bp, Artificial Sequence
  ENSG00000277972_15 (sequence is synthesized)
gactccagtggcccatccagttcatctccaggcacccccaaaaacagcaaattacacaagaccccccccaaaaaaaatgaacaccattttccacacatacacacacacataaagtttgtt

SEQ ID NO: 796479 - DNA, 120 bp, Artificial Sequence
  ENSG00000277972_16 (sequence is synthesized)
tcctgtggcatttaaattaatctggttggtccatagaaaataagtatgtatatttggtttttcctatgtacatatatatatatatttatttataaaacccgccccccacccccaaggtgg

SEQ ID NO: 796480 - DNA, 120 bp, Artificial Sequence
  ENSG00000277972_17 (sequence is synthesized)
gaagagctggggaaagtagaagaggtggaaaaaagggcccagaaaaagtggaaggagtggagaggcttggctggaagaagggagagggtccctggcctcaagttaaggggggcacgggag

SEQ ID NO: 796481 - DNA, 120 bp, Artificial Sequence
  ENSG00000277972_18 (sequence is synthesized)
cgccgttgacagtcatcttgcgccccctgctggtggaggatggtgtctgcaggcagttcaagctacccccgttggcagctgtggtggccccactggctgtcgaagggggagtgggggagg

SEQ ID NO: 796482 - DNA, 120 bp, Artificial Sequence
  ENSG00000277972_19 (sequence is synthesized)
tagggtgggtggctggaggcccatgggaactgggagagccatgggatggggtggctgggctgggcagggaggaggaggtggctggcagggtggcagggctgggagccttgtcgctgactg

SEQ ID NO: 796483 - DNA, 120 bp, Artificial Sequence
  ENSG00000277972_20 (sequence is synthesized)
actcacactcggacgccccgctggtgttggtgccctcggagggggtgggcaccgtggctagggtgagccgcttgcaggctggctggacacggtacttgagggggagaggcccgttctgcg

SEQ ID NO: 796484 - DNA, 120 bp, Artificial Sequence
  ENSG00000277972_21 (sequence is synthesized)
ctgagtgcctgcatggctttgaaatctccctgtccaaagctcacggtcctatggtgtcctggggaacggtcttgttgggtggcatcagatcagcctcttgtagaggaaacctgccacaca

SEQ ID NO: 796485 - DNA, 80 bp, Artificial Sequence
  ENSG00000277972_22 (sequence is synthesized)
gtgcccgggtgagcacccccgccctgcaccagcccccgtcccgaaccccagccgggcccctgccagcccccactccagcc

SEQ ID NO: 796486 - DNA, 120 bp, Artificial Sequence
  ENSG00000277972_23 (sequence is synthesized)
ccggcccggccgagcatcccggagctcccggcccgtcccgccggtgtctggcttgcctcagctcacaggcttttcccgagcgccagtccctgccaggacctccgcagccagcaccttctc

SEQ ID NO: 796487 - DNA, 120 bp, Artificial Sequence
  ENSG00000277972_24 (sequence is synthesized)
ttgcgacctttttcttaccctctcattcctccctcgccccttcagccctgtcacctcctccttcctagatggcctcccgtgtccttccctttccactgattttatttttccgtttccaaa

SEQ ID NO: 796488 - DNA, 120 bp, Artificial Sequence
  ENSG00000278023_0 (sequence is synthesized)
gcaatgctggggcgagggttagccgcgcaggtgcggtgaagggaggatggcggagttggtaccttttgcggttcccatcgagagtgacaaaaccttgctagtgtgggagctgagctccgg

SEQ ID NO: 796489 - DNA, 120 bp, Artificial Sequence
  ENSG00000278023_1 (sequence is synthesized)
acccacggccgaggctttgcatcattctctgttcacagcattttctcagtttggccttctgtattcagtccgggtcttcccaaatgctgcagtggcccatcctggtttctatgccgtcat

SEQ ID NO: 796490 - DNA, 120 bp, Artificial Sequence
  ENSG00000278023_2 (sequence is synthesized)
taagttttattctgcaagggctgcccacagagcccaaaaggcatgcgaccggaagcagctttttcagaaatctccagtcaaggttcgtcttggcaccagacataaggcagttcaacatca

SEQ ID NO: 796491 - DNA, 120 bp, Artificial Sequence
  ENSG00000278023_3 (sequence is synthesized)
agcccttgccctgaacagttccaaatgccaagaactggcgaattactactttggtttcaatgggtgttccaaaaggatcatcaagcttcaggagctttctgaccttgaagaaagggaaaa

SEQ ID NO: 796492 - DNA, 120 bp, Artificial Sequence
  ENSG00000278023_4 (sequence is synthesized)
ggagtcctggcattggcttggtggaggagcctatggataaggtggaggaaggaccattatcattccttatgaaaaggaagacagcccagaagcttgctattcagaaggctttgtcagatg

SEQ ID NO: 796493 - DNA, 120 bp, Artificial Sequence
  ENSG00000278023_5 (sequence is synthesized)
cattccagaaactgttgattgttgttctagaaagtggtaaaatagctgtggagtacagacccagtgaagacatcgtaggtgtcagatgcgaagaagaactacacggtttaattcaagtcc

SEQ ID NO: 796494 - DNA, 120 bp, Artificial Sequence
  ENSG00000278023_6 (sequence is synthesized)
cttgctctccctggaagcagtatggccaagaggaggaagggtatctctcggatttcagcttggaggaggaagagttcaggctgccagaacttgactagcatttctgaatatcccaaggcg

SEQ ID NO: 796495 - DNA, 120 bp, Artificial Sequence
  ENSG00000278023_7 (sequence is synthesized)
aggtcatgtaacttccttgggaagctctgtcgtgcccctaccccacgccgccccaccactataggctgctggagtcctggaaccacctgggtcggccgcccaaatctttcctggcgaagg

SEQ ID NO: 796496 - DNA, 120 bp, Artificial Sequence
  ENSG00000278023_8 (sequence is synthesized)
ggagggaaggggtgttctggtggagtgggaagggaggcttgggtaggattgtgggataagatcgccctggtgacgaggagcggatctcgaacggaacttaataaaggttgcctagataaa

SEQ ID NO: 796497 - DNA, 120 bp, Artificial Sequence
  ENSG00000278023_9 (sequence is synthesized)
aactgttgattgttgttctaggtaagactgtcttgatcatccttgaagtacttcagtttcagtaagcaaataaactcattttgaaaagttaattgaataaaaatattgatatctaaagca

SEQ ID NO: 796498 - DNA, 120 bp, Artificial Sequence
  ENSG00000278023_10 (sequence is synthesized)
acggccgaggctttgcatgtgagccggggccaggatggagggagggatggagaaagctgcccacccgctgactgggagttccggagtcctgcctcagaccctcacctgcctgagcctccg

SEQ ID NO: 796499 - DNA, 120 bp, Artificial Sequence
  ENSG00000278023_11 (sequence is synthesized)
ctgaaggactcttaattataaaggggatcccaactgacaactgacgacccccaacagatttttagagtcccggagaggtatctctccaccttcagaacgttttaccttccagtgcttctt

SEQ ID NO: 796500 - DNA, 120 bp, Artificial Sequence
  ENSG00000278023_12 (sequence is synthesized)
aaagtttaggattttaagaggaaaacctgttgattaagtgggaagtgttttgaatcgcatccttcgcgaagagaggtttggggaatatgagggcatgtgcggttttgttttctgggcgtg

SEQ ID NO: 796501 - DNA, 120 bp, Artificial Sequence
  ENSG00000278023_13 (sequence is synthesized)
acagcaaatattgtccccagtttacagatgtgaaaagacttgcctcagttcccacagaaaatgtttaagccaggtcttctttaattgcttacctatcatacagaatagtgattataagtt

SEQ ID NO: 796502 - DNA, 88 bp, Artificial Sequence
  ENSG00000278023_14 (sequence is synthesized)
ttaattgcttacctatcatacagaatagtgattataagttttggacgcatggatttgagtcctaactctgtctcttagatttttaatg

SEQ ID NO: 796503 - DNA, 120 bp, Artificial Sequence
  ENSG00000278023_15 (sequence is synthesized)
tccaaaaggatcatcaaggtcccttgctctccctggaagcagtatggccaagaggaggaagggtatctctcggatttcagcttggaggaggaagagttcaggctgccagaacttgactag

SEQ ID NO: 796504 - DNA, 120 bp, Artificial Sequence
  ENSG00000278023_16 (sequence is synthesized)
atggcggagttggtaccttttgcggttcccatcgagagtgacaaaaccttgctagtgtgggagctgagctccggacccacggccgaggctttgcatgttcgtcttggcaccagacataag

SEQ ID NO: 796505 - DNA, 120 bp, Artificial Sequence
  ENSG00000278030_0 (sequence is synthesized)
atgggcaccagcctcctctgctggatggccctgtgtctcctgggggcagatcacgcagatactggagtctcccagaaccccagacacaagatcacaaagaggggacagaatgtaactttc

SEQ ID NO: 796506 - DNA, 120 bp, Artificial Sequence
  ENSG00000278030_1 (sequence is synthesized)
atcaaggctgctcagtgatcggttctctgcagagaggcctaagggatctttctccaccttggagatccagcgcacagagcagggggactcggccatgtatctctgtgccagcagcttagc

SEQ ID NO: 796507 - DNA, 120 bp, Artificial Sequence
  ENSG00000278053_0 (sequence is synthesized)
agaactgtggcgctttctgggtaaagatggacgtccacgatctctttcgccggctcggcgcgggggccaaattcgacacgagacgcttctcggcagacgcagctcgattccagataggaa

SEQ ID NO: 796508 - DNA, 120 bp, Artificial Sequence
  ENSG00000278053_1 (sequence is synthesized)
aaaggaaatatgactttgattcttcggaggtgcttcagggactggacttttttggaaacaagaagtctgtcccaggtgtgtgtggagcatcacaaacacatcagaagccccaaaatggag

SEQ ID NO: 796509 - DNA, 120 bp, Artificial Sequence
  ENSG00000278053_2 (sequence is synthesized)
agaaaaaagaagagagcctaactgaaaggaagagggagcagagcaagaaaaaaaggaagacgatgacttcagaaattgcttcccaagaagaaggtgctactatacagtggatgtcatctg

SEQ ID NO: 796510 - DNA, 120 bp, Artificial Sequence
  ENSG00000278053_3 (sequence is synthesized)
tagaagcaaagattgaagacaaaaaagttcagagagaaagtaaactaacttccggaaagttggagaatctcagaaaagaaaagataaacttcttgcggaataaacacaaaattcacgtcc

SEQ ID NO: 796511 - DNA, 120 bp, Artificial Sequence
  ENSG00000278053_4 (sequence is synthesized)
aaggaaccgatcttcctgacccaattgctacatttcagcaacttgaccaggaatataaaatcaattctcgactacttcagaacattctagatgcaggtttccaaatgcctacgccaatcc

SEQ ID NO: 796512 - DNA, 120 bp, Artificial Sequence
  ENSG00000278053_5 (sequence is synthesized)
aaatgcaagccatcccagttatgctgcatggtcgggaacttctggcttctgctccaactggatctggaaaaacattagcttttagcattcctattttaatgcagctgaaacaacccgcaa

SEQ ID NO: 796513 - DNA, 120 bp, Artificial Sequence
  ENSG00000278053_6 (sequence is synthesized)
ataaaggcttcagagccctgattatatcaccaacacgagaacttgccagccagattcacagagagttaataaaaatttctgagggaacaggattcagaatacacatgatccacaaagcag

SEQ ID NO: 796514 - DNA, 120 bp, Artificial Sequence
  ENSG00000278053_7 (sequence is synthesized)
cagtggcagccaagaaatttggacctaaatcatctaaaaagtttgatattcttgtgactactccaaatcgactaatctatttattaaagcaagatccccccggaatcgacctagcaagtg

SEQ ID NO: 796515 - DNA, 120 bp, Artificial Sequence
  ENSG00000278053_8 (sequence is synthesized)
ttgagtggcttgtagtagacgaatcagataaactgtttgaagatggcaaaactgggttcagagaccagctggcttccattttcctggcctgcacatcccacaaggtccgaagagctatgt

SEQ ID NO: 796516 - DNA, 120 bp, Artificial Sequence
  ENSG00000278053_9 (sequence is synthesized)
tcagtgcaacttttgcatatgatgttgaacagtggtgcaaactcaacctggacaatgtcatcagtgtgtccattggagcaaggaattctgcagtagaaactgtagaacaagagcttctct

SEQ ID NO: 796517 - DNA, 120 bp, Artificial Sequence
  ENSG00000278053_10 (sequence is synthesized)
ttgttggatctgagaccggaaaacttctggccgtgagagaacttgttaaaaagggtttcaatccacctgttcttgtttttgttcagtccattgaaagggctaaagaactttttcatgagc

SEQ ID NO: 796518 - DNA, 120 bp, Artificial Sequence
  ENSG00000278053_11 (sequence is synthesized)
tcatatatgaaggtattaatgtggatgttattcatgcagagagaacacaacaacagagagataacacagtccacagtttcagagcaggaaaaatctgggttctgatttgtacagccttgc

SEQ ID NO: 796519 - DNA, 120 bp, Artificial Sequence
  ENSG00000278053_12 (sequence is synthesized)
tagcaagagggattgattttaaaggtgtgaacttggtgatcaactatgactttccaactagctcagtggaatatatccacaggataggtcgaactggaagagcagggaataagggaaaag

SEQ ID NO: 796520 - DNA, 120 bp, Artificial Sequence
  ENSG00000278053_13 (sequence is synthesized)
caattacatttttcactgaggatgataagccattattaagaagcgttgctaatgttatacagcaggctgggtgtcctgtaccagaatacataaaaggttttcagaaactactaagcaaac

SEQ ID NO: 796521 - DNA, 120 bp, Artificial Sequence
  ENSG00000278053_14 (sequence is synthesized)
aaaagaaaaagatgattaagaaaccattggaaagggagagcattagtacaactccaaaatgtttcttagaaaaagctaaggataaacagaaaaaggtcactggtcagaacagcaagaaga

SEQ ID NO: 796522 - DNA, 120 bp, Artificial Sequence
  ENSG00000278053_15 (sequence is synthesized)
aagtagctcttgaagacaaaagttaaaaacagactttaaaaatactgtcccagaaatgtaattttatgatcccagcatgaatgttattttcatggaatacttgaagtcttacagtcacct

SEQ ID NO: 796523 - DNA, 120 bp, Artificial Sequence
  ENSG00000278053_16 (sequence is synthesized)
gtaccaaacatttgaaatcaactacaagtacatgggactggtgataaatgatcctaaactatcaagtcagtttcaatttgtaggtgccttttttttttcctgtagagatgagggtcttgc

SEQ ID NO: 796524 - DNA, 120 bp, Artificial Sequence
  ENSG00000278053_17 (sequence is synthesized)
gctggtcttgaactcctgacctcacacaatcctcctgccttagcctcctgagtaactgagattacaggcacaagctgctgcacccagctctgtaggtgacttttaaatgattatacaatg

SEQ ID NO: 796525 - DNA, 120 bp, Artificial Sequence
  ENSG00000278053_18 (sequence is synthesized)
gattatacaatggaaataacattcattgacatttctgtggtttgaatccagagagatacttcttatagaaaaacaaatgtttatgctaaaaataacaccaaaatgtggtgaactcttaag

SEQ ID NO: 796526 - DNA, 120 bp, Artificial Sequence
  ENSG00000278053_19 (sequence is synthesized)
gacttttcccttcaagtgtgaaggaaggtgtgatgaatgctgtggagaggcatctggaacagaaattcaaaataaagccttgacattaaataccccttccactgctcactttgtggatgg

SEQ ID NO: 796527 - DNA, 120 bp, Artificial Sequence
  ENSG00000278053_20 (sequence is synthesized)
tagcatgagctgtctaccaagaagaaacctgctgctctcttaattttaatatttcctaatttgttgatggccttttgtgttgtgaaccacaacaaagagaggcctcttttgtggctggtt

SEQ ID NO: 796528 - DNA, 120 bp, Artificial Sequence
  ENSG00000278053_21 (sequence is synthesized)
attccagttccctgggattttaaattctttggtctattaagtatccttgtattggatacgtaataccttagtgctgtcataatgttgtacaagatcatgatcagcttctccctttcttca

SEQ ID NO: 796529 - DNA, 120 bp, Artificial Sequence
  ENSG00000278053_22 (sequence is synthesized)
ttttctgtgatttaaccatgttctttcctgtctctttccatttaagatattttatttgaatactgataaacattttatcctgataaggaagaatgttcttgttacttgatatacctctgt

SEQ ID NO: 796530 - DNA, 120 bp, Artificial Sequence
  ENSG00000278053_23 (sequence is synthesized)
cttcattctcttacagcttatctttccttaggttgatggtgcctcatttaataagtagatctctacttaagctaaaggattatgatcatatggtgttggagactattagctattagattt

SEQ ID NO: 796531 - DNA, 120 bp, Artificial Sequence
  ENSG00000278053_24 (sequence is synthesized)
ttctcaaaatatgagttttgtacaatggaatgaaaaagtgacttcatatacgtaagactggtgcctaagaatgacttgaatgttatcagtactaccacagaactataatatacattgcct

SEQ ID NO: 796532 - DNA, 120 bp, Artificial Sequence
  ENSG00000278053_25 (sequence is synthesized)
tttctcagcagcatttgaattcaacttatttatttcctctatttgtagctttttgttctagagtcagaacaggtggactttgctttgaatattttagatgggacaaaaattgttcatctt

SEQ ID NO: 796533 - DNA, 120 bp, Artificial Sequence
  ENSG00000278053_26 (sequence is synthesized)
tactggtacagggtgtaaaaatacttacaagaatatgatttttttgtttgttcatgcaaacagatcctttacccaatatatattctggaggtaggtatactggtgcaacccatttgccag

SEQ ID NO: 796534 - DNA, 120 bp, Artificial Sequence
  ENSG00000278053_27 (sequence is synthesized)
ctgtgtgactttgagtaagttcttaatttctcagagtttcagtgttctcatctataaaattatgtctccaattgtgagtacctagcactgtacctgatacatagtaaactcacaataaat

SEQ ID NO: 796535 - DNA, 120 bp, Artificial Sequence
  ENSG00000278053_28 (sequence is synthesized)
atttcttaaacatagattttgttaggaatacaggcttgataacacagtccttacccttacaatgtaatgttagagataaaggagcaaatagagtcacgcatcacttaatgacagagatat

SEQ ID NO: 796536 - DNA, 120 bp, Artificial Sequence
  ENSG00000278053_29 (sequence is synthesized)
gttctgagaaatgcatcgttaggtgatattgtcattgtgtaaacatcatgttgtttacttccacaaacctagatggtatagcctaccagtacacctaggctatatggtatagtctgttgc

SEQ ID NO: 796537 - DNA, 120 bp, Artificial Sequence
  ENSG00000278053_30 (sequence is synthesized)
tcctaggctacaaacccgtatagcatgttactgtcctgcatgctatagacagttggaacatgtagacttgtataaacactgcacacttaacctatactaaatttattgaaaatatttttc

SEQ ID NO: 796538 - DNA, 90 bp, Artificial Sequence
  ENSG00000278053_31 (sequence is synthesized)
ccaggcgtagtggctcatgcctgtaatcctaacacttcgggaggcctaggcgggcaggttgtctgagctcaggagtttagagaccagccc

SEQ ID NO: 796539 - DNA, 120 bp, Artificial Sequence
  ENSG00000278053_32 (sequence is synthesized)
actaaaaaaaataccaaaaaaagttagccgggtgtggtggcatagtcccggctactcaggagtctgaggcaggagaatagcttgaacctgtgaggcggaggttgcagtaagccgagatcg

SEQ ID NO: 796540 - DNA, 120 bp, Artificial Sequence
  ENSG00000278053_33 (sequence is synthesized)
cactccagcctgggcgacagggcaagactgtcttgaaaataaacacacacacacacattatatatattatgtattatatatattagatatatattttttcttcaataaattaaccttagc

SEQ ID NO: 796541 - DNA, 120 bp, Artificial Sequence
  ENSG00000278053_34 (sequence is synthesized)
tttgttttgtttttttttttttttttgagaaacagggtctgttacctaatttggagtttagtggcacaatcatggcccactgcagccttgacctcttagactcaagtgatcctcaaacct

SEQ ID NO: 796542 - DNA, 120 bp, Artificial Sequence
  ENSG00000278053_35 (sequence is synthesized)
cagcctcccgagtagctggtactataggtgcgggccaccaacactcagctaatttttaaattttgtagagacgaggtcttgcttgttgtccagttgggttttttagattttttttttttt

SEQ ID NO: 796543 - DNA, 120 bp, Artificial Sequence
  ENSG00000278053_36 (sequence is synthesized)
tctcaaactcctgacctggagtgagccactatatccggcctttataaacttttttgattcttgtcataacacttagcctaaaatgcaaatgtacagctgtagaaaaatactttatttctt

SEQ ID NO: 796544 - DNA, 120 bp, Artificial Sequence
  ENSG00000278053_37 (sequence is synthesized)
tatatccttattctagaagctttttttctattaatttttgtttgtttgttttgttttactatttacttctaaaacttttttgttaaaaaccatggcacaaacacacacattatgctaggc

SEQ ID NO: 796545 - DNA, 120 bp, Artificial Sequence
  ENSG00000278053_38 (sequence is synthesized)
atacaaaaggtcaggatcatcagtctcactgtcttccacccccacttctcatcccaccattgtatctgctgtctgtggctgaccaaaacatcatcatgtagcacatgactagtgtggcaa

SEQ ID NO: 796546 - DNA, 120 bp, Artificial Sequence
  ENSG00000278053_39 (sequence is synthesized)
gtgctctgttagatgtaaggccatgatgctaaagcatcacaagagggcatctaacccagattggggatgtcatggaaggccgacatcctgagttgaatcctgcaaatgtaaaaaccaata

SEQ ID NO: 796547 - DNA, 120 bp, Artificial Sequence
  ENSG00000278053_40 (sequence is synthesized)
ggcaaagaagaggaacaaaaaggattccaggacaaactgaggtcacatctatgatccttgactttattgtgtctgtttaaagtatctacagtaacctgtatcaacttagtcagtgtatta

SEQ ID NO: 796548 - DNA, 120 bp, Artificial Sequence
  ENSG00000278053_41 (sequence is synthesized)
atactaaatttagctccttcaaagcagttggaactatgtgctacataaatttcagcttcacacaaggaagggaaggagtgaaattagtgaacaggcagttacagcaaaagaaaaaacata

SEQ ID NO: 796549 - DNA, 120 bp, Artificial Sequence
  ENSG00000278053_42 (sequence is synthesized)
aaaattgaatagctggctctggtgaaatgagcaaggactttagagtcaaactggcctggatttgaatcctgatcctcattgcttgtagctgtatgatctggacaaatgacagtaactgtt

SEQ ID NO: 796550 - DNA, 120 bp, Artificial Sequence
  ENSG00000278053_43 (sequence is synthesized)
tctaaccttgattttctcatctgtaagatgccaattgtaactcctaaggatactgaggattttttaaaatgcgtgtacagttcctgaccagtggtttgtgcctaataacttattacaaat

SEQ ID NO: 796551 - DNA, 120 bp, Artificial Sequence
  ENSG00000278053_44 (sequence is synthesized)
tattacccagtaaaaaccttgagacaagagtgaaaacgtaaagctaattaatccattacttgttagcaagcaaactacgtgcttgagaaaattactcaactttcatgttttacttccaga

SEQ ID NO: 796552 - DNA, 120 bp, Artificial Sequence
  ENSG00000278053_45 (sequence is synthesized)
cagtagtttgattaaaagaaaaaaaaaaatcacagcccaggcatgtggctcacaccctggcacttggaggccgaggtgggagcatagcttgagcctagcagtttgaaactagcctgggca

SEQ ID NO: 796553 - DNA, 77 bp, Artificial Sequence
  ENSG00000278053_46 (sequence is synthesized)
agcatagcttgagcctagcagtttgaaactagcctgggcaacatagatcctcggtgtggtggtgcatgcctgtggtc

SEQ ID NO: 796554 - DNA, 68 bp, Artificial Sequence
  ENSG00000278053_47 (sequence is synthesized)
cagtaaaaaatatgccgaaatagcttcagagtaattatgaattgccttccaaaaaccactgttttgca

SEQ ID NO: 796555 - DNA, 120 bp, Artificial Sequence
  ENSG00000278053_48 (sequence is synthesized)
gagtaattatgaattgccttccaaaaaccactgttttgcacttgcctgcaagaataggaaaaacaaaaggactgtaaggtggcaggatggcagaaccaaacaagagtagtacaccttgga

SEQ ID NO: 796556 - DNA, 120 bp, Artificial Sequence
  ENSG00000278053_49 (sequence is synthesized)
gttttttcgaaatatgggttgggtttttgggctcttggttgatttaaaataaaatttaaatgccttcagcgtctgtgataggtgccaacatgaagctaccgagttccagagaaagagggg

SEQ ID NO: 796557 - DNA, 120 bp, Artificial Sequence
  ENSG00000278053_50 (sequence is synthesized)
agagctgatcactcatcagtgctgcgagactatcaaagggcccttcaggacctatctgttctttgtgtgtaaagagtaacaataaaagaacaccagtgtacccaccgtatagtttaaaaa

SEQ ID NO: 796558 - DNA, 120 bp, Artificial Sequence
  ENSG00000278053_51 (sequence is synthesized)
tccttcctctgtgtgtttgctcattctcttccctctcttcttgaactctttctttccaccttatctcccctgttaaaatccttcacttccttttaaggttcatcaaatgcctgtgcctcc

SEQ ID NO: 796559 - DNA, 120 bp, Artificial Sequence
  ENSG00000278053_52 (sequence is synthesized)
ataaaagttgtcttgatcactccatctagatgtgatcttcttccttttctagtaccctttcccccacactgcagttcttccatggtatttggtgtgttcttttccttgcaacatttattt

SEQ ID NO: 796560 - DNA, 120 bp, Artificial Sequence
  ENSG00000278053_53 (sequence is synthesized)
gagaatggggattatgttctattcattcatacattcattatttagtttataatgcccaggaactactccagaaatacaaatgctttctaaagttcttgtacataaactgacttatttttc

SEQ ID NO: 796561 - DNA, 120 bp, Artificial Sequence
  ENSG00000278053_54 (sequence is synthesized)
cgaatactttttattattaaagtatactttacatacaataaaatgcatagatttttaagtgcccagtttagtgagtttcagcaatgcatgccctgtgtaaccactattccagtgaagata

SEQ ID NO: 796562 - DNA, 120 bp, Artificial Sequence
  ENSG00000278053_55 (sequence is synthesized)
gagaacatatgtattaccccagacaattttcttgtgccctttccattcagtcctcaccctgcccctgctcagaggcaactgctattctgatttctactgctgtatattccttttgcctct

SEQ ID NO: 796563 - DNA, 120 bp, Artificial Sequence
  ENSG00000278053_56 (sequence is synthesized)
tctagagttttatatgagtggaatcacacattaatcttttatttctggtttctttcactttgcgtaatgctttgagattcttctgtattacatagagcaatagtttgttaccaagtagta

SEQ ID NO: 796564 - DNA, 120 bp, Artificial Sequence
  ENSG00000278053_57 (sequence is synthesized)
ttatgttgtatgaatataccacaatttgttatccagtcacttgttgatagaggtatggattaacttaggttttcggacgttaagtttttctgaggtttgtttctgtagcaataagagttg

SEQ ID NO: 796565 - DNA, 120 bp, Artificial Sequence
  ENSG00000278053_58 (sequence is synthesized)
ggttttttccccatgtaaccgagatggccttcagttctggtttccaaaggatataagataccttttcatctctatactagtccttttcattttctttgagagatgaaatgagaatacatt

SEQ ID NO: 796566 - DNA, 120 bp, Artificial Sequence
  ENSG00000278053_59 (sequence is synthesized)
catacatttaaatgatgctgttgacttatgttatagtaaatttgcttttaatttttgtttaagattgtttctgtcatggctttagcttaaagcttaaaaaatcacagtgggccaggtgcg

SEQ ID NO: 796567 - DNA, 120 bp, Artificial Sequence
  ENSG00000278053_60 (sequence is synthesized)
attccctgcacatatgctcacttcttagtgctgtgaaaatccagtgacttttataaatgaattttgagagcctccttccccccaaaatgtgttttttaatggtctaatttttcttaggtc

SEQ ID NO: 796568 - DNA, 120 bp, Artificial Sequence
  ENSG00000278053_61 (sequence is synthesized)
aaggtaaattagaaaaaataacctagtgttattggcaaaattgcttcattattcttatatgtatattcaattaagagataattacaaaatggctatgtcccaaattctactgataatggt

SEQ ID NO: 796569 - DNA, 120 bp, Artificial Sequence
  ENSG00000278053_62 (sequence is synthesized)
gttagttgaccaaattttagccatgggaaaggaaaaatgatcaaaaggccttgtttttgcccttccgttattagaatttggaaatacatattcaaaatggaatgttcattgtaagtttca

SEQ ID NO: 796570 - DNA, 120 bp, Artificial Sequence
  ENSG00000278053_63 (sequence is synthesized)
gactcaggactctttcaatggttgatgttagattttaatgtagaagatgagtttcctgcattttgactgcctatagtaatttttggttgatgatgattaacacttcacatttctagctaa

SEQ ID NO: 796571 - DNA, 120 bp, Artificial Sequence
  ENSG00000278053_64 (sequence is synthesized)
tctagttttggccaaaggaggtttgtacttagatctgtttatcagttttggtaaatattttggttgtgctttctgagctttggctctgccacctgtcagcctttatatcgctttaagcag

SEQ ID NO: 796572 - DNA, 120 bp, Artificial Sequence
  ENSG00000278053_65 (sequence is synthesized)
attcaaatgtgcgtgtgtagaggggtatattccaacaacctagatccaccataggcctcagcaactccaagcatgtgaatcccatgacccaaatattagtgtaaaactatgcacctcagt

SEQ ID NO: 796573 - DNA, 120 bp, Artificial Sequence
  ENSG00000278053_66 (sequence is synthesized)
tttccatctgtgaaatgaggacagtgatagtatttacaacacaggcttgttgtgaagagtgaagaagttactatacacaaaaaacttggcaacggtgccaaccccatagtaggcactttc

SEQ ID NO: 796574 - DNA, 120 bp, Artificial Sequence
  ENSG00000278053_67 (sequence is synthesized)
acttaatgaatttaagcttgactctggcttcagtcagtgcttcctccaagattgagtttaccagttttgtagggcttgataaatgttgaaatagctgctatctatagttattcatcagtg

SEQ ID NO: 796575 - DNA, 120 bp, Artificial Sequence
  ENSG00000278053_68 (sequence is synthesized)
cattaatttcagcccagtggatagttctctctgtaatccaatgtgcttacatcaggtaataattgataatatatcagaacactttgtggattactttgtgtagttttagttccctgtaag

SEQ ID NO: 796576 - DNA, 120 bp, Artificial Sequence
  ENSG00000278053_69 (sequence is synthesized)
caggtaaagtcaaatatatactttgaaactcagaagaactacttgattttaaactattgacattaaatttatgaagtacctgttttcattctaaaacaatttaatatatattctgttaac

SEQ ID NO: 796577 - DNA, 120 bp, Artificial Sequence
  ENSG00000278053_70 (sequence is synthesized)
tattactagtgggaggctattacagtggtagcactgtatcatcatcatcttggctcgtattcagtaatccattggtaaattgataagaaagtacattgtgctaactatatgatcatcctg

SEQ ID NO: 796578 - DNA, 120 bp, Artificial Sequence
  ENSG00000278053_71 (sequence is synthesized)
catcgtatttagtaatctaggagtaaatggttaagaagcgtgttgtcccagctcttatcccaagggacagaagcttgcctctcagaatatggtaagttgtcttttcgcagctcagattag

SEQ ID NO: 796579 - DNA, 120 bp, Artificial Sequence
  ENSG00000278057_0 (sequence is synthesized)
atggttttaaaggcggaacacaccaggagccccagcgcaaccctcccctccaatgtgccttcatgccggtccctgtcatccagcgaagacggccccagtggcccttccagcctcgcagat

SEQ ID NO: 796580 - DNA, 120 bp, Artificial Sequence
  ENSG00000278057_1 (sequence is synthesized)
ggaggcctagcccacaacttacaggatagtgtcaggcaccgcatcctctacctctcagagcagctgagagtggagaaggccagtcgggatggcaacactgtgagctacctcaagctggta

SEQ ID NO: 796581 - DNA, 120 bp, Artificial Sequence
  ENSG00000278057_2 (sequence is synthesized)
tccaaagcagaccggcaccaggtgccgcacatccagcaggcctttgagaaggtgaaccagcgcgcctctgccaccatcgcccagatcgagcacaggctccaccagtgtcaccagcagctc

SEQ ID NO: 796582 - DNA, 120 bp, Artificial Sequence
  ENSG00000278057_3 (sequence is synthesized)
caggagctggaggaaggctgcaggcccgagggcttactgctgatggcagaaagcgacccagccaactgcgagccacccagtgagaaggccctgctttcagagccccccgagccaggtggg

SEQ ID NO: 796583 - DNA, 120 bp, Artificial Sequence
  ENSG00000278057_4 (sequence is synthesized)
gaagacgggccggtcaacctgcctcatgccagcaggcccttcatcttggagagtcgcttccagagcttacagcaggggacgtgcttagagacagaggatgtggcccagcaacaaaacctg

SEQ ID NO: 796584 - DNA, 120 bp, Artificial Sequence
  ENSG00000278057_5 (sequence is synthesized)
gccaagaggttccacatcagcctccaggagtcctatcacagcctaaaggagaggtctctgactgacctgcagctgttgctggagtcccttcaggaggagaagtgtaggcaagcattgatg

SEQ ID NO: 796585 - DNA, 120 bp, Artificial Sequence
  ENSG00000278057_6 (sequence is synthesized)
gaagaacaggtgaatggtcgcctgcagggacagctgaatgagatttacaacctcaaacacaatctggcctgcagcgaagagagaatggcctatctatcctatgagagagccaaggaaata

SEQ ID NO: 796586 - DNA, 120 bp, Artificial Sequence
  ENSG00000278057_7 (sequence is synthesized)
tgggagatcacggagaccttcaagagccgaatatccaagctggagatgctacagcaagtcacccaactggaggcagcggagcacctccaaagccgtcccccgcagatgttgttcaagttc

SEQ ID NO: 796587 - DNA, 120 bp, Artificial Sequence
  ENSG00000278057_8 (sequence is synthesized)
ctgagtccgcgcctctcactggcaaccgtcctcttggtctttgtctccaccttgtgtgcctgcccctcgtcactgatcagctcacgcctgtgcacctgcaccatgctgatgctgatcggg

SEQ ID NO: 796588 - DNA, 120 bp, Artificial Sequence
  ENSG00000278057_9 (sequence is synthesized)
cttggggtcctggcctggcagaggtggcgcgccatccctgccacagactggcaggaatgggtcccctccaggtgtagactgtactccaaggactctgggcctccagcagatggaccttaa

SEQ ID NO: 796589 - DNA, 120 bp, Artificial Sequence
  ENSG00000278057_10 (sequence is synthesized)
tggtgccagcactagcccccatgtcggtctcagagaaccttctccccacctctgagttattctctcagtgtatcgaagatatcagtcaactatcttctggattgcattgatgctattgag

SEQ ID NO: 796590 - DNA, 120 bp, Artificial Sequence
  ENSG00000278057_11 (sequence is synthesized)
tgctagctccctccctcctcctgggtgctgagggcatccagcaagcccctccacagctcttgcttgccgattatgtaaccaccagcctggtgaaatggatatagacgcccacctgcctca

SEQ ID NO: 796591 - DNA, 120 bp, Artificial Sequence
  ENSG00000278057_12 (sequence is synthesized)
gaggcaagccccgtgtgattgttgaggaggagttagcccattgccagcctgtgacgtgactgactcgaatgaaccctgttattctctcagtgtatcgaagatatcagtcaactatcttct

SEQ ID NO: 796592 - DNA, 120 bp, Artificial Sequence
  ENSG00000278057_13 (sequence is synthesized)
aacccctttggagtctgaagacccactcctacgtctccggcgtctgaagagcgaatggcgcctgcgagctgcccagtgcgtttatgtgatgtcggtgcagctccctccgcatgcctcgtg

SEQ ID NO: 796593 - DNA, 120 bp, Artificial Sequence
  ENSG00000278057_14 (sequence is synthesized)
atatcagtcaactatcttctggattgcattgatgctattgagaaggcagcctgcagtctaaaagtcatggttttaaaggtggtttgttgctagttgttggatattgagaacatcagtgta

SEQ ID NO: 796594 - DNA, 120 bp, Artificial Sequence
  ENSG00000278057_15 (sequence is synthesized)
cttgcctcctgggaatatcgcctatgaatgcagttgctggatcatttggcggaacacaccaggagccccagcgcaaccctcccctccaatgtgccttcatgccggtccctgtcatccagc

SEQ ID NO: 796595 - DNA, 120 bp, Artificial Sequence; identical to SEQ ID NO: 790465
  ENSG00000278085_0 (sequence is synthesized)

SEQ ID NO: 796596 - DNA, 120 bp, Artificial Sequence; identical to SEQ ID NO: 791399
  ENSG00000278085_1 (sequence is synthesized)

SEQ ID NO: 796597 - DNA, 120 bp, Artificial Sequence; identical to SEQ ID NO: 791400
  ENSG00000278085_2 (sequence is synthesized)

SEQ ID NO: 796598 - DNA, 120 bp, Artificial Sequence; identical to SEQ ID NO: 791401
  ENSG00000278085_3 (sequence is synthesized)

SEQ ID NO: 796599 - DNA, 120 bp, Artificial Sequence; identical to SEQ ID NO: 791402
  ENSG00000278085_4 (sequence is synthesized)

SEQ ID NO: 796600 - DNA, 120 bp, Artificial Sequence; identical to SEQ ID NO: 791403
  ENSG00000278085_5 (sequence is synthesized)

SEQ ID NO: 796601 - DNA, 120 bp, Artificial Sequence; identical to SEQ ID NO: 791404
  ENSG00000278085_6 (sequence is synthesized)

SEQ ID NO: 796602 - DNA, 120 bp, Artificial Sequence
  ENSG00000278129_0 (sequence is synthesized)
gtagtcgccgcgtcgccggtgcggccgccattgtccggcgttcggcgagtcgggtggtccctttggctggagtgcctctctggtctggggatcacctcaggcgctgtccttcactgggcg

SEQ ID NO: 796603 - DNA, 120 bp, Artificial Sequence
  ENSG00000278129_1 (sequence is synthesized)
atccagcatggaccccgaggacgaaggggtagcgggagtgatgtctgtggggccgccggcggcccggcttcaggaaccagtgaccttccgggatgtggctgtggactttacccaggagga

SEQ ID NO: 796604 - DNA, 120 bp, Artificial Sequence
  ENSG00000278129_2 (sequence is synthesized)
atgggggcagctggaccctacccagaggatcctctaccgtgacgtgatgctggagacctttggtcacctgctctccataggtcctgagcttccgaagcctgaagtcatctcccagctgga

SEQ ID NO: 796605 - DNA, 120 bp, Artificial Sequence
  ENSG00000278129_3 (sequence is synthesized)
gcaagggaccgagctatgggtggctgagagaggaaccacccagggctgccatccagcctgggagcctcgatctgaaagccaagcatcacgcaaggaagagggcctgcctgaagaggagcc

SEQ ID NO: 796606 - DNA, 120 bp, Artificial Sequence
  ENSG00000278129_4 (sequence is synthesized)
atcccatgtcacgggaagggaaggattcccgacagatgctccttatcccaccacgttagggaaagacagggagtgtcagagccagagtctggcactcaaggagcagaataacttgaagca

SEQ ID NO: 796607 - DNA, 120 bp, Artificial Sequence
  ENSG00000278129_5 (sequence is synthesized)
gttggaatttggcctcaaggaagcaccagttcaagatcaaggctacaaaactctcagactcagggaaaactgcgtcctgagttcaagcccaaatccattcccagagatctctagagggga

SEQ ID NO: 796608 - DNA, 120 bp, Artificial Sequence
  ENSG00000278129_6 (sequence is synthesized)
gtatttgtatacttacgactcacagattacagactcagaacataactccagcttagtcagtcagcagacaggctccccaggaaaacagcccggtgaaaacagtgactgtcacagagattc

SEQ ID NO: 796609 - DNA, 120 bp, Artificial Sequence
  ENSG00000278129_7 (sequence is synthesized)
cagtcaggccattccaattacggaactcacaaaaagccaggtgcaggacaaaccctacaaatgtactgactgtgggaagtcgtttaaccataacgcacacctcaccgtgcacaagaggat

SEQ ID NO: 796610 - DNA, 120 bp, Artificial Sequence
  ENSG00000278129_8 (sequence is synthesized)
tcatacgggagaaagaccttatatgtgcaaggagtgtgggaaagccttcagccagaactcctccctcgtccagcatgagcgcatccacactggagacaagccctacaagtgtgccgaatg

SEQ ID NO: 796611 - DNA, 120 bp, Artificial Sequence
  ENSG00000278129_9 (sequence is synthesized)
tgggaagtctttctgccatagtacacaccttaccgtccatcggaggattcacactggggagaagccctatgagtgtcaggactgtgggagggccttcaaccagaactcctccctggggcg

SEQ ID NO: 796612 - DNA, 120 bp, Artificial Sequence
  ENSG00000278129_10 (sequence is synthesized)
gcacaagaggacacacactggggagaagccatacacctgcagtgtgtgtgggaaatccttctctcggaccacttgccttttcctgcacctgagaactcacaccgaggagaggccctacga

SEQ ID NO: 796613 - DNA, 120 bp, Artificial Sequence
  ENSG00000278129_11 (sequence is synthesized)
gtgtaaccactgcgggaagggcttcaggcacagctcatccctggcccagcaccagcggaagcacgcgggggagaagccctttgagtgccgccagaggctgatctttgagcagacgccagc

SEQ ID NO: 796614 - DNA, 120 bp, Artificial Sequence
  ENSG00000278129_12 (sequence is synthesized)
tctcacaaagcatgaatggacagaagccctgggctgtgacccacctttgagtcaagatgagaggactcaccgaagcgacagacccttcaaatgtaatcagtgtgggaagtgtttcattca

SEQ ID NO: 796615 - DNA, 120 bp, Artificial Sequence
  ENSG00000278129_13 (sequence is synthesized)
gagctctcacctcatccggcaccagataactcacaccagagaggagcagccccatgggcgaagccggcggcgtgaacaatcctcgagcaggaactcacacctggttcagcatcaacaccc

SEQ ID NO: 796616 - DNA, 120 bp, Artificial Sequence
  ENSG00000278129_14 (sequence is synthesized)
gaactccagaaagagctctgcaggcggagcaaaggcagggcagccggaaagcagagccctggctttgtttgacatccaaaaaatcatgcaagagaaaaaccctgtgcacgttattggggt

SEQ ID NO: 796617 - DNA, 120 bp, Artificial Sequence
  ENSG00000278129_15 (sequence is synthesized)
ggaagagccttctgtgggtgcttccatgttatttgacatcagagaatccacataggagagaaactttgctgatgacttttaaccacaagtaaaaaatgtggtaagtccacatagtgtact

SEQ ID NO: 796618 - DNA, 120 bp, Artificial Sequence
  ENSG00000278129_16 (sequence is synthesized)
catggaaggaggggctgggggtagaaatgtcatgggtgacttctgactttctaaggaaatgatgcttcccaagcacccgaggttggttggtcccaaatctatcaaactcagtgccctctt

SEQ ID NO: 796619 - DNA, 120 bp, Artificial Sequence
  ENSG00000278129_17 (sequence is synthesized)
tagcgacatattttgtgacattccttccattacaccacagtgagttcacaggtaatataacctacccacctgtgtaatgtcaaaaaaaatcaatatgcggccccattttgtaaaggatca

SEQ ID NO: 796620 - DNA, 120 bp, Artificial Sequence
  ENSG00000278129_18 (sequence is synthesized)
ttaaaatgaaagtaatttatggtagagtaaattgtagagtaacgtgtactgacttggtgcagtatttctccttgtcactgtgggcccaattttgccaggagacctagggcaatagcctgt

SEQ ID NO: 796621 - DNA, 120 bp, Artificial Sequence
  ENSG00000278129_19 (sequence is synthesized)
tgcttgtggactggtagagggtatgatgttgaccatggcaatactgtgaggggccttcccatgtggaacgtgaccttccaaagtagtgactaactcttggaaaagtttttaacaacataa

SEQ ID NO: 796622 - DNA, 120 bp, Artificial Sequence
  ENSG00000278129_20 (sequence is synthesized)
tatgctattgcatttctgggaaattctgggtaaattccaagcatgcagcaattagtttgtgcttatgtgtgaagtccagttaggttctcagttcataccctgaaaactgcttattccaca

SEQ ID NO: 796623 - DNA, 120 bp, Artificial Sequence
  ENSG00000278129_21 (sequence is synthesized)
tctgttgatgtggtccactgggggcagttctgttcctcaccatcttggcagcatgcatggctcctgcccacatttcaaccacacccccaacccaattacgtgaccagcccccacgaaatt

SEQ ID NO: 796624 - DNA, 120 bp, Artificial Sequence
  ENSG00000278129_22 (sequence is synthesized)
tcacagcattccgtgcaggggagtgtcacagctcctcttgaaaaacatctggtgttgctatgagccagaagttcttttttttgttttttgtctgagatggagtctcgctccgtcacccag

SEQ ID NO: 796625 - DNA, 120 bp, Artificial Sequence
  ENSG00000278129_23 (sequence is synthesized)
gctggagtgcaatggcgcagtctgctcaccacaacctccgcctcccaggttaaagcaattctcctgccttagtcccccgagtagctgggattacacgcacctgccaccacgcccagctaa

SEQ ID NO: 796626 - DNA, 120 bp, Artificial Sequence
  ENSG00000278129_24 (sequence is synthesized)
gctgagccagaggttcttaactggtggtgcttttgcctccagggcacatttggtgacatctagggacatttttggttgctgtgcctggaggaagggtgccgccgtcatgtagtgggtaga

SEQ ID NO: 796627 - DNA, 120 bp, Artificial Sequence
  ENSG00000278129_25 (sequence is synthesized)
ggccagggacgctgctcaacatcctttagtgcccgggacagctcctcaacaaaggattctctagctcaaatgtcaatagtgccaaggtggagaagccacctgggtataaacccagcccag

SEQ ID NO: 796628 - DNA, 120 bp, Artificial Sequence
  ENSG00000278129_26 (sequence is synthesized)
aaatgtagctgacatttttaaaacttgcagccagctgtggtggctcacgcttgtgatcccagcactgtgggaggctgaggagggcggatcctttgaggtcaggagtttgagactagcctg

SEQ ID NO: 796629 - DNA, 77 bp, Artificial Sequence
  ENSG00000278129_27 (sequence is synthesized)
ctagcctgggccagtgtggtgacatgcgcctgtaattctagctacctgggggaggctgaggcacgagaatcgcttga

SEQ ID NO: 796630 - DNA, 77 bp, Artificial Sequence
  ENSG00000278129_28 (sequence is synthesized)
gaaaagaaaaaaaaccttcaaattgattaatcagggctggactagactagaaatcatataagcttgattttaacaga

SEQ ID NO: 796631 - DNA, 120 bp, Artificial Sequence
  ENSG00000278129_29 (sequence is synthesized)
tggactagactagaaatcatataagcttgattttaacagatggcatcattagctagtttatacatgatgtactttttagtacatcctttacggttttgcagcattcataattgatgtgaa

SEQ ID NO: 796632 - DNA, 70 bp, Artificial Sequence
  ENSG00000278129_30 (sequence is synthesized)
acatcctttacggttttgcagcattcataattgatgtgaaataaggaagataatcagtgttgtaatcact

SEQ ID NO: 796633 - DNA, 120 bp, Artificial Sequence
  ENSG00000278129_31 (sequence is synthesized)
tagctgggaccacaggcatgtgccaccattcctgattttttttattttttgcagagacagggtctcactgtgttgcctaggctggtctcgaaccttggcgtcccaaagtgttgagattat

SEQ ID NO: 796634 - DNA, 120 bp, Artificial Sequence
  ENSG00000278129_32 (sequence is synthesized)
ttataggcatgagccactgtgcccagccacttatttttctgagtaacctttaaggatgtattgtggacattttcaaacatgagtcatatatttttgctggtactcccatctacctcccca

SEQ ID NO: 796635 - DNA, 120 bp, Artificial Sequence
  ENSG00000278129_33 (sequence is synthesized)
cccatctacctccccaccattctccttccctggatatatatataaccatgtttgtccactgggacaaaaccattttcacaatcatactaagctgtcatttcacatttttgctgtgcactg

SEQ ID NO: 796636 - DNA, 120 bp, Artificial Sequence
  ENSG00000278129_34 (sequence is synthesized)
atagtgtgaaagcaatggcaggtaaaactgctgagcctgagttcaaagcagggcagtagccctgaggttggttgttcatattcttctccactgggaaatgcagtaaagaaaaagaaaagc

SEQ ID NO: 796637 - DNA, 65 bp, Artificial Sequence
  ENSG00000278129_35 (sequence is synthesized)
atgcttcagccctctaagtagctgggatgacaggtgtgcgctaccacacccggctaatttttgta

SEQ ID NO: 796638 - DNA, 61 bp, Artificial Sequence
  ENSG00000278129_36 (sequence is synthesized)
aatctgcccgcctcagtctcccaaaatgctggcattacaggcatgagccaccgtgcctggc

SEQ ID NO: 796639 - DNA, 120 bp, Artificial Sequence
  ENSG00000278129_37 (sequence is synthesized)
caggcatgagccaccgtgcctggcctactttcactgaatttctgtgatgaaacgggaaaaattaattttgttaaatctcaagtagaactatattgtcattatcacatctaaacagatatc

SEQ ID NO: 796640 - DNA, 120 bp, Artificial Sequence
  ENSG00000278129_38 (sequence is synthesized)
cagatatcatcaaatacctagtgttcagatgttctgggttgcctcataaattttgttttctatttgtttcatagtaatcataatctaaacaagatccacacagtgcatttggttggaatt

SEQ ID NO: 796641 - DNA, 82 bp, Artificial Sequence
  ENSG00000278129_39 (sequence is synthesized)
ctaaacaagatccacacagtgcatttggttggggagacttgctctgtcacgtggttcactgcaacctcccaggttcaagcaa

SEQ ID NO: 796642 - DNA, 90 bp, Artificial Sequence
  ENSG00000278129_40 (sequence is synthesized)
gggactgcaggcatgcaccaccacactcagcagatttcttaattgtttgtagagatggggttttactacattgcctaggccagtttcaaa

SEQ ID NO: 796643 - DNA, 69 bp, Artificial Sequence
  ENSG00000278129_41 (sequence is synthesized)
cgcctggccccaaaacagcaatttgaataaccatgttggaatggttgagcattggaacgcattagcatc

SEQ ID NO: 796644 - DNA, 120 bp, Artificial Sequence
  ENSG00000278129_42 (sequence is synthesized)
gtgagccaccgcgcctggccccaaaacagcaatttgaataaccatgttggaatggttgagcattggaacgcattagcatcagaacttcccgtgtcaggccaggcgcggtggctcacgcct

SEQ ID NO: 796645 - DNA, 74 bp, Artificial Sequence
  ENSG00000278129_43 (sequence is synthesized)
tgagctgagatgaaaaaaataaaagaacttcccgtgtccgtttttgctttttggatgctgggagtgtcacaact

SEQ ID NO: 796646 - DNA, 120 bp, Artificial Sequence
  ENSG00000278129_44 (sequence is synthesized)
tgtccgtttttgctttttggatgctgggagtgtcacaactcagctatccaatcaaggcagagctggcctccaggatgccagagccagagctttgtggttcatctctagaggttcaacagg

SEQ ID NO: 796647 - DNA, 120 bp, Artificial Sequence
  ENSG00000278129_45 (sequence is synthesized)
accctgtggatggcccaagttcgtttctctgcacttacctcttcggggttgtcctcaaaacgttgccgtgtcagctctcacttttcacagcaactctggcctcctaccttggactgcgcc

SEQ ID NO: 796648 - DNA, 120 bp, Artificial Sequence
  ENSG00000278129_46 (sequence is synthesized)
acttctgtctccttagataacctccattcgcatagctaaatgctgcaccctccgacactgccacaataatagttctgtgagttagtaccattttatagataggcaaaatttggcacagga

SEQ ID NO: 796649 - DNA, 120 bp, Artificial Sequence
  ENSG00000278129_47 (sequence is synthesized)
caaaagttagtggtaactagaacaaaagtaaccagcccaagctaggaagtggtggagttagaatttgatgtcagcacccagctgaccatggcttaaacagatgaggctttgttcaaaggc

SEQ ID NO: 796650 - DNA, 120 bp, Artificial Sequence
  ENSG00000278129_48 (sequence is synthesized)
tgtcttttcagtggctcagctgtgtcacagtcgatgttttctgcaatctctcaacctttccattgtggtcatgaggagactcctatggctccagccattgcatccacagtgaagactgaa

SEQ ID NO: 796651 - DNA, 120 bp, Artificial Sequence
  ENSG00000278129_49 (sequence is synthesized)
agaagggggaatgggcaggccaacacttaccgctgatggtgtttaaaggaaaaacattcccagaagcctgcagcacatgccccccttagtctcactggccacagatgggtcagggggcca

SEQ ID NO: 796652 - DNA, 120 bp, Artificial Sequence
  ENSG00000278129_50 (sequence is synthesized)
cccctaataacaacggggcttagaaacctcgtatttacctttctaacctctgtggtggagacaggtgggagagaaaagtcctgggaagtggatgatggaggcagctagccgtagctgctg

SEQ ID NO: 796653 - DNA, 120 bp, Artificial Sequence
  ENSG00000278129_51 (sequence is synthesized)
cttttctcttcaagctcttgggagaattgcttgtgctccctattcccttggtggatgatggaggcagctagccgtatctgctgcttttctccttcaagctcttgggagaatcgcttgtgc

SEQ ID NO: 796654 - DNA, 120 bp, Artificial Sequence
  ENSG00000278129_52 (sequence is synthesized)
tccctattcccttggtggcagctcacacctcagacctgctgtccgcccccactgcttcacagaacccactgcaaccactgtccaaggtactacctctggtgtcgtctctcttcatcccca

SEQ ID NO: 796655 - DNA, 120 bp, Artificial Sequence
  ENSG00000278129_53 (sequence is synthesized)
ggactgtgaagcctgctaacctctttgcagagctccatctccttgcattgtggggttccttctaactcttcagggacttctcaacctcccgtcacccttcctaaatgctggggtcctaga

SEQ ID NO: 796656 - DNA, 120 bp, Artificial Sequence
  ENSG00000278129_54 (sequence is synthesized)
gtccaccttgtgctccacgccctccccaggtgtcatctacatccctagctttgtgctgctcaccaccaaatcagtctggtgcttctgagatttgggcttcagacccaaacaactgctgtg

SEQ ID NO: 796657 - DNA, 120 bp, Artificial Sequence
  ENSG00000278129_55 (sequence is synthesized)
tgctactgggcaactccccgaggtgtgccgaaagctccccaaacccagcctaccccaaacaaaactcattttccacccagactagtctctgcttccctgatccctttcctggaggctgtt

SEQ ID NO: 796658 - DNA, 120 bp, Artificial Sequence
  ENSG00000278129_56 (sequence is synthesized)
tccacttgccatcccatcatggaagccagaaaaccagtcttcttgacctctccccttccccactccatggagttagaggtcctgttgattttgccatgtaaacatttcggatttgcttac

SEQ ID NO: 796659 - DNA, 120 bp, Artificial Sequence
  ENSG00000278129_57 (sequence is synthesized)
ttcatccccactgccaccaacagtgcaggatggccctaagaggagaagtaatgtgctaccaagtggcccagccagagtgtgaaccaaacagtctggtaccaaaaccctattctggatcat

SEQ ID NO: 796660 - DNA, 120 bp, Artificial Sequence
  ENSG00000278129_58 (sequence is synthesized)
tcctcctttctgctccaccagcagtttggggcacaggcttgggaatccagacaggaaagctcctcccctctgaagcagtgggaccaaaaatgacagcatggttctagacagctctggaag

SEQ ID NO: 796661 - DNA, 120 bp, Artificial Sequence
  ENSG00000278129_59 (sequence is synthesized)
tcaggcctgtgattgcctcattccctccaccttggcccccaaaatggccagtcctgaaggggtcacagttgatacttctctgagggggcatggggttggctgaggttatagcagccccac

SEQ ID NO: 796662 - DNA, 120 bp, Artificial Sequence
  ENSG00000278129_60 (sequence is synthesized)
agggtggtaagctgggatgaagcaatcaactggaactcaacaagccttgagttctcaaagggggtgtgggaaggttcttatacatcttctatgaagggcagtttatcagtcactaaatta

SEQ ID NO: 796663 - DNA, 120 bp, Artificial Sequence
  ENSG00000278129_61 (sequence is synthesized)
caaatacataaaccctttgtctcaccaaacctgctgggaatgaatcctacatatatatttatatgtgtgcaggctacatggttttcattatgctattgattttaaaagtaaaaatttgga

SEQ ID NO: 796664 - DNA, 120 bp, Artificial Sequence
  ENSG00000278129_62 (sequence is synthesized)
aagaacctccatgtccaccatggggaactggctaagtcatttatggtggaatggtgatcataaaaattcattaaaaatgaagactctatatacagcttgaatattccttatcgaaatgct

SEQ ID NO: 796665 - DNA, 120 bp, Artificial Sequence
  ENSG00000278129_63 (sequence is synthesized)
tgggaccagaagtgtttcagatctttgcatattttctgtttctcatttcagttcacattttctaagcatgatattcctactgatttccttgtagatattttgaaacagataagaaactcc

SEQ ID NO: 796666 - DNA, 120 bp, Artificial Sequence
  ENSG00000278129_64 (sequence is synthesized)
tccgtggaaattactgttaactagggaaaagacatgtttttttctgttcataaaagtaatgcgagttctttgtagcaaaacttggaaaatgcataaaagtaaaaaaaaaatgaaaacttg

SEQ ID NO: 796667 - DNA, 120 bp, Artificial Sequence
  ENSG00000278129_65 (sequence is synthesized)
tgtaaaattcctcatactttagccatccatagatggtccttaccattaggattttactaattttccttgcagctttttcttaaaatatacacgtgtgtctacacatacatagtgtacact

SEQ ID NO: 796668 - DNA, 120 bp, Artificial Sequence
  ENSG00000278129_66 (sequence is synthesized)
aaattttacatacacacagaggaatatatatgtgtatagttatcttgtgtttagaaatttggaatcccttctagttgtcttgtaacatgtgcttactctattttgaggattttctctatg

SEQ ID NO: 796669 - DNA, 120 bp, Artificial Sequence
  ENSG00000278129_67 (sequence is synthesized)
aatttcatgtagctctttaaattaactttcaggaggattgtaacaatgtgctctccacccagtattttaccagccttgagttttctcaaagggggcattggaggggttcttatacattta

SEQ ID NO: 796670 - DNA, 120 bp, Artificial Sequence
  ENSG00000278129_68 (sequence is synthesized)
cagtgggaatgtgaattgatacaacttctgtggagggcagtttatcagccactatctaaattacacatacataaaccctttgtctaagcaaacttgctgggaataaatcctacacatata

SEQ ID NO: 796671 - DNA, 120 bp, Artificial Sequence
  ENSG00000278195_0 (sequence is synthesized)
actccctccttcacgggctccatgtcaccatctgtggcacagtccctctctgtcactctccctgccaccccctcattctccttcctccctcctgcctctctctgcatctctccctctcac

SEQ ID NO: 796672 - DNA, 120 bp, Artificial Sequence
  ENSG00000278195_1 (sequence is synthesized)
ccgtgtctcctctcctctctttccttctcgtcttctccctgtcacgcatctctcatcactccccctcattctgcctttcctcctactcacggtctcctctccctctccctctctctctct

SEQ ID NO: 796673 - DNA, 120 bp, Artificial Sequence
  ENSG00000278195_2 (sequence is synthesized)
ccccctccctctttctctctctctctctttctccacctcctcccgaccccctttcccctctatttctattggcttctgtgtcccttgctcccctcttctcttcctcaccctgggaagctt

SEQ ID NO: 796674 - DNA, 120 bp, Artificial Sequence
  ENSG00000278195_3 (sequence is synthesized)
ctcccccctatccttgcccctgcccccccaggatgtgtcctggagatggggggtgacgtaccaggctctggttgggaagtcagggccggagaccagatgggagaggctctgtggacagcc

SEQ ID NO: 796675 - DNA, 120 bp, Artificial Sequence
  ENSG00000278195_4 (sequence is synthesized)
gtggccgagggcctgggagggaacctgagcccgcaagcggtctagaagtgggtgccttgtggggaccctagttaggagtgccctgggggcacctggggactgggcagggagaggggacag

SEQ ID NO: 796676 - DNA, 120 bp, Artificial Sequence
  ENSG00000278195_5 (sequence is synthesized)
cagaatgataaccagcctggcggcaaggagggaagccctcaccccatgggcaggcaaatagctgactgctgaccaccctcccctcagccatggacatgcttcatccatcatcggtgtcca

SEQ ID NO: 796677 - DNA, 120 bp, Artificial Sequence
  ENSG00000278195_6 (sequence is synthesized)
cgacctcagaacctgagaatgcctcctcggcctggcccccagatgccaccctgggcaacgtgtcggcgggcccaagcccggcagggctggccgtcagtggcgttctgatccccctggtct

SEQ ID NO: 796678 - DNA, 120 bp, Artificial Sequence
  ENSG00000278195_7 (sequence is synthesized)
acctggtggtgtgcgtggtgggcctgctgggtaactcgctggtcatctatgtggtcctgcggcacacggccagcccttcagtcaccaacgtctacatcctcaacctggcgctggccgacg

SEQ ID NO: 796679 - DNA, 120 bp, Artificial Sequence
  ENSG00000278195_8 (sequence is synthesized)
agctcttcatgctggggctgcccttcctggccgcccagaacgccctgtcctactggcccttcggctccctcatgtgccgcctggtcatggcggtggatggcatcaaccagttcaccagca

SEQ ID NO: 796680 - DNA, 120 bp, Artificial Sequence
  ENSG00000278195_9 (sequence is synthesized)
tattctgcctgactgtcatgagcgtggaccgctacctggccgtggtacatcccacccgctcggcccgctggcgcacagctccggtggcccgcacggtcagcgcggctgtgtgggtggcct

SEQ ID NO: 796681 - DNA, 120 bp, Artificial Sequence
  ENSG00000278195_10 (sequence is synthesized)
cagccgtggtggtgctgcccgtggtggtcttctcgggagtgccccgcggcatgagcacctgccacatgcagtggcccgagccggcggcggcctggcgagccggcttcatcatctacacgg

SEQ ID NO: 796682 - DNA, 120 bp, Artificial Sequence
  ENSG00000278195_11 (sequence is synthesized)
ccgcactgggcttcttcgggccgctgctggtcatctgcctctgctacctgctcatcgtggtgaaggtgcgctcagctgggcgccgggtgtgggcaccctcgtgccagcggcggcggcgct

SEQ ID NO: 796683 - DNA, 120 bp, Artificial Sequence
  ENSG00000278195_12 (sequence is synthesized)
ccgaacgcagggtcacgcgcatggtggtggccgtggtggcgctcttcgtgctctgctggatgcccttctacgtgctcaacatcgtcaacgtggtgtgcccactgcccgaggagcctgcct

SEQ ID NO: 796684 - DNA, 120 bp, Artificial Sequence
  ENSG00000278195_13 (sequence is synthesized)
tctttgggctctacttcctggtggtggcgctgccctatgccaacagctgtgccaaccccatcctttatggcttcctctcctaccgcttcaagcagggcttccgcagggtcctgctgcggc

SEQ ID NO: 796685 - DNA, 120 bp, Artificial Sequence
  ENSG00000278195_14 (sequence is synthesized)
cctcccgccgtgtgcgcagccaggagcccactgtggggcccccggagaagactgaggaggaggatgaggaggaggaggatggggaggagagcagggaggggggcaaggggaaggagatga

SEQ ID NO: 796686 - DNA, 120 bp, Artificial Sequence
  ENSG00000278195_15 (sequence is synthesized)
acggccgggtcagccagatcacgcagcctggcaccagcgggcaggagcggccgcccagcagagtggccagcaaggagcagcagctcctaccccaagaggcttccactggggagaagtcca

SEQ ID NO: 796687 - DNA, 120 bp, Artificial Sequence
  ENSG00000278195_16 (sequence is synthesized)
gcacgatgcgcatcagctacctgtaggggcctggggaaagccaggatggcccgaggaagaggcagaagccgtgggtgtgcctagggcctacttcccaaggtgccacaggcccatgatggg

SEQ ID NO: 796688 - DNA, 120 bp, Artificial Sequence
  ENSG00000278195_17 (sequence is synthesized)
gggtaggttgcttctactctctgggccttgttttctcctctgtgactcagggataggagtcatcagcctggatgagctatgtcagatgagaggtttggagggcactgttgctgggctgac

SEQ ID NO: 796689 - DNA, 120 bp, Artificial Sequence
  ENSG00000278195_18 (sequence is synthesized)
ctggctgagcaggcaaaaggtgggtgcagactggcctccccccagggatggagtgtcttggggcatcaactagaatcttggccctcagagggataaaccaaggccaggatttcttgggct

SEQ ID NO: 796690 - DNA, 120 bp, Artificial Sequence
  ENSG00000278195_19 (sequence is synthesized)
cagagtcaggaacacaggagctgctgggggctgggctggaaacctaaacagaagaaagcctaacccggtgggaggagtggggcagaaatggtcaggccccagatcagctccctcccctcg

SEQ ID NO: 796691 - DNA, 120 bp, Artificial Sequence
  ENSG00000278195_20 (sequence is synthesized)
actgtgaggccttggaccagctctgctcctctctaggcctcaggcttcacctgggtaaaacccaacaacctctacacccttttggcccaggcagtcaatgctggaggtcctgtgctcctg

SEQ ID NO: 796692 - DNA, 120 bp, Artificial Sequence
  ENSG00000278195_21 (sequence is synthesized)
gacgggaagagcaggtgaatttcctgctcatggaagcgaatgaagtccagcttcagggtctctcactgcctgggcttttgcaaggccctgcatctacttttgtacttgtcattttgtatt

SEQ ID NO: 796693 - DNA, 120 bp, Artificial Sequence
  ENSG00000278195_22 (sequence is synthesized)
cgttttcttaaagagggacctcgaactgcataagcttaggccacccaaagcctggctctgcccctgctgaggtcagccacccaatccccaaggaagctcatgttgggtcttatggctgga

SEQ ID NO: 796694 - DNA, 120 bp, Artificial Sequence
  ENSG00000278195_23 (sequence is synthesized)
gtaggggcccccgggggttcccaggtcttttgagggcttccaggcacctccttgtaggaagggccatccctgttcctctccttgtgacccatattctcccttcctggagaccgagacagg

SEQ ID NO: 796695 - DNA, 120 bp, Artificial Sequence
  ENSG00000278195_24 (sequence is synthesized)
gacccagcccatgaggactggcatggaaaggcagagtgtctgaagagcgctgtgaggagaaggaagaggaagggagaagaggaagaggaaggagaaggaagaggaagacaagggggaaag

SEQ ID NO: 796696 - DNA, 120 bp, Artificial Sequence
  ENSG00000278195_25 (sequence is synthesized)
gggaggatgaggagggggaaggagaagtacagatctgtttcctggagccgtctttggcccccctgggctgagctcagtggtagcatctgtgaacctgagttgccgacaacagccccaccc

SEQ ID NO: 796697 - DNA, 120 bp, Artificial Sequence
  ENSG00000278195_26 (sequence is synthesized)
aaccagtactgagggaaggacacgatcagggtggaacagccagggtgcaatggcaaatgcacagagtacagacaggcacagggcctgcgtccctgaggggcctcagagtgctgccaagag

SEQ ID NO: 796698 - DNA, 120 bp, Artificial Sequence
  ENSG00000278195_27 (sequence is synthesized)
ggctcaggccttaataaagccctagggtggagctggctaccagggacattgggaggactggggagctccctccccatgctctatcatcctggagactacaggtcgggaggcccagggaag

SEQ ID NO: 796699 - DNA, 120 bp, Artificial Sequence
  ENSG00000278195_28 (sequence is synthesized)
acaagaagaggctgaagtgggactgtggagggggaccatggggagcagccaccatccaaggctgggcctagactccctcccagagatggtccctcagagctgtggtgaggctggccctgg

SEQ ID NO: 796700 - DNA, 120 bp, Artificial Sequence
  ENSG00000278195_29 (sequence is synthesized)
gagggtgagacccccggtgaaatccttccgcttccccaccccttgcagagggcaggggtcctcagggaaagcacaggaaccagacttttggagacttggatcttcagcacacctcagggt

SEQ ID NO: 796701 - DNA, 120 bp, Artificial Sequence
  ENSG00000278195_30 (sequence is synthesized)
cctgggctggcattggccttccgggcctcaatttccccatcaacaaatggagatgaatcccagcttggctgcctcctgggatctaacgagaaaatgagtcatgtgaggtaacttccaggc

SEQ ID NO: 796702 - DNA, 120 bp, Artificial Sequence
  ENSG00000278195_31 (sequence is synthesized)
tcactgcaatgggtacggtggggtgtatcagattataaagtgggggtgccctcctcacccccaggcttggcctatacccccctctccatcaagtggcctctctgtgtctgtcctttgggg

SEQ ID NO: 796703 - DNA, 120 bp, Artificial Sequence
  ENSG00000278195_32 (sequence is synthesized)
tgaggacactgtaggccatgagaaatgggcagttggggggtcagaggccaagggttagggaggcagggcttggggagagtgtgggaccatcagaagagaaggaagtttacaaaaccacat

SEQ ID NO: 796704 - DNA, 120 bp, Artificial Sequence
  ENSG00000278195_33 (sequence is synthesized)
tttgtgtggagatggaggctggaggcccggccctgggacttggtctggggtttcttgaggaagatctgagggtccaagggaggaaggatgccctggccttctggccttctctggctgatc

SEQ ID NO: 796705 - DNA, 120 bp, Artificial Sequence
  ENSG00000278195_34 (sequence is synthesized)
ctgccttcttgctgcctaggacaggagagtaatgtcctagaatggtccctgggaggccagttaggaaaccctttgctgcttctgtctctagctcttgtcaataaagacggtgacacctga

SEQ ID NO: 796706 - DNA, 120 bp, Artificial Sequence
  ENSG00000278195_35 (sequence is synthesized)
tgagtctgaggcttccatccggggacaatgtcccaccttggagctctccttgttgaacggcttggctgttcacatttatggctgttctgggtgatgtcctaggttctggggttaagaaat

SEQ ID NO: 796707 - DNA, 120 bp, Artificial Sequence
  ENSG00000278195_36 (sequence is synthesized)
aaatcattcagggcccctgccttcaagagccagtgttctagcgggtgggagatgggcaaatggagaatgattggggtgcctggcctccctgaactgttagggctgtgcggctcaggacag

SEQ ID NO: 796708 - DNA, 120 bp, Artificial Sequence
  ENSG00000278195_37 (sequence is synthesized)
ccactcaccctctctgtgctgtctcctcctgaacagtcctccaaggagtccgcccccagctttcaggcaagcttgtgccaaagataaaccagacagggaggaaaagtccctccttctcaa

SEQ ID NO: 796709 - DNA, 120 bp, Artificial Sequence
  ENSG00000278196_0 (sequence is synthesized)
tctctaagcccaggcccaagtgagggtggggtgagaagaggagctcaggatgcagatttgcatggaggtcccgcccttctctgaggcagaggggataagacagggctgggggcaggccca

SEQ ID NO: 796710 - DNA, 120 bp, Artificial Sequence
  ENSG00000278196_1 (sequence is synthesized)
gtgctggggtctcaggaggcagcgctctcaggacgtcaccaccatggcctgggctctgctcctcctcaccctcctcactcagggcacagggtcctgggcccagtctgccctgactcagcc

SEQ ID NO: 796711 - DNA, 120 bp, Artificial Sequence
  ENSG00000278196_2 (sequence is synthesized)
atctcctgcactggaaccagcagtgacgttggtggttataactatgtctcctggtaccaacagcacccaggcaaagcccccaaactcatgatttatgaggtcagtaagcggccctcaggg

SEQ ID NO: 796712 - DNA, 120 bp, Artificial Sequence
  ENSG00000278196_3 (sequence is synthesized)
gtccctgatcgcttctctggctccaagtctggcaacacggcctccctgaccgtctctgggctccaggctgaggatgaggctgattattactgcagctcatatgcaggcagcaacaatttc

SEQ ID NO: 796713 - DNA, 120 bp, Artificial Sequence
  ENSG00000278224_0 (sequence is synthesized)
atgtcagtgcagaactctggctggccccaccaagaagacagccccaagccccaggatccaggtccaccagccaactcagacagtgactcaggccacctgccgggggaggaccctgaggat

SEQ ID NO: 796714 - DNA, 120 bp, Artificial Sequence
  ENSG00000278224_1 (sequence is synthesized)
acccatgctcagggtcctgcagttctgagcttgggttccctttgcctggacaccaaccaagcccccaactggactggacttcagaccctcctgcagcaactccctccgcaggacattgat

SEQ ID NO: 796715 - DNA, 120 bp, Artificial Sequence
  ENSG00000278224_2 (sequence is synthesized)
gagcgctactgcctggcccttggggaggaggagcgggccgagctgcagctcttctgtgccaggcggaagcaggaagccctgggacagggggtagcccgcctggtacttcccaagcttgaa

SEQ ID NO: 796716 - DNA, 120 bp, Artificial Sequence
  ENSG00000278224_3 (sequence is synthesized)
ggacacacctgtgagaagtgtagggagctgctgaagccaggggagtacggagtgtttgcagcccgggcaggggaacagcgctgctggcaccagccttgctttgcctgccaggcctgtggc

SEQ ID NO: 796717 - DNA, 120 bp, Artificial Sequence
  ENSG00000278224_4 (sequence is synthesized)
cgcccgcgctgcccggcttgtgaccagctgatcttctcctggcgctgcaccgaggcggagggacagcgctggcatgagaaccacttctgttgccaggactgcgccgggcctctgggcggg

SEQ ID NO: 796718 - DNA, 120 bp, Artificial Sequence
  ENSG00000278224_5 (sequence is synthesized)
ggacgttatgccctgcctgggggaagcccctgctgccccagctgcttcgagaaccgctactcggatgcaggctcgagctgggccggggcactggaagggcaggcattccttggggagact

SEQ ID NO: 796719 - DNA, 120 bp, Artificial Sequence
  ENSG00000278224_6 (sequence is synthesized)
ggactcgaccgaactgaaggaagggaccaaacctcggtgaactctgcaaccctctcccgaacactcctcgctgctgccggcggttccagcctgcaaactcagagggggctgcctggatcc

SEQ ID NO: 796720 - DNA, 120 bp, Artificial Sequence
  ENSG00000278224_7 (sequence is synthesized)
agtccccagcaggagaaccgacctggggacaaagcggaggcacccaaagggcaggagcaatgccgcctggagactattcgtgatcccaaggacacccctttctccacctgctcctcctcc

SEQ ID NO: 796721 - DNA, 120 bp, Artificial Sequence
  ENSG00000278224_8 (sequence is synthesized)
tctgactcggaacctgaaggatttttcttaggcgagcgccttccccagtcctggaagacccccggaagcctccaagcagaggacagcaacgcctctaagacgcactgcaccatgtgctag

SEQ ID NO: 796722 - DNA, 120 bp, Artificial Sequence
  ENSG00000278224_9 (sequence is synthesized)
gaccgggtgaggggcctgacggcagagtcggtccagaactgcccggacagcgacgcacagcgaggagccaaaatggaagagggtgcaagtcccctcctggggccccagacgccccctcct

SEQ ID NO: 796723 - DNA, 120 bp, Artificial Sequence
  ENSG00000278224_10 (sequence is synthesized)
ttcttgctgcctggagcaggggcagtgctgttagtggctactcctggtgtgaacagcccatcctggccaccttccacaggaaacctgacctgaaggacagaagaggaaggaagcaggctt

SEQ ID NO: 796724 - DNA, 120 bp, Artificial Sequence
  ENSG00000278224_11 (sequence is synthesized)
cgcagctcagagaggggatgtgagtgggaggaaaggggtctgtaaagcgggagaacaaggctagcctccccctaacaatcctagactgagacgcagtcaggcgcacgcccgcaagaggcg

SEQ ID NO: 796725 - DNA, 120 bp, Artificial Sequence
  ENSG00000278224_12 (sequence is synthesized)
gcgaggtgacaagtttggagtgcgcccccttcagtactgcgcgttctaagacttttggcggagactttcttggcaaaacccattccccaaagctacgcttcccctgctgagatagcccct

SEQ ID NO: 796726 - DNA, 120 bp, Artificial Sequence
  ENSG00000278224_13 (sequence is synthesized)
tggccacccttttccaccaacccggaggtagtttgacttcgtgcctaatctcttgttgcctttttctcttttcaggaattcctgtctctgcacctgcttagaacatggggttttgacttt

SEQ ID NO: 796727 - DNA, 120 bp, Artificial Sequence
  ENSG00000278224_14 (sequence is synthesized)
aaactcattcacatgagtattcattatctctcctagggggtctgtattgtcaaaccagactctaggggctttggccccaaggcgtgaagggggttaagaagggaaagcataagaagggaa

SEQ ID NO: 796728 - DNA, 120 bp, Artificial Sequence
  ENSG00000278224_15 (sequence is synthesized)
gctgttttggggtgtggggcctccccagcctccctcaaggaagaccacacatgcaggcatcagtcagctatccttgcactcagtgaggatctgcaaggaggaccctcccaaatggagggc

SEQ ID NO: 796729 - DNA, 120 bp, Artificial Sequence
  ENSG00000278224_16 (sequence is synthesized)
ccagacccaagcctcggggcccgcagctctcaccgcgcatccctggccggagcgttccaagggccgcccgaacccaccccgcgccgcggtcggggttgcggcgccagactccctcccagg

SEQ ID NO: 796730 - DNA, 80 bp, Artificial Sequence
  ENSG00000278224_17 (sequence is synthesized)
ggaggcggacgccctctggtggaggcgggggaccctggcgaggactctcggcggcggcggcggcgcgcacggcccagggg

SEQ ID NO: 796731 - DNA, 120 bp, Artificial Sequence
  ENSG00000278224_18 (sequence is synthesized)
ctcttctatgccattatctctggcatctccctgaggttctacaacctttctctgacccagcagccaagccctttttcctccaaccaatgctcaatgttttctgctggagctctcccagta

SEQ ID NO: 796732 - DNA, 120 bp, Artificial Sequence
  ENSG00000278259_0 (sequence is synthesized)
gtgctcgccccgcccctagggaggagccggccgacccccggccacttagcagtgccgcagccgacggggtgcggttcggcgctcccaggttcctttcctcactgcacgctcttgcccctc

SEQ ID NO: 796733 - DNA, 120 bp, Artificial Sequence
  ENSG00000278259_1 (sequence is synthesized)
ctcttttctctcctgcccgtgttcttcccgccgcctgacctggcccgcccgcctttccagtctggccgggcgggggcctgaagcacggcggctcgggccgtgggaccgtgttcacaccct

SEQ ID NO: 796734 - DNA, 120 bp, Artificial Sequence
  ENSG00000278259_2 (sequence is synthesized)
ttccagaaattcttggctggtaaccgcgaaaccgactggagcaggagctgggagaactggagaaaactgctctaatctcacttgactccagctaggagctgatgctgcatcgtaataaca

SEQ ID NO: 796735 - DNA, 120 bp, Artificial Sequence
  ENSG00000278259_3 (sequence is synthesized)
tttgcagagcgctttcacaggcgctggagtgacttgtctgagattcctccagaactgagccctttgttggaaccataccccagcccatggtcccatgactaggtggatagtactccttgt

SEQ ID NO: 796736 - DNA, 120 bp, Artificial Sequence
  ENSG00000278259_4 (sequence is synthesized)
acctcctgcaacccagaaccctggctgaccactttgaaggaggatgctccagcaggtcaatggccacaatccggggtctgatggccaagccagggagtacctcagagaagacctgcagga

SEQ ID NO: 796737 - DNA, 120 bp, Artificial Sequence
  ENSG00000278259_5 (sequence is synthesized)
gttcctgggtggggaggtcctgctgtacaaactggatgacctcaccagggtgaatcctgtgacactagagacagtcctgaggtgcctgcaggcccggtacatggcagacacattctacac

SEQ ID NO: 796738 - DNA, 120 bp, Artificial Sequence
  ENSG00000278259_6 (sequence is synthesized)
caatgctggctgcaccctggtagccttgaaccccttcaagcctgttcctcagctctactcgcccgagctaatgagagagtaccatgctgcgcctcagccccagaaactgaagccccatgt

SEQ ID NO: 796739 - DNA, 120 bp, Artificial Sequence
  ENSG00000278259_7 (sequence is synthesized)
gttcactgtgggtgaacagacctacaggaatgtcaagagcctgattgaaccagtcaaccagtctattgttgtcagtggagagagtggtgctggaaagacatggacgtctcgctgcctaat

SEQ ID NO: 796740 - DNA, 120 bp, Artificial Sequence
  ENSG00000278259_8 (sequence is synthesized)
gaagttctatgctgtggtggccacctcacctgcatcttgggagagccacaagattgcagagaggatagaacagaggatcctgaactccaaccctgtcatggaagcttttgggaatgcgtg

SEQ ID NO: 796741 - DNA, 120 bp, Artificial Sequence
  ENSG00000278259_9 (sequence is synthesized)
tacactgaggaataacaacagcagtcgctttgggaagttcatccagctccagctgaacagggctcagcaaatgactggagccgcagtccagacctacctcctagagaaaactcgagtggc

SEQ ID NO: 796742 - DNA, 120 bp, Artificial Sequence
  ENSG00000278259_10 (sequence is synthesized)
ctgccaggcttccagtgagaggaacttccacatcttctatcagatttgcaaaggagccagtgaggacgagaggctccagtggcaccttcctgagggagctgccttctcctggctgcccaa

SEQ ID NO: 796743 - DNA, 120 bp, Artificial Sequence
  ENSG00000278259_11 (sequence is synthesized)
cccagagaggagcttagaagaggattgttttgaggtgaccagagaggccatgctccatttgggcattgacacccctacccagaacaacatctttaaggtcctagctggactgctgcacct

SEQ ID NO: 796744 - DNA, 120 bp, Artificial Sequence
  ENSG00000278259_12 (sequence is synthesized)
tggcaatatccagtttgctgcctccgaggatgaagcccagccctgccagccgatggatgatgccaagtactctgtcaggacggcagcctcgctgctggggctcccagaggacgtgctgct

SEQ ID NO: 796745 - DNA, 120 bp, Artificial Sequence
  ENSG00000278259_13 (sequence is synthesized)
ggagatggtgcagattagaaccatcagggcaggcagacagcagcaggtgttccggaagccctgcgcccgagccgagtgtgacacccgtagagactgcctggccaaactgatctatgcgcg

SEQ ID NO: 796746 - DNA, 120 bp, Artificial Sequence
  ENSG00000278259_14 (sequence is synthesized)
gttgtttgactggctggtatcagtgatcaacagcagcatctgtgcagacaccgactcgtggaccactttcataggcctgctggatgtgtatggatttgaatcatttcctgacaacagtct

SEQ ID NO: 796747 - DNA, 120 bp, Artificial Sequence
  ENSG00000278259_15 (sequence is synthesized)
ggaacagttgtgcatcaactacgccaatgagaagctgcagcagcattttgtggctcactacctaagggcccagcaggaggaatacgcagttgagggcctggagtggtcattcatcaacta

SEQ ID NO: 796748 - DNA, 120 bp, Artificial Sequence
  ENSG00000278259_16 (sequence is synthesized)
agcgcagcccagctccagacacgcattgagactgccctggcaggcagcccctgcctgggccacaataagctcagccgggagcccagcttcattgtggtgcattatgcggggcctgtgcgg

SEQ ID NO: 796749 - DNA, 120 bp, Artificial Sequence
  ENSG00000278259_17 (sequence is synthesized)
taccacacagcaggcctggtggagaagaacaaggaccctatcccacctgagctgaccaggctcctgcagcaatcccaggaccccctgctcatggggctgtttcctactaaccccaaagag

SEQ ID NO: 796750 - DNA, 120 bp, Artificial Sequence
  ENSG00000278259_18 (sequence is synthesized)
aagacccaggaggaaccccctggccagagcagggcccctgtgttgaccgtggtgtccaagttcaaggcctcactggagcagcttctgcaggtcctacacagcaccacgccccactacatt

SEQ ID NO: 796751 - DNA, 120 bp, Artificial Sequence
  ENSG00000278259_19 (sequence is synthesized)
cgctgcatcaagcccaacagccagggccaggcgcagacctttctccaagaggaggtcctgagccagctggaggcctgtggcctcgtggagaccatccatatcagtgctgctggcttcccc

SEQ ID NO: 796752 - DNA, 120 bp, Artificial Sequence
  ENSG00000278259_20 (sequence is synthesized)
atccgggtctctcaccgaaactttgtagaacgatacaagttactaagaaggcttcatccttgcacatcctctggccccgacagcccatatcctgccaaagggctccctgaatggtgtcca

SEQ ID NO: 796753 - DNA, 120 bp, Artificial Sequence
  ENSG00000278259_21 (sequence is synthesized)
cacagcgaggaagccacgcttgaacctctcatccaggacattctccacactctgccggtcctaactcaggcagcagccataactggtgactcggctgaggccatgccagcccccatgcac

SEQ ID NO: 796754 - DNA, 120 bp, Artificial Sequence
  ENSG00000278259_22 (sequence is synthesized)
tgtggcaggaccaaggtgttcatgactgactctatgctggagcttctggaatgtgggcgtgcccgggtgctggagcagtgtgcccgctgcatccagggtggctggaggcgacaccggcac

SEQ ID NO: 796755 - DNA, 120 bp, Artificial Sequence
  ENSG00000278259_23 (sequence is synthesized)
cgagagcaggagcggcagtggcgggccgtcatgctcatccaggcagccattcgttcctggttaactcggaaacacatccagaggctgcatgcagctgccacagtcatcaagcgtgcatgg

SEQ ID NO: 796756 - DNA, 120 bp, Artificial Sequence
  ENSG00000278259_24 (sequence is synthesized)
cagaagtggagaatcagaatggcctgccttgctgctaaagagctggatggtgtggaagaaaaacacttctctcaagctccctgttccctgagcacctcgccgctgcagaccaggctcctg

SEQ ID NO: 796757 - DNA, 120 bp, Artificial Sequence
  ENSG00000278259_25 (sequence is synthesized)
gaggcaataatccgcctctggcccctgggactggtcctggccaatacggctatgggtgtaggcagctttcagaggaaattagtggtctgggcttgcctccagctccccaggggcagcccc

SEQ ID NO: 796758 - DNA, 120 bp, Artificial Sequence
  ENSG00000278259_26 (sequence is synthesized)
agtagctacactgtccagacagcacaagaccaggctggtgtcacgtccatccgagcgctgcctcagggatcgataaagtttcactgcagaaagtctccactgcggtatgctgacatctgc

SEQ ID NO: 796759 - DNA, 120 bp, Artificial Sequence
  ENSG00000278259_27 (sequence is synthesized)
cctgaaccttcaccctacagcattacaggctttaatcagattctgctggaaagacacaggctgatccacgtgacctcttctgccttcactgggctggggtgatccttggtgcctttgttt

SEQ ID NO: 796760 - DNA, 120 bp, Artificial Sequence
  ENSG00000278259_28 (sequence is synthesized)
ccacaaggccttttcctgccccctgccttgccaaagacatttaatcagcacacagctgccagactattcccacagtgctccaaatgcacatgaacaacagtgacggctccagccttcgac

SEQ ID NO: 796761 - DNA, 120 bp, Artificial Sequence
  ENSG00000278259_29 (sequence is synthesized)
ccagagccccgtgcccagtgcgtcagtgggcctggggttccaggctacatcaagcactgatggtgtcagggctggtagttaccaaatcagggttaagaaacatcagggccacatttcact

SEQ ID NO: 796762 - DNA, 120 bp, Artificial Sequence
  ENSG00000278259_30 (sequence is synthesized)
accttcacagatcaaactcagcagcagtcatgactgtctgtcactacactggggatcccaattccacataagcacttttggaagaaaacagccaaagttggcctaaaattggcgctggaa

SEQ ID NO: 796763 - DNA, 120 bp, Artificial Sequence
  ENSG00000278259_31 (sequence is synthesized)
tttgggctgggaaaaatcttgtggttatttcctttaaaaaggaacaaaactttagtatttaattagttgatttatttaatgtaatttcaaacaattaaattatgaataatgcaatgtaca

SEQ ID NO: 796764 - DNA, 120 bp, Artificial Sequence
  ENSG00000278259_32 (sequence is synthesized)
gtagaatcacgttttgattttattaacactgaccaagtttaactccatatgaagtgtaagcttgatatcgtttatgatgtctatcaactgtaccaaaagtaaaacatttaaaaacaatca

SEQ ID NO: 796765 - DNA, 120 bp, Artificial Sequence
  ENSG00000278259_33 (sequence is synthesized)
atcctcaccttcttgaagttgacactggaccgttcacctgattagcgctcccaaatggatcatcaacccttagtcgtagtgctaacagtgtttatcctctgagtgaatactcagattcgt

SEQ ID NO: 796766 - DNA, 120 bp, Artificial Sequence
  ENSG00000278259_34 (sequence is synthesized)
tgaagagtggtataagcaactctgggaatataccaaactctgggatgtacactttagaagactgggttttatggcatatcagttatatcttgatggactcttatcttgttttcaagtagc

SEQ ID NO: 796767 - DNA, 120 bp, Artificial Sequence
  ENSG00000278259_35 (sequence is synthesized)
atatgtaaggcctaagcacagttgcctggggtgtatagacttgtggcatatggaaccagtttggttcagggcagccagctgtttgcaaccaggtgccttcagttcaccttgttaagatga

SEQ ID NO: 796768 - DNA, 120 bp, Artificial Sequence
  ENSG00000278259_36 (sequence is synthesized)
agtctggccgggcgggggcctgaagcacggcggctcgggccgtgggaccggtgagtgtcaacccgaacctatatctgaagcccttcagacgcggaaggggcttgggaggccagtttgccc

SEQ ID NO: 796769 - DNA, 120 bp, Artificial Sequence
  ENSG00000278259_37 (sequence is synthesized)
actaatcaagcatgacctgcctggagataacccatgttagactgggtctccaggtctctggttgtccaatggaccttctcttggactcaggccctgtcctacctggaagccccgtcatct

SEQ ID NO: 796770 - DNA, 120 bp, Artificial Sequence
  ENSG00000278259_38 (sequence is synthesized)
accccatctggccaaggccctggagagatgaagggcaggacatctgttccaaatggagtgcacagaagtggtctctccggccaggcctgacatgagagaggacccatctcccttgctgtg

SEQ ID NO: 796771 - DNA, 120 bp, Artificial Sequence
  ENSG00000278259_39 (sequence is synthesized)
gcagggcaggcatgtatggttgtgtggtctgtgcatagtagcctagccagggaggcaagttccagtgcatcttgtttttttgagccatgtaccctgatgagagactgaaactgcccagag

SEQ ID NO: 796772 - DNA, 120 bp, Artificial Sequence
  ENSG00000278259_40 (sequence is synthesized)
ctgaaactgcccagaggaatgggtgtctcgtgattagctgaaagtctacatcaccacacagtccccgcacagtgcagccatttctcactggaggtatcatttttttcttttttttttttt

SEQ ID NO: 796773 - DNA, 120 bp, Artificial Sequence
  ENSG00000278259_41 (sequence is synthesized)
cctcaagctaatttcaggtcacaatttgaggtcaaaggcttttaaagcctttgcctacaagtcactccaagatgagcagataaagtgtgatgaacacagatagagtgagcttctgaccac

SEQ ID NO: 796774 - DNA, 120 bp, Artificial Sequence
  ENSG00000278259_42 (sequence is synthesized)
aggacatttgcacagcccctgttgcaaaaagagccagtttatttactgaagggaaaaaagttgcagagcaattactttaagaaaaaatgtgaggaagaaacccctgtatagtgctgtacg

SEQ ID NO: 796775 - DNA, 120 bp, Artificial Sequence
  ENSG00000278259_43 (sequence is synthesized)
tgtcagcgtcttgtgtggtagtctcatcttctctgggctggggccggttctagagtggaggatgccattgttgacctcgggactgggggcccacttgtgcagaactacatcagggggtat

SEQ ID NO: 796776 - DNA, 120 bp, Artificial Sequence
  ENSG00000278259_44 (sequence is synthesized)
ggtggggccttgagctctgggctccaccggtagagttttgcaggggtgttcaatgaactcagttatttacaaaccacacccaggcccatctgccccttcccaagacactagctgggtctc

SEQ ID NO: 796777 - DNA, 120 bp, Artificial Sequence
  ENSG00000278259_45 (sequence is synthesized)
gagccatgtgactgagctcgactgattccctccccagcctaggagctgagcttgtcctgtgctcagtcttcccataaggacatgccaggtttgtgtgtacctggcaacatgcatgcccat

SEQ ID NO: 796778 - DNA, 120 bp, Artificial Sequence
  ENSG00000278259_46 (sequence is synthesized)
agcctgcatctgtagtaggtcaagacgtgataggccggaagcaagaggagaggatttggtctttgacctgtcaggctcagaatacaagggccccccagggtgtagcaccctgatgggggg

SEQ ID NO: 796779 - DNA, 120 bp, Artificial Sequence
  ENSG00000278259_47 (sequence is synthesized)
agcaattttaccacccctttgactcagccagaccctcttaccagagtccactctcttcccccaacaggttgtttgactggctggtatcagtgatcaacagcagcatctgtgcagacaccg

SEQ ID NO: 796780 - DNA, 120 bp, Artificial Sequence
  ENSG00000278259_48 (sequence is synthesized)
actcgtggaccactttcataggtagcaaggcctcactgtgctgggagcactccagaaaaagagcaataaagccctggatggagaggcaggagccctgggtccactgtgtgactctgggca

SEQ ID NO: 796781 - DNA, 120 bp, Artificial Sequence
  ENSG00000278259_49 (sequence is synthesized)
gttcctttcccttttttgtctcctcttgcatctgcctgccagcatagagcgagatctctgcatagggtgagatctctgctctcctgcacccacatctgagcagtccataactctccagac

SEQ ID NO: 796782 - DNA, 120 bp, Artificial Sequence
  ENSG00000278259_50 (sequence is synthesized)
aggctcaacagtgccttgtctgaaagagccctttacctccccagagacccagctctaattgtgggagagtagtgggggttggggaaaatagctgtattagaagggactttggaggctggc

SEQ ID NO: 796783 - DNA, 73 bp, Artificial Sequence
  ENSG00000278259_51 (sequence is synthesized)
aaagtgggaggatcactgttcaaagaaattagccaggcatggtgctacatgcctgtagtcccagctactcagg

SEQ ID NO: 796784 - DNA, 88 bp, Artificial Sequence
  ENSG00000278259_52 (sequence is synthesized)
aaattagccaggcatggtgccgaggtgggaggatcactttagcccaagagtttgaagcttctgtgagctgtgatcacaccactgcact

SEQ ID NO: 796785 - DNA, 120 bp, Artificial Sequence
  ENSG00000278259_53 (sequence is synthesized)
gtcaacagagcaagaccctatctcaggggggagaacaaaaaaagacttgggggacatgactgagggaggtcaacacggttgtaactaggtgggacagtcagttataggaggaaataaagc

SEQ ID NO: 796786 - DNA, 120 bp, Artificial Sequence
  ENSG00000278259_54 (sequence is synthesized)
ttaaaggtacaagtgcagtttgctcatggaatggtggaattctaggcaccaaattggctagtgagactaatgccctccgaactagatttaacacagaaaatgttccctgggacctggttt

SEQ ID NO: 796787 - DNA, 120 bp, Artificial Sequence
  ENSG00000278259_55 (sequence is synthesized)
cctcataggaggtgcctatcagaaccagagaattcagactcaaaaatgggcctgatgctctgggctgtcttcacacttcatttgggtttcctgcttgctctgagctctacaggggaatgg

SEQ ID NO: 796788 - DNA, 120 bp, Artificial Sequence
  ENSG00000278259_56 (sequence is synthesized)
ggtagagatgggagccaccttgggtggagggtggggaaggtatgttctgcccaccacaggtgtcatgctcactcagcctgatgcccaggctgccaagtataaggcattggcaggggccca

SEQ ID NO: 796789 - DNA, 120 bp, Artificial Sequence
  ENSG00000278259_57 (sequence is synthesized)
gccaccctgggttccttggtcccctattccccatctgctccctgcagtggccccatgggttctctgccatcttcccaggcctgctggatgtgtatggatttgaatcatttcctgacaaca

SEQ ID NO: 796790 - DNA, 120 bp, Artificial Sequence
  ENSG00000278259_58 (sequence is synthesized)
ggcgctcgtgccagtgtcccgtgggctacccactcctgtcatgtcctttgggctggtgcaggccagatcttctagggccgtagccctgagaggagcgcctggagaggaaacggcgcgcca

SEQ ID NO: 796791 - DNA, 120 bp, Artificial Sequence
  ENSG00000278259_59 (sequence is synthesized)
tgcacctcacacggcccctcagacctcacggcgaggccctatcagggtaatggtgtccgccggcctcgcacaacactccgccgcactcgcacaagactccgccgcggcgacctctactga

SEQ ID NO: 796792 - DNA, 120 bp, Artificial Sequence
  ENSG00000278259_60 (sequence is synthesized)
aagacccccagtcctggtgtcgcccgaaggcccaggaaaccgtgcttccgcgcttctcccccagaacgtgggaagctgccgctttaccctcattttaccccagggtcgcaaaacatctca

SEQ ID NO: 796793 - DNA, 120 bp, Artificial Sequence
  ENSG00000278259_61 (sequence is synthesized)
aagtgctgggattacaggcatgagcagccactgcactcagccggtatcatttttttctaatctaacaaaagcactctagccagcagctgcccttttcttgggattccaggttctgaggga

SEQ ID NO: 796794 - DNA, 120 bp, Artificial Sequence
  ENSG00000278259_62 (sequence is synthesized)
ggattccaggttctgagggatgtggatgaggggtgaatgctgggcactgctgaaggtgtggcctggtagatgtggccttccggtttgtagccaggacaactcagctctgtggtaaagacc

SEQ ID NO: 796795 - DNA, 120 bp, Artificial Sequence
  ENSG00000278259_63 (sequence is synthesized)
tgggttcaggtcacagaagaatcttcatagtataatcttccctgcctctcagctgtgaaccaccctctaatgcctgcagacagtgaaaacaatccaaactggaaatttgcctgggctggg

SEQ ID NO: 796796 - DNA, 120 bp, Artificial Sequence
  ENSG00000278259_64 (sequence is synthesized)
ttgtgtggtagtgagactacactgagggcagggtgagacggagccaggacatcacttgcttcagctgtatcagaagccatgcgtcggatgagggggacttgggaccaccaggaccctttc

SEQ ID NO: 796797 - DNA, 120 bp, Artificial Sequence
  ENSG00000278259_65 (sequence is synthesized)
tagtgggagatttgttttcaaggtccctcgatttctcacagccccaaggagatacccccattagccaagccttgggagagcctgcagcttggcactggccagggtctaagaagaagggct

SEQ ID NO: 796798 - DNA, 120 bp, Artificial Sequence
  ENSG00000278259_66 (sequence is synthesized)
cctgcccttctggcccctggttgattttgctgctgtttctcatctgtggtgtctcctttggcagcctctgtcttcagagaggcactgggcatctaaggtggtcagagccctcagaatggt

SEQ ID NO: 796799 - DNA, 120 bp, Artificial Sequence
  ENSG00000278259_67 (sequence is synthesized)
tactgagcatctaccctgtgccctgtcttagggctaggggctggggcttactggtgaataaaacacagccctggttttggttcagtgggggaaacagattcaaaaaagacaaatagcatg

SEQ ID NO: 796800 - DNA, 120 bp, Artificial Sequence
  ENSG00000278259_68 (sequence is synthesized)
gaaagtggaaaagcagagctatgagcaggatgctgtgggtggtgctagggaggtgtgaattggggaaggcttcctggaagaggtagtatctgagaataaattggattagccaggtgatgg

SEQ ID NO: 796801 - DNA, 120 bp, Artificial Sequence
  ENSG00000278259_69 (sequence is synthesized)
agaacaacatctttaaggtcagaagaaaagccacgccacttaagtttggcagagatgacgggcagccctttgcatagagcttttccctggacttggagttggtctttccctgaggatcta

SEQ ID NO: 796802 - DNA, 120 bp, Artificial Sequence
  ENSG00000278259_70 (sequence is synthesized)
ggactttgggcccttctgtgctacctccaaggaatcagtcacctctgttctgctgagtctggagaccaggtggtggggtggacggggcataaggaagagtgatgcatacacagtgctaga

SEQ ID NO: 796803 - DNA, 120 bp, Artificial Sequence
  ENSG00000278259_71 (sequence is synthesized)
gtacagaatgcagtaagtgatccatgggggcagagagcaaggtaccgcatgatcagaagagagaactagtgctaccgccttgcttgtctagtacattaaaacttacaagtcatgttcaca

SEQ ID NO: 796804 - DNA, 120 bp, Artificial Sequence
  ENSG00000278259_72 (sequence is synthesized)
ataaaacataataaaatgaaatcccaaaggtctctttccatctgagcttactttccctaatttgggtttgtctcttaggtccaccgggcatacttagtatctttggacaaataggaattc

SEQ ID NO: 796805 - DNA, 120 bp, Artificial Sequence
  ENSG00000278259_73 (sequence is synthesized)
aatgaaaacgtattcttaaaggcgaaaaaggtggatttgctagacgcccgacctggccgcgccctacccgtatacctcacgtactccaaatggtgccggcgcccccagcagacggtctac

SEQ ID NO: 796806 - DNA, 120 bp, Artificial Sequence
  ENSG00000278259_74 (sequence is synthesized)
gaaggtagccagcattgctggggttgggtggaaggctggatggtgaaaattggaatctgatgcccttgcttatgccacccaccatagggcctggccctggatcatttactcctcaccctg

SEQ ID NO: 796807 - DNA, 120 bp, Artificial Sequence
  ENSG00000278259_75 (sequence is synthesized)
actgtcctccatgcctagaaagaaacagtctgagaaggagggactggtgatcaggttgccacttgccttgattcggtgttccatttactcattaccgtctcctttctgcccacagtgttc

SEQ ID NO: 796808 - DNA, 120 bp, Artificial Sequence
  ENSG00000278259_76 (sequence is synthesized)
taatccattgcaggcacgcttcaccctcagcctcatctctccttgctaggggtggtgccaaggcctagaaaattccaagtctgagggtcacttaaccattcttcaaagattggcttaggc

SEQ ID NO: 796809 - DNA, 72 bp, Artificial Sequence
  ENSG00000278259_77 (sequence is synthesized)
tccgagatcgcgccattgtgctccggcctgggcgacgagtgaaactacgtctcaaaaaaaaattttttttat

SEQ ID NO: 796810 - DNA, 120 bp, Artificial Sequence
  ENSG00000278259_78 (sequence is synthesized)
atgctgttctggaatacgctgtggtaccgaggccagccgtggatggcccgtcaggacatcagaccacagctgccttctcccacctcatcccaccttgttctttaggaggaatacgcagtt

SEQ ID NO: 796811 - DNA, 120 bp, Artificial Sequence
  ENSG00000278259_79 (sequence is synthesized)
tttttaaatttattttttaatttattctttttatttgcagtagaagattcccaaactaagggctgggattggatctcccttttcccatacatggtggggagttgaggggtcggggctgag

SEQ ID NO: 796812 - DNA, 120 bp, Artificial Sequence
  ENSG00000278259_80 (sequence is synthesized)
ggagtggcctatagctgccctatttggccctcaggatgtgtgtttgggccttggaaacaaatgctggctgagcagcctgggattccaagcttggaaggagtcacccttccaggtgtcaag

SEQ ID NO: 796813 - DNA, 120 bp, Artificial Sequence
  ENSG00000278259_81 (sequence is synthesized)
caccctctgccagcctgcccaaagggactcatggcagtagaggctgtgggacaccccaggacacacaggcgcaagtgggtattccaaggctccacggaacagctagcaccctgagggaca

SEQ ID NO: 796814 - DNA, 120 bp, Artificial Sequence
  ENSG00000278259_82 (sequence is synthesized)
acagagaggctgtttgtggcttcctccaaaagaagaacaaggagaaaatggctagagccaagaacagcaggaaagagacctgtagagtgctagggaggccaaagccagtttcttcaggcc

SEQ ID NO: 796815 - DNA, 120 bp, Artificial Sequence
  ENSG00000278259_83 (sequence is synthesized)
aggtcacctgtcagcactgctcacagaccccacaggatgttggtttcctttgaaacatagctcgtcgagtccccatctcctgaagctgtgtcccagcctgaagagatgtccctgtggtgt

SEQ ID NO: 796816 - DNA, 120 bp, Artificial Sequence
  ENSG00000278259_84 (sequence is synthesized)
acaaacaaaggtgctctgtaagaagtggaggctaagcgttgtctaagcgttgtctttaattcctttctcagaccctgacagctgtttaggccaactttttttccctttatgacaactcaa

SEQ ID NO: 796817 - DNA, 120 bp, Artificial Sequence
  ENSG00000278259_85 (sequence is synthesized)
accattacctgctgggctctagggctggaatgaatttaaggagaaggtaaaaaccaaaaggagttcatcagatgaaaagatgtattaaccaacatgttcatagtggtcttattttgaaaa

SEQ ID NO: 796818 - DNA, 120 bp, Artificial Sequence
  ENSG00000278259_86 (sequence is synthesized)
ggaaaagtgttggaaagaacccaaatatctaacagtggtgacatcatggccaaatgatggactggaccatccctatgatgcagctaagtgtttttgaagaatattataaatttaatggag

SEQ ID NO: 796819 - DNA, 120 bp, Artificial Sequence
  ENSG00000278259_87 (sequence is synthesized)
aaccacttccaaaatgatattcatacctagatgtcaaactacatattaagggcgatgccctccttttaaggtgtgtttgtgtgtgtgtaggcattaaaaaattgtataaggaagctgggc

SEQ ID NO: 796820 - DNA, 60 bp, Artificial Sequence
  ENSG00000278259_88 (sequence is synthesized)
gtgtgtgtaggcattaaaaaattgtataaggaagctgggcacagtagttcgccataccag

SEQ ID NO: 796821 - DNA, 120 bp, Artificial Sequence
  ENSG00000278259_89 (sequence is synthesized)
ctctgtctcaaaaaaaaaaaaaacaacaaaacataattaaccgtgcctggtggcacatgcctgtagtcccagttactccagaggctgaggcaagaggattgcttgagcctgggagattga

SEQ ID NO: 796822 - DNA, 120 bp, Artificial Sequence
  ENSG00000278259_90 (sequence is synthesized)
ctgtagtcccagttactccagaggctgaggcaagaggattgcttgagcctgggagattgaagctacagccttacggaggctacaataagctgttcgtgccactgcactccagcctgggca

SEQ ID NO: 796823 - DNA, 120 bp, Artificial Sequence
  ENSG00000278259_91 (sequence is synthesized)
acacccctacccagaacaacatctttaagagcagcaggaggggatagataggatggcctggcagtcgagaaagggaggccacttcagggaggtagcaatgcagtggaaagtgaccctcac

SEQ ID NO: 796824 - DNA, 120 bp, Artificial Sequence
  ENSG00000278259_92 (sequence is synthesized)
ataccactaagtggtgatacagagtaccagacatagtaattccaagttcctaccctctctgtcttcccccaacccgtgccccgtcgtcctctggaacatgagactgccccagagcagcag

SEQ ID NO: 796825 - DNA, 120 bp, Artificial Sequence
  ENSG00000278259_93 (sequence is synthesized)
ggaatgtttaaaagccaattttgccttatgtattgattttagaaccttatttgtagcaatttattgaaaaaaaaaaaacgtatttgaaactttgacagcaactgtggtgctgctgcagcg

SEQ ID NO: 796826 - DNA, 120 bp, Artificial Sequence
  ENSG00000278259_94 (sequence is synthesized)
cttatgccacccaccatagggcctggccctggatcatttactcctcaccctgtctggtgaggcagacagtatcgtccccatcttaaagatgagaaaatgagtcagaggtttgtaaagtga

SEQ ID NO: 796827 - DNA, 120 bp, Artificial Sequence
  ENSG00000278259_95 (sequence is synthesized)
tttgtcccatacatggcagcatggactggtacatgaaagtgctgggtttgagttctgactgctgtttatggagtcctttgggtgagtcacttcactgatcagaacttaggtttcttctgt

SEQ ID NO: 796828 - DNA, 120 bp, Artificial Sequence; identical to SEQ ID NO: 785812
  ENSG00000278263_0 (sequence is synthesized)

SEQ ID NO: 796829 - DNA, 120 bp, Artificial Sequence; identical to SEQ ID NO: 795662
  ENSG00000278263_1 (sequence is synthesized)

SEQ ID NO: 796830 - DNA, 120 bp, Artificial Sequence; identical to SEQ ID NO: 790465
  ENSG00000278289_0 (sequence is synthesized)

SEQ ID NO: 796831 - DNA, 120 bp, Artificial Sequence; identical to SEQ ID NO: 791399
  ENSG00000278289_1 (sequence is synthesized)

SEQ ID NO: 796832 - DNA, 120 bp, Artificial Sequence
  ENSG00000278289_2 (sequence is synthesized)
gtttcagcaaagatgggatgatgcagaaacctggtagcaatgcacctgtgggaggaaacgttaccagcagtttctctggagatgacctagaatgcagagaaacagcctcctctcccaaaa

SEQ ID NO: 796833 - DNA, 120 bp, Artificial Sequence
  ENSG00000278289_3 (sequence is synthesized)
cgatgcgttggacaaaaatatgaaaaaatcttcgaaatgcttgaaggagtgcaaggacctactgcagtcaggaagcgattttttgaatccatcatcaaggaagcagcaagatgtatgaga

SEQ ID NO: 796834 - DNA, 120 bp, Artificial Sequence
  ENSG00000278289_4 (sequence is synthesized)
cgagactttgttaagcaccttaagaagaaactgaaacgtatgatttgagaatacttgtccctggaggattatcacaccccaaatgcataatctcgttaatgattgaggagagaaaaggat

SEQ ID NO: 796835 - DNA, 120 bp, Artificial Sequence; identical to SEQ ID NO: 791403
  ENSG00000278289_5 (sequence is synthesized)

SEQ ID NO: 796836 - DNA, 120 bp, Artificial Sequence
  ENSG00000278289_6 (sequence is synthesized)
ctccccatgcacatcactcccaggtgccctagggggcacatttcccacaactcccagagggcaggtttctagaaagtgccaccagtggggaggcgccacaacttcactgccattttgtga

SEQ ID NO: 796837 - DNA, 74 bp, Artificial Sequence; identical to SEQ ID NO: 793767
  ENSG00000278299_0 (sequence is synthesized)

SEQ ID NO: 796838 - DNA, 67 bp, Artificial Sequence
  ENSG00000278299_1 (sequence is synthesized)
cctttgtacttcaaactcatggaaggataaccaccttcatgttttgaaataaatgtttcctgttgaa

SEQ ID NO: 796839 - DNA, 120 bp, Artificial Sequence
  ENSG00000278311_0 (sequence is synthesized)
cactccccgcggcgcgagcggctgactgcccgtagaggaaacgacattcggagctgcgctcccgcccacgccggccctgacgcgggcctcgtcagccagtaacagggagcagaggtggga

SEQ ID NO: 796840 - DNA, 120 bp, Artificial Sequence
  ENSG00000278311_1 (sequence is synthesized)
gttagcgaggcgaccacgaaaacggtgaaggtcggaaccgacagcctcctccgagaagggcaggagctgggaggaggcggcagcggcggcggcagaaacagcagcggcggcggcggcggc

SEQ ID NO: 796841 - DNA, 120 bp, Artificial Sequence
  ENSG00000278311_2 (sequence is synthesized)
agctgggaggaggtggtgacggtggcaacggcagcgtcggggacgatggcgcgactcgtggcagtgtgcagggacggggaggaggagttccccttcgagaggaggcagattcccctctac

SEQ ID NO: 796842 - DNA, 120 bp, Artificial Sequence
  ENSG00000278311_3 (sequence is synthesized)
atagacgacaccctgacgatggtgatggaatttcctgataatgtgttaaatctcgatggacatcagaataatggtgcacagctaaagcagttcattcagcgacatggtatgcttaagcaa

SEQ ID NO: 796843 - DNA, 120 bp, Artificial Sequence
  ENSG00000278311_4 (sequence is synthesized)
caggatctaagtattgccatggtggtgacatcacgcgaagtcctgagtgcactttctcagcttgtcccatgtgttggttgtcgtcgcagtgtggagcgtctcttttcccagcttgtagag

SEQ ID NO: 796844 - DNA, 120 bp, Artificial Sequence
  ENSG00000278311_5 (sequence is synthesized)
tctggaaatcctgctcttgaacccctaacagtagggcccaagggagtcctgtctgtaactagaagctgcatgactgatgcaaagaagctttatacattattttatgtacatgggtccaaa

SEQ ID NO: 796845 - DNA, 120 bp, Artificial Sequence
  ENSG00000278311_6 (sequence is synthesized)
ctaaatgacatgatagatgctattccaaaaagtaagaagaataagagatgtcagttgcactccttagatacgcacaagccaaaacctttgggaggttgttggatggatgtatgggaacta

SEQ ID NO: 796846 - DNA, 120 bp, Artificial Sequence
  ENSG00000278311_7 (sequence is synthesized)
atgtcgcaggaatgcagggatgaagtagttttaattgactcgagttgtcttttagaaacactagaaacatatctgcgaaaacacaggttttgcactgattgcaaaaataaagtcctccga

SEQ ID NO: 796847 - DNA, 120 bp, Artificial Sequence
  ENSG00000278311_8 (sequence is synthesized)
gcatacaatatccttattggtgaacttgactgcagcaaagaaaagggctactgtgctgcactttatgaaggcttgcggtgctgtccacatgaacgacacatacatgtttgctgtgaaaca

SEQ ID NO: 796848 - DNA, 120 bp, Artificial Sequence
  ENSG00000278311_9 (sequence is synthesized)
gacttcattgcacatcttttgggtcgtgctgagccagagttcgcaggagggcgaagagaaaggcatgcaaagacaatagatatagctcaagaagaagttctgacctgcttgggaattcat

SEQ ID NO: 796849 - DNA, 120 bp, Artificial Sequence
  ENSG00000278311_10 (sequence is synthesized)
ctttatgaaagactgcatcgaatctggcagaagctacgggcagaagagcagacatggcagatgcttttctatcttggtgttgatgctttacgcaagagttttgagatgaccgtggaaaaa

SEQ ID NO: 796850 - DNA, 120 bp, Artificial Sequence
  ENSG00000278311_11 (sequence is synthesized)
agtaagagaactcaagcaagaaaagaaacgccaaaaacggaagaatagacgaaaaaataagtgtgtgtgtgatattcctactcccttacaaacagcagatgaaaaggaagtaagccaaga

SEQ ID NO: 796851 - DNA, 120 bp, Artificial Sequence
  ENSG00000278311_12 (sequence is synthesized)
gaaggaaacagacttcatagaaaatagcagctgcaaagcctgtggcagcactgaagatggtaatacttgtgtagaagtaattgttaccaatgaaaatacatcatgtacctgtcctagcag

SEQ ID NO: 796852 - DNA, 120 bp, Artificial Sequence
  ENSG00000278311_13 (sequence is synthesized)
tggcaatcttttggggtcccctaaaataaagaaaggcttatctccacactgtaatggtagtgattgtggatattcatctagcatggaagggagtgaaacaggttctcgggagggttcgga

SEQ ID NO: 796853 - DNA, 120 bp, Artificial Sequence
  ENSG00000278311_14 (sequence is synthesized)
tgttgcctgcactgaaggcatttgtaatcatgatgaacacggtgatgactcttgtgttcatcactgtgaagacaaagaggatgatggtgatagttgtgttgaatgttgggcaaattctga

SEQ ID NO: 796854 - DNA, 120 bp, Artificial Sequence
  ENSG00000278311_15 (sequence is synthesized)
agagaacgacacaaaaggaaaaaataaaaagaagaagaagaaaagcaagatactgaaatgtgatgaacatatccagaagcttggaagctgtattacagatccaggtaatcgagagacctc

SEQ ID NO: 796855 - DNA, 120 bp, Artificial Sequence
  ENSG00000278311_16 (sequence is synthesized)
aggaaataccatgcacacagtgtttcaccgtgacaagaccaaagatacacatcctgaaagctgttgcagctctgaaaagggtgggcagccattgccttggtttgagcataggaaaaatgt

SEQ ID NO: 796856 - DNA, 120 bp, Artificial Sequence
  ENSG00000278311_17 (sequence is synthesized)
accacagtttgcagaacctacagaaacgttgtttggtcccgattccggaaaaggtgccaagagcttagttgaactccttgatgagtctgaatgtacttcagatgaggaaatctttatctc

SEQ ID NO: 796857 - DNA, 120 bp, Artificial Sequence
  ENSG00000278311_18 (sequence is synthesized)
acaagatgaaatacagtcatttatggctaataaccagtctttctacagcaatagagaacaataccgacagcatctgaaggagaaatttaataaatactgccggttaaatgatcacaagag

SEQ ID NO: 796858 - DNA, 120 bp, Artificial Sequence
  ENSG00000278311_19 (sequence is synthesized)
gcccatttgtagtggctggttgacaacggctggagcaaattaaataaataaaatagctctgtctttcaatgaaacactcacgatgactactgcgccttctctttcgaaaaactcttaatt

SEQ ID NO: 796859 - DNA, 120 bp, Artificial Sequence
  ENSG00000278311_20 (sequence is synthesized)
tagtgacttatggcaaaattttatcttaaatcaatgtgattctttcttgttttgggagacggtggaggtatcctcattagttctttcttcaggcttgtgtctttagttgcgtggctgcgc

SEQ ID NO: 796860 - DNA, 120 bp, Artificial Sequence
  ENSG00000278311_21 (sequence is synthesized)
aggcctgccatatgatttaagccatctcttttcattaaatgtttctcttcctgtgagacttactaaagcaacttagtggcaaaaagtaatgttgtacttataattctgtacagaaatgac

SEQ ID NO: 796861 - DNA, 120 bp, Artificial Sequence
  ENSG00000278311_22 (sequence is synthesized)
aatgagctgaatatatggttttacaaagtagacatccacttgcaaaatgtttggatgtaatgttaaagcgcaatgtgcaaaatttaaaataaagaatatttattaatacgcacagtaaaa

SEQ ID NO: 796862 - DNA, 120 bp, Artificial Sequence
  ENSG00000278311_23 (sequence is synthesized)
atgtatatatatgtgtatatatatatatatagcataggcaacttaaaccatgccagagggaattgaaaatagggacctacaggagaaacaagaaagaatgaatactagttggctctactc

SEQ ID NO: 796863 - DNA, 120 bp, Artificial Sequence
  ENSG00000278311_24 (sequence is synthesized)
aataggaagacccagggagaagttggaattaactcagatttccagcctgggtgactctgaatggctgtgaatggcagtgttcttattaacagggattgagaaggcacataggaatagaac

SEQ ID NO: 796864 - DNA, 120 bp, Artificial Sequence
  ENSG00000278311_25 (sequence is synthesized)
agcattacccttggacagtgaatttaaggtgttgcctattggacatctgccatgtcttgtcacttttcgatatgggtctggccctcaggcaatagcagagatttgaatggagctgtagag

SEQ ID NO: 796865 - DNA, 120 bp, Artificial Sequence
  ENSG00000278311_26 (sequence is synthesized)
tcacaagtcatctttatagacatgttagttgaagccatacgcatagatgagctcatctgggagatgaatttaaatcaaagagatcaaaatttccttgtttcacttaactaatcttcttag

SEQ ID NO: 796866 - DNA, 120 bp, Artificial Sequence
  ENSG00000278311_27 (sequence is synthesized)
ccatttactcttattgtgagcctggcttttccacctgaccaagttcttcttgttccaggaattcaaagataaagaaaccaggctctattatttctttctgattgattgatatttggtttc

SEQ ID NO: 796867 - DNA, 120 bp, Artificial Sequence
  ENSG00000278311_28 (sequence is synthesized)
taaaagaaattttcttccttctctacattcacaaactcttctattcttttgccacattttatacacttaagtttaaaccagtttccatgtatattttgtctatattatgtttgttattga

SEQ ID NO: 796868 - DNA, 120 bp, Artificial Sequence
  ENSG00000278311_29 (sequence is synthesized)
gaaataggcatttttgggaagaaagaatttggcattttggaaataatcagaaaattaaaaaatgcacacaccactttcccattcttctccccaccccaacccctacccctatcctcaaat

SEQ ID NO: 796869 - DNA, 120 bp, Artificial Sequence
  ENSG00000278311_30 (sequence is synthesized)
gcttagctagtgaaatattaaaatgttgtaatagaaattggagtcaaggtctccttgctgaagagaccatctattttcagagactggaaggagagagaacaaaccaatcaagagtcattg

SEQ ID NO: 796870 - DNA, 120 bp, Artificial Sequence
  ENSG00000278311_31 (sequence is synthesized)
gtttgttgcctctattgttttatttctgacctgcgcaaatagcttttgaagtggagatatgctagttcttggcaactaatacttttctgggcatgcattttatgaaataataggtatgta

SEQ ID NO: 796871 - DNA, 120 bp, Artificial Sequence
  ENSG00000278311_32 (sequence is synthesized)
ctgcctcattcttttaggctatgtgtttctctagtttaaaaataatttgccaatgaaggtctatctgtatttatgcaatccctaaatttgtatttaccttatgtgcgtatgttttaaatg

SEQ ID NO: 796872 - DNA, 120 bp, Artificial Sequence
  ENSG00000278311_33 (sequence is synthesized)
tgtgtatggaggcttattttggatgctgtagatgggagagagtgccatcatctagtacactgttatatgccacaagaaataattgcacagccatttcttaattttaaggtttttcttttc

SEQ ID NO: 796873 - DNA, 120 bp, Artificial Sequence
  ENSG00000278311_34 (sequence is synthesized)
gaactccttgtaagtattccatgtggtcttactgtacataactgtttgggaacggggtggatgtgggaggggatagtatttgagggcttaaggtaggtagttgaaggaagcttatgagaa

SEQ ID NO: 796874 - DNA, 120 bp, Artificial Sequence
  ENSG00000278311_35 (sequence is synthesized)
attaagggtagtatttcattattgtttggggacttcatttctgtccttccactcgtggtttatgcaactactctggaacacgtttccatggccgcctctgtctcagtagaagacattata

SEQ ID NO: 796875 - DNA, 120 bp, Artificial Sequence
  ENSG00000278311_36 (sequence is synthesized)
ggtattccttgagttacagtggggttacattccaataaacccattataactcaaaaatactgcgagttgaaaatacattcaacatcccaataaaccctttgtaaagttaaaaaaaaaaaa

SEQ ID NO: 796876 - DNA, 120 bp, Artificial Sequence
  ENSG00000278311_37 (sequence is synthesized)
agtgtgttgcaactcctaggcgaggccttctcttcagcaggccccacaaactcgcctttgcagtgggtggctcggtaacctctgtcggccccaagcccagagctccgtacgcactccctc

SEQ ID NO: 796877 - DNA, 120 bp, Artificial Sequence
  ENSG00000278311_38 (sequence is synthesized)
tctccagattttccttcttttggaaccttattccttgaccctttccctttaggagacgctgcttttgtcaaagcacacatctcagagaggggttgaaggatcttgggcgtttagggccta

SEQ ID NO: 796878 - DNA, 120 bp, Artificial Sequence
  ENSG00000278311_39 (sequence is synthesized)
ccccatacagaaaccacctaccctcggggaggcttaattacctggtaatgtcgcagctgcactgctacctgtgtattttctgttttaatactggtagctctcaccacataagcttaatta

SEQ ID NO: 796879 - DNA, 120 bp, Artificial Sequence
  ENSG00000278311_40 (sequence is synthesized)
ctgggggcagagtgacatgctcgtgcacagtcaagattccactaaaatggtttgatttcgttgtaaatagtctcgtattgcctaatgcattaaaactcttgaaatgattgtattgctagg

SEQ ID NO: 796880 - DNA, 120 bp, Artificial Sequence
  ENSG00000278311_41 (sequence is synthesized)
ccctttcttcaaaacgggctttcttcgcattatttagtttacaggtggacttttttttttttaaaggaagccaaattattgaatgtgtaagagtactataaaaagctgattgctcatctt

SEQ ID NO: 796881 - DNA, 120 bp, Artificial Sequence
  ENSG00000278311_42 (sequence is synthesized)
tagatttggtagtgtagcattatcgaccctctgccctatgttgctgtactgtttcctttaaaaggaaatggctgaaatttgaattgaatctgaacaggaaatgagtgcagttgcttgcca

SEQ ID NO: 796882 - DNA, 120 bp, Artificial Sequence
  ENSG00000278311_43 (sequence is synthesized)
cttaagaaatgaaattaaccttttccgaatatcttttgaaatctgcgttttgatgatgctgaagctttggattatacatttgcttatttcgataaggtgcacctaagtctcttcatctca

SEQ ID NO: 796883 - DNA, 120 bp, Artificial Sequence
  ENSG00000278311_44 (sequence is synthesized)
tcagtattcttttgctatcaaaggcagttgatcagttttgttcctcaatatttttttttgcaaatatctaccgaagttttttcaaattttatgtaaaatgcaagtcattgtagagatgcc

SEQ ID NO: 796884 - DNA, 120 bp, Artificial Sequence
  ENSG00000278311_45 (sequence is synthesized)
agtctatgcctttatgcttgccagtctcaattaagacttgattgagctgcagtactttaaaaaggattagaagagctattgaatgacttaatttattagaagtttttaagtgacagcatt

SEQ ID NO: 796885 - DNA, 120 bp, Artificial Sequence
  ENSG00000278311_46 (sequence is synthesized)
tctaattattcaagtgcatttatttttcatgaaaaaaggtagaatgatttgttctgacataaagtaaatagtgttgatgcattagaaattgtgtgtcttgattatgatttctgtactttt

SEQ ID NO: 796886 - DNA, 120 bp, Artificial Sequence
  ENSG00000278311_47 (sequence is synthesized)
tgcattagaagtataatggacttgtatttttaaatagttgaaactagcactgtgatcatattaaataatgcatttctcagtttggacttcagatagggattcatttgttgatattttctt

SEQ ID NO: 796887 - DNA, 120 bp, Artificial Sequence
  ENSG00000278311_48 (sequence is synthesized)
tcttctctcccctgctaacataaacacttttctgaagcatatagttatgatatcagcctttaaggtttattgtcccacaatggctgtggagttaaaaaaaaaaattcagtgagtttggat

SEQ ID NO: 796888 - DNA, 120 bp, Artificial Sequence
  ENSG00000278311_49 (sequence is synthesized)
ataagattattatttaatgaataatcataacataggaaaacatatcaaaacatagggaaaaccaacataaatagtcttcaaaagacactagttcttggtatattcacataaccacctttg

SEQ ID NO: 796889 - DNA, 120 bp, Artificial Sequence
  ENSG00000278311_50 (sequence is synthesized)
tgaatgcagcacattaatacatctgtcatatagcactttaaaatggccaactttttaagtgcttttatactgtattctctccacaatgatgtgactttccaaaattttccactgaaaaag

SEQ ID NO: 796890 - DNA, 120 bp, Artificial Sequence
  ENSG00000278311_51 (sequence is synthesized)
atgtaaccttgcaatgtggtttagtatggaacttactttgcactgtatctggcggttgaattttgcttttattgtactgtggacttgtgactaaggcaaataaaacttaagctcacttaa

SEQ ID NO: 796891 - DNA, 120 bp, Artificial Sequence
  ENSG00000278311_52 (sequence is synthesized)
gtgatgggaaacgcagcccggctctcccgtaccctcccgctccgctccctgccccccgtggcgaatgtgctgcgcagcggcgggtgcttacgctcgcggggtttggctgttgcaggcagg

SEQ ID NO: 796892 - DNA, 120 bp, Artificial Sequence
  ENSG00000278311_53 (sequence is synthesized)
gacttcattgcacatcttttgggtcgtgctgagccagagttcgcaggagggtatgagtatgtaatttgctagaatgggctatctagcgctttgcttcattttattactgaaagtttattt

SEQ ID NO: 796893 - DNA, 120 bp, Artificial Sequence
  ENSG00000278311_54 (sequence is synthesized)
tcatcaccttctgcctcagtacatatgatatatgtataaattaaagtatgcctgtaaagattttgcttctctttaaagtatgcatttcttaattgactgaaaatagggaaaaactgttct

SEQ ID NO: 796894 - DNA, 120 bp, Artificial Sequence
  ENSG00000278311_55 (sequence is synthesized)
ctggtgtttggttcagtcctctgctagttcttgcttgaagggaggcaggcttttttggctttcattgttacagactatcattttcatttgaaaatgattagaagggatttttctccctct

SEQ ID NO: 796895 - DNA, 120 bp, Artificial Sequence
  ENSG00000278311_56 (sequence is synthesized)
atccatgcattatcatgtgtaaattttattcacaataatggtttttgcataagtcagatctttgcagtaggggattaagaaatgccttattgaatgtaattcacgaactgtgtatattat

SEQ ID NO: 796896 - DNA, 120 bp, Artificial Sequence
  ENSG00000278311_57 (sequence is synthesized)
attattattactacacagaaacctaaagtagtatctctggctttgttgtaaaaataaaatcagatgatgatgttaatagaataaatcaaatgcatttccttttgtatttagggtatcaac

SEQ ID NO: 796897 - DNA, 120 bp, Artificial Sequence
  ENSG00000278311_58 (sequence is synthesized)
ctttctgctagaatacaaagggcttttttatcgccaaagttctgtgaacacttgtaaagactggcctggtggaggactcttgcccatgatgaatcactttggcattgcctttctcaattc

SEQ ID NO: 796898 - DNA, 120 bp, Artificial Sequence
  ENSG00000278311_59 (sequence is synthesized)
ctcctcaaaacaaaaaacctaaagaaggaaaaaatgttttgctataattggaaagtaaaaggaactgttgtgtctactatgagctggacacttctatgtgattgctttgtgccctaaaac

SEQ ID NO: 796899 - DNA, 120 bp, Artificial Sequence
  ENSG00000278311_60 (sequence is synthesized)
ccatctttttagagccagttcctgaattactttatttttagcaatacgaggactaaattctacttgcatgtgtatttctcattggttgtggacatgcatgcttgtatagcaacatatacg

SEQ ID NO: 796900 - DNA, 120 bp, Artificial Sequence
  ENSG00000278311_61 (sequence is synthesized)
ttgagtgtaaatgtataactgtcttgttactaggtaagcacattgtgtttaaaacctgaacttgcagctgtgttatccatcttttactgtttcagttaaaggtattagtgtgtgattatt

SEQ ID NO: 796901 - DNA, 120 bp, Artificial Sequence
  ENSG00000278311_62 (sequence is synthesized)
gggaggcccagggtggaggtatcacttgagcctaggagtttgggaccagcctgggcaagatagtgagatctctatctctatttattttattttatttttttaataaaaataaaaagtaca

SEQ ID NO: 796902 - DNA, 120 bp, Artificial Sequence
  ENSG00000278311_63 (sequence is synthesized)
gtcgtcccttggtatctgtggggtttgattccaggacttcctgtagataccaaaatctgcagatgtgcaagtccctgatgtaaaatggtgtaatatttgcatatagtctatgcacatcct

SEQ ID NO: 796903 - DNA, 85 bp, Artificial Sequence
  ENSG00000278311_64 (sequence is synthesized)
taaaatggtgtaatatttgcatatagtctatgcacatcctccttatacttttatttctgagacagggtctcactctgtcacccgg

SEQ ID NO: 796904 - DNA, 120 bp, Artificial Sequence
  ENSG00000278311_65 (sequence is synthesized)
ttcccaagtggctggaactacaggcttaccccaccaggcccagctaattttttgtatttattgtagagatggcgttttaccatgttgttcaggctggtctccagcttgtgggctcaagca

SEQ ID NO: 796905 - DNA, 120 bp, Artificial Sequence
  ENSG00000278311_66 (sequence is synthesized)
attctcccacctcagcctcccaaaatgctacaattacaggcatgaaccaccgtgcctggcctcttgtattcttaaattatctctaaattataatacctaatgcaatgtaaaagctatgta

SEQ ID NO: 796906 - DNA, 69 bp, Artificial Sequence
  ENSG00000278311_67 (sequence is synthesized)
tgggaggctgaggcatgagaattgtccagcctgggcgacagagtgaaactctctcaaaataaataaaaa

SEQ ID NO: 796907 - DNA, 120 bp, Artificial Sequence
  ENSG00000278311_68 (sequence is synthesized)
ctccactgcagtccagcctgggcgacagagtgaaactctctcaaaataaataaaaactgtttaaatagttgttatactgtattgtttagaaaataaggacaagaaaaaagtctgtacatg

SEQ ID NO: 796908 - DNA, 120 bp, Artificial Sequence
  ENSG00000278311_69 (sequence is synthesized)
aaataaagaaaggtaagtaaataatttctttttaaaatgaactcttaactctattctttcttactgttaaatgtaagagcttttagagattctgtgagctagaattttaaaactgcttta

SEQ ID NO: 796909 - DNA, 120 bp, Artificial Sequence
  ENSG00000278311_70 (sequence is synthesized)
tagttccaagaatatcatataatttagtcagatacttaatatttcctttttctttatgttctttgacttatttttgacaaaaacgaaaaatggtaaattcctaatcatattttcattatt

SEQ ID NO: 796910 - DNA, 120 bp, Artificial Sequence
  ENSG00000278311_71 (sequence is synthesized)
taatttactttctacttaaaaaaaaaatccttcattggaaatgttctacttttaataagccattaattatgagatttttctgtggtccccaaagagttcactctttgtcctaatatactt

SEQ ID NO: 796911 - DNA, 120 bp, Artificial Sequence
  ENSG00000278311_72 (sequence is synthesized)
gatttctgcaggtgatgactcttgtgttcatcactgtgaagacaaagaggatgatggtgatagttgtgttgaatgttgggcaaattctgaagagaacgacacaaaaggaaaaaataaaaa

SEQ ID NO: 796912 - DNA, 120 bp, Artificial Sequence
  ENSG00000278311_73 (sequence is synthesized)
aattcttaaacctttgctgttgaggacagaacacgtgttttccttggagtggcatatgtgcagcttagctgctaggatttactttttttagaatgagttctttatgcagttccattgggt

SEQ ID NO: 796913 - DNA, 120 bp, Artificial Sequence
  ENSG00000278311_74 (sequence is synthesized)
gagagtgtgggttgggggcagagagagatgtgatcatttgtgcaacagtccttgtgagtcagaaattcaattgttctttttatacttttaaaattataagctgtgtaatcttaaacaatt

SEQ ID NO: 796914 - DNA, 120 bp, Artificial Sequence
  ENSG00000278311_75 (sequence is synthesized)
tgtttagtccctatcatattaggttctatgaaggtgaagtgaatgtatattggcaggtgtggcatagtgtctagtacatagtaagtgcctggtaaaataaaatgaatgccagctgctact

SEQ ID NO: 796915 - DNA, 86 bp, Artificial Sequence
  ENSG00000278311_76 (sequence is synthesized)
gtaagtgcctggtaaaataaaatgaatgccagctgctactattacttagtattccttctaaaggtttaatactatgtcaggtacta

SEQ ID NO: 796916 - DNA, 120 bp, Artificial Sequence
  ENSG00000278318_0 (sequence is synthesized)
accttgattgcttcttaggcagtggtgaggcgtcttagagacgtgcatctccatgcggttgtactgtcaggccatgggaattaggatcggctctataggaccagtgtgaagggacaacgt

SEQ ID NO: 796917 - DNA, 120 bp, Artificial Sequence
  ENSG00000278318_1 (sequence is synthesized)
gcggcggagggtcgaagcccacggatttccatgagctcggcctggcttccttcttggaattgttcgtttctcggagataattgtataaaagaaggagaaataaccccacatctcttgaca

SEQ ID NO: 796918 - DNA, 120 bp, Artificial Sequence
  ENSG00000278318_2 (sequence is synthesized)
ctagagctccaggtcccctgaccatgggaagcagtcgcgctctggacagtaaaggtggagacaggaacttgtcagagcttggagagtttccggaatgaaaaaggcctggatcttctgcgt

SEQ ID NO: 796919 - DNA, 120 bp, Artificial Sequence
  ENSG00000278318_3 (sequence is synthesized)
ctccagcttaggaaaaccagagaataaatacagttgctgctgctcgcagagaacctagcagaagagaccatggagactttgacctcaaggcatgagaaaagagctcttcattctcaagcc

SEQ ID NO: 796920 - DNA, 120 bp, Artificial Sequence
  ENSG00000278318_4 (sequence is synthesized)
tcagccatttcccaagatagggaggagaagatcatgtctcaggagccattgagcttcaaggacgtggctgtggtcttcactgaggaggagctagagctgctggactctacccagaggcag

SEQ ID NO: 796921 - DNA, 120 bp, Artificial Sequence
  ENSG00000278318_5 (sequence is synthesized)
ctgtaccaagatgtgatgcaggagaatttcaggaacctactctcagtgggtgagaggaatcctctgggagacaagaatggaaaggatacggagtatattcaagatgaagaattaaggttc

SEQ ID NO: 796922 - DNA, 120 bp, Artificial Sequence
  ENSG00000278318_6 (sequence is synthesized)
ttttcacacaaagagctctcctcatgcaaaatctgggaagaggtggcaggtgaattacctgggagccaagactgtagagtaaatctgcaaggaaaagacttccagttctcagaagatgct

SEQ ID NO: 796923 - DNA, 120 bp, Artificial Sequence
  ENSG00000278318_7 (sequence is synthesized)
gctccccatcaagggtgggaaggagcatctacgccgtgttttccaattgagaatttcctggacagtctacaaggggatgggcttatcggtctagaaaatcaacagtttccagcctggaga

SEQ ID NO: 796924 - DNA, 120 bp, Artificial Sequence
  ENSG00000278318_8 (sequence is synthesized)
gctataagaccaatccccattcaaggatcttgggcaaaagcgtttgtgaaccagttaggggatgttcaagaaagatgtaaaaatctcgacacagaagacacagtatataaatgtaactgg

SEQ ID NO: 796925 - DNA, 120 bp, Artificial Sequence
  ENSG00000278318_9 (sequence is synthesized)
gatgatgacagcttttgctggatatcttgtcatgttgatcacagattccctgaaatagacaagccgtgtggttgcaataaatgcagaaaagactgcattaaaaactctgtacttcatcgc

SEQ ID NO: 796926 - DNA, 120 bp, Artificial Sequence
  ENSG00000278318_10 (sequence is synthesized)
attaaccctggagagaatggcttgaaaagtaacgaatacagaaatggcttcagggacgatgcagaccttcccccgcatccaagagtacctttgaaagagaaactctgtcaatatgatgag

SEQ ID NO: 796927 - DNA, 120 bp, Artificial Sequence
  ENSG00000278318_11 (sequence is synthesized)
tttagtgagggcttgaggcacagtgcccatcttaacagacatcaaagagttcccacaggagagaaatctgttaagagtcttgagcgtggtcggggcgtcagacagaacacgcacatacgt

SEQ ID NO: 796928 - DNA, 120 bp, Artificial Sequence
  ENSG00000278318_12 (sequence is synthesized)
aaccaccccagagcccctgtgggagacatgccctatagatgtgatgtctgtggaaaggggttcaggtataaatcggttcttcttattcatcaaggggtgcacacaggaaggagaccctat

SEQ ID NO: 796929 - DNA, 120 bp, Artificial Sequence
  ENSG00000278318_13 (sequence is synthesized)
aaatgtgaggagtgtgggaaggcatttggtcgaagttcaaacctgcttgtccatcagagggtccacactggagagaaaccatataaatgcagcgagtgtgggaagggcttcagttacagc

SEQ ID NO: 796930 - DNA, 120 bp, Artificial Sequence
  ENSG00000278318_14 (sequence is synthesized)
tcagtgcttcaagtccatcagaggctgcacacaggggagaagccctacacctgcagcgagtgtggcaaaggcttctgtgccaagtctgcactgcacaaacaccagcacattcaccctgga

SEQ ID NO: 796931 - DNA, 120 bp, Artificial Sequence
  ENSG00000278318_15 (sequence is synthesized)
gaaaagccctacagctgtggcgagtgtggaaagggattcagctgcagctcccacctcagcagtcatcagaagacacacaccggcgagaggccctaccagtgtgacaagtgtggcaaaggt

SEQ ID NO: 796932 - DNA, 120 bp, Artificial Sequence
  ENSG00000278318_16 (sequence is synthesized)
ttcagtcacaactcgtaccttcaagctcaccagagagttcacatggggcagcatctgtacaaatgtaacgtgtgtggtaagagtttcagttacagctcagggcttctcatgcatcagaga

SEQ ID NO: 796933 - DNA, 120 bp, Artificial Sequence
  ENSG00000278318_17 (sequence is synthesized)
ctgcacacaggagagaaaccctacaaatgcgagtgcgggaagagctttggccggagctccgacctccacatccatcagagggtccacacaggagagaaaccctataaatgcagtgagtgt

SEQ ID NO: 796934 - DNA, 120 bp, Artificial Sequence
  ENSG00000278318_18 (sequence is synthesized)
gggaagggcttccggcggaattcagaccttcacagccaccagagggtccacacgggagagaggccctacgtgtgtgacgtgtgtgggaagggtttcatctacagctccgacctccttatc

SEQ ID NO: 796935 - DNA, 120 bp, Artificial Sequence
  ENSG00000278318_19 (sequence is synthesized)
catcagagggtccacactggagagaaaccctataaatgtgctgagtgtggcaaaggcttcagttacagctcagggcttctcattcaccagagagtccacacaggcgagaaaccttacaga

SEQ ID NO: 796936 - DNA, 120 bp, Artificial Sequence
  ENSG00000278318_20 (sequence is synthesized)
agccttcacaaacatcagcgagtccacacgggaaaaaagccctatacgtgtgatcagtgtggcaagggattcagttatggctctaatcttcgcacccaccagaggttgcacacaggagag

SEQ ID NO: 796937 - DNA, 120 bp, Artificial Sequence
  ENSG00000278318_21 (sequence is synthesized)
aaaccctacacttgttgtgaatgtgggaagggtttcagatatggctcaggtctccttagtcataagagagtgcacactggcgagaagccatacagatgccacgtgtgtgggaagggctat

SEQ ID NO: 796938 - DNA, 120 bp, Artificial Sequence
  ENSG00000278318_22 (sequence is synthesized)
agtcagagctcacatcttcaaggtcatcagagggtccacactggtgagaaaccctataaatgtgaggagtgtgggaagggctttggccgcaactcctgtcttcatgttcatcagagagtc

SEQ ID NO: 796939 - DNA, 120 bp, Artificial Sequence
  ENSG00000278318_23 (sequence is synthesized)
cacactggagagaagccctatacgtgtggtgtgtgtgggaaaggcttcagttatacctcaggtctgcggaaccaccaaagagtgcatttaggcgagaacccttataagtagatgtacata

SEQ ID NO: 796940 - DNA, 120 bp, Artificial Sequence
  ENSG00000278318_24 (sequence is synthesized)
gaggattccatctgggactcagagctttctatccatctgagagccaacacaggagaaaaaccataggaaagtgacatgtaggagggctataggagaaactgatgattttacattttctag

SEQ ID NO: 796941 - DNA, 120 bp, Artificial Sequence
  ENSG00000278318_25 (sequence is synthesized)
tctgcataggaagggaacacctggatgtgtgataaataggttagcacttcagttacaaacttcagtctttaagagtctgttgtgcagcggagtaggctttaaagaaacagtgcagcagtg

SEQ ID NO: 796942 - DNA, 120 bp, Artificial Sequence
  ENSG00000278318_26 (sequence is synthesized)
gtttcagtaataatcctcacttccatcagaatctgcctgggagggagcttttacaatgtacaagtggtgagaatgtttccaaggtgctaattatggacatagattctttgtgtgggttga

SEQ ID NO: 796943 - DNA, 120 bp, Artificial Sequence
  ENSG00000278318_27 (sequence is synthesized)
tagctaccaatgggacagtgtagaaacaagtttccacctttctaaaaccagtttggtacatatctttttaaagatcgctttataaaaacaaaaagataacattaacatttattgaaacaa

SEQ ID NO: 796944 - DNA, 120 bp, Artificial Sequence
  ENSG00000278318_28 (sequence is synthesized)
gtcactctgagaagaccaggaacaaagttctcttggcagatctgggtgatgtgtgtgtctcacatttttatcatgtttttatgactgttttatcttgcaggtaagctttacagctttcag

SEQ ID NO: 796945 - DNA, 120 bp, Artificial Sequence
  ENSG00000278318_29 (sequence is synthesized)
aggagttgtagtacactacagaaatatgtcttctttccaggttcaaaaagcaaaatctgattggcattgcattgaattattaattaaataaatttattaattggcattgcattgaattta

SEQ ID NO: 796946 - DNA, 120 bp, Artificial Sequence
  ENSG00000278318_30 (sequence is synthesized)
taggttaattttgaaagaatgtggcgtctttgaaatgctgattttttttcactttaaaaaaatgactttttttttaccactgatagtatttcatatggtccctcagtaatatttcttaga

SEQ ID NO: 796947 - DNA, 120 bp, Artificial Sequence
  ENSG00000278318_31 (sequence is synthesized)
gatggttaaaaataggttctgagtcatcttaagcatatttctaggaatttgttttattgctgtcatgaatataatggttttgctccagttcatttcatagtttaacatatcaaatattag

SEQ ID NO: 796948 - DNA, 120 bp, Artificial Sequence
  ENSG00000278318_32 (sequence is synthesized)
gtatcttaaaaatcacaaatgctatttcaccctgcaggttagcagtattaaaatagaatcatcaaatcccccatcagtgggggcgggggggggggttgtagaaacagtctgatatggttt

SEQ ID NO: 796949 - DNA, 120 bp, Artificial Sequence
  ENSG00000278318_33 (sequence is synthesized)
gtttggctcttgtccccacccaaatctcatctcaattttaatccccacgtgtcagaggagggccttggtgggagatgattggatcacgagggcagatttctcccttgctgttctcatgat

SEQ ID NO: 796950 - DNA, 120 bp, Artificial Sequence
  ENSG00000278318_34 (sequence is synthesized)
agttctcatgagagctgatggttttaaggtgtagcccttcctcgctgtctctctcctgtccccttgtgaagaaggtccttatttctcttttgcgttctgccatgactaagttttcggagg

SEQ ID NO: 796951 - DNA, 120 bp, Artificial Sequence
  ENSG00000278318_35 (sequence is synthesized)
cctccccagccatgtggaactgtgtgtgagttaaacctctttcctttgcaaattacctagtctcaggtagttctttatagcagtgcaaaaatggacgtaataagtcttatgtacttattg

SEQ ID NO: 796952 - DNA, 120 bp, Artificial Sequence
  ENSG00000278318_36 (sequence is synthesized)
gtgagagagaaaatccgtgcattgttttcaaaagaattcattaacgtatcaattcaatttctataacctttgaagtggcagtaaatatgtagtaattgatacttgggagatagttgccca

SEQ ID NO: 796953 - DNA, 120 bp, Artificial Sequence
  ENSG00000278318_37 (sequence is synthesized)
cttgggcaaaaacgcatgcagaaggtggagtttttaaatttaaaacatttttaaaatagcaaatgttaatattccagtttccattggtaggaaattttttagataagttcaggcatatgt

SEQ ID NO: 796954 - DNA, 120 bp, Artificial Sequence
  ENSG00000278318_38 (sequence is synthesized)
atgcaatggaaagccactagaaatcttcaggcacacagataatgacaatgcaggttgctcatgaagtatttagtgaaccaggagagttttagaacaacaattatagcatgaccccatttt

SEQ ID NO: 796955 - DNA, 120 bp, Artificial Sequence
  ENSG00000278318_39 (sequence is synthesized)
gttagtatgtttttctgtgtgtatgtttagagcaacagagaaaaaaagatgtgggagaggacatataactacttatctctagtggtgggattctgaatgtataatacatatgttgtactt

SEQ ID NO: 796956 - DNA, 120 bp, Artificial Sequence
  ENSG00000278318_40 (sequence is synthesized)
ttatgtattttactttgtaacaaagtatctttcagttttataataacagtagagctattttttataaattagcctgatggaacaatcccttatgattaaagattcatgttgtaacctcta

SEQ ID NO: 796957 - DNA, 120 bp, Artificial Sequence
  ENSG00000278318_41 (sequence is synthesized)
tttcaggaacctactctcagtgggtgagaggaatcctctgggtaattggaactgaacttcttggagtgttcttgttcctggagagaagatatttttggcttttttacacaggttaaatcc

SEQ ID NO: 796958 - DNA, 120 bp, Artificial Sequence
  ENSG00000278318_42 (sequence is synthesized)
tatttttatagaactcttagtttcagctgctgtaaaaaattgccagactgagtggcatataaacaacagaagtttatttctggaaggcacagtctgagatcagggtgccagcatagttgg

SEQ ID NO: 796959 - DNA, 120 bp, Artificial Sequence
  ENSG00000278318_43 (sequence is synthesized)
gttctggtgaggaccctctgtcagggtgcagatagctgacttccttttgtgtcctcacgtagcagagaagagctctctgggcatctgttttctaaggacactaatttctttcctgggggt

SEQ ID NO: 796960 - DNA, 120 bp, Artificial Sequence
  ENSG00000278318_44 (sequence is synthesized)
tccacctccatgacttaattacctccggaagacccaccacctcctaatggtatcacgttgggatttaggatttcaacataggaatttttgaagactggggtaacagatggagaaactcca

SEQ ID NO: 796961 - DNA, 120 bp, Artificial Sequence
  ENSG00000278463_0 (sequence is synthesized)
atgtctggtcgcggcaaacaaggcggtaaagctcgcgccaaggctaagactcggtcttctcgtgcaggtttgcagtttcctgtgggccgagtgcaccgcctgctccgcaaaggcaactac

SEQ ID NO: 796962 - DNA, 120 bp, Artificial Sequence
  ENSG00000278463_1 (sequence is synthesized)
ctcgcggcggtgcttgagtacctgaccgccgagatcctggagctggcgggcaatgcggcccgcgacaacaagaagacccgcatcatcccgcgccacctgcaattggccatccgcaatgac

SEQ ID NO: 796963 - DNA, 120 bp, Artificial Sequence
  ENSG00000278463_2 (sequence is synthesized)
gaggagcttaataaactcttggggcgtgtgaccatcgcgcagggtggcgttttgcctaatattcaggcggtgctgctgcctaagaaaactgagagccatcataaggccaagggaaagtga

SEQ ID NO: 796964 - DNA, 120 bp, Artificial Sequence
  ENSG00000278505_0 (sequence is synthesized)
caaacttggttccagctgcgtgtggtgaaagcaactagaggcagagctatcaagggctgtgacagatgagcagtggtctgtctgcaatgagcatgtgctcaagctaacatggataccatc

SEQ ID NO: 796965 - DNA, 120 bp, Artificial Sequence
  ENSG00000278505_1 (sequence is synthesized)
ttggtcttcagcctaatcattgcatcctatgatgccaacaagaaagacctcagagatagcagttgccgactggaacagctgcctgggatcttcccaaaagacgtgagaagcatcagagaa

SEQ ID NO: 796966 - DNA, 120 bp, Artificial Sequence
  ENSG00000278505_2 (sequence is synthesized)
ttgcaaatgcaagaaactcacacagaaaccaaaaggacaacattcattcaaaaccggactatagctaccctgcagtgccttggctctgacagcaaagtaaaagtcaaccttgtatatttg

SEQ ID NO: 796967 - DNA, 120 bp, Artificial Sequence
  ENSG00000278505_3 (sequence is synthesized)
gagagaaggccaaaggtcaagcatattttgaagaacctgagaatcattgctgctccccgcagaaacagctctgcctcctcaagctgtcacctaatccccacatccaagtttcagactgga

SEQ ID NO: 796968 - DNA, 120 bp, Artificial Sequence
  ENSG00000278505_4 (sequence is synthesized)
tctcttctaaaaggcaaagcttttttaccagggatctcacaatgtaaagtcctgggggcttcatcagagacttttcccaccactgccccttctataactcctgggaataaagaaggagag

SEQ ID NO: 796969 - DNA, 120 bp, Artificial Sequence
  ENSG00000278505_5 (sequence is synthesized)
aaaactacaagtaccgacacagatgagaacctagagaagagacagaaatggagtattgtggtcaaaattctgattgctgtcaccctgttgctcagtggagttgccattatagtatttgta

SEQ ID NO: 796970 - DNA, 120 bp, Artificial Sequence
  ENSG00000278505_6 (sequence is synthesized)
atttttgaagtcccatgtccttatcaatgcctaggagccaggaagctgtgccaatgccagtggttgtggagatggcaaaagaagggaggccagccacctgggacagctgaatccaagcct

SEQ ID NO: 796971 - DNA, 120 bp, Artificial Sequence
  ENSG00000278505_7 (sequence is synthesized)
gactctcagccccagaaggttggacaagatgctgccaattcatcaaacccaaagaaagctgcagagatcactgttatccaccagacatacttctgaaaagttctgctctatctcaaagac

SEQ ID NO: 796972 - DNA, 120 bp, Artificial Sequence
  ENSG00000278505_8 (sequence is synthesized)
tgaatgatactacacagtcctctccctattaatatgggcacattcttgccaatttcacacttgtatcttcagcagggacattacaatcaaacaccaattcctggttaatgaagggagagt

SEQ ID NO: 796973 - DNA, 120 bp, Artificial Sequence
  ENSG00000278505_9 (sequence is synthesized)
gtgggcttagcagagttaccctcatgcccctatctgagccacaaccttctgtaattcacttcatacatccatctaaatggatacctttccatcccctcaaacgagaacaaaaagtattcc

SEQ ID NO: 796974 - DNA, 120 bp, Artificial Sequence
  ENSG00000278505_10 (sequence is synthesized)
ctgcaagcactatgaatggaccttactactctctttgacagaagactcaaacacagcctctaagaaacaaggcagctgttagtgtgacatagcttccagctcctctgttatcttcacagc

SEQ ID NO: 796975 - DNA, 120 bp, Artificial Sequence
  ENSG00000278505_11 (sequence is synthesized)
tgacttcacactcactggccctcaatagcttagagtgggactcctgatctccctggttgacgtttataaggttttgtaatttagcttctggtactacatgtatctatccacacactgctg

SEQ ID NO: 796976 - DNA, 120 bp, Artificial Sequence
  ENSG00000278505_12 (sequence is synthesized)
aagggaacttgaccctacgcattccaaaagccttcctcataagttatccccaaggggttcagggactacagaccattagtacccaagtgaagtcttctgacgatccagaattcctaaggt

SEQ ID NO: 796977 - DNA, 120 bp, Artificial Sequence
  ENSG00000278505_13 (sequence is synthesized)
ggctctgatattatatcatactttaatagagagttgcataccttttggacaaagattccagagcaaaataattatgataatgctgtttctcacaggagaatagctatgagtcaaatctaa

SEQ ID NO: 796978 - DNA, 120 bp, Artificial Sequence
  ENSG00000278505_14 (sequence is synthesized)
cctgcttaaataagagtttggtgagaaagtgaaaccacctgatcttgaatcaatgttgaggtgaaaaaggaaatgtcaggagggataagacagggtgaggccctgcttcttttcctaaga

SEQ ID NO: 796979 - DNA, 120 bp, Artificial Sequence
  ENSG00000278505_15 (sequence is synthesized)
gtctgaaaccattccatttcattttggtgaaatgtgtctgtttctaagaaattctgttttcttagttctctggttaaaaaaaaaaatacataaactgtatccttctttctttcacttcaa

SEQ ID NO: 796980 - DNA, 120 bp, Artificial Sequence
  ENSG00000278522_0 (sequence is synthesized)
gacgcgatctgttcgctactaccggcctcccctggctgttaaaagcagatggtggctgaggtttgttcaatgcccgctgcctctgctgtgaagaagccatttgatctcaggagcaagatg

SEQ ID NO: 796981 - DNA, 120 bp, Artificial Sequence
  ENSG00000278522_1 (sequence is synthesized)
gctgcagggggagcggcaagagcaacatgggcacttctggagaccacgacgactcctttatgaagacgctcaggagcaagatgggcaagtgttgccaccactgcttcccctgctgcaggg

SEQ ID NO: 796982 - DNA, 88 bp, Artificial Sequence
  ENSG00000278522_2 (sequence is synthesized)
caagatgggcaagtgttgccacgagcaatgtgggcacttctggagaccatgacaactcctttatgaagacactcaggagcaagatggg

SEQ ID NO: 796983 - DNA, 74 bp, Artificial Sequence
  ENSG00000278522_3 (sequence is synthesized)
gctgacttggggagactacgacgacagcgccttcatggagccgaggtaccacgtccgtcgagaagatctggaca

SEQ ID NO: 796984 - DNA, 80 bp, Artificial Sequence
  ENSG00000278522_4 (sequence is synthesized)
cccagaaaggatctcatcgtcatgctcagggacactgacatgaacaagagggacaagcaaaagaagtagtacaactcctg

SEQ ID NO: 796985 - DNA, 120 bp, Artificial Sequence
  ENSG00000278522_5 (sequence is synthesized)
aattcagaagtagtacaactcctgctggacagacgatgtcaacttaacgtccttgacaacaaaaaaaggacagctctgataaaggccgtacaatgccaggaagatgaatgtgtgttaatg

SEQ ID NO: 796986 - DNA, 120 bp, Artificial Sequence
  ENSG00000278522_6 (sequence is synthesized)
tacaatgccaggaagatgaatgtgtgttaatgttgctggaacatggcgctgatggaaatattcaagatgagtatggaaataccgctctacactatgctatctacaatgaagataaattaa

SEQ ID NO: 796987 - DNA, 120 bp, Artificial Sequence; identical to SEQ ID NO: 652462
  ENSG00000278522_7 (sequence is synthesized)

SEQ ID NO: 796988 - DNA, 69 bp, Artificial Sequence; identical to SEQ ID NO: 768340
  ENSG00000278522_8 (sequence is synthesized)

SEQ ID NO: 796989 - DNA, 120 bp, Artificial Sequence; identical to SEQ ID NO: 768341
  ENSG00000278522_9 (sequence is synthesized)

SEQ ID NO: 796990 - DNA, 120 bp, Artificial Sequence; identical to SEQ ID NO: 768342
  ENSG00000278522_10 (sequence is synthesized)

SEQ ID NO: 796991 - DNA, 120 bp, Artificial Sequence
  ENSG00000278522_11 (sequence is synthesized)
tagtcataagaaagaagaagatctcttgcgtgaaaacagcatgttgcgggaagaaattgccatgctaagactggaactagatgaaacaaaacatcagaaccagctaagggaaaataaaat

SEQ ID NO: 796992 - DNA, 120 bp, Artificial Sequence
  ENSG00000278522_12 (sequence is synthesized)
taagggaaaataaaattttggaggaaattgaaagtgtaaaagaaaaacttctaaaggctatacaactgaatgaagaagcattaacgaaaaccagtatttaagtacagtggacagcttagg

SEQ ID NO: 796993 - DNA, 120 bp, Artificial Sequence
  ENSG00000278522_13 (sequence is synthesized)
acctgtaacgggtacacttcgcttcgcgttcctcgcttggccttgcgttcctagcttggcttggctgttagtagctttgcctggtgtttcttgcttggattggcgtttcctccctcgcat

SEQ ID NO: 796994 - DNA, 120 bp, Artificial Sequence
  ENSG00000278522_14 (sequence is synthesized)
tcctttgctggacttgaccttttctctgctgggtttggcattcccttgactgggctgggtgtttccttgggagggggggcttggcctttcctggggtgggcgtggggtccccctggtggg

SEQ ID NO: 796995 - DNA, 120 bp, Artificial Sequence
  ENSG00000278522_15 (sequence is synthesized)
tttccctgggtggggtgggctgggctcccttgctgggcttggcaagttttggctgggattgacctttctcttcaaacagattggaaacccagggtttcctgctagttggtgaaactggtt

SEQ ID NO: 796996 - DNA, 120 bp, Artificial Sequence
  ENSG00000278522_16 (sequence is synthesized)
ttttgacaactgagaatgctcagttctgaactggagaatgtaagacacagctaggaaacactggaaatggaaattcaatcatgtcattgtagactgactactgctctacatgattgtgat

SEQ ID NO: 796997 - DNA, 120 bp, Artificial Sequence
  ENSG00000278522_17 (sequence is synthesized)
caaagtcagatagctgaaagggacttctttccagagaacaaacatcaacaggtttatttacaggagaaaatgaattcttatatatctcacctaaaagataacagtgagattctttctgaa

SEQ ID NO: 796998 - DNA, 120 bp, Artificial Sequence
  ENSG00000278522_18 (sequence is synthesized)
caactctaacgctgacagtaaaattaacaacctaaaaattaagctccatcacacaggataaattctgagagaaaagatgaggcaggccaccatctttcctgtttgggcaacttagtcatt

SEQ ID NO: 796999 - DNA, 120 bp, Artificial Sequence
  ENSG00000278522_19 (sequence is synthesized)
ccagcgtgcgggctttggagagtacaaactcaccagggacagaagagatcctgtggcatagcacagctgctttaccaaatcatggccagaatgcttctgtaagcaggcccctgatcctgt

SEQ ID NO: 797000 - DNA, 120 bp, Artificial Sequence
  ENSG00000278522_20 (sequence is synthesized)
tcctcgtcactggacaggatctcccacctgaggcctccagctacacccaccagtgttccctggccaatggagatttgaaaccttcctgggacagagttcccagagagaggggtgggccat

SEQ ID NO: 797001 - DNA, 120 bp, Artificial Sequence
  ENSG00000278522_21 (sequence is synthesized)
gatgggcaggtcttcctggcctgggtctccagccagccccccacttgagccttcaagccagtagcaactcagcaactccctggacagagcttccaggagcaacagaaatcctctctgcca

SEQ ID NO: 797002 - DNA, 120 bp, Artificial Sequence
  ENSG00000278522_22 (sequence is synthesized)
aagaataatttttggcagaaggaacatgcaacaagtttgtgtgtttgccagaagaacatctgatgagattgcctgtttggcaggaagagcaacaactgcaaaagacaggatgccgagtga

SEQ ID NO: 797003 - DNA, 71 bp, Artificial Sequence; identical to SEQ ID NO: 769995
  ENSG00000278522_23 (sequence is synthesized)

SEQ ID NO: 797004 - DNA, 120 bp, Artificial Sequence; identical to SEQ ID NO: 769996
  ENSG00000278522_24 (sequence is synthesized)

SEQ ID NO: 797005 - DNA, 120 bp, Artificial Sequence
  ENSG00000278522_25 (sequence is synthesized)
acaaaggaagcttttgcagtagtcatctatagtttccatgtcacacatccttggactagtatcaatgtattctaaggttttcacctgcccatggtgaaataaagtttggaatccccatta

SEQ ID NO: 797006 - DNA, 120 bp, Artificial Sequence
  ENSG00000278535_0 (sequence is synthesized)
gggactctggtgggtctaggcgcggatcggacccaagcaggtcggcggcggcggcaggagagcggccgggcgtcagctcctcgacccccgtgtcgggctagtccagcgaggcggacgggc

SEQ ID NO: 797007 - DNA, 120 bp, Artificial Sequence
  ENSG00000278535_1 (sequence is synthesized)
cgaccggctggcgctggtgacgggggcctcggggggcatcggcgcggccgtggcccgggccctggtccagcagggactgaaggtggtgggctgcgcccgcactgtgggcaacatcgagga

SEQ ID NO: 797008 - DNA, 120 bp, Artificial Sequence
  ENSG00000278535_2 (sequence is synthesized)
aggtggtgggctgcgcccgcactgtgggcaacatcgaggagctggctgctgaatgtaagagtgcaggctaccccgggactttgatcccctacagatgtgacctatcaaatgaagaggaca

SEQ ID NO: 797009 - DNA, 120 bp, Artificial Sequence
  ENSG00000278535_3 (sequence is synthesized)
tcctctccatgttctcagctatccgttctcagcacagcggtgtagacatctgcatcaacaatgctggcttggcccggcctgacaccctgctctcaggcagcaccagtggttggaaggaca

SEQ ID NO: 797010 - DNA, 120 bp, Artificial Sequence
  ENSG00000278535_4 (sequence is synthesized)
tgttcaatgtgaacgtgctggccctcagcatctgcacacgggaagcctaccagtccatgaaggagcggaatgtggacgatgggcacatcattaacatcaatagcatgtctggccaccgag

SEQ ID NO: 797011 - DNA, 120 bp, Artificial Sequence
  ENSG00000278535_5 (sequence is synthesized)
tgttacccctgtctgtgacccacttctatagtgccaccaagtatgccgtcactgcgctgacagagggactgaggcaagagcttcgggaggcccagacccacatccgagccacgtgcatct

SEQ ID NO: 797012 - DNA, 120 bp, Artificial Sequence
  ENSG00000278535_6 (sequence is synthesized)
agcaaatgaagtgtctcaaacccgaggatgtggccgaggctgttatctacgtcctcagcacccccgcacacatccagattggagacatccagatgaggcccacggagcaggtgacctagt

SEQ ID NO: 797013 - DNA, 120 bp, Artificial Sequence
  ENSG00000278535_7 (sequence is synthesized)
gactgtgggagctcctccttccctccccacccttcatggcttgcctcctgcctctggattttaggtgttgatttctggatcacgggataccacttcctgtccacaccccgaccaggggct

SEQ ID NO: 797014 - DNA, 120 bp, Artificial Sequence
  ENSG00000278535_8 (sequence is synthesized)
agaaaatttgtttgagatttttatatcatcttgtcaaattgcttcagttgtaaatgtgaaaaatgggctggggaaaggaggtggtgtccctaattgttttacttgttaacttgttcttgt

SEQ ID NO: 797015 - DNA, 120 bp, Artificial Sequence
  ENSG00000278535_9 (sequence is synthesized)
gcccctgggcacttggcctttgtctgctctcagtgtcttccctttgacatgggaaaggagttgtggccaaaatccccatcttcttgcacctcaacgtctgtggctcagggctggggtggc

SEQ ID NO: 797016 - DNA, 120 bp, Artificial Sequence
  ENSG00000278535_10 (sequence is synthesized)
agagggaggccttcaccttatatctgtgttgttatccagggctccagacttcctcctctgcctgccccactgcaccctctcccccttatctatctccttctcggctccccagcccagtct

SEQ ID NO: 797017 - DNA, 120 bp, Artificial Sequence
  ENSG00000278535_11 (sequence is synthesized)
tggcttcttgtcccctcctggggtcatccctccactctgactctgactatggcagcagaacaccagggcctggcccagtggatttcatggtgatcattaaaaaagaaaaatcgcaaccaa

SEQ ID NO: 797018 - DNA, 120 bp, Artificial Sequence
  ENSG00000278535_12 (sequence is synthesized)
gcccagccaggacttgagtttatagtgaggtttctccattgataacagccttttcccttcatcactcggggagcactgtcatcccttagactttgaccaaagaggacagacttaggggat

SEQ ID NO: 797019 - DNA, 120 bp, Artificial Sequence
  ENSG00000278535_13 (sequence is synthesized)
gggcagtccaacatcttcgtggctgaaagtcagctgccaaaggagcatgttttatgagtgtgacgggggtcggggtctgaggctggctagggagccgtgggagtgagctgctcaccccag

SEQ ID NO: 797020 - DNA, 120 bp, Artificial Sequence
  ENSG00000278535_14 (sequence is synthesized)
actctggtgggtctaggcgcggatcggacccaagcaggtcggcggcggcggcaggagagcggccgggcgtcagctcctcgacccccgtgtcgggctagtccagcgagctggctgctgaat

SEQ ID NO: 797021 - DNA, 69 bp, Artificial Sequence
  ENSG00000278535_15 (sequence is synthesized)
gcccagctaattgtatcgcctaacctcgtgatccgcctgccttggtctcccagagtgctgggattacag

SEQ ID NO: 797022 - DNA, 120 bp, Artificial Sequence
  ENSG00000278535_16 (sequence is synthesized)
acaggtgtgagccaccacgcccagctgatcttatgatttctttgagagaagtggggagtctgattttatgtgacacccccccactcccattcactaaaatgacagctccatgagggcaag

SEQ ID NO: 797023 - DNA, 120 bp, Artificial Sequence
  ENSG00000278535_17 (sequence is synthesized)
gctccatgagggcaagtattttatctgttttattctctggtatggcttgatcccataagcactgaaaagatagttattgaataaatgaaactttccagtacatgttggaagggtttttaa

SEQ ID NO: 797024 - DNA, 120 bp, Artificial Sequence
  ENSG00000278535_18 (sequence is synthesized)
aatgttttgaaactgtgcacaggccaaacccaactttcaggacatgggttttcaacttctggatggtatgatggggtgatagtagggtataaaagtatcctgagaagttgaaagcagtgt

SEQ ID NO: 797025 - DNA, 120 bp, Artificial Sequence
  ENSG00000278535_19 (sequence is synthesized)
gtgaatggggtgttcttttctccccacaatcctttcccatctgctgacagtagacttagcacctcacagatgcttgggcctggaaatgaagccatgaaaatgaagccctcagccttcttg

SEQ ID NO: 797026 - DNA, 120 bp, Artificial Sequence
  ENSG00000278535_20 (sequence is synthesized)
gagatcagagccatggtcctcacccacagcacatgggtctctaaacctggacctcaactcgcccatctgtaaaatgagggacttacattaaattcctacagctcctttcagcttgaacat

SEQ ID NO: 797027 - DNA, 120 bp, Artificial Sequence
  ENSG00000278535_21 (sequence is synthesized)
tatctgagtctattaggatcatcctatgaggcatcttctctttccctgcccctgataccctagacctgggagatttactcacctggtcccaggggatctatttctcccactctacctgcc

SEQ ID NO: 797028 - DNA, 120 bp, Artificial Sequence
  ENSG00000278535_22 (sequence is synthesized)
aggggctgagttctctgcctcacaagcccacattgccaagaagatgagaaacacggctggaaacctccctgtcctggcacccatctcttcctactgccatgaacaccaagacaggttcac

SEQ ID NO: 797029 - DNA, 120 bp, Artificial Sequence
  ENSG00000278535_23 (sequence is synthesized)
accaaaggtgttctgttcctcatggcaggctctgccacctgattaagagaaacatctaatctcctgctggttccctctcttcttaagaggagaggcctgaggacctgctgaaagctttat

SEQ ID NO: 797030 - DNA, 120 bp, Artificial Sequence
  ENSG00000278535_24 (sequence is synthesized)
ctctgcttgtcctccgggtgaggctaatgagtggggccaacgggtggggcagtgtaggcgctttacagcagacacgccttcagacctctgttccctgaagggtggggatgtgggggtcac

SEQ ID NO: 797031 - DNA, 120 bp, Artificial Sequence
  ENSG00000278535_25 (sequence is synthesized)
ctctgccagagggagtaggagtggcaagttacctgaccctctagagtctccgtgcctagtcttgtagatggaacccacgttaaaggaaggcatagaaaggagggtcaggccttctcttct

SEQ ID NO: 797032 - DNA, 120 bp, Artificial Sequence
  ENSG00000278535_26 (sequence is synthesized)
ccactcatctcaagggaggggatggggaaggagcagagagtagctgaggaaggtagggagaggctaggctgtgtgccggaggagagagatttgtaagccattttggtaaggattttgagc

SEQ ID NO: 797033 - DNA, 120 bp, Artificial Sequence
  ENSG00000278535_27 (sequence is synthesized)
agtttaggagggagcagggccagagactgtcacagagaagagaagagtagggtatttgggggaagaaatggaaatgattccctatggaattagagggtctgtgctactgttcatagagga

SEQ ID NO: 797034 - DNA, 120 bp, Artificial Sequence
  ENSG00000278535_28 (sequence is synthesized)
gatggccaagacagagtctcctgggtcaggagtgggtttgaagggtttccattcttgtttgcaggaacttggggggtcagccaggtgaggagctacctctgttatcaactgggggttgcg

SEQ ID NO: 797035 - DNA, 120 bp, Artificial Sequence
  ENSG00000278535_29 (sequence is synthesized)
gctttagggagaggggcatctcgtgtagaagacaagatgctctgtgcctgtggctggtctccggggggacctggacactgttttggaatgccacactgcccccttcccccctagcattct

SEQ ID NO: 797036 - DNA, 120 bp, Artificial Sequence
  ENSG00000278535_30 (sequence is synthesized)
gtggctccatcacttgctcagttgggccggagtggagacacctcattgccctccctggcctgcaggtgaacgtgctggccctcagcatctgcacacgggaagcctaccagtccatgaagg

SEQ ID NO: 797037 - DNA, 120 bp, Artificial Sequence
  ENSG00000278535_31 (sequence is synthesized)
agcggaatgtggacgatgggcacatcattaacatcaataggtgagggcaggtggccaatgggtaccactcacccaccaggctgggtaatgtgctgcagctcacctgacctctttggacct

SEQ ID NO: 797038 - DNA, 120 bp, Artificial Sequence
  ENSG00000278535_32 (sequence is synthesized)
cagtttccttggtgggaaaatacagatttaatacctgaatggcacaattatggtgagggaaagaataatgttgtcaagtaccagcccctggttggctggaatgggcagcttagccccttc

SEQ ID NO: 797039 - DNA, 120 bp, Artificial Sequence
  ENSG00000278535_33 (sequence is synthesized)
gaaccccacctcatggcacaaagagtactatgtacagtgtctgccactggggagccccagtctgaggggggacatggcctctgcctgccttgagatgtcccaatagaaccgtatcagtga

SEQ ID NO: 797040 - DNA, 120 bp, Artificial Sequence
  ENSG00000278535_34 (sequence is synthesized)
acatacagattagatggagagaattctgacattctgcaccaccaggagagtgcattctgtcgtcagcttagggatgagttccaggaaaaggagggttttccaaagctgtttgaataacca

SEQ ID NO: 797041 - DNA, 120 bp, Artificial Sequence
  ENSG00000278535_35 (sequence is synthesized)
aaattagattagtgagctgtaggatggccagtagaggtcccctttagaagtcttcccgatgggcatctgggtggtggggctgaccgggtacggcaggagcaccactggtctccctggaac

SEQ ID NO: 797042 - DNA, 120 bp, Artificial Sequence
  ENSG00000278535_36 (sequence is synthesized)
agcccatgttcagaatgtgccgctcagagctcctgggagtggactgggcacagaactgggtgctgctgctccaggcatggccctatgcagcccttcatttcctcatttcactgatccagg

SEQ ID NO: 797043 - DNA, 120 bp, Artificial Sequence
  ENSG00000278535_37 (sequence is synthesized)
agccaacgaccagacttagactttgagctgggagggggctgacctgagggaaagcaagggactgtgggaaaccaggtgcacagtggctggaaaccgggactctgggctcttctcttgaag

SEQ ID NO: 797044 - DNA, 120 bp, Artificial Sequence
  ENSG00000278535_38 (sequence is synthesized)
gccgcatgatcgtgagcgagtcactgaacctccctaagcctcggccttctcacttgtgaaaaggagatgatgagcttttcagggacacttttttgtaaaacgtttacctgacatatagga

SEQ ID NO: 797045 - DNA, 120 bp, Artificial Sequence
  ENSG00000278535_39 (sequence is synthesized)
aaggctctgtagatggtaggtatcattgtggtcactgccagtggcagcttcggagggaggaggccgctgccggatatcaggcagccatcactgtgaagctggggttctgtggcctccatc

SEQ ID NO: 797046 - DNA, 120 bp, Artificial Sequence
  ENSG00000278535_40 (sequence is synthesized)
ctctcccctcgacctccccaagacctggcaaagctcagcccctgagaaggccctctctgttggcccagtgcatctctccaggtgtggtggagacacaattcgccttcaaactccacgaca

SEQ ID NO: 797047 - DNA, 120 bp, Artificial Sequence
  ENSG00000278535_41 (sequence is synthesized)
aggaccctgagaaggcagctgccacctatgagcaaatgaaggtggggcctccctctgagcctggtgaagccactgactccctaaatgaaggcagagggaagctcggccttcagactccac

SEQ ID NO: 797048 - DNA, 120 bp, Artificial Sequence
  ENSG00000278535_42 (sequence is synthesized)
tcttccagcctttgtggctcctcctggagggttggggtggatgtgtggatgccacagagaagctcagtggtgggagggaatttgagtccattctgtccttgtctcaacccattcccctgg

SEQ ID NO: 797049 - DNA, 120 bp, Artificial Sequence
  ENSG00000278535_43 (sequence is synthesized)
ccccagaggaggggagcagggagccctgcagggccaggggagagtgtcacagctgcctcatgccttgtaccttccacagattggagacatccagatgaggcccacggagcaggtgaccta

SEQ ID NO: 797050 - DNA, 120 bp, Artificial Sequence
  ENSG00000278540_0 (sequence is synthesized)
cggcctggtgctgcacgcctgtcagccatcgcccgagccgccggcgtctcctcccgcccagcagttcctccacgcaggggctccggaatcgcccgaccgcacacgttgccaccctgaggt

SEQ ID NO: 797051 - DNA, 120 bp, Artificial Sequence
  ENSG00000278540_1 (sequence is synthesized)
ctttttggaagtggatatctactcagacagtaagaattataagagctgtaagagctcattttggaggaataatggatgaaccatctcccttggcccaacctctggagctgaaccagcact

SEQ ID NO: 797052 - DNA, 120 bp, Artificial Sequence
  ENSG00000278540_2 (sequence is synthesized)
ctcgattcataataggttctgtgtctgaagataactcagaggatgagatcagcaacctggtgaagttggacctactggaggagaaggagggctccttgtcacctgcttctgttggctcag

SEQ ID NO: 797053 - DNA, 120 bp, Artificial Sequence
  ENSG00000278540_3 (sequence is synthesized)
atacactctctgatttggggatctctagcctacaggatggcttggccttgcacataaggtccagcatgtctggcttgcacctagtaaagcagggccgagacagaaagaaaatagattctc

SEQ ID NO: 797054 - DNA, 120 bp, Artificial Sequence
  ENSG00000278540_4 (sequence is synthesized)
aacgagatttcactgtggcttctccagcagaatttgttactcgctttgggggaaataaagtgattgagaaggttcttattgctaacaatggcattgcagcagtgaaatgcatgcggtcta

SEQ ID NO: 797055 - DNA, 120 bp, Artificial Sequence
  ENSG00000278540_5 (sequence is synthesized)
tccgtaggtggtcttatgaaatgtttcgaaatgaacgtgcaattagattcgttgtcatggtcacacctgaagaccttaaagccaatgcagaatacattaagatggcagatcactatgtgc

SEQ ID NO: 797056 - DNA, 120 bp, Artificial Sequence
  ENSG00000278540_6 (sequence is synthesized)
cagtgcctggaggaccaaacaacaacaactatgcaaatgtggaattaattcttgatattgctaaaaggatcccagtacaagcagtgtgggctggctggggtcatgcttctgagaatccca

SEQ ID NO: 797057 - DNA, 120 bp, Artificial Sequence
  ENSG00000278540_7 (sequence is synthesized)
aactaccggaacttctcttgaaaaatggcattgccttcatgggtcctccaagccaggccatgtgggctttaggggataagattgcatcttccatagtggctcaaactgcaggtatcccaa

SEQ ID NO: 797058 - DNA, 120 bp, Artificial Sequence
  ENSG00000278540_8 (sequence is synthesized)
ctcttccctggagcggcagtggtcttcgtgtggactggcaggaaaatgatttttcaaaacgtatcttaaatgttccccaggagctatatgaaaaaggttatgtgaaagatgtggatgatg

SEQ ID NO: 797059 - DNA, 120 bp, Artificial Sequence
  ENSG00000278540_9 (sequence is synthesized)
ggctacaggcagctgaggaagttggatatccagtaatgatcaaggcctcagagggaggaggagggaagggaattagaaaagtcaacaatgcagatgacttccctaatctcttcagacagg

SEQ ID NO: 797060 - DNA, 120 bp, Artificial Sequence
  ENSG00000278540_10 (sequence is synthesized)
ttcaagctgaagttcctggatctcccatatttgtgatgagactagccaaacaatctcgtcatctggaggtgcagatcttagcggaccaatatggcaatgctatctctttgtttggtcgtg

SEQ ID NO: 797061 - DNA, 120 bp, Artificial Sequence
  ENSG00000278540_11 (sequence is synthesized)
attgctctgtacaacgcaggcatcagaagattattgaagaagcacctgctactattgctactccagcagtatttgaacacatggaacagtgtgcggtgaaacttgccaaaatggtgggtt

SEQ ID NO: 797062 - DNA, 120 bp, Artificial Sequence
  ENSG00000278540_12 (sequence is synthesized)
atgtgagtgctgggactgtggaatacctgtacagccaggatggcagcttctactttctggaattgaatcctcggctgcaggtagagcacccttgtacagagatggtggctgatgtcaatc

SEQ ID NO: 797063 - DNA, 120 bp, Artificial Sequence
  ENSG00000278540_13 (sequence is synthesized)
tccctgcagcacagctccagattgccatggggattcctctatatagaatcaaggatatccgtatgatgtatggggtatctccctggggtgattctcccattgattttgaagattctgcac

SEQ ID NO: 797064 - DNA, 120 bp, Artificial Sequence
  ENSG00000278540_14 (sequence is synthesized)
acgttccttgtccaaggggccatgttattgctgctcggatcactagtgaaaatccagatgagggttttaagcccagctcaggaacagttcaggagctaaatttccgcagcaataagaatg

SEQ ID NO: 797065 - DNA, 120 bp, Artificial Sequence
  ENSG00000278540_15 (sequence is synthesized)
tttggggatatttcagtgttgctgctgcagggggacttcatgaatttgctgattctcagtttggtcactgcttttcttggggagaaaacagagaagaggcaatttcaaacatggtggtgg

SEQ ID NO: 797066 - DNA, 120 bp, Artificial Sequence
  ENSG00000278540_16 (sequence is synthesized)
ctttgaaggagctgtctattcggggtgactttcgaactacagttgaatacctgatcaaattgttagagactgaaagctttcagatgaacagaattgatactggctggctggacagactga

SEQ ID NO: 797067 - DNA, 120 bp, Artificial Sequence
  ENSG00000278540_17 (sequence is synthesized)
tagcagaaaaagtacaggctgagcgacctgacaccatgttgggggttgtgtgtggtgccctccacgtggcagatgtgagcctgcggaatagcgtctctaacttccttcactccttagaaa

SEQ ID NO: 797068 - DNA, 120 bp, Artificial Sequence
  ENSG00000278540_18 (sequence is synthesized)
ggggtcaagtccttcctgctcatacacttctgaatacagtagatgttgaacttatctatgagggagtcaagtatgtacttaaggtgactcgacagtcccccaactcctatgtggtgatca

SEQ ID NO: 797069 - DNA, 120 bp, Artificial Sequence
  ENSG00000278540_19 (sequence is synthesized)
tgaatggctcatgtgtagaagtagatgtacatcggctgagtgacggtggactgctcttgtcctatgatggcagcagttatactacgtatatgaaagaggaagtggatagatatcgcatca

SEQ ID NO: 797070 - DNA, 120 bp, Artificial Sequence
  ENSG00000278540_20 (sequence is synthesized)
caattggcaataaaacctgtgtgtttgagaaggaaaatgacccatcggtgatgcgctcaccttctgctgggaagttaatccagtacattgtagaagatggaggtcatgtgtttgccggcc

SEQ ID NO: 797071 - DNA, 120 bp, Artificial Sequence
  ENSG00000278540_21 (sequence is synthesized)
agtgctatgctgagattgaggtaatgaagatggtaatgaccttaacagctgtggagtctggctgtatccattacgtcaagcgacctggagcagctcttgaccctggctgtgtactagcca

SEQ ID NO: 797072 - DNA, 120 bp, Artificial Sequence
  ENSG00000278540_22 (sequence is synthesized)
aaatgcaactggacaaccccagcaaggttcagcaggctgaacttcacacaggtagtctgccacggatccagagcacggcactcagaggcgagaaactccatcgagtgttccattatgtcc

SEQ ID NO: 797073 - DNA, 120 bp, Artificial Sequence
  ENSG00000278540_23 (sequence is synthesized)
tggataatctggtcaatgtaatgaatggatactgccttccagatcctttctttagcagcaaggtaaaagactgggtagagcgattgatgaaaaccctcagagatccctccctgcctctcc

SEQ ID NO: 797074 - DNA, 120 bp, Artificial Sequence
  ENSG00000278540_24 (sequence is synthesized)
tagaattgcaagatattatgaccagtgtgtctggccgcattccccccaatgtggagaagtctatcaagaaggaaatggctcagtatgctagcaacatcacatcagtcctctgtcagtttc

SEQ ID NO: 797075 - DNA, 120 bp, Artificial Sequence
  ENSG00000278540_25 (sequence is synthesized)
ccagccagcagattgcaaacatcctagatagccatgcagctacattgaaccggaaatctgaacgggaagtcttctttatgaatactcagagcattgttcagctggtacagaggtaccgaa

SEQ ID NO: 797076 - DNA, 120 bp, Artificial Sequence
  ENSG00000278540_26 (sequence is synthesized)
gtggcatccgaggccacatgaaggctgtggtgatggatctgctccggcagtacctgcgagtagagacacaattccagaatggtcactatgacaaatgtgtattcgccctccgagaagaga

SEQ ID NO: 797077 - DNA, 120 bp, Artificial Sequence
  ENSG00000278540_27 (sequence is synthesized)
ataaaagtgacatgaacactgtactgaactacatcttctctcacgctcaagtcaccaagaagaatcttctggtcacaatgcttattgatcagttgtgtggccgggaccctactctcactg

SEQ ID NO: 797078 - DNA, 120 bp, Artificial Sequence
  ENSG00000278540_28 (sequence is synthesized)
atgagctgctgaatattctcacagagctaactcaactcagtaagaccaccaatgccaaagtagcacttcgagcacgccaggttcttattgcctcccatttgccatcatatgagcttcgcc

SEQ ID NO: 797079 - DNA, 120 bp, Artificial Sequence
  ENSG00000278540_29 (sequence is synthesized)
ataaccaagtagagtctatcttcctatcagctattgacatgtatggacatcaattttgcattgagaacctgcagaaactcatcctatcagaaacatctatttttgatgtcctaccaaact

SEQ ID NO: 797080 - DNA, 120 bp, Artificial Sequence
  ENSG00000278540_30 (sequence is synthesized)
tcttctatcacagcaaccaagtagtgaggatggcagctctggaggtgtatgttcgaagggcttatattgcctatgaacttaacagcgtacaacaccgccagcttaaggacaacacctgtg

SEQ ID NO: 797081 - DNA, 120 bp, Artificial Sequence
  ENSG00000278540_31 (sequence is synthesized)
tggtggaattccagttcatgctgcccacatctcatccaaacagagggaacatccctacgctaaacagaatgtccttctcctccaacctcaaccactatggcatgacccatgtagctagtg

SEQ ID NO: 797082 - DNA, 120 bp, Artificial Sequence
  ENSG00000278540_32 (sequence is synthesized)
tcagcgatgtactgttggacaactcattcactccaccttgtcagcggatgggcggaatggtctcttttcggacttttgaagattttgtcaggatctttgatgaagtgatgggctgcttct

SEQ ID NO: 797083 - DNA, 120 bp, Artificial Sequence
  ENSG00000278540_33 (sequence is synthesized)
ctgactccccaccccagagtcccacattccctgaggcaggtcacacgtctctttatgatgaggataaggttcccagggatgaaccaattcacattctcaatgtggctatcaagactgact

SEQ ID NO: 797084 - DNA, 120 bp, Artificial Sequence
  ENSG00000278540_34 (sequence is synthesized)
gtgatattgaggatgacaggctggcagctatgttcagagaatttacccagcaaaataaagctaccctggttgaccatgggatccggcgccttactttcctggttgcacaaaaggatttca

SEQ ID NO: 797085 - DNA, 120 bp, Artificial Sequence
  ENSG00000278540_35 (sequence is synthesized)
gaaagcaggtcaactatgaggtggatcggagatttcatagagaattccctaaattttttacattccgagcaagggataagtttgaggaggatcgtatctatcgtcatctggagcctgctc

SEQ ID NO: 797086 - DNA, 120 bp, Artificial Sequence
  ENSG00000278540_36 (sequence is synthesized)
tggctttccagttagagctgaaccggatgagaaattttgacctcactgccattccatgtgctaatcacaagatgcacctgtatctcggggcagccaaggtggaagtgggcacagaagtga

SEQ ID NO: 797087 - DNA, 120 bp, Artificial Sequence
  ENSG00000278540_37 (sequence is synthesized)
cagactacaggttctttgttcgtgcaatcatcaggcattctgatctggtcaccaaggaagcttcttttgaatatctgcaaaatgaaggggagcggctactcctggaagccatggatgagt

SEQ ID NO: 797088 - DNA, 120 bp, Artificial Sequence
  ENSG00000278540_38 (sequence is synthesized)
tggaagttgcttttaacaatacaaatgtccgcactgactgtaaccacatcttcctcaactttgtgcccacggttatcatggacccatcaaagattgaggaatccgtgcggagcatggtaa

SEQ ID NO: 797089 - DNA, 120 bp, Artificial Sequence
  ENSG00000278540_39 (sequence is synthesized)
actggaaaagcaattcccatccgcctcttcctgacaaacgagtctggctattacttggatatcagcctatacaaggaagtgactgactccaggacagcacagatcatgtttcaggcatat

SEQ ID NO: 797090 - DNA, 120 bp, Artificial Sequence
  ENSG00000278540_40 (sequence is synthesized)
ggagacaaacagggaccactgcatggaatgttaatcaatactccatatgtgaccaaagacctgctgcaatcaaagaggttccaggcacaatccttagggacaacatacatatatgatatc

SEQ ID NO: 797091 - DNA, 120 bp, Artificial Sequence
  ENSG00000278540_41 (sequence is synthesized)
ccagagatgtttcggcagtccctgatcaaactctgggagtctatgtccactcaagcatttcttccatctccccctctgccttctgacatgctgacttacactgaactggtactggatgat

SEQ ID NO: 797092 - DNA, 120 bp, Artificial Sequence
  ENSG00000278540_42 (sequence is synthesized)
caaggtcagctggtccacatgaacaggcttccaggaggaaatgagattggcatggtagcttggaaaatgacctttaaaagtcctgaatatccagaaggccgagatatcattgttattggc

SEQ ID NO: 797093 - DNA, 120 bp, Artificial Sequence
  ENSG00000278540_43 (sequence is synthesized)
aatgacatcacataccgaattgggtcctttgggcctcaagaggatttgttatttctcagagcttccgaacttgctagggcagaaggtattccacgcatctatgtatcagccaacagtgga

SEQ ID NO: 797094 - DNA, 120 bp, Artificial Sequence
  ENSG00000278540_44 (sequence is synthesized)
gcaagaatcggactggcagaagaaattcgccatatgtttcatgtggcctgggtagatcctgaggatccttacaagggatacaggtatttatatctgactcctcaagattataagagagtc

SEQ ID NO: 797095 - DNA, 120 bp, Artificial Sequence
  ENSG00000278540_45 (sequence is synthesized)
agtgctctcaactctgtccattgtgaacacgtggaagatgaaggagaatccaggtacaagataacagatattattgggaaagaagagggaattggacccgagaaccttcgaggttctgga

SEQ ID NO: 797096 - DNA, 120 bp, Artificial Sequence
  ENSG00000278540_46 (sequence is synthesized)
atgattgctggagaatcctcattggcctataatgagatcattaccatcagcctggtgacgtgccgggccattgggattggggcttaccttgtccggctgggacagagaaccatccaggtt

SEQ ID NO: 797097 - DNA, 120 bp, Artificial Sequence
  ENSG00000278540_47 (sequence is synthesized)
gagaattctcacttaattctaacaggagctggagccctcaacaaagtcctcgggcgggaagtgtacacctccaataaccagctggggggcatccagattatgcacaacaatggggtgacc

SEQ ID NO: 797098 - DNA, 120 bp, Artificial Sequence
  ENSG00000278540_48 (sequence is synthesized)
cactgcactgtgtgtgatgactttgaaggggttttcactgtcctgcactggctgtcttacatgcccaagagcgtgcacagttcagttcctcttctgaactcaaaggatcctatagacaga

SEQ ID NO: 797099 - DNA, 120 bp, Artificial Sequence
  ENSG00000278540_49 (sequence is synthesized)
atcatcgagtttgttcccacaaagaccccatacgatcctcgatggatgctagcaggccgtcctcacccaacccaaaaaggtcagtggttgagtggcttttttgactatggatctttctca

SEQ ID NO: 797100 - DNA, 120 bp, Artificial Sequence
  ENSG00000278540_50 (sequence is synthesized)
gagattatgcagccctgggcacagactgtggtggttggtagagccaggctaggaggaatacctgtgggagttgttgctgtagaaacccgaacagtagaactaagtatcccagctgatcca

SEQ ID NO: 797101 - DNA, 120 bp, Artificial Sequence
  ENSG00000278540_51 (sequence is synthesized)
gcaaacctggattctgaagccaagataatccagcaggctggccaggtttggttcccagattctgcgtttaagacgtatcaggccatcaaggacttcaaccgggaagggctgcctctgatg

SEQ ID NO: 797102 - DNA, 120 bp, Artificial Sequence
  ENSG00000278540_52 (sequence is synthesized)
gtctttgccaactggagaggcttctctggtggaatgaaagatatgtacgaccaagtgctgaagtttggtgcttacattgtggatggcttgagggagtgctgccagcctgtgctggtttac

SEQ ID NO: 797103 - DNA, 120 bp, Artificial Sequence
  ENSG00000278540_53 (sequence is synthesized)
attcctccccaggctgagctgcggggtggctcctgggtggtgattgactcctccatcaacccccggcacatggagatgtatgctgaccgagaaagcaggggatctgttctggagccagaa

SEQ ID NO: 797104 - DNA, 120 bp, Artificial Sequence
  ENSG00000278540_54 (sequence is synthesized)
gggacagtagaaatcaaattccgcagaaaggatctggtgaaaaccatgcgtcgggtggacccagtctacatccacttggctgagcgattggggaccccagagctaagcacagctgagcgg

SEQ ID NO: 797105 - DNA, 120 bp, Artificial Sequence
  ENSG00000278540_55 (sequence is synthesized)
aaggagttggagaacaagttgaaggagcgggaggaattcctaattcccatttaccatcaggtagccgtgcagtttgctgacttgcacgacacaccaggccggatgcaggagaagggtgtt

SEQ ID NO: 797106 - DNA, 120 bp, Artificial Sequence
  ENSG00000278540_56 (sequence is synthesized)
attagcgatatcctggattggaaaacatcccgtaccttcttctactggcggctgaggcgtcttctgctggaggacctggtcaagaagaaaatccacaatgccaaccctgagctgactgat

SEQ ID NO: 797107 - DNA, 120 bp, Artificial Sequence
  ENSG00000278540_57 (sequence is synthesized)
ggccagattcaagccatgttaaggcgctggtttgtggaagtggaaggaacagtgaaggcttatgtttgggacaataataaggatctggcggagtggctagagaaacagctgacagaggag

SEQ ID NO: 797108 - DNA, 120 bp, Artificial Sequence
  ENSG00000278540_58 (sequence is synthesized)
gatggtgttcactcggtaatagaggaaaacatcaaatgcatcagcagagactacgtcctcaagcaaatccgcagcttggtccaggccaatccagaggttgccatggattccatcatccat

SEQ ID NO: 797109 - DNA, 120 bp, Artificial Sequence
  ENSG00000278540_59 (sequence is synthesized)
atgacgcagcacatatcacccactcagcgagcagaagtcatacggatcctctccacaatggattccccttccacgtaggaagagcttcctgcctgtccctgccctgtctctggagaaaag

SEQ ID NO: 797110 - DNA, 120 bp, Artificial Sequence
  ENSG00000278540_60 (sequence is synthesized)
ggctagagctgccttttacaactgtaaccactgtaatgagaaggcacaggagacccagcactggagtcaaatggcattttacttcctctcgtttcaggttatgcatgacatcctgggatg

SEQ ID NO: 797111 - DNA, 120 bp, Artificial Sequence
  ENSG00000278540_61 (sequence is synthesized)
taagatcacagaatccccctccagcccaccagtcacacctaccccattcagtatttattaccctggccaggcctagtcctccactccctgcacaggactgagaaggcaatgaaaggtaca

SEQ ID NO: 797112 - DNA, 120 bp, Artificial Sequence
  ENSG00000278540_62 (sequence is synthesized)
aacatgtaccatgaggtcttactaaccaaagtagggctgcccctcctgtcctgacagccccttggcctcccagcatggggaagcgtgaggagttgcccagcagtgagcagcccccctcac

SEQ ID NO: 797113 - DNA, 120 bp, Artificial Sequence
  ENSG00000278540_63 (sequence is synthesized)
tcctggccccatgagccgcagccacaggcagcagaggagggctaaggagaggaggaagcctcaagtccattgtttattaccccgactcttagcccagcacacagtaggcactggagagga

SEQ ID NO: 797114 - DNA, 120 bp, Artificial Sequence
  ENSG00000278540_64 (sequence is synthesized)
atgattcccagtttaaccacactacggtaccttttatgaagaaaaattagagcataaaatctactacaagctccataggaactcaaagatgagggcaaaactgtgagccaagaagcagag

SEQ ID NO: 797115 - DNA, 120 bp, Artificial Sequence
  ENSG00000278540_65 (sequence is synthesized)
aaagaaaatagaaccagttattcttgatttaggggacctcaaccttgggttcagtctctgaggacaaagggaaaggtagttgttggcctgcctctcgcctgcacgtcactgctggactag

SEQ ID NO: 797116 - DNA, 120 bp, Artificial Sequence
  ENSG00000278540_66 (sequence is synthesized)
ctgtcgcatgtggctgggagctgcaaggccagtgcttgaggggccccagcagttccacaggtggtgaagcctgagttggcagaggaggagccagaagagaactgccctttctgcactggt

SEQ ID NO: 797117 - DNA, 120 bp, Artificial Sequence
  ENSG00000278540_67 (sequence is synthesized)
ggaaactagttatttatgccatgtggagagccagtgagatagatagatagtctgtttgttttgaggacttggaaagttgttcctatgaagcctggagcttggatggttttgagaggttaa

SEQ ID NO: 797118 - DNA, 120 bp, Artificial Sequence
  ENSG00000278540_68 (sequence is synthesized)
tggtgcctccacactcactcttccctagttccaggattactgtcctagcagctaacggttctactctcttccccagagtgtagacaggcagcaggtctccccacagctctgaaaggaccc

SEQ ID NO: 797119 - DNA, 120 bp, Artificial Sequence
  ENSG00000278540_69 (sequence is synthesized)
tggtgacagctacaccctcagcaccaggagctggccttcctgatgagggaggcttccaggaaacacagaatccacatgaccttaagattatttacaactcagtcatggtgctgctgtcct

SEQ ID NO: 797120 - DNA, 120 bp, Artificial Sequence
  ENSG00000278540_70 (sequence is synthesized)
ccaggcttactggcccctcctgactggcatcaggggcttcctcaggtggtggagagagtttactttcaacaactagtttattcaagaaaagaacttactgattcctctgttcctaaagca

SEQ ID NO: 797121 - DNA, 120 bp, Artificial Sequence
  ENSG00000278540_71 (sequence is synthesized)
agagtggcaggtgatcagggctggtgtagcatccggttcctttagtgcagctaactgcatttgtcactgatgaccaaggaggaaatcactaagacatttgagaagcagtggtatgaacgt

SEQ ID NO: 797122 - DNA, 120 bp, Artificial Sequence
  ENSG00000278540_72 (sequence is synthesized)
tcttggacaagccacagttctgagccttaaccctgtagtttgcacacaagaacgagctccacctccccttcttcaggaggaatctgtgcggatagattggctggacttttcaatggttct

SEQ ID NO: 797123 - DNA, 120 bp, Artificial Sequence
  ENSG00000278540_73 (sequence is synthesized)
gggttgcaggtgggcactgtatggctgggtatggagcggacagcccccaggagtcagagcctcagcccggctgccctggtggaaggtacaggtgttcagcaccttcagaaaagggcataa

SEQ ID NO: 797124 - DNA, 120 bp, Artificial Sequence
  ENSG00000278540_74 (sequence is synthesized)
agtggtgggggacaattctcagtccaggaaaatgcattgaccattgctggctatttgcttacctagtaagaattggattcatttttgaccagattattcttctatgcttttttgcaataa

SEQ ID NO: 797125 - DNA, 120 bp, Artificial Sequence
  ENSG00000278540_75 (sequence is synthesized)
atcaaatcccacatatctacaagtggtatgaagtcctgcaccccccaggaggcctgtccaggcatgtcttcagaggcagggtgggttacactcatttacctcccctctccccaccaaatt

SEQ ID NO: 797126 - DNA, 120 bp, Artificial Sequence
  ENSG00000278540_76 (sequence is synthesized)
atgacacaaacgagtatgtttcctctctagaaccctgtaatgcctcctcccccatccccagagctccttactgtaggtcttaccctggacaaggattttttcaagttggaggcacagaac

SEQ ID NO: 797127 - DNA, 120 bp, Artificial Sequence
  ENSG00000278540_77 (sequence is synthesized)
atgagcaatctgacattcccacagcccctcaaacatgcaaggctactaaggcaggaggagtataaatgatggatattgaccaagacctgcttggacggagaccgccatattatctgttct

SEQ ID NO: 797128 - DNA, 120 bp, Artificial Sequence
  ENSG00000278540_78 (sequence is synthesized)
cttcgttcacaaaacagccttcacttgtctcagaatttgatggacacatactgtgatgagcaggagcttcagatgcactctttacacattttgttgaaataaacctctacatttgtagaa

SEQ ID NO: 797129 - DNA, 120 bp, Artificial Sequence
  ENSG00000278540_79 (sequence is synthesized)
gtggaggcccccgccgggtgctgagcgcccgccaccgccctcttggccttttcccggtccccgccgcgcgcctgctgctgtccccgtgcccgaggactgggaggatggggctgagccgct

SEQ ID NO: 797130 - DNA, 120 bp, Artificial Sequence
  ENSG00000278540_80 (sequence is synthesized)
gaggatggggctgagccgcttgcctgacttttgatccgaccagtaatcactttgcccgtgtggcgcgtggcccgttgcctgaggcttcctggcgcgtggggctgtttggtcccctccgga

SEQ ID NO: 797131 - DNA, 120 bp, Artificial Sequence
  ENSG00000278540_81 (sequence is synthesized)
gtgcggtgaggcgggccgagccgggactgcctgggtttggggataacgttcccatctccacccctgttgcagcaagggaaattgaggctgagggaactgggcccagggacggcgagccgt

SEQ ID NO: 797132 - DNA, 120 bp, Artificial Sequence
  ENSG00000278540_82 (sequence is synthesized)
ggcgcctctccagtccgggccccgaagggctgctcgtggatgaaccagactgattttaaggggtgaagagggtgcgtttcaatcagatgctcctggaacgtcgaaattgtcttctttgga

SEQ ID NO: 797133 - DNA, 120 bp, Artificial Sequence
  ENSG00000278540_83 (sequence is synthesized)
ctcaggccacagtcatttgctccttccaagaaatgaaaggaaaggaacatggagagaaaggggaaagtaatattttctgtgtgcctactatctaacaagctctgtgccagaagcttaaca

SEQ ID NO: 797134 - DNA, 120 bp, Artificial Sequence
  ENSG00000278540_84 (sequence is synthesized)
tgttggttacatcatttaatccaaaacaccaccttagaaggaccagacttatgaagtggccttcctgaggagattttctgaccttatggtatgaagttccttcaggctcttaattctgga

SEQ ID NO: 797135 - DNA, 120 bp, Artificial Sequence
  ENSG00000278540_85 (sequence is synthesized)
tgtcttatttttcttttatatcacaactggagccacagttgtgggcaaggcactgactttcttgatgaattctgtccatctgtaaagcagctatatatcccactggaggctttgcctctc

SEQ ID NO: 797136 - DNA, 120 bp, Artificial Sequence
  ENSG00000278540_86 (sequence is synthesized)
agagacaacgtgaagacggataagcaggcatcaggagcagagtggcctctcagcttccgccaagaacttcttacctgggcatgtatttctatcctattcactttttactctctggcgtgg

SEQ ID NO: 797137 - DNA, 120 bp, Artificial Sequence
  ENSG00000278540_87 (sequence is synthesized)
aacttcttcctaccaaactgtcatcctctgcacctctcctggccttcctcacaagtttgtaagcattaagaaggtgcgctgcatgcttcattaaattcctccttggaagggctgagttca

SEQ ID NO: 797138 - DNA, 120 bp, Artificial Sequence
  ENSG00000278540_88 (sequence is synthesized)
tagagggttgaagataatgaggacagatgaagaaatgtttgattgtgccatacttacagttgctgattttcaaggtccagcatgtctggcttgcacctagtaaagcagggccgagacaga

SEQ ID NO: 797139 - DNA, 120 bp, Artificial Sequence
  ENSG00000278540_89 (sequence is synthesized)
gaagtggataggtaagtggctgtttgaggtccatttgctggtcatcctgttagccttttctcttattagctactagctcttgggattttcccaggcttttcttggtactcatttgtagtt

SEQ ID NO: 797140 - DNA, 120 bp, Artificial Sequence
  ENSG00000278540_90 (sequence is synthesized)
gatgtggtggtctactctgatgtcaatcttgagggctagggtcttgctatgtcacccagcctggagtggaattgtgtgatcaagactcactgaagcctccaactcctgggctcaagcaat

SEQ ID NO: 797141 - DNA, 120 bp, Artificial Sequence
  ENSG00000278540_91 (sequence is synthesized)
gctttgcctctcagagacaacgtgaagacggataagcaggcatcaggagcagagtggcctctcagctggtcagattctccgaagaaggatcctctaggctgggcacggtggctcacacct

SEQ ID NO: 797142 - DNA, 120 bp, Artificial Sequence
  ENSG00000278540_92 (sequence is synthesized)
tcaaatccgtagagtctcacatttaactcatagaagaatcagatttcccctgctctctgtgtttgtttctagttttttccccaatgtcttgatttgggattggaaaacaaatggctagct

SEQ ID NO: 797143 - DNA, 120 bp, Artificial Sequence
  ENSG00000278540_93 (sequence is synthesized)
attcatttgatactggcttggtgtggaactggggcttttttttaaggtatccaggtgattgttgtgtacagccagcattcagattataggtgtaccctagataacataagttagggtggc

SEQ ID NO: 797144 - DNA, 120 bp, Artificial Sequence
  ENSG00000278540_94 (sequence is synthesized)
tgttgttgctgttactatcttggcacctttattattaatgggtcataaaataattcagctctattttatacactaaatatatcaactctataataaaatcctgtatgagatctggctgga

SEQ ID NO: 797145 - DNA, 120 bp, Artificial Sequence
  ENSG00000278540_95 (sequence is synthesized)
ggcagccaggagaggcagtggagcttttctccgttgactgtcagaagaaagtgactgttgttgaaaatgtttgctgcaactaaaggagagctgctaagatctactttctagttaaacaag

SEQ ID NO: 797146 - DNA, 120 bp, Artificial Sequence
  ENSG00000278540_96 (sequence is synthesized)
cttttatatttctccccggctcctctcagttcccttgggaaatcaactaattgtgtgtgtaagctaagtgtgtggaggagagaagatgcaaaaaggaagagaaaggtggggaaagaagga

SEQ ID NO: 797147 - DNA, 120 bp, Artificial Sequence
  ENSG00000278540_97 (sequence is synthesized)
aattgggaacaattagacaaaaagactatagtttgaggccatcaggagtattctagtctgactgaagccaggcagaaggcacagtatctcttgtcctcctgggttttaagcagctgcaac

SEQ ID NO: 797148 - DNA, 120 bp, Artificial Sequence
  ENSG00000278540_98 (sequence is synthesized)
aggaggaggaactgcggcttgtgtttacaaggccgaaatctgaagaaaaagcttccattcttttcccatcttgatatggagggttctccagaggaaaataaggaaatgagatattacatg

SEQ ID NO: 797149 - DNA, 120 bp, Artificial Sequence
  ENSG00000278540_99 (sequence is synthesized)
ggtgccgagtacctggggctgtcaaagcagctttccctagtctttctttctacttcagagttgtaaaaggctagctctgctgcatctacctttcccacagctgctccctgccagacctga

SEQ ID NO: 797150 - DNA, 120 bp, Artificial Sequence
  ENSG00000278540_100 (sequence is synthesized)
ctttgggcttcagaggcccaaattgaggcgcaatgatgagaggatgtggtggtctactctgatgtcaatcttgagggctagcttccgccaagaacttcttacctgggcatgtatttctat

SEQ ID NO: 797151 - DNA, 120 bp, Artificial Sequence
  ENSG00000278540_101 (sequence is synthesized)
tccagttcatgctgcccacatctcatccaaacaggtgagtttgaggtggtatgtgcacccgagccagccagaggtataccatgagaatcaaggggagtaatgtgtatgacaattccatgt

SEQ ID NO: 797152 - DNA, 120 bp, Artificial Sequence
  ENSG00000278540_102 (sequence is synthesized)
ttttttagttagaaatgtagggcaaaaaatgaacaatatgaaccaaaagagaagagccttttggtgcccacttctttgatctaaagagaaaaattatggtctaagtaagatgaaagttta

SEQ ID NO: 797153 - DNA, 120 bp, Artificial Sequence
  ENSG00000278540_103 (sequence is synthesized)
ggtgggggaagggtagaggtttaagttcaaaaatcaccacttatggtaaaaattaaatataaacaaaattatttgtgaaaattccttaagacaccatattaaagacaaattatttctcaa

SEQ ID NO: 797154 - DNA, 120 bp, Artificial Sequence; identical to SEQ ID NO: 751036
  ENSG00000278558_0 (sequence is synthesized)

SEQ ID NO: 797155 - DNA, 120 bp, Artificial Sequence; identical to SEQ ID NO: 751037
  ENSG00000278558_1 (sequence is synthesized)

SEQ ID NO: 797156 - DNA, 120 bp, Artificial Sequence; identical to SEQ ID NO: 751038
  ENSG00000278558_2 (sequence is synthesized)

SEQ ID NO: 797157 - DNA, 120 bp, Artificial Sequence; identical to SEQ ID NO: 751039
  ENSG00000278558_3 (sequence is synthesized)

SEQ ID NO: 797158 - DNA, 120 bp, Artificial Sequence
  ENSG00000278558_4 (sequence is synthesized)
tgcggaggcgaagccaggcagcgcagcctctgcaaggggaggcgcgcgaggcggcgcgggagcgcgcggagcgggtgcgcagaagactggaggaggcggagcgccacaaggaggacttgg

SEQ ID NO: 797159 - DNA, 120 bp, Artificial Sequence
  ENSG00000278558_5 (sequence is synthesized)
cagctgcaggagcagtgggaggagctgtcgagtcagctcttctacggaggggaaccgcagagccagaagagcacggagcagcaactcgcagcccaattggtgacgctgcagaatgaactg

SEQ ID NO: 797160 - DNA, 120 bp, Artificial Sequence; identical to SEQ ID NO: 751042
  ENSG00000278558_6 (sequence is synthesized)

SEQ ID NO: 797161 - DNA, 120 bp, Artificial Sequence
  ENSG00000278558_7 (sequence is synthesized)
tcagacgccaaggtgcctcccgcctctcctcccccagacctggggcggtgtgacgggcagcttcgcggagtgcagtacagcaccgagtcgctcatggaggagatggccagggcggaccga

SEQ ID NO: 797162 - DNA, 120 bp, Artificial Sequence; identical to SEQ ID NO: 751044
  ENSG00000278558_8 (sequence is synthesized)

SEQ ID NO: 797163 - DNA, 120 bp, Artificial Sequence
  ENSG00000278558_9 (sequence is synthesized)
ctgttggaccccggcgccgtctccgcgtggctctggagcctcacctcggagacgacgctgcgccgcctgcgctacacgctgtccccgctgctggagctgcgcgctaacgggctgctgcca

SEQ ID NO: 797164 - DNA, 120 bp, Artificial Sequence; identical to SEQ ID NO: 751046
  ENSG00000278558_10 (sequence is synthesized)

SEQ ID NO: 797165 - DNA, 120 bp, Artificial Sequence
  ENSG00000278558_11 (sequence is synthesized)
tgaggaagagtcctagaatggggctggacccagggtggggtgaggcagggcgggcggaagggggcgggatccgggggtggggtgaggtaggaccggcggagaggtcggcaccgccccagg

SEQ ID NO: 797166 - DNA, 120 bp, Artificial Sequence
  ENSG00000278558_12 (sequence is synthesized)
accccgtccgcaggagcagcacagcaggcagctgcaggagcagtgggaggagctgtcgagtcaggtacgtgcaggagatgggagggcctgtctcttggttcctctcggaagtcctgccct

SEQ ID NO: 797167 - DNA, 120 bp, Artificial Sequence
  ENSG00000278558_13 (sequence is synthesized)
cctcccccagacctggggcggtaagtctcccaacccaccgccaggacgcctccccgaggcctcagtccgcactctcacccgctccaggaggtgcaggtgaaggtgatggaggctgcggag

SEQ ID NO: 797168 - DNA, 120 bp, Artificial Sequence
  ENSG00000278558_14 (sequence is synthesized)
gagctggacgcctggcagagtggccgggaactgtaagggagttgggcctgcgggcgcggcggggcactgtggggccgggctgggctcccacctgcatgcctgtccccgcaggtgtgacgg

SEQ ID NO: 797169 - DNA, 120 bp, Artificial Sequence
  ENSG00000278570_0 (sequence is synthesized)
agaaatctcctcaagccagagcctgtgctgtgaggggcttcgggaccttggggcagctcctgagttcagacagagttcaggaagggagacaggggcacagagagacagaggttcatggac

SEQ ID NO: 797170 - DNA, 120 bp, Artificial Sequence
  ENSG00000278570_1 (sequence is synthesized)
tgaggcaaaggctgggccaggctcagcaacccaggcctcccgcaggcaggcagaggctgccctgtaacccatggagaccagaccaacagctctgatgagctccacagtggctgcagctgc

SEQ ID NO: 797171 - DNA, 120 bp, Artificial Sequence
  ENSG00000278570_2 (sequence is synthesized)
gcctgcagctggggctgcctccaggaaggagtctccaggcagatggggcctgggggaggatcccacaggcgtgagcccctcgctccagtgccgcgtgtgcggagacagcagcagcgggaa

SEQ ID NO: 797172 - DNA, 120 bp, Artificial Sequence
  ENSG00000278570_3 (sequence is synthesized)
gcactatggcatctatgcctgcaacggctgcagcggcttcttcaagaggagcgtacggcggaggctcatctacaggtgccaggtgggggcagggatgtgccccgtggacaaggcccaccg

SEQ ID NO: 797173 - DNA, 120 bp, Artificial Sequence
  ENSG00000278570_4 (sequence is synthesized)
caaccagtgccaggcctgccggctgaagaagtgcctgcaggcggggatgaaccaggacgccgtgcagaacgagcgccagccgcgaagcacagcccaggtccacctggacagcatggagtc

SEQ ID NO: 797174 - DNA, 120 bp, Artificial Sequence
  ENSG00000278570_5 (sequence is synthesized)
caacactgagtcccggccggagtccctggtggctcccccggccccggcagggcgcagcccacggggccccacacccatgtctgcagccagagccctgggccaccacttcatggccagcct

SEQ ID NO: 797175 - DNA, 120 bp, Artificial Sequence
  ENSG00000278570_6 (sequence is synthesized)
tataacagctgaaacctgtgctaagctggagccagaggatgctgatgagaatattgatgtcaccagcaatgaccctgagttcccctcctctccatactcctcttcctccccctgcggcct

SEQ ID NO: 797176 - DNA, 120 bp, Artificial Sequence
  ENSG00000278570_7 (sequence is synthesized)
ggacagcatccatgagacctcggctcgcctactcttcatggccgtcaagtgggccaagaacctgcctgtgttctccagcctgcccttccgggatcaggtgatcctgctggaagaggcgtg

SEQ ID NO: 797177 - DNA, 120 bp, Artificial Sequence
  ENSG00000278570_8 (sequence is synthesized)
cgaggcctctgctgccggtggtgcccagggccggctcacgctggccagcatggagacgcgtgtcctgcaggaaactatctctcggttccgggcattggcggtggaccccacggagtttgc

SEQ ID NO: 797178 - DNA, 120 bp, Artificial Sequence
  ENSG00000278570_9 (sequence is synthesized)
ctgcatgaaggccttggtcctcttcaagccagagacgcggggcctgaaggatcctgagcacgtagaggccttgcaggaccagtcccaagtgatgctgagccagcacagcaaggcccacca

SEQ ID NO: 797179 - DNA, 120 bp, Artificial Sequence
  ENSG00000278570_10 (sequence is synthesized)
ccccagccagcccgtgaggtttgggaaattgctcctgctcctcccgtctttgaggtttatcactgcggaacgcatcgagctcctctttttccgcaagaccatagggaatactccaatgga

SEQ ID NO: 797180 - DNA, 120 bp, Artificial Sequence
  ENSG00000278570_11 (sequence is synthesized)
gaagctcctttgtgatatgttcaaaaactagtgggggtggaggtgaaatgtttccaagcactctggaaaacaatctactgaaacgaaacatttgcctactctttgccccagcaattcctc

SEQ ID NO: 797181 - DNA, 120 bp, Artificial Sequence
  ENSG00000278570_12 (sequence is synthesized)
gtaggtgtgtgtacccagcagaaatgcccaccgaaagatattgtaagaatattcatagcagctttattcataatagccccaaactgtatattgatggtaggatgaattaacaagttgtgg

SEQ ID NO: 797182 - DNA, 120 bp, Artificial Sequence
  ENSG00000278570_13 (sequence is synthesized)
tatattcatataatgaaaaataatttaaaaagaatgaattacggatacatgtggcaacacaggtaaacttcacagacataaaagttgaatgaaagaagccaggccgaagttccatttatg

SEQ ID NO: 797183 - DNA, 120 bp, Artificial Sequence
  ENSG00000278570_14 (sequence is synthesized)
cagagttcaggaacaggcaagactaattgacaataatagaagttggaatagtggttacttctgggtggtgggggattgatacagagggggctcatgggagccctctggtgtaccagaaat

SEQ ID NO: 797184 - DNA, 120 bp, Artificial Sequence
  ENSG00000278570_15 (sequence is synthesized)
ccagaaatgttgattttgatctgggcagtggtttcacaaatgtattcatacgtaataattcattgagctgtgcactttattttgttagacctcaataaaaaagtaaaaaaaaaaaacaaa

SEQ ID NO: 797185 - DNA, 120 bp, Artificial Sequence
  ENSG00000278570_16 (sequence is synthesized)
cagcagcagagttaagtagtattgctttaattgcaacaagctgagctaatgtgggaagaatgcagtagagtggcacagaagaatgctaacccgaaactctaagcctgttccctggaatct

SEQ ID NO: 797186 - DNA, 120 bp, Artificial Sequence
  ENSG00000278570_17 (sequence is synthesized)
tccatctggatggaggagagaaagttgacctggagtgaggttcaatgtaaggacaagatctgcacccggagaagctctctctcggagagcacaggcggcctgaggagtcaaaacaggtgg

SEQ ID NO: 797187 - DNA, 120 bp, Artificial Sequence
  ENSG00000278570_18 (sequence is synthesized)
cctgtggagtcagcacaggcagcctggaggaggtgaggaactgaagtttggacagattgagtcactttctcagggacacatggctggccggtgatggagaaggcgtgagcccctcgctcc

SEQ ID NO: 797188 - DNA, 120 bp, Artificial Sequence
  ENSG00000278570_19 (sequence is synthesized)
agcacaagggtctcagttcaacagcatacagccaacatctatggtgtcccaggcacagtgccaggccccgggagtggggaccaagatgtacataagacaaagctactgccttctagagac

SEQ ID NO: 797189 - DNA, 120 bp, Artificial Sequence
  ENSG00000278570_20 (sequence is synthesized)
aaccggcagtgacctcactgaagacaaaaactgccctagccaggtactgagggttgcatgaatctgcaggagacagagatccccttgcatgggaaacataaagcagaattgggagggact

SEQ ID NO: 797190 - DNA, 120 bp, Artificial Sequence
  ENSG00000278570_21 (sequence is synthesized)
ttgtggagacagggctggacttgaaaggaagaagaagtctaaaagaaaacatcatttgcaaagggagagaggggcaagcatgatatgttgttagaacaggagcccactttgaaggtataa

SEQ ID NO: 797191 - DNA, 120 bp, Artificial Sequence
  ENSG00000278570_22 (sequence is synthesized)
caggttcctgccagtgagaaatggggagaataagccagaaaagtaccctaggaccagcccgttcaggactttgaatgccagccaaaggccacgtctgacttgggaggcagagggcagcta

SEQ ID NO: 797192 - DNA, 120 bp, Artificial Sequence
  ENSG00000278570_23 (sequence is synthesized)
ctgcaggtttccgagcagagggtcatacacagggctggacctcacgcagactggcatggccatgggtccagaggatactactgggaaggggatggcagctactgccaccttccagatggt

SEQ ID NO: 797193 - DNA, 120 bp, Artificial Sequence
  ENSG00000278570_24 (sequence is synthesized)
tccatggagttctgatctttgggcatggccaggggaagcagaagggagactctaggagttgaaatgggtcagacccggtgtttgggtgaaggtaaggaatgagggaagaggagctctttg

SEQ ID NO: 797194 - DNA, 120 bp, Artificial Sequence
  ENSG00000278588_0 (sequence is synthesized)
atgcctgaaccagctaagtcagctcccgccccgaagaagggctccaagaaggcggtgaccaaggcacagaagaaggatggcaagaagcgcaagcgcagccgcaaggagagctattccgtg

SEQ ID NO: 797195 - DNA, 120 bp, Artificial Sequence
  ENSG00000278588_1 (sequence is synthesized)
caggtccaccccgacaccggcatctcgtccaaggctatggggattatgaactccttcgtcaacgacattttcgagcgcattgcaggcgaggcttcccgcctggcgcattataacaagcgc

SEQ ID NO: 797196 - DNA, 120 bp, Artificial Sequence
  ENSG00000278588_2 (sequence is synthesized)
tcgaccatcacttccagggagatccaaacggctgtgcgcctgctgctacccggggagctggccaaacacgcggtgtcggagggcaccaaggcggtcaccaagtacaccagctccaagtaa

SEQ ID NO: 797197 - DNA, 89 bp, Artificial Sequence
  ENSG00000278599_0 (sequence is synthesized)
gtcatctgagcacatccagcgcatcgaccgggacgtaagcgggacattaaggaagcatatattcttcagggatcgatacggaaccaagc

SEQ ID NO: 797198 - DNA, 120 bp, Artificial Sequence
  ENSG00000278615_0 (sequence is synthesized)
cggcgctgagcggaagtacggaccgtgaactggagtggaatcgcgactatgggagctccggggggaaagatcaaccggccccgaacggagctgaagaagaagctgttcaaacgccggcgg

SEQ ID NO: 797199 - DNA, 120 bp, Artificial Sequence
  ENSG00000278615_1 (sequence is synthesized)
gtgttgaatcgggagcggcgtctgaggcaccgggtggtcggggctgtgatagaccaagggctgatcacgcggcaccacctcaagaagcgggcgtccagtgcacgtgccaacattacactg

SEQ ID NO: 797200 - DNA, 120 bp, Artificial Sequence
  ENSG00000278615_2 (sequence is synthesized)
aagacagccatggaagtggaagccccttcaaagccagccaggactagtgaaccacagctcaaaaggcaaaagaagacaaaagccccccaggatgtagaaatgaaggaccttgaagatgag

SEQ ID NO: 797201 - DNA, 120 bp, Artificial Sequence
  ENSG00000278615_3 (sequence is synthesized)
agctaaacctcttccactagaagattctcaactggagccagccttcagactcagtggttgtttcagaggactttgacaaaagcaaggccccttttcactctccagatttcctcctaccta

SEQ ID NO: 797202 - DNA, 120 bp, Artificial Sequence
  ENSG00000278615_4 (sequence is synthesized)
atggcctactgacctcccctagagggatgtctttgggagggaagaaggtacagaagaaagattggagaagggcctctctagcagtcaactccatttgtaataaagccctagcactctgag

SEQ ID NO: 797203 - DNA, 120 bp, Artificial Sequence
  ENSG00000278615_5 (sequence is synthesized)
ggaatcgcgactatgggagctccggggggaaagatcaaccggccccgaacggtgactgtgtgggggccgcgactttgtttcctcaagcgttcctgagcccttttatctcgcacgagatgg

SEQ ID NO: 797204 - DNA, 120 bp, Artificial Sequence
  ENSG00000278615_6 (sequence is synthesized)
gatcagtgaggggccggggctgcctggtggaggggccccgggtcgcggcgagcccactccatctgattcgcatctttctccccggcaggagctgaagaagaagctgttcaaacgccggcg

SEQ ID NO: 797205 - DNA, 120 bp, Artificial Sequence
  ENSG00000278615_7 (sequence is synthesized)
tgaggctgggacagaggtgggtgaggggaatcctggatttatttgggataatacttccttcttccctttactcagtggaagccccttcaaagccagccaggactagtgaaccacagctca

SEQ ID NO: 797206 - DNA, 120 bp, Artificial Sequence
  ENSG00000278619_0 (sequence is synthesized)
gaacccggaagcgagggacccacgtgggagcctgggagcgggtggtcgtagctcggtagtccagttgtgggtaatcggggctgtttgttcctgtccgagagagctcggcggagacggctg

SEQ ID NO: 797207 - DNA, 120 bp, Artificial Sequence
  ENSG00000278619_1 (sequence is synthesized)
tcgagtacccttcacctcggtgttgggagcctgggagcgaactgcggcgcgggttaccgctcccggggacgcagcaaggggcatcgagtccctggcgggagctgcgccatggcattgctc

SEQ ID NO: 797208 - DNA, 120 bp, Artificial Sequence
  ENSG00000278619_2 (sequence is synthesized)
tcgaccgtccggggcgcgacctggggtcgcctcgtcacccgtcatttctcccatgcagcgcggcatggggagcggcctggtggggaggagctaagccgcttgctgctggatgacctggtg

SEQ ID NO: 797209 - DNA, 120 bp, Artificial Sequence
  ENSG00000278619_3 (sequence is synthesized)
ccgacctctcggctggagcttctgtttggcatgaccccgtgtctcctggctctgcaggccgcccgccgctctgtggcccggctcctgctccaggcgggtaaagctgggctgcaggggaag

SEQ ID NO: 797210 - DNA, 120 bp, Artificial Sequence
  ENSG00000278619_4 (sequence is synthesized)
cgggccgagctgctccggatggccgaggcgcgggacattccagttctgcggcccagacggcagaaactggacacaatgtgccgctaccaggtccaccagggtgtctgcatggaggtgagc

SEQ ID NO: 797211 - DNA, 120 bp, Artificial Sequence
  ENSG00000278619_5 (sequence is synthesized)
ccgctgcggccccggccttggagagaggccggggaggcgagcccaggcgacgacccccagcagttgtggctcgtcctcgatgggatccaggatccccggaattttggggctgtgctgcgt

SEQ ID NO: 797212 - DNA, 120 bp, Artificial Sequence
  ENSG00000278619_6 (sequence is synthesized)
tccgcacacttcctcggagtggataaggtcatcaccagccggagaaacagctgcccgctcactccagtagtcagcaagtccagcgcgggggctatggaggtgatggacgtgttctccact

SEQ ID NO: 797213 - DNA, 120 bp, Artificial Sequence
  ENSG00000278619_7 (sequence is synthesized)
ggctggctcgtggccggcacggtgggctgcccaagcacagaggatccccagtcctccgagatccccatcatgagttgcttggagttcctctgggaacggcctactctccttgtgctgggg

SEQ ID NO: 797214 - DNA, 120 bp, Artificial Sequence
  ENSG00000278619_8 (sequence is synthesized)
aatgagggctcaggtctatcccaggaggtgcaggcctcctgccagcttctcctcaccatcctgccccggcgccagctgcctcctggacttgagtccttgaacgtctctgtggctgcagga

SEQ ID NO: 797215 - DNA, 120 bp, Artificial Sequence
  ENSG00000278619_9 (sequence is synthesized)
attcttcttcactccatttgcagccagaggaagggtttccccacagagggggagagaaggcagcttctccaagacccccaagaaccctcagccaggtctgaagggctcagcatggctcag

SEQ ID NO: 797216 - DNA, 120 bp, Artificial Sequence
  ENSG00000278619_10 (sequence is synthesized)
cacccagggctgtcttcaggcccagagaaagagaggcaaaatgagggctgacgtggactgtccacagtgttcatgtgctggagtcagggacggccgcacctgcctccgccggctccagtg

SEQ ID NO: 797217 - DNA, 120 bp, Artificial Sequence
  ENSG00000278619_11 (sequence is synthesized)
tgcggggagcctctgcctgagtgtgcaccaggcccatgtttattgaccacagtctgggggggggggaaggggactgcggtggacaccagaggaagctgtttcctgttgtgatgttggacc

SEQ ID NO: 797218 - DNA, 120 bp, Artificial Sequence
  ENSG00000278619_12 (sequence is synthesized)
tgtagtaggacatggtgatttgttaatttccatgggaagccatgatggcctagcatggagggaatctgttcccaggccctgcctggaagttgagggaaagtttagacatctgcagagagg

SEQ ID NO: 797219 - DNA, 120 bp, Artificial Sequence
  ENSG00000278619_13 (sequence is synthesized)
caggcagcccagcccaggggacccgttcctcttgaaccagtcattgcctgtggcaaatgtgtgtatgagaatgtggggggtggagggcggggccctgatgtggagtagacagtgcgcacc

SEQ ID NO: 797220 - DNA, 120 bp, Artificial Sequence
  ENSG00000278619_14 (sequence is synthesized)
tcaggcccacacacggccccgccctggggccttgagcgcaggcctcatctttctgtgccgcgggactccgcacctacctcacagggttgttgtgaggctcaaataaaacatcactcagca

SEQ ID NO: 797221 - DNA, 120 bp, Artificial Sequence
  ENSG00000278637_0 (sequence is synthesized)
atgtctggacgtggtaagggcgggaagggtttgggtaaggggggtgccaagcgccaccgcaaggtgttgcgtgacaacatccagggcatcaccaagccggccatccggcgtctggcccgg

SEQ ID NO: 797222 - DNA, 120 bp, Artificial Sequence
  ENSG00000278637_1 (sequence is synthesized)
aacgtgatccgtgacgctgtcacctatacggagcacgccaagcgcaagacagtcactgccatggacgtggtctacgcgcttaagcgccagggacgcaccctttatggctttggcggttaa

SEQ ID NO: 797223 - DNA, 120 bp, Artificial Sequence
  ENSG00000278662_0 (sequence is synthesized)
gcgttccattggtgccctggttacgccacctgtggctcagttgcacagctgcctggtaggtgactggaggcattgagcagtgctcactggtatttcgctgatgtggccccaaccccgcct

SEQ ID NO: 797224 - DNA, 120 bp, Artificial Sequence
  ENSG00000278662_1 (sequence is synthesized)
ggtatttcgctgatgtggccccaaccccgcctccctccccaccccgcgatgtcagaaaaaacacaacaggggaaattggccgcagccaagaaaaagttaaaagcatattggcagaggaag

SEQ ID NO: 797225 - DNA, 120 bp, Artificial Sequence
  ENSG00000278662_2 (sequence is synthesized)
ggtggttaccactcacctggggattcagcaacaggtatctacggggagggccgtgcatcctctactaccctgcaggatctggagagccagtaccaagaactagcagtggccctggattca

SEQ ID NO: 797226 - DNA, 120 bp, Artificial Sequence
  ENSG00000278662_3 (sequence is synthesized)
ggagagccagtaccaagaactagcagtggccctggattcaagctccgcaataatcagtcaactcactgaaaacatcaattcactggttcgcacatctaaggaggagaagaagcatgagat

SEQ ID NO: 797227 - DNA, 120 bp, Artificial Sequence
  ENSG00000278662_4 (sequence is synthesized)
acatctggtacagaagcttgggaggagcttgttcaaactcaaaaaccagacggctgaacccctggccccagagcccccagcagggccatctaaggtggagcagctacaagatgagaccaa

SEQ ID NO: 797228 - DNA, 86 bp, Artificial Sequence
  ENSG00000278662_5 (sequence is synthesized)
ggctacgtgaacaggaggagaggctatgtgaacaggaggagaggctaagctgccagggcaggagaggctgctggaagaggtggaga

SEQ ID NO: 797229 - DNA, 60 bp, Artificial Sequence
  ENSG00000278662_6 (sequence is synthesized)
gaggtggaggagctcctggagcaggagaggcttcggcaacaggatgagaggctgtggcag

SEQ ID NO: 797230 - DNA, 120 bp, Artificial Sequence
  ENSG00000278662_7 (sequence is synthesized)
gcaggagaggcttcggcaacaggatgagaggctgtggcagcaggagactctgcgggagctggagaggctgcgggagctggagaggctgcgggagctggagaggatgctggagctggggtg

SEQ ID NO: 797231 - DNA, 120 bp, Artificial Sequence; identical to SEQ ID NO: 722993
  ENSG00000278662_8 (sequence is synthesized)

SEQ ID NO: 797232 - DNA, 120 bp, Artificial Sequence
  ENSG00000278662_9 (sequence is synthesized)
tgaagagccaagaggctccgagtctgcagcagcagccagaccagtacctggagccccagtcccacaaggagcttggatgtgcggacaagcagggtggactccccaggagcacccaggctt

SEQ ID NO: 797233 - DNA, 120 bp, Artificial Sequence
  ENSG00000278662_10 (sequence is synthesized)
gagtggagaagctgttggtacaggagaggcggcaggaggagcagaagaggctgcatgccattcttttcgggctgcggagaacagggagctaaacatcaccatcatctaagagcgggtcaa

SEQ ID NO: 797234 - DNA, 120 bp, Artificial Sequence
  ENSG00000278662_11 (sequence is synthesized)
tcaagaaattgaaaaaaaaaaaaacaaaacatttaaggggttaatatcctacacaattcatttacttcatttgaatgttagagccacttatgtttatttgtgtttctaatttatagttta

SEQ ID NO: 797235 - DNA, 78 bp, Artificial Sequence
  ENSG00000278662_12 (sequence is synthesized)
tttaaatttatttgtaaaaagttaaatgagagtgggtctttctctcatgttcactctggcatcttttagcattttttt

SEQ ID NO: 797236 - DNA, 120 bp, Artificial Sequence
  ENSG00000278662_13 (sequence is synthesized)
ggtctttctctcatgttcactctggcatcttttagcatttttttaatttgataattataggacgttagcatgcatatcgagtttgcccttatgtggtgggagttcaaacacacaaagacc

SEQ ID NO: 797237 - DNA, 120 bp, Artificial Sequence
  ENSG00000278662_14 (sequence is synthesized)
gtatgcacacaactgttcttgctggtttgggataggctgccatgcttttttaatgttagtacagcctgtatattcattacggaattcagataaaatttccttatgttctgctgttatgtt

SEQ ID NO: 797238 - DNA, 120 bp, Artificial Sequence
  ENSG00000278662_15 (sequence is synthesized)
ttccttatgttctgctgttatgtttgatcgaatcctaatcacagtgagctcttcattagctcaatatgtggtttgccctcaagtgcgcggtctattactttgtaatatgccactgtgagt

SEQ ID NO: 797239 - DNA, 120 bp, Artificial Sequence
  ENSG00000278662_16 (sequence is synthesized)
ggatgggagtaataacattttggggaggtttttaaatctcccagaagaggaaagtggcctgctttggcaggtgtgtgcaggatagaatatgtttcatttgttccggtgccaagaatgagc

SEQ ID NO: 797240 - DNA, 81 bp, Artificial Sequence
  ENSG00000278662_17 (sequence is synthesized)
ggaaagtggcctgctttggcaggtgtgtgcaggatagaatatgtttcatttgttccggtgccaagaatgagcgctgtacta

SEQ ID NO: 797241 - DNA, 79 bp, Artificial Sequence
  ENSG00000278662_18 (sequence is synthesized)
ttgtactcttttttgatgacctactgtggatgtggaaaaccttttctagctgagagcatttatatctacaatacatttt

SEQ ID NO: 797242 - DNA, 74 bp, Artificial Sequence
  ENSG00000278662_19 (sequence is synthesized)
cacaaaagggcactggttggcgttctccttaccctggaacaggcatatacaggctctagtcaagaatgaattcg

SEQ ID NO: 797243 - DNA, 81 bp, Artificial Sequence
  ENSG00000278662_20 (sequence is synthesized)
ttcatggagcttatctgaggctagaagatggattttaccatctagacctctctggctaatagctagtcttcaaccatctga

SEQ ID NO: 797244 - DNA, 120 bp, Artificial Sequence
  ENSG00000278662_21 (sequence is synthesized)
ctagacctctctggctaatagctagtcttcaaccatctgacataggaatttacttcttttccttgaatggagaacactttaaaaataataacaaacattattataaactaatatatgtga

SEQ ID NO: 797245 - DNA, 120 bp, Artificial Sequence
  ENSG00000278662_22 (sequence is synthesized)
agttttagtagacagtattatactacatttgaaaatcaaggagcagtttatgcaacgtaaaatgtttacaaactgcagcgcaatctactgtttgtgactgtcaaagtgtcatgaggaaag

SEQ ID NO: 797246 - DNA, 120 bp, Artificial Sequence
  ENSG00000278662_23 (sequence is synthesized)
ctgcagcgcaatctactgtttgtgactgtcaaagtgtcatgaggaaagtgtctatacaatcacagagttatatttcctcacaaagttctttacgaagagtgaaatatgtttttatacctc

SEQ ID NO: 797247 - DNA, 73 bp, Artificial Sequence
  ENSG00000278662_24 (sequence is synthesized)
tcagtttcagttagaggcatattttgtgtaatatttatggcttaaaatggactaaaggtcctgttcttgcctt

SEQ ID NO: 797248 - DNA, 120 bp, Artificial Sequence
  ENSG00000278662_25 (sequence is synthesized)
ttactttaactccattttaaaccctcgggctagaaatcgtaccactgttaattagccacgttatttggtctaacagtttttgtttatcattctgaaactgagcttatctaatacattgat

SEQ ID NO: 797249 - DNA, 89 bp, Artificial Sequence
  ENSG00000278662_26 (sequence is synthesized)
cttcacttttaccctgacacgtataaatgactaggaatgaccttcagatagcgtttagcaactgtaaccaatctgacaataatgtgttc

SEQ ID NO: 797250 - DNA, 120 bp, Artificial Sequence
  ENSG00000278662_27 (sequence is synthesized)
atcacatactggcatatttaagctgaatgtcagtctgaaaaataaatgtactatattaactcaaataccactctctgtgtaggtattttgtcatatgtttaagaaaaagctaaagagaat

SEQ ID NO: 797251 - DNA, 120 bp, Artificial Sequence
  ENSG00000278662_28 (sequence is synthesized)
ggaaatcctatgacaataactcaagtctttcttcaaagtgcatgcagtctcttgcagtacctcattcagccaagtatttgttctcttcctcattcagtataaggcagctttcaatttgct

SEQ ID NO: 797252 - DNA, 120 bp, Artificial Sequence
  ENSG00000278662_29 (sequence is synthesized)
tagaaggcaatattagaaggttagagttcagcagaaagagagaattttaaaatgtgagtttgactgaataaatttgaatttctgtaggaagtaaagaatcaaaatacctatttaaagact

SEQ ID NO: 797253 - DNA, 120 bp, Artificial Sequence
  ENSG00000278662_30 (sequence is synthesized)
aatcaaaatacctatttaaagactgcaatatatgataattatttttaaagtaatagattaaacctgataggttttcctgaaatgaaaaacaatcagttctaaaaccaaagctgattttta

SEQ ID NO: 797254 - DNA, 120 bp, Artificial Sequence
  ENSG00000278662_31 (sequence is synthesized)
aaagaaatgccaattccagtccaaagctgtatttgccaagttttcttagaacgacttttaccgatttatgaattcttatacacagaatgcatgatggaaatactgatttttgtctaaagt

SEQ ID NO: 797255 - DNA, 120 bp, Artificial Sequence
  ENSG00000278662_32 (sequence is synthesized)
cacagaatgcatgatggaaatactgatttttgtctaaagtggcattattgactgcttctgtgatgctactgtaatgtaataaattattagattgtttcaaggtgctgttttgcctaaaaa

SEQ ID NO: 797256 - DNA, 120 bp, Artificial Sequence
  ENSG00000278662_33 (sequence is synthesized)
gcccaaggggcagtagagggtaattgttaagattgtagatggactgttgggtactggttaagaattctggatttgaatcctgcctctccgtctgctaagaattgattagggattgattag

SEQ ID NO: 797257 - DNA, 80 bp, Artificial Sequence
  ENSG00000278662_34 (sequence is synthesized)
ttgaatcctgcctctccgtctgctaagaattgattagggattgattagcatatgatttagggcaagttgcttgaggtctt

SEQ ID NO: 797258 - DNA, 120 bp, Artificial Sequence; identical to SEQ ID NO: 793779
  ENSG00000278674_0 (sequence is synthesized)

SEQ ID NO: 797259 - DNA, 120 bp, Artificial Sequence; identical to SEQ ID NO: 793780
  ENSG00000278674_1 (sequence is synthesized)

SEQ ID NO: 797260 - DNA, 120 bp, Artificial Sequence; identical to SEQ ID NO: 793781
  ENSG00000278674_2 (sequence is synthesized)

SEQ ID NO: 797261 - DNA, 120 bp, Artificial Sequence; identical to SEQ ID NO: 793782
  ENSG00000278674_3 (sequence is synthesized)

SEQ ID NO: 797262 - DNA, 120 bp, Artificial Sequence; identical to SEQ ID NO: 793783
  ENSG00000278674_4 (sequence is synthesized)

SEQ ID NO: 797263 - DNA, 120 bp, Artificial Sequence; identical to SEQ ID NO: 793784
  ENSG00000278674_5 (sequence is synthesized)

SEQ ID NO: 797264 - DNA, 120 bp, Artificial Sequence
  ENSG00000278674_6 (sequence is synthesized)
tcggagctctgggacccctcagaggcctggatgcaggccaactacgatctgctgtccgcttttgaggccatgacctcccaggcaaacccagaagcactctgcgcgccagcgctccaggag

SEQ ID NO: 797265 - DNA, 120 bp, Artificial Sequence; identical to SEQ ID NO: 656952
  ENSG00000278674_7 (sequence is synthesized)

SEQ ID NO: 797266 - DNA, 120 bp, Artificial Sequence; identical to SEQ ID NO: 793787
  ENSG00000278674_8 (sequence is synthesized)

SEQ ID NO: 797267 - DNA, 120 bp, Artificial Sequence; identical to SEQ ID NO: 656954
  ENSG00000278674_9 (sequence is synthesized)

SEQ ID NO: 797268 - DNA, 120 bp, Artificial Sequence; identical to SEQ ID NO: 656955
  ENSG00000278674_10 (sequence is synthesized)

SEQ ID NO: 797269 - DNA, 120 bp, Artificial Sequence; identical to SEQ ID NO: 656956
  ENSG00000278674_11 (sequence is synthesized)

SEQ ID NO: 797270 - DNA, 120 bp, Artificial Sequence; identical to SEQ ID NO: 656957
  ENSG00000278674_12 (sequence is synthesized)

SEQ ID NO: 797271 - DNA, 120 bp, Artificial Sequence
  ENSG00000278677_0 (sequence is synthesized)
atgtctggacgtggcaagcagggcggcaaggctcgcgccaaggccaaaacccgctcctctagagctgggctccaatttcctgtaggacgagtgcaccgcctgctccgcaagggcaactac

SEQ ID NO: 797272 - DNA, 120 bp, Artificial Sequence
  ENSG00000278677_1 (sequence is synthesized)
ctggcggcggtgctggagtacctaactgccgagatcctggagctggcgggcaacgcagcccgcgacaacaaaaagacccgcatcatcccgcgccacttgcagctggccatccgcaacgac

SEQ ID NO: 797273 - DNA, 120 bp, Artificial Sequence
  ENSG00000278677_2 (sequence is synthesized)
gaggagctcaacaagctgcttggtaaagttaccatcgctcagggcggtgttctgcctaacatccaggccgtactgctccccaagaagactgagagccaccacaaagctaagggcaagtaa

SEQ ID NO: 797274 - DNA, 120 bp, Artificial Sequence
  ENSG00000278685_0 (sequence is synthesized)
ccaccaccagcaaacaaggggcagcgtggaggagtggacacaatgtctgagggagcttaccagcgcctctgggagtcctcccacgcgaccctgcaggagctgctggaccaagagcagctt

SEQ ID NO: 797275 - DNA, 120 bp, Artificial Sequence
  ENSG00000278685_1 (sequence is synthesized)
ctgctcgaacctgcgcccgaccgggagcggcagtccttccagtacaggctcgcatcgctctacctgcactacctggggctgctgcgccgcttcgacaccgtctatgaccagatggtgcag

SEQ ID NO: 797276 - DNA, 120 bp, Artificial Sequence
  ENSG00000278685_2 (sequence is synthesized)
ccgcagaagcggcggctgctgcgacgcctgctggacggcgtggcgggccgcgtgctggagctcaaggacgagctggtgcgcgccgacctgtgtgagaaccactgcctggaccgcgtgctg

SEQ ID NO: 797277 - DNA, 120 bp, Artificial Sequence
  ENSG00000278685_3 (sequence is synthesized)
caggatttcaagctcaccccagctgacctggaggttccaatccccaaatacttcctgctggagcagtccaccactgtgcgggagcgagggctgatactggccgagatcctgtccagactg

SEQ ID NO: 797278 - DNA, 120 bp, Artificial Sequence
  ENSG00000278685_4 (sequence is synthesized)
gagccagtgtcctcccagaagagctttacaggaatgcaccggactgaggccataattctagtgcaaaaggcagagcgggcgaggcaaggccggcttcgagccaccttcatgcgagagatt

SEQ ID NO: 797279 - DNA, 120 bp, Artificial Sequence
  ENSG00000278685_5 (sequence is synthesized)
cgaagagatgaggagcaggatgggaggattcgggaggatggatggcacaagttcagtcagggccaagcagctgtcaccatacagaaggtgtggaaaggctatctgcagaggaaacgcact

SEQ ID NO: 797280 - DNA, 120 bp, Artificial Sequence
  ENSG00000278685_6 (sequence is synthesized)
cagcaggaccggcgaatggagatggagttcattggcatgctcccctcacccaaccaggtagagcacctgagcatcatctcccagccatgcctcgtggaggatgtccagaggctccgccag

SEQ ID NO: 797281 - DNA, 120 bp, Artificial Sequence
  ENSG00000278685_7 (sequence is synthesized)
atggagaaagaggaggagttccgggcagcaatggtgaaggcccatgattctctggtagagacagaggggcctgacatgaaggagaaaatgaaggagcaaatccgacagtggtttatcgag

SEQ ID NO: 797282 - DNA, 120 bp, Artificial Sequence
  ENSG00000278685_8 (sequence is synthesized)
tgccatgaccttactggccggttccctgattatccagatgcgtcttcaggtggatcctactcaatctttgcagacaaaacgccagaacaggtgagaatggaactggaaatgcagatgcaa

SEQ ID NO: 797283 - DNA, 120 bp, Artificial Sequence
  ENSG00000278685_9 (sequence is synthesized)
gagaacagaaaaaaggaacaagagaagagcaaggaaaaaggaaaggatgaaaaagagaagaagaaaggaaaggaagaaaaggccaagaagggggaagtggatgcggtgttgcaagtgttg

SEQ ID NO: 797284 - DNA, 120 bp, Artificial Sequence
  ENSG00000278685_10 (sequence is synthesized)
tcagaattatgactccgagaccctccgggaggagaagaggaaagaggtggagctggagatccggatacaggtggatgagctgatgcgtcaggagctgaggaagctccgtctggctgtgga

SEQ ID NO: 797285 - DNA, 120 bp, Artificial Sequence
  ENSG00000278685_11 (sequence is synthesized)
caaggaggaagaaagacccctgagggctccaaagaaaacacctgggaagaaaactgggaaaaagaaggaaaaagatctgacctcagacaggtctgtggagtctctgtacgaagagcttgt

SEQ ID NO: 797286 - DNA, 120 bp, Artificial Sequence
  ENSG00000278685_12 (sequence is synthesized)
tatttctggccttctaaggaagagtgagtcagtagcattgaaagactacataggtgacttcctgtatcttggatccactctgagtttggtgaagaagttgcccatgccatccctgtttga

SEQ ID NO: 797287 - DNA, 120 bp, Artificial Sequence
  ENSG00000278685_13 (sequence is synthesized)
catacgacagaatgtggctttgtatgcggtccttcggcttggctccccggatatccacatcatggccccactcatccgctccatcctcctggtgggcccctctggcatggggaagaagat

SEQ ID NO: 797288 - DNA, 120 bp, Artificial Sequence
  ENSG00000278685_14 (sequence is synthesized)
gctggtcaaggcagtgtgcacagaaactggcgccaacctgttcgacctgtcgccggaaaacctgctgggcaaatatcctggcaggaatggggcacagatgatggtgcatatagtctttaa

SEQ ID NO: 797289 - DNA, 120 bp, Artificial Sequence
  ENSG00000278685_15 (sequence is synthesized)
ggtagcccgactcctacagccctctgtgatttggattggaaatgctgagaagaatttctataagaagacccccaaagaagacaaggagatggacccaaagcggataaagaaggacctcac

SEQ ID NO: 797290 - DNA, 120 bp, Artificial Sequence
  ENSG00000278685_16 (sequence is synthesized)
caaggccttgcggctgctgactcccggagaccgtgtgatgctgattgggacaacctcccggccacagctggccgagatgcggggtctgtgccgggtctacgagcggatcctcttcatgcc

SEQ ID NO: 797291 - DNA, 120 bp, Artificial Sequence
  ENSG00000278685_17 (sequence is synthesized)
ccggcctgactacgcatcccgctatgtgctctggaagcgtatgatagaggcccggggcatccagccgacccagcacctggacatcagtgccctagccaaggtctccgatggctacacgcc

SEQ ID NO: 797292 - DNA, 120 bp, Artificial Sequence
  ENSG00000278685_18 (sequence is synthesized)
gggtcacattctccaagccatccaatcggtgctgagtgagcggcggttcctgcaactgtccaagcggcccctggtggcctctgagttcctgggacaactggtgaagctggatccagtgta

SEQ ID NO: 797293 - DNA, 120 bp, Artificial Sequence
  ENSG00000278685_19 (sequence is synthesized)
cagggaggaggaggagtccctgaaggactggtacttcaagaccccactgggcaagaagagcatgaaacacaggatggaccagttggaggccgaggaggccaagctggacaaggagaagaa

SEQ ID NO: 797294 - DNA, 120 bp, Artificial Sequence
  ENSG00000278685_20 (sequence is synthesized)
gaaaaggaagtgatggctaaggcttgcgggcacctgagattagtggcgtgggacagggcagtggcccaagggtaaagggatggggcagaggcataaatgcccagatgacttgggaacaaa

SEQ ID NO: 797295 - DNA, 120 bp, Artificial Sequence
  ENSG00000278685_21 (sequence is synthesized)
aggagaagaggaaagaggtggagctggagatccggatacaggtcacaaagacctcagcgggggatcttcggtttgaattccatctgggggcttctccgcatgttgaaggctgttaagaac

SEQ ID NO: 797296 - DNA, 120 bp, Artificial Sequence
  ENSG00000278705_0 (sequence is synthesized)
atgtctggtcgcggcaaaggcggtaaaggtttgggtaagggaggtgccaagcgtcaccgaaaagtgctgcgggataacatccaaggcatcaccaaaccggccattcggcgccttgctagg

SEQ ID NO: 797297 - DNA, 120 bp, Artificial Sequence
  ENSG00000278705_1 (sequence is synthesized)
atccgggacgccgtgacctacacggagcacgccaagcgcaagactgtcactgccatggatgtggtttacgcgctcaagcgtcaaggacgcactctgtacggcttcggcggttaatctttt

SEQ ID NO: 797298 - DNA, 120 bp, Artificial Sequence
  ENSG00000278705_2 (sequence is synthesized)
cgtcagttttcttccaatggcccttttcagggccgcccactccctctcagaaagagctgtgattgtattctttcggatggtaacatctcaatggctttactcggctattctgcctagtat

SEQ ID NO: 797299 - DNA, 120 bp, Artificial Sequence
  ENSG00000278803_0 (sequence is synthesized)
atggactcggagtacgtcctatgctcttggaaaggccgactatggccagcaaaggttttgtgcacacgtgggacttcaccaaaaacgaagcctgaaaaggcgatttctctagaagttcaa

SEQ ID NO: 797300 - DNA, 120 bp, Artificial Sequence
  ENSG00000278803_1 (sequence is synthesized)
atcctcgcagtagatgaaaaaatcaaggtgaaaagcacagacgtgaagaccccaactaagtttgagatggaagacattgccgcctctgcagcagcacagacgaagctcggtgccccactc

SEQ ID NO: 797301 - DNA, 120 bp, Artificial Sequence
  ENSG00000278803_2 (sequence is synthesized)
agagagaagatggggtacagaggaacccttcgggtggccctggagattctgaaagagagaacaaatctgggtggaggaaggaaaccacatgaactagagagcaccacaccctctcagctt

SEQ ID NO: 797302 - DNA, 120 bp, Artificial Sequence
  ENSG00000278803_3 (sequence is synthesized)
tctcaaaaggtgcccgaaaagccagccagttctgtccctcgtgaagatgactggagatgcaaaggcgacctaaggaggagtcttgggaagagggaaaacccaagctcaccgacggtccct

SEQ ID NO: 797303 - DNA, 120 bp, Artificial Sequence
  ENSG00000278803_4 (sequence is synthesized)
tcagagagtaagcgtgccctgcgggatgacaggtcgcaggagcccacagccattgcccctactccaggcgccctgcccggggacaggtcaggggcgcccagggccattgcccctactcca

SEQ ID NO: 797304 - DNA, 120 bp, Artificial Sequence
  ENSG00000278803_5 (sequence is synthesized)
ggagccatgctcagtggcaggtcacgggcacgcagggccattgcccctacgccaagcgccctgcgaggttacaggtcttgggcgcacagggccattgcccctaccccaggctgcctgtac

SEQ ID NO: 797305 - DNA, 120 bp, Artificial Sequence
  ENSG00000278803_6 (sequence is synthesized)
agtgacaggtcacgggcgcacagggccattgcccctgctcgaggcaccaagcatggtggcaggtcatgggcatgcaggtccattgcccccaaaccaggctccctgtgcggggacaggtca

SEQ ID NO: 797306 - DNA, 120 bp, Artificial Sequence
  ENSG00000278803_7 (sequence is synthesized)
caggcgagcagggccattgaccctaccttaggcgccaggcgcggtggcaggtcacgggcccacagagccattgcccctactccaggctccctgtgcggcaacaggtcacgggcttgcgga

SEQ ID NO: 797307 - DNA, 120 bp, Artificial Sequence
  ENSG00000278803_8 (sequence is synthesized)
gccattgcccttactccaggtgtcctgtgcggtgtcaggtcacgggtgccaaaggacattacccctactccaggcgccctgcgaggttacaagtcatgggtgtgcagggccattgcccct

SEQ ID NO: 797308 - DNA, 120 bp, Artificial Sequence
  ENSG00000278803_9 (sequence is synthesized)
actccaggtgccctgcgcggagacaggtcagcagcacgcacggccgttgtccgtactccaggtgcccttggcagggacaggtcacgggcacgcagcgccattgcttctactccagggacc

SEQ ID NO: 797309 - DNA, 120 bp, Artificial Sequence
  ENSG00000278803_10 (sequence is synthesized)
ctgcagggaaacaggtcatctgtgtccaaggccattgcccctactccaggtgccctgcgtggagacaggtcagcagcgcgcacggcctttgtccctactccaggcgcccttcacagggac

SEQ ID NO: 797310 - DNA, 120 bp, Artificial Sequence
  ENSG00000278803_11 (sequence is synthesized)
aggtcacgggcccgcagcgccattgcttctactccagggaccctgcggggaaacacgtcatctgcgtgcaaggccattgcccctactccaggtgccctgcgaggttacaagtcatgggcg

SEQ ID NO: 797311 - DNA, 120 bp, Artificial Sequence
  ENSG00000278803_12 (sequence is synthesized)
cgcagggccattgcacctaacccaggtgcctggcgcggttacaggtcaacgacaggcaccgccattgcacctaatctgggcgccctgggcggcaacaggtcagcggcacgcacggacatt

SEQ ID NO: 797312 - DNA, 120 bp, Artificial Sequence
  ENSG00000278803_13 (sequence is synthesized)
gcccctactccaggcgccctgcgaggttacaggtcatggacgcgcagggccattgcccctactccaggcactctgagcagttacaggtcacggtcccgcaggaccattgcctctactcca

SEQ ID NO: 797313 - DNA, 120 bp, Artificial Sequence
  ENSG00000278803_14 (sequence is synthesized)
gccaccctgcgtggtgaaaagtcacgggcgcacaccagccttgcccccaccccaggtgctttgcgcggtgacggttcacgagcacgcagggccattgtccctactacatgcccattgtgc

SEQ ID NO: 797314 - DNA, 120 bp, Artificial Sequence
  ENSG00000278803_15 (sequence is synthesized)
gagatatggtcacgggtgggcataggcattgcccctattgcagatgccctgcgccgtgacaggtcaccagtgcgcagggccattgcccctactccaggcactctgagcggttacaggtca

SEQ ID NO: 797315 - DNA, 120 bp, Artificial Sequence
  ENSG00000278803_16 (sequence is synthesized)
cgggcacgcacggccattgcccctactccaggcaccctgcgaggttacaggccacggtcccgcagggccattgcctctactccagccaccctgcgtggtgaaaagtcacgggcgcacacc

SEQ ID NO: 797316 - DNA, 120 bp, Artificial Sequence
  ENSG00000278803_17 (sequence is synthesized)
agccttgcccccgccccaggtgctttgcgcggtgacggttcacgagcacgcagggccattgtccctactacatgcccattgtgcgagatatggtcacgggtgggcataggcattgcccct

SEQ ID NO: 797317 - DNA, 120 bp, Artificial Sequence
  ENSG00000278803_18 (sequence is synthesized)
attgcagatgccctgcgccgtgacaggccaccagtgcgcagggccattgctcctactccaggcgccctgcgctgtgacaggtcacgagagctcacagccattgatcctactccaggagct

SEQ ID NO: 797318 - DNA, 120 bp, Artificial Sequence
  ENSG00000278803_19 (sequence is synthesized)
ctgtgcagtgacaggtcaggggcaagcagggccattgcccccactccaggcactttgtgcagtgaaaggtcccgggtgcgcagggccattgcccctactccatgcgcactgtgcgggaag

SEQ ID NO: 797319 - DNA, 120 bp, Artificial Sequence
  ENSG00000278803_20 (sequence is synthesized)
gggtcacaggtgggcatgggcgttgcccctactccaggtgcactgcgcagggacaggtcacaggcaggcagggccattgcacctactccatccgcactgttcagggttgggtcacgggtg

SEQ ID NO: 797320 - DNA, 120 bp, Artificial Sequence
  ENSG00000278803_21 (sequence is synthesized)
ggcacaggcattgcccttcctgcaggtgccctgcaccgtgacaggtcaccggtgcgcagggccgttgctcccactccaggcaccctgcactgtgacgggtcacgaaaatgcacggccact

SEQ ID NO: 797321 - DNA, 120 bp, Artificial Sequence
  ENSG00000278803_22 (sequence is synthesized)
ggttctactccaggagccctgcccggcgacaggtcaggggtgagcaaggccactgcccctgctccaggcgccttgtgcagtgaaaggtcccgcgcacgcaggagcattgcccctactcca

SEQ ID NO: 797322 - DNA, 120 bp, Artificial Sequence
  ENSG00000278803_23 (sequence is synthesized)
tgtttactgtgcggggacaggtcatgggtgggtatgggcattgcacctactccaggcgccctgcttggtggcaaatcaaggaaatgcagggccattgctattactcccggcgccctgcgt

SEQ ID NO: 797323 - DNA, 120 bp, Artificial Sequence
  ENSG00000278803_24 (sequence is synthesized)
ggtggcaggtcacagaaacgcagggtcgttgctcctactccagaggccctgcacggtgacgggtcatggacttatatggccattgctcctactccaggtgccctgcacggtgacagctca

SEQ ID NO: 797324 - DNA, 120 bp, Artificial Sequence
  ENSG00000278803_25 (sequence is synthesized)
gcctttccttctactccaggcaccctgcatggtgatgcctctcacgcacacatggccattgctcctactccaggcacgatgcgcggtgacagctcaacagcgcgcacggccactgcccca

SEQ ID NO: 797325 - DNA, 120 bp, Artificial Sequence
  ENSG00000278803_26 (sequence is synthesized)
tctccaggggccctgcgaggtgacaggtcatggaaacgcaaggccattgcttctactccaggtgccctgcatggtaacaggtctgacaggtcacggaaatgcaaggccattgcttctact

SEQ ID NO: 797326 - DNA, 120 bp, Artificial Sequence
  ENSG00000278803_27 (sequence is synthesized)
ccaggcaccctgcacgttgagaggtcaccagcactcagggccattgttccaactccaggcaccctgggccgtgacagctcaccagggcgcacgtccattattccttctccaggcgccctg

SEQ ID NO: 797327 - DNA, 120 bp, Artificial Sequence
  ENSG00000278803_28 (sequence is synthesized)
catggtgacaggtcaccagcacacctggacattgcttctactccaggcgccctgcacggtgacagctctcaggcacacacggccattgctcctactccaggcaccatgcgcggtgacagc

SEQ ID NO: 797328 - DNA, 120 bp, Artificial Sequence
  ENSG00000278803_29 (sequence is synthesized)
tcaacagctcgcatggccattgccccatctgcaggggccctgagaggtgacaggtcatggaaacgcaaggccattgcttctactccaggtgccctgcgtggtaacaggtctgacaggtca

SEQ ID NO: 797329 - DNA, 120 bp, Artificial Sequence
  ENSG00000278803_30 (sequence is synthesized)
cggaaacgcaaagccattgcttctactccaggtgccctgctcggtaacaggtctgacaggtcacggaaacacaaggccattgctcctactccaggtgccccgcgcattgacaggtcacca

SEQ ID NO: 797330 - DNA, 120 bp, Artificial Sequence
  ENSG00000278803_31 (sequence is synthesized)
gcatgcagggccattgctcctactccaggcgccctgggtgatgacagctcaacggccattgcccctactccagggaccccgcgaggtgacagttcgccagcaaacacggccattgcttct

SEQ ID NO: 797331 - DNA, 120 bp, Artificial Sequence
  ENSG00000278803_32 (sequence is synthesized)
actccaggcgccctgcacggtgacacctctcagacacacaaggccattgctcctactccaggtgacctgggcggtggcagctcatcagcgcacaaggccatcactccttctccaggtgcc

SEQ ID NO: 797332 - DNA, 120 bp, Artificial Sequence
  ENSG00000278803_33 (sequence is synthesized)
ctgcatggtgacaggtcaccagcacacacggccattgcttctactccaggagccctgcatggtgacagctcccaggtgcacacgaccattgctccaactccaggcgccctgcgcgatgac

SEQ ID NO: 797333 - DNA, 120 bp, Artificial Sequence
  ENSG00000278803_34 (sequence is synthesized)
aagtcatggaaacgcaaggccattgctcccactccaggcaccctgcactgtgacagctcacgaacgtgcaccgcctttgctcctactccaggcgccctgcatgctgacaggtcaccagcg

SEQ ID NO: 797334 - DNA, 120 bp, Artificial Sequence
  ENSG00000278803_35 (sequence is synthesized)
caccaggacattactcttacttcaggcgccctgcactgtgacagctcaagagaaagcagggccgttgctcctattctaggcgccctgcaccgtgtcggctctcaggcacacaaggctatt

SEQ ID NO: 797335 - DNA, 120 bp, Artificial Sequence
  ENSG00000278803_36 (sequence is synthesized)
gcttctactccaggccctctgcgcggtgacagctcaccatttcacacagccattgcacctatgccaggggccctgcatggtaccaggtcatggaaacgcgaagccatttctcagactcca

SEQ ID NO: 797336 - DNA, 120 bp, Artificial Sequence
  ENSG00000278803_37 (sequence is synthesized)
tttgtcaccctgtgtggtgacagctcaggagaacgcatggccattgctcctactccaggcgccctgcacagtgacaggtcacagacacatacggccatcgatcctactccaagtgtcctg

SEQ ID NO: 797337 - DNA, 120 bp, Artificial Sequence
  ENSG00000278803_38 (sequence is synthesized)
cgcagtgacagctcaccagcgtgcatggccattgatcctactccaggtgccctgggcagggacaggtcacaggcgctcatggccattgctcctactccagttggaatgcaagcacatgtg

SEQ ID NO: 797338 - DNA, 120 bp, Artificial Sequence
  ENSG00000278803_39 (sequence is synthesized)
ttgcaaagcccccgagcctgccaggattccctgacgctttcgcggcatgtttgtgagaaaaaggggaagaaaagggcaaacgcctcgactcttatgtccctgcctcccacagtaacggag

SEQ ID NO: 797339 - DNA, 120 bp, Artificial Sequence
  ENSG00000278803_40 (sequence is synthesized)
gagggtgcatctctgcctccaggtctcaccagccctgcaccccccgctctgaaggaagagacacaggacagccgcccgaagaaggccctggctgcatccccggaaagttctcccttctcg

SEQ ID NO: 797340 - DNA, 120 bp, Artificial Sequence
  ENSG00000278803_41 (sequence is synthesized)
ggaaacattcaggaccccggagagggtgcctggaagccaggctgggcaggtatggctgcatcctctgggtcccgtcagcacaggctgccttcttcactccggcttgccaatagaaaaagg

SEQ ID NO: 797341 - DNA, 120 bp, Artificial Sequence
  ENSG00000278803_42 (sequence is synthesized)
aagcgtccaggtccagattttcagaggagacctcaaggacctcagacgcctggtgacgctaagcttgctaatcctgtcaccaccattcaaagggctggcggtaaacaggatgggcagccc

SEQ ID NO: 797342 - DNA, 120 bp, Artificial Sequence
  ENSG00000278803_43 (sequence is synthesized)
cccagccttgcttttccacaggagccacatcccatcgaaaggggaacgatggtctggttcaaatttcaagatcatccgttttggccagcagtggtcaagagtgtcagcaacacagacaag

SEQ ID NO: 797343 - DNA, 120 bp, Artificial Sequence
  ENSG00000278803_44 (sequence is synthesized)
accgcgagggtgctcctgcttgaggccaacctgcaccatggaaagcggggcattcaagttcctcttcgaaggctgaagcacctggattgtaaggagaaagagaaactgctgaagagagcc

SEQ ID NO: 797344 - DNA, 120 bp, Artificial Sequence
  ENSG00000278803_45 (sequence is synthesized)
cagaaggcctacaagcaaagcgtcaactggtgcttctcactgatctcccactacagagaaggactggtccggggttctttccggggctctttcctggactattatgccgcagacatcagc

SEQ ID NO: 797345 - DNA, 120 bp, Artificial Sequence
  ENSG00000278803_46 (sequence is synthesized)
tacccaatcaggagagccatccaagagggagacctgcagattgactttccaaaggtgaattatggcgacctggaagactgggaggaggagacctccctgggcgggaagaggccttgcaag

SEQ ID NO: 797346 - DNA, 120 bp, Artificial Sequence
  ENSG00000278803_47 (sequence is synthesized)
aaaatcctcccggaccggatgagggcctcttgggaccgagacaaccagaagctcgtggacttcatcgtgaggagaaagggggccgacccccaccttctggacatcttgcaaggcaggaag

SEQ ID NO: 797347 - DNA, 120 bp, Artificial Sequence
  ENSG00000278803_48 (sequence is synthesized)
cagtccaggtggctgaccgcgtttctgaagccacacagggatttgcactgcattgaaacatacctggaggatgacgatcagttggaagtcgtggccaagcatttacaagaaatctacaag

SEQ ID NO: 797348 - DNA, 120 bp, Artificial Sequence
  ENSG00000278803_49 (sequence is synthesized)
caaattgacaaggccaggctgactctgataagggatgacaaagtcaattttgttctggaagttcttctgccggaagccatgatttgtaccatcgccgcacttgatgggctggattacaag

SEQ ID NO: 797349 - DNA, 120 bp, Artificial Sequence
  ENSG00000278803_50 (sequence is synthesized)
gcagcagaggagaagtacctgcgaggaccacctgtgcattaccgggagaaagagctgtttgacagaaatatcttaaagaaggcaagaagagaaccagcaaccacccatacagctaattag

SEQ ID NO: 797350 - DNA, 120 bp, Artificial Sequence
  ENSG00000278828_0 (sequence is synthesized)
ctctgaaggcatggcgcgtacgaagcagactgctcgcaagtccaccggcggcaaggctccgcgcaagcagctggccaccaaggcggctcggaagagcgctccggccaccggcggtgtcaa

SEQ ID NO: 797351 - DNA, 120 bp, Artificial Sequence
  ENSG00000278828_1 (sequence is synthesized)
gaagccccatcgctatcggcctggtacagtggctctccgcgagattcgccgctaccagaagtccaccgagctgctgatcagaaagctgccttttcagcgtctggtgcgtgagatcgcgca

SEQ ID NO: 797352 - DNA, 120 bp, Artificial Sequence
  ENSG00000278828_2 (sequence is synthesized)
ggacttcaagaccgacttgcgcttccagagctccgcggtgatggcgctgcaagaggcatgcgaggcctacctggtggggctctttgaggacaccaacctgtgcgccatccacgccaagcg

SEQ ID NO: 797353 - DNA, 120 bp, Artificial Sequence
  ENSG00000278828_3 (sequence is synthesized)
ggtgactatcatgcccaaggacatccagctcgcacgtcgtatccgcggcgagagggcttgagtctcaaggactcactgattacatacccaaaggctcttttcagagccacccacatgcgc

SEQ ID NO: 797354 - DNA, 120 bp, Artificial Sequence
  ENSG00000278828_4 (sequence is synthesized)
gctgaaaagatctgtttctctcaggaattcttcctggtacttgttttgcctgtagtagatagggcccatttccagacgttatacaatctgtttcgtaagactcagcctatccctttttga

SEQ ID NO: 797355 - DNA, 120 bp, Artificial Sequence
  ENSG00000278828_5 (sequence is synthesized)
ggcatttttccgtaagcattgagtgtagccaaaagttccttcgtgtattgctctcccatctccgcagcccggttttgaccggatggtgcttctaattttctgctaacctgtactgtggtg

SEQ ID NO: 797356 - DNA, 120 bp, Artificial Sequence
  ENSG00000278828_6 (sequence is synthesized)
tgtgtatatttcttgccaacacgccagaaataaaactaaggttgtactgaagttggaaaaattcaggttaatgtagctcatgctggctaaagtgaaacgttctctccccgccccccgttc

SEQ ID NO: 797357 - DNA, 120 bp, Artificial Sequence
  ENSG00000278828_7 (sequence is synthesized)
ctaagcagtgttaagttttctttgaattttttcaagccggattttgggcctgcttaaaccacttaaatgtagttaatgacagatggtttgaggtttaaaagtcttctggagaaagcccgc

SEQ ID NO: 797358 - DNA, 120 bp, Artificial Sequence
  ENSG00000278828_8 (sequence is synthesized)
cagagaacattccctttgaagccccatgtaaaaatacgtgtgggagagaaagtgttttctctgacttctgctgacagtggctaaaactctgaactgtcaggagtattcaaaataagactg

SEQ ID NO: 797359 - DNA, 120 bp, Artificial Sequence
  ENSG00000278828_9 (sequence is synthesized)
ccttgtaggtaagcctgtggtagtttttttgagcacaggataaaatacttgagtctttgcttaaatgttactttctcaatgaggctttgtatgactaaataaaatctgtataatccccac

SEQ ID NO: 797360 - DNA, 120 bp, Artificial Sequence
  ENSG00000278845_0 (sequence is synthesized)
cctttgcgggaacaagatggcagcccccatacctcaagggttctcttgtttatcgaggtttttgggctggtggtctcggcagccagttctggtgactcagtccgcagctatagttccagt

SEQ ID NO: 797361 - DNA, 120 bp, Artificial Sequence
  ENSG00000278845_1 (sequence is synthesized)
aagaactaaaaaacgtttcacacctcctatttatcaacctaaatttaaaacagaaaaggagtttatgcaacatgcccggaaagcaggattggttattcctccagaaaaatcggaccgttc

SEQ ID NO: 797362 - DNA, 120 bp, Artificial Sequence
  ENSG00000278845_2 (sequence is synthesized)
catacatctggcctgtacagctggtatatttgatgcctatgttcctcctgagggtgatgcacgcatatcatctctttcaaaggagggactgatagagagaactgaacgaatgaagaagac

SEQ ID NO: 797363 - DNA, 120 bp, Artificial Sequence
  ENSG00000278845_3 (sequence is synthesized)
tatggcatcacaagtgtcaatccggaggataaaagactatgatgccaactttaaaataaaggacttccctgaaaaagctaaggatatctttattgaagctcacctttgtctaaataactc

SEQ ID NO: 797364 - DNA, 120 bp, Artificial Sequence
  ENSG00000278845_4 (sequence is synthesized)
agaccatgaccggcttcataccttggtaactgaacactgttttccagacatgacttgggacatcaaatataagaccgtccgctggagctttgtggaatctttagagccctctcatgttgt

SEQ ID NO: 797365 - DNA, 120 bp, Artificial Sequence
  ENSG00000278845_5 (sequence is synthesized)
tcaagttcgctgttcaagtatgatgaaccagggcaacgtgtacggccagatcaccgtacgcatgcacacccggcagactctggccatctatgaccggtttggccggttgatgtatggaca

SEQ ID NO: 797366 - DNA, 120 bp, Artificial Sequence
  ENSG00000278845_6 (sequence is synthesized)
agcagcccatccttaagacggtgatgatccctggccctcagctgaaaccagaagaagaatatgaagaggcacaaggagaggcccagaagcctcagctagcctgatgacaaaaatgacttc

SEQ ID NO: 797367 - DNA, 120 bp, Artificial Sequence
  ENSG00000278845_7 (sequence is synthesized)
tagggtgaagcctgggtgatgaggctgctggaagctttgaagtctcccattcccctcatgctataaaaagaactacctttgttctctcccatcctgctcaggtcttttcagcagtctcat

SEQ ID NO: 797368 - DNA, 120 bp, Artificial Sequence
  ENSG00000278845_8 (sequence is synthesized)
catcagcaaccatgactgatgactgggccctagcaggtggcaggtataacatggccatggacactcttcttttttaaattttatgtctagcttctgagtctagatgaaagacagtatgtt

SEQ ID NO: 797369 - DNA, 120 bp, Artificial Sequence
  ENSG00000278845_9 (sequence is synthesized)
tcagagaacattggatatcagtttttcccacagcagggactgtgagagacaaccagcagcatcctctttgtaatcacagggcagggatcagagtttgaaatgaaatgttgtcagggtgtt

SEQ ID NO: 797370 - DNA, 120 bp, Artificial Sequence
  ENSG00000278845_10 (sequence is synthesized)
ggaaaaattttggtgagttctgcacatttcccctggttcaggctgggcatggaccagccttcagatggcagaagtggaagatgagcctacttgtgagcgatgtgactttaaggaaatgaa

SEQ ID NO: 797371 - DNA, 120 bp, Artificial Sequence
  ENSG00000278845_11 (sequence is synthesized)
gactggggaagaataattagtgtttataagacatttaagaggccctttttcatatactgactcactgatgaatcagcatttgcattttatggaaaaatataaatccaaagaaataattta

SEQ ID NO: 797372 - DNA, 120 bp, Artificial Sequence
  ENSG00000278845_12 (sequence is synthesized)
cactcccgcgagcacgtgcgcgtcctcgctgctcacatttcggcggagggcgcgctccctggaaaattccactcctgtgctagctccaccctatgcggcttttctcctacccgacgctct

SEQ ID NO: 797373 - DNA, 120 bp, Artificial Sequence; identical to SEQ ID NO: 655225
  ENSG00000278848_0 (sequence is synthesized)

SEQ ID NO: 797374 - DNA, 120 bp, Artificial Sequence; identical to SEQ ID NO: 655226
  ENSG00000278848_1 (sequence is synthesized)

SEQ ID NO: 797375 - DNA, 120 bp, Artificial Sequence; identical to SEQ ID NO: 655227
  ENSG00000278848_2 (sequence is synthesized)

SEQ ID NO: 797376 - DNA, 120 bp, Artificial Sequence; identical to SEQ ID NO: 655228
  ENSG00000278848_3 (sequence is synthesized)

SEQ ID NO: 797377 - DNA, 120 bp, Artificial Sequence; identical to SEQ ID NO: 655229
  ENSG00000278848_4 (sequence is synthesized)

SEQ ID NO: 797378 - DNA, 120 bp, Artificial Sequence; identical to SEQ ID NO: 655230
  ENSG00000278848_5 (sequence is synthesized)

SEQ ID NO: 797379 - DNA, 120 bp, Artificial Sequence; identical to SEQ ID NO: 655231
  ENSG00000278848_6 (sequence is synthesized)

SEQ ID NO: 797380 - DNA, 120 bp, Artificial Sequence; identical to SEQ ID NO: 655232
  ENSG00000278848_7 (sequence is synthesized)

SEQ ID NO: 797381 - DNA, 120 bp, Artificial Sequence; identical to SEQ ID NO: 655233
  ENSG00000278848_8 (sequence is synthesized)

SEQ ID NO: 797382 - DNA, 120 bp, Artificial Sequence; identical to SEQ ID NO: 655234
  ENSG00000278848_9 (sequence is synthesized)

SEQ ID NO: 797383 - DNA, 120 bp, Artificial Sequence; identical to SEQ ID NO: 655235
  ENSG00000278848_10 (sequence is synthesized)

SEQ ID NO: 797384 - DNA, 120 bp, Artificial Sequence; identical to SEQ ID NO: 655236
  ENSG00000278848_11 (sequence is synthesized)

SEQ ID NO: 797385 - DNA, 120 bp, Artificial Sequence; identical to SEQ ID NO: 655237
  ENSG00000278848_12 (sequence is synthesized)

SEQ ID NO: 797386 - DNA, 120 bp, Artificial Sequence; identical to SEQ ID NO: 655238
  ENSG00000278848_13 (sequence is synthesized)

SEQ ID NO: 797387 - DNA, 120 bp, Artificial Sequence; identical to SEQ ID NO: 655239
  ENSG00000278848_14 (sequence is synthesized)

SEQ ID NO: 797388 - DNA, 120 bp, Artificial Sequence; identical to SEQ ID NO: 655240
  ENSG00000278848_15 (sequence is synthesized)

SEQ ID NO: 797389 - DNA, 120 bp, Artificial Sequence; identical to SEQ ID NO: 655241
  ENSG00000278848_16 (sequence is synthesized)

SEQ ID NO: 797390 - DNA, 120 bp, Artificial Sequence; identical to SEQ ID NO: 655242
  ENSG00000278848_17 (sequence is synthesized)

SEQ ID NO: 797391 - DNA, 120 bp, Artificial Sequence
  ENSG00000278848_18 (sequence is synthesized)
cgcttctctgaccccacccaggctgcttcccaggcctcagggtcttagtgtggacctccgggccgtgattaatgcaggtcagcaggaccagagcgccccttggtccctcccaacacatga

SEQ ID NO: 797392 - DNA, 120 bp, Artificial Sequence
  ENSG00000278848_19 (sequence is synthesized)
gggtagtttgtgtggtgaggtcagggatagtgtctgcgcttctaccctgaatagggctcccttggaaaatactttaatatctctttttaaatacccccttggaccacttttaatagtttt

SEQ ID NO: 797393 - DNA, 85 bp, Artificial Sequence
  ENSG00000278848_20 (sequence is synthesized)
ctctttttaaatacccccttggaccacttttaatagttttctgatagaactaaacagtgatcattctcttaattcatgtttccat

SEQ ID NO: 797394 - DNA, 89 bp, Artificial Sequence
  ENSG00000278857_0 (sequence is synthesized)
acatgatctctggttcccaggttccagatgcgacatccagatgacccagtctccatcttccgtgtctgcatctgtaggagacagagtca

SEQ ID NO: 797395 - DNA, 89 bp, Artificial Sequence; identical to SEQ ID NO: 776403
  ENSG00000278857_1 (sequence is synthesized)

SEQ ID NO: 797396 - DNA, 120 bp, Artificial Sequence
  ENSG00000278870_0 (sequence is synthesized)
atgacaattcttcttaatagcagcctccaaagagccactttcttcctgacgggcttccaaggtctagaaggtctccatggctggatctctattcccttctgcttcatctacctgacagtt

SEQ ID NO: 797397 - DNA, 120 bp, Artificial Sequence
  ENSG00000278870_1 (sequence is synthesized)
atcttggggaacctcaccattctccacgtcatttgtactgatgccactctccatggacccatgtactatttcttgggcatgctagctgtcacagacttaggcctttgcctttccacactg

SEQ ID NO: 797398 - DNA, 120 bp, Artificial Sequence
  ENSG00000278870_2 (sequence is synthesized)
cccactgtgctgggcattttctggtttgataccagagagattggcatccctgcctgtttcactcagctcttcttcatccacaccttgtcttcaatggagtcatcagttctgttatccatg

SEQ ID NO: 797399 - DNA, 120 bp, Artificial Sequence
  ENSG00000278870_3 (sequence is synthesized)
tccattgaccgctacgtggccgtctgcaacccactgcatgactccaccgtcctgacacctgcatgtattgtcaagatggggctaagctcagtgcttagaagtgctctcctcatcctcccc

SEQ ID NO: 797400 - DNA, 120 bp, Artificial Sequence
  ENSG00000278870_4 (sequence is synthesized)
ttcctcctgaagcgcttccaatactgccactcccatgtgctggctcatgcttattgtcttcacctggagatcatgaagctggcctgctctagcatcattgtcaatcacatctatgggctc

SEQ ID NO: 797401 - DNA, 120 bp, Artificial Sequence
  ENSG00000278870_5 (sequence is synthesized)
tttgttgtggcctgcaccgtgggtgtggactccctgctcatctttctctcatacgccctcatccttcgcaccgtgctcagcattgcctcccaccaggagcgactccgagccctcaacacc

SEQ ID NO: 797402 - DNA, 120 bp, Artificial Sequence
  ENSG00000278870_6 (sequence is synthesized)
tgtgtctctcatatctgtgctgtactgctcttctacatccccatgattggcttgtctcttgtgcatcgctttggtgaacatctgccccgcgttgtacacctcttcatgtcctatgtgtat

SEQ ID NO: 797403 - DNA, 120 bp, Artificial Sequence
  ENSG00000278870_7 (sequence is synthesized)
ctgctggtaccaccccttatgaaccccatcatctacagcatcaagaccaagcaaattcgccagcgcatcattaagaagtttcagtttataaagtcacttaggtgtttttggaaggattaa

SEQ ID NO: 797404 - DNA, 120 bp, Artificial Sequence
  ENSG00000278889_0 (sequence is synthesized)
tcccaaaaagcctgatgcgctgctcagtactttgctgatggcagaggggatatcacatggaaaaagccaatgagacctcccctgtgatggggttcgttctcctgaggctctctgcccacc

SEQ ID NO: 797405 - DNA, 120 bp, Artificial Sequence
  ENSG00000278889_1 (sequence is synthesized)
cagagctggaaaagacattcttcgtgctcatcctgctgatgtacctcgtgatcctgctgggcaatggggtcctcatcctggtgaccatccttgactcccgcctgcacacgcccatgtact

SEQ ID NO: 797406 - DNA, 120 bp, Artificial Sequence
  ENSG00000278889_2 (sequence is synthesized)
tcttcctagggaacctctccttcctggacatctgcttcactacctcctcagtcccactggtcctggacagctttttgactccccaggaaaccatctccttctcagcctgtgctgtgcaga

SEQ ID NO: 797407 - DNA, 120 bp, Artificial Sequence
  ENSG00000278889_3 (sequence is synthesized)
tggcactctcctttgccatggcaggaacagagtgcttgctcctgagcatgatggcatttgatcgctatgtggccatctgcaacccccttaggtactccgtgatcatgagcaaggctgcct

SEQ ID NO: 797408 - DNA, 120 bp, Artificial Sequence
  ENSG00000278889_4 (sequence is synthesized)
gagacaatgtcatcaaccacttcacctgtgagattctggctgttctaaagttggcctgtgctgacatttccatcaatgtgatcagcatggaggtgacgaatgtgatcttcctaggagtcc

SEQ ID NO: 797409 - DNA, 120 bp, Artificial Sequence
  ENSG00000278889_5 (sequence is synthesized)
cggttctgttcatctctttctcctatgtcttcatcatcaccaccatcctgaggatcccctcagctgaggggaggaaaaaggtcttctccacctgctctgcccacctcaccgtggtgatcg

SEQ ID NO: 797410 - DNA, 120 bp, Artificial Sequence
  ENSG00000278889_6 (sequence is synthesized)
tcttctacgggaccttattcttcatgtatgggaagcctaagtctaaggactccatgggagcagacaaagaggatctttcagacaaactcatcccccttttctatggggtggtgaccccga

SEQ ID NO: 797411 - DNA, 120 bp, Artificial Sequence
  ENSG00000278889_7 (sequence is synthesized)
tgctcaaccccatcatctatagcctgaggaacaaggatgtgaaggctgctgtgaggagactgctgagaccaaaaggcttcactcagtgatggtggaagggtcctctgtgattgtcaccca

SEQ ID NO: 797412 - DNA, 120 bp, Artificial Sequence; identical to SEQ ID NO: 776629
  ENSG00000278961_0 (sequence is synthesized)

SEQ ID NO: 797413 - DNA, 120 bp, Artificial Sequence; identical to SEQ ID NO: 776630
  ENSG00000278961_1 (sequence is synthesized)

SEQ ID NO: 797414 - DNA, 120 bp, Artificial Sequence; identical to SEQ ID NO: 776631
  ENSG00000278961_2 (sequence is synthesized)

SEQ ID NO: 797415 - DNA, 120 bp, Artificial Sequence; identical to SEQ ID NO: 776632
  ENSG00000278961_3 (sequence is synthesized)

SEQ ID NO: 797416 - DNA, 120 bp, Artificial Sequence; identical to SEQ ID NO: 776633
  ENSG00000278961_4 (sequence is synthesized)

SEQ ID NO: 797417 - DNA, 120 bp, Artificial Sequence; identical to SEQ ID NO: 776634
  ENSG00000278961_5 (sequence is synthesized)

SEQ ID NO: 797418 - DNA, 120 bp, Artificial Sequence; identical to SEQ ID NO: 776635
  ENSG00000278961_6 (sequence is synthesized)

SEQ ID NO: 797419 - DNA, 120 bp, Artificial Sequence; identical to SEQ ID NO: 776636
  ENSG00000278961_7 (sequence is synthesized)

SEQ ID NO: 797420 - DNA, 120 bp, Artificial Sequence
  ENSG00000278961_8 (sequence is synthesized)
cttggacagggtctttgtgacctgtgtcttgtgatatcaatcctgctggcctcctgtctcaccctgtgactaagaatgcctaccctcctggaatgcagtccagcaagtctcatcctcatt

SEQ ID NO: 797421 - DNA, 120 bp, Artificial Sequence
  ENSG00000278961_9 (sequence is synthesized)
ttacacagcctttaatcaagatggagtcactctgcttcgaaaacctctgacagaattgctggatccattttgccaccatgaagaaagccaacttgaaggcaaaaacccagcatctagaag

SEQ ID NO: 797422 - DNA, 120 bp, Artificial Sequence
  ENSG00000278961_10 (sequence is synthesized)
ggagaagaactaggaaattacagagaccagagcctgtaccaactgtacccagagccttcatttaccactggagtttttcagtttgtgaaccaatgagatccttttattaagtcttttgga

SEQ ID NO: 797423 - DNA, 120 bp, Artificial Sequence
  ENSG00000278961_11 (sequence is synthesized)
gctaggcttttgttcctcacaaccaaaaatatcctaaatgataccactggataaatgatttcccgaaggaagtgggccttggagtcaaatttgaaaagagaagatgtgtgatgtgctgtg

SEQ ID NO: 797424 - DNA, 120 bp, Artificial Sequence
  ENSG00000278961_12 (sequence is synthesized)
tgggaggctgggatcattttttttcaccaagatttttatatttataggcttttatatttataggggaaaaacagattcggtacacttcttacttcagctcaataatcatttgcaggactt

SEQ ID NO: 797425 - DNA, 120 bp, Artificial Sequence
  ENSG00000278961_13 (sequence is synthesized)
ctcattgcttgacctctcaaagagcactcagtgagactctgtaccatttaatcctcacccctgactgtcagtagactgccatggaaaccccaaggatgcctgtcctgttggacatgtggt

SEQ ID NO: 797426 - DNA, 120 bp, Artificial Sequence
  ENSG00000278961_14 (sequence is synthesized)
tctctgctgcctgatctaaactcacctcatttctgggagctggtctgagagtctgccttggagatgtgttggatgggaactaggggtttgtaggctccattgtgagcaatactgatggga

SEQ ID NO: 797427 - DNA, 120 bp, Artificial Sequence
  ENSG00000278961_15 (sequence is synthesized)
aatgaccccaactggtatggatattttgcataaagcccctgaaatctgacatgctcagggtcagagccatgaaccactgtcttgacaaaccccatgtacatggactaataaggaaggtgt

SEQ ID NO: 797428 - DNA, 120 bp, Artificial Sequence
  ENSG00000278961_16 (sequence is synthesized)
gggcaccatggcgttagtgttcaactggagagtgggaaagagatttgcatgtgccaccagccctgatagagacagtgacagaacacactgattctcaacattgcagacacctgctgtctt

SEQ ID NO: 797429 - DNA, 120 bp, Artificial Sequence
  ENSG00000278961_17 (sequence is synthesized)
tgtccctatgtaggtttcccccaatatttaggggatcaggtcagataaaggccttcctctgaaatggaaattatttaaaatcgatgaggaagtcatccaggaatgacttcctctggggat

SEQ ID NO: 797430 - DNA, 120 bp, Artificial Sequence
  ENSG00000278961_18 (sequence is synthesized)
ctgtggatgatggtgctagggtttgtaccagaccaaatcaaggtaactagagcctccccaggtgattgtaacccatctcctaaataaaacttgcatcgactcggttgcattacaatttga

SEQ ID NO: 797431 - DNA, 120 bp, Artificial Sequence
  ENSG00000279000_0 (sequence is synthesized)
atggaaagacaaaatcaaagctgtgtggttgaattcatcctcttgggcttttctaactatcctgagctccaggggcagctctttgtggctttcctggttatttatctggtgaccctgata

SEQ ID NO: 797432 - DNA, 120 bp, Artificial Sequence
  ENSG00000279000_1 (sequence is synthesized)
ggaaatgccattattatagtcatcgtctccctagaccagagcctccacgttcccatgtacctgtttctcctgaacttatctgtggtggacctgagtttcagtgcagttattatgcctgaa

SEQ ID NO: 797433 - DNA, 120 bp, Artificial Sequence
  ENSG00000279000_2 (sequence is synthesized)
atgctggtggtcctctctactgaaaaaactacaatttcttttgggggctgttttgcacagatgtatttcatccttctttttggtggggctgaatgttttcttctgggagcaatggcttat

SEQ ID NO: 797434 - DNA, 120 bp, Artificial Sequence
  ENSG00000279000_3 (sequence is synthesized)
ggtactgttcaaacatcatgggtatctagttttcccttttgtggccttaatgaaattaaccatatatcttgtgaaaccccagcagtgttagaacttgcatgtgcagacacgtttttgttt

SEQ ID NO: 797435 - DNA, 120 bp, Artificial Sequence
  ENSG00000279000_4 (sequence is synthesized)
gaaatctatgcattcacaggcacctttttgattattttggttcctttcttgttgatactcttgtcttacattcgagttctgtttgccatcctgaagatgccatcaaccactgggagacaa

SEQ ID NO: 797436 - DNA, 120 bp, Artificial Sequence
  ENSG00000279000_5 (sequence is synthesized)
aaggccttttccacctgtgccgctcacctcacatctgtgaccctattctatggcacagccagtatgacttatttacaacccaaatctggctactcaccggaaaccaagaaagtgatgtca

SEQ ID NO: 797437 - DNA, 120 bp, Artificial Sequence
  ENSG00000279000_6 (sequence is synthesized)
ttgtcttactcacttctgacaccactgctgaatctgcttatctacagtttgcgaaatagtgagatgaagagggctttgatgaaattatggcgaaggcgagtggttttacacacaatctga

SEQ ID NO: 797438 - DNA, 120 bp, Artificial Sequence
  ENSG00000279000_7 (sequence is synthesized)
aataggtggcttttgactacaggtgaatcttctgataaagtagtatgaaaattaaagagacagagtcaacagagaaaggttcgggcaataagtagaagtgctgaagccttggggaggaag

SEQ ID NO: 797439 - DNA, 120 bp, Artificial Sequence
  ENSG00000279000_8 (sequence is synthesized)
tgatctgcgtctgcactcaagacagcactgtatgccttcaacttgctgtgtccatctgtcttcctggcttcctcatctctcacagtgaatttcttttggttttcaaaacatcacacaaaa

SEQ ID NO: 797440 - DNA, 120 bp, Artificial Sequence
  ENSG00000279000_9 (sequence is synthesized)
ggcagtaggcttccattctagttttatggtgtcaccaagtgcctcctgacttgagcaagtcagttttcctcctcctgccatcctcctccgacctaatggccttccattcatgacatcctg

SEQ ID NO: 797441 - DNA, 120 bp, Artificial Sequence
  ENSG00000279000_10 (sequence is synthesized)
tgattgtgtttgttcatcctccacccccttcaaatgtcatcattcccttacttaaatttctacagcacgtgttattaatttccaattgtgttgtgtgctgacttctcttaggcactctat

SEQ ID NO: 797442 - DNA, 120 bp, Artificial Sequence
  ENSG00000279000_11 (sequence is synthesized)
tccttaaaaatagagtctaggtttttcttattttaaaattcatttattcaaaaatgttggtttaaaacctattatgagccagggagggttgtagtgtaggcagtgtgtgtagagcaaaga

SEQ ID NO: 797443 - DNA, 83 bp, Artificial Sequence
  ENSG00000279000_12 (sequence is synthesized)
agggagggttgtagtgtaggcagtgtgtgtagagcaaagaagcaaacaaaatctttgccctctgggagctaagctctagtgag

SEQ ID NO: 797444 - DNA, 80 bp, Artificial Sequence
  ENSG00000279000_13 (sequence is synthesized)
atgccatataatgttataaaatcaatgaactgaatcactcagttgtgtatatatatgtgtgcatgtgtgtgtatatatat

SEQ ID NO: 797445 - DNA, 120 bp, Artificial Sequence
  ENSG00000279000_14 (sequence is synthesized)
ggggtatgcggtacggggaggtactagtttatgcagcatactggttaaggggttagaagctattttatgtagtgtgcttagctctctgttgagctctggattcatgtgtattcctaaggg

SEQ ID NO: 797446 - DNA, 120 bp, Artificial Sequence
  ENSG00000279000_15 (sequence is synthesized)
tgcagagcctagaaaatggtagctggttaatcagtgcttgttgaataattaatgattaaatgaattttttgatgacgagtatagtgggaagagagaagagagaaaaggagagagagagtg

SEQ ID NO: 797447 - DNA, 120 bp, Artificial Sequence
  ENSG00000279000_16 (sequence is synthesized)
aaatcttttaaattacacaatgatcccccaaatggtttttttcttaagtcatcatggtcagaaggatagaccttggagatctggccccaaaaacttcacatccaggtaaatcccaatata

SEQ ID NO: 797448 - DNA, 120 bp, Artificial Sequence
  ENSG00000279000_17 (sequence is synthesized)
attggccagatccaggatgggcagaaatctgcaagcttgaagccaattcacatagtctataggtcacctaatatggttgtgttgaaaattcaaatcccctctatgtttctacagaatgtt

SEQ ID NO: 797449 - DNA, 120 bp, Artificial Sequence
  ENSG00000279000_18 (sequence is synthesized)
gttttctttctccaagtcatatataggtactttgaatctaattaatattttaaataagtttatatcaaatatgctgtaacattggattattaggctattatcacatttgttgagatatct

SEQ ID NO: 797450 - DNA, 120 bp, Artificial Sequence
  ENSG00000279000_19 (sequence is synthesized)
ttttcaatctatctgcttttttatattttattttttgtagtcttaagttttgcatttatgtaaaattcagttaaataaagaacacttgcaccaatgttatgggattggaacctaaggtat

SEQ ID NO: 797451 - DNA, 120 bp, Artificial Sequence
  ENSG00000279000_20 (sequence is synthesized)
aaagtatttatatttccattaaggctatgtttaattttcaaataatatcaaataaattttgatattatttgacaagatctctgagccagaattcttcatttctattttttatatttggaa

SEQ ID NO: 797452 - DNA, 120 bp, Artificial Sequence
  ENSG00000279000_21 (sequence is synthesized)
tataatccaagtatttggtcattgtctaaaattgccaaagaaaatttctgtcaggataggctcctcatcttctgccagaatttctggggtgaatgcagactggaactcttagctaatgga

SEQ ID NO: 797453 - DNA, 120 bp, Artificial Sequence
  ENSG00000279000_22 (sequence is synthesized)
tttgattgtatatcaggagcatctttatatgttaatgtttttagttttttcaccagtgcataatattccttaatattgaatataacacaatttcaacaatttgtttagtagtagccctac

SEQ ID NO: 797454 - DNA, 120 bp, Artificial Sequence
  ENSG00000279000_23 (sequence is synthesized)
tgatggttatttttttgtcacaatagataatactaaaacaaccagtttttatatattcataaattctggtgctttaatttttacagaatagctttcacaaagtaggtttgaagggtcaaa

SEQ ID NO: 797455 - DNA, 120 bp, Artificial Sequence
  ENSG00000279000_24 (sequence is synthesized)
acaaatgtgagtttgcaagttttcatagatattactgagttacttttttaaatgattttaacaacttcagactgacctgagcacccatcctatccctctactatgttgtatgccaagaag

SEQ ID NO: 797456 - DNA, 120 bp, Artificial Sequence
  ENSG00000279000_25 (sequence is synthesized)
cctacaataacgagatgagattttctgcttctgtagtgaaaatctgttccatacataagtaggaaagaacagttatttattgagaggaacacaatgtctctactcagggacccagagagt

SEQ ID NO: 797457 - DNA, 120 bp, Artificial Sequence
  ENSG00000279000_26 (sequence is synthesized)
ctataattcaaaactagatatcttctggttattttagaatatatattcctccagtgttttgagtagagaacatcatgtgatcatttttgaaggtcatttaaagtacggctgtcctttcca

SEQ ID NO: 797458 - DNA, 120 bp, Artificial Sequence
  ENSG00000279000_27 (sequence is synthesized)
cttataaactatattttttgaaacttggtcaaatttctttcataaggcaaaaatgcacctcatacaggccaaacaatgtatgattgtgtttttttgttgtgggacataaatatgattacc

SEQ ID NO: 797459 - DNA, 120 bp, Artificial Sequence
  ENSG00000279000_28 (sequence is synthesized)
tcattgtgcctattttctattatccttgggtcatatcaatatttatgtgcatctttccaacataaaataatcacataatagtctttctagttatatataaagatgaataattagacacat

SEQ ID NO: 797460 - DNA, 120 bp, Artificial Sequence
  ENSG00000279000_29 (sequence is synthesized)
tgcaacattgaaatataacatttcattcttgcttcctattttaatattgctataataaatagaaagggttcttctcattaaatctatatcaaaggagttgacaacacccttcatttctgc

SEQ ID NO: 797461 - DNA, 120 bp, Artificial Sequence
  ENSG00000279000_30 (sequence is synthesized)
tctgggggtggaggtggggtaataaagcggttagaacacttctacaaaacaatcattcattggatggaaaacccttcttttcttcactactccttctgccaaaaataaaggtgaagttgc

SEQ ID NO: 797462 - DNA, 120 bp, Artificial Sequence
  ENSG00000279000_31 (sequence is synthesized)
aaatctatttgaatttcaaaaaaagagagaaatttcatgagaagaaggctggaaccttgtgggtaatgatgcaggacttttcttctcagtcactttggaagctggggacccctgaccggc

SEQ ID NO: 797463 - DNA, 120 bp, Artificial Sequence
  ENSG00000279000_32 (sequence is synthesized)
aacagcccacctggcatgccccagctcacctctgttatagcttgtacctgcattcagcagttcccaagcttttgtaccacacccaagaagaatgaggatatgctgggcattgaagggtaa

SEQ ID NO: 797464 - DNA, 120 bp, Artificial Sequence
  ENSG00000279000_33 (sequence is synthesized)
ggatggtggagaagaattttactgaaggacagaacaactgtcagcagagaggggatatggggggtggttcccctactggaaggcaggaaagccccaccatggtggctgggtccaggacct

SEQ ID NO: 797465 - DNA, 120 bp, Artificial Sequence
  ENSG00000279000_34 (sequence is synthesized)
tttagggactcaaaatgggaagtacatgctggtttgtgaggtatgcaaaaaggttaaagtgaagacaccactcaaaggtgggcatgacagtgtagaaaaaccaattaggaaagggtaggt

SEQ ID NO: 797466 - DNA, 120 bp, Artificial Sequence
  ENSG00000279000_35 (sequence is synthesized)
atatgtaaaataggtgaagagcggggaacaatcagaggaaagtatgtgaaatgggaagataagttctcaatccggtcccagagtttaacttgcagtttggctttcaggctttaaactgtc

SEQ ID NO: 797467 - DNA, 120 bp, Artificial Sequence
  ENSG00000279000_36 (sequence is synthesized)
ttttgtttagaggtggggtttcaccaggaacccaccccatctgcctaggcatttggctgcctcctgtcgctatcagtgatatctgaatgttgtataatactgttttcatttgggcaccaa

SEQ ID NO: 797468 - DNA, 120 bp, Artificial Sequence
  ENSG00000279000_37 (sequence is synthesized)
acagccctcagcaaaagcctttgattggatcccatctcttgatatcctgaaatttccttctgatagcttttaaaagaaccaattaagtaagacttatgtaaaacgaacaaatcagcaaag

SEQ ID NO: 797469 - DNA, 120 bp, Artificial Sequence
  ENSG00000279000_38 (sequence is synthesized)
aaacaaacaaaggaagctaaatacagaaagtctttttagccattctttagttcattttgttcattgattctgtaaaccaatttttttcttaaaaaaaattctttataaaaatgtcttaag

SEQ ID NO: 797470 - DNA, 120 bp, Artificial Sequence
  ENSG00000279000_39 (sequence is synthesized)
agagctaaatctaatgaaatagtctctgctcttgaaggatttacagtgtactggtcattagatgctggaaggttactatatttgacgctttcctctttcattgcctttgtgataaataaa

SEQ ID NO: 797471 - DNA, 120 bp, Artificial Sequence
  ENSG00000279000_40 (sequence is synthesized)
gcctggattggcaagatgttcatgaaattacaataagaaattaggtcactctaattctaaatttgtatgtgtgtgtgtatatgcgtgtgtgaatccaagtatgtgctgggaatttataca

SEQ ID NO: 797472 - DNA, 120 bp, Artificial Sequence
  ENSG00000279000_41 (sequence is synthesized)
tttgtgatgttatgtgaggagatagaaataatcgctagtaaatttagtcatagtttaaaatttttatgttattctgatgaatagaaattgttagtatgcttcacacataatagcctaatc

SEQ ID NO: 797473 - DNA, 120 bp, Artificial Sequence
  ENSG00000279000_42 (sequence is synthesized)
atatcatttctgcatactattcttcatggtgatttttagttatagtcaccgtggctgctactgctgctagttttctagtttatgcccattctcctttttctttaatagagaaaaccccat

SEQ ID NO: 797474 - DNA, 120 bp, Artificial Sequence
  ENSG00000279000_43 (sequence is synthesized)
ttttgttctttaagtagaaaaaaaaaacaagtttcttaagggcagtaatgtatccagttaataaccaatttcccagtttctcttttgaacaagggtggtttgtgacacagttctgactag

SEQ ID NO: 797475 - DNA, 120 bp, Artificial Sequence
  ENSG00000279000_44 (sequence is synthesized)
tgatatataggtggacatccttgagtagggtgtctatgaaaactctttaaaaatgtgacttagttaataaggactttttgctcttcaacctcctccttccttctacctgaaacaagccat

SEQ ID NO: 797476 - DNA, 120 bp, Artificial Sequence
  ENSG00000279000_45 (sequence is synthesized)
gaggctagagatagtgcagctatcttgcaatgagagttaaagcatgactagaaaagccaggccctacagaggccaagtggaaagctagagggcccctgggtctgtgacggcattgcgtag

SEQ ID NO: 797477 - DNA, 120 bp, Artificial Sequence
  ENSG00000279000_46 (sequence is synthesized)
tgaccttatcattcctctcctgcctatttgtttactgactgttacttcagagaaataaaccttgtctttgtttaatccagtatttgctaggttttctgttacagcataacccaatccaga

SEQ ID NO: 797478 - DNA, 120 bp, Artificial Sequence
  ENSG00000279012_0 (sequence is synthesized)
atgtggcccaatattactgcagccccttttttgctgactggctttccagggctggaggcagctcatcactggatctccatccccttctttgctgtttatgtgtgcatccttctgggcaat

SEQ ID NO: 797479 - DNA, 120 bp, Artificial Sequence
  ENSG00000279012_1 (sequence is synthesized)
ggcatgctcctctacctcatcaagcatgaccacagtcttcatgagcccatgtactacttcctcaccatgctggcaggcacagacctcatggtgacattgaccacgatgcctactgtaatg

SEQ ID NO: 797480 - DNA, 120 bp, Artificial Sequence
  ENSG00000279012_2 (sequence is synthesized)
ggcatcctatgggtgaatcacagggagattagcagtgtgggctgcttcctacaggcttactttattcactccctttctgttgtggaatcaggttccctcctggcaatggcatatgattgt

SEQ ID NO: 797481 - DNA, 120 bp, Artificial Sequence
  ENSG00000279012_3 (sequence is synthesized)
atcctgcctgtaattttgcgtcttttttcattttcatattgcaaatctcatgttatcacacgtgctttctgcctccaccaagaaatcatgagactggcttgtgctgacataactttcaat

SEQ ID NO: 797482 - DNA, 120 bp, Artificial Sequence
  ENSG00000279012_4 (sequence is synthesized)
agactttaccctgtaattttgatctctttaacaatcttcctagactgtctgatcatcctcttctcctatattctaattcttaatactgtcataggcattgcttctggtgaagagagagcc

SEQ ID NO: 797483 - DNA, 120 bp, Artificial Sequence
  ENSG00000279012_5 (sequence is synthesized)
aaagccctcaatacctgtatctcccacattagttgtgttcttatcttctatgttacagtgatgggtttgacattcatttacagatttgggaagaatgtgccagaggttgtccacattatc

SEQ ID NO: 797484 - DNA, 120 bp, Artificial Sequence
  ENSG00000279012_6 (sequence is synthesized)
atgagttacatctacttcctctttcctcctttaatgaaccctgtcatctacagcatcaaaaccaagcaaatacaatatggcattatccgccttttatctaaacataggtttagtagttaa

SEQ ID NO: 797485 - DNA, 120 bp, Artificial Sequence
  ENSG00000279051_0 (sequence is synthesized)
ttgctgagctctcactgccacatatgcaaccatataccaaaaactggacccaggtaactgaatttgtcatgatgggctttgctggcatccatgaagcacacctcctcttcttcatactct

SEQ ID NO: 797486 - DNA, 120 bp, Artificial Sequence
  ENSG00000279051_1 (sequence is synthesized)
tcctcaccatgtacctgttcaccttggtggagaatttggccatcattttagtggtgggtttggaccaccgactacggagacccatgtatttcttcctgacacacttgtcctgccttgaaa

SEQ ID NO: 797487 - DNA, 120 bp, Artificial Sequence
  ENSG00000279051_2 (sequence is synthesized)
tctggtacacttctgttacagtgcccaagatgctggctggttttattggggtggatggtggcaagaatatctcttatgctgattgcctatcccagctcttcatcttcacctttcttgggg

SEQ ID NO: 797488 - DNA, 120 bp, Artificial Sequence
  ENSG00000279051_3 (sequence is synthesized)
caactgagtgtttcctactggctgccatggcctatgatcgttatgtggccatttgtatgcctctccactatggggcttttgtgtcctggggcacctgcatccgtctggcagctgcctgtt

SEQ ID NO: 797489 - DNA, 120 bp, Artificial Sequence
  ENSG00000279051_4 (sequence is synthesized)
tgtctcagctaacattttatggcccaaatgtcattgaccatttctcctgtgatgcctcacccttgctagccttgtcgtgctcagatgtcacttggaaggagactgtggatttcctggtgt

SEQ ID NO: 797490 - DNA, 120 bp, Artificial Sequence
  ENSG00000279051_5 (sequence is synthesized)
ctctggctgtgctactggcctcctctatggtcattgctgtgtcctatggcaacatcgtctggacactgctgcacatccgctcagctgctgagcgctggaaggccttctctacctgtgcag

SEQ ID NO: 797491 - DNA, 120 bp, Artificial Sequence
  ENSG00000279051_6 (sequence is synthesized)
ctcacctgactgtggtgagcctcttctatggcactcttttctttatgtatgtccagaccaaggtgacctcctccatcaacttcaacaaggtggtatctgtcttctactctgttgtcacgc

SEQ ID NO: 797492 - DNA, 120 bp, Artificial Sequence
  ENSG00000279051_7 (sequence is synthesized)
ccatgctcaatcctctcatctacagtcttaggaacaaggaagtgaagggagctctgggtcgagtcttttctctcaacttttggaagggacagtgaggaggcaggtgggaacccagtttcc

SEQ ID NO: 797493 - DNA, 120 bp, Artificial Sequence
  ENSG00000279111_0 (sequence is synthesized)
atggtgttgaatgtttattgttgtttctttcaaatttcagacattcaaacgatgaagatcaaccagacaatcctgaaggaattcattcttgttggcttttctgtgtacccacatgtacag

SEQ ID NO: 797494 - DNA, 120 bp, Artificial Sequence
  ENSG00000279111_1 (sequence is synthesized)
acatttctttttgtggtcttcttttgtctctaccttctcacccttgcaggtaatctgatcatcatgggtctaacttgggtggacaggtccctccacacccctatgtatctcttccttagt

SEQ ID NO: 797495 - DNA, 120 bp, Artificial Sequence
  ENSG00000279111_2 (sequence is synthesized)
gcactctccttctctgagacctgctatacgctgaccatcgtccccaagatgctggaagatctactggccaaggacagaagcatttcagtcacaggttgtagcttacagatgtgcttcttc

SEQ ID NO: 797496 - DNA, 120 bp, Artificial Sequence
  ENSG00000279111_3 (sequence is synthesized)
ttgggacttggtggcacaaactgtatcattctcactttgatgggatatgaccgcttcctggccatctgtaaccctctaagatatccactgcttatgaccaacattgtatgtggacaactt

SEQ ID NO: 797497 - DNA, 120 bp, Artificial Sequence
  ENSG00000279111_4 (sequence is synthesized)
ggcttctttatctctcttacagagactgcactgatattcagggactctttctgcagacccaaccttgtcaaacacttcttctgccatatgctggcagttattaggctgtcttgtatagac

SEQ ID NO: 797498 - DNA, 120 bp, Artificial Sequence
  ENSG00000279111_5 (sequence is synthesized)
agtaaccacacagaattcattataacactgatctcagtgtctggtttgctgggtacccttctgctcatcatcctgactgatgtcttcattatttctactgtcctcaggatcccttcagct

SEQ ID NO: 797499 - DNA, 120 bp, Artificial Sequence
  ENSG00000279111_6 (sequence is synthesized)
gagggcaagcagaaggccttcaccacctgtgcctcccacctcaccgtggttataatccactttggttttgcatctattgtttatttgaagccagaagcctcaggagatgacacactcata

SEQ ID NO: 797500 - DNA, 120 bp, Artificial Sequence
  ENSG00000279111_7 (sequence is synthesized)
gcagtcccttatactgtcattacccccttcctcagccccatcatattcagcctgaggaataaggacatgaaaaatgcttttagaagaatgatgggaaacacagttgccttgaaaaaataa

SEQ ID NO: 797501 - DNA, 120 bp, Artificial Sequence
  ENSG00000279116_0 (sequence is synthesized)
tggggcatgtcattctgctttgggaatcagaaaataaatctaatgtctctcttttctcttatttcttattacacataataccttaaaagacatggctacttcaaaccattcttcaggggc

SEQ ID NO: 797502 - DNA, 120 bp, Artificial Sequence
  ENSG00000279116_1 (sequence is synthesized)
tgagtttatcctggcaggcttgacacaacgcccagaacttcaactgccactcttcctcctgttccttggaatatatgtggtcacagtggtggggaacctgggcatgatcttcttaattgc

SEQ ID NO: 797503 - DNA, 120 bp, Artificial Sequence
  ENSG00000279116_2 (sequence is synthesized)
tctcagttctcaactttaccctccagtgtattattttctcagtcatttgtctttcattgatctctgctactcctctgtcattacccctaagatgctggtgaactttgttccagaggagaa

SEQ ID NO: 797504 - DNA, 120 bp, Artificial Sequence
  ENSG00000279116_3 (sequence is synthesized)
cattatctcctttctggaatgcattactcaactttatttcttccttatttttgtaattgcagaaggctaccttctgacagccatggaatatgaccgttatgttgctatctgtcgcccact

SEQ ID NO: 797505 - DNA, 120 bp, Artificial Sequence
  ENSG00000279116_4 (sequence is synthesized)
acccgcatgtcagtgttgtcattctgtaggtctcatacggtcagtcattatttttgtgatattctccccttattgactctgtcttgctccagcacccacatcaatgagattctgctgttc

SEQ ID NO: 797506 - DNA, 120 bp, Artificial Sequence
  ENSG00000279116_5 (sequence is synthesized)
attattggaggagttaataccttagcaactacactggcggtccttatctcttatgctttcattttctctagtatccttggtattcattccactgaggggcaatccaaagcctttggcact

SEQ ID NO: 797507 - DNA, 120 bp, Artificial Sequence
  ENSG00000279116_6 (sequence is synthesized)
tgtagctcccatctcttggctgtgggcatcttttttgggtctataacattcatgtatttcaagcccccttccagcactactatggaaaaagagaaggtgtcttctgtgttctacatcaca

SEQ ID NO: 797508 - DNA, 120 bp, Artificial Sequence
  ENSG00000279116_7 (sequence is synthesized)
ataatccccatgctgaatcctctaatctatagcctgaggaacaaggatgtgaaaaatgcactgaagaagatgactaggggaaggcagtcatcctgacaaagagggttctcattggcagcc

SEQ ID NO: 797509 - DNA, 120 bp, Artificial Sequence
  ENSG00000279169_0 (sequence is synthesized)
acccacagcactcattcctggagctactgcttggttccctgagaggtcccagaactctgcaaagtgagtccagcgctgagattttccttgcagatctatcaggatgagcatccaggcccc

SEQ ID NO: 797510 - DNA, 120 bp, Artificial Sequence
  ENSG00000279169_1 (sequence is synthesized)
acccagactcctggagctggcggggcagagcctgctgagagaccaggccttgtccatctctgccatggaggagctgcccagggtgctctatctcccactcttcatggaggccttccgcag

SEQ ID NO: 797511 - DNA, 120 bp, Artificial Sequence; identical to SEQ ID NO: 742299
  ENSG00000279169_2 (sequence is synthesized)

SEQ ID NO: 797512 - DNA, 120 bp, Artificial Sequence
  ENSG00000279169_3 (sequence is synthesized)
cttcaagtgctggatttgcgggatgttgacgagaatttctgggccagatggcctggagcctgggccctgtcctgcttcccagagaccatgagtaagaggcagacagcagaggaccgtcca

SEQ ID NO: 797513 - DNA, 120 bp, Artificial Sequence
  ENSG00000279169_4 (sequence is synthesized)
agagaccatgagtaagaggcagacagcagaggaccgtccaaggatgggagagcaccagcccttaaaggtgttcatagacatctgcctcaaggaaataccccaggatgaatgcctgagata

SEQ ID NO: 797514 - DNA, 120 bp, Artificial Sequence
  ENSG00000279169_5 (sequence is synthesized)
cctcttccagtgggtttaccaaaggagaggtttagtacacctgtgctgtagtaagctggtcaattatctaacgccgattaaacatctcagaaagtcattgaaaataatatacctgaatag

SEQ ID NO: 797515 - DNA, 120 bp, Artificial Sequence
  ENSG00000279169_6 (sequence is synthesized)
tattcaagagctggaaattcacaacatgtcctggccacgtctgataagaaagcttcgttgttacctgaaggagatgaagactcttggcaaactcgttttctccaggtgccatcattccac

SEQ ID NO: 797516 - DNA, 120 bp, Artificial Sequence
  ENSG00000279169_7 (sequence is synthesized)
gtcagataatgaactcgaaggacggttagtcaccaaattcagctctgtgttcctcgggctggaacacctccagttgcttaaaataaaattgatcaccttcttcagtgggcacctggaaca

SEQ ID NO: 797517 - DNA, 120 bp, Artificial Sequence
  ENSG00000279169_8 (sequence is synthesized)
gctgatcaggtgcctccagaaccccttggagaacttggaattaacttatggctacctattggaagaggatgtgaagtgtctctcccagtacccaagcctcggttacctaaagcatctgaa

SEQ ID NO: 797518 - DNA, 120 bp, Artificial Sequence
  ENSG00000279169_9 (sequence is synthesized)
cagctacgtgctgctgttccgcatcagtcttgaacccctcggagctctgctagagaaaattgctgcctctctcgaaaccctcatcttggagggctgtcagatccactactcccaactcag

SEQ ID NO: 797519 - DNA, 120 bp, Artificial Sequence
  ENSG00000279169_10 (sequence is synthesized)
tgccatcctgcctggcctgagccgctgctcccagctcaccaccttctactttggcagaaattgtatgtctatgggtgccctgaaggacctgctgcgccacaccagtgggctgagcaagtt

SEQ ID NO: 797520 - DNA, 120 bp, Artificial Sequence
  ENSG00000279169_11 (sequence is synthesized)
aagcctggagacgtatcctgcccctgaggagagtttgaattccttggttcgtgtcaattgggagatcttcaccccacttcgggctgagctgatgtgtacactgagggaagtcaggcagcc

SEQ ID NO: 797521 - DNA, 120 bp, Artificial Sequence
  ENSG00000279169_12 (sequence is synthesized)
caagaggatcttcattggtcccaccccctgcccttcctgtggctcatcactgtctgaggaactggagctccatctttgctgctagggaaggcatgcccagtggggtagagaaatccaaag

SEQ ID NO: 797522 - DNA, 120 bp, Artificial Sequence
  ENSG00000279169_13 (sequence is synthesized)
ttctcttccaggcacttggacactaaaatctactatgtaggtgcaagctatttttctcttttcttatttatttcattttttaataattccaaaatttttattaaagacaatttgagacag

SEQ ID NO: 797523 - DNA, 120 bp, Artificial Sequence
  ENSG00000279169_14 (sequence is synthesized)
ggtttctctgtgttgctctgggatcctcctgcctcagctgggcttatggggtcctcctgcctcagcttcctaaagtgctgggattactggcatgagtgactgtgtccaggccacatgcaa

SEQ ID NO: 797524 - DNA, 120 bp, Artificial Sequence
  ENSG00000279169_15 (sequence is synthesized)
cttaaaggaagcacagggaagtgctcagtgtgagggagaaaacataacagcagggggcaaggctggaggaaaatgttgaggtgacatcaatgagaacttcagggacccgtgtcctacaga

SEQ ID NO: 797525 - DNA, 120 bp, Artificial Sequence
  ENSG00000279169_16 (sequence is synthesized)
gtcagaaagagaagctaaagttctacagtgatgagaatgttatccctgcaaggatggttaccaaggaatatcagaaataaagagcacctgaatgaaaacttttaacctgttgtagcaatt

SEQ ID NO: 797526 - DNA, 120 bp, Artificial Sequence
  ENSG00000279169_17 (sequence is synthesized)
tatccaccagaaatatctagttattgagttactgatggaaaaataatgaaatactactttgtctgtgattgagtttcagctgtagaacatcaaagcaaccaaataaaatttgatcatttt

SEQ ID NO: 797527 - DNA, 120 bp, Artificial Sequence
  ENSG00000279169_18 (sequence is synthesized)
ggggtcacctggggtagaagctagagagggacatcatgtacaagctagttagtgggggtttcagctctattgggggtgcacgtgtgaatttcctgttacaaagtgtgtttcaagttgata

SEQ ID NO: 797528 - DNA, 120 bp, Artificial Sequence
  ENSG00000279169_19 (sequence is synthesized)
tgatgtcaaagagataatagaggagggtatgaaaggagggaaagtgcatcaaacctgtccatttcacaatagaacgtctgtcctcaccggcttagtgatcacgaatgatcctgtctctga

SEQ ID NO: 797529 - DNA, 120 bp, Artificial Sequence
  ENSG00000279170_0 (sequence is synthesized)
taagaacaattcctagaaaagttatccatgtagtcagtctgttttaaacaaatccagtgtatgaaaatcatgttataaggtaaattggaaacgtttatttcctttaactctttaaatgtg

SEQ ID NO: 797530 - DNA, 120 bp, Artificial Sequence
  ENSG00000279170_1 (sequence is synthesized)
tcacactttttgctttctatttttaaactttgtgtctcctacaaaataataatcaaaaacaaaaaaagtaagcataacccgtagtttctttccaaatgcctttaaagtttcaaagcagta

SEQ ID NO: 797531 - DNA, 120 bp, Artificial Sequence
  ENSG00000279170_2 (sequence is synthesized)
attacaccttgcggcactacccggttcggccggtgcctggctggagggcgccggagagcctggagcagggcgccaggaggccggagcaggaggagaaggagtaggaggaagtggtcacta

SEQ ID NO: 797532 - DNA, 120 bp, Artificial Sequence
  ENSG00000279170_3 (sequence is synthesized)
gcgcggcggccgccggcccgcaatggtgctaccctggttgctgctcgagactgcgcgcagggcggtcctcgggtccgcggaggctgcgctctgcgccatgaaaatgacagatgaaaatag

SEQ ID NO: 797533 - DNA, 120 bp, Artificial Sequence
  ENSG00000279170_4 (sequence is synthesized)
aagtgtggctggtctgaaggtttgacgtcaataaagggaaactgccacaatttttatactgctatttctaaagatgtcacttataaggaacttaaaaacctgttgaattctaaaaatatt

SEQ ID NO: 797534 - DNA, 120 bp, Artificial Sequence
  ENSG00000279170_5 (sequence is synthesized)
atgttaattgatgttagagagatatgggaaattctggagtatcaaaaaatccctgagtctatcaatgtaccattggatgaagtaggtgaagctctacagatgaatccaagagacttcaaa

SEQ ID NO: 797535 - DNA, 120 bp, Artificial Sequence
  ENSG00000279170_6 (sequence is synthesized)
gagaagtacaatgaagtaaaaccatccaaatctgacagctagtgttttcttatttagccggagtgagaagcaagaaggccctggacacagcaatatctctgggctttcacaggtgtgtag

SEQ ID NO: 797536 - DNA, 120 bp, Artificial Sequence
  ENSG00000279170_7 (sequence is synthesized)
atgaatgaaaaaatggattgataaatgtataatccaatgtttcatatatattacatttttatatgtctatttaagaatttcttgtaattactgtcagtaaaggcaggatagcaaaactaa

SEQ ID NO: 797537 - DNA, 120 bp, Artificial Sequence
  ENSG00000279170_8 (sequence is synthesized)
tcatcctttcctttcactggtgtgccacagcaagatggtggtgcagtttttcaagaagaggaagtttgtcattgatggtatcttcaaagctgaactgaatgaagttctcattcaggagct

SEQ ID NO: 797538 - DNA, 120 bp, Artificial Sequence
  ENSG00000279170_9 (sequence is synthesized)
ggctgaagatagctactctggagttgaggtctgagttacaccagctaggacagaaatctttaccttagccaccagaacacagaatgttcttggtgagaagggctggcatatttgggaatt

SEQ ID NO: 797539 - DNA, 120 bp, Artificial Sequence
  ENSG00000279170_10 (sequence is synthesized)
gactgctgtagttcagaagaggtttggcttttcagagggtaaagtagagctttatgctgaaaaggtgtctacaagagatatgtgccattgtccaggcagagtctctgtgttacaaacccc

SEQ ID NO: 797540 - DNA, 120 bp, Artificial Sequence
  ENSG00000279170_11 (sequence is synthesized)
taggagggcttgctgtgcagaaggcctgctatggtgtgctgcggttcatcatggagtgtgggactaaaggcttcaaggtcattgtgtccaggaaactctgaggacagagggctaaatcca

SEQ ID NO: 797541 - DNA, 120 bp, Artificial Sequence
  ENSG00000279170_12 (sequence is synthesized)
tgaagtttgtgaatggcctgatgatccacagctgggaccctgttaatactatgttgacaccgctgtgcaccatgtgctgctccaacaggctgtgctgggcatcaaggtgaaggtcatgct

SEQ ID NO: 797542 - DNA, 120 bp, Artificial Sequence
  ENSG00000279170_13 (sequence is synthesized)
tccctgggaaccagctggtaagattagccctaggaagtccctgcccgaccaggggcaggggacccatctttgggttcgtggaacccaaagatgagatactctccaccactcccatctcag

SEQ ID NO: 797543 - DNA, 120 bp, Artificial Sequence
  ENSG00000279170_14 (sequence is synthesized)
aagagaagggtaggaagccagagccacctgccatgtcccagccagtccccacagcataacagggtctacttagcagctgtgtctggagtctggatgttgttctgtaaagaactttaataa

SEQ ID NO: 797544 - DNA, 120 bp, Artificial Sequence
  ENSG00000279170_15 (sequence is synthesized)
aatcttgtacaaagaaaaaagtcctaaagtcgtagatgcatctcactatgctaaaattaaggtgtcagcagggctgtattcctctctaaagaatctagaggataatctgtattcctgcct

SEQ ID NO: 797545 - DNA, 120 bp, Artificial Sequence
  ENSG00000279170_16 (sequence is synthesized)
tttccagtttctagaggttcccacatttcttggctcatggctcccttaatcttcaaaaccagccatggccagttgagtctttctcatgttgtgtcactctaaattgtaccttcttcttcc

SEQ ID NO: 797546 - DNA, 120 bp, Artificial Sequence
  ENSG00000279170_17 (sequence is synthesized)
acatttaaagtacccttgtgattactaccctgggcctacctggataatctgggataattttcttattttaaattcagctcactagcaacctaaattccatccgcaaccttaattcctccc

SEQ ID NO: 797547 - DNA, 120 bp, Artificial Sequence
  ENSG00000279170_18 (sequence is synthesized)
tgccatgtaacataacatattcacaggttctggggattcagttgaggacatctttggagactattattttgactgctacagtgtcttcagattgttaatcagctctggcccacagactta

SEQ ID NO: 797548 - DNA, 120 bp, Artificial Sequence
  ENSG00000279170_19 (sequence is synthesized)
agtatctaggctcttcagcaagtatgttcttagggtacaagttgatgtatcagattgttataacttgatagcactaacttcaaccaacttctattgatctaattttgtacttatgaagca

SEQ ID NO: 797549 - DNA, 120 bp, Artificial Sequence
  ENSG00000279170_20 (sequence is synthesized)
atctttcaataataatttggtttcccacattaatttgcctatggaaatataatgctatgagcagtaaaaaagtatttaatcaattggcaattatctttataaatcaattaatttgtattg

SEQ ID NO: 797550 - DNA, 120 bp, Artificial Sequence
  ENSG00000279170_21 (sequence is synthesized)
aaatcaattaatttgtattgttttttctttttttttaactgtaatctcatgacagattatatattaggttttttgcaggtttttttttttcacagatgggggtctcactatgttgcccag

SEQ ID NO: 797551 - DNA, 120 bp, Artificial Sequence
  ENSG00000279170_22 (sequence is synthesized)
ttcaagtgatcctcctgtctcagcctccaaaagtgttgggatttacgggtatgagccactgcacctggttgggtttttaatgtatgagtttctatgagcttgatcaatgtatttacaccc

SEQ ID NO: 797552 - DNA, 120 bp, Artificial Sequence
  ENSG00000279170_23 (sequence is synthesized)
aaagaccagatctgcaaactctggggaagtctatctgtctagtggtcttctgaaatgattgattttgaggtacttttcaaactaaagctcagaatggatctcactttctggctataaact

SEQ ID NO: 797553 - DNA, 120 bp, Artificial Sequence
  ENSG00000279170_24 (sequence is synthesized)
ggatactcccctaacttctttcattatgttatttatccctgcagcattggccaattctcttctttgtttttattcatttttttcacatctacatactataattgaacttttttggttgca

SEQ ID NO: 797554 - DNA, 120 bp, Artificial Sequence
  ENSG00000279170_25 (sequence is synthesized)
aagttacttccataaatttacagttcattaaaagaagaaatgtggattggcgctagaattgtaactagaaaactgtctggaattgagacatacttctttttgtgtgtttcttgttttcct

SEQ ID NO: 797555 - DNA, 120 bp, Artificial Sequence
  ENSG00000279170_26 (sequence is synthesized)
gttccaactggcctatactatttccccattctgagtattttctgtctgcttcatagtctctgcattgtaactttagtttgtatgctcttagtttttctctttaacatgaactttcagctt

SEQ ID NO: 797556 - DNA, 120 bp, Artificial Sequence
  ENSG00000279170_27 (sequence is synthesized)
taattccattctacttcattctctccttatttcctttgtttatatagatagaggtttcacaccaaaaaaaaaaagtgtctagggccccacaaaactagggacagccctgatgagaacaac

SEQ ID NO: 797557 - DNA, 120 bp, Artificial Sequence
  ENSG00000279170_28 (sequence is synthesized)
cataattggcttaggatggttggtggtccttaatcttgactgtgctttagacttacttgagggtgcttctaaaacaatcatccttttcagacttgacttccagaccaaatttcttctata

SEQ ID NO: 797558 - DNA, 120 bp, Artificial Sequence
  ENSG00000279170_29 (sequence is synthesized)
gaataaatacacatacaaacatatttatatgcctgtgtacttatttatatctaagcaagaagaaataagtggaagaatatacatcaagacattgaaatgataatgggaacaaccacatga

SEQ ID NO: 797559 - DNA, 120 bp, Artificial Sequence
  ENSG00000279170_30 (sequence is synthesized)
taatgagcaacaactatattaatcagggttctccagagaagcagaaccaataggagattatatatataattggcatacttgattatagaagccgagaaatcccacagcctgccatcttca

SEQ ID NO: 797560 - DNA, 120 bp, Artificial Sequence
  ENSG00000279170_31 (sequence is synthesized)
agctggagatccagaaaagccagtggtgtagttccagtccaagcctgagggcttgacaaccaggagcactgatgtccaagggcagaagataagatggatgtccagattccagaagagaga

SEQ ID NO: 797561 - DNA, 120 bp, Artificial Sequence
  ENSG00000279170_32 (sequence is synthesized)
gtgaattgacccttcctctgtctttttgttctgtttaatcatgcaacagtttggatgatgcccaccacattggtgagggctatcttctttactcagtcaactgattcaaatctcttccta

SEQ ID NO: 797562 - DNA, 120 bp, Artificial Sequence
  ENSG00000279170_33 (sequence is synthesized)
ctatgtcctttttctcttccaggagaaaaaacttcatagccacacctagaaataatgttctaccagttacctgggcatacttagcctaatcaagttgacttctaaaattaaccatccata

SEQ ID NO: 797563 - DNA, 120 bp, Artificial Sequence
  ENSG00000279170_34 (sequence is synthesized)
acaaccaaacagtacagtattttaacccaaataataaaataaatatacctggatctatgctgacatacatatgtaagtatatgattaagtaaataaataaatgggtaaaagataaatctt

SEQ ID NO: 797564 - DNA, 120 bp, Artificial Sequence
  ENSG00000279170_35 (sequence is synthesized)
ccttactaaagaattccaaataatacatgtagacagtttcccctccagagatggaacttaaagcttcaccccttgagtatgggctgaatttagtgtcttgcttccaaacaatagattatg

SEQ ID NO: 797565 - DNA, 120 bp, Artificial Sequence
  ENSG00000279170_36 (sequence is synthesized)
taaagggaaaaaatagtaactttacagcagagacacctggcacacactacctgaacaaagcgatcaaggttagcatcaacactgataagtcatgttggtagtatgtattcctgacatgat

SEQ ID NO: 797566 - DNA, 120 bp, Artificial Sequence
  ENSG00000279170_37 (sequence is synthesized)
gtgataaggagagaactctacctttacctctgtggtcttcctcttaaaagtctgtaaccctacaactagtcatgagaaaaaaaaaaacatcatcagacaaacccaaatttagggacatta

SEQ ID NO: 797567 - DNA, 120 bp, Artificial Sequence
  ENSG00000279170_38 (sequence is synthesized)
tacaaaacatctgaccagcactattcaaaaatatccaggtcatcaaaaacaaataaagactgagaaactgtcacagactagaggggaataaggagatttaatggctaaatgtaatgtggt

SEQ ID NO: 797568 - DNA, 120 bp, Artificial Sequence
  ENSG00000279170_39 (sequence is synthesized)
atcctgcgtgggatcctggaacagaaaaaagacatagtaggaaaaattggtgaaatttgaataaactgtgaaaattgattaatagtcatgaagcaataacagtctctcaattttaacaaa

SEQ ID NO: 797569 - DNA, 120 bp, Artificial Sequence
  ENSG00000279170_40 (sequence is synthesized)
tgtgctatagttatgttaagatgttaatattaggggaaactgggtaagagacatataggcactctctgtgctatctttataacttttctgtaaatttaaattaaattattccaagataag

SEQ ID NO: 797570 - DNA, 120 bp, Artificial Sequence
  ENSG00000279170_41 (sequence is synthesized)
aagaaaagaaagaaagaaaggaaagaaagagagaaagaaagagacaaccgtgaagcttgctgcatcagtggactcttcctttcacaaaacatttttctgtagtatgctatgctgtttgac

SEQ ID NO: 797571 - DNA, 120 bp, Artificial Sequence
  ENSG00000279170_42 (sequence is synthesized)
agcattttactcacagtagaactgctttcaaaattggagtcagtcctctcaggccttgccaatactttctcaactaagtttatgtagtattgtaattcctttgttgtcatttaaacaatg

SEQ ID NO: 797572 - DNA, 120 bp, Artificial Sequence
  ENSG00000279170_43 (sequence is synthesized)
ccatctcaagaaaccactttctttgagcatttataagaggtacctccttatctgttcaagtctgatcatgagttgcagcaattcagtcacatttttaagctgcacttctagttctcttgc

SEQ ID NO: 797573 - DNA, 120 bp, Artificial Sequence
  ENSG00000279170_44 (sequence is synthesized)
ttttaagctgcacttctagttctcttgctagttccaccacacctgcacttgcttcctctactgaagtcttgcacccctcaaagtgatatatgatggttggaatcaactttttccaaactc

SEQ ID NO: 797574 - DNA, 120 bp, Artificial Sequence
  ENSG00000279170_45 (sequence is synthesized)
atggttggaatcaactttttccaaactcctgtgaataacatgttgctattttagcctcttcccatgagttacaaattttttttaacactttaacttttttttttttttgagacagagtct

SEQ ID NO: 797575 - DNA, 84 bp, Artificial Sequence
  ENSG00000279170_46 (sequence is synthesized)
actgcaacctccacctcctgggctcaaatgatcctaccacctcagccaccagcaaatgtttgtattttttgtagagatggggtt

SEQ ID NO: 797576 - DNA, 69 bp, Artificial Sequence
  ENSG00000279170_47 (sequence is synthesized)
acaggtgcatgccaccatgaccagcaaatggaacttctgtgctcaagcaatccatccaccttggcctcc

SEQ ID NO: 797577 - DNA, 120 bp, Artificial Sequence
  ENSG00000279170_48 (sequence is synthesized)
ccacaaatgttcttaatagttatgacaaatgatgaatcctttccagaagattttcctttaaagtttgaagccaggcattgatttctctctagctatgaacgtcctagatggcatcttttt

SEQ ID NO: 797578 - DNA, 120 bp, Artificial Sequence
  ENSG00000279170_49 (sequence is synthesized)
ccaatagaaggctgtttcacctacatagaaaatccattgttaagtatagctaccttcatcagcaatcttagctagatcttctggttagcttgctgcagcttctgcatcagcacttgctgc

SEQ ID NO: 797579 - DNA, 120 bp, Artificial Sequence
  ENSG00000279170_50 (sequence is synthesized)
ctggttagcttgctgcagcttctgcatcagcacttgctgcttcacctcacacttttatgttttggagaccacatctttccttaaatctcatgagccaacctctgctagcttcaaactttt

SEQ ID NO: 797580 - DNA, 120 bp, Artificial Sequence
  ENSG00000279170_51 (sequence is synthesized)
aaagagagttagcgctttgctctggaataagctttggtttaagggaatattgtggctagtatgattttctattcagaccactcaaactttctctgcatcagtaataaagctgttctgctt

SEQ ID NO: 797581 - DNA, 120 bp, Artificial Sequence
  ENSG00000279170_52 (sequence is synthesized)
tcctatcacttgtatggtcacaggaacaacacttttagttttcctcaagaacttttcctttgcattcacaacttggctaatggtttggtgtaggaggccaagctttgtgcctgtcttgtc

SEQ ID NO: 797582 - DNA, 120 bp, Artificial Sequence
  ENSG00000279170_53 (sequence is synthesized)
tttccacatgccttcctcactaagcttaccatttctagcttttcatataaagtgagagacttgcaacttttcttttcacttgaacacttttacttttcaccctacacttagaggccattg

SEQ ID NO: 797583 - DNA, 120 bp, Artificial Sequence
  ENSG00000279170_54 (sequence is synthesized)
tagggtgtagctgacctaatttcaacactgctgtgtctcagggaatagggaggcctgaagagaggggaagtgatggggactgccagtcggtagagcagtcagaacacacacatttatcaa

SEQ ID NO: 797584 - DNA, 120 bp, Artificial Sequence
  ENSG00000279170_55 (sequence is synthesized)
ttatgtttgctgacttatataaatatagttcatggaaccccaaaagaattacaacaataacaccacagattactgatcgcagatcaccataacagataaatggcaccaatagatgtactc

SEQ ID NO: 797585 - DNA, 120 bp, Artificial Sequence
  ENSG00000279170_56 (sequence is synthesized)
aatgcagagtcaccacacactttccattgtaaacagcacaatatctgtgaaacacaataaaatgaagtgtggctgtagaatgctgcagccaggaagtaattccagactgtgtgcctagag

SEQ ID NO: 797586 - DNA, 120 bp, Artificial Sequence
  ENSG00000279170_57 (sequence is synthesized)
tgtgtatgacttctatattatactgatagtgccaagaaggaacaaagcaggtatgtgtcaacattgaacatattaaggaccagcaaatagcacacttccacaggccttcctactgtgctg

SEQ ID NO: 797587 - DNA, 120 bp, Artificial Sequence
  ENSG00000279170_58 (sequence is synthesized)
agctgctaataggttgtcaatagatatttattggttaagttttaaaattttttttcctgttgcggaatggtgggcaggacgctgagctaagtatcagacccagatgctaacaagggctcc

SEQ ID NO: 797588 - DNA, 120 bp, Artificial Sequence
  ENSG00000279170_59 (sequence is synthesized)
aaaaaaattagaataataataactgctaggcctacttcctaatattgggactatgtatggaattcttcagaaaatgtgatttaaaaaaaacaacaacaaatgaaaagctttacagaccca

SEQ ID NO: 797589 - DNA, 120 bp, Artificial Sequence
  ENSG00000279170_60 (sequence is synthesized)
aaatctaagttcaaagaggcccactagacagggtaccacacttctgaaaaaaagcagctcaacctcttaattacagacagtaaaccaaattccacatcccagtaaaagtctggctaataa

SEQ ID NO: 797590 - DNA, 120 bp, Artificial Sequence
  ENSG00000279170_61 (sequence is synthesized)
ctcaggaatctttcatttggtcttacttccctgaacttattttcctgactttttcatctgactccatcacccctccacccaaattaatcagtttcctttacaaagtcattttcaggagct

SEQ ID NO: 797591 - DNA, 120 bp, Artificial Sequence
  ENSG00000279170_62 (sequence is synthesized)
gaagtgaaaaaagtatgcctcccagaggttagaatctcaggggcattctgttcaaagaacacaggaagaaatactttgtcctttttctcttaactcaggcctcacaggtctttttgaaag

SEQ ID NO: 797592 - DNA, 120 bp, Artificial Sequence
  ENSG00000279170_63 (sequence is synthesized)
ccagaagctaaagtggcttaagagaaagctagaagtattggggtagtggtgttcccacttcagggtgaagttgtcaggatgtacctgttttatgattctagttcctttgattggcagtcc

SEQ ID NO: 797593 - DNA, 120 bp, Artificial Sequence
  ENSG00000279170_64 (sequence is synthesized)
ttgaactaaattaaaaacagagaaaagttcatatgatttaaactcatgatgcttctttgtgaaaagggaaaatgagacatgttgttagccccagcatctcttttgagatgggggttttac

SEQ ID NO: 797594 - DNA, 120 bp, Artificial Sequence
  ENSG00000279170_65 (sequence is synthesized)
ttgcccaggctggcctcaaactcctggattcaaactatcctcccccgtaggtggaattacaggtgcatgctaccgtgcttggctatgggcttgtttttaattgttggacggtctgggtgc

SEQ ID NO: 797595 - DNA, 120 bp, Artificial Sequence
  ENSG00000279170_66 (sequence is synthesized)
gtgcccctttcactttattctttttttccgctctcacttttttttcctctcacttattaagtctttgtcctctttaagtcctcttctaaaagactggaattgcaggttacatttataact

SEQ ID NO: 797596 - DNA, 120 bp, Artificial Sequence
  ENSG00000279170_67 (sequence is synthesized)
aaatcttcctatctaggtaaagagaaaatatactaaattccatagaaagcaggtaatttgtccacaggacacagagctgatcactgtggaagatccctccaatcacatcttcgattctct

SEQ ID NO: 797597 - DNA, 120 bp, Artificial Sequence
  ENSG00000279170_68 (sequence is synthesized)
ctccctctttctttaccttgcctttgctctctccatgtgacgtgcctgctcccccttcaccttccaccatgattgtaagattcctgaggactccctagaagctgagcagatgccagcacc

SEQ ID NO: 797598 - DNA, 120 bp, Artificial Sequence
  ENSG00000279170_69 (sequence is synthesized)
atgattcctgtaaagactgaagaaccgtgggtcaactctacctctttcctttataaattacccggcctcaggtatttctttatagcaacgcaagaacaataccttattgttttcccattc

SEQ ID NO: 797599 - DNA, 120 bp, Artificial Sequence
  ENSG00000279170_70 (sequence is synthesized)
atccaaacaactggaaattaagcttcctgaggctggaggccttgggtgtttaggacatagtgagcgctcaacagacacatgttaaatgaaagagccaatactttattgcgcgctgctgtg

SEQ ID NO: 797600 - DNA, 120 bp, Artificial Sequence
  ENSG00000279170_71 (sequence is synthesized)
tgcccggtatcgctctaggagctgagagtagagaagtaacgactacactgcgcttcctttggagagagacactggagaactaaaaccgacccaagcgctaagcgatctgcctaatagagg

SEQ ID NO: 797601 - DNA, 120 bp, Artificial Sequence
  ENSG00000279170_72 (sequence is synthesized)
gaacgccagctgagaccagcgcaaggcgggcgctgggtggcgtgcgcgactgcaaagtctggcatgcccaggttctgctccttgggctcctgctgcgtgagccgatctgcagatccagca

SEQ ID NO: 797602 - DNA, 120 bp, Artificial Sequence
  ENSG00000279170_73 (sequence is synthesized)
aaagacccgagagcggcttgaacgccagatgattcctccctgaggatgcgccccaggcgttctgccctggctcccagccgcctcccggtgctccggggttcggcctcacacacctgtcga

SEQ ID NO: 797603 - DNA, 120 bp, Artificial Sequence
  ENSG00000279170_74 (sequence is synthesized)
ccgcgtcggcccagctgcggcccaagcctgtgggactccggggagcgaggcgccccctgctccaggctgggaaccagaaatgcagcagggcctcaaaaagaaacaaaattctttccctcg

SEQ ID NO: 797604 - DNA, 120 bp, Artificial Sequence
  ENSG00000279170_75 (sequence is synthesized)
gggttgctgctgccgcacaaccttacccagcccgctctgcggatgggtcgtagattccggctggaagccggaggaagtgcatagagggcagcttcaaaagccaaggctgcgctgctttgc

SEQ ID NO: 797605 - DNA, 120 bp, Artificial Sequence
  ENSG00000279170_76 (sequence is synthesized)
gcggggcttcttccctcgcgtgcccgcgccgggtgccggagcagcctccgcaagctgctttcatctcggtctgccggggcagggtcgaaccgcagctgtggggcttcctctccaagcttc

SEQ ID NO: 797606 - DNA, 120 bp, Artificial Sequence
  ENSG00000279170_77 (sequence is synthesized)
gatttgagctggatggagacagaagagaccgtggtgcccagaggccagtctcacgggggatgggggcgggtgggatgggatcagaaaaagcttgaaattcctcctgtaccttaaacctaa

SEQ ID NO: 797607 - DNA, 120 bp, Artificial Sequence
  ENSG00000279170_78 (sequence is synthesized)
acagctgcgagagccccagagcaggaagcgcggctgcggctgagaagctggaggaggaccggggcggggaggagtagccccagcagcaacagcagccagcccgggggcgtcctctcccag

SEQ ID NO: 797608 - DNA, 120 bp, Artificial Sequence
  ENSG00000279170_79 (sequence is synthesized)
cggtgaccagggccagcctttgccagcctgcccgtcctcggactcctggggaacgtacacacagccttttgcttaagcaaggcgctctgaagccgaattacgtctgcctggcatcccgaa

SEQ ID NO: 797609 - DNA, 120 bp, Artificial Sequence
  ENSG00000279170_80 (sequence is synthesized)
acactgacggccctgctatggctgtgggcaaattcaggggtgggggtgtgagggggggactagcagagaaagagttaatctcccaagaggaatatacatcagtactctcctgtcacttgc

SEQ ID NO: 797610 - DNA, 120 bp, Artificial Sequence
  ENSG00000279170_81 (sequence is synthesized)
tttttatttaatgttaatgttagacttcaccagatatttcaactgacaatttcaacattttcacctacagaatttcctggaaggaaaaaaaagcttcttagtaaacatgtttctctgtct

SEQ ID NO: 797611 - DNA, 120 bp, Artificial Sequence
  ENSG00000279170_82 (sequence is synthesized)
tggagcaaaggtctataaggatgatacactatcaagcaacaatcctagaaacagtttaaaaaatgtgtatgtataaaaaacagatttattacaacacaaaaatgttatcattacccaact

SEQ ID NO: 797612 - DNA, 120 bp, Artificial Sequence
  ENSG00000279170_83 (sequence is synthesized)
gatttgtaattgtgtatttcaaagtgaatttcactaactcatgcttgcttcccttttattctcttaagctagcagtatgacagccctaaactctaccgtaatagtgaaggcagtgctctc

SEQ ID NO: 797613 - DNA, 120 bp, Artificial Sequence
  ENSG00000279170_84 (sequence is synthesized)
tctggaatataccttgataaatcggttggcagtcagtcagcatccattcattcccttagagactcaaagtgtcacatctgcaacacactgaaacctcttattagcctataaattcataat

SEQ ID NO: 797614 - DNA, 120 bp, Artificial Sequence
  ENSG00000279170_85 (sequence is synthesized)
tcccaactggaggagcagaattctgccaaagacataatctatctttaaataacactgcacgcacacacaaattgtgcacataatttatggtggtttaatgtcctgacttgtctgtttgta

SEQ ID NO: 797615 - DNA, 120 bp, Artificial Sequence
  ENSG00000279170_86 (sequence is synthesized)
atcctttcattatagttacttactatagaacagaaaaattttcccatcctaagtaggatatacaaattattttacaggcttcagagagactctaggtgctaatataaataggctaccatg

SEQ ID NO: 797616 - DNA, 120 bp, Artificial Sequence
  ENSG00000279170_87 (sequence is synthesized)
atttcaccatcacatattaggtggatggttttaaaatgtacctctctaaaatcatttctttaaataatttccaacttcatttaatttaaaaatgttttaatctattaatcacagaagatt

SEQ ID NO: 797617 - DNA, 120 bp, Artificial Sequence
  ENSG00000279170_88 (sequence is synthesized)
tacttaccattagttctaacagatagaattcacattctaatatctgtttaaaacaaagattatcaatgaaatgtcaatatgaaaccaaattagataagtccacttaatctaacataaatt

SEQ ID NO: 797618 - DNA, 120 bp, Artificial Sequence
  ENSG00000279170_89 (sequence is synthesized)
gttttaaaaatccagacaataaacatagtttatattaaaataaatatctgcaataaaaaattactattagaaatgcaattatgattataaggattttaatccttgtaaggaaaagccagc

SEQ ID NO: 797619 - DNA, 120 bp, Artificial Sequence
  ENSG00000279170_90 (sequence is synthesized)
atgattataaggattttaatccttgtaaggaaaagccagcttctcacaatcattcttattactcacttttatttaaaatatcctgtaaaaccatcagattttccagtatactttctactc

SEQ ID NO: 797620 - DNA, 120 bp, Artificial Sequence
  ENSG00000279170_91 (sequence is synthesized)
agcaaatgcaaaaatacaattatttctacttaatttaaaaaatgtaacttaaagagaataaacaaatcccttgcaaggtggaaaaaggacatacctattaaaatgtcaatagaaattcac

SEQ ID NO: 797621 - DNA, 120 bp, Artificial Sequence
  ENSG00000279170_92 (sequence is synthesized)
cttatatttcatattgttccattagtttttaatcccagctaaatagtagtatcacctgggaccttttacacagtaccaatgttgggagccccaaggctgaaaattctgattttgttgttc

SEQ ID NO: 797622 - DNA, 120 bp, Artificial Sequence
  ENSG00000279170_93 (sequence is synthesized)
tggaaaggatccaacatcagtattatttacaagttcccaaggtgatttaatgagcagccagggttgataatcgccactatgaagtattttttttaaatggtaaaagctatttagctttaa

SEQ ID NO: 797623 - DNA, 120 bp, Artificial Sequence
  ENSG00000279170_94 (sequence is synthesized)
atttgaaactgccatttctaggaaactattaaatttagtctaatataaaatagagctagtttatatatagctttgataattgttccattttatatcatatacttacatgattcatcctat

SEQ ID NO: 797624 - DNA, 120 bp, Artificial Sequence
  ENSG00000279170_95 (sequence is synthesized)
aaaatctagtttttactgcagaaaataaaaaaaaaatttaaactgagaaaatgggaaataaattaactcaaaattcctttaacagagcagaatattagagggtagagcaaaattattttc

SEQ ID NO: 797625 - DNA, 120 bp, Artificial Sequence
  ENSG00000279170_96 (sequence is synthesized)
agtaggaattcttggcaacacttacggacgcagatttttatttactttcagggaaggggaaagactggggggcaggacactctacacagcttcaattttatatttactaccttaagaaag

SEQ ID NO: 797626 - DNA, 120 bp, Artificial Sequence
  ENSG00000279170_97 (sequence is synthesized)
gattctgatgtttaaaaaagaaaaagatcaggaaaaaaaaatcactggcttttatcatttctaaaatcttttcagctacagaatggtattcttctgttttccagtgactgagcttagaag

SEQ ID NO: 797627 - DNA, 120 bp, Artificial Sequence
  ENSG00000279170_98 (sequence is synthesized)
gaacacaggggttacatatgtgtttacaatatatacaattggtaaaaaatatacatataaaatattgggaggatagtacaccaaaaaaatgttaacagtggttatttgtgagatttaaga

SEQ ID NO: 797628 - DNA, 120 bp, Artificial Sequence
  ENSG00000279170_99 (sequence is synthesized)
actttttactaatctgcactttctaaactttttacaatgaccaggtatttatcaaaatatatattttaataaaagcattaatatatatgcaaaggtctcgagttactcataaagtagtag

SEQ ID NO: 797629 - DNA, 120 bp, Artificial Sequence
  ENSG00000279170_100 (sequence is synthesized)
tagtaacacataaagttagtactctattatctattactttattggttagtcactaaataaagtacaaatgaaaaaaaaatgttaaccatcaatcccccatctccttaaaatggtgtgagc

SEQ ID NO: 797630 - DNA, 120 bp, Artificial Sequence
  ENSG00000279170_101 (sequence is synthesized)
atatacacataagtactatttgagaaactgtattcaagccattatgacacatttaattcaaccaagtaactactgacaggtcctaaaaaatgtttagtgtcagcttccatttgtacaaag

SEQ ID NO: 797631 - DNA, 74 bp, Artificial Sequence
  ENSG00000279170_102 (sequence is synthesized)
tcctaaaaaatgtttagtgtcagcttccatttgtacaaagcccaagtgatttcactgaaattaaaagaaattcc

SEQ ID NO: 797632 - DNA, 73 bp, Artificial Sequence
  ENSG00000279170_103 (sequence is synthesized)
ctctactaaaaatacaaaaattaggcgagtgtagtggcatgcacctgtagtcccggctactcgggaggcctga

SEQ ID NO: 797633 - DNA, 77 bp, Artificial Sequence
  ENSG00000279170_104 (sequence is synthesized)
cactgcactccagtaaattccatttcttctatgcactatgttttcaaaaagatttgttttgcaaattcagtgcccta

SEQ ID NO: 797634 - DNA, 120 bp, Artificial Sequence
  ENSG00000279170_105 (sequence is synthesized)
atgttttcaaaaagatttgttttgcaaattcagtgccctacagctaatttagatgtgtaatatctgccaggatttgaaacctagaataatttaaacttgacattagtaaatttataatct

SEQ ID NO: 797635 - DNA, 120 bp, Artificial Sequence
  ENSG00000279170_106 (sequence is synthesized)
ttcctttcttctctcctttatttaaatttaagacgtacctattaaggtttctgagttttacaaatccttgtgatgtaaagtataccagcacaacaggttcttatataatggtagacaatc

SEQ ID NO: 797636 - DNA, 120 bp, Artificial Sequence
  ENSG00000279170_107 (sequence is synthesized)
aacaaagtaaaattatctctgtatataaaacaaatctacatccccatcccctggaccttgacacctaacacctctattgagaatatatttacctgatactgtcacatgtctgttactcca

SEQ ID NO: 797637 - DNA, 120 bp, Artificial Sequence
  ENSG00000279170_108 (sequence is synthesized)
tgctaaaactgctctgcatttttttctgtcttttaatccttttcctccaacttggagaaaaatacatccctcctctctattgtttgtcttaccacttatacacttattatcatctattca

SEQ ID NO: 797638 - DNA, 120 bp, Artificial Sequence
  ENSG00000279170_109 (sequence is synthesized)
attgataactcctgctatttttttcatctttaaccttcctccttcagtaaatcttccatcacatactaatatgctcaaatttcccttgaaaaaagcaaaacaaactctacctaattatat

SEQ ID NO: 797639 - DNA, 120 bp, Artificial Sequence
  ENSG00000279170_110 (sequence is synthesized)
aaaacaaactctacctaattatattcctctgccttttatttttgtagactcaaacactgagatcatgcacagttctcttatacccaccgttattgacttcccagcctccagaactgtgag

SEQ ID NO: 797640 - DNA, 120 bp, Artificial Sequence
  ENSG00000279170_111 (sequence is synthesized)
taaattacttactaatgctttcttagcataaaaaattataccaagataccttgtcaaattctgttcatctttcaactatacagtggaaagcctactcaaatgttcaatttaccccataac

SEQ ID NO: 797641 - DNA, 120 bp, Artificial Sequence
  ENSG00000279170_112 (sequence is synthesized)
gcaccttcctgcctgcttaaacaaatgtatttagggataaatgtttttaatattattctagctctcacatggtcactgacagaaacaagaacttattcatgaaaaaggttaaagaaacag

SEQ ID NO: 797642 - DNA, 120 bp, Artificial Sequence
  ENSG00000279170_113 (sequence is synthesized)
gtaaacaaagtcactggaaaaataggcctttaaaacaaaatataaagcacaggctaatgaaatggataaatttagagggcacctgccctataccttatcaatataaaactccatctagac

SEQ ID NO: 797643 - DNA, 120 bp, Artificial Sequence
  ENSG00000279170_114 (sequence is synthesized)
agactctctcctctcctcataatattaaatccactcaagatatacagtgaatgacaaaagaccacgacgccgatcacccgaagaaaccccaggtaaaagcacgccacaactgtcctgaac

SEQ ID NO: 797644 - DNA, 120 bp, Artificial Sequence
  ENSG00000279170_115 (sequence is synthesized)
aggtagcctcacagtcttgagctgagtcacacttcccgtacctgtgcccactctatccgaccccccgcggcctagctaaaccaagaatccgaaattaaactccgaaacgttccttcccgg

SEQ ID NO: 797645 - DNA, 120 bp, Artificial Sequence
  ENSG00000279170_116 (sequence is synthesized)
gagacgaaactctctcccacccctccccctcacagatccttccctccccgaaactggggctgggggcggggaggggagtcgcctcagaaaagcgcatcttgattctgaccgctgcggtct

SEQ ID NO: 797646 - DNA, 120 bp, Artificial Sequence
  ENSG00000279170_117 (sequence is synthesized)
cccgtgaggaccccggcactcggaactgagctgggatccaggcccaggggagtcacaggccccgtcctcacagctcccccaaaaaccggccccaggtgagaagacggaagatcgcttact

SEQ ID NO: 797647 - DNA, 120 bp, Artificial Sequence
  ENSG00000279170_118 (sequence is synthesized)
agtgggagctctgccaaaagttccctgccatggaacacagcttgccctgataaaaaagcaccagccggcggagcggcccgcggagcgaccatagacccagcccgtccggtaaccgcgctc

SEQ ID NO: 797648 - DNA, 120 bp, Artificial Sequence
  ENSG00000279170_119 (sequence is synthesized)
ctcgatcaaatcagctcggctcgactccgctccgcggcggcgacggcgaaaggaagaggatggccccctagtctccttcacgccggccgacaacactcaactgtgcaaacccgttcctat

SEQ ID NO: 797649 - DNA, 120 bp, Artificial Sequence
  ENSG00000279170_120 (sequence is synthesized)
cgacaaaagttccggcccgcggtagcggagggagccggaggggaggtgctgacccttggaggtgctgagattgaagagaactagtgttcacgagagctcgcggcggttggaaggctctcg

SEQ ID NO: 797650 - DNA, 120 bp, Artificial Sequence
  ENSG00000279170_121 (sequence is synthesized)
cgagagcgtcttgagaattctggccgggggcccaagccgctcggtctcctgtcttcagcacgggagttgctgagtgggtctaacctaggcgaagtggctcagatacggggttctgttatt

SEQ ID NO: 797651 - DNA, 120 bp, Artificial Sequence
  ENSG00000279170_122 (sequence is synthesized)
acctcttccaggacttcaaaaacagaacaatgtggcattgtaataaagtacaaggttttgtgacttatttttcctgtgattggaaagagaaataaatgaagatgactttgttctcaggga

SEQ ID NO: 797652 - DNA, 120 bp, Artificial Sequence
  ENSG00000279263_0 (sequence is synthesized)
atggaaaattacaatcaaacatcaactgatttcatcttattggggctgtttccaccatcaagaattgaccttttcttcttcattctcattgttttcattttcctgatggctctaattgga

SEQ ID NO: 797653 - DNA, 120 bp, Artificial Sequence
  ENSG00000279263_1 (sequence is synthesized)
aacctgtccatgattcttctcatcttcttggacacccatctccacacacccatgtatttcctactgagtcagctctccctcattgacctaaattacatctccaccattgttcctaagatg

SEQ ID NO: 797654 - DNA, 120 bp, Artificial Sequence
  ENSG00000279263_2 (sequence is synthesized)
gcatctgattttctgcatggaaacaagtctatctccttcactgggtgtgggattcagagtttcttcttcttggcattaggaggtgcagaagcactacttttggcatctatggcctatgat

SEQ ID NO: 797655 - DNA, 120 bp, Artificial Sequence
  ENSG00000279263_3 (sequence is synthesized)
aatgcttgtgctcacactgtatatgtactccatattccttattgccgatccagggccatcaatcatttcttctgtgatgtcccagcaatggtgactctggcctgcatggacacctgggtc

SEQ ID NO: 797656 - DNA, 120 bp, Artificial Sequence
  ENSG00000279263_4 (sequence is synthesized)
tatgagggcacagtgtttttgagtgccaccatctttctcgtgtttcccttcattggtatttcatgttcctatggccaggttctctttgctgtctaccacatgaaatctgcagaagggagg

SEQ ID NO: 797657 - DNA, 120 bp, Artificial Sequence
  ENSG00000279263_5 (sequence is synthesized)
aagaaagcctatttgacctgcagcacccacctcactgtagtaactttctactatgcaccttttgtctacacttatctacgtccaagatccctgcgatctccaacagaggacaaggttctg

SEQ ID NO: 797658 - DNA, 120 bp, Artificial Sequence
  ENSG00000279263_6 (sequence is synthesized)
gctgtcttctacaccatcctcaccccaatgctcaaccccatcatctatagcctgaggaacaaggaggtgatgggggccctgacacgagtgagtcagagaatctgctctgtgaaaatgtag

SEQ ID NO: 797659 - DNA, 120 bp, Artificial Sequence
  ENSG00000279270_0 (sequence is synthesized)
atggtgctggcttcagggaacagctcttctcatcctgtgtccttcatcctgcttggaatcccaggcctggagagtttccagttgtggattgcctttccgttctgtgccacgtatgctgtg

SEQ ID NO: 797660 - DNA, 120 bp, Artificial Sequence
  ENSG00000279270_1 (sequence is synthesized)
gctgttgttggaaatatcactctcctccatgtaatcagaattgaccacaccctgcatgagcccatgtacctctttctggccatgctggccatcactgacctggtcctctcctcctccact

SEQ ID NO: 797661 - DNA, 120 bp, Artificial Sequence
  ENSG00000279270_2 (sequence is synthesized)
caacctaagatgttggccatattctggtttcatgctcatgagattcagtaccatgcctgcctcatccaggtgttcttcatccatgccttttcttctgtggagtctggggtgctcatggct

SEQ ID NO: 797662 - DNA, 120 bp, Artificial Sequence
  ENSG00000279270_3 (sequence is synthesized)
ctgtgggtgagccccttctgcttcatggtgtctaggatgcccttctgccaacaccaagccattccccagtcatactgtgagcacatggctgtgctgaagttggtgtgtgctgatacaagc

SEQ ID NO: 797663 - DNA, 120 bp, Artificial Sequence
  ENSG00000279270_4 (sequence is synthesized)
ataagtcgtgggaatgggctctttgtggccttctctgtggctggctttgatatgattgtcattggtatgtcatacgtgatgattttgagagctgtgcttcagttgccctcaggtgaagcc

SEQ ID NO: 797664 - DNA, 120 bp, Artificial Sequence
  ENSG00000279270_5 (sequence is synthesized)
cgcctcaaagcttttagcacacgttcctcccatatctgtgtcatcttggctctttatatcccagcccttttttctttcctcacctaccgctttggccatgatgtgccccgagttgtacac

SEQ ID NO: 797665 - DNA, 120 bp, Artificial Sequence
  ENSG00000279270_6 (sequence is synthesized)
atcctgtttgctaatctctatctactgatacctcccatgctcaaccccatcatttatggagttagaaccaaacagatcggggacagggttatccaaggatgttgtggaaacatcccctga

SEQ ID NO: 797666 - DNA, 120 bp, Artificial Sequence
  ENSG00000279301_0 (sequence is synthesized)
tcttgcctccttcctggtccttgtgtcttcccgttgccctgggacgctcgtgggccatatcaatgacgaacacatcatcctctgacttcaccctcctggggcttctggtgaacagtgagg

SEQ ID NO: 797667 - DNA, 120 bp, Artificial Sequence
  ENSG00000279301_1 (sequence is synthesized)
ctgccgggattgtatttacagtgatccttgctgttttcttgggggccgtgactgcaaatttggtcatgatattcttgattcaggtggactctcgcctccacacccccatgtactttctgc

SEQ ID NO: 797668 - DNA, 120 bp, Artificial Sequence
  ENSG00000279301_2 (sequence is synthesized)
tcagtcagctgtccatcatggacacccttttcatctgtaccactgtcccaaaactcctggcagacatggtttctaaagagaagatcatttcctttgtggcctgtggcatccagatcttcc

SEQ ID NO: 797669 - DNA, 120 bp, Artificial Sequence
  ENSG00000279301_3 (sequence is synthesized)
tctacctgaccatgattggttctgagttcttcctcctgggcctcatggcctatgactgctacgtggctgtctgtaaccctctgagatacccagtcctgatgaaccgcaagaagtgtcttt

SEQ ID NO: 797670 - DNA, 120 bp, Artificial Sequence
  ENSG00000279301_4 (sequence is synthesized)
gatcccagcagttctgaaactggcctgtgcagacacgtccttgtatgaaactctgatgtacatctgctgtgtcctcatgttgctcatccccatctctatcatctccacttcctactccct

SEQ ID NO: 797671 - DNA, 120 bp, Artificial Sequence
  ENSG00000279301_5 (sequence is synthesized)
catcttgttaaccatccaccgcatgccctctgctgaaggtcgcaaaaaggccttcaccacttgttcctcccacttgactgtagttagcatcttctatggggctgccttctacacatacgt

SEQ ID NO: 797672 - DNA, 120 bp, Artificial Sequence
  ENSG00000279301_6 (sequence is synthesized)
gctgccccagtccttccacacccccgagcaggacaaagtagtgtcagccttctataccattgtcacgcccatgcttaatcctctcatctacagcctcagaaacaaggacgtcataggggc

SEQ ID NO: 797673 - DNA, 120 bp, Artificial Sequence
  ENSG00000279301_7 (sequence is synthesized)
atttaaaaaggtatttgcatgttgctcatctgctcagaaagtagcaacaagtgatgcttagagagtcactgcccagaggataaggcttcctaaggacttcctccatttgccctgtttccc

SEQ ID NO: 797674 - DNA, 120 bp, Artificial Sequence
  ENSG00000279301_8 (sequence is synthesized)
acctgatgacccacattgaggggtaatcagattccctgtggggtctttctgcagcctctagcctggaagcttcatcctgacggtaccctcagaagtgtcacctctactgcagacctttcc

SEQ ID NO: 797675 - DNA, 120 bp, Artificial Sequence
  ENSG00000279301_9 (sequence is synthesized)
cagagatctttcagtgaagtatcaaaaatggtttattatgaagttaaataatttatctagtctttttatttagggaagaaaaaccccaaatattagagttcacagcaacctttcactctg

SEQ ID NO: 797676 - DNA, 120 bp, Artificial Sequence
  ENSG00000279301_10 (sequence is synthesized)
aactagatctccttcacaacatttgttcatgtttaaacaacacaatgaaagaaacctgcaaaagctatcaaatgtttacagtcaaattctgtgattagcagcaatagagtaaaagaatgc

SEQ ID NO: 797677 - DNA, 120 bp, Artificial Sequence
  ENSG00000279301_11 (sequence is synthesized)
caatacacaagtggcaaagaagataaaagcacacactttagtcgtgttttttattttagtattaaccccaagtaactataagctctaatattatcgttgaatctctgaccctcttgagta

SEQ ID NO: 797678 - DNA, 120 bp, Artificial Sequence
  ENSG00000279301_12 (sequence is synthesized)
cagacagcagctatcaaatactaggccacaataaatggtggtgaattgaacagaactgagtatgaatgggtggaggttcagcatgacacagctactcacagggaatagactctaacactt

SEQ ID NO: 797679 - DNA, 120 bp, Artificial Sequence
  ENSG00000279301_13 (sequence is synthesized)
accaggttcgttaacatccatggccagaaacttcccttttccaagttctgtgattcaacagcaacacttaaggcactttgagactgactgagtggggtgggaagtccctggagttttcca

SEQ ID NO: 797680 - DNA, 120 bp, Artificial Sequence
  ENSG00000279301_14 (sequence is synthesized)
tgcgggtgttacatgataacagacacgtttttaaagcatcactatgcctacagtgtaggaaaatagaacaaagggcaaacatggatacaggaagacaattgaggtttcagagatgagaaa

SEQ ID NO: 797681 - DNA, 120 bp, Artificial Sequence
  ENSG00000279301_15 (sequence is synthesized)
caaggatggcttgtgtagggtgtggacacaaaggatttggctcatggatttggcgtgtgttagcaacaggtgtagagtgaaggataacttattggtttgggcccaagtgaataaaaaaat

SEQ ID NO: 797682 - DNA, 120 bp, Artificial Sequence
  ENSG00000279301_16 (sequence is synthesized)
ggaatattgatatttggaaaacttgtcggtagcagaagtcaagaattcacttaagataatttggaaatatctattaggtatttaagctaggccgggtgcagtagctcatacctgtactcc

SEQ ID NO: 797683 - DNA, 80 bp, Artificial Sequence
  ENSG00000279301_17 (sequence is synthesized)
ggagaccaaggccaacatagcaaaaccccatctaccaaaaacacaaatatcagttggatgtggtggcacatgcctgtagt

SEQ ID NO: 797684 - DNA, 120 bp, Artificial Sequence
  ENSG00000279301_18 (sequence is synthesized)
cttgggaggctgaggtgggaggatcacgggaggctgagaagttgaggctgcagtgagccgtgatggcaccactgtgctccagcctgactggcagagaggccttgtctcaagataaataca

SEQ ID NO: 797685 - DNA, 120 bp, Artificial Sequence
  ENSG00000279301_19 (sequence is synthesized)
cttgtctcaagataaatacataaatacagaaagatattgaagctatatgtaaagtcaattgtacttcagattagagttctgaacataaagcatacatttaataatcagagtacgaagagc

SEQ ID NO: 797686 - DNA, 120 bp, Artificial Sequence
  ENSG00000279301_20 (sequence is synthesized)
atttaaaaacaggttttttgagagttttcttaagagaaagcttgagactgagatctgaggcagctggcgtcacatgaaaaattagaaagatagggttttatgaggttagaagaaatctaa

SEQ ID NO: 797687 - DNA, 120 bp, Artificial Sequence
  ENSG00000279301_21 (sequence is synthesized)
gacaaagtgtttaaagaaagtaaaagcaactgcaacaagtgcagtctatggttgaaataagtgagatttggttactgtatttagcaacatgaaaggttacttgtaaccttagtgaccatt

SEQ ID NO: 797688 - DNA, 120 bp, Artificial Sequence
  ENSG00000279301_22 (sequence is synthesized)
tttaatggagatatgcttagagatgattcagggtaaaatcaagggggaggaagtggataaggtaagttgagtatgaatttttagatttttttgtaaaggaaatggagtataactagaaaa

SEQ ID NO: 797689 - DNA, 120 bp, Artificial Sequence
  ENSG00000279301_23 (sequence is synthesized)
acgtgataccaatgtgtttgatgttaatggtgctgtcatgtgatattgagtatgaagttcaaaggaataattcagtacaaaaagaaaatcgatatatgagaaatggaggaaagtttcaga

SEQ ID NO: 797690 - DNA, 120 bp, Artificial Sequence
  ENSG00000279301_24 (sequence is synthesized)
aagatggcctttgagagtggccgaaagcacagaaaccagtttagaagtggagagtttgaacttttgtaagagcatggccaactcagtgacaatagcaggaggtcaggcagagcgtgtgtt

SEQ ID NO: 797691 - DNA, 120 bp, Artificial Sequence
  ENSG00000279301_25 (sequence is synthesized)
ataactaagatcccttccgatggtttgtatcttctcggtgcagttagaatcaatgagagcgtctatgagtaaagatcagggtggtcccgtcaaaagtttgagaggagaagagaatcatct

SEQ ID NO: 797692 - DNA, 120 bp, Artificial Sequence
  ENSG00000279301_26 (sequence is synthesized)
tggagaagaggtaagttaataagctagtagagacatctgggttgtaggacaaccttcggactccccctcctttgcattgaatttatgaatttagcacagcacatttgtcagacgattcat

SEQ ID NO: 797693 - DNA, 120 bp, Artificial Sequence
  ENSG00000279301_27 (sequence is synthesized)
gatgtgtgttcgggatggtggccagaaaatagtaggcactcaatatgttaactagaattatgttaaaaacaaggacaaaataacagcagcaactgctgttactactacaaacttattcct

SEQ ID NO: 797694 - DNA, 120 bp, Artificial Sequence
  ENSG00000279301_28 (sequence is synthesized)
ttgtgaataaagtgtgtcatatttatgcttttccaaggcatataatttgcagtatgtaatagatgttcagtagctgtttatttcaataaatttgtctctttgggcaattaaaagttgtat

SEQ ID NO: 797695 - DNA, 120 bp, Artificial Sequence
  ENSG00000279395_0 (sequence is synthesized)
ggtgtctttttacaggatacagccaaaactaaaatttagactatataatggagaataatttttaagtttcttttcctccaatctcatataaattggagacatgggcaaggaaaactgcac

SEQ ID NO: 797696 - DNA, 120 bp, Artificial Sequence
  ENSG00000279395_1 (sequence is synthesized)
cactgtggctgagttcattctccttggactatcagatgtccctgagttgagagtctgcctcttcctgctgttccttctcatctatggagtcacgttgttagccaacctgggcatgattgc

SEQ ID NO: 797697 - DNA, 120 bp, Artificial Sequence
  ENSG00000279395_2 (sequence is synthesized)
actgattcaggtcagctctcggctccacacccccatgtactttttcctcagccacttgtcctctgtagatttctgctactcctcaataattgtgccaaaaatgttggctaatatctttaa

SEQ ID NO: 797698 - DNA, 120 bp, Artificial Sequence
  ENSG00000279395_3 (sequence is synthesized)
caaggacaaagccatctccttcctagggtgcatggtgcaattctacttgttttgcacttgtgtggtcactgaggtcttcctgctggccgtgatggcctatgaccgctttgtggccatctg

SEQ ID NO: 797699 - DNA, 120 bp, Artificial Sequence
  ENSG00000279395_4 (sequence is synthesized)
ttggaaggtgcgtgtggagctggcttcttgctgctacttctgtgggacggtgtgttctctgattcatttgtgcttagctcttaggatccccttctatagatctaatgtgattaaccactt

SEQ ID NO: 797700 - DNA, 120 bp, Artificial Sequence
  ENSG00000279395_5 (sequence is synthesized)
tttctgtgatctacctcctgtcttaagtcttgcttgctctgatatcactgtgaatgagacactgctgttcctggtggccactttgaatgagagtgttaccatcatgatcatcctcacctc

SEQ ID NO: 797701 - DNA, 120 bp, Artificial Sequence
  ENSG00000279395_6 (sequence is synthesized)
ctacctgctaattctcaccaccatcctgaagatgggctctgcagagggcaggcacaaagccttctccacctgtgcttcccacctcacagctatcactgtcttccatggaacagtcctttc

SEQ ID NO: 797702 - DNA, 120 bp, Artificial Sequence
  ENSG00000279395_7 (sequence is synthesized)
catttattgcaggcccagttcaggcaatagtggagatgctgacaaagtggccaccgtgttctacacagtcgtgattcctatgctgaactctgtgatctacagcctgagaaataaagatgt

SEQ ID NO: 797703 - DNA, 120 bp, Artificial Sequence
  ENSG00000279395_8 (sequence is synthesized)
gaaagaagctctcagaaaagtgatgggctccaaaattcactcctagggaagattttattagcacaattcaggattcccaagtagtggcaggcgggggttcacgggagaggcacagtgttg

SEQ ID NO: 797704 - DNA, 120 bp, Artificial Sequence
  ENSG00000279408_0 (sequence is synthesized)
tgtggcataccttgtgtttagttcaagaactataatctagatgtaacacctgaaaataaactcttttattgatattctacaggcagaagaaatgaagatagcaaacaacacagtagtgac

SEQ ID NO: 797705 - DNA, 120 bp, Artificial Sequence
  ENSG00000279408_1 (sequence is synthesized)
agaatttatcctccttggtctgactcagtctcaagatattcagctcttggtctttgtgctgatcttaattttctaccttatcatcctccctggaaattttctcattattttcaccataag

SEQ ID NO: 797706 - DNA, 120 bp, Artificial Sequence
  ENSG00000279408_2 (sequence is synthesized)
gtcagaccctgggctcacagcccccctctatttatttctgggcaacttggccttcctggatgcatcctactccttcattgtggctcccaggatgttggtggacttcctctctgagaagaa

SEQ ID NO: 797707 - DNA, 120 bp, Artificial Sequence
  ENSG00000279408_3 (sequence is synthesized)
ggtaatctcctacagaggctgcatcactcagctctttttcttgcacttccttggaggaggggagggattactccttgttgtgatggcctttgaccgctacatcgccatctgccggcctct

SEQ ID NO: 797708 - DNA, 120 bp, Artificial Sequence
  ENSG00000279408_4 (sequence is synthesized)
gttggctctgtggcttgggggttttgtccactccattatccaggtggtcctcatcctccgcttgcctttttgtggcccaaaccagctggacaacttcttctgtgatgtccgacaggtcat

SEQ ID NO: 797709 - DNA, 120 bp, Artificial Sequence
  ENSG00000279408_5 (sequence is synthesized)
caagctggcttgcaccgacatgtttgtggtggagcttctgatggtcttcaacagtggcctgatgacactcctgtgctttctggggcttctggcttcctatgcagtcatcctctgccatgt

SEQ ID NO: 797710 - DNA, 120 bp, Artificial Sequence
  ENSG00000279408_6 (sequence is synthesized)
tcgtagggcagcttctgaagggaagaacaaggccatgtccacatgcaccactcgtgtcattattatacttcttatgtttggacctgctatcttcatctacatatgccctttcagggcctt

SEQ ID NO: 797711 - DNA, 120 bp, Artificial Sequence
  ENSG00000279408_7 (sequence is synthesized)
accagctgacaagatggtttctctctttcacacagtgatctttccattgatgaatcctatgatttatacccttcgcaaccaggaagtgaaaacttccatgaagaggttattgagtcgaca

SEQ ID NO: 797712 - DNA, 120 bp, Artificial Sequence
  ENSG00000279408_8 (sequence is synthesized)
tgtagtctgtcaagtggattttataataagaaactgagaaggaggaattctggctggaattcatatcattcatttaacaagtcctgtttttcactggtacctcccatttgccaggtacca

SEQ ID NO: 797713 - DNA, 120 bp, Artificial Sequence
  ENSG00000279486_0 (sequence is synthesized)
ggtgatgaaagaaaccacagcatggagctctggaacttcaccttgggaagtggcttcattttggtggggattctgaatgacagtgggtctcctgaactgctctgtgctacaattacaatc

SEQ ID NO: 797714 - DNA, 120 bp, Artificial Sequence
  ENSG00000279486_1 (sequence is synthesized)
ctatacttgttggccctgatcagcaatggcctactgctcctggctatcaccatggaagcccggctccacatgcccatgtacctcctgcttgggcagctctctctcatggacctcctgttc

SEQ ID NO: 797715 - DNA, 120 bp, Artificial Sequence
  ENSG00000279486_2 (sequence is synthesized)
acatctgttgtcactcccaaggcccttgcggactttctgcgcagagaaaacaccatctcctttggaggctgtgcccttcagatgttcctggcactgacaatgggtggtgctgaggacctc

SEQ ID NO: 797716 - DNA, 120 bp, Artificial Sequence
  ENSG00000279486_3 (sequence is synthesized)
ctactggccttcatggcctatgacaggtatgtggccatttgtcatcctctgacatacatgaccctcatgagctcaagagcctgctggctcatggtggccacgtcctggatcctggcatcc

SEQ ID NO: 797717 - DNA, 120 bp, Artificial Sequence
  ENSG00000279486_4 (sequence is synthesized)
tcccttctgcagggcccaggagatcaggcatcttctctgtgagatcccacacttgctgaaggtggcctgtgctgatacctccagatatgagctcatggtatatgtgatgggtgtgacctt

SEQ ID NO: 797718 - DNA, 120 bp, Artificial Sequence
  ENSG00000279486_5 (sequence is synthesized)
cctgattccctctcttgctgctatactggcctcctatacacaaattctactcactgtgctccatatgccatcaaatgaggggaggaagaaagcccttgtcacctgctcttcccacctgac

SEQ ID NO: 797719 - DNA, 120 bp, Artificial Sequence
  ENSG00000279486_6 (sequence is synthesized)
tgtggttgggatgttctatggagctgccacattcatgtatgtcttgcccagttccttccacagcaccagacaagacaacatcatctctgttttctacacaattgtcactccagccctgaa

SEQ ID NO: 797720 - DNA, 120 bp, Artificial Sequence
  ENSG00000279486_7 (sequence is synthesized)
tccactcatctacagcctgaggaataaggaggtcatgcgggccttgaggagggtcctgggaaaatacatgctgccagcacactccacgctctagggaaggatcatggctagcttccagaa

SEQ ID NO: 797721 - DNA, 120 bp, Artificial Sequence
  ENSG00000279486_8 (sequence is synthesized)
tatctttgctccctgaccccagcaagaatgaaggaaagtctgagtatctgaacccaagaactcagtctggtaactgctctagggctagaggggctctctccctggcaacctgtatgaaag

SEQ ID NO: 797722 - DNA, 120 bp, Artificial Sequence
  ENSG00000279486_9 (sequence is synthesized)
tagttgctactagttcttcacaggcgtgagaacaagaaagtaatcttcttcctatataggaaactacccaaattctgtattagctgtctgcctgcatccactgctatctctagggtagac

SEQ ID NO: 797723 - DNA, 120 bp, Artificial Sequence
  ENSG00000279486_10 (sequence is synthesized)
ctgcagataagtggaaggaatagaagggccctgacatctgatctcactagtacttttcagacacttaacccaacttggcaatattaaaccaactgaacactgctgaagaaagccacgtcc

SEQ ID NO: 797724 - DNA, 120 bp, Artificial Sequence
  ENSG00000279486_11 (sequence is synthesized)
ttgtcaaatgctctttaaatcttctctccatgaagtaatttatagggcatgatttacactatctaaaattactcttcactctatttaaaatttaatctttattttcccaggaaggtattt

SEQ ID NO: 797725 - DNA, 120 bp, Artificial Sequence
  ENSG00000279486_12 (sequence is synthesized)
agttaaatgggttcccaccttgggacatgacccctaaccttcgaagtttatattggatcagggaaaggaaaagaaccagagaaaggaaagtttcaagtgggtggtgtaagtaaaacccag

SEQ ID NO: 797726 - DNA, 120 bp, Artificial Sequence
  ENSG00000279486_13 (sequence is synthesized)
acatcaaagggggagatgtcttgagatttgcacaaatttagaccaactgaccttattaaaaggttatatagacttcttgtctaatgccccaactggtagtagtttgcttgtatttgcatt

SEQ ID NO: 797727 - DNA, 120 bp, Artificial Sequence
  ENSG00000279486_14 (sequence is synthesized)
gtacttgctcttttttttctttctaaacatcagccatatgaaacactctaacaagtgtctttgcttgtttgtttttgtttgttggtttttgacatggagatactttatagttcctaaaat

SEQ ID NO: 797728 - DNA, 120 bp, Artificial Sequence
  ENSG00000279486_15 (sequence is synthesized)
gcaattattaataaaatgaagaaaataggaggtgaaggtagtccataagcaaggttcatgataaacaactttgcttatttcttgctaatacaaaaacaaacaagcaaaatagtgattttc

SEQ ID NO: 797729 - DNA, 120 bp, Artificial Sequence
  ENSG00000279486_16 (sequence is synthesized)
cattatccaaggctatcttgtaacattccaaccattgcagtgttcacatgcatggtgggtgtggatatttaagtcagtgtgtctgtgtgtttgtgctaaagatggagaggacaacataat

SEQ ID NO: 797730 - DNA, 120 bp, Artificial Sequence
  ENSG00000279486_17 (sequence is synthesized)
gcattttctcaccagcttaattatgctgcactactattagtttgtctataagtctgagaatattgaaaacaaaagatgtgaacaaaagctgtgagttgcattttgaagattaaaaataat

SEQ ID NO: 797731 - DNA, 120 bp, Artificial Sequence
  ENSG00000279486_18 (sequence is synthesized)
ataaaatgatatggctaattacatgacactcttttgggggatattgctgtttgaagattcgctaacgctttttaaatcaattcctatagtaatttaaaacagtaactgagactaggttca

SEQ ID NO: 797732 - DNA, 120 bp, Artificial Sequence
  ENSG00000279486_19 (sequence is synthesized)
gaaagtatagtagtagtatatcatgtttggaaggcaaggctgagtagagataattcctacacgtatttatatgaatttccttccattttaatacaggcatgcattttactgagttgatgt

SEQ ID NO: 797733 - DNA, 120 bp, Artificial Sequence
  ENSG00000279486_20 (sequence is synthesized)
gtgtgtgtaaaacagatttttttaacctacaagcatatagttatttttcctatattatatagtggcagtatacagcactgcaaagagtctagggtcagctatcagcgtacagaagttaga

SEQ ID NO: 797734 - DNA, 120 bp, Artificial Sequence
  ENSG00000279486_21 (sequence is synthesized)
attgaatacaccccacttatttctataacttttagcatattacttaacctgtttgtgcccaagtctgcaagtttgcaaagtgtaagttgacattaacaataagacctactttgtagtgtt

SEQ ID NO: 797735 - DNA, 120 bp, Artificial Sequence
  ENSG00000279486_22 (sequence is synthesized)
gtgaggatgaaacaagttagtaaatataaatataaagacatctttatacttgtaatcagcatgtgtcgtataataagtatttaataaatttaacacctacagaataaatggccctgaaaa

SEQ ID NO: 797736 - DNA, 120 bp, Artificial Sequence
  ENSG00000279486_23 (sequence is synthesized)
cctgaaaatactgttgagtgatggtataatgttacatcatatgggtgttttgtaacattattagctattttatcattgttttacctttaacattgtcgtgtgtgtgtgtgtgtgtgtgtg

SEQ ID NO: 797737 - DNA, 120 bp, Artificial Sequence
  ENSG00000279486_24 (sequence is synthesized)
tgtctctgtgtgtgtgtgtatgtgtgtgtgaaatcaataatgtcaatctcttggatgtgtgactttttttctatagaaaattcctatgagtgaaattactcgaaccaaggttaaaaatct

SEQ ID NO: 797738 - DNA, 120 bp, Artificial Sequence
  ENSG00000279486_25 (sequence is synthesized)
gtttaatactcttcatatgaaaagacaaattgttttcttaaaatgttaaatattttgcattcttaccagcaacatataagtgtacttagcccactacatattttttcatgttaaatttta

SEQ ID NO: 797739 - DNA, 120 bp, Artificial Sequence
  ENSG00000279486_26 (sequence is synthesized)
catataagtagtcttcactaattgataaggtataaaatttgcctattttaatttgcttaagtaacttgtccacagttttcttattgatttgttgaagtttttttacaggttaggaacacg

SEQ ID NO: 797740 - DNA, 120 bp, Artificial Sequence
  ENSG00000279486_27 (sequence is synthesized)
ttcaatttgttatttggcttctaatatctgcatggcagagatttttagaaagagaaatatttaaaatatttgtatagtgaaggatatcttttatttttttttccagtgatttttactgtt

SEQ ID NO: 797741 - DNA, 120 bp, Artificial Sequence
  ENSG00000279486_28 (sequence is synthesized)
aggatataattttctattctcattgacgtctttgctgtgcatcatacagttcaatttaggtaacaatttatatattttatgtgttttgtcactctatatgtttaactttaacaataaatg

SEQ ID NO: 797742 - DNA, 120 bp, Artificial Sequence
  ENSG00000279486_29 (sequence is synthesized)
tcaaacttatctttacatgtgaaaatgatgatatttcaacttttgtcaaaggtaccatttttctagcaatattttaaagtaatcctttcattttctattattttactaccttcatcagac

SEQ ID NO: 797743 - DNA, 120 bp, Artificial Sequence
  ENSG00000279486_30 (sequence is synthesized)
atgttctagtaagctatattttggctaactcttcagttctagcttctttctcctctttactcttttggaagacatttgattctatcattcacatcttaatagctcacttgtaatttgatt

SEQ ID NO: 797744 - DNA, 120 bp, Artificial Sequence
  ENSG00000279486_31 (sequence is synthesized)
gtgaatatatttaactgataaattaatttgtaatttgagcattttttacaatactcagccttgccttcctgaacatggtgcatgactatacttctggaacctagtctcagtcagttttaa

SEQ ID NO: 797745 - DNA, 120 bp, Artificial Sequence
  ENSG00000279486_32 (sequence is synthesized)
aatgaacattccacaccatcattctaagctgatgccttgcctcacacttcactagaacagaagcagttggctacaaagccctcttcaaatcctccacatatctgtgcctgcgtgtacact

SEQ ID NO: 797746 - DNA, 82 bp, Artificial Sequence
  ENSG00000279486_33 (sequence is synthesized)
ctcttcaaatcctccacatatctgtgcctgcgtgtacacttcctgttttccctcattataactgcttgaacccgggaggcag

SEQ ID NO: 797747 - DNA, 120 bp, Artificial Sequence
  ENSG00000279486_34 (sequence is synthesized)
taaataaataaataaataaataaagtaagaagtctttgcatgactccaatccccctcagtaactgtagcattattttcagcttctcttcacaggaaaaaaaaaaaatacaaagggaacac

SEQ ID NO: 797748 - DNA, 120 bp, Artificial Sequence
  ENSG00000279486_35 (sequence is synthesized)
caaagggaacacttatgcccattttctcctctgctgatcttctattcgcatcttaacacactttcaatcaagctctggtctctttctatggacctgttctttgtgaaaattatcattaat

SEQ ID NO: 797749 - DNA, 120 bp, Artificial Sequence
  ENSG00000279486_36 (sequence is synthesized)
gtgctaaataaaatgtctacctccatattctccttcatcaacctttcagcaacattgatataattgacctcacccttctgttgggaaatttttcttcttttggcttccagacaccacaca

SEQ ID NO: 797750 - DNA, 120 bp, Artificial Sequence
  ENSG00000279486_37 (sequence is synthesized)
actctggcttgcttctttaatccctaaccttttttgccttattggattcgtttttctttctgaatgtttccacattcagatgatacaaacatggacttccctgtcttctcaatcaagaat

SEQ ID NO: 797751 - DNA, 120 bp, Artificial Sequence
  ENSG00000279486_38 (sequence is synthesized)
ctcttcctgagtaatttcatccacttacatagatttaagttctgtccatatgcttttgagtcccaaagacctcactacttgtataatccacagactcaaaaaattagccgggtgtgatgg

SEQ ID NO: 797752 - DNA, 120 bp, Artificial Sequence
  ENSG00000279486_39 (sequence is synthesized)
aaacaaacaaacaaaaaaacaaaaaacaacgagatatcacgtcttgcctgttagtattatttttgaaaaccaaaaaagtcaaagcaaaacaagtgttggtaggtatggggagaaaatgga

SEQ ID NO: 797753 - DNA, 120 bp, Artificial Sequence
  ENSG00000279486_40 (sequence is synthesized)
ttttgaaaaccaaaaaagtcaaagcaaaacaagtgttggtaggtatggggagaaaatggaacctgtgtacacaattcatgggaatgtaaaatggtacagccattatggaaaacagtatgg

SEQ ID NO: 797754 - DNA, 120 bp, Artificial Sequence
  ENSG00000279486_41 (sequence is synthesized)
caagattcccacttctgactatatatccaaaggtaattaaatcgctgtttccaagacatatttgcactccatgtttattgcagcatgattcacaatagacaaaatattggaaacaaccta

SEQ ID NO: 797755 - DNA, 120 bp, Artificial Sequence
  ENSG00000279486_42 (sequence is synthesized)
agagtctatcaacagaccaatggataaagaaaatgtggtctatttatacaatagaatattatttacccttaaaagggaaggacactctgtcatttgcaatgaaatagaccaacctggagg

SEQ ID NO: 797756 - DNA, 120 bp, Artificial Sequence
  ENSG00000279486_43 (sequence is synthesized)
acattatgctatgtggaataagcccaacacagaaatacaaatgctgtctaattttgcttaatgcggaagctagaaaagagtctaactcagtaatagagagtacagtggtgtttgccaagg

SEQ ID NO: 797757 - DNA, 120 bp, Artificial Sequence
  ENSG00000279486_44 (sequence is synthesized)
gtttggggtgactgtgggaggaaatgaaaaatattagtcaacagatacaaacttttatttttaagatgaataatttctgaggttccaacatatagcatggtgactgaagttaataaaaat

SEQ ID NO: 797758 - DNA, 120 bp, Artificial Sequence
  ENSG00000279486_45 (sequence is synthesized)
gtgtacttgaaatttgctgcagaagtagatgtcacgtgttctcacaacacacacgcacagagggtaagtatgtaaggtgattgatatgttgctctgttaattagcttgcatgtggtcatc

SEQ ID NO: 797759 - DNA, 120 bp, Artificial Sequence
  ENSG00000279486_46 (sequence is synthesized)
atttcacagggtatacgtatatcaaatcatcacactgtataccttaaatacattctagtcatatttgtcaaccatatctcaataaagttggaaaaaaaagaaaactatgggcaaattata

SEQ ID NO: 797760 - DNA, 120 bp, Artificial Sequence
  ENSG00000279486_47 (sequence is synthesized)
cataataataaacataaaaaatcatttgaaaacatttctaaagctgctttgtcttcattataggaatgtaaaatattacctctgctggaatatgaactacacccaggatttgaatagtac

SEQ ID NO: 797761 - DNA, 120 bp, Artificial Sequence
  ENSG00000279486_48 (sequence is synthesized)
aaattagatgagacgacttgcagtgtagagccctctaggctttcagcctagaacaggaaggaacgcagagtaatgacagcaaacagtgaagctataggataataattcctcctcagtgac

SEQ ID NO: 797762 - DNA, 120 bp, Artificial Sequence
  ENSG00000279486_49 (sequence is synthesized)
aagaggccccaccactgctttggactccaggaagcactcagacattaacatctgtgaagtgtgccctgcatgctaagaaaagggtgaactgacagacccttctgtccatcaagtcatcca

SEQ ID NO: 797763 - DNA, 120 bp, Artificial Sequence
  ENSG00000279486_50 (sequence is synthesized)
cagcctagttatttctgtctctgctgctaattgtgccaaaagtaaccataaaatctggagtcaactgctagaagttttgcaagaacaaaggccaaggagatgcacttgtgtcttggtgag

SEQ ID NO: 797764 - DNA, 120 bp, Artificial Sequence
  ENSG00000279486_51 (sequence is synthesized)
tagccaaagttagctgcagggagctgaagcaagggactgaaaaaatgagaagtcttagaaaatgttctccagtccttgaggatctgaaggcctatgtgtgactgatatttggtggagaag

SEQ ID NO: 797765 - DNA, 120 bp, Artificial Sequence
  ENSG00000279486_52 (sequence is synthesized)
aacggacctagctctttccccactccaaccaaccaaaatctttgttgaaaggcatattgtgtattgtcactaattctgggaaggcgggggccattggttttcatgaagtgtgactatgaa

SEQ ID NO: 797766 - DNA, 120 bp, Artificial Sequence
  ENSG00000279486_53 (sequence is synthesized)
acatgaaaatcacacaaggcaatcttgatctgaggaatgcttctaagagaaaatgaatacacctgccctataggcccgcttctctaccaagcacacggagatgtccacttattcttgctg

SEQ ID NO: 797767 - DNA, 120 bp, Artificial Sequence
  ENSG00000279486_54 (sequence is synthesized)
gcaccaaatggtgatattcaaaagagctggcataattttttagagttgctaagtatataaagcactaactttatcaattttgttaattatacttcacttcatctctgtcttatcaattag

SEQ ID NO: 797768 - DNA, 120 bp, Artificial Sequence
  ENSG00000279493_0 (sequence is synthesized)
gtggaggagtggggacccttcgatcttgtgtacggcgccacacctcccctgggccacacctgtgaccgtcctcccagctggtacctgttccagttccaccggctcctgcagtacgcacgg

SEQ ID NO: 797769 - DNA, 120 bp, Artificial Sequence
  ENSG00000279493_1 (sequence is synthesized)
cccaagccaggcagccccaggcccttcttctggatgttcgtggacaatctggtgctgaacaaggaagacctggacgtcgcatctcgcttcctggagatggagccagtcaccatcccagat

SEQ ID NO: 797770 - DNA, 120 bp, Artificial Sequence
  ENSG00000279493_2 (sequence is synthesized)
gtgtggagcaacatcccagccataaggagcaggcactgggctctggtttcggaagaagaattgtccctgctggcccagaacaagcagagctcgaagctcgcggccaagtggcccaccaag

SEQ ID NO: 797771 - DNA, 120 bp, Artificial Sequence
  ENSG00000279493_3 (sequence is synthesized)
ctggtgaagaactgctttctccccctaagagaatatttcaagtatttttcaacagaactcacttcctctttataaatgagtcactatactgtgaagaaaaagacttttcctagaacaaag

SEQ ID NO: 797772 - DNA, 120 bp, Artificial Sequence
  ENSG00000279514_0 (sequence is synthesized)
atgcaactgaataataatgtgactgagttcattctgcttggattgacacaggatcctttttggaagaaaatagtgtttgttatttttttgcgtctctacttgggaacactgttgggtaat

SEQ ID NO: 797773 - DNA, 120 bp, Artificial Sequence
  ENSG00000279514_1 (sequence is synthesized)
ttgctaatcattattagtgtcaagaccagccaggcacttaagaacccaatgttcttcttccttttctacttatccttatctgatacttgcctctctacttccataacccctagaatgatt

SEQ ID NO: 797774 - DNA, 120 bp, Artificial Sequence
  ENSG00000279514_2 (sequence is synthesized)
gtggatgcccttttgaagaagacaactatctccttcagcgagtgcatgatccaagtcttttcatcccatgtctttggctgcctggagatcttcatcctcatcctcacggctgttgaccgc

SEQ ID NO: 797775 - DNA, 120 bp, Artificial Sequence
  ENSG00000279514_3 (sequence is synthesized)
gtgcattctttagttcagatttttcttgccctgagtttgccattctgtggccccaatgtgatcaatcactgtttctgtgacttgcagcccttgttgaaacaagcctgttcagaaacctat

SEQ ID NO: 797776 - DNA, 120 bp, Artificial Sequence
  ENSG00000279514_4 (sequence is synthesized)
gtggttaacctactcctggtttccaatagtggggccatttgtgcagtgagttatgtcatgctaatattctcctatgtcatcttcttgcattctctgagaaaccacagtgctgaagtgata

SEQ ID NO: 797777 - DNA, 120 bp, Artificial Sequence
  ENSG00000279514_5 (sequence is synthesized)
aagaaagcactttccacatgtgtctcccacatcattgtggtcatcttgttctttggaccttgcatatttatgtacacatgccttgcaaccgtattccccatggataagatgatagctgta

SEQ ID NO: 797778 - DNA, 120 bp, Artificial Sequence
  ENSG00000279514_6 (sequence is synthesized)
ttttatacagttggaacatcttttctcaaccctgtgatttacacgctgaagaatacagaagtgaaaagtgccatgaggaagctttggagcaagaaattgatcacagatgacaaaagataa

SEQ ID NO: 797779 - DNA, 120 bp, Artificial Sequence
  ENSG00000279761_0 (sequence is synthesized)
atgatggcatctgaaagaaatcaaagcagcacacccacttttattctcttgggtttttcagaatacccagaaatccaggttccactctttctggttttcttgttcgtctacacagtcact

SEQ ID NO: 797780 - DNA, 120 bp, Artificial Sequence
  ENSG00000279761_1 (sequence is synthesized)
gtagtggggaacttgggcatgataataatcatcagactcaattcaaaactccatacaatcatgtgctttttccttagtcacttgtccttgacagacttctgtttttccactgtagttaca

SEQ ID NO: 797781 - DNA, 120 bp, Artificial Sequence
  ENSG00000279761_2 (sequence is synthesized)
cctaaactgttggagaacttggttgtggaatacagaaccatctctttctctggttgcatcatgcaattttgttttgcttgcatttttggagtgacagaaactttcatgttagcagcgatg

SEQ ID NO: 797782 - DNA, 120 bp, Artificial Sequence
  ENSG00000279761_3 (sequence is synthesized)
gtgtgctccctgatactcacatattttcttcttgacttatcgttttgtgaatctaccttcataaataattttatctgtgaccactctgtaattgtttctgcctcctactcagacccctat

SEQ ID NO: 797783 - DNA, 120 bp, Artificial Sequence
  ENSG00000279761_4 (sequence is synthesized)
atcagccagaggctatgctttattattgccatattcaatgaggtgagcagcctaattatcattctgacatcatatatgcttattttcactaccattatgaagatgcgatctgcaagtggg

SEQ ID NO: 797784 - DNA, 120 bp, Artificial Sequence
  ENSG00000279761_5 (sequence is synthesized)
cgccagaaaactttctccacctgtgcctcccacctgacagccatcactatcttccatggaactatccttttcctttactgtgttcctaatcctaaaacttctagcctcatagttacagtg

SEQ ID NO: 797785 - DNA, 120 bp, Artificial Sequence
  ENSG00000279761_6 (sequence is synthesized)
gcttctgtgttttacacagtggcgattccaatgctgaacccattgatctacagccttaggaacaaagatatcaataacatgtttgaaaaattagttgtcaccaaattgatttaccactga

SEQ ID NO: 797786 - DNA, 120 bp, Artificial Sequence; identical to SEQ ID NO: 791565
  ENSG00000279782_0 (sequence is synthesized)

SEQ ID NO: 797787 - DNA, 82 bp, Artificial Sequence; identical to SEQ ID NO: 791566
  ENSG00000279782_1 (sequence is synthesized)

SEQ ID NO: 797788 - DNA, 120 bp, Artificial Sequence; identical to SEQ ID NO: 791567
  ENSG00000279782_2 (sequence is synthesized)

SEQ ID NO: 797789 - DNA, 120 bp, Artificial Sequence; identical to SEQ ID NO: 791568
  ENSG00000279782_3 (sequence is synthesized)

SEQ ID NO: 797790 - DNA, 120 bp, Artificial Sequence; identical to SEQ ID NO: 791569
  ENSG00000279782_4 (sequence is synthesized)

SEQ ID NO: 797791 - DNA, 120 bp, Artificial Sequence
  ENSG00000279804_0 (sequence is synthesized)
atgagcttccaggccccacgcagactcctggagctggcagggcagagcctgctgagggaccaggccttggccatctccgtcctggatgagctgcccagggagctcttccccccactgttc

SEQ ID NO: 797792 - DNA, 120 bp, Artificial Sequence
  ENSG00000279804_1 (sequence is synthesized)
gtggaggccttcactagcagacgctgcgaggttctgaaggtgatggtgcaggcctggcccttcccctgcctccctctggggtccctgatgaagacgcctgatctggagatcttacattat

SEQ ID NO: 797793 - DNA, 120 bp, Artificial Sequence; identical to SEQ ID NO: 742287
  ENSG00000279804_2 (sequence is synthesized)

SEQ ID NO: 797794 - DNA, 120 bp, Artificial Sequence
  ENSG00000279804_3 (sequence is synthesized)
ctcctgtcctgctccccagaggccatgagtaagagacagacagtggaggactgtccaaggacaggagagaagcagcccttgaaggtgttcatggatgtttgcctcaaggaaaaattcatg

SEQ ID NO: 797795 - DNA, 120 bp, Artificial Sequence
  ENSG00000279804_4 (sequence is synthesized)
gatgaagatctgagcttcttctctgggtgggtgcagcacagaagaggttcagtacacctgtgctgtactaaggtggtgaattattcaatgagcattctaaatttcagaaacatattggaa

SEQ ID NO: 797796 - DNA, 120 bp, Artificial Sequence
  ENSG00000279804_5 (sequence is synthesized)
acagtatacccagacagtatccaagtgttggaaatttggaacatgtgctggctgtgtatgatagtagagtttagccgttacctgagccagatgaggaatcttcgcaaactcttcatctct

SEQ ID NO: 797797 - DNA, 120 bp, Artificial Sequence
  ENSG00000279804_6 (sequence is synthesized)
gatggctgtcgttacctgctaagctctgacagccaagaacagttagttgctgaattcagctctgtgctcctcaggctggagaacctccagatgctttatgtaagaagggtctgcttcttc

SEQ ID NO: 797798 - DNA, 120 bp, Artificial Sequence
  ENSG00000279804_7 (sequence is synthesized)
agaggccacctggaccagctgatcaggtgcctcaggagcccgttggagacattggcattaacttatggcttcctagaagaagaggacttgaaatgcctgccccggtacccaagtctcagt

SEQ ID NO: 797799 - DNA, 120 bp, Artificial Sequence
  ENSG00000279804_8 (sequence is synthesized)
ggtgcactgcgcttcatccgtcttgagcccctccgagctctgctagagaaagttgctgccactcttcagaccctcttcttagtggactgtgggattgggtactccaaactcagggtcatc

SEQ ID NO: 797800 - DNA, 120 bp, Artificial Sequence
  ENSG00000279804_9 (sequence is synthesized)
ctgcctgccctgagccgctgctccaacctcaccactttctgttttcacggcaatgacacgtccatggatgctctgaaggacctgctgcgccacacaggcaggctgagcaatttgagcctg

SEQ ID NO: 797801 - DNA, 120 bp, Artificial Sequence
  ENSG00000279804_10 (sequence is synthesized)
gaaacatatcctgcccctcgggagagtcttgacaacaggggtcgtgtcattttggagctcctcaccccacttcaggctgagctgatgcgtatactgagggaagtaagggagcccaaaagg

SEQ ID NO: 797802 - DNA, 120 bp, Artificial Sequence
  ENSG00000279804_11 (sequence is synthesized)
atcttctttggtccggtgtcctgcccttgctgtggcacgtcgcccactgagcaactggagtccaatttttgcttgtggggaaggcctgcctagtggggtggaggtataaaaagctttttc

SEQ ID NO: 797803 - DNA, 120 bp, Artificial Sequence
  ENSG00000279804_12 (sequence is synthesized)
tccaggcacttggaaactaaaatctgggacatagatgtcttttatttttctttttccttattttacaattttacagcttttatttaaaaatttgaaacagggtttccctatgttgtccag

SEQ ID NO: 797804 - DNA, 120 bp, Artificial Sequence
  ENSG00000279804_13 (sequence is synthesized)
gctggtctcaaactcttacgcttaagggagccccctgcttggcctcccaagattctgggattacaggcataagcagctgtgccgggtctataggtgtattataaagggaacagagaaacc

SEQ ID NO: 797805 - DNA, 120 bp, Artificial Sequence
  ENSG00000279804_14 (sequence is synthesized)
tctgtttcaggcatgtgctttctgtgagtggaaaacaaaaaacaaaaaatcccagcagggggcagcactggggaaaaagttgaatggagtcactgagactcagggatctgtgtcctagac

SEQ ID NO: 797806 - DNA, 120 bp, Artificial Sequence
  ENSG00000279804_15 (sequence is synthesized)
agtcagaaatagaaagctgaagttctagagtgagggagttatctcagcaaggatggatacaaagaaacgtcggaagtagagggaacctaaatggaaactctctgctgtccttcatgattg

SEQ ID NO: 797807 - DNA, 120 bp, Artificial Sequence
  ENSG00000279804_16 (sequence is synthesized)
attagcctgtttcagcaatttatacatcagaaatctttagttcctgatgaattaaaaaaagaggtactagttcatctgtgatttaggttcatctgcaggaaataaaggaatcaaaataaa

SEQ ID NO: 797808 - DNA, 120 bp, Artificial Sequence
  ENSG00000279961_0 (sequence is synthesized)
atggctgaagttaatatcatttatgtcactgtattcattctgaaaggaattaccaaccggccagagcttcaggccccgtgctttggggtgtttttagttatctatctggtcacagtgctg

SEQ ID NO: 797809 - DNA, 120 bp, Artificial Sequence
  ENSG00000279961_1 (sequence is synthesized)
ggcaatcttgggttgattactttaatcaagattgatactcgactccacacacctatgtactatttcctcagccacctggcctttgttgacctttgttactcctctgctattacaccgaag

SEQ ID NO: 797810 - DNA, 120 bp, Artificial Sequence
  ENSG00000279961_2 (sequence is synthesized)
atgatggtgaattttgttgtggaacgcaacaccattcctttccatgcttgtgcaacccaactgggttgttttctcaccttcatgatcactgagtgtttccttctagcctccatggcctac

SEQ ID NO: 797811 - DNA, 120 bp, Artificial Sequence
  ENSG00000279961_3 (sequence is synthesized)
gattgctatgtcgccatctgtagtcccctgcattattcaacactgatgtcaagaagagtctgcattcaactggtggcagttccatatatatacagcttcctggttgccctcttccacacc

SEQ ID NO: 797812 - DNA, 120 bp, Artificial Sequence
  ENSG00000279961_4 (sequence is synthesized)
ctgacttactgtggcccaaacttaattaaccatttctattgtgatgacctccccttcttagctctgtcctgctcagacacacacatgaaggaaattctgatatttgcctttgctggcttt

SEQ ID NO: 797813 - DNA, 120 bp, Artificial Sequence
  ENSG00000279961_5 (sequence is synthesized)
gatatgatctcttcctcttccattgtcctcacctcctacatctttattattgccgctatcctaaggatccgctctactcaggggcaacacaaagccatttccacctgtggctcccatatg

SEQ ID NO: 797814 - DNA, 120 bp, Artificial Sequence
  ENSG00000279961_6 (sequence is synthesized)
gtgactgtcactattttctatggcacactgatctttatgtacctacagcccaaatcaaatcactccttggacacagacaagatggcttctgtattttacacagtggtgatccccatgtta

SEQ ID NO: 797815 - DNA, 120 bp, Artificial Sequence
  ENSG00000279961_7 (sequence is synthesized)
aaccccctaatctatagtctaaggaacaaagaagtgaaagatgcctcaaagaaagccttggataaaggttgtgaaaacttacagatattaacatttttaaaaataagaaaactttattaa

SEQ ID NO: 797816 - DNA, 120 bp, Artificial Sequence
  ENSG00000279968_0 (sequence is synthesized)
atgcagtaccctttccggaagctactccgcccctcgacagagtcttgctgtgtcgcccaagctagagtgcagtggtgtcatctgggctcattgcaacctccgcttcctggattcaagcaa

SEQ ID NO: 797817 - DNA, 85 bp, Artificial Sequence
  ENSG00000279968_1 (sequence is synthesized)
gctcactgcaacctctgcctccctgatttaagcgacaggcgcgcaccaccatgcccaggaacctgtggtgataaggaagatgtga

SEQ ID NO: 797818 - DNA, 120 bp, Artificial Sequence
  ENSG00000279968_2 (sequence is synthesized)
gcaaaaggcagtgccaaggaactaaaagaaaacaaattttgattacatttttggagttcctgggtcaagcagttcatgacactgaggcttttccgctacatgaataagtactttttcttt

SEQ ID NO: 797819 - DNA, 120 bp, Artificial Sequence
  ENSG00000279968_3 (sequence is synthesized)
cccgttaaagtgggtttgtgctggcttctctatcactcacaacaactggatactaactgaggcaacacttcctacctcttacacacattacacccataaaacagaaacaacatctaaaat

SEQ ID NO: 797820 - DNA, 120 bp, Artificial Sequence
  ENSG00000279968_4 (sequence is synthesized)
tagatttcaacacagctaccaagcagaaaagttcaaatcaacaagttatggataatgttttattgaaactacatttctcctcccaatgtgagtatggtgttggccaacatgttgcgtgtt

SEQ ID NO: 797821 - DNA, 120 bp, Artificial Sequence
  ENSG00000279968_5 (sequence is synthesized)
gattctgcttgcctttgtgtcctacatataggatgtgtactgtgtaatgaatcgtttcttcattatttttctcagcttgcatggttgcctccctcacctccattcacagagctcactgtg

SEQ ID NO: 797822 - DNA, 120 bp, Artificial Sequence
  ENSG00000279968_6 (sequence is synthesized)
acagcattcaaccttgtcttggtacaagtgtgtaatttacataatagtcgcctctgtactttcctcagtaacttaaacaaagaagaccatcactcactgtgcttgcctttcaaattagat

SEQ ID NO: 797823 - DNA, 120 bp, Artificial Sequence
  ENSG00000279968_7 (sequence is synthesized)
ttgatatcaaattaaagtctcattttattaagtttctgaagccaaagtctttgacctatgaaagtatgtttcaattatgaatggaaaagagaagctttgtgttattaacaggaaaagaat

SEQ ID NO: 797824 - DNA, 120 bp, Artificial Sequence
  ENSG00000279968_8 (sequence is synthesized)
tcaagtgtgatggttgtgtcaatgccattgggacatgccagtagtcagtaactcaacagacaagcctgctagacctgctttactcatttgtggcgctgtttcttcactttctactgactc

SEQ ID NO: 797825 - DNA, 120 bp, Artificial Sequence
  ENSG00000279968_9 (sequence is synthesized)
ctcatagggatcttaaattaattgtgcaactcgttagagtctctttatgtaaaatacatagtcttcatactattagaatgttacaatctggacctaccaatgtgaacaagtgaaaaaatg

SEQ ID NO: 797826 - DNA, 120 bp, Artificial Sequence
  ENSG00000279968_10 (sequence is synthesized)
tgctgtttattttaaccagcagtggtgttttagttagctatttatctccttatctcccaaatctcaaaaacactcagtagtttacaacatgaagcttttttttttttttttttgcttaca

SEQ ID NO: 797827 - DNA, 120 bp, Artificial Sequence
  ENSG00000279968_11 (sequence is synthesized)
ggtctgtgggtcagctgggataactctgcttcagactgtgggtcatcttggcttggcagactttaggttaaacataagactgtgtgtctcattctggggcccagactgaagggatagcag

SEQ ID NO: 797828 - DNA, 120 bp, Artificial Sequence
  ENSG00000279968_12 (sequence is synthesized)
ctagctggtgcatgctgtcttcgtggcaatcacaggggtgcgagaggcggagctgaaggacgcaagcacatttaagtcttttgcgtgtgtcatgttcaatgacattccatgtccagagcc

SEQ ID NO: 797829 - DNA, 120 bp, Artificial Sequence
  ENSG00000279968_13 (sequence is synthesized)
agctacatgggtggatcatgaatagaggggagaaatacaccccacccacttcagtgagctttaggtttacatgactgagggatggagggaagaattttggacaataatctcatctagtac

SEQ ID NO: 797830 - DNA, 120 bp, Artificial Sequence
  ENSG00000279968_14 (sequence is synthesized)
atatggcttcaatttgtatgaaccctatctctactcctccaaccttctgatctcaactgctattgctaatatgacctgtgggagcgagaggactttctataactaggctgaattttaaag

SEQ ID NO: 797831 - DNA, 120 bp, Artificial Sequence
  ENSG00000279968_15 (sequence is synthesized)
gaagagaatgacttccagatagcttattggctatcaatctaggagctcttacagctgagaaacattttgacccaaccctctggcttctttgttgatttatttttctgataaaattcattt

SEQ ID NO: 797832 - DNA, 120 bp, Artificial Sequence
  ENSG00000279968_16 (sequence is synthesized)
ttttaaatattaagctttaagaagtacatgtgttttaatgcagtaaaaaataaagcatatatgattcaatcatttgtaaatatacagtataactagtaagaaataaggggtctcattcac

SEQ ID NO: 797833 - DNA, 120 bp, Artificial Sequence
  ENSG00000279968_17 (sequence is synthesized)
acccagatttataggagccagcactatgtgctcggtatataatagaagctcagttagtatttgttgattgaagtaccttttcttatttactaatgattattattaacagataataatttg

SEQ ID NO: 797834 - DNA, 120 bp, Artificial Sequence
  ENSG00000279968_18 (sequence is synthesized)
ggcctgaaatagacatttccttttttaatataattatatatatgtgcatatatatatcatcaatatcctctgactttattagtgactgttaaccacgtcgaaaaaagtaaaggtgtttat

SEQ ID NO: 797835 - DNA, 120 bp, Artificial Sequence
  ENSG00000279968_19 (sequence is synthesized)
tatgcatgcatagaaaaatgatatgtttgtgttcgctctttttaggaccaagaaaaaattattggttgctgttttctcagttttggttttttttaaaataaattttactgtgtgtatttg

SEQ ID NO: 797836 - DNA, 120 bp, Artificial Sequence
  ENSG00000279968_20 (sequence is synthesized)
gtttccgattggttgcccggacttctcgcggctaaactaattttggctccaaggcggcgtgaagagtgtgattctgttcagcgaccgtgattctgttcagcgaccatgatgttgagcccc

SEQ ID NO: 797837 - DNA, 120 bp, Artificial Sequence
  ENSG00000279968_21 (sequence is synthesized)
taattgagagtctgttaccactattaatagctactctgttcgggccctacacataacggtgtatctaaacctctctacaattttatggacagagtcttgctgtgtcgcccaagctagagt

SEQ ID NO: 797838 - DNA, 120 bp, Artificial Sequence
  ENSG00000279968_22 (sequence is synthesized)
agaagaattgaattcttccgtagcatttataggacggtgataaaattaaagcaagcatttcttagtgaaacaaaccattgttcctgattgttcatcagatggaatctcactctgtcaccc

SEQ ID NO: 797839 - DNA, 120 bp, Artificial Sequence
  ENSG00000280021_0 (sequence is synthesized)
atgctgcaaaaccaggacaccatggaaatcctaagcaactcaacatctaaatttccaaccttcttgttgaccggcattcctggcctagagtctgcccatgtctggatctccattcctttc

SEQ ID NO: 797840 - DNA, 120 bp, Artificial Sequence
  ENSG00000280021_1 (sequence is synthesized)
tgttgtttttatgccattgccctctctgggaacagcgtgatcctgtttgtcatcattacccagcagagtctccatgaacccatgtattatttcctcttcaggctatcagccactgatctg

SEQ ID NO: 797841 - DNA, 120 bp, Artificial Sequence
  ENSG00000280021_2 (sequence is synthesized)
ggcttgactgtttcttcattgtcaacaacattaggtatcctctggtttgaggcacgtgaaatcagtctatatagctgcattgtccagatgttttttcttcatggattcacttttatggaa

SEQ ID NO: 797842 - DNA, 120 bp, Artificial Sequence
  ENSG00000280021_3 (sequence is synthesized)
tctggagtgctggtggctacagcctttgaccgttatgtggccatctgtgaccctctgaggtacactaccattctcactaattccagaatcattcaaatgggtcttctgatgattacacgt

SEQ ID NO: 797843 - DNA, 120 bp, Artificial Sequence
  ENSG00000280021_4 (sequence is synthesized)
gctatagtactaatattgccactacttttgctccttaagcctctctatttctgtagaatgaatgccctttctcactcctattgttaccatccagatgtgattcaattagcatgttcagac

SEQ ID NO: 797844 - DNA, 120 bp, Artificial Sequence
  ENSG00000280021_5 (sequence is synthesized)
attcgggcaaatagcatctgtggattaattgatctcatcctgaccactggaatagatacaccatgcattgtcctgtcatatatcttaattattcactctgtcctcagaattgcctcccct

SEQ ID NO: 797845 - DNA, 120 bp, Artificial Sequence
  ENSG00000280021_6 (sequence is synthesized)
gaagaatggcacaaggtcttcagcacctgtgtctcccatgtgggagcagttgctttcttctacatccacatgctgagcctgtccttggtgtatcgctatggtcggtcagcccccagagta

SEQ ID NO: 797846 - DNA, 120 bp, Artificial Sequence
  ENSG00000280021_7 (sequence is synthesized)
gtccattcagtgatggctaatgtatacctgcttttaccccctgtgctcaaccccatcatcgacagtgtaaaaacaaaacaaatccgcaaggctatgctcagtctgctgcttacaaaatga

SEQ ID NO: 797847 - DNA, 120 bp, Artificial Sequence
  ENSG00000280071_0 (sequence is synthesized)
gctgtcctcaccgcaatggcggctgtgagggccctggtggcctcgaggctcgctgcggcatctgcattcacgtccctgtcccccggcggtcggacgccttcccagcgcgcagcccttcac

SEQ ID NO: 797848 - DNA, 120 bp, Artificial Sequence; identical to SEQ ID NO: 475582
  ENSG00000280071_1 (sequence is synthesized)

SEQ ID NO: 797849 - DNA, 120 bp, Artificial Sequence; identical to SEQ ID NO: 475583
  ENSG00000280071_2 (sequence is synthesized)

SEQ ID NO: 797850 - DNA, 120 bp, Artificial Sequence; identical to SEQ ID NO: 475584
  ENSG00000280071_3 (sequence is synthesized)

SEQ ID NO: 797851 - DNA, 120 bp, Artificial Sequence; identical to SEQ ID NO: 475585
  ENSG00000280071_4 (sequence is synthesized)

SEQ ID NO: 797852 - DNA, 120 bp, Artificial Sequence; identical to SEQ ID NO: 475586
  ENSG00000280071_5 (sequence is synthesized)

SEQ ID NO: 797853 - DNA, 120 bp, Artificial Sequence; identical to SEQ ID NO: 475587
  ENSG00000280071_6 (sequence is synthesized)

SEQ ID NO: 797854 - DNA, 120 bp, Artificial Sequence; identical to SEQ ID NO: 475588
  ENSG00000280071_7 (sequence is synthesized)

SEQ ID NO: 797855 - DNA, 120 bp, Artificial Sequence; identical to SEQ ID NO: 475589
  ENSG00000280071_8 (sequence is synthesized)

SEQ ID NO: 797856 - DNA, 120 bp, Artificial Sequence; identical to SEQ ID NO: 475590
  ENSG00000280071_9 (sequence is synthesized)

SEQ ID NO: 797857 - DNA, 120 bp, Artificial Sequence; identical to SEQ ID NO: 475591
  ENSG00000280071_10 (sequence is synthesized)

SEQ ID NO: 797858 - DNA, 120 bp, Artificial Sequence
  ENSG00000280071_11 (sequence is synthesized)
tggcaacttcccacagccacatttcagacctgctgagactgctgagtgaggaatggcagtgaggtttcttcaattagtctcagttctcttaattttcaggaagaaagggaaattgcagct

SEQ ID NO: 797859 - DNA, 120 bp, Artificial Sequence; identical to SEQ ID NO: 475593
  ENSG00000280071_12 (sequence is synthesized)

SEQ ID NO: 797860 - DNA, 120 bp, Artificial Sequence; identical to SEQ ID NO: 475611
  ENSG00000280071_13 (sequence is synthesized)

SEQ ID NO: 797861 - DNA, 120 bp, Artificial Sequence; identical to SEQ ID NO: 475612
  ENSG00000280071_14 (sequence is synthesized)

SEQ ID NO: 797862 - DNA, 120 bp, Artificial Sequence; identical to SEQ ID NO: 475613
  ENSG00000280071_15 (sequence is synthesized)

SEQ ID NO: 797863 - DNA, 120 bp, Artificial Sequence
  ENSG00000280071_16 (sequence is synthesized)
ctgcctggtcactgtccagggaggcccctaaagtggagcctcaggaagaggtgcaggctcagagctcctgaaggaggtccctgctgcagccgtgtcacagccggggtgaaggtttcgccc

SEQ ID NO: 797864 - DNA, 120 bp, Artificial Sequence
  ENSG00000280071_17 (sequence is synthesized)
atggtctccacctcgggatcccgtccttgtcagagaagtgttccttggatgagcgcccagagggaggagcccatggccctttcttctgtgactgattaaaaatctcgatgaaacaagaca

SEQ ID NO: 797865 - DNA, 120 bp, Artificial Sequence
  ENSG00000280071_18 (sequence is synthesized)
cggggagggagggaggagggtgcgtgggcccgcggcctctgttctcagccaggagctgccgctgatcctgaaaactcacagctggttttcttgttttaactgaggggatttcacacgatg

SEQ ID NO: 797866 - DNA, 120 bp, Artificial Sequence
  ENSG00000280071_19 (sequence is synthesized)
tcactggtgacttaacaggaaggagaggcacactgcacttccctagaggaggcctggaattctcttggctcccagaggtgtccctaggcagtccctcaggacccctatcctttaccagac

SEQ ID NO: 797867 - DNA, 120 bp, Artificial Sequence
  ENSG00000280071_20 (sequence is synthesized)
aacaagcagcacgggagttaggagccggaaaccagcgtctgagtctcagcaccgcagcccgggttctgccagctgctccggaaggttccagggcgtgggccctctcgccctggtggcctc

SEQ ID NO: 797868 - DNA, 120 bp, Artificial Sequence
  ENSG00000280071_21 (sequence is synthesized)
ggtgaacatcagtgaggcgcactcgcgatggccgctcactaccgagttctgtcagccgaacaaggatgaggatctatcggaatcctctgtctccccacccacagtcactcacttaaggac

SEQ ID NO: 797869 - DNA, 120 bp, Artificial Sequence
  ENSG00000280090_0 (sequence is synthesized)
ccagacagctcgccaagagagaatgactctgagaaacagctcctcagtgactgagtttatccttgtgggattatcagaacagccagagctccagctccctcttttccttctattcttagg

SEQ ID NO: 797870 - DNA, 120 bp, Artificial Sequence
  ENSG00000280090_1 (sequence is synthesized)
gatctatgtgttcactgtggtgggcaacttgggcttgatcaccttaattgggataaatcctagccttcacacccccatgtactttttcctcttcaacttgtcctttatagatctctgtta

SEQ ID NO: 797871 - DNA, 120 bp, Artificial Sequence
  ENSG00000280090_2 (sequence is synthesized)
ttcctgtgtgtttacccccaaaatgctgaatgactttgtttcagaaagtatcatctcttatgtgggatgtatgactcagctatttttcttctgtttctttgtcaattctgagtgctatgt

SEQ ID NO: 797872 - DNA, 120 bp, Artificial Sequence
  ENSG00000280090_3 (sequence is synthesized)
gttggtatcaatggcctatgatcgctatgtggccatctgcaaccccctgctctacatggtcaccatgtccccaagggtctgctttctgctgatgtttggttcctatgtggtagggtttgc

SEQ ID NO: 797873 - DNA, 120 bp, Artificial Sequence
  ENSG00000280090_4 (sequence is synthesized)
gcgactgaccttctgtgattccaacgtcattgaccattatctgtgtgacgttctccccctcttgcagctctcctgcaccagcacccatgtcagtgagctggtatttttcattgttgttgg

SEQ ID NO: 797874 - DNA, 120 bp, Artificial Sequence
  ENSG00000280090_5 (sequence is synthesized)
agtaatcaccatgctatccagcataagcatcgtcatctcttacgctttgatactctccaacatcctctgtattccttctgcagagggcagatccaaagcctttagcacatggggctccca

SEQ ID NO: 797875 - DNA, 120 bp, Artificial Sequence
  ENSG00000280090_6 (sequence is synthesized)
cataattgctgttgctctgttttttgggtcagggacattcacctacttaacaacatcttttcctggctctatgaaccatggcagatttgcctcagtcttttacaccaatgtggttcccat

SEQ ID NO: 797876 - DNA, 120 bp, Artificial Sequence
  ENSG00000280090_7 (sequence is synthesized)
gcttaacccttcgatctacagtttgaggaataaggatgataaacttgccctgggcaaaaccctgaagagagtgctcttctaatgggtctcttcatatcactggcaaccgattctcggtaa

SEQ ID NO: 797877 - DNA, 120 bp, Artificial Sequence
  ENSG00000280094_0 (sequence is synthesized)
tgacttaaactgtctttcaggcaggctgactgtcactcatgatgagctttgcccctaatgcttcacactctccggtttttttgctccttgggttctcgagagctaacatctcctacactc

SEQ ID NO: 797878 - DNA, 120 bp, Artificial Sequence
  ENSG00000280094_1 (sequence is synthesized)
tcctcttcttcctgttcctggctatttacctgaccaccatactggggaatgtgacactggtgctgctcatctcctgggactccagactgcactcacccatgtattatctgcttcgtggcc

SEQ ID NO: 797879 - DNA, 120 bp, Artificial Sequence
  ENSG00000280094_2 (sequence is synthesized)
tctctgtgatagacatggggctatccacagttacactgccccagttgctggcccatttggtctctcattacccaaccattcctgctgcccgctgcttggctcagttctttttcttctatg

SEQ ID NO: 797880 - DNA, 120 bp, Artificial Sequence
  ENSG00000280094_3 (sequence is synthesized)
catttggggttacagatacacttgtcattgctgtcatggctctggatcgctatgtggccatctgtgaccccctgcactatgctttggtaatgaatcaccaacggtgtgcctgcttactag

SEQ ID NO: 797881 - DNA, 120 bp, Artificial Sequence
  ENSG00000280094_4 (sequence is synthesized)
ttgcgtgtgggactcgtcctgcctctttgctggactggggatgctgggggcaacgttaaccttcctcacttcttttgtgaccaccggccacttctgcgagcctcttgttctgacatacat

SEQ ID NO: 797882 - DNA, 120 bp, Artificial Sequence
  ENSG00000280094_5 (sequence is synthesized)
tctaatgagctggccatattctttgagggtggcttccttatgctgggcccctgtgccctcattgtactctcttatgtccgaattggggccgctattctacgtttgccttcagctgctggt

SEQ ID NO: 797883 - DNA, 120 bp, Artificial Sequence
  ENSG00000280094_6 (sequence is synthesized)
cgccgccgagcagtctccacctgtggatcccacctcaccatggttggtttcctctacggcaccatcatttgtgtctacttccagcctcccttccagaactctcagtatcaggacatggtg

SEQ ID NO: 797884 - DNA, 120 bp, Artificial Sequence
  ENSG00000280094_7 (sequence is synthesized)
gcttcagtaatgtatactgccattacacctttggccaacccatttgtgtatagcctccacaataaggatgtcaagggtgcactctgcaggctgcttgaatgggtgaaggtagacccctga

SEQ ID NO: 797885 - DNA, 120 bp, Artificial Sequence
  ENSG00000280165_0 (sequence is synthesized)
tttattttaattctccctctcttgctagcaacctgtggacttggcatctgactggtgcggcaaggaaggaggctggtaggtaagcgctactgtgcccaaccccgagctgcctcttcgcag

SEQ ID NO: 797886 - DNA, 120 bp, Artificial Sequence
  ENSG00000280165_1 (sequence is synthesized)
tcttcaggagcaagtcccccattccagctcctctggcagagtatggagttacctgcgtccggggcaggaaaccatgaatgtgcccttctgccctcttgcctttctgccactctttgagtt

SEQ ID NO: 797887 - DNA, 120 bp, Artificial Sequence
  ENSG00000280165_2 (sequence is synthesized)
cccgtccttaattgaagagccagtgactattggctgaagttcccccagcgatttgcatgaaccgagagggagtgtcttctgccgccctcccttcaagagcgctctgactgcagcctccca

SEQ ID NO: 797888 - DNA, 120 bp, Artificial Sequence
  ENSG00000280165_3 (sequence is synthesized)
gggaatgcgcggccgagggaatgcgcgcagctcacaggccctgggagtgagctggtgcccggcgacctggcacccgcgcctggatatggggcgtctacatcgtcccaggagcagcaccag

SEQ ID NO: 797889 - DNA, 120 bp, Artificial Sequence
  ENSG00000280165_4 (sequence is synthesized)
ctacaggaacctgccgcatctgtttctgtttttcctcttcgtgggacccttcagctgcctcgggagttacagccgggccaccgagcttctgtacagcctaaacgagggactacccgcggg

SEQ ID NO: 797890 - DNA, 120 bp, Artificial Sequence
  ENSG00000280165_5 (sequence is synthesized)
ggtgctcatcggcagcctggccgaggacctgcggctgctgcccaggtctgcagggaggccggacccgcagtcgcagctgccagagcgcaccggtgctgagtggaacccccctctctcctt

SEQ ID NO: 797891 - DNA, 120 bp, Artificial Sequence
  ENSG00000280165_6 (sequence is synthesized)
cagcctggcctcccggggactgagtggccagtacgtgaccctagacaaccgctctggggagctgcacacttcagctcaggagatcgacagggaggccctgtgtgttgaagggggtggagg

SEQ ID NO: 797892 - DNA, 120 bp, Artificial Sequence
  ENSG00000280165_7 (sequence is synthesized)
gactgcgtggagcggcagcgtttccatctcctcctctccttctgactcttgtcttttgctgctggatgtgcttgtcctgcctcaggaatacttcaggtttgtgaaggtgaagatcgccat

SEQ ID NO: 797893 - DNA, 120 bp, Artificial Sequence
  ENSG00000280165_8 (sequence is synthesized)
cagagacatcaatgacaacgccccgcagttccctgtttcccagatctcggtgtgggtcccggaaaatgcacctgtaaacacccgactggccatagagcatcctgctgtggacccagatgt

SEQ ID NO: 797894 - DNA, 120 bp, Artificial Sequence
  ENSG00000280165_9 (sequence is synthesized)
aggcattaatggggtacagacctatcgcttactggactaccatggtatgttcaccctggacgtggaggagaatgagaatggggagcgcaccccctacctaattgtcatgggtgctttgga

SEQ ID NO: 797895 - DNA, 120 bp, Artificial Sequence
  ENSG00000280165_10 (sequence is synthesized)
cagggaaacccaggaccagtatgtgagcatcatcatagctgaggatggtgggtctccaccacttttgggcagtgccactctcaccattggcatcagtgacattaatgacaattgccctct

SEQ ID NO: 797896 - DNA, 120 bp, Artificial Sequence
  ENSG00000280165_11 (sequence is synthesized)
cttcacagactcacaaatcaatgtcactgtgtatgggaatgctacagtgggcaccccaattgcagctgtccaggctgtggataaagacttggggaccaatgctcaaattacttattctta

SEQ ID NO: 797897 - DNA, 120 bp, Artificial Sequence
  ENSG00000280165_12 (sequence is synthesized)
cagtcagaaagttccacaagcatctaaggatttatttcacctggatgaaaacactggagtcattaaacttttcagtaagattggaggaagtgttctggagtcccacaagctcaccatcct

SEQ ID NO: 797898 - DNA, 120 bp, Artificial Sequence
  ENSG00000280165_13 (sequence is synthesized)
tgctaatggaccaggctgcatccctgctgtaatcactgctcttgtgtccattattaaagttattttcagaccccctgaaattgtccctcgttacatagcaaacgagatagatggtgtggt

SEQ ID NO: 797899 - DNA, 120 bp, Artificial Sequence
  ENSG00000280165_14 (sequence is synthesized)
ttatctgaaagaactggaacccgttaacactcccattgcgtttttcaccataagagatccagaaggtaaatacaaggttaactgctacctggatggtgaagggccgtttaggttatcacc

SEQ ID NO: 797900 - DNA, 120 bp, Artificial Sequence
  ENSG00000280165_15 (sequence is synthesized)
ttacaaaccatacaataatgaatatttactagagaccacaaaacctatggactatgagctacagcagttctatgaagtagctgtggtggcttggaactctgagggatttcatgtcaaaag

SEQ ID NO: 797901 - DNA, 120 bp, Artificial Sequence
  ENSG00000280165_16 (sequence is synthesized)
ggtcattaaagtgcaacttttagatgacaatgataatgctccaattttccttcaacccttaatagaactaaccatcgaagagaacaactcacccaatgcctttttgactaagctgtatgc

SEQ ID NO: 797902 - DNA, 120 bp, Artificial Sequence
  ENSG00000280165_17 (sequence is synthesized)
tacagatgccgacagcgaggagagaggccaagtttcatattttctgggacctgatgctccatcatatttttccttagacagtgtcacaggaattctgacagtttctactcagctggaccg

SEQ ID NO: 797903 - DNA, 120 bp, Artificial Sequence
  ENSG00000280165_18 (sequence is synthesized)
agaagagaaagaaaagtacagatacactgtcagagctgttgactgtgggaagccacccagagaatcagtagccactgtggccctcacagtgttggataaaaatgacaacagtcctcggtt

SEQ ID NO: 797904 - DNA, 120 bp, Artificial Sequence
  ENSG00000280165_19 (sequence is synthesized)
gatgggtcgccctctctgtggtgaaccagagtgatatttttgtcatagatacaggaaagggtatgctgagggctaaagtctctttggacagagagcagcaaagctcctatactttgtggg

SEQ ID NO: 797905 - DNA, 120 bp, Artificial Sequence
  ENSG00000280165_20 (sequence is synthesized)
ttgaagctgttgatgggggtgagcctgccctctcctctacagcaaaaatcacaattctccttctagatatcaatgacaaccctcctcttgttttgtttcctcagtctaatatgtcttatc

SEQ ID NO: 797906 - DNA, 120 bp, Artificial Sequence
  ENSG00000280165_21 (sequence is synthesized)
tgttagtactgccttctactctgccaggctccccggttacagaagtctatgctgtcgacaaagacacaggcatgaatgctgtcatagcttacagcatcatagggagaagaggtcctaggc

SEQ ID NO: 797907 - DNA, 120 bp, Artificial Sequence
  ENSG00000280165_22 (sequence is synthesized)
ctgagtccttcaggattgaccctaaaactggcaacattactttggaagaggcattgctgcagacagattatgggctccatcgcttactggtgaaagtgagtgatcatggttatcccgagc

SEQ ID NO: 797908 - DNA, 120 bp, Artificial Sequence
  ENSG00000280165_23 (sequence is synthesized)
ctctccactccacagtcatggtgaacctatttgtcaatgacactgtcagtaatgagagttacattgagagtcttttaagaaaagaaccagagattaatatagaggagaaagaaccacaaa

SEQ ID NO: 797909 - DNA, 120 bp, Artificial Sequence
  ENSG00000280165_24 (sequence is synthesized)
tctcaatagaaccgactcataggaaggtagaatctgtgtcttgtatgcccaccttagtagctctgtctgtaataagcttgggttccatcacactggtcacagggatgggcatatacatct

SEQ ID NO: 797910 - DNA, 120 bp, Artificial Sequence
  ENSG00000280165_25 (sequence is synthesized)
gtttaaggaaaggggaaaagcatcccagggaagatgaaaatttggaagtacagattccactgaaaggaaaaattgacttgcatatgcgagagagaaagccaatggatatttctaatattt

SEQ ID NO: 797911 - DNA, 120 bp, Artificial Sequence
  ENSG00000280165_26 (sequence is synthesized)
gatatttcatggtggaataacacagagaaatgttttaactgactttggatcttcatcacctaaaaaagagtgtgttgatggcagttccaatgaaggacaactaatttataacttgttcta

SEQ ID NO: 797912 - DNA, 120 bp, Artificial Sequence
  ENSG00000280165_27 (sequence is synthesized)
tattgtaaatagctgtttacaggtttttaaatttaaattcagaggttataaaatgtgtacagcatttttaagtgaaaattagtactaacagctataggacttgtatttaaaaaaaaaaaa

SEQ ID NO: 797913 - DNA, 120 bp, Artificial Sequence
  ENSG00000280165_28 (sequence is synthesized)
aaagcttggacatggtttgcagctttcatacaccaagcagatgattgataaaacctgggagtaaggtaagaaaaatggaacaaatttttatctaaaaattcctgtcaccacaagagggca

SEQ ID NO: 797914 - DNA, 120 bp, Artificial Sequence
  ENSG00000280165_29 (sequence is synthesized)
tcagctgctcctttgcaggaaactggggtattgtacttggcagttgtacatgaaattaatgaaagagtatattttaaatatattgtttttaacattaaacaaatatgaaattaaagtaaa

SEQ ID NO: 797915 - DNA, 120 bp, Artificial Sequence
  ENSG00000280165_30 (sequence is synthesized)
ttaaatttcaccctatttaaacatatgataaaaaaagaaatgcacttgtaaacagaatgtttattacctcataagtgcatatatagtgtgaaagagaaggcattaaaaagaagtgcaatt

SEQ ID NO: 797916 - DNA, 120 bp, Artificial Sequence
  ENSG00000280165_31 (sequence is synthesized)
cctttttagcaaggataaaatcattgccttgtgttacagattcagcctgctgaagagtattccactttctgtgtactcgaattgctttctgtttgctttaccactgcacttgttattatt

SEQ ID NO: 797917 - DNA, 120 bp, Artificial Sequence
  ENSG00000280165_32 (sequence is synthesized)
acaagggaaatagatttatacatacatatatatattcttcattacaggaaatgtaactagatattgtgcccaagaaaaacagccagaagcaaagaaatgcttcaatctttagttgcttca

SEQ ID NO: 797918 - DNA, 120 bp, Artificial Sequence
  ENSG00000280165_33 (sequence is synthesized)
taggcattcatgacattttagtgctttcacaacttgttggtcgtactttatacttgggttatatattagacttttataggcttgaaatcatccatcacataagaaaatagaaatcatatt

SEQ ID NO: 797919 - DNA, 120 bp, Artificial Sequence
  ENSG00000280165_34 (sequence is synthesized)
aaaagtgaattcttctagaggcttgtgtacactactggttgttttagttgggccttttatatgaaagttatactgtacttatctttttgttgttgtttaggtttgttgactaccatttct

SEQ ID NO: 797920 - DNA, 120 bp, Artificial Sequence
  ENSG00000280165_35 (sequence is synthesized)
ggcttcctttctttggttttggattaaatccaacagtttatttgtaagccctgcagcagatttctttgataatttagcttttactgaatctcttgcaatgaagaaagctatttcatcagt

SEQ ID NO: 797921 - DNA, 120 bp, Artificial Sequence
  ENSG00000280165_36 (sequence is synthesized)
gatttatcactttcaattcattgtgtgagctggaaatattattttatatgagagctatagcaaaataatctgtataaacaaggaatgtgttagcttaaactggatcattttactttttgg

SEQ ID NO: 797922 - DNA, 120 bp, Artificial Sequence
  ENSG00000280165_37 (sequence is synthesized)
catcatgcatctgtactgtaccaaaagtgtttatatgtctgcaaattaaaggtatatattttcataatttctttctcacttttagcattttatatttgaacatgggcttgttatttcact

SEQ ID NO: 797923 - DNA, 120 bp, Artificial Sequence
  ENSG00000280165_38 (sequence is synthesized)
gaagtgcctgtcatttgtttgtttttagggttaaatgtgggtaacctgtagtattctgctatactaaagtttatattaaatgaattcattactcaattaaacattgggtaaattattaaa

SEQ ID NO: 797924 - DNA, 120 bp, Artificial Sequence
  ENSG00000280204_0 (sequence is synthesized)
atgaagacttttagttcctttcttcagatcggcagaaatatgcatcaaggaaaccaaaccaccatcactgaattcattctcctgggatttttcaagcaggatgagcatcaaaacctcctc

SEQ ID NO: 797925 - DNA, 120 bp, Artificial Sequence
  ENSG00000280204_1 (sequence is synthesized)
tttgtgcttttcttgggtatgtacctggtcactgtgattgggaacgggctcatcattgtggctatcagcttggatacgtaccttcatacccccatgtatctcttccttgccaatctatcc

SEQ ID NO: 797926 - DNA, 120 bp, Artificial Sequence
  ENSG00000280204_2 (sequence is synthesized)
tttgctgatatttcctccatttccaactcagtccccaaaatgctggtgaatattcaaaccaagagtcaatccatctcttatgagagctgcatcacacagatgtacttttctattgtgttt

SEQ ID NO: 797927 - DNA, 120 bp, Artificial Sequence
  ENSG00000280204_3 (sequence is synthesized)
gtcgtcattgacaatttgctcttggggaccatggcctatgaccactttgtggcgatctgccaccctctgaattatacaattctcatgcggcccaggttcggcattttgctcacagtcatc

SEQ ID NO: 797928 - DNA, 120 bp, Artificial Sequence
  ENSG00000280204_4 (sequence is synthesized)
attattgctctgacacacacccttctgctcattcaattgctcttctgtaaccacaacactctcccacacttcttctgtgacttggcccctctgctcaaactgtcctgttcagatacattg

SEQ ID NO: 797929 - DNA, 120 bp, Artificial Sequence
  ENSG00000280204_5 (sequence is synthesized)
atcaatgagcttgtgttgtttattgtgggtttatcagttatcatcttcccctttacactcagcttcttttcctatgtctgcatcatcagagctgtcctgagagtatcttccacacaggga

SEQ ID NO: 797930 - DNA, 120 bp, Artificial Sequence
  ENSG00000280204_6 (sequence is synthesized)
aagtggaaagccttctccacttgtggctctcacctgacagttgtattactgttctacggaaccattgtaggcgtgtactttttcccctcctccactcaccctgaggacactgataagatt

SEQ ID NO: 797931 - DNA, 120 bp, Artificial Sequence
  ENSG00000280204_7 (sequence is synthesized)
ggtgctgtcctattcactgtggtgacacccatgataaaccccttcatctacagcttgaggaataaggatatgaaaggtgccctgagaaagctcatcaatagaaaaatttcttccctttga

SEQ ID NO: 797932 - DNA, 120 bp, Artificial Sequence
  ENSG00000280204_8 (sequence is synthesized)
agtaactttctgagatttttaccatcattcagaggtgaatctcttcagaatccagcattggtcttgaccagctagacagtcaccttaagaattcagaacaatttgtgcaggactactggt

SEQ ID NO: 797933 - DNA, 120 bp, Artificial Sequence
  ENSG00000280204_9 (sequence is synthesized)
ccctggacctctacattcttttagtccacataatcagataaatgattcagcccagagcgtatggcacagttgtgatggttcaacttttgatgaacttgcaggtatctgtctcctattcca

SEQ ID NO: 797934 - DNA, 120 bp, Artificial Sequence
  ENSG00000280204_10 (sequence is synthesized)
acctctgaaggggttggagcttttccacttagctcttgtcttggaaacaaaacctgtaactgccatggtaagtcacaagaataacacgcatccttagagagtagattggtggttaccagg

SEQ ID NO: 797935 - DNA, 120 bp, Artificial Sequence
  ENSG00000280204_11 (sequence is synthesized)
gcccaggggtgggaagatggaatggaggtgatgagttgttgattaatgggtacaacaatacagttagatagaagaaataagacctattgtttgataaatcattagggggactatagtaaa

SEQ ID NO: 797936 - DNA, 120 bp, Artificial Sequence
  ENSG00000280236_0 (sequence is synthesized)
agcttctatacaacttctgaggtttggaagaagtacaacagtactctccttccaagtatctttggcttggtgagaaaattctgagccggaaggattctgattgcgattagtgttccatag

SEQ ID NO: 797937 - DNA, 120 bp, Artificial Sequence
  ENSG00000280236_1 (sequence is synthesized)
attattttgtcttttgtctgaagtgatgctgaatacaacctcagtcaccgaatttctcctcttgggagtgacagacattcaagaactgcagccttttctcttcgtggttttcctcaccat

SEQ ID NO: 797938 - DNA, 120 bp, Artificial Sequence
  ENSG00000280236_2 (sequence is synthesized)
ctacttcatcagtgtgactgggaatggagccgttctgatgattgtcatctccgatcctagactccattcccttatgtatttcttcctgggaaacctgtcctacctggatatctgttactc

SEQ ID NO: 797939 - DNA, 120 bp, Artificial Sequence
  ENSG00000280236_3 (sequence is synthesized)
tacggtgacactgccaaaaatgctgcagaactttctctctacacacaaagcaatttctttcttgggatgcataagccagcttcatttcttccactccctgggcagcacggagtccatgtt

SEQ ID NO: 797940 - DNA, 120 bp, Artificial Sequence
  ENSG00000280236_4 (sequence is synthesized)
attggttttttccatgccctgctgcactccgtaatgacttctcgcttgaacttctgtggttccaaccgtatccatcattttctctgtgatattaagccattgctaaagctggcctgtggg

SEQ ID NO: 797941 - DNA, 120 bp, Artificial Sequence
  ENSG00000280236_5 (sequence is synthesized)
aacactgagcttaatcagtggctactcagtactgtcacggggacaattgccatgggccccttctttctgacacttctctcctatttctacattatcacttatctcttcttcaagacccgt

SEQ ID NO: 797942 - DNA, 120 bp, Artificial Sequence
  ENSG00000280236_6 (sequence is synthesized)
tcttgtagcatgctctgtaaagcactgtccacttgtgcctcccacttcatggtagttattcttttctatgcacctgttcttttcacctatatccatcctgcgttagagagcttcatggac

SEQ ID NO: 797943 - DNA, 120 bp, Artificial Sequence
  ENSG00000280236_7 (sequence is synthesized)
caggaccggattgttgccatcatgtacactgtggtcactcctgtactaaacccactgatctatactttgaggaacaaggaagtgaagggggccttgggtagagtgatcagaaggctttga

SEQ ID NO: 797944 - DNA, 120 bp, Artificial Sequence
  ENSG00000280236_8 (sequence is synthesized)
agaagacagaactttcagtggtctaaattcttagatactttagaagaagacactattgggtaaaatgaaggaagaattgttgagtctattggaagagtttttcttattcagagattcagg

SEQ ID NO: 797945 - DNA, 120 bp, Artificial Sequence
  ENSG00000280236_9 (sequence is synthesized)
gaggcataaataaccagcaatgaaaaagtagagatgtgtaattttactgcttctcagatggtttataagtgtaaaatagaggcaactggataaaagaaaaaaaagtccaatctagttgta

SEQ ID NO: 797946 - DNA, 120 bp, Artificial Sequence
  ENSG00000280236_10 (sequence is synthesized)
gtaaacaatacatttctaagtaatatgaggaatacttgaaaatgcaagacactagccatggaaccctaatgctgaaaattttttggaatatcagttgatgtaattgacttattatgtatt

SEQ ID NO: 797947 - DNA, 120 bp, Artificial Sequence
  ENSG00000280236_11 (sequence is synthesized)
ctaacatgtacttgtatgcaattgcatgtagaattttgcctatattgcccatgtattgtatagatagatgatatttaggactgtttgtctgtgagatccttttagtttaacacattttag

SEQ ID NO: 797948 - DNA, 120 bp, Artificial Sequence; identical to SEQ ID NO: 793821
  ENSG00000280267_0 (sequence is synthesized)

SEQ ID NO: 797949 - DNA, 120 bp, Artificial Sequence; identical to SEQ ID NO: 768129
  ENSG00000280267_1 (sequence is synthesized)

SEQ ID NO: 797950 - DNA, 120 bp, Artificial Sequence; identical to SEQ ID NO: 768130
  ENSG00000280267_2 (sequence is synthesized)

SEQ ID NO: 797951 - DNA, 120 bp, Artificial Sequence; identical to SEQ ID NO: 768131
  ENSG00000280267_3 (sequence is synthesized)

SEQ ID NO: 797952 - DNA, 120 bp, Artificial Sequence; identical to SEQ ID NO: 768132
  ENSG00000280267_4 (sequence is synthesized)

SEQ ID NO: 797953 - DNA, 120 bp, Artificial Sequence; identical to SEQ ID NO: 742357
  ENSG00000280267_5 (sequence is synthesized)

SEQ ID NO: 797954 - DNA, 120 bp, Artificial Sequence; identical to SEQ ID NO: 742358
  ENSG00000280267_6 (sequence is synthesized)

SEQ ID NO: 797955 - DNA, 120 bp, Artificial Sequence; identical to SEQ ID NO: 742374
  ENSG00000280267_7 (sequence is synthesized)

SEQ ID NO: 797956 - DNA, 120 bp, Artificial Sequence; identical to SEQ ID NO: 742375
  ENSG00000280267_8 (sequence is synthesized)

SEQ ID NO: 797957 - DNA, 120 bp, Artificial Sequence; identical to SEQ ID NO: 768137
  ENSG00000280267_9 (sequence is synthesized)

SEQ ID NO: 797958 - DNA, 120 bp, Artificial Sequence; identical to SEQ ID NO: 768138
  ENSG00000280267_10 (sequence is synthesized)

SEQ ID NO: 797959 - DNA, 120 bp, Artificial Sequence; identical to SEQ ID NO: 768139
  ENSG00000280267_11 (sequence is synthesized)

SEQ ID NO: 797960 - DNA, 120 bp, Artificial Sequence; identical to SEQ ID NO: 742379
  ENSG00000280267_12 (sequence is synthesized)

SEQ ID NO: 797961 - DNA, 120 bp, Artificial Sequence; identical to SEQ ID NO: 768141
  ENSG00000280267_13 (sequence is synthesized)

SEQ ID NO: 797962 - DNA, 120 bp, Artificial Sequence; identical to SEQ ID NO: 742381
  ENSG00000280267_14 (sequence is synthesized)

SEQ ID NO: 797963 - DNA, 120 bp, Artificial Sequence
  ENSG00000280314_0 (sequence is synthesized)
atggaacaacacaatctaacaacggtgaatgaattcattcttacgggaatcacagatatcgctgagctgcaggcaccattatttgcattgttcctcatgatctatgtgatctcagtgatg

SEQ ID NO: 797964 - DNA, 120 bp, Artificial Sequence
  ENSG00000280314_1 (sequence is synthesized)
ggcaatttgggcatgattgtcctcaccaagttggactccaggttgcaaacccctatgtacttttttctcagacatctggctttcatggatcttggttattcaacaactgtgggacccaaa

SEQ ID NO: 797965 - DNA, 120 bp, Artificial Sequence
  ENSG00000280314_2 (sequence is synthesized)
atgttagtaaattttgttgtggataagaatataatttcttattatttttgtgcaacacagctagctttctttcttgtgttcattggtagtgaactttttattctctcagccatgtcctac

SEQ ID NO: 797966 - DNA, 120 bp, Artificial Sequence
  ENSG00000280314_3 (sequence is synthesized)
ttcatttctcttctagtcaccataaagatttttactttatccttctgtggctacaacgtcattagtcatttctactgtgacagtctccctttgttacctttgctttgttcaaatacacat

SEQ ID NO: 797967 - DNA, 120 bp, Artificial Sequence
  ENSG00000280314_4 (sequence is synthesized)
gaaattgaattgataattctgatctttgcagctattgatttgatttcatctcttctgatagttcttttatcttacctgctcatccttgtagccattctcaggatgaattctgctggcaga

SEQ ID NO: 797968 - DNA, 120 bp, Artificial Sequence
  ENSG00000280314_5 (sequence is synthesized)
caaaaggctttttctacctgtggagcccacctgacagtggtcatagtgttctatgggactttgcttttcatgtacgtgcagcccaagtccagtcattcctttgacactgataaagtggct

SEQ ID NO: 797969 - DNA, 120 bp, Artificial Sequence
  ENSG00000280314_6 (sequence is synthesized)
tccatattttacaccctggttatccccatgttgaatcccttgatctatagtttacgaaacaaagatgtaaaatatgccctacgaaggacatggaataacttatgtaatatttttgtttaa

SEQ ID NO: 797970 - DNA, 120 bp, Artificial Sequence
  ENSG00000280314_7 (sequence is synthesized)
ggcatgaatttttgctctgcatacttccagaagacataacaagcataactgattcaacatatatttacatatgtctcatacatgataggctcttctaattgctatacatagattaataaa

SEQ ID NO: 797971 - DNA, 120 bp, Artificial Sequence
  ENSG00000280314_8 (sequence is synthesized)
tgaattgtattcacaataagtccattttatataacagtagaatgtgcacgatggatatagacaaagaaaaaagggagacaaggaaagctagtatgctgggtggcagtaggaaacagtggt

SEQ ID NO: 797972 - DNA, 120 bp, Artificial Sequence
  ENSG00000280314_9 (sequence is synthesized)
cattacagaagggagttacgaggattccagtgttttttatctgctactggaataaaatttacagtgtgtgtgcttctgtatgtttctgtttgtgtgtttttgtgtatataagcattttcc

SEQ ID NO: 797973 - DNA, 120 bp, Artificial Sequence
  ENSG00000280314_10 (sequence is synthesized)
ttctgttttagccttcatactttttgcttgtatattctgacattgcatttaatactggttgtttagatgatatgtgatgattttaagtcttacagatgtgctcgaataattactattccg

SEQ ID NO: 797974 - DNA, 120 bp, Artificial Sequence
  ENSG00000280314_11 (sequence is synthesized)
aatattaggatcctactatttccttatcaatgtttttatttccacatagaagtctgttaaccgaacatactttgtagctcaataatcggtaaattctgattagcacctgattttgtttca

SEQ ID NO: 797975 - DNA, 120 bp, Artificial Sequence
  ENSG00000280314_12 (sequence is synthesized)
gttagcccattctgtttacatgagtagatatatcaattatgcttaagtttagaagacatccatagaaattctcaggtttattctttctctctagttgttcttgcttaataactgcctttt

SEQ ID NO: 797976 - DNA, 120 bp, Artificial Sequence
  ENSG00000280314_13 (sequence is synthesized)
tcacagattttcccgttatttatctaaaaaaaagtaataaactgtggttaaaatttgtgttccagttgtttttacatctttgaggagggggaccattctatgatgaattaactttgtagt

SEQ ID NO: 797977 - DNA, 120 bp, Artificial Sequence
  ENSG00000280314_14 (sequence is synthesized)
ctctcactgagttgacaatccataatttttatcaatatgcactatatcgaatgcactatattttcatttacttcactgtttgattgcatcagttgatttttctacttgtacaaagcaaat

SEQ ID NO: 797978 - DNA, 120 bp, Artificial Sequence
  ENSG00000280314_15 (sequence is synthesized)
aaaagtaataaaatgcactacaccatactgtatctatctgctggctattacagatgtcctttgacagttacagaccttcaccatgcaagtgaggtctgatctgtatgcaatgatatcgtt

SEQ ID NO: 797979 - DNA, 120 bp, Artificial Sequence
  ENSG00000280314_16 (sequence is synthesized)
atcttgccttttaaacatggttgctttccttaactccatatgttttcttatgtattttgatttcctttattctttttaataatcctaagaatttattgaaagtatcagagtctacaatat

SEQ ID NO: 797980 - DNA, 120 bp, Artificial Sequence
  ENSG00000280314_17 (sequence is synthesized)
tttcttggttcaccatcataaaataaaatcccatgtgcagccaaagaaacactaatgaatatatctcattggaataaattaaacattgcatagcacattgtcatgtgaggataaatatta

SEQ ID NO: 797981 - DNA, 120 bp, Artificial Sequence
  ENSG00000280411_0 (sequence is synthesized)
atcacataacaaccacattcctcctctaaagaagcccctgggagcacagctcatcaccatggactggacctggaggttcctctttgtggtggcagcagctacaggtgtccagtcccaggt

SEQ ID NO: 797982 - DNA, 120 bp, Artificial Sequence
  ENSG00000280411_1 (sequence is synthesized)
ggtctcctgcaaggcttctggaggcaccttcagcagctatgctatcagctgggtgcgacaggcccctggacaagggcttgagtggatgggagggatcatccctatctttggtacagcaaa

SEQ ID NO: 797983 - DNA, 120 bp, Artificial Sequence
  ENSG00000280411_2 (sequence is synthesized)
ctacgcacagaagttccagggcagagtcacgattaccgcggacgaatccacgagcacagcctacatggagctgagcagcctgagatctgaggacacggccgtgtattactgtgcgagaga

SEQ ID NO: 797984 - DNA, 120 bp, Artificial Sequence
  ENSG00000280433_0 (sequence is synthesized)
acattatacaacgtgaaggctgagatctttcccccttcgggaatggagtattgcagaacaggctccctctgctccctggaggttttgatcacgaggctctcagacctcttggaggtggat

SEQ ID NO: 797985 - DNA, 120 bp, Artificial Sequence
  ENSG00000280433_1 (sequence is synthesized)
aaagatgaagcactgactgaatctgatgagcatttttcgacaaagcttatgtatgaagttgtcgacaacagtagcaactgggcagtgtgtgggaaaagctgcggtgtcatctccatgcca

SEQ ID NO: 797986 - DNA, 120 bp, Artificial Sequence
  ENSG00000280433_2 (sequence is synthesized)
gtggctgctcgggccactcacagggtccacatggaagtgatgccgctcttcgccgggtatctccccctgcccgacgtcaggctgttcaagtacctcccccatcattctgcacactcctcc

SEQ ID NO: 797987 - DNA, 120 bp, Artificial Sequence
  ENSG00000280433_3 (sequence is synthesized)
caactggacgctgacagctggatagaaaacgacagcctgtcagtagacaagcacggggacgaccagccggacagcagcagcctcaagagcaggggcagcgtgcattcggcctgcagcagc

SEQ ID NO: 797988 - DNA, 120 bp, Artificial Sequence
  ENSG00000280433_4 (sequence is synthesized)
gagcacaaaggcctacccatgccccggctgcaggcactgccggccggccaggtcttcaactccagctcgggcacacaagtcctggtcatccccagccaagatgaccacgtcctggaagtc

SEQ ID NO: 797989 - DNA, 120 bp, Artificial Sequence
  ENSG00000280433_5 (sequence is synthesized)
agtgtaacatgacaacgccagggtgaacacacgccacttcccagctaggagtgcactttatgggactgtgactggactcttccgttctggctccagccagaccttcagtggtcctgcctg

SEQ ID NO: 797990 - DNA, 120 bp, Artificial Sequence
  ENSG00000280433_6 (sequence is synthesized)
gccgtggggacatcagagagtgtcatcacgcagctggccagctgagttctgttgttgttttcatgccgcctgtgatctcagattcctgcttttctcaccccgtccccatgctggtgtccg

SEQ ID NO: 797991 - DNA, 120 bp, Artificial Sequence
  ENSG00000280433_7 (sequence is synthesized)
acgccgcttactcagagccctggcctccctccccctacctcacacgctgctcatgaaagtttccacccacgctgtctccacggaacagcctccgtctgctggctcttcgtggaaggccat

SEQ ID NO: 797992 - DNA, 120 bp, Artificial Sequence
  ENSG00000280433_8 (sequence is synthesized)
ttgtctttcaggtagacactcagcagccctcacggtcttagtgacgtgtgtgcctttctggtcacacagctgcccagtttcctgatcggggtggatttgtgtcccctaaggggtaaaaca

SEQ ID NO: 797993 - DNA, 120 bp, Artificial Sequence
  ENSG00000280433_9 (sequence is synthesized)
gccgtttaccgcagatcctctcattgtgcttttctagaataacacccttctaggggaggcgggtgggggagggagggatcataaccccttctgtgccttgggatgccggagctgggggac

SEQ ID NO: 797994 - DNA, 120 bp, Artificial Sequence
  ENSG00000280433_10 (sequence is synthesized)
ctggaggcccatcagccggagccacgtgaaaggtactgaagaaagctgagacccggctgtgaggagcgcctcagcggtgaggtggtttagggataaatgtttctggaaccctgtggtccc

SEQ ID NO: 797995 - DNA, 120 bp, Artificial Sequence
  ENSG00000280433_11 (sequence is synthesized)
ccataatgttgatagaatatcatatgcactgggagttaaatatatttaatttaatgatcattatatatgtgggggttaatatgttgtttttctgtccctttaaagtctttacatgtaatt

SEQ ID NO: 797996 - DNA, 120 bp, Artificial Sequence
  ENSG00000280433_12 (sequence is synthesized)
gtagctgtataatcgttatttttcttttgcatcttaagtcttagaaattaagatattccatcgtgaggatgagagaggtcctcagtgtgtttttggtctggttgtagggaaggactcaag

SEQ ID NO: 797997 - DNA, 120 bp, Artificial Sequence
  ENSG00000280433_13 (sequence is synthesized)
tcctggaatgtcctccactggtctactgagttgcagtcacactgttccaatggattatttgctttcggttgtaaatttaattgtacatatggttgatttattatttttaaaaatacagac

SEQ ID NO: 797998 - DNA, 120 bp, Artificial Sequence
  ENSG00000280433_14 (sequence is synthesized)
taactgatgtaatgtttatgtataagttgcaccaaaaatcaaggacaaaaataagtgtgtttgtttttacaggtgtgaaagtcacagcttgtaaataagtgttgtatgtattaaaccttt

SEQ ID NO: 797999 - DNA, 120 bp, Artificial Sequence
  ENSG00000280433_15 (sequence is synthesized)
tgaaatagagtactcttaatttactgggcaaatgtgcttggaattgaacttgacaagattagctcaagcagatagagtcgggtccagcagtgggtggccctcgtgtgaatccccgtggat

SEQ ID NO: 798000 - DNA, 120 bp, Artificial Sequence
  ENSG00000280433_16 (sequence is synthesized)
gtgcaagttgtggagagaaggagcaccgggttcctgcccagcactgtgcttgcgggaggcggtggggcatgggaggaaggaggcacagaccggggaaatatgacagccgtcatttccagt

SEQ ID NO: 798001 - DNA, 120 bp, Artificial Sequence
  ENSG00000280433_17 (sequence is synthesized)
attctctgtgttgtcttttagctcattcaataaataaaggtggtgtgatttttttttcctcctgtctttttcatttgtagaaactggagacgtgtaaagaagataaataattgtgtaatt

SEQ ID NO: 798002 - DNA, 120 bp, Artificial Sequence
  ENSG00000280433_18 (sequence is synthesized)
aaactttccagaaatttatcttcctcatgtgcagtttaacaaacttggtcaaactagttagcaaattagaacttcagaatctaatgatagtttagggtttctaaaataaggttttttatt

SEQ ID NO: 798003 - DNA, 120 bp, Artificial Sequence
  ENSG00000280433_19 (sequence is synthesized)
gtaaaaattgacgattgccctgcatttctaccaagtcctgtgaataaagagatgggagatttgattccgtcagaagagactgtaatccgtgtcgtcagcctgggagccttccccagtgta

SEQ ID NO: 798004 - DNA, 120 bp, Artificial Sequence
  ENSG00000280433_20 (sequence is synthesized)
atgtagctttctctcttaccttctggaagagggaatgtttcatttattactgtttgattttcttgtatctggttctactcccaggatgaaattatccaactacatatatatttagaggaa

SEQ ID NO: 798005 - DNA, 120 bp, Artificial Sequence
  ENSG00000280433_21 (sequence is synthesized)
gaaagtgaaggggaaatttaaaatgtttacggcgcttaattgcctggaaatgaaatgaaatcaaatttatcagtttttttccccctaattacccaaaagatcttttgcaaactatgttac

SEQ ID NO: 798006 - DNA, 120 bp, Artificial Sequence
  ENSG00000280433_22 (sequence is synthesized)
atgaatgcttctgcctctttaagacaaagaagaatgtcacccaaaattgtcatttttttcttaatgttcatcataaaagtcctaaaagagtaactgtaattggatgtttattgtttttat

SEQ ID NO: 798007 - DNA, 120 bp, Artificial Sequence
  ENSG00000280433_23 (sequence is synthesized)
ctaaagtaaggtgtatgtgtttgagacaagctggttttgttgataaagagatgttaaataattgtgaagccagatatgcaatgtgtatctaaaaagcaaggaatttgcagccgttttaca

SEQ ID NO: 798008 - DNA, 120 bp, Artificial Sequence
  ENSG00000280433_24 (sequence is synthesized)
aatatctgtggaacatgtaaatactgtcaaatggaaaataaaataagttataatttttgtgaatttcatgggatgtcctatgattggaaaaattataactcttctgattctaatgtggaa

SEQ ID NO: 798009 - DNA, 120 bp, Artificial Sequence
  ENSG00000280433_25 (sequence is synthesized)
attgttgtatttaatctgaaaatgactttacctacaacagttccattgtcagcacagcctaggagggtcagattcctgtattaattactcttagtggagatgccagatatcccatacaga

SEQ ID NO: 798010 - DNA, 120 bp, Artificial Sequence; identical to SEQ ID NO: 475497
  ENSG00000280433_26 (sequence is synthesized)

SEQ ID NO: 798011 - DNA, 120 bp, Artificial Sequence
  ENSG00000280433_27 (sequence is synthesized)
tataaaagggcaaactgggctgatgtaaatgttttactttcaactgtgttctttaaaataaatcctacctggtttttaaattttatttttcatgaaaatgctcctttctctacatttatt

SEQ ID NO: 798012 - DNA, 120 bp, Artificial Sequence; identical to SEQ ID NO: 475499
  ENSG00000280433_28 (sequence is synthesized)

SEQ ID NO: 798013 - DNA, 120 bp, Artificial Sequence; identical to SEQ ID NO: 475500
  ENSG00000280433_29 (sequence is synthesized)

SEQ ID NO: 798014 - DNA, 120 bp, Artificial Sequence; identical to SEQ ID NO: 475507
  ENSG00000280433_30 (sequence is synthesized)

SEQ ID NO: 798015 - DNA, 120 bp, Artificial Sequence; identical to SEQ ID NO: 475508
  ENSG00000280433_31 (sequence is synthesized)

SEQ ID NO: 798016 - DNA, 120 bp, Artificial Sequence; identical to SEQ ID NO: 475509
  ENSG00000280433_32 (sequence is synthesized)

SEQ ID NO: 798017 - DNA, 120 bp, Artificial Sequence; identical to SEQ ID NO: 475510
  ENSG00000280433_33 (sequence is synthesized)

SEQ ID NO: 798018 - DNA, 120 bp, Artificial Sequence; identical to SEQ ID NO: 475511
  ENSG00000280433_34 (sequence is synthesized)

SEQ ID NO: 798019 - DNA, 120 bp, Artificial Sequence; identical to SEQ ID NO: 475512
  ENSG00000280433_35 (sequence is synthesized)

SEQ ID NO: 798020 - DNA, 120 bp, Artificial Sequence; identical to SEQ ID NO: 475513
  ENSG00000280433_36 (sequence is synthesized)

SEQ ID NO: 798021 - DNA, 120 bp, Artificial Sequence; identical to SEQ ID NO: 475514
  ENSG00000280433_37 (sequence is synthesized)

SEQ ID NO: 798022 - DNA, 120 bp, Artificial Sequence; identical to SEQ ID NO: 475515
  ENSG00000280433_38 (sequence is synthesized)

SEQ ID NO: 798023 - DNA, 89 bp, Artificial Sequence; identical to SEQ ID NO: 475516
  ENSG00000280433_39 (sequence is synthesized)

SEQ ID NO: 798024 - DNA, 84 bp, Artificial Sequence; identical to SEQ ID NO: 475517
  ENSG00000280433_40 (sequence is synthesized)

SEQ ID NO: 798025 - DNA, 120 bp, Artificial Sequence; identical to SEQ ID NO: 475518
  ENSG00000280433_41 (sequence is synthesized)

SEQ ID NO: 798026 - DNA, 120 bp, Artificial Sequence; identical to SEQ ID NO: 475519
  ENSG00000280433_42 (sequence is synthesized)

SEQ ID NO: 798027 - DNA, 120 bp, Artificial Sequence
  ENSG00000280670_0 (sequence is synthesized)
acccgaagttttgaacccggcggcggcagttgtcactggcacaggtttggcgtggtggcgccagtgtactacttctggggaggtctcaaccaggttctggcaccttcaatccccacctga

SEQ ID NO: 798028 - DNA, 120 bp, Artificial Sequence
  ENSG00000280670_1 (sequence is synthesized)
tatctgcgtatcatcacggtatcccgcttttcccccagttccccaagagcgtccttcctttccctagtcacaggatcgcagttttggtctgatagtgcatccacctaccccagtgttgca

SEQ ID NO: 798029 - DNA, 120 bp, Artificial Sequence
  ENSG00000280670_2 (sequence is synthesized)
tccccacttccctctttccatctaacgtggtggcctttcctggggataccttgggtatcccccgctaggagagcaagcacaagacaccagggagccagacccctgccgctcccctgccac

SEQ ID NO: 798030 - DNA, 120 bp, Artificial Sequence
  ENSG00000280670_3 (sequence is synthesized)
aggatatgaatacgagcctcagctggtttgagcagctggatgtgcttctcaacgctactgatggaaatgtggtccggaataagcagtggctgtatcctcttggggtctccacagagctca

SEQ ID NO: 798031 - DNA, 120 bp, Artificial Sequence
  ENSG00000280670_4 (sequence is synthesized)
ttggcctgtgcatctgtttcttctgtagcagtggctgtatcttcttggggtctccaccgcagaatagcactgctgtcactcctgcagtgctgtgggaggagtcagagattatgcagaagg

SEQ ID NO: 798032 - DNA, 120 bp, Artificial Sequence
  ENSG00000280670_5 (sequence is synthesized)
aattgaagttgctgcagtaccagttgagccagcaccaggagctgctgctgaaacagctggctgagggacgacaggctcaggttggcagttggaagctcttaattcagtcttctggacagt

SEQ ID NO: 798033 - DNA, 120 bp, Artificial Sequence
  ENSG00000280670_6 (sequence is synthesized)
ccagagtcttaagcaagaggacctattcctttggggccccaaaatgctcctgaatgacctgtaaggactcgttaagaatagtaggatgaaggcttctttgcccaccctcccctccaaggc

SEQ ID NO: 798034 - DNA, 120 bp, Artificial Sequence
  ENSG00000280670_7 (sequence is synthesized)
cctgtttctgggctgcccgcccctaccttcttgaagtagctattatctgtcttatctactgaggcttttcactgcctgcccatccttgccccccatctcagctcactgcaacctccgcct

SEQ ID NO: 798035 - DNA, 83 bp, Artificial Sequence
  ENSG00000280670_8 (sequence is synthesized)
tatagctgtaccttctgagtgcaagctcagttgaacttggaaagtaatgggagttcccattctggtgagtagaatgaggtagg

SEQ ID NO: 798036 - DNA, 120 bp, Artificial Sequence
  ENSG00000280670_9 (sequence is synthesized)
gtaatgggagttcccattctggtgagtagaatgaggtaggacactgctctagggcagtagtgctgggggatgcaaaggaggatgagatattctggtgggacttggatctggacagtagga

SEQ ID NO: 798037 - DNA, 120 bp, Artificial Sequence
  ENSG00000280670_10 (sequence is synthesized)
tggtgggacttggatctggacagtaggaggctacctttcctcatctccagcttctgccttttttttttttttttttgaggcaaggtcttactcagttgcccaggctggagtgcagtggca

SEQ ID NO: 798038 - DNA, 87 bp, Artificial Sequence
  ENSG00000280670_11 (sequence is synthesized)
ctaaagcaatcctcccaccttagccccccaagtaataatatatgggactacaggcacacgctatcatgcctggctaatttttaaata

SEQ ID NO: 798039 - DNA, 120 bp, Artificial Sequence
  ENSG00000280670_12 (sequence is synthesized)
ctttggcctcccaaagtgttcagattacaggtgtgagctgctaccatgcctagccccagcttctactgcttgaggctctctttggcatctccacacatcatccttagcagcccagactgc

SEQ ID NO: 798040 - DNA, 120 bp, Artificial Sequence
  ENSG00000280670_13 (sequence is synthesized)
atttctgtagcagcctcttccctggtctcttctttcagtctctctgcctctaatccagtggctttaagaattttttggctgtgacttccagtaagaaatacaatttacattgtgacctag

SEQ ID NO: 798041 - DNA, 120 bp, Artificial Sequence
  ENSG00000280670_14 (sequence is synthesized)
taaatatgtgtgtagatttattaactgaaataaaaatgttatgatttaatttttatccttagtgggagtgatacactgatattttctattatatttcattaaaaaatgccttgtgactaa

SEQ ID NO: 798042 - DNA, 120 bp, Artificial Sequence
  ENSG00000280670_15 (sequence is synthesized)
gttggcagttggaaggtaggactaggttcagacttgtctctgcatatttctctatggaggacctttcctttctctgtctatcctgttctgcagggaggccaggataccctctcctgcccc

SEQ ID NO: 798043 - DNA, 120 bp, Artificial Sequence
  ENSG00000280670_16 (sequence is synthesized)
tgtcttcattcctctcttccctgtgctgactctctctctctccagagctcttctttctaacctttctgctcccggccatgagaaactatccttgccgacatgagggttccaagtgtgctg

SEQ ID NO: 798044 - DNA, 120 bp, Artificial Sequence
  ENSG00000280670_17 (sequence is synthesized)
aagaggacagtcatggggagggagagagggagaggtttggttccacctgagcccatgatctggcagatgttagagcagttgcaaagtggccaggaaggcaagggtcataccctggaggct

SEQ ID NO: 798045 - DNA, 120 bp, Artificial Sequence
  ENSG00000280670_18 (sequence is synthesized)
gcccactaccttcaccatgtctgtttcttcatccagctcttaattcagtcttctggacagtaacagtagctgggaacttttatggaagccagatccccagaggagcaccctttctaacct

SEQ ID NO: 798046 - DNA, 120 bp, Artificial Sequence
  ENSG00000280670_19 (sequence is synthesized)
gcagggggccccaaaggggagtgcttttctcctggagcaatgcctggaggagctgagaaaggaactgcagggccttcagagccaggtgtgggagcaaacccaagcccaagcccaagccca

SEQ ID NO: 798047 - DNA, 120 bp, Artificial Sequence
  ENSG00000280670_20 (sequence is synthesized)
gatgcaaacaggaccaggagaatgcagtactaccaatggccttcctcaggagctgcagactgaaatagcactgctgtcactcctgcagtgctgtgggaggagtcagagattatgcagaag

SEQ ID NO: 798048 - DNA, 120 bp, Artificial Sequence
  ENSG00000280789_0 (sequence is synthesized)
aggtgcgtacggcatctgacttgacgtggcccacaactgaaaggtctggggagaaggcgccgtgtccgggtgtggagaggggcgtcgtggaagcgagaagagtggcccgtccctctcctc

SEQ ID NO: 798049 - DNA, 120 bp, Artificial Sequence
  ENSG00000280789_1 (sequence is synthesized)
cccctttccctctttcggaaagtggtttctgcggggcccgggagcctcggagtaccgaacctcgatctccggggcggggtccttggtggggactgagcgccccctcccggggacgggcgg

SEQ ID NO: 798050 - DNA, 120 bp, Artificial Sequence
  ENSG00000280789_2 (sequence is synthesized)
tctggccgcggagtcccctgcgggagcgtgattggctggaaacggtcccgaacccccaggggagcccgatccctgggggaccctggcttcggactccagtatctgtcgtcgcagggtccc

SEQ ID NO: 798051 - DNA, 120 bp, Artificial Sequence
  ENSG00000280789_3 (sequence is synthesized)
tgccctagtggcctatgtcccttgctcggggccatggagacactgcggccagtacggcggcgcctctgtctgaagaaggggaagtgacctccggcctccaggctctggccgtggaggata

SEQ ID NO: 798052 - DNA, 120 bp, Artificial Sequence
  ENSG00000280789_4 (sequence is synthesized)
ccggaggcccctctgcctcggccggtaaggccgaggacgagggggaaggaggccgagaggagaccgagcgtgaggggtccgggggcgaggaggcgcagggagaagtccccagcgctgggg

SEQ ID NO: 798053 - DNA, 120 bp, Artificial Sequence
  ENSG00000280789_5 (sequence is synthesized)
gagaagagcctgccgaggaggactccgaggactggtgcgtgccctgcagcgacgaggaggtggagctgcctgcggatgggcagccctggatgcccccgccctccgaaatccagcggctct

SEQ ID NO: 798054 - DNA, 120 bp, Artificial Sequence
  ENSG00000280789_6 (sequence is synthesized)
atgaactgctggctgcccacggtactctggagctgcaagccgagatcctgccccgccggcctcccacgccggaggcccagagcgaagaggagagatccgatgaggagccggaggccaaag

SEQ ID NO: 798055 - DNA, 120 bp, Artificial Sequence
  ENSG00000280789_7 (sequence is synthesized)
aagaggaagaggaaaaaccacacatgcccacggaatttgattttgatgatgagccagtgacaccaaaggactccctgattgaccggagacgcaccccaggaagctcagcccggagccaga

SEQ ID NO: 798056 - DNA, 120 bp, Artificial Sequence
  ENSG00000280789_8 (sequence is synthesized)
aacgggaggcccgcctggacaaggtgctgtcggacatgaagagacacaagaagctggaggagcagatccttcgtaccgggagggacctcttcagcctggactcggaggaccccagccccg

SEQ ID NO: 798057 - DNA, 120 bp, Artificial Sequence
  ENSG00000280789_9 (sequence is synthesized)
ccagccccccactccgatcctccgggagtagtctcttccctcggcagcggaaatactgattcccactgctcctgcctctagggtgcagtgtccgtacctgctggagcctgggccctcctt

SEQ ID NO: 798058 - DNA, 120 bp, Artificial Sequence
  ENSG00000280789_10 (sequence is synthesized)
ccccagcccagacattgagaaacttgggaagaagagagaaacctcaagctcccaaacagcacgttgcgggaaagaggaagagagagtgtgagtgtgtgtgtgtgttttttctattgaaca

SEQ ID NO: 798059 - DNA, 120 bp, Artificial Sequence
  ENSG00000280789_11 (sequence is synthesized)
cctgtagagtgtgtgtgtgtgttttctattgaacacctatagagagagtgtgtgtgttttctattgaacatctatatagagagagtgtgtgagtgtgtgttttctattgaacacctattc

SEQ ID NO: 798060 - DNA, 120 bp, Artificial Sequence
  ENSG00000280789_12 (sequence is synthesized)
agagacctggactgaattttctgagtctgaaataaaagatgcagagctatcatctcttaaaaggaggggctgtagctgtagctcaacagttaggccccacttgaagggagaggcagaatt

SEQ ID NO: 798061 - DNA, 120 bp, Artificial Sequence
  ENSG00000280789_13 (sequence is synthesized)
gtactcacccagattggaaaatgaaagccagatgggtagaggtgccctcagttagcacctgtcccatctcgggccctccaactcctcccagtcccactccagtgcagccagctggctcca

SEQ ID NO: 798062 - DNA, 120 bp, Artificial Sequence
  ENSG00000280789_14 (sequence is synthesized)
aggtagaaacccatgagcactcagggagcagtgtgccttcagctgcagcagaagcagcccggaggataaaatgagaaccagctgcacacgggccctttaactcccaagccccacccctgg

SEQ ID NO: 798063 - DNA, 120 bp, Artificial Sequence
  ENSG00000280789_15 (sequence is synthesized)
gcttggcctgccttgccctgccgggaagtgatccccaaggcagggtgagagttccccatctgaggcgtttgttgcagctacctgcacttctagatgtgagtacattgtactagcccccca

SEQ ID NO: 798064 - DNA, 120 bp, Artificial Sequence
  ENSG00000280789_16 (sequence is synthesized)
gaggctctctttagtcctgtcttgctttgaagggccttgcttctgctggggcagggaaaacatgtctgaatcagagtggggaaggaggatgggtggtggctttgcttttggaggtttcac

SEQ ID NO: 798065 - DNA, 120 bp, Artificial Sequence
  ENSG00000280789_17 (sequence is synthesized)
tttccaatagttgggagtcttctgggttttgaagtaaaggcagattaacaccaacaccggtcccccacccccctgcaactctcaggcctctctctgacttcagggtcccacctgggaaat

SEQ ID NO: 798066 - DNA, 120 bp, Artificial Sequence
  ENSG00000280789_18 (sequence is synthesized)
caggtggggaaccttacagggtcattcagaccccatcttagccctagatcggtgcttgctctactcacctgcactgtcctggggacctgggctctggcctgtcaccttgagctccaagaa

SEQ ID NO: 798067 - DNA, 120 bp, Artificial Sequence
  ENSG00000280789_19 (sequence is synthesized)
tgtgacctgtacccattcaggccccttaactctgacagatgagggtttcttactcctccatgcagggctgggccagctgttggtctcagtcgatcattcaggaagtcattagcagagtga

SEQ ID NO: 798068 - DNA, 120 bp, Artificial Sequence
  ENSG00000280789_20 (sequence is synthesized)
tttccagaaggcgtagaatttagtgaccaaggttctttcctttttgggaggagaaagtgaaaactaggatgctcagctggacccaccagcctgagattctggggattttagagctgtccc

SEQ ID NO: 798069 - DNA, 120 bp, Artificial Sequence
  ENSG00000280789_21 (sequence is synthesized)
ttggggagccaagcacttgggggtggaggtgatagcgaggctgatggcccctgtgttctcagctctctgcctgggtagcccctgggtgatgggggagaggccagctgtcacgtggggtat

SEQ ID NO: 798070 - DNA, 120 bp, Artificial Sequence
  ENSG00000280789_22 (sequence is synthesized)
caggtggctctgccagaaactcccttggcacacagagcactgggtcggccctcgggtgtggctgtttgggcaggacagccctctgtatgtagccttgagcaggtaggggggccaccttga

SEQ ID NO: 798071 - DNA, 120 bp, Artificial Sequence
  ENSG00000280789_23 (sequence is synthesized)
gtgggtggcccagagacagcctcagggctccaaggtaacggggtgctcaggttatcttgggtgctgccctcccaggttctgggggagcagaggctgggcgctggcccaacttacaggaaa

SEQ ID NO: 798072 - DNA, 120 bp, Artificial Sequence
  ENSG00000280789_24 (sequence is synthesized)
cactcacctttgaactgccattagcaccatctgggcagtacacagccccacccaggtcctctagttcttgttctcggcttagaatctttgtgtttctgcctgagaagccactgcctccta

SEQ ID NO: 798073 - DNA, 120 bp, Artificial Sequence
  ENSG00000280789_25 (sequence is synthesized)
gtttgtggtctctacagttatagccaggttggacttccggctccgtcctttgataactgtgtgctcttgggcaaatttcttaacttgcaggttcttgtgaggataacatgagttaattga

SEQ ID NO: 798074 - DNA, 120 bp, Artificial Sequence
  ENSG00000280789_26 (sequence is synthesized)
gggcacttaacactacctggcacagattaagctcatctgaagtgggagctgttacttaggggcgtttgcctagaacacagggtccagaggctctctcccggaaacttagacccagtgagt

SEQ ID NO: 798075 - DNA, 120 bp, Artificial Sequence
  ENSG00000280789_27 (sequence is synthesized)
ggctctctcccggaaacttagacccagtgagtcagaagtgaggcctgcaaaaagcagcaggagtggggttaagaattccagcctagggctggatgcggtggctcaggcctgtaatcccag

SEQ ID NO: 798076 - DNA, 120 bp, Artificial Sequence
  ENSG00000280789_28 (sequence is synthesized)
gaggccaggagttccagaccagcctgagcaacatagcgagaccctgtctctgtttgtgtgtgtgtggttggggttttgttttttttttttttttaaagaattatagctcagtcctatgat

SEQ ID NO: 798077 - DNA, 120 bp, Artificial Sequence
  ENSG00000280789_29 (sequence is synthesized)
taggcaagttgagaaaatattgatgaagatcaggggtgctgaagcctggttcctggggtcgcttctgatctaggcggttcttgcctctggtgactggtgttaattggcaggagtgggagg

SEQ ID NO: 798078 - DNA, 120 bp, Artificial Sequence
  ENSG00000280789_30 (sequence is synthesized)
agggaggacaagtggaagtctaggctggctgagctgttctgtctcgaaaagttcctaaaactgtgctgctttaaaaaaaaaaaaagtaatttatgagacacattctcaatttccattaat

SEQ ID NO: 798079 - DNA, 120 bp, Artificial Sequence
  ENSG00000280789_31 (sequence is synthesized)
catctcctaaagggggtaaaccaggaagccgctgggtgaaaacaggctgttggcaattcctgagtcatgtgacccattctctaaagactagaatatttaacttaaatcagtgagaaactc

SEQ ID NO: 798080 - DNA, 120 bp, Artificial Sequence
  ENSG00000280969_0 (sequence is synthesized)
gcagattacggttgcaccgtaaaaggagaggttctgttccgtcgcgggatttcgccatggcccggggccccaagaagcacttgaagcgtgttgcagcgccgaagcattggatgctggata

SEQ ID NO: 798081 - DNA, 120 bp, Artificial Sequence
  ENSG00000280969_1 (sequence is synthesized)
aactaactggtgtatttgcacctcgtccatcgacaggtcctcacaagctgagggaatgtcttcccctgatagtcttcctcaggaatagactcaagtatgcattgactggagatgaggtaa

SEQ ID NO: 798082 - DNA, 120 bp, Artificial Sequence
  ENSG00000280969_2 (sequence is synthesized)
agaagatatgtatgcaacacttcctcaaaattgatggcaaggttcgagtggacatcacataccctgctggattcatagatgtcatcagcattgagaaaacaggtgagcatttccgcctgg

SEQ ID NO: 798083 - DNA, 120 bp, Artificial Sequence
  ENSG00000280969_3 (sequence is synthesized)
accaagggctgttttgctgttcatcgtatcacagtggaagaggcaaagtacaagttgtgcaaagtgaggaagattactgtggggacaaagggaattccacacctggtgactcatgatgct

SEQ ID NO: 798084 - DNA, 120 bp, Artificial Sequence
  ENSG00000280969_4 (sequence is synthesized)
cgaaccattcgctacccagatcctctcatcaaggtgaacgatactgtgcagattgatttagggactgggaagataaccagctttatcaaatttgacacaggcaatgtatgtatggtgatt

SEQ ID NO: 798085 - DNA, 120 bp, Artificial Sequence
  ENSG00000280969_5 (sequence is synthesized)
gctggagctaacctcggtcgtgttggtgtgatcacaaacagggaaagacatcctggttcttgcgatgtggtacatgtgaaggatgccaacggcaacagctttgccacaaggatttccaac

SEQ ID NO: 798086 - DNA, 120 bp, Artificial Sequence
  ENSG00000280969_6 (sequence is synthesized)
atttttgtcattggcaatggtaataaaccttggatttccctgcccaggggaaagggcatccgacttactattgctgaagagagagacaagaggctggctgccaaacagagcagtggctaa

SEQ ID NO: 798087 - DNA, 120 bp, Artificial Sequence
  ENSG00000280987_0 (sequence is synthesized)
ctttcccctccggcctctgccggtgctgctgcgccctgcggagctccgaacacgtgcgcagaggctggctgtggcagatgcaactgcaggatgacttgaaagtagggcatccttcaccca

SEQ ID NO: 798088 - DNA, 120 bp, Artificial Sequence
  ENSG00000280987_1 (sequence is synthesized)
tctgaagggaggaaatagtggcaggtgacagtctgcatgtgcagttttcagatgccttcacctgaatgacatctacctccatcaggaccccagatgtctgacagccctgtgtgacaccaa

SEQ ID NO: 798089 - DNA, 120 bp, Artificial Sequence
  ENSG00000280987_2 (sequence is synthesized)
gataagtaacagttgtctgctggttctcagcttgaagaagattctgcagtccttattgatcctttttcttggcgttaccatttttgaagcaaagttaacctagctttctagtttgagctt

SEQ ID NO: 798090 - DNA, 120 bp, Artificial Sequence
  ENSG00000280987_3 (sequence is synthesized)
tctttttggccgtctttaaaaaaatttttttttttaatctataaaatagacaagagctagttctacaatgtccaagtcattccagcagtcatctctcagtagggactcacagggtcatgg

SEQ ID NO: 798091 - DNA, 120 bp, Artificial Sequence
  ENSG00000280987_4 (sequence is synthesized)
gcgtgacctgtctgcggcaggaataggccttcttgctgctgctacccagtctttaagtatgccagcatctcttggaaggatgaaccagggtactgcacgccttgctagtttaatgaatct

SEQ ID NO: 798092 - DNA, 120 bp, Artificial Sequence
  ENSG00000280987_5 (sequence is synthesized)
tggaatgagttcttcattgaatcaacaaggagctcatagtgcactgtcttctgctagtacttcttcccataatttgcagtctatatttaacattggaagtagaggtccactccctttatc

SEQ ID NO: 798093 - DNA, 120 bp, Artificial Sequence
  ENSG00000280987_6 (sequence is synthesized)
ttctcaacaccgtggagatgcagaccaggccagtaacattttggccagctttggtctgtctgctagagacttagatgaactgagtcgttatccagaggacaagattactcctgagaattt

SEQ ID NO: 798094 - DNA, 120 bp, Artificial Sequence
  ENSG00000280987_7 (sequence is synthesized)
gccccaaatccttctacagcttaaaaggaggagaactgaagaaggccctaccttgagttatggtagagatggcagatctgctacacgggagccaccatacagagtacctagggatgattg

SEQ ID NO: 798095 - DNA, 120 bp, Artificial Sequence
  ENSG00000280987_8 (sequence is synthesized)
ggaagaaaaaaggcactttagaagagatagttttgatgatcgtggtcctagtctcaacccagtgcttgattatgaccatggaagtcgttctcaagaatctggttattatgacagaatgga

SEQ ID NO: 798096 - DNA, 120 bp, Artificial Sequence
  ENSG00000280987_9 (sequence is synthesized)
ttatgaagatgacagattaagagatggagaaaggtgtagggatgattctttttttggtgagacctcgcataactatcataaatttgacagtgagtatgagagaatgggacgtggtcctgg

SEQ ID NO: 798097 - DNA, 120 bp, Artificial Sequence
  ENSG00000280987_10 (sequence is synthesized)
ccccttacaagagagatctctctttgagaaaaagagaggcgctcctccaagtagcaatattgaagacttccatggactcttaccgaagggttatccccatctgtgctctatatgtgattt

SEQ ID NO: 798098 - DNA, 120 bp, Artificial Sequence
  ENSG00000280987_11 (sequence is synthesized)
gccagttcattctaataaggagtggagtcaacatatcaatggagcaagtcacagtcgtcgatgccagcttcttcttgaaatctacccagaatggaatcctgacaatgatacaggacacac

SEQ ID NO: 798099 - DNA, 120 bp, Artificial Sequence
  ENSG00000280987_12 (sequence is synthesized)
aatgggtgatccattcatgttgcagcagtctacaaatccagcaccaggaattctgggacctccacctccctcatttcatcttgggggaccagcagttggaccaagaggaaatctgggtgc

SEQ ID NO: 798100 - DNA, 120 bp, Artificial Sequence
  ENSG00000280987_13 (sequence is synthesized)
tggaaatggaaacctgcaaggacctagacacatgcagaaaggcagagtggaaactagcagagttgttcacatcatggattttcaacgagggaaaaacttgagataccagctattacagct

SEQ ID NO: 798101 - DNA, 120 bp, Artificial Sequence
  ENSG00000280987_14 (sequence is synthesized)
ggtagaaccatttggagtcatttcaaatcatctgattctaaataaaattaatgaggcatttattgaaatggcaaccacagaggatgctcaggccgcagtggattattacacaaccacacc

SEQ ID NO: 798102 - DNA, 120 bp, Artificial Sequence
  ENSG00000280987_15 (sequence is synthesized)
agcgttagtatttggcaagccagtgagagttcatttatcccagaagtataaaagaataaagaaacctgaaggaaagccagatcagaagtttgatcaaaagcaagagcttggacgtgtgat

SEQ ID NO: 798103 - DNA, 120 bp, Artificial Sequence
  ENSG00000280987_16 (sequence is synthesized)
aatttgccgcattctggctattctgatagtgctgttctcaagcttgctgagccttatgggaaaataaagaattacatattgatgaggatgaaaagtcaggcttttattgagatggagaca

SEQ ID NO: 798104 - DNA, 120 bp, Artificial Sequence
  ENSG00000280987_17 (sequence is synthesized)
agagaagatgcaatggcaatggttgaccattgtttgaaaaaagccctttggtttcaggggagatgtgtgaaggttgacctgtctgagaaatataaaaaactggttctgaggattccaaac

SEQ ID NO: 798105 - DNA, 120 bp, Artificial Sequence
  ENSG00000280987_18 (sequence is synthesized)
agaggcattgatttactgaaaaaagataaatcccgaaaaagatcttactctccagatggcaaagaatctccaagtgataagaaatccaaaactgatggttcccagaagactgagagttca

SEQ ID NO: 798106 - DNA, 120 bp, Artificial Sequence
  ENSG00000280987_19 (sequence is synthesized)
accgaaggtaaagaacaagaagagaagtccggtgaagatggtgagaaagacacaaaggatgaccagacagagcaggaacctaatatgcttcttgaatctgaagatgagctacttgtagat

SEQ ID NO: 798107 - DNA, 120 bp, Artificial Sequence
  ENSG00000280987_20 (sequence is synthesized)
gaagaagaagcagcagcactgctagaaagtggcagttcagtgggagacgagaccgatcttgctaatttaggtgatgtggcttctgatgggaaaaaggaaccatcagataaagctgtgaaa

SEQ ID NO: 798108 - DNA, 120 bp, Artificial Sequence
  ENSG00000280987_21 (sequence is synthesized)
aaagatggaagtgcttcagcagcagcaaagaaaaagcttaaaaaggtggacaagatcgaggaacttgatcaagaaaacgaagcagcgttggaaaatggaattaaaaatgaggaaaacaca

SEQ ID NO: 798109 - DNA, 120 bp, Artificial Sequence
  ENSG00000280987_22 (sequence is synthesized)
gaaccaggtgctgaatcttctgagaacgctgatgatcccaacaaagatacaagtgaaaacgcagatggtcaaagtgatgagaacaaggacgactatacaatcccagatgagtatagaatt

SEQ ID NO: 798110 - DNA, 120 bp, Artificial Sequence
  ENSG00000280987_23 (sequence is synthesized)
ggaccatatcagcccaatgttcctgttggtatagactatgtgatacctaaaacagggttttactgtaagctgtgttcactcttttatacaaatgaagaagttgcaaagaatactcattgc

SEQ ID NO: 798111 - DNA, 120 bp, Artificial Sequence
  ENSG00000280987_24 (sequence is synthesized)
agcagccttcctcattatcagaaattaaagaaatttctgaataaattggcagaagaacgcagacagaagaaggaaacttaagatgtgcaaggagatttaatgatttcaaagaaaataatg

SEQ ID NO: 798112 - DNA, 120 bp, Artificial Sequence
  ENSG00000280987_25 (sequence is synthesized)
gttctttgtttttaatgttaaccttttttaaatacaatactgatagttagaagaaaactattgtactcttttgttttagtggagaaataatagatgtctgttcatgtgttaagtgttata

SEQ ID NO: 798113 - DNA, 120 bp, Artificial Sequence
  ENSG00000280987_26 (sequence is synthesized)
gcaaaaaaaatacacatatggttaagttaatgaatagtttttgttttatcagaatggcaacagacagaagtactttgtagagattgacttcctaagctacttaagacaacttgcaccact

SEQ ID NO: 798114 - DNA, 120 bp, Artificial Sequence
  ENSG00000280987_27 (sequence is synthesized)
aagaaaaaaatgtagaaccatttggaaaaatgaaatttagtagttccaagtttcaaagaaatgtcaacattttattccattcaataaagaacaaaaccaatagtgtttttattactttca

SEQ ID NO: 798115 - DNA, 120 bp, Artificial Sequence
  ENSG00000280987_28 (sequence is synthesized)
tctgaaacattccatgttttaatctgagccttgcagactttcatttggagtttgaacccgttttggttgcatttcatttttggagaacttaattaacgtgagattggcaattgaaatgca

SEQ ID NO: 798116 - DNA, 120 bp, Artificial Sequence
  ENSG00000280987_29 (sequence is synthesized)
ggtgcagttttctgttaatgtcatgctgttgtttaggtaataagaaatattaagtaattggctttagattttgtaatttttttccctgagttcctgctagatttcgtattctagtagtca

SEQ ID NO: 798117 - DNA, 120 bp, Artificial Sequence
  ENSG00000280987_30 (sequence is synthesized)
atgtattttcagtgaaatgcaaaaatattcccgttatctttgaccagtattaatttttgagatcttactgcttgtcacttgaatcccgtgattgtcatacatctctggtataagcaacat

SEQ ID NO: 798118 - DNA, 120 bp, Artificial Sequence
  ENSG00000280987_31 (sequence is synthesized)
ttgatttttgaagtgtgtagaccatctcttcatattttcaagatgtaattttacatttctgcatttttaaaacagtttggccataatcctagatgcacgcttctaattcatgtacctgca

SEQ ID NO: 798119 - DNA, 120 bp, Artificial Sequence
  ENSG00000280987_32 (sequence is synthesized)
catgtgacctttgtgaacagaaatttgcatgtataatttgtgtttacttgtaactttctggttatatactgcttatatctgtggattcaagttactgaagtgaataccaataaaaagaaa

SEQ ID NO: 798120 - DNA, 120 bp, Artificial Sequence
  ENSG00000280987_33 (sequence is synthesized)
gcagcaacggaaaggcgccacgctcgtgagcggaaccagcgttccgggggcgctcagtgtgggcaggcaggaagcctggctccactaggacacacagattctctcctgagcagctgcgaa

SEQ ID NO: 798121 - DNA, 120 bp, Artificial Sequence
  ENSG00000280987_34 (sequence is synthesized)
ctatgcgccccttctacccttaagagatgggatgggagtccaacaaacccagccattgctcagaccccagcccttctctcctctaagaagcaggttcacctctgccaccgcactcgcatt

SEQ ID NO: 798122 - DNA, 120 bp, Artificial Sequence
  ENSG00000280987_35 (sequence is synthesized)
tttttttttttttaaagcccggcctttcctaggcggggtcaagggccccgcccaccgaagccacgcccagtagccgccccggggcggggttcccctcggctcccggctgccctttcccct

SEQ ID NO: 798123 - DNA, 120 bp, Artificial Sequence
  ENSG00000280987_36 (sequence is synthesized)
ccggcctctgccggtgctgctgcgccctgcggagctccgaacacgtgcgcagaggctggctgtggcagatgcaactgcagatgccttcacctgaatgacatctacctccatcaggacccc

SEQ ID NO: 798124 - DNA, 120 bp, Artificial Sequence
  ENSG00000280987_37 (sequence is synthesized)
ataagtaacgaggttgacaaacagccttttcgggaatgggactcgaactcgtaagccacgtctgttcctccatttcccgcctcagctggatgacggagagggatctccgggattaaagaa

SEQ ID NO: 798125 - DNA, 120 bp, Artificial Sequence
  ENSG00000280987_38 (sequence is synthesized)
ggaagattcggaacttcagaaacttcgtaaatcgggcatggcatttaaatctggtgacaaaaatgatgatggtttggttgaaattaaggtggacaagatcgaggaacttgatcaagaaaa

SEQ ID NO: 798126 - DNA, 120 bp, Artificial Sequence
  ENSG00000280987_39 (sequence is synthesized)
cttaaactttgtgcatgctttaacaatttattacttttaaatctagagtgaattctaaagactgccgctaaagatctgagttttaaaaatgttgttgctggtggatttcttgttcctgtt

SEQ ID NO: 798127 - DNA, 120 bp, Artificial Sequence
  ENSG00000280987_40 (sequence is synthesized)
acataactaaaagtgaggccatttgtggtttttaaaaaccttatgaattaaaaatgctacaggtgaacaaacagaagcttatgtttagagatattgatgacttaacagtacaattggaag

SEQ ID NO: 798128 - DNA, 120 bp, Artificial Sequence
  ENSG00000280987_41 (sequence is synthesized)
taatacggatgagcaagaattagttctgcagcttttcaaaataattacgtagagactcttggtatattggattatctgttgtaaacaatttttttttcttccctgacacagggtctcact

SEQ ID NO: 798129 - DNA, 76 bp, Artificial Sequence
  ENSG00000280987_42 (sequence is synthesized)
ccctgagttctctgcaacctcagcctttgggctcaaatgaccctcctacctcagtctcctgagtagctgggactac

SEQ ID NO: 798130 - DNA, 120 bp, Artificial Sequence
  ENSG00000280987_43 (sequence is synthesized)
ggctagtttttggtttttttgtatagatggggctttgccatgttgcccaggttgatcttgaattcctgggcccaagtgatctgctcgcttcagcctcccaaagtgctgggactgtaggca

SEQ ID NO: 798131 - DNA, 120 bp, Artificial Sequence
  ENSG00000280987_44 (sequence is synthesized)
tgagccaccatccctggccaagaaacaaagttttaatttcaaaaaaatctacaaaaacaggataggcattgtctttcaaatgttcagaccccagtttattaaaggatacttcaaatagtt

SEQ ID NO: 798132 - DNA, 120 bp, Artificial Sequence
  ENSG00000280987_45 (sequence is synthesized)
ggctaaattttatgatctctcccgttgaaaagtaggtgatgattttaatgtgacatgcacaaaaaatccttgccagtttacttctgcaatttaattttagcctttactaattacccactt

SEQ ID NO: 798133 - DNA, 120 bp, Artificial Sequence
  ENSG00000280987_46 (sequence is synthesized)
ctgtttaattccaatttttaacagcaggtacataaagcattatgtgcacaatggagttcttcagtgtttcctttcagtgatggctttttcatagcttcaactttgttggatttagcaagt

SEQ ID NO: 798134 - DNA, 120 bp, Artificial Sequence
  ENSG00000280987_47 (sequence is synthesized)
tgaaggaaagaatgctatgtttttaatacctacatttgagagcatttagaaatcagaaattataataagctgttagtgataaatctgtaacagcccttcgattacgagaaaacctctttt

SEQ ID NO: 798135 - DNA, 120 bp, Artificial Sequence
  ENSG00000280987_48 (sequence is synthesized)
tagtaggaatgtttccactcatgtttgctgtaaagtttaagaacatttttcctacggctatgtcagcccttagtttaatcttacattatcctacaaaagtgaatgaaacttctagaagta

SEQ ID NO: 798136 - DNA, 120 bp, Artificial Sequence
  ENSG00000280987_49 (sequence is synthesized)
gtttcattgcagagaggctggctgtggcagatgcaactgcaggtgccgtcatttaatttcccagacacttgacctccttctgatttgtgtactccctccaaggctgagttgcaagttgtc

SEQ ID NO: 798137 - DNA, 120 bp, Artificial Sequence
  ENSG00000280987_50 (sequence is synthesized)
ataagtaactgtctgactctgtagcccaggctggagtgtgcagtggtgcactaggctcacggcaacctccgcctccggctcaaacgatcctcagccccgtcctccgtaccaggaggttga

SEQ ID NO: 798138 - DNA, 120 bp, Artificial Sequence
  ENSG00000280987_51 (sequence is synthesized)
caggtgacagtctgcatgtgcagttttcagatcccaatcgcagtgcttggcacatggcaggacctccctgaatgttgcataaaacaactgaaaacacagaaggggattcctgttaaaggg

SEQ ID NO: 798139 - DNA, 120 bp, Artificial Sequence
  ENSG00000280987_52 (sequence is synthesized)
tttgacaacagggtctgcaattagtgcttccacgcctgttttgcagtcaatattcaactgatacgtcttctacctggagtgcctagatgccttcacctgaatgacatctacctccatcag

SEQ ID NO: 798140 - DNA, 120 bp, Artificial Sequence
  ENSG00000281106_0 (sequence is synthesized)
acgagttgctgttgtgctgcaggagagaaagggagaaagaaagcgtgcgacagggagtgggagccccaagtcaagaggagccccacagaggcagccctggacttcgggaccacagaggtg

SEQ ID NO: 798141 - DNA, 120 bp, Artificial Sequence
  ENSG00000281106_1 (sequence is synthesized)
ctgagtgctgcccgattctggatcccactctgcttagctcagaactttgtcagcgagcaagaacaatgccaggaggtctggagaaaacgtgtcatcagtgcatttctaaaatcgccagca

SEQ ID NO: 798142 - DNA, 120 bp, Artificial Sequence
  ENSG00000281106_2 (sequence is synthesized)
atgcctgcttcgttgttgtgctctgtgctttcctggctctgccgctgtccatgaccttcataggaatgaaatttttggaggactgccctatacagcccctcattcctttatatttgctag

SEQ ID NO: 798143 - DNA, 120 bp, Artificial Sequence
  ENSG00000281106_3 (sequence is synthesized)
tgggtggcatcgtcggtaccttaaaggtgtctctcctgttgtacgactccaccaggatgaggcggctgctgtccaaggccgtggtgattgatgacgatgacgatgacgaatacccctgga

SEQ ID NO: 798144 - DNA, 120 bp, Artificial Sequence
  ENSG00000281106_4 (sequence is synthesized)
ggcagaatgcgcacagatactacatccacctcctgctgagcctcttcctcttcctctggttcatcctgggaaactactgggtcttttctgtgtacctgcctgattttcttccccctttcc

SEQ ID NO: 798145 - DNA, 120 bp, Artificial Sequence
  ENSG00000281106_5 (sequence is synthesized)
agcagcctcaggactactgtgacaaaaccctgtacctctttgcagtcggagtcctggcgctcagtcacactgtgctggtcttgctcctgctgtgcagcggctgtgtctacctgtgctcca

SEQ ID NO: 798146 - DNA, 120 bp, Artificial Sequence
  ENSG00000281106_6 (sequence is synthesized)
ggtggagacttgctgccgatgaagactgacagctgccttgtccagcataccatgtatgcatatgcgtgtgcatgcacgcgcgtgcacacagacacacagacgcacacacacacacacaca

SEQ ID NO: 798147 - DNA, 120 bp, Artificial Sequence
  ENSG00000281106_7 (sequence is synthesized)
cacacaggttcagagaagggcataaaggtaataaaaccttccctgaaggcatttaaaaagccacccaaaggcactgaatataatagcagactaaagaaactcttgccttcctagacatgg

SEQ ID NO: 798148 - DNA, 120 bp, Artificial Sequence
  ENSG00000281106_8 (sequence is synthesized)
ggaaatcacttctgctcttttcagagtgggaattttgttctcacaagagttttcaaagggataattgtttttgagggtatgaagtgtgggaggcaaagaatgggagaccttttcaaatca

SEQ ID NO: 798149 - DNA, 120 bp, Artificial Sequence
  ENSG00000281106_9 (sequence is synthesized)
tagtgcaatttcaatgactggtgcaagagcaaggttggttgttgctactgctgctgtcattcagccatggtcaccttgaagttatagaaagtgcacagactttcacacaagatatatctt

SEQ ID NO: 798150 - DNA, 120 bp, Artificial Sequence
  ENSG00000281106_10 (sequence is synthesized)
aacttcactcgctatgatggcttttgttattaaaaggaaaaagatattcttttagtgactctagctgccttttgggaaagtgaaggagcagtctcttccagccctatatcagataggttt

SEQ ID NO: 798151 - DNA, 120 bp, Artificial Sequence
  ENSG00000281106_11 (sequence is synthesized)
gacgtgatgggtggaacatcccaaggtcagctataaaatctaacaacgtcaaagcagtagcttccacatagggggcgggctggcctgctacaggcattgcggagtgcagcgccgtgtgca

SEQ ID NO: 798152 - DNA, 120 bp, Artificial Sequence
  ENSG00000281106_12 (sequence is synthesized)
ccgtgtgccgctgctgcaggttctttgcttggccttgagtctgtctctgcctctggctattcaagtacctctctatgatctgcggctggctgggtggcataaaccagttttgtatgtttc

SEQ ID NO: 798153 - DNA, 120 bp, Artificial Sequence
  ENSG00000281106_13 (sequence is synthesized)
tggacaggttgcatgagttggggtgccgtcagtgtagctgtttttggtttctgagcttaaatatcgaataatagctcctcaacctaatgaccagttaggctttggaagccttttgtaaat

SEQ ID NO: 798154 - DNA, 120 bp, Artificial Sequence
  ENSG00000281106_14 (sequence is synthesized)
tgagatgtctggaagtccaggatgacaccgaacagtgaccactaaccttccctctggctgccgctgttgagagatgaagtccaggtctgttgtcagtgctcgctggggagcctctttatg

SEQ ID NO: 798155 - DNA, 120 bp, Artificial Sequence
  ENSG00000281106_15 (sequence is synthesized)
agcaaaaagtcccatgttttagaattttgtatgaagatactgtcatgagtgtttctagggcagtgcccaggggtgcgtggcacctgcttaaccgtgcttctctcagccacgtgcatagca

SEQ ID NO: 798156 - DNA, 120 bp, Artificial Sequence
  ENSG00000281106_16 (sequence is synthesized)
tttctgtatatttacacactgctgagctgtgtttattttttaactttgttatgttttcgtgctttctcatcaaaccaatccctgagtggccatgaatggaggcacctcccttcatcagaa

SEQ ID NO: 798157 - DNA, 120 bp, Artificial Sequence
  ENSG00000281106_17 (sequence is synthesized)
ttcccatttcagtttagaagcactccccgggcagtcaccgttagtccccctttcctcccaggtgagaagaaagtgcttggtgtgccatctgctggacaaaggaagaacagcccttttttt

SEQ ID NO: 798158 - DNA, 120 bp, Artificial Sequence
  ENSG00000281106_18 (sequence is synthesized)
gcccctgtccctaagggcagtttctgttttcattttcacttgagccatggcagaagaccagcgggtgtgcagtttgcagatcctacctcacctatgatgcccaattccatcctcactgtg

SEQ ID NO: 798159 - DNA, 120 bp, Artificial Sequence
  ENSG00000281106_19 (sequence is synthesized)
tcccacgttgccctctctgtgttggggactggggagagtctgtgggctatgatactggggtggacaggagttccatgggctcctctcccaccctcctttccccagtccatgactcgtcag

SEQ ID NO: 798160 - DNA, 120 bp, Artificial Sequence
  ENSG00000281106_20 (sequence is synthesized)
ccattcccagtcacttagccaatgcttggacatctgtgagcagcaaagacctgggcccagggacacctgcatgactcccacatgaaagcctctgaggcttctgttgcgagggccttggca

SEQ ID NO: 798161 - DNA, 120 bp, Artificial Sequence
  ENSG00000281106_21 (sequence is synthesized)
aaggcggaaagagctgtgaacaaccatgggcatgaagatttctgttagcagatggcaggtactggttagtgctttggatacatcagtagctaggtctcaaacgttggacattcccagttt

SEQ ID NO: 798162 - DNA, 120 bp, Artificial Sequence
  ENSG00000281106_22 (sequence is synthesized)
ctggtaggcatgagtatcaccagagtgttgcagaaatctttcccagagggagtggtggatgaagtgtgctcattctcatatgcaccccaccagcccacccccagttgcaatggagaatac

SEQ ID NO: 798163 - DNA, 120 bp, Artificial Sequence
  ENSG00000281106_23 (sequence is synthesized)
tggtcataggtcctaaataattgctaaaatctggactatatttttagctttgagttttcttgtcaccaaagcagtaaggaagaggtgatgatctctttgtataggtcatacatcttccct

SEQ ID NO: 798164 - DNA, 120 bp, Artificial Sequence
  ENSG00000281106_24 (sequence is synthesized)
cagtgagctatgattgcaccactgcactctactctgggtgacagaatgagaccccatctctaaaaaacaaaattacccccttctggggaaacaggttagatcctaaagaaaatgttcatg

SEQ ID NO: 798165 - DNA, 120 bp, Artificial Sequence
  ENSG00000281106_25 (sequence is synthesized)
aaaatgttcatgtgcatccattcatagaggggacactgaatggttcagtgggtgacatcttcaagcgcagcaggctttgaatgataactgattaaggcctccctcaggagatggtgagat

SEQ ID NO: 798166 - DNA, 120 bp, Artificial Sequence
  ENSG00000281106_26 (sequence is synthesized)
ggttatgataaggcacatttcaagaaagaggctctggggctaagtaaggcaaatggtctataactgtggttctttgaagtctggcttaatccagggatgacacccagactgtctaggaag

SEQ ID NO: 798167 - DNA, 120 bp, Artificial Sequence
  ENSG00000281106_27 (sequence is synthesized)
ggctgagctgcgtgccctttaagtgatcacctcttagtataatttcactgagctggaggtgagtgtaagaagttcctggttatagaagaagttataatccttggcatggcctgaagtagg

SEQ ID NO: 798168 - DNA, 120 bp, Artificial Sequence
  ENSG00000281106_28 (sequence is synthesized)
cagtccacactgatatgaaatgtgctgtgtatacctggagaatgaaaatgcccatctaagactggcccaagagctgggcagccttcctccatgggaacctggcaaggcaatgggaagtgg

SEQ ID NO: 798169 - DNA, 120 bp, Artificial Sequence
  ENSG00000281106_29 (sequence is synthesized)
acatgggaacacctgaactttctggatgctatgaaacctcaagggaacaaattatgtggcagagagggataatctgttcttcccatctgagaaaagactgcagcaaagataaactatatg

SEQ ID NO: 798170 - DNA, 120 bp, Artificial Sequence
  ENSG00000281106_30 (sequence is synthesized)
ttgagatcattttatttgctacatcgggcatcattctaaaaaccattctttgcctgaatctatataaatgacagttgaaagcagtaaaagtgggactgtttcactggagtcagccacact

SEQ ID NO: 798171 - DNA, 120 bp, Artificial Sequence
  ENSG00000281106_31 (sequence is synthesized)
agtggttctcaaatcttggtgaaccctgagagctacccaaggacttgtttgcaatgcagaatcacagcccccagagactgacttgtggggcccagctggttctgattcggtggccagaga

SEQ ID NO: 798172 - DNA, 120 bp, Artificial Sequence
  ENSG00000281106_32 (sequence is synthesized)
aaccgcatgtgtgcactcgggccacacatacagcctggactggcttatgtcaggcccatcctggttgtcaccatgaggacaatataatgtcacttccagtacttcgtgttatttccttct

SEQ ID NO: 798173 - DNA, 120 bp, Artificial Sequence
  ENSG00000281106_33 (sequence is synthesized)
cttttagtatgagaagtggccaagtggtcaatagctttcatctttgtgtaactgaatcttgtgcttcatttccttctgggcatttttcattgttgatgaaataaactttgttcaatttgt

SEQ ID NO: 798174 - DNA, 62 bp, Artificial Sequence; identical to SEQ ID NO: 791179
  ENSG00000281179_0 (sequence is synthesized)

SEQ ID NO: 798175 - DNA, 120 bp, Artificial Sequence; identical to SEQ ID NO: 791180
  ENSG00000281179_1 (sequence is synthesized)

SEQ ID NO: 798176 - DNA, 120 bp, Artificial Sequence
  ENSG00000281406_0 (sequence is synthesized)
gtgtgtgcgcgcgtgtgtgcaaatgcctgcatatgtgtgcgggtcgggactggccgggggcggcaggacccgaaggcgctaggcggattcaccggattgggagttgaatcgcgtcccggt

SEQ ID NO: 798177 - DNA, 120 bp, Artificial Sequence
  ENSG00000281406_1 (sequence is synthesized)
ctttctagctgtgcccggaaatcgggcgtgcgggcagctacagcagagaatcggacaaggagggaagaaagagattggtgagggggagagagagagaaagagagagagagacacaaagga

SEQ ID NO: 798178 - DNA, 120 bp, Artificial Sequence
  ENSG00000281406_2 (sequence is synthesized)
agtgagtgcaagaggagccggcttagcatctaaactatctctggtgagtgttcccccagcctggcgtagggcatgccccagttcactttcgcctgcttctgtggtctccacggcttctgc

SEQ ID NO: 798179 - DNA, 120 bp, Artificial Sequence
  ENSG00000281406_3 (sequence is synthesized)
aaaatgaagaggaagaaggaggaagttcacagagagcgggagacggcggtgtgatcagaaccagggcccctccatcaagcccccagcaggtcccaggcctgatggtgcctgcttctggct

SEQ ID NO: 798180 - DNA, 120 bp, Artificial Sequence
  ENSG00000281406_4 (sequence is synthesized)
ggggcttggagcaggaagccgtgtgtgtatcttaagtcttgatttagccagtgctcttctcagcctgactctcacccgagggcatcagcctcctgtgtgcctctcatcctcctcatgccc

SEQ ID NO: 798181 - DNA, 120 bp, Artificial Sequence
  ENSG00000281406_5 (sequence is synthesized)
acacccattagcttccaattctcagacctccttggagagaggccccagccacacaagggggaaccccaggacctgccgcatgccttccagagactgagaagccccagggaggccaaggag

SEQ ID NO: 798182 - DNA, 120 bp, Artificial Sequence
  ENSG00000281406_6 (sequence is synthesized)
tgaaacttctttcctgccctgagagcttcgggggactcttctcagggtaaccgcatgaggcatgtgccgccttgggctaggagagctgttgctaaatgggaaactggctgctctagcaga

SEQ ID NO: 798183 - DNA, 120 bp, Artificial Sequence
  ENSG00000281406_7 (sequence is synthesized)
gaacttccagcagccctgaccctggagaaggcctccagggcggaagtgtgagactctcctgggattccaggacctggggcaagaatccttttccagccccctgccagcatcctcctgggc

SEQ ID NO: 798184 - DNA, 120 bp, Artificial Sequence
  ENSG00000281406_8 (sequence is synthesized)
caggtggggccaggcctgaggtggccagcccagtgaggaggaaggcagaggtggccagtggctccgtggctccctctgttcttgctctccagaaagcagtgtttcctccagccccggccc

SEQ ID NO: 798185 - DNA, 120 bp, Artificial Sequence
  ENSG00000281406_9 (sequence is synthesized)
tgacccacccgtgttcatgatgcctgtgcctccttgccagcatcacagatgtggggaggcctgttccccaggccctgactcccctcctcagggactgtcttgccgtggccagactgaggg

SEQ ID NO: 798186 - DNA, 120 bp, Artificial Sequence
  ENSG00000281406_10 (sequence is synthesized)
acccctttcctggactgagccgtgccctcccttgattctcctgtctcccctgcctttttcttctctcctcagaagccatagaggggactgcgttcatatgtggtgccttcagtggaaact

SEQ ID NO: 798187 - DNA, 120 bp, Artificial Sequence
  ENSG00000281406_11 (sequence is synthesized)
cttagggtggggggacctctaggaccttcctcgactttttccctcatcccccacccccgccaaccttccagcttcagcctctgcccttacccccagcccatttccaggaggtaggaagca

SEQ ID NO: 798188 - DNA, 120 bp, Artificial Sequence
  ENSG00000281406_12 (sequence is synthesized)
aaagaaaaaagcatttccttccctctttccttcttccttccttcctctctcccttcattttggtataacttagccttttgtctttaatcctggagttctccggggctagaagacaggcag

SEQ ID NO: 798189 - DNA, 120 bp, Artificial Sequence
  ENSG00000281406_13 (sequence is synthesized)
agacgaatgccagcagcagagatgcttcaggcagattctgtaagcctgttctccctcatcagggagcagctcagccaaggagcaaagtcagaccccctctagctccccagggacagaata

SEQ ID NO: 798190 - DNA, 120 bp, Artificial Sequence
  ENSG00000281406_14 (sequence is synthesized)
gcccttctgacaggtaaacaggtgacctgggtagagagggcaaggccccaagataggagagtcagggctcccctttccttggaatgtgggcctctctgggcaactagggagggcaaaagt

SEQ ID NO: 798191 - DNA, 120 bp, Artificial Sequence
  ENSG00000281406_15 (sequence is synthesized)
cttcctcggctggttcgcccaaaacctgggagaagcaagggcacattctatgctggcagcctctgcctgcccagctcatgcccacactcaggggcctttcctgggctttgggcagattgg

SEQ ID NO: 798192 - DNA, 120 bp, Artificial Sequence
  ENSG00000281406_16 (sequence is synthesized)
gtgggattcaggttgtctttatgaggcttgagcacagcttgagttcctcctcccatcctccaaccccttcctttgcccctacctcctagcccccaccttctacaatctgttatttccttt

SEQ ID NO: 798193 - DNA, 120 bp, Artificial Sequence
  ENSG00000281406_17 (sequence is synthesized)
tatatccaaagaattataaacagaagtccttccctcaagggaacagcaagattcagcaataaaggccagtggggtcacaaaggacagaagaaaaactccctggttctttgtcctcttgga

SEQ ID NO: 798194 - DNA, 120 bp, Artificial Sequence
  ENSG00000281406_18 (sequence is synthesized)
tagtagaggccttgggtgaggcaaagagatgggcagaaaaagttaccttgatacagaggccagagagcctcctggagggcatgtgtttccctagcggtcacctgcgaggctgcaatccta

SEQ ID NO: 798195 - DNA, 120 bp, Artificial Sequence
  ENSG00000281406_19 (sequence is synthesized)
gaaaagtcacttctgtggcagaggatgaaattgtatccccggagactcagagatattgggtgttatgtcctgaccacacaggctcaccaggaggaaaggttaggaaagtggagaaagtac

SEQ ID NO: 798196 - DNA, 120 bp, Artificial Sequence
  ENSG00000281406_20 (sequence is synthesized)
gtcctggggagcgggtggccgaggagagctttccccttgtgcgcctctcaggccttggcagggattgcagctgcaggggtttggcagtgagcccatccagagagcttcctcccccgggag

SEQ ID NO: 798197 - DNA, 120 bp, Artificial Sequence
  ENSG00000281406_21 (sequence is synthesized)
aactcccttggctccagagggatactagatatcttgagccctggctttgggaacatgggtggggtcccaaggtcaaagtgttctgagtggaggtccagttgtcctctgcctccaagccgg

SEQ ID NO: 798198 - DNA, 120 bp, Artificial Sequence
  ENSG00000281406_22 (sequence is synthesized)
cagccccttcttcacccagggctgaggttggggccagcactgcagctggaattgtctgagcaggaggtagcagcttctagccaggcacaccccaaccccacattctattgtccctcagtt

SEQ ID NO: 798199 - DNA, 120 bp, Artificial Sequence
  ENSG00000281406_23 (sequence is synthesized)
tccttctcaggaaaatggggactttgctccttttagcatctcaggaagcagtctggacacctgtgccctcctctaggcccttggatgagcccagggaatagggaaaggccaaagcagccc

SEQ ID NO: 798200 - DNA, 120 bp, Artificial Sequence
  ENSG00000281406_24 (sequence is synthesized)
cagcattcgcagaccctgcgccctgggcctctgacttcgggccaggcttctgctccttctagggttggcctggctgccctgccttcccatcctctctccatggttctctcccagagactc

SEQ ID NO: 798201 - DNA, 120 bp, Artificial Sequence
  ENSG00000281406_25 (sequence is synthesized)
caccttgaggtgggggccctgagctcttggggtgagggaggggcacatgggtagatgattctgtggaggagatcaggcctcttgttcttgctgcgtggcactgattcctccttgcagatg

SEQ ID NO: 798202 - DNA, 120 bp, Artificial Sequence
  ENSG00000281406_26 (sequence is synthesized)
gtgtgaagggtgcttggggtccttgtgacttgagtgttgcctaggaccctggcccacaggacccaaggggcttcttgtctcaggttgaaacctttttatcagaatgtcatttccttctct

SEQ ID NO: 798203 - DNA, 120 bp, Artificial Sequence
  ENSG00000281406_27 (sequence is synthesized)
gctcccagggaagggctttttgcatgtagcatatgggttcatagaaatatatagggagattgttatttttaggaaaaaaaaagagcaataattaactaactgaaatacacatgaagtgtt

SEQ ID NO: 798204 - DNA, 120 bp, Artificial Sequence
  ENSG00000281406_28 (sequence is synthesized)
agagtgggatgcaaggagcactgagctgggagccaggtctcctggcttctagccctgcttggaaactaatgacctatgtgaccttagactagtcatgtcttatttctgagactcaggttc

SEQ ID NO: 798205 - DNA, 120 bp, Artificial Sequence
  ENSG00000281406_29 (sequence is synthesized)
ctcaactataaataggggattacataaatttcctcttaagtctcctttggagtccagggctctgtgagtctgggaagttgagcctcagtggggcatagggttgtggaaccagagggtcgc

SEQ ID NO: 798206 - DNA, 120 bp, Artificial Sequence
  ENSG00000281406_30 (sequence is synthesized)
aggtttcctctgccctcacagatgcactccgtgcagacaacagacatatctggagggtggatggaagtggtatggtggctctgagaagtgagagggggagtgagagggaaaggcaagtca

SEQ ID NO: 798207 - DNA, 120 bp, Artificial Sequence
  ENSG00000281406_31 (sequence is synthesized)
cccagagcttctgctagaatcttcccctagccagggcccaggactccttgcagttctgcctctcttccctcctacagccaggcccaaggggagtaagtcagttggcctagactctgactc

SEQ ID NO: 798208 - DNA, 120 bp, Artificial Sequence
  ENSG00000281406_32 (sequence is synthesized)
caggtcctgtctaggccatcacaggcgccactcttatgtacgttctcactttctctctgtcacatacacacagcatcaccaccaccaccaccacaaccacctgcagatagatgctcaagt

SEQ ID NO: 798209 - DNA, 120 bp, Artificial Sequence
  ENSG00000281406_33 (sequence is synthesized)
gattctagaagagatctcaaggactggcgctctgctccagttatgtaacccatgggcttccctttgcacagctcctcatgtgctcatctccatgctgatcaaaccaccccacctcattcc

SEQ ID NO: 798210 - DNA, 120 bp, Artificial Sequence
  ENSG00000281406_34 (sequence is synthesized)
ttgccttctgcaaggggaagtgcctcaggctggagtttgtcctgtctacagactgaatatgcattttgcccagtggctggagatgtgctggtggtggaatgtgctggtgattgtttctgg

SEQ ID NO: 798211 - DNA, 120 bp, Artificial Sequence
  ENSG00000281406_35 (sequence is synthesized)
atggagagccacagccccccagtgttctgccatgactgactcctgaccttggcaaattgcctcctctctcccagcctcctccataacaggtggcgatgagtcccatttcctccctacctc

SEQ ID NO: 798212 - DNA, 120 bp, Artificial Sequence
  ENSG00000281406_36 (sequence is synthesized)
acaggaaggcacgcattataaagggcacacttatcagatgtgcccagatgtggctggaacttttggagacagatacttggttcacaactgcaaaggtgggctttcaccagagaagaaaat

SEQ ID NO: 798213 - DNA, 120 bp, Artificial Sequence
  ENSG00000281406_37 (sequence is synthesized)
ctctgggctgctgagttcagtgggctccttgcaggctggtccaggaagtctggtgttcctcctgaaggtggctgctatgtccagcaggtgatcaagctgacagtaccacaagaaccaaga

SEQ ID NO: 798214 - DNA, 120 bp, Artificial Sequence
  ENSG00000281406_38 (sequence is synthesized)
aacagaatctgttcccaaggaatgaatgttctatctctctgacccaaaagcaagagcaagagagagctgtcaccatcatcaccctgctcccaacacaaacacagccccccaagtccatat

SEQ ID NO: 798215 - DNA, 120 bp, Artificial Sequence
  ENSG00000281406_39 (sequence is synthesized)
tgctgacaagggtatctgccttgtcagggtgaatcctctggaccccaggccatccctggagtggtcagtgcccactgtgccggggttattgtggccagtccgcctgggttcgcttctcta

SEQ ID NO: 798216 - DNA, 120 bp, Artificial Sequence
  ENSG00000281406_40 (sequence is synthesized)
aatttccatgggataggaactatagatcatgaagaagaaacaggaaccttgactcttcacggaggagcccaggaggtcagaaccatccaccaggagggtgagcggtagctgcccagggca

SEQ ID NO: 798217 - DNA, 120 bp, Artificial Sequence
  ENSG00000281406_41 (sequence is synthesized)
tccctggaggaagtcgtcatactgaggaagaaattgccaaagccaagagctcccagacctgggcagctcaggagctgacagaaaccaccccccaggtctggagttcaagggttttcctcg

SEQ ID NO: 798218 - DNA, 120 bp, Artificial Sequence
  ENSG00000281406_42 (sequence is synthesized)
tgggctgctggtctgtctctttcccttctggggcagccgtctctcctccttcagctcattcccgtgttccatctgaggggcgggaggaaggcaggagggggagatggcaggacccagaca

SEQ ID NO: 798219 - DNA, 120 bp, Artificial Sequence
  ENSG00000281406_43 (sequence is synthesized)
gatcctcaggactctcccagcctctgttgccatggcaacactgctatttttatcccgttgttcatgatgctcaaagctctaactttctctgttccagagaggccaggctggtttctgccc

SEQ ID NO: 798220 - DNA, 120 bp, Artificial Sequence
  ENSG00000281406_44 (sequence is synthesized)
tcatcctttaacacagcatcttctcccagaggcctgaggatgggaaaaagtgatggagaaaaggggaacccctaaggtcacccctcagccagggggaactgtttaacaggggtttgtctc

SEQ ID NO: 798221 - DNA, 120 bp, Artificial Sequence
  ENSG00000281406_45 (sequence is synthesized)
tgcccttttgagcctttggttttctacctggctcaggcacccaggtttatgttttctagatcaaaactctgcatggtctccctgagagactggaaaagagctgccaatcaggatggattt

SEQ ID NO: 798222 - DNA, 120 bp, Artificial Sequence
  ENSG00000281406_46 (sequence is synthesized)
tttcctacacaggtatgacactgcagccacttcccttcttgggaaaattaaacttcattctgaagaatgtcctgttggtggtataagccaacccctgccctcctaaaaggggatagataa

SEQ ID NO: 798223 - DNA, 120 bp, Artificial Sequence
  ENSG00000281406_47 (sequence is synthesized)
ttaaatttggttaattagcaatcagattcactggggaattgaaaccagtacttccctttcttctgtccctccaccaaagaaccggaacaaatggcttcatgtctttgtccagtctttctg

SEQ ID NO: 798224 - DNA, 120 bp, Artificial Sequence
  ENSG00000281406_48 (sequence is synthesized)
cctaaagcaaaatagcatatattctccaggctgaaaagtagattcctcctcacccctactcaagatggccacatttcaatccaggctcttgaagacagggtctaatgaaaggatttctgt

SEQ ID NO: 798225 - DNA, 120 bp, Artificial Sequence
  ENSG00000281406_49 (sequence is synthesized)
tctttctctgtctgttccctctggcccagcttctagtcctctccttatgtccccacctccatggcagtggcaagagacccctgagagtcaatggtgctaacgttccccacctatataccc

SEQ ID NO: 798226 - DNA, 120 bp, Artificial Sequence
  ENSG00000281406_50 (sequence is synthesized)
ctatgtagtttatcgagatttgaacccagcacctgggtggctgtgttgggcggatacatttcacgtcctcaagaccacaaccctggcgacaggtctggattaattctgtaaagtagcaat

SEQ ID NO: 798227 - DNA, 120 bp, Artificial Sequence
  ENSG00000281406_51 (sequence is synthesized)
ctatatcatgctaaactcctgcactgaggttcttcctcggctgaactgactcgtggatggttaagtttcctggggtggctggaacccatttactaagcctctaattggtttcattttggc

SEQ ID NO: 798228 - DNA, 120 bp, Artificial Sequence
  ENSG00000281406_52 (sequence is synthesized)
tcaagttgcatggtttcccgaatctatgcacctggagtaagcacttttctggttgccactgaaaagcatgccggcaaacgctgctctgttaattgctgtaataaacagactttattatat

SEQ ID NO: 798229 - DNA, 120 bp, Artificial Sequence
  ENSG00000281406_53 (sequence is synthesized)
attagcgaacacaccttggccgcgcggcctccggcggcggcgccgcagcttttgtctcccgcccgccgggctgcgaggtgcgggcgcttaggcgcgaagttgcagctccgacgcgctgct

SEQ ID NO: 798230 - DNA, 120 bp, Artificial Sequence
  ENSG00000281406_54 (sequence is synthesized)
ggggggctgcaaaagagagaagagagacaaaactacagcagagaatcggacaaggagggaagaaagagattggtgagggggagagagagagaaagagagagagagacacaaaggaagtga

SEQ ID NO: 798231 - DNA, 87 bp, Artificial Sequence
  ENSG00000281990_0 (sequence is synthesized)
atggactgcacctggaggatcctcctcttggtggcagcagctacaggcacccacgccgaggtccagctggttacagtgaaaatctcc

SEQ ID NO: 798232 - DNA, 120 bp, Artificial Sequence
  ENSG00000281990_1 (sequence is synthesized)
atacgcagagaagttccagggcagagtcaccataaccgcggacacgtctacagacacagcctacatggagctgagcagcctgagatctgaggacacggccgtgtattactgtgcaacaga

SEQ ID NO: 798233 - DNA, 120 bp, Artificial Sequence
  ENSG00000281991_0 (sequence is synthesized)
ccacccaagccaaaccaaagctgaggcaggagccgaaactcagagtccttcaaggcctatagccaggtgatggaggacgaggagaaggcagtggagatcttgggcaacacggaagctgct

SEQ ID NO: 798234 - DNA, 120 bp, Artificial Sequence
  ENSG00000281991_1 (sequence is synthesized)
catcctccatcccccatccgctgctgctggctccgcctccgctgcttggcagctactagcattatctgtggctgctcttgcctgggagtcatggctctggtgtttgccatcaaggcggaa

SEQ ID NO: 798235 - DNA, 120 bp, Artificial Sequence
  ENSG00000281991_2 (sequence is synthesized)
gagcggcataaagcaggccggtccgaggaggcagtgcgctggggggcccgggcccggaaactcatcctggccagctttgctgtctggcttgctgtcctcattctgggtcccctgctgctg

SEQ ID NO: 798236 - DNA, 120 bp, Artificial Sequence
  ENSG00000281991_3 (sequence is synthesized)
tggttgctctcctacgccatcgctcaggctgagtgaccctggatggcctctgctgagagccagccgagacctcctggatcctgcaatgcggcattgctaaggtcctgtgacagcagtggt

SEQ ID NO: 798237 - DNA, 120 bp, Artificial Sequence
  ENSG00000281991_4 (sequence is synthesized)
tggaaggatcctggttggaaggatggggactctctcaaggggctttggaagagctcttctagccctttataaaaggagggcagcagctgagactgatgagaggagggcagcctgctctgt

SEQ ID NO: 798238 - DNA, 120 bp, Artificial Sequence
  ENSG00000281991_5 (sequence is synthesized)
tctttcagggccccccacccccatctcccctaccctagcccaccctagggcctctacccagcgggaggggttgaagaccaggcctggttttattagaattcattttgtaataaaagcctt

SEQ ID NO: 798239 - DNA, 120 bp, Artificial Sequence
  ENSG00000281991_6 (sequence is synthesized)
gcagaagccagcatccacctcatccaggagctccaagagaaggaaacaatttttattttcttcttctggaagtttcccttcttggaaagaccccagcttctcccttgtacgtccacagag

SEQ ID NO: 798240 - DNA, 120 bp, Artificial Sequence
  ENSG00000281991_7 (sequence is synthesized)
actctgaggccaagagtagtagcagctgctactatttattacttactatattccaggctgtgttctaagcactttatatttcttaacttcctccagttttcagtcactcagtagatgtct

SEQ ID NO: 798241 - DNA, 120 bp, Artificial Sequence
  ENSG00000281991_8 (sequence is synthesized)
gtactatcatatccatcatatgaatatatcacatatgataggtaccaactatctgagtgaaaactggaagaaatgttctaaaatgacagtgttctcgttttatacttgaagaaacaaaca

SEQ ID NO: 798242 - DNA, 120 bp, Artificial Sequence
  ENSG00000281991_9 (sequence is synthesized)
gatttgcacaaggtcctcagctactaaatggtagagctgagactgaacccagacagtttggttccagagctgagagaggagtgaaagagttgggtaacagcaacaaccatcctgtacatg

SEQ ID NO: 798243 - DNA, 120 bp, Artificial Sequence
  ENSG00000281991_10 (sequence is synthesized)
gagatttgagtgattaaaatggattttcatatcttttatcttggacctcataatatttcaaattttttttaaaattatgaagtatatcatacatataggaaaatacccaaaacaagtata

SEQ ID NO: 798244 - DNA, 120 bp, Artificial Sequence
  ENSG00000281991_11 (sequence is synthesized)
cagttcattaacacaaagcaaacgtgaataaccacattcagtaaagaaattggaacactgtcaacacttcaaagcctcctttatactcctcccaatcactgctacttcctttcttcccac

SEQ ID NO: 798245 - DNA, 120 bp, Artificial Sequence
  ENSG00000281991_12 (sequence is synthesized)
aggtaaccaccattctgacttctagcagtgtcatttaattttgtctgcatttgaactttatataaatggaatcatgtattcttttcatgttaacattgtgagattcgtcaatatttggaa

SEQ ID NO: 798246 - DNA, 120 bp, Artificial Sequence
  ENSG00000282122_0 (sequence is synthesized)
acaaccacacccctcctaagaagaagcccctagaccacagctccacaccatggactggacctggaggatcctcttcttggtggcagcagcaacaggtgcccactcccaggtgcagctggt

SEQ ID NO: 798247 - DNA, 120 bp, Artificial Sequence
  ENSG00000282122_1 (sequence is synthesized)
ggtttcctgcaaggcttctggatacaccttcactagctatgctatgaattgggtgcgacaggcccctggacaagggcttgagtggatgggatggatcaacaccaacactgggaacccaac

SEQ ID NO: 798248 - DNA, 120 bp, Artificial Sequence
  ENSG00000282122_2 (sequence is synthesized)
gtatgcccagggcttcacaggacggtttgtcttctccttggacacctctgtcagcacggcatatctgcagatctgcagcctaaaggctgaggacactgccgtgtattactgtgcgagaga

SEQ ID NO: 798249 - DNA, 120 bp, Artificial Sequence
  ENSG00000282419_0 (sequence is synthesized)
agcttttctctgtgacatgtcgcggagtcgccggtagggttcggtgtggcgagggggacctgcttctctctttgtgagaaccagggagtgagggaggaaggaggccaaggaggaggccag

SEQ ID NO: 798250 - DNA, 120 bp, Artificial Sequence
  ENSG00000282419_1 (sequence is synthesized)
gactgagcaaggactaaagtaagactgaaaggggaggtgaggggtggactggttgtcggcagcagccggtaccggaagtggcggcagcagctgaggcgacgcaccgtgaggcagctgctt

SEQ ID NO: 798251 - DNA, 120 bp, Artificial Sequence
  ENSG00000282419_2 (sequence is synthesized)
gactaggccacagccgccatggcgatgaattttggggaccatgccagcggcttccgccacaatgatgtgatcaggttcattaacaatgaagtcctcatggacggcagcggcccagccttt

SEQ ID NO: 798252 - DNA, 120 bp, Artificial Sequence
  ENSG00000282419_3 (sequence is synthesized)
tacgtggccttccgctcgcggccgtggaacgaggtagaggacagccttcaggccattgtggccgactctcaggtgccgcgcgccatcaagagggcctgtacctggagcgctttggctttg

SEQ ID NO: 798253 - DNA, 120 bp, Artificial Sequence
  ENSG00000282419_4 (sequence is synthesized)
agcgtgcgagtggccacgaggcagcgggaggagctgctgcaccacgttcggcggctgcaaaggcatgcggaggagcgccaggcgacctcctgggctctaacgtcccagctgcagcagctg

SEQ ID NO: 798254 - DNA, 120 bp, Artificial Sequence
  ENSG00000282419_5 (sequence is synthesized)
cgcctggagcatgaggtggcggcaacacagctgcacctcgcgcaggctgccctgcagcaggcgctgaatgagcgtgatgggctgtacgggaggctgctccagatcgagaggtttccccag

SEQ ID NO: 798255 - DNA, 120 bp, Artificial Sequence
  ENSG00000282419_6 (sequence is synthesized)
gccgctccactggcccatgaaataatgtctgggccgcaagcagagcagaatggggctgcggcatgtcccctggctacagagcagcagagcgatatggtggccatggggacacatgctaat

SEQ ID NO: 798256 - DNA, 120 bp, Artificial Sequence
  ENSG00000282419_7 (sequence is synthesized)
gcccagatgccaaccccgacagatgttctttatgtgccaggacctctgagtccctgggcccagggcatgcaaccccctctgccagtgccacatccattcccacacccaccaccattccca

SEQ ID NO: 798257 - DNA, 120 bp, Artificial Sequence
  ENSG00000282419_8 (sequence is synthesized)
atgaaattcccatccttgccacctctaccacctgctgtagtcacgggggcagaagcagcagcagtcccacttcagatgcctcctactgagatccacccaccttgcccgtggcctgcagtg

SEQ ID NO: 798258 - DNA, 120 bp, Artificial Sequence
  ENSG00000282419_9 (sequence is synthesized)
ggcttccaggaggagatggcccctctgtggtaccagagaagctacatccaggaggaagattccaaaatccttcaggggtcattccccttaggagacagcagaagccacagccagggagaa

SEQ ID NO: 798259 - DNA, 120 bp, Artificial Sequence
  ENSG00000282419_10 (sequence is synthesized)
ggttcagagaggtcccaaagaatgcccctccccggggacagtgggtgccacaacccgctgtcagagagtccccaggggacagccccactggggagcagcggatgccactcccaggaagaa

SEQ ID NO: 798260 - DNA, 120 bp, Artificial Sequence
  ENSG00000282419_11 (sequence is synthesized)
ggtacagaaggaccccaggggatggatcccctggggaacagagagagacaaaatcagaaagaaggtccaaagagggcccggaggatgcacaccctggtgtttcgcaggagccacaaatca

SEQ ID NO: 798261 - DNA, 120 bp, Artificial Sequence
  ENSG00000282419_12 (sequence is synthesized)
gaaggtccagaggggccccaggggacggtcccccagggagacagcagaagctacagccaggaaggatgttcagatagggcccaggagatggccaccctggtgtttatcaggaggtgcaaa

SEQ ID NO: 798262 - DNA, 120 bp, Artificial Sequence
  ENSG00000282419_13 (sequence is synthesized)
ccagaaggtccaaagaggccccagtggactgtccccctgggggacagcagaagtcatatcaaggaagaaggcccagaggggccccagaggattgtcctccagggagacaacaggagctat

SEQ ID NO: 798263 - DNA, 120 bp, Artificial Sequence
  ENSG00000282419_14 (sequence is synthesized)
agccaggaaggaagcccagagagggcccaggggatggccaccctggtgtttagcaggagctgcaaaccagaagaaggtccagagaggccccaggacactcccctgggggacagcagaagt

SEQ ID NO: 798264 - DNA, 120 bp, Artificial Sequence
  ENSG00000282419_15 (sequence is synthesized)
catatcaaggaagaaggcccagaggggccccagaggattgtcctccagggagacaacaggagctatagccaggaaggaagcccagagagggcccaggggatggccaccctggtgtttagc

SEQ ID NO: 798265 - DNA, 120 bp, Artificial Sequence
  ENSG00000282419_16 (sequence is synthesized)
aggagctgcaaaccagaagaaggtccagagaggccccaggacactcccctgggggacagcagaagtcatatcaaggaagaaggcccagaggggccccagaggattgtcctccagggagac

SEQ ID NO: 798266 - DNA, 120 bp, Artificial Sequence
  ENSG00000282419_17 (sequence is synthesized)
gaagctatagccaggaaggaagccgagagagggcccaggggatggccaccctggtgtttagcaggagctgcaaaccagaagaaggtccagagaggccccagggcactcccctgggggaca

SEQ ID NO: 798267 - DNA, 120 bp, Artificial Sequence
  ENSG00000282419_18 (sequence is synthesized)
gcaggagccatggtgtcagagaaagcccaaagaaatggcaacctcagaggcagaaggccaagaaaccaaaagtgaataaagtctcgggatcccagcagcaggagaagcctgcctcatttc

SEQ ID NO: 798268 - DNA, 120 bp, Artificial Sequence
  ENSG00000282419_19 (sequence is synthesized)
cagttccagtgaattggaaatgcccatggtgtaaagccattaatttttcatggcgtacggcctgctataaatgcaagaaagcctgtgtgccatttgagagtggaggacaaactcagtgat

SEQ ID NO: 798269 - DNA, 120 bp, Artificial Sequence
  ENSG00000282419_20 (sequence is synthesized)
ttcaggaaggtaagtaagaatggacacacttcaaagagaaagcaatttcctaagaccctcttctgattaaagtataacttatttacttcacagaaaaattgaaccccaaattatggagaa

SEQ ID NO: 798270 - DNA, 120 bp, Artificial Sequence
  ENSG00000282419_21 (sequence is synthesized)
aattaaataaaataatttattatcccattacccaaattagccattttaaaagttgttttggatacacatacatacaaatatatatgcatttatattctcatgttattcatttacttgaac

SEQ ID NO: 798271 - DNA, 120 bp, Artificial Sequence
  ENSG00000282419_22 (sequence is synthesized)
agagatggactacttttgatttctcctgattgcatttaaattttgcaggtggtggattctggatggccgatgctgattggttaataccctggagaagctgaagtcatgaagccttttctt

SEQ ID NO: 798272 - DNA, 120 bp, Artificial Sequence
  ENSG00000282419_23 (sequence is synthesized)
ttcctttttgtttcactccttttcctgaaaaagccatgtatgtggctgggagcagttgtgtgattttagagttagaagatatgttgaattttaggaacagtacttttccttgaaaatgct

SEQ ID NO: 798273 - DNA, 120 bp, Artificial Sequence
  ENSG00000282419_24 (sequence is synthesized)
gttattcctttggaaacaaattttagaatcaccacacttccttgaaaatgctattattccttttgaaactactgcaatcttcatgttttcttcattttgctttgttggttttataggtga

SEQ ID NO: 798274 - DNA, 120 bp, Artificial Sequence
  ENSG00000282419_25 (sequence is synthesized)
ggttctgtttttgtatctcagccccaccaaacttgcttgttgctgaagaagctgaacctgttccattagaagatcttccaaagccaaaagaaagtgagactgactgcagacttactggct

SEQ ID NO: 798275 - DNA, 120 bp, Artificial Sequence
  ENSG00000282419_26 (sequence is synthesized)
gcagcagagaggagtaagaggaagtcagagaagaagagatgatttgacactcattgggggaaaaggaagagcagaattgttttgttagaattgaatttttccactgggacaaggaattaa

SEQ ID NO: 798276 - DNA, 120 bp, Artificial Sequence
  ENSG00000282419_27 (sequence is synthesized)
cttggaagagtttggggggttgtgttcaattctgtagatggtagcaactttgatgaatttcgtttagtttgttaaatagttattgtctaatatgtgttaggagctagacttataggttat

SEQ ID NO: 798277 - DNA, 120 bp, Artificial Sequence
  ENSG00000282419_28 (sequence is synthesized)
tatttggtgcacacatcataatccttgttgctgagttggttagaagataggagagagcataatttgggatacaaattagatcaggggtatcttctttgccttgcatgtagtgttgcctta

SEQ ID NO: 798278 - DNA, 120 bp, Artificial Sequence
  ENSG00000282419_29 (sequence is synthesized)
ggtaaaaccaatttaaataacatctagatccatttttgcagttttgtgggcaatgtgaaagagacttgcatgaaaggtcttgagtaaccaaactgctagtctcattggtttgcaggtgag

SEQ ID NO: 798279 - DNA, 120 bp, Artificial Sequence
  ENSG00000282419_30 (sequence is synthesized)
acaaataagcagtggcaaagttcaggaaagtggtcttacagaagtgcaggcagggcttttctgattgtctgctgatttcctcctttgagagggacagatattttcctggctgccagtaag

SEQ ID NO: 798280 - DNA, 120 bp, Artificial Sequence
  ENSG00000282419_31 (sequence is synthesized)
cctgcctgaaagaccactggggtgtcttgaagaaagacagtgctctgaggagtattcactacacactccagccctcagcctcgggctgcccccattccaagtccctttctagtcaatagg

SEQ ID NO: 798281 - DNA, 120 bp, Artificial Sequence
  ENSG00000282419_32 (sequence is synthesized)
tggatgaagaacaaaatggatttcaaggacagacagacagacataagggctgtgggctatggatggtgtttctcttgagaggactaattgggttaaaaataaaactggacaggggcgagc

SEQ ID NO: 798282 - DNA, 120 bp, Artificial Sequence
  ENSG00000282419_33 (sequence is synthesized)
actcttgggaatgcccctggacccttcctctttggcgtgttctctgcaggctcccccaaggcagctgctgcaaggcaaggagggatccagggtagagctcagggatggtgggttagatct

SEQ ID NO: 798283 - DNA, 120 bp, Artificial Sequence
  ENSG00000282419_34 (sequence is synthesized)
gcctccagtccaagctaaagatgtcttcaagtttccctgtaagatcccgcccagctcaccaaaatcaacctttgtcaggggttttctgatcctaactagtaataaagagtgtgcactgga

SEQ ID NO: 798284 - DNA, 78 bp, Artificial Sequence
  ENSG00000282419_35 (sequence is synthesized)
agctcaagcagtggattctggatggccgatgctgattggttaataccctggagaagctgaagtcatgaagccttttct

SEQ ID NO: 798285 - DNA, 120 bp, Artificial Sequence
  ENSG00000282499_0 (sequence is synthesized)
actactgggagacatcctctctagccccaactgtgccatgactatcaggctcctctgctacgtgggcttttattttctgggggcaggcctcatggaagctgacatctaccagaccccaag

SEQ ID NO: 798286 - DNA, 120 bp, Artificial Sequence
  ENSG00000282499_1 (sequence is synthesized)
aaagaagatcactctggaatgttctcaaaccatgggccatgacaaaatgtactggtatcaacaagatccaggaatggaactacacctcatccactattcctatggagttaattccacaga

SEQ ID NO: 798287 - DNA, 120 bp, Artificial Sequence
  ENSG00000282499_2 (sequence is synthesized)
gaagggagatctttcctctgagtcaacagtctccagaataaggacggagcattttcccctgaccctggagtctgccaggccctcacatacctctcagtacctctgtgccagcagtgaata

SEQ ID NO: 798288 - DNA, 120 bp, Artificial Sequence
  ENSG00000282608_0 (sequence is synthesized)
ctcacttcctgaaacacccctgaagagggttgcttatcttgatggaactcaaaaagccaaaaagctgcaggcagaggcgttgaggacatctgtttggggaactaagagcagcagcacttt

SEQ ID NO: 798289 - DNA, 120 bp, Artificial Sequence
  ENSG00000282608_1 (sequence is synthesized)
cagattcagtccatatagagctgtcctacagcattctggaaacttgaggatgtgcggtgcataaaggggctggaagtgacccacctgtgatgagccctttctaaggagaagggtttccaa

SEQ ID NO: 798290 - DNA, 120 bp, Artificial Sequence
  ENSG00000282608_2 (sequence is synthesized)
gagatcaccccaccagaaaagggtaggaatgagcaagttgggaattttagactgtcactgcacatggacctctgggaagacgtctggcgagagctaggcccactggccctacagacggat

SEQ ID NO: 798291 - DNA, 120 bp, Artificial Sequence
  ENSG00000282608_3 (sequence is synthesized)
cttgctggctcacctgtccctgtggaggttcccctgggaaggcaagatgcccaacaacagcactgctctgtcattggccaatgttacctacatcaccatggaaattttcattggactctg

SEQ ID NO: 798292 - DNA, 120 bp, Artificial Sequence
  ENSG00000282608_4 (sequence is synthesized)
cgccatagtgggcaacgtgctggtcatctgcgtggtcaagctgaaccccagcctgcagaccaccaccttctatttcattgtctctctagccctggctgacattgctgttggggtgctggt

SEQ ID NO: 798293 - DNA, 120 bp, Artificial Sequence
  ENSG00000282608_5 (sequence is synthesized)
catgcctttggccattgttgtcagcctgggcatcacaatccacttctacagctgcctttttatgacttgcctactgcttatctttacccacgcctccatcatgtccttgctggccatcgc

SEQ ID NO: 798294 - DNA, 120 bp, Artificial Sequence
  ENSG00000282608_6 (sequence is synthesized)
tgtggaccgatacttgcgggtcaagcttaccgtcagatacaagagggtcaccactcacagaagaatatggctggccctgggcctttgctggctggtgtcattcctggtgggattgacccc

SEQ ID NO: 798295 - DNA, 120 bp, Artificial Sequence
  ENSG00000282608_7 (sequence is synthesized)
aatggactacatggtatacttcagcttcctcacctggattttcatccccctggttgtcatgtgcgccatctatcttgacatcttttacatcattcggaacaaactcagtctgaacttatc

SEQ ID NO: 798296 - DNA, 120 bp, Artificial Sequence
  ENSG00000282608_8 (sequence is synthesized)
taactccaaagagacaggtgcattttatggacgggagttcaagacggctaagtccttgtttctggttcttttcttgtttgctctgtcatggctgcctttatctatcatcaactgcatcat

SEQ ID NO: 798297 - DNA, 120 bp, Artificial Sequence
  ENSG00000282608_9 (sequence is synthesized)
ctactttaatggtgaggtaccacagcttgtgctgtacatgggcatcctgctgtcccatgccaactccatgatgaaccctatcgtctatgcctataaaataaagaagttcaaggaaaccta

SEQ ID NO: 798298 - DNA, 120 bp, Artificial Sequence
  ENSG00000282608_10 (sequence is synthesized)
ccttttgatcctcaaagcttgtgtggtctgccatccctctgattctttggacacaagcattgagaagaattctgagtagttatccatcagagatgactctgtctcattgaccttcagatt

SEQ ID NO: 798299 - DNA, 120 bp, Artificial Sequence
  ENSG00000282608_11 (sequence is synthesized)
ccccatcaacaaacacttgagggcctgtatgcctgggccaagggatttttacatccttgattacttccactgaggtgggagcatctccagtgctccccaattatatctcccccactccac

SEQ ID NO: 798300 - DNA, 120 bp, Artificial Sequence
  ENSG00000282608_12 (sequence is synthesized)
tactctcttcctccacttcatttttcccttgtcctttctctctaattcagtgttttggaggcctgacttggggacaacgtattattgatattattgtctgttttccttcttcccaataga

SEQ ID NO: 798301 - DNA, 120 bp, Artificial Sequence
  ENSG00000282608_13 (sequence is synthesized)
agaataagtcatggagcctgaagggtgcctagttgacttactgacaaaaggctccagttgggctgaacatgtgtgtggtggtgactcatttccataccattgtggaattgagcagagaac

SEQ ID NO: 798302 - DNA, 120 bp, Artificial Sequence
  ENSG00000282608_14 (sequence is synthesized)
ctgctctcggaggatgcctaggagatgttgggaacagaaaaaataaactgagtttaagggggacttaaactgctgaattcacctgtggatgtttttgagtaaataaaagctaatagctaa

SEQ ID NO: 798303 - DNA, 120 bp, Artificial Sequence
  ENSG00000282608_15 (sequence is synthesized)
ctgcttatctttacccacgcctccatcatgtccttgctggccatcgctgtggaccgatacttgcgggtcaagcttaccgtcaggctgctgtcaggaaggacagtttaaggagcaatgggg

SEQ ID NO: 798304 - DNA, 120 bp, Artificial Sequence
  ENSG00000282608_16 (sequence is synthesized)
actcttactcttactgtcctttaaggtctctgaaacacttcaatacaattttgtaacttcattgattcatttaactcaaataccaagtatggatgcccatgaagatagagaagcaggagc

SEQ ID NO: 798305 - DNA, 120 bp, Artificial Sequence
  ENSG00000282608_17 (sequence is synthesized)
aggcacaggtagaggggaagtgtcggggaggcatagtataatttatgagaatctgcacaacagccaaacagaacagtgccaagaacagcaggcaagcttgctttgagaatatcatttctc

SEQ ID NO: 798306 - DNA, 120 bp, Artificial Sequence
  ENSG00000282608_18 (sequence is synthesized)
aaactgagttcaagggggacttaaactgctgaattcacctgtggatgtttttgagttaaaaaaaaaaagaaaaagaaaagataggtaacagttgtatagctctcagtaagtggagccctg

SEQ ID NO: 798307 - DNA, 120 bp, Artificial Sequence
  ENSG00000282608_19 (sequence is synthesized)
agtggagcacgtaagcacttgactctaggcaacatcctccttatccattcaagagttttcttctttagaaaagtccccagagaagtttcctggatttttctccaatcgttgtctgctcat

SEQ ID NO: 798308 - DNA, 120 bp, Artificial Sequence
  ENSG00000282608_20 (sequence is synthesized)
cttgtcttcgtatccagtggagtttagctggaatcaccataggatatcaatgctgccctctcttagcagaagattggagaattaagagagtatatgccttatctcacctctctctctctc

SEQ ID NO: 798309 - DNA, 120 bp, Artificial Sequence
  ENSG00000282608_21 (sequence is synthesized)
ctttaccagctccatctcccctaccctttagcaattactgctgtggactcactgactctcttcattcacacagatacaagagggtcaccactcacagaagaatatggctggccctgggcc

SEQ ID NO: 798310 - DNA, 73 bp, Artificial Sequence
  ENSG00000282639_0 (sequence is synthesized)
atggagttctggctgagctgggttctccttgttgccattttaaaagcagcctggggggtccctgagactctcc

SEQ ID NO: 798311 - DNA, 120 bp, Artificial Sequence
  ENSG00000282639_1 (sequence is synthesized)
ctacgcagactccgtgaagggcagattcaccatctccagagacaattccaagaacacgctgtatcttcaaatgagcagtctgagagctgaggacacggctgtgtattactgtgtgaaaga

SEQ ID NO: 798312 - DNA, 120 bp, Artificial Sequence
  ENSG00000282651_0 (sequence is synthesized)
agtctccttcaccacccagctgggatctcagggcttccttttctgtcctcctccaggatggggtcaaccgccatcctcgccctcctcctggctgttctccaaggagtctgtgccgaagtg

SEQ ID NO: 798313 - DNA, 120 bp, Artificial Sequence
  ENSG00000282651_1 (sequence is synthesized)
gatctcctgtaagggttctggatacagctttaccagctactggatcagctgggtgcgccagatgcccgggaaaggcctggagtggatggggaggattgatcctagtgactcttataccaa

SEQ ID NO: 798314 - DNA, 120 bp, Artificial Sequence
  ENSG00000282651_2 (sequence is synthesized)
ctacagcccgtccttccaaggccacgtcaccatctcagctgacaagtccatcagcactgcctacctgcagtggagcagcctgaaggcctcggacaccgccatgtattactgtgcgagaca

SEQ ID NO: 798315 - DNA, 120 bp, Artificial Sequence
  ENSG00000282757_0 (sequence is synthesized)
agttactcgctgatctccgtggagtccaggtcttctgcccaagatgaatttggagggcacttcaggtggcatacttcaaaaagaattctggagaaacagaattcagtataaccagagtca

SEQ ID NO: 798316 - DNA, 120 bp, Artificial Sequence
  ENSG00000282757_1 (sequence is synthesized)
aaaggatatcctccaatcatggtttcaacatgaccctttccctgataaagctgccagagaacaactggccaaagaaattggggttccagaatctaatattcaggtttggtttaaaaatta

SEQ ID NO: 798317 - DNA, 120 bp, Artificial Sequence
  ENSG00000282757_2 (sequence is synthesized)
cagagtaaaacagagaaaactggattataagtgcttctcagaaaaagatcaaacccaggggcatgaccagtcccagcatctgactcaagaatacttacctaaagaagcccgacaaaaaca

SEQ ID NO: 798318 - DNA, 120 bp, Artificial Sequence
  ENSG00000282757_3 (sequence is synthesized)
gacattcatcacatggactcaaaaaaacaggctagtgcaagcctttgagaggaacccattccctgatattgctaccagaaaaaaactggctgaacaaacaggcctgcaggaatcaagaat

SEQ ID NO: 798319 - DNA, 120 bp, Artificial Sequence
  ENSG00000282757_4 (sequence is synthesized)
aagaagagcagaatggagcccatgaatttattggtagacgacccaaatgagagaccagatgcaactgttgggtggcatccaatcaacctgttcctccccacagacagctctcattatttt

SEQ ID NO: 798320 - DNA, 120 bp, Artificial Sequence
  ENSG00000282757_5 (sequence is synthesized)
tcttgctcacattcttccagcgggcatgaaactcttccacctgttcttccttcaacccaggctccttgggatcccttcaggttccatgtgagccaaggaccaaatgtcatgatcatgcag

SEQ ID NO: 798321 - DNA, 120 bp, Artificial Sequence
  ENSG00000282757_6 (sequence is synthesized)
cccacacaggctgtgcaggaaggagagaagtctgatcagcctctgataattccgaatcacctcctgacactgccaattctgacaaaggacttagatactccgactcccttctggctccaa

SEQ ID NO: 798322 - DNA, 120 bp, Artificial Sequence
  ENSG00000282757_7 (sequence is synthesized)
taccaagaagaacaccaaaatcacaaagaacactctggctcgggagtaccacaggtcaagagccattctcagcctgaacctgagcacagggagcaacaacctctaaatctgggtcagttt

SEQ ID NO: 798323 - DNA, 120 bp, Artificial Sequence
  ENSG00000282757_8 (sequence is synthesized)
gacatatcgaacattttgcaaaggtgggacgagatctgccaggctctgcttgctgaatgggaccctctcaaagggacacactgagacagacttgtggcagcagtaggcacactcagctga

SEQ ID NO: 798324 - DNA, 120 bp, Artificial Sequence
  ENSG00000282815_0 (sequence is synthesized)
atggcgatgaactttggggaccatgccagcgggttccgccatgatgatgtgatcaggttcatcaacaatgaagtcctcaggaacggcggcagcccagccttttacacggccttccgctcg

SEQ ID NO: 798325 - DNA, 120 bp, Artificial Sequence
  ENSG00000282815_1 (sequence is synthesized)
cggccgtggaacgaggtagaggaccggcttcgggccattgtggccgacccgcgggtgccccgtgccattaagagggcctgtacctggagcgctttggcgctgagtgtgcaagtggctgcg

SEQ ID NO: 798326 - DNA, 120 bp, Artificial Sequence
  ENSG00000282815_2 (sequence is synthesized)
aggcagcaggaggagctgctgtaccaggtttggtggctgcaagggcatgtggaggagtgccaggcgacctcctgggctctaacttcccagctgcagcagctgcgcctggagcatgaggag

SEQ ID NO: 798327 - DNA, 120 bp, Artificial Sequence
  ENSG00000282815_3 (sequence is synthesized)
gtggcaacacagctgcacctcacgcaggccgccctgcagcaggtgctgaatgagcgtgatgggttatgcgggaggctgctagaagttgagagatccatgcaggtctatccgatgcctcag

SEQ ID NO: 798328 - DNA, 120 bp, Artificial Sequence
  ENSG00000282815_4 (sequence is synthesized)
gattttgtacccggtccagaagccggccagtatgggcctgtggccgggactttaaatgcagaacagagtgaggcggtggccacagaggcacagggaatgccacattcggaagcccaggta

SEQ ID NO: 798329 - DNA, 120 bp, Artificial Sequence
  ENSG00000282815_5 (sequence is synthesized)
gcagccccaacagctgtgtattacatgcctgaaccccagagtggcagggtccagggcatgcaacctcttctgctaatgcaggcacctcatccagtcccattccatatgccttcaccaatg

SEQ ID NO: 798330 - DNA, 120 bp, Artificial Sequence
  ENSG00000282815_6 (sequence is synthesized)
ggactgccatactcaacacctctaccacccccagtagtaatggaatcagcagcagcaattgcaccacagatgcctcctgcagggatctatccacctggtctttgggccacagtgggatcc

SEQ ID NO: 798331 - DNA, 120 bp, Artificial Sequence
  ENSG00000282815_7 (sequence is synthesized)
caggaggagacggcccctccgtgggaccagaagtgccatggccaggatggatatcctgagaatttccagggagtatatcacccaggagataacagaagctgcaaccaaaaggaaggttct

SEQ ID NO: 798332 - DNA, 120 bp, Artificial Sequence
  ENSG00000282815_8 (sequence is synthesized)
gagtgtccccaaggaatgacttcccaaggggacagcagcagccacagcctgaagaaagatccagtgatgcaagagggcacagctcccccagagtttagcaggagccacagcctggagaaa

SEQ ID NO: 798333 - DNA, 120 bp, Artificial Sequence
  ENSG00000282815_9 (sequence is synthesized)
aaaccagtgatgcccaaggagatggtccccctaggggacagcaacagccacagcctgaagaaagatccagttgtgcccaaggagattgtccccataggggacagcaacagccacagcctg

SEQ ID NO: 798334 - DNA, 120 bp, Artificial Sequence
  ENSG00000282815_10 (sequence is synthesized)
acgaaaaatccagttgtgcacaaggagatggtctccctgggggacagcaacagccacagcatgaagaaagatccagtgatgccccagaagatggtccccctgggggacagcaacagccac

SEQ ID NO: 798335 - DNA, 120 bp, Artificial Sequence
  ENSG00000282815_11 (sequence is synthesized)
agtctgaagaaagatccaatgatgtgccaggagatggtccccctgggggacagcaacagccatagcctgaagaaagatccagtggtggcccagggcacagctcccctgatgtatagcagg

SEQ ID NO: 798336 - DNA, 120 bp, Artificial Sequence
  ENSG00000282815_12 (sequence is synthesized)
aggcacagccagaagaaagtgccaatgatgcccaaggagatggtccccctgggggaaagccacagccacagcctgaagaaagatctagttgtgcccaaggagctggtccccctgggggac

SEQ ID NO: 798337 - DNA, 120 bp, Artificial Sequence
  ENSG00000282815_13 (sequence is synthesized)
agcaagagtcacaggatgaagaaagatccagtgatgccccagaagatggtccccctgggggacagcagaagccacagcctgaagaaagatccagtgatgccccagaacatgatccccctg

SEQ ID NO: 798338 - DNA, 120 bp, Artificial Sequence
  ENSG00000282815_14 (sequence is synthesized)
gaggacagcaacagccacagcctgaagaaagatccagtgatgccccagaacatgatccccctggaggacagcaacagccacagtctgaagaaagatccaatgatgcaccaggagatggtc

SEQ ID NO: 798339 - DNA, 120 bp, Artificial Sequence
  ENSG00000282815_15 (sequence is synthesized)
cccctgggggacagcaacagccatagcctgaagaaagatccagtggtgccccaggacacagctcccctgatgtttagcaggagacacagcctgaagaaagtgccagtgatgcccaaggag

SEQ ID NO: 798340 - DNA, 120 bp, Artificial Sequence
  ENSG00000282815_16 (sequence is synthesized)
atggtccccctgggggacagccacagcctgaagaaagatccagtgatgccccagaacatggtccccctggaggacagcaacagccatagcctgaagaaagatccagtggtgccccagggc

SEQ ID NO: 798341 - DNA, 120 bp, Artificial Sequence
  ENSG00000282815_17 (sequence is synthesized)
acagctcccctgatgtttagcaggagacacagcctgaagaaagtgccagtgatgcccaaggagatggtccccctgggggacagcaacagccatagcctgaagaaagatccagtggtgccc

SEQ ID NO: 798342 - DNA, 120 bp, Artificial Sequence
  ENSG00000282815_18 (sequence is synthesized)
cagggcacagctcccctgatgtttagcaggagacacagcctgaagaaagtgccagtgatgcccaaggagatggtccccctgggggacagccacagcctgaagaaagatccagtgatgccc

SEQ ID NO: 798343 - DNA, 120 bp, Artificial Sequence
  ENSG00000282815_19 (sequence is synthesized)
cagaacatggtccccctggaggacagcaacagccatagcctgaagaaagatccagtggtgccccagggcacagctcccctgacgtttagcaggagacacagcctgaagaaagtgccagtg

SEQ ID NO: 798344 - DNA, 120 bp, Artificial Sequence
  ENSG00000282815_20 (sequence is synthesized)
gtgccccaggggacagcctccctggggttcagcagaatccacagcctgaagaaagagttagtgatgcccgaggagatggtccccctgggggacagcaacagccacagcatgaagaaagat

SEQ ID NO: 798345 - DNA, 120 bp, Artificial Sequence
  ENSG00000282815_21 (sequence is synthesized)
agaaagatccagtggtgcaccaggaggtggtctccttgggggacagcaacagccacagcctgaagaaacatccagtgattccccagggcacagcctcactgaggtttagcaagagccaca

SEQ ID NO: 798346 - DNA, 120 bp, Artificial Sequence
  ENSG00000282815_22 (sequence is synthesized)
gccagaaggaagatcaggagaggccccaggtaacccctctggaggatagcaagagccatggtgtgaaaaatagcccatggaaacaccagcctcaggggcagaaggtcaaggaacaaaaaa

SEQ ID NO: 798347 - DNA, 120 bp, Artificial Sequence
  ENSG00000282815_23 (sequence is synthesized)
ggaaaaaggcctcagaatcccagcaacagaagcctgcctcatgctccagcccagtgaattgggcctgcccatggtgtaatgccatgaattttccacggaacaaggtgtgctctaaatgca

SEQ ID NO: 798348 - DNA, 120 bp, Artificial Sequence
  ENSG00000282815_24 (sequence is synthesized)
agagagtccgtatgccagttgagaatggcagcgttgacccagcgtaaactcattgatttcaggaaggtaagtaagatggaagcactccaaagagaaaccaatttcccaggacccccttct

SEQ ID NO: 798349 - DNA, 120 bp, Artificial Sequence
  ENSG00000282815_25 (sequence is synthesized)
ttctgataaaaaagtaacttatttacttaacagaaaatttgaaaccaaaattgtagagaaaattagataaaataatccattatcctattacccaaattaagtactttttatcattgtgag

SEQ ID NO: 798350 - DNA, 120 bp, Artificial Sequence
  ENSG00000282815_26 (sequence is synthesized)
catacacacaaatacgtatgtatttattttcttattttattcatttatttgaataaagagagactacttctgagtataacactcagtctttaattaggggatttctcctaattgctgtca

SEQ ID NO: 798351 - DNA, 120 bp, Artificial Sequence
  ENSG00000282815_27 (sequence is synthesized)
actttttcaggtagtagattgtggttggctgatactaattggttgacaccctggagaagctgaagttatagttataaagcctgttttaaatcaaccattttctgttttttttttttctct

SEQ ID NO: 798352 - DNA, 120 bp, Artificial Sequence
  ENSG00000282815_28 (sequence is synthesized)
taacctccttttcctgaaaatgccatgtatttggctgggagcagccatgtgattttagagttccaggctatattgtattctagaaacactgcttttccttgcaagtgctatcattccttt

SEQ ID NO: 798353 - DNA, 120 bp, Artificial Sequence
  ENSG00000282815_29 (sequence is synthesized)
tgaaattactgcagtgttgatttttgcttatttttgttttattagttttacaggtgaagtcctgtttttgtgtcttagctccaccaaacttgcttgtttctgaagaagctgaacctgtga

SEQ ID NO: 798354 - DNA, 120 bp, Artificial Sequence
  ENSG00000282815_30 (sequence is synthesized)
cattagaagatctgccaaagccacaagaagtaacacctcaattctgatggacccacacctcactgagaccccaactggctgcagtcaagaagagtgaaaggaagtcagggaagaagagat

SEQ ID NO: 798355 - DNA, 120 bp, Artificial Sequence
  ENSG00000282815_31 (sequence is synthesized)
catttgacactcattagggggaaaagggagaacaaaattgtttttgtagagttgaattttttcattggtatgggaattaacttagaaaagtttggggagttgtagtgttaaattctatag

SEQ ID NO: 798356 - DNA, 120 bp, Artificial Sequence
  ENSG00000282815_32 (sequence is synthesized)
atggtagcaactttgatgaatttcacttaattcattaaatgagaagtttagggaaagagtttagggggttgtagtgttaaattctatagctgatagcaactttaattaatttcatttaat

SEQ ID NO: 798357 - DNA, 120 bp, Artificial Sequence
  ENSG00000282815_33 (sequence is synthesized)
tcattaaagaaatagttattgcctagtatgttttgggagctagacttgtatgttattatctagtacacacagcataatcttttattgtgaattcggttagaagataggaaagagcataat

SEQ ID NO: 798358 - DNA, 120 bp, Artificial Sequence
  ENSG00000282815_34 (sequence is synthesized)
ttggcatacacattagatcagggatgtattctttgccttgcatatagcgtgaccttggataaaaccaattgaagtaacatccagatccatttctgtggttctggggccaatgcgaaagag

SEQ ID NO: 798359 - DNA, 86 bp, Artificial Sequence
  ENSG00000282815_35 (sequence is synthesized)
ccagatccatttctgtggttctggggccaatgcgaaagagactttcatgaaaggggagaaatgaggtctcattttgtcgcccaggc

SEQ ID NO: 798360 - DNA, 120 bp, Artificial Sequence
  ENSG00000282815_36 (sequence is synthesized)
caaactcctgggctcaagtgatcctctgcctcagcctcccgagtggctgtgagccaccatgcccagcccttatgaaaggtcttgagtaaccaaactgcttgtctcattggtctcaggtga

SEQ ID NO: 798361 - DNA, 120 bp, Artificial Sequence
  ENSG00000282815_37 (sequence is synthesized)
gataaatgagcagtgacaaagtttgggaaagtgtcctcacaaaaatgcaggcagagcttttctgaattcctctgctgatttcctcctttgagaaggatagctattttcctggttgcccac

SEQ ID NO: 798362 - DNA, 120 bp, Artificial Sequence
  ENSG00000282815_38 (sequence is synthesized)
cagcctgcctgaaagacctggggtgtcttgaagaaaaacagtgctttggggagtgttcactacacacgctagctttcagcctcaggctgcccccatcccaagtcccttttcagtcagcag

SEQ ID NO: 798363 - DNA, 120 bp, Artificial Sequence
  ENSG00000282815_39 (sequence is synthesized)
tggatgaagaacaaaatggattccaaggacaaacattgggggcaccaggttatggatggtgtttctcttgggaggataaattgggttaaaaatagagctagactggggcaagcacttttg

SEQ ID NO: 798364 - DNA, 120 bp, Artificial Sequence
  ENSG00000282815_40 (sequence is synthesized)
ggaataccccaggacccccacctctccctctttggtgtgttctctgcaggcttacccaaggcaactgctgcaaggcaaggaaggagccagggtggagcccaggggtggttggttagatct

SEQ ID NO: 798365 - DNA, 120 bp, Artificial Sequence
  ENSG00000282815_41 (sequence is synthesized)
gccttcaatccaagctaaagatgtccttgagtttcccaatgagatcccacccagctcaccaaaatcaatgtttgtcagggattttctgggcctaactagtaataaagaatgtgcatttga

SEQ ID NO: 798366 - DNA, 120 bp, Artificial Sequence
  ENSG00000282872_0 (sequence is synthesized)
agttcctagagccagactcactggtatccactgagccaccaccttcctgtgcttgcgtgccaggccccttccccctgcagccatgaaccaggccttctggaaaacctacaagtccaaagt

SEQ ID NO: 798367 - DNA, 120 bp, Artificial Sequence
  ENSG00000282872_1 (sequence is synthesized)
gctacagaccctgagtggggaatctgaagaagacctggcagaggagagggagaacccagcattagtggggtctgagacagcagaaccgaccgaggagaccttcaatcccatgtcacagct

SEQ ID NO: 798368 - DNA, 120 bp, Artificial Sequence
  ENSG00000282872_2 (sequence is synthesized)
atgtcatctctgtttaacaaagaagatgaagataagctgctgccatcagagccttgcgctgaccaccctctggcggcgcgacccccctcgcaggcggcggcggcggcggaggcgcgcggc

SEQ ID NO: 798369 - DNA, 120 bp, Artificial Sequence
  ENSG00000282872_3 (sequence is synthesized)
ccgggcttctgggacgcgttcgccagcaggtggcagcagcagcaggccgcggcggcgtccatgctgcgcggcaccgagcccactccggagccggaccccgaacccgcggacgaggccgcg

SEQ ID NO: 798370 - DNA, 120 bp, Artificial Sequence
  ENSG00000282872_4 (sequence is synthesized)
gaggaggccgcagagcgccccgagtcgcaggaggccgagccggtggccggcttcaagtggggcttcctcactcacaaactggccgagatgagggtgaaggctgcgcccaagggtgactag

SEQ ID NO: 798371 - DNA, 120 bp, Artificial Sequence
  ENSG00000282872_5 (sequence is synthesized)
cagtatgtgcgtgtgtgtttgtggtggttctggaaggggcctgaggtcccccttctgcctggtcctttccttctggtttgtttgtctttctaaccactgagggctggggaggggcagtcc

SEQ ID NO: 798372 - DNA, 120 bp, Artificial Sequence
  ENSG00000282881_0 (sequence is synthesized)
agcccctagaagtcagcggacggcggaggaggtggcccggcctctcttggtggtcctgcgctctcggggtctttccttcctgctgacccagggtgctcaagggtcagcctggtcggaccc

SEQ ID NO: 798373 - DNA, 120 bp, Artificial Sequence
  ENSG00000282881_1 (sequence is synthesized)
gcaggggagtgtccacggacgggctcaggaccagcgtgaggaggctcctggcagttgcccacaggaccagcgtgaggaggctcctggcagttgggctgttccgggccggcggcaggaggg

SEQ ID NO: 798374 - DNA, 120 bp, Artificial Sequence
  ENSG00000282881_2 (sequence is synthesized)
agttgggctgttccgggccggcggcaggagggagcttgatgcgtgcctggcgtgcgcaggccgatgccgccggcagaaaagagcgaggggccaccggtcccggcgcccgcggaacgcgcc

SEQ ID NO: 798375 - DNA, 120 bp, Artificial Sequence
  ENSG00000282881_3 (sequence is synthesized)
gctgtgctgcgcctgcggtctgtgcgcgctgctggcgggcgtgaacgtgacgctggcaggcgccttcgcctccttcttgcccgagcacaacgcgctgctcgtcgtggggctggcgctgct

SEQ ID NO: 798376 - DNA, 120 bp, Artificial Sequence
  ENSG00000282881_4 (sequence is synthesized)
ccgagcacaacgcgctgctcgtcgtggggctggcgctgctggtgctggcgctcggcttcttcgcggcctgctgcgtgtgtagccgccggggcctcgcgccccgtgggcgctcggcggccg

SEQ ID NO: 798377 - DNA, 120 bp, Artificial Sequence
  ENSG00000282881_5 (sequence is synthesized)
ggcgctggagatggagagcagcgagcccacggcacaggacaccacggccgtgcagctcagccctgccgtctccgccgcgtcctccggctgctccagccccggccccagccccctcgccct

SEQ ID NO: 798378 - DNA, 120 bp, Artificial Sequence
  ENSG00000282881_6 (sequence is synthesized)
ccccgggcgcgcgccgccccctagcggaccagggccccgccgtgactccgctgtccgggttcattccccttccttcagtgccatttaaggggggaaaagaaagaaaagaaaaagaaaaaa

SEQ ID NO: 798379 - DNA, 120 bp, Artificial Sequence
  ENSG00000282881_7 (sequence is synthesized)
ttccttccttcctttcttttttacaagggtctggtgctgggctcaggtggcctcatcttttccatctcccaaactcctgggtagaatgtggtgatggtgtcaggggtcacaccccaaaga

SEQ ID NO: 798380 - DNA, 120 bp, Artificial Sequence
  ENSG00000282881_8 (sequence is synthesized)
agggagcagcagagccttggccccttagacagggtctctggtctctagtaaaccttacccatccagcttgctgaaagtaggcccctggaccctggaaccctgacactgccacctccccct

SEQ ID NO: 798381 - DNA, 120 bp, Artificial Sequence
  ENSG00000282881_9 (sequence is synthesized)
ggcatttgggcactgtgaaccaaggagcacccaccctgaaggggctaaccaccagcagtccccccagtgaggtgggaggaagagagggagaagggttgaatgtcagcctgggctgtctct

SEQ ID NO: 798382 - DNA, 120 bp, Artificial Sequence
  ENSG00000282881_10 (sequence is synthesized)
gtccttgcacacaccgtgaaaggcttccagtcccctctcctgcccctccccaccttccttgtttctaccccaacatgacctttgggattcatttggctgagaagccgtggctctgacttg

SEQ ID NO: 798383 - DNA, 120 bp, Artificial Sequence
  ENSG00000282881_11 (sequence is synthesized)
ggccaggatggtccctagaattagggccggggtgagcactccccaccctttctgtctgactaagagcaagagtagctgagactggggccctgacagaggtgagtggtgagggagcttctg

SEQ ID NO: 798384 - DNA, 120 bp, Artificial Sequence
  ENSG00000282881_12 (sequence is synthesized)
cagccctgaaagtcctagtgtgactttcactgccagcaatgctggcccccacccaccctgactgtggcacaccatgcattcctgcagtgccttactcctcaataaagcacctttggagtc

SEQ ID NO: 798385 - DNA, 120 bp, Artificial Sequence
  ENSG00000282939_0 (sequence is synthesized)
acagtgatcctgatctggtaaagctcccatcctgccctgaccctgccatgggcaccaggctcctcttctgggtggccttctgtctcctgggggcagatcacacaggagctggagtctccc

SEQ ID NO: 798386 - DNA, 120 bp, Artificial Sequence
  ENSG00000282939_1 (sequence is synthesized)
ggatgtagagctcaggtgtgatccaatttcaggtcatactgccctttactggtaccgacagagcctggggcagggcctggagtttttaatttacttccaaggcaacagtgcaccagacaa

SEQ ID NO: 798387 - DNA, 120 bp, Artificial Sequence
  ENSG00000282939_2 (sequence is synthesized)
atcagggctgcccagtgatcgcttctctgcagagaggactgggggatccgtctccactctgacgatccagcgcacacagcaggaggactcggccgtgtatctctgtgccagcagcttagc

SEQ ID NO: 798388 - DNA, 120 bp, Artificial Sequence
  ENSG00000283039_0 (sequence is synthesized)
atggattccagtcttctccaggcaattgaggaaattgagaaatttttccagcatctctctgagcggcatacagaacaggcagaaaccccagatgcaccagaaccacagaactgtatgcct

SEQ ID NO: 798389 - DNA, 120 bp, Artificial Sequence
  ENSG00000283039_1 (sequence is synthesized)
ctgactgcccatgctgaggagagccaacatgagtcaacccagagcaagacgatgcctcccttggggtccacaatgatgacttctgcatgcactaacatccctgggacagttctcacccag

SEQ ID NO: 798390 - DNA, 120 bp, Artificial Sequence
  ENSG00000283039_2 (sequence is synthesized)
gacttaacaatgcaccctcttaaagcccttgaagacctaagtgagacttattccatgggccagaaagtgacttcctttgatcaggtaaaacacacagcaggctcccagatgacagatgtt

SEQ ID NO: 798391 - DNA, 120 bp, Artificial Sequence
  ENSG00000283039_3 (sequence is synthesized)
actgtcaccccaaagtcatcacccactgattgccagaagacaaccatcactgcaagcaacatgacaatctccaatgaaagtagccagctgaacaccccaagcagtgaccagaccctcaat

SEQ ID NO: 798392 - DNA, 120 bp, Artificial Sequence
  ENSG00000283039_4 (sequence is synthesized)
gagagtcagataccagccctgcttggagatcagatgaagaccctcagtgataaccagactctctgtggggaccaggtgaccttcagtagtgaccagaccctcactgatggtcatacagtg

SEQ ID NO: 798393 - DNA, 120 bp, Artificial Sequence
  ENSG00000283039_5 (sequence is synthesized)
acttccggtagcgatgagaccctctctgggggccaaatgacaaccagtctagacctctatggagggcaaatgatgacttccattgataaccagaccctctgtggggagcagatgacgacc

SEQ ID NO: 798394 - DNA, 89 bp, Artificial Sequence
  ENSG00000283039_6 (sequence is synthesized)
cattgataaccagaccctctgtggggagcagatgacgacctccagtggtaaccaggccttctacgggagacagatgacgacctccactg

SEQ ID NO: 798395 - DNA, 74 bp, Artificial Sequence
  ENSG00000283039_7 (sequence is synthesized)
ggagcaagtgatgacctccactggtaaccaagccctctgtggagggcagatgacgacctccactggtaaccaga

SEQ ID NO: 798396 - DNA, 86 bp, Artificial Sequence
  ENSG00000283039_8 (sequence is synthesized)
gggcagatgacaacctctagacccccactagtaaccagaccctctgtggggagcaggtgacgacctccactggtaaccaggccctc

SEQ ID NO: 798397 - DNA, 68 bp, Artificial Sequence
  ENSG00000283039_9 (sequence is synthesized)
cgacctccactggtaaccaggccctctgatgacaacctctgctagtaaccagaccctctgtggagagc

SEQ ID NO: 798398 - DNA, 88 bp, Artificial Sequence
  ENSG00000283039_10 (sequence is synthesized)
ccagaccctctgtggagagcagatgacgacccccactagtaaccagaccctctgtggggagcaggagggggcagatcacgacctccac

SEQ ID NO: 798399 - DNA, 120 bp, Artificial Sequence
  ENSG00000283039_11 (sequence is synthesized)
atgatgacctccactggtaaccagaacctctacggggggcagaatatgacctccactgataaccaggccctctatggaggccagatggcaacatatagtggcaaccagaccctctatggg

SEQ ID NO: 798400 - DNA, 120 bp, Artificial Sequence
  ENSG00000283039_12 (sequence is synthesized)
gaccagatgctgactcttcaggtgggcaatatgacaacgctcactgatgaccacagcctttatgggggatatatgatgtcccatcagttctcatcattgccatacccaggattcctatgc

SEQ ID NO: 798401 - DNA, 120 bp, Artificial Sequence
  ENSG00000283039_13 (sequence is synthesized)
ttttcaagttcccatttgattcaaggacaactcccaaaacagaagacacagagctgccagttctggaagaatcctgaggtttcaaggccctatgtctgcacttacgaggactgcaagatg

SEQ ID NO: 798402 - DNA, 120 bp, Artificial Sequence
  ENSG00000283039_14 (sequence is synthesized)
tcttattcaaaggcttgccacctccgaacccacatgcgcaagcacaccggggagaagccctatgtatgcgatgtagagggatgtacgtggaaatttgcccgctcagatgagctcaacaga

SEQ ID NO: 798403 - DNA, 120 bp, Artificial Sequence
  ENSG00000283039_15 (sequence is synthesized)
cacaagaaaaggcacactggggaaaggccctacctgtgttcaatatgcagcaagaattttgcaagatctgatcacctaaagcagcatgcaaaggtccacaacattcgcccaggattatga

SEQ ID NO: 798404 - DNA, 120 bp, Artificial Sequence
  ENSG00000283063_0 (sequence is synthesized)
agaatgacgcccttgaaagacgtgttcccttttcaccaatgcacagacccagaggacccctccatcctgcagttcctgccatgagcctcgggctcctgtgctgtggggccttttctctcc

SEQ ID NO: 798405 - DNA, 120 bp, Artificial Sequence
  ENSG00000283063_1 (sequence is synthesized)
acagagcatgacactgctgtgtgcccaggatatgaaccatgaatacatgtactggtatcgacaagacccaggcatggggctgaggctgattcattactcagttggtgagggtacaactgc

SEQ ID NO: 798406 - DNA, 120 bp, Artificial Sequence
  ENSG00000283063_2 (sequence is synthesized)
caaaggagaggtccctgatggctacaatgtctccagattaaaaaaacagaatttcctgctggggttggagtcggctgctccctcccaaacatctgtgtacttctgtgccagcagttactc

SEQ ID NO: 798407 - DNA, 120 bp, Artificial Sequence
  ENSG00000283071_0 (sequence is synthesized)
gcgccagcacccgcgcgggcggtgagcgtgagtgtggcgcagggtcgcccctccccagcctggccccggcagtgcgggccccgggagcgccctgacggctagtcctcgtgcagcttagtg

SEQ ID NO: 798408 - DNA, 120 bp, Artificial Sequence
  ENSG00000283071_1 (sequence is synthesized)
gagcgccctgacggctagtcctcgtgcagcttagtggcgcagtggcggcagcagcatgagcaccccccggcctgctccaccacagccaggcgctgctgagggggctggaggcccagaagg

SEQ ID NO: 798409 - DNA, 120 bp, Artificial Sequence
  ENSG00000283071_2 (sequence is synthesized)
gaaggctgtggcaggtgcctgggagaagggccctcggctgggccagcggctgccctcaatcgtggtggagcccagcgaggcggaccctgtggaaagtggggagctgcgctggcccctgga

SEQ ID NO: 798410 - DNA, 120 bp, Artificial Sequence
  ENSG00000283071_3 (sequence is synthesized)
gggcccctctcagagccgggctgctgctgccccctcgccgagtctgcccggagaaccagggaaagctgcagataacgctggcagcgagtgtgcctgctccgaggacccagcagccccggc

SEQ ID NO: 798411 - DNA, 120 bp, Artificial Sequence
  ENSG00000283071_4 (sequence is synthesized)
ccggggataggacaaggacgtggctgggctctgctgtctgactgctgagggcctctgccccagggtggccgggctgatgcacaggagggccgggcctgcccagcctggaaagcccagagg

SEQ ID NO: 798412 - DNA, 120 bp, Artificial Sequence
  ENSG00000283071_5 (sequence is synthesized)
ctgcttcctgtgtcacagggtctggaccgcagccctgccctcttctgcccatggcccaggtctggatcacaccccgctttgttccgtggtttgaagcagaaataaaggcacttcctggtg

SEQ ID NO: 798413 - DNA, 80 bp, Artificial Sequence; identical to SEQ ID NO: 765480
  ENSG00000283093_0 (sequence is synthesized)

SEQ ID NO: 798414 - DNA, 120 bp, Artificial Sequence; identical to SEQ ID NO: 765481
  ENSG00000283093_1 (sequence is synthesized)

SEQ ID NO: 798415 - DNA, 120 bp, Artificial Sequence; identical to SEQ ID NO: 765482
  ENSG00000283093_2 (sequence is synthesized)

SEQ ID NO: 798416 - DNA, 120 bp, Artificial Sequence; identical to SEQ ID NO: 765483
  ENSG00000283093_3 (sequence is synthesized)

SEQ ID NO: 798417 - DNA, 120 bp, Artificial Sequence; identical to SEQ ID NO: 765484
  ENSG00000283093_4 (sequence is synthesized)

SEQ ID NO: 798418 - DNA, 120 bp, Artificial Sequence; identical to SEQ ID NO: 765485
  ENSG00000283093_5 (sequence is synthesized)

SEQ ID NO: 798419 - DNA, 120 bp, Artificial Sequence; identical to SEQ ID NO: 765486
  ENSG00000283093_6 (sequence is synthesized)

SEQ ID NO: 798420 - DNA, 120 bp, Artificial Sequence; identical to SEQ ID NO: 765487
  ENSG00000283093_7 (sequence is synthesized)

SEQ ID NO: 798421 - DNA, 120 bp, Artificial Sequence; identical to SEQ ID NO: 765488
  ENSG00000283093_8 (sequence is synthesized)

SEQ ID NO: 798422 - DNA, 120 bp, Artificial Sequence; identical to SEQ ID NO: 765489
  ENSG00000283093_9 (sequence is synthesized)

SEQ ID NO: 798423 - DNA, 120 bp, Artificial Sequence; identical to SEQ ID NO: 765490
  ENSG00000283093_10 (sequence is synthesized)

SEQ ID NO: 798424 - DNA, 120 bp, Artificial Sequence; identical to SEQ ID NO: 765491
  ENSG00000283093_11 (sequence is synthesized)

SEQ ID NO: 798425 - DNA, 120 bp, Artificial Sequence; identical to SEQ ID NO: 765492
  ENSG00000283093_12 (sequence is synthesized)

SEQ ID NO: 798426 - DNA, 120 bp, Artificial Sequence
  ENSG00000283154_0 (sequence is synthesized)
ctctttgaggctttctgatgcctagagtgagctcaactcaaaggtttccagcctcacactcgcctcacattcccccacagtcacattgcgctctgtgattctgaggaatacagtgtgcca

SEQ ID NO: 798427 - DNA, 120 bp, Artificial Sequence
  ENSG00000283154_1 (sequence is synthesized)
gcatccgatccagtctcctttcacctgcaggtgttccagaaacttcaaaatgcgtctggaagaactgaaaagattgcagaatcctctagaacaagttaatgatggaaaatattcatttga

SEQ ID NO: 798428 - DNA, 120 bp, Artificial Sequence
  ENSG00000283154_2 (sequence is synthesized)
aaatcaccagctggccatggatgcagagaataatattgaaaagtatcccctcaatctacagcccttggaatcaaaggtgaaaatcattcagcgagcatggcgagagtacctgcagcggca

SEQ ID NO: 798429 - DNA, 120 bp, Artificial Sequence
  ENSG00000283154_3 (sequence is synthesized)
ggagcccctggggaagaggagcccgtccccaccctctgtctcctcagagaagctgagcagctctgtcagcatgaacaccttctccgacagcagcacacccgattaccgagaggatgggat

SEQ ID NO: 798430 - DNA, 120 bp, Artificial Sequence
  ENSG00000283154_4 (sequence is synthesized)
ggatctaggcagtgacgccggcagcagcagcagcagcagccgcgccagttcacagtccaactccaccaaagtgaccccttgctccgagtgcaaatcttcatcgtcgccggggggcagcct

SEQ ID NO: 798431 - DNA, 120 bp, Artificial Sequence
  ENSG00000283154_5 (sequence is synthesized)
ggacttggtgtctgccctggaggactatgaggagcccttcccggtctaccagaagaaggtgattgatgagtgggcgccggaggaggacggggaggaggaggaagaggaggacgagcgcga

SEQ ID NO: 798432 - DNA, 120 bp, Artificial Sequence
  ENSG00000283154_6 (sequence is synthesized)
gagcgcgaccagcgagggtaccgggatgaccgctctccggcccgggaaccgggggacgtaagcgccaggacccgcagcggcggcggcgggggcaggagcgccaccaccgccatgccgccc

SEQ ID NO: 798433 - DNA, 120 bp, Artificial Sequence
  ENSG00000283154_7 (sequence is synthesized)
caacggcaacctccaccagcacgacccccaggacctcaggcacaatggcaacgtggtggtggctggccggccgagctgttcccggggcccccgccgggcgatccaaaagccccagccggc

SEQ ID NO: 798434 - DNA, 120 bp, Artificial Sequence
  ENSG00000283154_8 (sequence is synthesized)
ggccggcgcagtggccgcggcccggcggctggggggctctgccttcagcccccagacggcgggacgtgcgtccccgaagagcccccggtgccacctatggattgggaggcgctggagaag

SEQ ID NO: 798435 - DNA, 120 bp, Artificial Sequence
  ENSG00000283154_9 (sequence is synthesized)
gaagcatctggccgggctgcagttccgggagcaggaggtacggaaccagggccaggcgaggaccaactccacctccgcacagaaaaatgagagagagtctatcagacagaagttggcact

SEQ ID NO: 798436 - DNA, 120 bp, Artificial Sequence
  ENSG00000283154_10 (sequence is synthesized)
caaaagtgggaagccaagcctttcctcccgactgcagagtgggatgaacttgcagatatgctttgtcaacgacagtggcagtgataaggacagtgatgctgatgacagtaagactgaaac

SEQ ID NO: 798437 - DNA, 120 bp, Artificial Sequence
  ENSG00000283154_11 (sequence is synthesized)
cagcttggacacccccttgtctcccatgagcaaacagagttcttcctattctgatagagacactactgaagaggagtctgaatccttggatgacatggacttccttacaaggcaaaagaa

SEQ ID NO: 798438 - DNA, 120 bp, Artificial Sequence
  ENSG00000283154_12 (sequence is synthesized)
attgcaagctgaagccaaaatggcccttgccatggccaaaccaatggccaaaatgcaagtagaagtggagaaacagaacaggaaaaagtctcccgtcgctgatcttctgccacacatgcc

SEQ ID NO: 798439 - DNA, 120 bp, Artificial Sequence
  ENSG00000283154_13 (sequence is synthesized)
tcatataagtgaatgcttgatgaaaagaagtttaaaacccaccgacctgagagacatgactattgggcagctacaagtgatagtcaatgatctccattcccagatagaaagcttgaatga

SEQ ID NO: 798440 - DNA, 120 bp, Artificial Sequence
  ENSG00000283154_14 (sequence is synthesized)
agagttggtccagctgcttctcatccgagatgagctgcacacagagcaggatgccatgctggtggacattgaagacttgaccagacatgctgaaagtcagcagaagcacatggcagagaa

SEQ ID NO: 798441 - DNA, 120 bp, Artificial Sequence
  ENSG00000283154_15 (sequence is synthesized)
aatgcctgcaaagtgaaaagaagccattcaaccagagaacaagctagaatttattttgcttctgtggttgtaaaaatgctgttgctaaaggtggcgcagaaacaaatatcagtgttagtc

SEQ ID NO: 798442 - DNA, 120 bp, Artificial Sequence
  ENSG00000283154_16 (sequence is synthesized)
attgataatgtctgaagcttaatgtccagtgattggcctttgcttcttaatttattttaattttttacttgtgccacttaatatcaggcattttaataaaatattgttacaaaaaatgta

SEQ ID NO: 798443 - DNA, 120 bp, Artificial Sequence
  ENSG00000283154_17 (sequence is synthesized)
cagtactgacaccaccacaaatcatggttaataaaagagagtagttttaactttatttttatttgtttagagattttaagttggaacagtattttcccattgactacttttcattcttca

SEQ ID NO: 798444 - DNA, 120 bp, Artificial Sequence
  ENSG00000283154_18 (sequence is synthesized)
ctgtagttttaaagaagaactgtaaatgacggtgctatacaagtcaaaaaatacatgcctgcctcgtagtgaagttgtagctctccgtaatatgtatattttactcagttttcaacattt

SEQ ID NO: 798445 - DNA, 120 bp, Artificial Sequence
  ENSG00000283154_19 (sequence is synthesized)
tgtgaatgttgactacctgaagttcctttttagatgtgctattaacattctgttggattcagagggttccttgaaagttttatgtataaatatgtaaaataaaaattaaaactttgtttc

SEQ ID NO: 798446 - DNA, 120 bp, Artificial Sequence
  ENSG00000283154_20 (sequence is synthesized)
agaaagagataatctgtgaaagccacagagcctgatttctgctgtgataatcttcagcagaccgaggctggggcgagaatgaggcagacctgtttacatggtgtgtgcagtgccttgtgg

SEQ ID NO: 798447 - DNA, 120 bp, Artificial Sequence
  ENSG00000283154_21 (sequence is synthesized)
aattcttaactctattttattgtattatttttaatcgaaaagtagatcagatgatagcatgaagtgaatcggctgctttggactaatgggatcttcttttctgcattaagatcaagaact

SEQ ID NO: 798448 - DNA, 120 bp, Artificial Sequence
  ENSG00000283154_22 (sequence is synthesized)
tttctggaatcctctgttctccgagtagccttgtcttctctgtgtgttttatcaatttgaagaacactggcaaaaatcagcaaacttcatctcccaaaaagctctcgctcttttttgcca

SEQ ID NO: 798449 - DNA, 120 bp, Artificial Sequence
  ENSG00000283154_23 (sequence is synthesized)
atacttgaagatttctgctccaaaatctactttgagctgcttgagcatggtggttgataaccgaagggcaaaagcatcacttatttagtgtgtgttatagaaattttttagacaacctta

SEQ ID NO: 798450 - DNA, 120 bp, Artificial Sequence
  ENSG00000283154_24 (sequence is synthesized)
ctagctaacccaggtgaccctttacggatttctttcaaagccaatttgaataaacaactcttccctctcaaatgggcaagagtaactcttcagcaccatggagaggtccgggcagcgtgt

SEQ ID NO: 798451 - DNA, 120 bp, Artificial Sequence
  ENSG00000283154_25 (sequence is synthesized)
agatttcactaaaggaatctcattgaaagcaacacttcctatgaacatccagattttctagtcagatctgtaaatatcttacacaacaacagcaagtagaggaaaaatacatttttcaca

SEQ ID NO: 798452 - DNA, 120 bp, Artificial Sequence
  ENSG00000283154_26 (sequence is synthesized)
aatttgagggttagttaccggcaggaagtctggttgtgcgagaggaaaggcgggcaggagggaagcctcaggctggtgctggctcccgcccccaggcctccttgggggacgcacctctga

SEQ ID NO: 798453 - DNA, 120 bp, Artificial Sequence
  ENSG00000283154_27 (sequence is synthesized)
agagcgagatgcgaaattagtagccgcccacccccttctcagttcccgcccccagggaattataatttcctgggaaagtgtctggttctcggagaatccttggggcggggtaaaggggcg

SEQ ID NO: 798454 - DNA, 120 bp, Artificial Sequence
  ENSG00000283154_28 (sequence is synthesized)
cgcctggcgcaaaatggttaatacaaagtctgcgcgcgccgcggggccccttgtatgaaaagtgtgcgcgctggtggctgggcacccctttgctaatttgagggattaccgagaggatgg

SEQ ID NO: 798455 - DNA, 120 bp, Artificial Sequence
  ENSG00000283154_29 (sequence is synthesized)
cttgaccaggtcagtgtggcttcactcttgccaaagaagaaaagcccagggtggtctgaaatctaagaattaggcaaaaactagctcaagagaacttcttcctctacttccataaataac

SEQ ID NO: 798456 - DNA, 120 bp, Artificial Sequence
  ENSG00000283154_30 (sequence is synthesized)
tcacctagccttttctggtgccagctgttcagatggaggggaagcagaattccattgtccttaccaaatgcatgctttttagcaaccatcccccccttgtgatgaattgtcagtgcatta

SEQ ID NO: 798457 - DNA, 120 bp, Artificial Sequence
  ENSG00000283154_31 (sequence is synthesized)
cttctcacatctccgcctaaatcaggtctagttctggttttggaggactttaccttgaaggactgtcccctgggaagctgggcataagccatgtcatgctggcatgtttccagcacaagc

SEQ ID NO: 798458 - DNA, 120 bp, Artificial Sequence
  ENSG00000283154_32 (sequence is synthesized)
gttgtgaaggttccattgagaaggctgagctccttgtcttgtttattcctctgcattgagcttgttccctggaagaactgaaaagattgcagaatcctctagaacaagttaatgatggaa

SEQ ID NO: 798459 - DNA, 80 bp, Artificial Sequence
  ENSG00000283154_33 (sequence is synthesized)
agcgacttgccgccgcgccccggccaggcacaccttttggggaggcgggggaccaccctgcccggcgtgggccgagagcg

SEQ ID NO: 798460 - DNA, 120 bp, Artificial Sequence
  ENSG00000283154_34 (sequence is synthesized)
gtgtgtgtgtgtgtgtgcgtgtgtatggggaggaggtgttgatttttgaaaattgggagagaagagttatattgctgctgcacgagaatttctaccccatgttacctgccttcttaaaac

SEQ ID NO: 798461 - DNA, 120 bp, Artificial Sequence
  ENSG00000283154_35 (sequence is synthesized)
cctgccttcttaaaactcagtaagcactgaggggaagagatgtggttctgctttggagaacctcagggggacgttgatccgcagtgttcagcaggaattttaggaagaactgaaaagatt

SEQ ID NO: 798462 - DNA, 120 bp, Artificial Sequence
  ENSG00000283199_0 (sequence is synthesized)
gcacctcctgactactccctgcgggacggctgggtgtgagggtggcagccttgtgctcaagccgaggctgggctggaggatggagaaggacacggggaccacacacaggaggcaccggcc

SEQ ID NO: 798463 - DNA, 120 bp, Artificial Sequence
  ENSG00000283199_1 (sequence is synthesized)
cggcctcagggccctgccctcaggagtggcccttgggcacctcaaggcggccagtgaggcctctgaacttcagcgaagcaggagtctgggaggcctgcagcccgagggggaccctcccag

SEQ ID NO: 798464 - DNA, 120 bp, Artificial Sequence
  ENSG00000283199_2 (sequence is synthesized)
ccgccctaggaagcctcacaaggagctggagtccgaagatcaagggaaagacccaagcagtaacgcggaagatgccagctgtcagaaaaacctagcacaagacaagaaggaaagcttcag

SEQ ID NO: 798465 - DNA, 120 bp, Artificial Sequence
  ENSG00000283199_3 (sequence is synthesized)
cacccttgggaagctgggtcatgagagtggaaaacaagacccagagagggagaagagcgacttggaggccagcatgcaggaggtgcaggaaggcgagcacgcagacggaggcttgcagga

SEQ ID NO: 798466 - DNA, 120 bp, Artificial Sequence
  ENSG00000283199_4 (sequence is synthesized)
ggccaaggaacaggaggcagagtccataaagctaaatgaccttcaggaagaagagaaagcatctgtgtttgtggagattgatctgggagaccatgctgaggaggtggtcaccgatgccaa

SEQ ID NO: 798467 - DNA, 120 bp, Artificial Sequence
  ENSG00000283199_5 (sequence is synthesized)
gaaggaagagaagccgtcccagatggatgtggaagatctgtcagaagacgagatgcagaccagctgggtgtgctgcatcccgtactccaccaggaagagggcaaaggagagcacctagcg

SEQ ID NO: 798468 - DNA, 120 bp, Artificial Sequence
  ENSG00000283199_6 (sequence is synthesized)
ccccggagagggtgctcagagcttggcgaagaagaggaaggagacggggtgcagaggggctgggggcacaggaggcgggacggagggcgatccggccacctacttgccgcccaagagcct

SEQ ID NO: 798469 - DNA, 120 bp, Artificial Sequence
  ENSG00000283199_7 (sequence is synthesized)
tctctgccaggcactgaggtttctgttttcttcttgtgggactggccaggcctggaaggagcgagagcacagactgcgcctttgggctaaagatcccgccagctctgagcaacgctgggg

SEQ ID NO: 798470 - DNA, 120 bp, Artificial Sequence
  ENSG00000283199_8 (sequence is synthesized)
tgccgatgaccacaccaggtgtgagccacgcctgaaacccactgcccactgggtgagtgatgacgtgaccttcaacaaacacaataaacaagcacgggaagatgctcctcctctccacca

SEQ ID NO: 798471 - DNA, 120 bp, Artificial Sequence
  ENSG00000283199_9 (sequence is synthesized)
gatgctcctcctctccaccagatgctcctcctctccaccagatgctcctcctctccaccagatactactcctctccaccagatactactcctcctctccaccagatgctcctcgtctcca

SEQ ID NO: 798472 - DNA, 120 bp, Artificial Sequence
  ENSG00000283199_10 (sequence is synthesized)
ccagatgctcctcctctccaccggatgttcctcctctcgtcgagatgctcctcgtctcctcgagatgctcctcgtctccaccgggtgctcctcgtctccaccggatgctccttgtctccg

SEQ ID NO: 798473 - DNA, 120 bp, Artificial Sequence
  ENSG00000283199_11 (sequence is synthesized)
ccggatgctcctcctcttcgccaaatactactcctcctctccgccagatcctactcctcctctccgccagatactactccacctctccgccagatcctactcctcctctccgccagatcc

SEQ ID NO: 798474 - DNA, 120 bp, Artificial Sequence
  ENSG00000283199_12 (sequence is synthesized)
tactcctctctgccagatcctactcctcctctccgccagatcctactcctcctctctgccagatcctactcctcgtctccgccagatgctcctcctcgtctccgccagatgctcctcgtc

SEQ ID NO: 798475 - DNA, 120 bp, Artificial Sequence
  ENSG00000283199_13 (sequence is synthesized)
tccgcgagatgctcctcctctctgcgagatgctcctcctctccaccggatgctcctcctctcctcgagatgctcctcctctcctcgagatgctcctcgtctccaccggctgctcctcgtc

SEQ ID NO: 798476 - DNA, 120 bp, Artificial Sequence
  ENSG00000283199_14 (sequence is synthesized)
tccgccggctgctcctcgtctccgccggctgctcctcgtctccgccggatgctcctcctctctgccagacactactcctcgtctctgccagacactactcctcctctccgccagacacta

SEQ ID NO: 798477 - DNA, 120 bp, Artificial Sequence
  ENSG00000283199_15 (sequence is synthesized)
ctactcctcgtctctgccagatgctcctccgctccacgagatgctcctcctctccacgagatgctcctcctctccacgagatgctcctcgtctccgccagatgctcctccgctccacgag

SEQ ID NO: 798478 - DNA, 120 bp, Artificial Sequence
  ENSG00000283199_16 (sequence is synthesized)
atgctcctcgtctccgccagatgctcctccgctcctcgagatgctcctcctctccaccggatgctcctcatctccgccggatgctcctcgtcaccgccggatgctcctcgtctccgccgg

SEQ ID NO: 798479 - DNA, 120 bp, Artificial Sequence
  ENSG00000283199_17 (sequence is synthesized)
atgctcctcctctccgccggatgctcctcctctccaccagatactactcctcctctccaccagatactactcctctctgccagatactactcctctccgccagatactactcctcctctc

SEQ ID NO: 798480 - DNA, 120 bp, Artificial Sequence
  ENSG00000283199_18 (sequence is synthesized)
cgccagatgctcctcgtctccgccagatgctcctcgtctccacgggatgctcctcgtctccacgggatgctcctcctctccaccagatgctcctcctctcctcgagatgctcctcatctc

SEQ ID NO: 798481 - DNA, 120 bp, Artificial Sequence
  ENSG00000283199_19 (sequence is synthesized)
caccggatgctcctcgtctccaccagctgctgctcctctccaccagctgctcctcatccccactggatgctcctcatccccgccggatgctcctcctctccgccagatcctactcctcct

SEQ ID NO: 798482 - DNA, 120 bp, Artificial Sequence
  ENSG00000283199_20 (sequence is synthesized)
ctccgccagatcctactcctcctctctgccagatcctcctcctcgtctccgccagatcctcctcctcgtctccgccagatcctcctcctcgtctccgccagatgctcctcctcgtctccg

SEQ ID NO: 798483 - DNA, 120 bp, Artificial Sequence
  ENSG00000283199_21 (sequence is synthesized)
ccagatgctcctcgtctctgccagatgctcctcctccccacgagatgctcctcatctccaccggatgctcctcatctccaccggatgctcctcgtctccaccagctgctcctcgtctcca

SEQ ID NO: 798484 - DNA, 120 bp, Artificial Sequence
  ENSG00000283199_22 (sequence is synthesized)
ccagctggaggactccagccccttcctgccctggcctcttgctcagtggcttgttgggtggggacagaggcccctggggcacagcaggggaggctcagccctttgtgggcctcgtgtgag

SEQ ID NO: 798485 - DNA, 120 bp, Artificial Sequence
  ENSG00000283199_23 (sequence is synthesized)
ctgcagctcctggaagcacccccaccaggcaggagtgagaggtgcagggcagggatggagcatctgctgtgtcaccaaagtccctgcaggagccaggagcacggtggacgcagctgagcc

SEQ ID NO: 798486 - DNA, 120 bp, Artificial Sequence
  ENSG00000283199_24 (sequence is synthesized)
ccggctgtgactgcgagagcaacagagactgtggtgctggcactaggatctgtccctggagggaagccacatgctccccactcagaggaggagagggagtcttcctaggggtgtgggggg

SEQ ID NO: 798487 - DNA, 120 bp, Artificial Sequence
  ENSG00000283199_25 (sequence is synthesized)
ctccaggacatgcctgtaagacgagtttcaccagaatccacccagagccctctcgttcagacacgcacacgtgcatattcatatgtacacagcacatacatgctcgtacataccacacat

SEQ ID NO: 798488 - DNA, 120 bp, Artificial Sequence
  ENSG00000283199_26 (sequence is synthesized)
gtgcacaggagggcacgggcaggtgacctgcagcatctctgatccgggtgtctctaaggcagtcagaggccacaggcggagatgctgtgtgcactgtctattcccgtggagacacatggg

SEQ ID NO: 798489 - DNA, 120 bp, Artificial Sequence
  ENSG00000283199_27 (sequence is synthesized)
ggccgtccctgtggtgcacatgataatgcagaggctcccagagggtgagctctgcccatcactcagccagggagggaggggcccttttcagggagccgcatgccacgcagagcttgtccc

SEQ ID NO: 798490 - DNA, 120 bp, Artificial Sequence
  ENSG00000283199_28 (sequence is synthesized)
actgggtagtttcctctgatcaaagtggggcaccatccaggctgcagagagaaaggggaccccccaaagccagcacccacccttgactgaaagacaccacagaagataagtgcccatcgg

SEQ ID NO: 798491 - DNA, 120 bp, Artificial Sequence
  ENSG00000283199_29 (sequence is synthesized)
ccccagagtcatcatttcccagacaaccggaaatgggccctggacgggctgtcctggacaggctgccgggcagttgggtgtgactcagttgcggcctccaactgtgccaaccagaaaggc

SEQ ID NO: 798492 - DNA, 120 bp, Artificial Sequence
  ENSG00000283199_30 (sequence is synthesized)
acccagagaagcttccggaaatacggttggtttgtccccttggtggggcaggaggcggcagctctgccgggtggctcccagcaccctcccccacagagcaaacatcggcatgagtctgtc

SEQ ID NO: 798493 - DNA, 120 bp, Artificial Sequence
  ENSG00000283205_0 (sequence is synthesized)
agcctcactgtcctgtcttgaacatcctccaccaaagtgtgaacacaggtggcatgggcttcgtaacgaataagagcgccttcaaagcaggagattccctgtacctgcgaagggccttcg

SEQ ID NO: 798494 - DNA, 120 bp, Artificial Sequence
  ENSG00000283205_1 (sequence is synthesized)
tgaacaaccttggagaggaaaggagaaccaggattcagatccaaagcatccagaaggctttagacatccagatcagggagattgatagagaaaaagcagccctgaagagatttttggtaa

SEQ ID NO: 798495 - DNA, 120 bp, Artificial Sequence
  ENSG00000283205_2 (sequence is synthesized)
acgagttcatctgaaacatccaatacagacagaacacacctgggtctccttctgtatctctctgtgacccaagaaagcagtagaagtggctactgggacaagccaaaaaagaaaaaaaag

SEQ ID NO: 798496 - DNA, 120 bp, Artificial Sequence
  ENSG00000283205_3 (sequence is synthesized)
gactagataattgaggacacaaatggactgcctctaaaataataaacaaaacctcctacaaaagagagaataatgcgctgatttttttcccagctgattctatttctttacaacttgagg

SEQ ID NO: 798497 - DNA, 120 bp, Artificial Sequence
  ENSG00000283205_4 (sequence is synthesized)
tggtaatatgcagtgcacgtgttattttcttacagattctcctggaggcaagaataaagctgagctattttagagatctttcagatactgatcatgaaatacatattatatttgccttaa

SEQ ID NO: 798498 - DNA, 120 bp, Artificial Sequence
  ENSG00000283227_0 (sequence is synthesized)
cctcaggcagggatgagaggtatataaaaggtagataggctcagagcatcccaaacccctccacacctatctgctccagtcgctggtgaaccttgttgcaagtccagcccagaatgtctc

SEQ ID NO: 798499 - DNA, 120 bp, Artificial Sequence
  ENSG00000283227_1 (sequence is synthesized)
agcagaagcagaagcagtgtgctcccccgcagcagtgctgccccccaccccagcagcgctgccccccaccccagcagtgctgccccccgcctcaacagtgctgccccccaccccagcagt

SEQ ID NO: 798500 - DNA, 120 bp, Artificial Sequence
  ENSG00000283227_2 (sequence is synthesized)
gctgcccgccgcctcaacaatgctgcccccctccccagcagtgctgtcccccaccccagcagtgctgccctccacctcagcagtactgccccccaccccaacagaccaagcagccttgcc

SEQ ID NO: 798501 - DNA, 120 bp, Artificial Sequence
  ENSG00000283227_3 (sequence is synthesized)
agaggcgaacccccaggaaaaacagagcatgaagttccttctgggccagcatcttacactccacaggccaagcaaagccctgctcaccagtgcttctggatgcagccacacttcacactt

SEQ ID NO: 798502 - DNA, 120 bp, Artificial Sequence
  ENSG00000283227_4 (sequence is synthesized)
gcaggagaggcagcaccaggctggcagctggcggcttcctcgagctctactcttcttaattagcagctgcagtttccatctcagacaaggatctggttctaaactatctaatcatctttc

SEQ ID NO: 798503 - DNA, 120 bp, Artificial Sequence
  ENSG00000283227_5 (sequence is synthesized)
ctgacatgcatctacattgccctgctggaaacatgagcggcatgcacaggcatcttctcctaccacgcttcccctcagctcctgttttcaaacaattaaaacagaattcctctggcatga

SEQ ID NO: 798504 - DNA, 120 bp, Artificial Sequence
  ENSG00000283247_0 (sequence is synthesized)
atttcttggtgctgagggccacagggtgggcgctgcaactgcccacttggaagccagccccagaggcaaagcaggatggagcctggggtgcaggatctaggattgagctcctctgaggat

SEQ ID NO: 798505 - DNA, 120 bp, Artificial Sequence
  ENSG00000283247_1 (sequence is synthesized)
gagagcccctctctagcaatcaggagccccaccttgagaaagcccctgaaacacagcacccctgaggaggcagccctgggttggagcccaaggccatcgggaggtgcctcctatctcagt

SEQ ID NO: 798506 - DNA, 120 bp, Artificial Sequence
  ENSG00000283247_2 (sequence is synthesized)
gggtccccaatgcctgcacacttctctcaggaccttgcatcccacccagcaggggtcagccctccagccactgttaggaaaaggaggctttctactctctgggcctccaaggagtccagc

SEQ ID NO: 798507 - DNA, 120 bp, Artificial Sequence
  ENSG00000283247_3 (sequence is synthesized)
ttggatctctcagctcctggggaggagccgcccacatcagcctccttaacccagcggcagcggcagcggcagcagcagcagcagcagcaagagtccctccgggcaaagagctgggcacaa

SEQ ID NO: 798508 - DNA, 120 bp, Artificial Sequence
  ENSG00000283247_4 (sequence is synthesized)
aaccctggattgcctgggatcctgaacacaacagggaggaagagacgagacccgaagaagcgggcagctgcgatggagcgagtgcgacagtgggagatctacgtgcttcagaacattgag

SEQ ID NO: 798509 - DNA, 120 bp, Artificial Sequence
  ENSG00000283247_5 (sequence is synthesized)
gaagccacccagcatgagctcaccatcgaagatgactgagtgcttggtgccaggacaggaaggcagggtgctctagagctgcctgccttgggctggcttcatcgtccacatggtgccctc

SEQ ID NO: 798510 - DNA, 120 bp, Artificial Sequence
  ENSG00000283247_6 (sequence is synthesized)
cttgggctggcccccaatgctgttgcccttctccatggggtgggaaaaacaggtttgagaagatcctgttgcttagactgtaaatgtgtttctgggaggcattgacattgatgagggtca

SEQ ID NO: 798511 - DNA, 120 bp, Artificial Sequence
  ENSG00000283247_7 (sequence is synthesized)
gcagaggtggcaggttaaagaagacaaggctctgcatggtgtgtaacttgagccctgggttttccactgcccagctctggccttggagacagctctctgcttgtctgagcctcaggttcc

SEQ ID NO: 798512 - DNA, 120 bp, Artificial Sequence
  ENSG00000283247_8 (sequence is synthesized)
ttacctgacacatgaggaaaccccatcccagactgatgaaatgactgtggagctgatgtctaggcgagggcggccgtagccactcagccttctcaggaaagagttgggccaatgccccat

SEQ ID NO: 798513 - DNA, 120 bp, Artificial Sequence
  ENSG00000283247_9 (sequence is synthesized)
gagcatatttgagacagcaggattgaaggcctgaagcaggaactggaaagaaaatctctgcactggatggtgggtttccaaccctatggttatggtggtctcattggagcaccaatggtg

SEQ ID NO: 798514 - DNA, 120 bp, Artificial Sequence
  ENSG00000283247_10 (sequence is synthesized)
agggatgtatgttcccttcccttatgtggagaggaaccaggttttgagaggaggggagtgcccatagtcccacccctagagggtacctacctccttcctcaataggctgtaggagaaacc

SEQ ID NO: 798515 - DNA, 120 bp, Artificial Sequence
  ENSG00000283247_11 (sequence is synthesized)
agactgtgggatcccaggatgtttgcagataaaggcaaggaagcttagaggaactcagaggccagtccacccacactgcatggctgagaagtctccaggagtcaccacacctggtatcag

SEQ ID NO: 798516 - DNA, 120 bp, Artificial Sequence
  ENSG00000283247_12 (sequence is synthesized)
gggcagggtaggtatcctagtgagcctgaaatgccactctaggaaagccccaaaaccgtgattctcacctggaaggcattctggaaatctgagagtgctggctgtgtttgttgagtgtgt

SEQ ID NO: 798517 - DNA, 120 bp, Artificial Sequence
  ENSG00000283247_13 (sequence is synthesized)
agggctagaggaacttaacctttaacagttacatgggccaaccccctacactctccaacgctgtgctccctgcttaacatcagggtcccacccaggtgatcaataatacgaaggtaatac

SEQ ID NO: 798518 - DNA, 120 bp, Artificial Sequence
  ENSG00000283247_14 (sequence is synthesized)
atattgtaaggaagaagaaagagatgtccaggtagcttcagtttaacccaaagtcagcatcaattctcccaagtacaggcatctcagcaagacctgtttgtgtggacatgttatggttac

SEQ ID NO: 798519 - DNA, 120 bp, Artificial Sequence
  ENSG00000283247_15 (sequence is synthesized)
gctagagtttattcatataaatgtttgcatcatccactctaaaaagcttgctttctacttcctaaaaagaatgcacacatttccagcctagtcctacactgcctcccttcaagtgtgcgg

SEQ ID NO: 798520 - DNA, 120 bp, Artificial Sequence
  ENSG00000283247_16 (sequence is synthesized)
acaggtgggctggcatctggagtcagtgagaagggcaacccctagatgaaatctgagactggcttaaaacataggctcagactggcttaaaagataggacataatagattctaagggcat

SEQ ID NO: 798521 - DNA, 120 bp, Artificial Sequence
  ENSG00000283247_17 (sequence is synthesized)
gtgaggtctaggatgttcagttttaagagacaggtgaaaagtttagatctgcagggtgggtggaaaatattcctgatcaataattgggttcttcctggaaacacccacatttctttggag

SEQ ID NO: 798522 - DNA, 120 bp, Artificial Sequence
  ENSG00000283247_18 (sequence is synthesized)
gtttccaacagagaatgagattcttcacaggagggattagatatagcggctgcagttagacagtaacttcatatttcattggatgttctatatgagtgataaaaatttatttactgtgta

SEQ ID NO: 798523 - DNA, 120 bp, Artificial Sequence
  ENSG00000283247_19 (sequence is synthesized)
tgtagtgtgtttaaacatttataggttttatgaactagttcctcctgtataagctattaaaaagtttacttttttctttttttataacttatatattattgggttacaaaattatcagat

SEQ ID NO: 798524 - DNA, 120 bp, Artificial Sequence
  ENSG00000283247_20 (sequence is synthesized)
aaaatgtttattttacaaattagagtacaaagaagcagaaaaaaactgcctatattgcacaccatagagataaatacatcagagtaattctttccagtctttactattaaaaataaactg

SEQ ID NO: 798525 - DNA, 120 bp, Artificial Sequence
  ENSG00000283247_21 (sequence is synthesized)
ttttcatgagaactattcccgtggtctgtgtttgatgcaaagtgattcaggcatgtagttatgtttctatctcgtttttcaaagaatgaaattcaaattcaaaatgagtccctggaggaa

SEQ ID NO: 798526 - DNA, 120 bp, Artificial Sequence
  ENSG00000283247_22 (sequence is synthesized)
gaaaaataatgtgagtgactctggggaagtgtgtccttgaaagattgggaattatcagcactcagaagaatgttttcacatataagatgatttcctagatattcatattgcatcttctac

SEQ ID NO: 798527 - DNA, 120 bp, Artificial Sequence
  ENSG00000283247_23 (sequence is synthesized)
atattagcacaatgtacttactatgtttttacatatttggagtatatgcagttatccataggcactctagttaaagtgttcaaaatgcaatctcttggatttcacaaatggtgcacatca

SEQ ID NO: 798528 - DNA, 120 bp, Artificial Sequence
  ENSG00000283247_24 (sequence is synthesized)
catgttccatccatgggaagatacctacaggaagcagctaaagacagaacaagtcttgctgccccagcgcctagacatgcctatggaactgagtctctgtttggctgctacaaagctttc

SEQ ID NO: 798529 - DNA, 120 bp, Artificial Sequence
  ENSG00000283247_25 (sequence is synthesized)
caaattcttggggacaggagacgatgagaaacttagaaagggagacagggcattctcagactgagggacacggagaaatgagtgctgcccgcttatgttagacatagggcaagatttcta

SEQ ID NO: 798530 - DNA, 120 bp, Artificial Sequence
  ENSG00000283247_26 (sequence is synthesized)
aatgatcatctttgaggaaaataataaacagctaaacaatagccctggtaataacaccaacaatgctcacttagaggtaagcataatgtaacttgcagcaattatttgggataaaataga

SEQ ID NO: 798531 - DNA, 120 bp, Artificial Sequence
  ENSG00000283247_27 (sequence is synthesized)
tcttaactctcactgtgtatgcgaacccatgtattttgcagaaaatgcagttttgaaacctgtcaggcccctgagcccaagctaagccatcatatcccgtgacatgcacatacacatcag

SEQ ID NO: 798532 - DNA, 76 bp, Artificial Sequence
  ENSG00000283247_28 (sequence is synthesized)
tagccttaactgatgacattcttttgtaatctcccctacccttaagaaggttctttttaatctcccccacgcttaa

SEQ ID NO: 798533 - DNA, 120 bp, Artificial Sequence
  ENSG00000283247_29 (sequence is synthesized)
tacccttaagaaggttctttttaatctcccccacgcttaagaaggttctttgtaattctcctcacccttgagaatgtactttgtgagatccccccgctgcccacaaaacattgctcctaa

SEQ ID NO: 798534 - DNA, 72 bp, Artificial Sequence
  ENSG00000283247_30 (sequence is synthesized)
aaaacattgctcctaactctttgctgattctcttttcaaactcagactgcctgcacccaggtgaaataaaca

SEQ ID NO: 798535 - DNA, 120 bp, Artificial Sequence
  ENSG00000283267_0 (sequence is synthesized)
gggtctgtctcgggaaccccgcgtggccgcagcagaaccggcagctccacccgcggtgagccagtgccagccagagcctcccagcgccgaagcgcaccgcggccgagacggttccgctga

SEQ ID NO: 798536 - DNA, 120 bp, Artificial Sequence
  ENSG00000283267_1 (sequence is synthesized)
gcgagcttgggcgcccggtgagcgctcggggtgggtgacacagcgctgcctcgcccagttcgcctgcctcgggaagtgggtccgctgggcagagggcgccctgggcaggggtcgtccccg

SEQ ID NO: 798537 - DNA, 120 bp, Artificial Sequence
  ENSG00000283267_2 (sequence is synthesized)
ctgaaacctctggttcctcgtgggcaggaggcgccccgtcctcctcccaacgagcgtagcgcacccaggacaccgcgccgggacgcgctcctcggacggcgaccagaggtcctcgactcc

SEQ ID NO: 798538 - DNA, 120 bp, Artificial Sequence
  ENSG00000283267_3 (sequence is synthesized)
cgcgtggcctccctcttctgcgcccaggtgacctgacccagggctgggggcacagggagaggcgctagcctgaaattgagggggaagaaattccctctgatacatcatgtatcataaact

SEQ ID NO: 798539 - DNA, 120 bp, Artificial Sequence
  ENSG00000283267_4 (sequence is synthesized)
gccagctttcagctcagtctggggaatttgcacaattttcgacgatgtgaaatgacttgaatgtcctgtttagatttgattcgtatgatttctctcttcagcccaacttttttagggagg

SEQ ID NO: 798540 - DNA, 120 bp, Artificial Sequence
  ENSG00000283267_5 (sequence is synthesized)
tggcagacggctgtgtacggggggaaagaatatgtgttttgctacaagaagatggttctatctacatttgggctgcatgatgctgatcaatctggttaatgctgactttgagtttcaaaa

SEQ ID NO: 798541 - DNA, 120 bp, Artificial Sequence
  ENSG00000283267_6 (sequence is synthesized)
aggagtgcttgccagcatcagcccaggaatcaccaaagacattgatctccagtgctggaaagcttgctctttgacattgatagatctcaaggaactcaagatagagcacaatgtggatgc

SEQ ID NO: 798542 - DNA, 120 bp, Artificial Sequence
  ENSG00000283267_7 (sequence is synthesized)
tttttggaatttcatgttgttcttgcaaaaatctcagcggcctggacattataatgtcttcttaaacatagctcaggatttctgggacatgtatgtagactgcttgctttcaagatctca

SEQ ID NO: 798543 - DNA, 120 bp, Artificial Sequence
  ENSG00000283267_8 (sequence is synthesized)
tggaatgggcagaagacaggtgatgccccccaaatataattttccacagaaaataacaggaggtaatttaaatgtgtatttaagagaatagcagtttacttttctttaaaagtcactatt

SEQ ID NO: 798544 - DNA, 120 bp, Artificial Sequence
  ENSG00000283267_9 (sequence is synthesized)
taattcttctgatttttttcaagttatccaacaaggtagcaaatttaccatatttagtttttttccctaaaatgataggttttgattctcatttttactcattttacattatttacaaac

SEQ ID NO: 798545 - DNA, 120 bp, Artificial Sequence
  ENSG00000283267_10 (sequence is synthesized)
cacacaagctctgacttacaattttaaatgatcttggaatataatacactttggtagataattaaaattatccttgtttgcccatgaatagttcataagaaagccatttaaccctgtaat

SEQ ID NO: 798546 - DNA, 120 bp, Artificial Sequence
  ENSG00000283267_11 (sequence is synthesized)
tattcatattacatttgttgaagaaattttaaacatcagacatgtatttaggcttttgaaattaattttttcaatagggttgtataaaagcaggaaatttaagagtcatattggaatgaa

SEQ ID NO: 798547 - DNA, 120 bp, Artificial Sequence
  ENSG00000283267_12 (sequence is synthesized)
tattaacaatttcttcttttaaatcttacaggactagattttacaaaatgagagtattacatttaagagaaaacatgtaaaatacctcaagcaagatgacagcgacctgaaaacttgtat

SEQ ID NO: 798548 - DNA, 120 bp, Artificial Sequence
  ENSG00000283267_13 (sequence is synthesized)
ttatgaggtcaaatatttcttgtcatagttatacaaattatttaatactgataaacgttgttttttgttgtaattgctttattgctattgaattattccaatattttcagataatttctc

SEQ ID NO: 798549 - DNA, 120 bp, Artificial Sequence
  ENSG00000283267_14 (sequence is synthesized)
aattttttacttagaaggtgtctttttaaagtgtctttgttttaaagaaaacatcagttaaaaggcaaatgtgatatattttttagatacaatagtcaatggaataaaattgtaaccaat

SEQ ID NO: 798550 - DNA, 120 bp, Artificial Sequence
  ENSG00000283267_15 (sequence is synthesized)
tttataaggtatcttatatattaatattgactattaaactgtgccaaaactaatggcagtattatcctaaaaagtaatatttaatgtagtatattttgtggtttctgaaatgtacatttc

SEQ ID NO: 798551 - DNA, 120 bp, Artificial Sequence
  ENSG00000283267_16 (sequence is synthesized)
tgcattaaggactaaaacctttttatgttctcatttttattgtctttgttttgaaaaaggaacaataaacaaagacagaaacttcatttcagtaaagtacaatttgatagaatttttgtg

SEQ ID NO: 798552 - DNA, 120 bp, Artificial Sequence
  ENSG00000283267_17 (sequence is synthesized)
ttagctgagttattttttatattgcctatttatatctcacatcttatttcaaaaaggatgtgaagctttaaagaaatataccgaagaaaaggaaaacatgaagtagtggaggaaattgga

SEQ ID NO: 798553 - DNA, 120 bp, Artificial Sequence
  ENSG00000283267_18 (sequence is synthesized)
acattgggacatgaagacagggaagtaatacaatggagttacggtttagattaatactttttgaatgcatgtcgtaaaagcctatacctttgataaagggtgcctataaatttggtctgt

SEQ ID NO: 798554 - DNA, 120 bp, Artificial Sequence
  ENSG00000283267_19 (sequence is synthesized)
ttcccacttctcctagtgaagagggacacatgaacagtttcaagattcacatgcttataagaaaaaccaaaccatatgttcaacagaggtccagccttttccaggacaaagaatcaatga

SEQ ID NO: 798555 - DNA, 120 bp, Artificial Sequence
  ENSG00000283267_20 (sequence is synthesized)
aaatctcacccataggttttcacagtggctaccatggtttacaacactggtttcaagtatccttacaatgacagattctctcctttacagtctgattccagtacactcaaactcaaatat

SEQ ID NO: 798556 - DNA, 120 bp, Artificial Sequence
  ENSG00000283267_21 (sequence is synthesized)
aaaaagttttaaaatcggctaaaataatactgaacaagtaacgaactgcctgatggtttgacttgatccaagaataagctgaattaaaggagggacgttctttgcattattgaccacttt

SEQ ID NO: 798557 - DNA, 120 bp, Artificial Sequence
  ENSG00000283267_22 (sequence is synthesized)
caaattctgatgatgtatagaccatttattaggggttttatatataaacactcttaaaattacattttgcatgtaatttcagggggctgcataaaccccaggttaggaattttcaatatt

SEQ ID NO: 798558 - DNA, 120 bp, Artificial Sequence
  ENSG00000283267_23 (sequence is synthesized)
aaaggacctcatagcgttcggcaatattatttcatataaccaattttgcatgagtagcagataatataagattgtagggctaataatttcctagattgaaaacttcttatcttgccaatt

SEQ ID NO: 798559 - DNA, 120 bp, Artificial Sequence
  ENSG00000283267_24 (sequence is synthesized)
aagggtggatccctaagctcagaaaatcaactggttggagggtagggctaattaatgttctcataaaaatgaccagacagcgtgtaaacatgagtgattttatgtccattaagcttttga

SEQ ID NO: 798560 - DNA, 120 bp, Artificial Sequence
  ENSG00000283267_25 (sequence is synthesized)
tttgtggaatttatatgacaaataattagtctgatatgagtttttaaatttcaacatattttcatattgacactttattactgtttagctctaatcgaaaagtgatgattcatttgagag

SEQ ID NO: 798561 - DNA, 120 bp, Artificial Sequence
  ENSG00000283267_26 (sequence is synthesized)
gagtcacatttatgtgacaggagtaaaaagttgagttaatcttgccaagaactttcctgtcctttctcatctccatattgaacatctgtgttctttatcattaaactgcttttggtctaa

SEQ ID NO: 798562 - DNA, 120 bp, Artificial Sequence
  ENSG00000283267_27 (sequence is synthesized)
aaaaaaaaaaatgacctgacagctatccacctagaattcatttcctgcagaggagccgaagtggtacctagaggcagtattacagttttcctcaaaaaaaacagttctcttttacagtct

SEQ ID NO: 798563 - DNA, 120 bp, Artificial Sequence
  ENSG00000283267_28 (sequence is synthesized)
gtgggcaaatgattgaagctcaaaagttcaatgctgtaaagtgagaccatgtacttttagtctaaaaaattgttcaaccagttgtcctcaatcactcatagttgtcatgacaattttatt

SEQ ID NO: 798564 - DNA, 120 bp, Artificial Sequence
  ENSG00000283267_29 (sequence is synthesized)
gcagcgatgataaacattttagcttaaatcaataaaattagtcttccagttaatggcaaaatggttttctagttcttttaattgaatttacatactacattgggttaaaaataagaacat

SEQ ID NO: 798565 - DNA, 120 bp, Artificial Sequence
  ENSG00000283267_30 (sequence is synthesized)
ttgctaaactgggcaatctggttttaaaacaactcatcttaagctttttgatgatgattacataccgtaaattcctccccgtttttggcacaaatagtgtcatctgcatataaaaaaact

SEQ ID NO: 798566 - DNA, 120 bp, Artificial Sequence
  ENSG00000283267_31 (sequence is synthesized)
ttttctttctgttcatcattcattcattcaacaaatattcattaagctttagggtatattagtgaacaatccagacgtaatctttgactcacagagttgacactgaagtgggacaatgca

SEQ ID NO: 798567 - DNA, 120 bp, Artificial Sequence
  ENSG00000283268_0 (sequence is synthesized)
tggaggcaggcaggctggcgtgggtggcacggagtccagggccacgcggggccatgggctgctgccaagacaaggactttgagatgtctgatgagcagtccaaggaggaagagtctgagg

SEQ ID NO: 798568 - DNA, 120 bp, Artificial Sequence
  ENSG00000283268_1 (sequence is synthesized)
acggcagggaagatgagaccacagacacacaaagagggcccagggagtgtgagagggggcttcccgagggtaggggtgagctcagaggcctcgtcgtcccctcaggcgccgaagatatcg

SEQ ID NO: 798569 - DNA, 120 bp, Artificial Sequence
  ENSG00000283268_2 (sequence is synthesized)
aactccccggaccatccgaatcacaagtcgaacgaaagccttctgattaccgtgctgtggcggcgactatccacgttcggtcgtcggggctcctcgcggccaagcaagaggcaaccagac

SEQ ID NO: 798570 - DNA, 120 bp, Artificial Sequence
  ENSG00000283268_3 (sequence is synthesized)
cagattcggaagcaggagagtccgatccgagaaggcaaccaggaggagccggagaagggatgaccccagacctgctctcagtccgccccaacctccagagaataaaatttctaacgtata

SEQ ID NO: 798571 - DNA, 120 bp, Artificial Sequence
  ENSG00000283288_0 (sequence is synthesized)
ttggtggggggcagattaggttggggctctggccaggcttctgagatctggtggaggaggggtggtcaggcacacccaggctcctgaagctggcagggggcatgaaaggaggcgccaagg

SEQ ID NO: 798572 - DNA, 120 bp, Artificial Sequence
  ENSG00000283288_1 (sequence is synthesized)
aggaagattaaggtactatcagagttaagggcagagcccagggtagcccagatgttcccggaaggaagtgcaagcgcaggagagcggtgagagtgtgtgcacagggtgtgtgcccatggg

SEQ ID NO: 798573 - DNA, 120 bp, Artificial Sequence
  ENSG00000283288_2 (sequence is synthesized)
ccccgcagacgtggcagctccgggtaggggctgaattagggtggccagccctcctttacccagctggctgccagtcccaagggagccctgtgtcggcccggacaatgcaccaggctggcc

SEQ ID NO: 798574 - DNA, 120 bp, Artificial Sequence
  ENSG00000283288_3 (sequence is synthesized)
actactcctggccttctccagctgtgaacagttcatcagagcaggagccccagaggcagcttccggaggtgctaagtggcacctgggaacaacctcgagttgacgggctgcctgtggtca

SEQ ID NO: 798575 - DNA, 120 bp, Artificial Sequence
  ENSG00000283288_4 (sequence is synthesized)
ccgtcattgtcgctgtctttgttctgctggcagtctgcatcatagtggcagtccattttgggccaaggctgcaccagggccatgccactctccctacagagccaccgaccccaaagccag

SEQ ID NO: 798576 - DNA, 120 bp, Artificial Sequence
  ENSG00000283288_5 (sequence is synthesized)
atggtggcatctacctcatccactggcgggtgctgggcccccaagacagtcctgaagaagcaccaccgggccctcttgtccctggctcctgccctgcgccagatggacccaggcccagca

SEQ ID NO: 798577 - DNA, 120 bp, Artificial Sequence
  ENSG00000283288_6 (sequence is synthesized)
tcgatgaagtcacttgtctgtaggagggagactttggagagttagcctgacctagctcagaacaagaaaccgggcagagaactagggcaaaagcaaattggagcctgggcatcagagcgt

SEQ ID NO: 798578 - DNA, 120 bp, Artificial Sequence
  ENSG00000283288_7 (sequence is synthesized)
cggaagggcacactggactcagctggagctgctctctcagaacatttatagagagagccctgtggtgggcaagagaaatcaaaacttgagggccctgcccagaaacatgctgcggggggc

SEQ ID NO: 798579 - DNA, 120 bp, Artificial Sequence
  ENSG00000283288_8 (sequence is synthesized)
cttcccagggcccaaggccacctcacaaagtccctccctcctcttcagggaccaccagacccctgaatctccttttctgagtctctgccccttcattgcacgcttaatctccttcctttg

SEQ ID NO: 798580 - DNA, 120 bp, Artificial Sequence
  ENSG00000283288_9 (sequence is synthesized)
taatgtgaatccaactccccacaagcaggaatgtcagaggccccgtggagaggccctcatcctacaaaggccagccagggagagcccaggcggagaagctgggatctgccttcccttagg

SEQ ID NO: 798581 - DNA, 120 bp, Artificial Sequence
  ENSG00000283288_10 (sequence is synthesized)
agggcccagaccttgttgacaagctccgaagtccttgtaagcccaagcacaatttatagttcaaagattggctttcaaaggcccccactgactctgtcttgcctctccagaagggatggg

SEQ ID NO: 798582 - DNA, 120 bp, Artificial Sequence
  ENSG00000283288_11 (sequence is synthesized)
ggaatttgggagcctctcattgcctcccactttctgtgtgcctgggcctgttggaacaagcctagaatgtaccacaggacatttcccagatctttccggctgatgagaaaacaggaaagg

SEQ ID NO: 798583 - DNA, 120 bp, Artificial Sequence
  ENSG00000283288_12 (sequence is synthesized)
aaaaggagctccatggaacttgttttgggaaggaaggagtggggtggggaccactcccagctgtgggagtgcctgggtctaatcagcaggggggtcaggatgatgcatccagaagccagg

SEQ ID NO: 798584 - DNA, 120 bp, Artificial Sequence
  ENSG00000283288_13 (sequence is synthesized)
aagacaaaactgggcctcctggtggctcagtgcctgctggtggcactgccttccccagcacctctgaatcttactcatctgcagtcaagaacacgcagacagacatttatggcaggacct

SEQ ID NO: 798585 - DNA, 120 bp, Artificial Sequence
  ENSG00000283288_14 (sequence is synthesized)
ctggtgctctaccctggggaactcctggggacaagaagtcccctgggggcattggcaagaccccaccacagtcagggaggctgggaaataacagaatataaaaaggaacagaggtgggga

SEQ ID NO: 798586 - DNA, 120 bp, Artificial Sequence
  ENSG00000283288_15 (sequence is synthesized)
ttgcagtgtgtgcagagggcaggcttgcctcctttgggattggggagaggcagctaaagtgttaatagctgccccttgttgtgggtcagctaagtgctggacaccaggcttctctgtgga

SEQ ID NO: 798587 - DNA, 120 bp, Artificial Sequence
  ENSG00000283288_16 (sequence is synthesized)
cctacagatatgataccattcactcctcacaacaacctccaggggaggggccactgctatccccgttttacacttggggaaactgagggttatcaagatacctaagtagacacaggtcct

SEQ ID NO: 798588 - DNA, 120 bp, Artificial Sequence
  ENSG00000283288_17 (sequence is synthesized)
aagtggtggagtcaggatttgaagctggggccatcagactccacagcctaagccccatgacagttactggatggattggaaaggcctttgattctgggctggtttctagtatacaagcca

SEQ ID NO: 798589 - DNA, 120 bp, Artificial Sequence
  ENSG00000283288_18 (sequence is synthesized)
ctggtgtgatgatggaggatcttcaggccttgaggacagggtgggatacttagggagagtggggactgttcccccttgactcccttggctctgccgttcttaggggcagccagttccttc

SEQ ID NO: 798590 - DNA, 120 bp, Artificial Sequence
  ENSG00000283288_19 (sequence is synthesized)
ggcagccagttccttctaacccatgtgtgtctgtgtggagcatttctccacagtgatgctgtactcagaaatgtatattgagcctttgtgaccaaaaaaaaacaaaacaaaacaaaacaa

SEQ ID NO: 798591 - DNA, 75 bp, Artificial Sequence
  ENSG00000283288_20 (sequence is synthesized)
aacaaaacaaaacaaaacaaaaaaaaccaaaacaggccaggcacagtgcacggtgtctcatcaaggtcaggagtt

SEQ ID NO: 798592 - DNA, 120 bp, Artificial Sequence
  ENSG00000283297_0 (sequence is synthesized)
gaggcccagaagaatggccagtaaccggcaaagatcactcagagggcccagtcacccatctcatatggaagaacctttcctgcagatggtccaggccagcgagtccctcccaccctccca

SEQ ID NO: 798593 - DNA, 120 bp, Artificial Sequence
  ENSG00000283297_1 (sequence is synthesized)
aacgtgggctcagcgtgagttcttcctccccagcgagtcctgggagttccctggcttcacccggcaagcctaccaccagctggctctgaagctgccgccctgcacagatatgaagtccaa

SEQ ID NO: 798594 - DNA, 120 bp, Artificial Sequence
  ENSG00000283297_2 (sequence is synthesized)
ggtgcgtcagcggctcatccacccttggaagggtggcgcccagcacacctggggctttcacacgtggctcgatgtgtgccgtctgcctgccaccttccccacccagcctgacaggcccta

SEQ ID NO: 798595 - DNA, 120 bp, Artificial Sequence
  ENSG00000283297_3 (sequence is synthesized)
cgatagcaatgtctggcgctggctgaccgactccaatgcccacagatgcccccccacggagcaccccatcccccctccctcctggatggggcaaaacagcttcctgaccttcatccactg

SEQ ID NO: 798596 - DNA, 120 bp, Artificial Sequence
  ENSG00000283297_4 (sequence is synthesized)
ggtgattttcaggacagtgaaggagttgaaggaggtggagaagctcaagttgaggagtgaggcaagagcacccccactcgatgcccagggcaacatccagccgccagcgagcttcaagaa

SEQ ID NO: 798597 - DNA, 120 bp, Artificial Sequence
  ENSG00000283297_5 (sequence is synthesized)
gtaccggcacatatccgctggtgggaggtttgaaccccagggcctccagctcatgcccaacccgtttcccaataatttcgccaggagctggccctgcccaaaccctctgcctcactacca

SEQ ID NO: 798598 - DNA, 120 bp, Artificial Sequence
  ENSG00000283297_6 (sequence is synthesized)
ggagaaggtgctaaagctggccttgctgcccagcgcgcccctgagccaggacctcataagggatttccaaaccctgataaaggacagaactgccttacccctccaccatctctccaaggc

SEQ ID NO: 798599 - DNA, 120 bp, Artificial Sequence
  ENSG00000283297_7 (sequence is synthesized)
acaagcaagcaaatccccagcaaggaagaggaagagaagacctggacacttctagaagggcttccagaggggacgatcgtgatacccagagccccaggctccagtgttctcaatcaatgc

SEQ ID NO: 798600 - DNA, 120 bp, Artificial Sequence
  ENSG00000283297_8 (sequence is synthesized)
tccttcagcaagaggccctggggtagcaaaaggactctggcttctgcagaacagcctctccaccatcctcccagcctcaagccacctctgtaccccaggctattggagattcaactgaaa

SEQ ID NO: 798601 - DNA, 120 bp, Artificial Sequence
  ENSG00000283324_0 (sequence is synthesized)
gaactattcatgaagcttctgagttcagcgtgggagtggggaagggagagagctaccaaccactctccttttgtgggaagaggttgataaaaacagaggctgccaagagatgtacttgag

SEQ ID NO: 798602 - DNA, 120 bp, Artificial Sequence
  ENSG00000283324_1 (sequence is synthesized)
taggaggagactgccctggcaacaagtgaatgtagccttggatatccgctctcagaaggaatatgacaaatctgaagctatacctgaggaattagctggagctggacaacagtaacgagg

SEQ ID NO: 798603 - DNA, 120 bp, Artificial Sequence
  ENSG00000283324_2 (sequence is synthesized)
tgcaagtccccatggaagattcaagcctgtccagtggtgttgatgtggacaaaggctttgccattgcctttgttgttcttctgtttctgttcctaatagtgatgatttttcggtgtgcca

SEQ ID NO: 798604 - DNA, 120 bp, Artificial Sequence
  ENSG00000283324_3 (sequence is synthesized)
agctggtgaagaatccctacaaggccagctccacaaccacagaaccatctctgagctgaagtataataaaacctggtagactcccccaagcaagagatttgaaatctgttatacacactt

SEQ ID NO: 798605 - DNA, 120 bp, Artificial Sequence
  ENSG00000283324_4 (sequence is synthesized)
tatattatttcacctccctgtttctcagccttctcactcttgcattccacagtgagatgaaacacaagccagtttgtattgttcctgttcagggaaatggctactaaagtgagataaagg

SEQ ID NO: 798606 - DNA, 120 bp, Artificial Sequence
  ENSG00000283324_5 (sequence is synthesized)
gattttaattcttcagtgcctaaggtccttaggatgagacagtgggccataattttatgatgtaatgtaacataatgtcatcatgcttggtaaggtccacctgaaactagaagctcacct

SEQ ID NO: 798607 - DNA, 120 bp, Artificial Sequence
  ENSG00000283324_6 (sequence is synthesized)
agaggtggcagacttgaatgatccctttagttatgcaaatgtaggctcagcagaaaccaaatgtcctataagaagagtgtaaccagattgttttagtgtgtgaagttttataaaatctgc

SEQ ID NO: 798608 - DNA, 120 bp, Artificial Sequence
  ENSG00000283324_7 (sequence is synthesized)
tgttcttaagtgggcagaactctctggtagaaggggactaatttgctgtgggtgaattccttaatctctctcatcccaaatttcctcatctataaaataatatgtagaggtttcagtgag

SEQ ID NO: 798609 - DNA, 120 bp, Artificial Sequence
  ENSG00000283324_8 (sequence is synthesized)
ggccccagaaaagatatatccgtgtcctaacccctggaatgtgagcttatttggaaaaatggtctttgcaaatataattaagaatctcaagataaattcatcctgaattatctaggtgag

SEQ ID NO: 798610 - DNA, 120 bp, Artificial Sequence
  ENSG00000283324_9 (sequence is synthesized)
acttaaatccaatgactcccctagagattctggtaccccagtatggtcttactaacaccttgattttggacttccggccttcacaactgtgaggaaataaatttctgttgttttaaggca

SEQ ID NO: 798611 - DNA, 120 bp, Artificial Sequence
  ENSG00000283329_0 (sequence is synthesized)
ggggaatagggcacatggataatccagcctctgctctaaatcatctctcttggttcaggccaagtcatagtacttgtgggacctgccaaaacagaagctcgccttctctggggagggtgg

SEQ ID NO: 798612 - DNA, 120 bp, Artificial Sequence
  ENSG00000283329_1 (sequence is synthesized)
ggtagtacgagatgggatttgtttagagccatctctcaccacgagggaaggctacaatgtccctggaaagatattgtctggttctggtactaatttggctcaaatgaccttgaaaggtta

SEQ ID NO: 798613 - DNA, 120 bp, Artificial Sequence
  ENSG00000283329_2 (sequence is synthesized)
agggatttctgtaactcctccactccttatataggggctgcaacaatgtgatttcaggacagcatctgtggccttcctgagccggacctgaggaatcaagagcaggcccgggagtcttgc

SEQ ID NO: 798614 - DNA, 120 bp, Artificial Sequence
  ENSG00000283329_3 (sequence is synthesized)
cctcctttgcaccctagccgggtatcacctgcaaattcatctttaaggggatgaacaatcaatacatccgtcgagaagtcttctgctgtggaacttgtcatgagctcaaaagcttctggg

SEQ ID NO: 798615 - DNA, 120 bp, Artificial Sequence
  ENSG00000283329_4 (sequence is synthesized)
gaagaatggaggcagaggctggagaggaggctgaggatgctggacaaccctgttgagaaggaaaagccggcacacaccgcggactgagctctgcctgcctcaccgacttcaaagatagca

SEQ ID NO: 798616 - DNA, 120 bp, Artificial Sequence
  ENSG00000283329_5 (sequence is synthesized)
agcgaccacttttctaggggaaaaaaactaacactcaagttgtgctgatttactaaacaggacgctctctatttgtgcttccatttgctaggggatttacatgtgaaacctcccccagtg

SEQ ID NO: 798617 - DNA, 120 bp, Artificial Sequence
  ENSG00000283329_6 (sequence is synthesized)
ctaatgggagttattatcctgctcaatcccctccgcacagaggacaggatgaccgcaagtgggataggacgcttgggctatttaataaaagagctcttggaattagcactctccaggtct

SEQ ID NO: 798618 - DNA, 120 bp, Artificial Sequence
  ENSG00000283329_7 (sequence is synthesized)
cacagacccatgtagcctagtatatttccacatttccttgtcattttgaaatgtttcaagtcttgagacatttgaagtgttttctctaagcttaccgagggcaatgaccttgatgaaaat

SEQ ID NO: 798619 - DNA, 120 bp, Artificial Sequence
  ENSG00000283329_8 (sequence is synthesized)
ttggctttgccaggtgtcctggaaaaagagtcataaaatcttgtccttctttccccgctttttgtgaacacagaaatgtaactgcttgcagaaataaagctattattataaaaagaattt

SEQ ID NO: 798620 - DNA, 63 bp, Artificial Sequence
  ENSG00000283329_9 (sequence is synthesized)
ggatgaacaatcaatacatccgtcgagaagtcttctgctgtggaacttgtcatgagctcaaaa

SEQ ID NO: 798621 - DNA, 120 bp, Artificial Sequence
  ENSG00000283361_0 (sequence is synthesized)
atgcacggagccccccggctgacctttccctgtgccagtgagtacctgtggcatgcaagggagaaagcctatcaggaccacaggagaaaggtccagagcgcccagccgctggtagacacc

SEQ ID NO: 798622 - DNA, 120 bp, Artificial Sequence
  ENSG00000283361_1 (sequence is synthesized)
cgcgccccgctgacgttccgccatctccacctgaaactcaagaggctgaagctggaggaggaacggctctccgtcatcgagagggacaaccgcctgctcctggagaaggtggcctctgtc

SEQ ID NO: 798623 - DNA, 120 bp, Artificial Sequence
  ENSG00000283361_2 (sequence is synthesized)
gacagcaaaaacaactccaagcacaggagtctgcacagggggaagagagaacaggaacttcgcagagtgcggaagaaaacacggccattctggaaggaatcacacactcagaaccatggt

SEQ ID NO: 798624 - DNA, 120 bp, Artificial Sequence
  ENSG00000283361_3 (sequence is synthesized)
atggagctcaaaggtggtgtgaagactggggcagggctgagaagtcccgggtgctggtgtggaatctccctggagacagcagatacgcctagcaaaaagcaggaagtgaaactggattag

SEQ ID NO: 798625 - DNA, 120 bp, Artificial Sequence
  ENSG00000283361_4 (sequence is synthesized)
atgagggagtcacaaggaagacccacaaggccagccatgagctcccccaggctaacacagccagcggtctcagggcagtgtggggaatcagccttgcccagggccggggccagggcagcc

SEQ ID NO: 798626 - DNA, 120 bp, Artificial Sequence
  ENSG00000283361_5 (sequence is synthesized)
ccgctgtcttcctctcttcactgttatcacagccggagcagctgtgaagtgcccaggaggcagctcctcaaacggtgtttcaacaatgtgcccgagcagatgacgcagcaaaactatttt

SEQ ID NO: 798627 - DNA, 120 bp, Artificial Sequence
  ENSG00000283361_6 (sequence is synthesized)
ctgtgcttcttggactctgataactggaaacaaactatgcagagtcatgttaggaggtgagggtttgaattagattgttttctctagctatgaagacttattctgttactgtattttgag

SEQ ID NO: 798628 - DNA, 120 bp, Artificial Sequence
  ENSG00000283361_7 (sequence is synthesized)
ctgtggtggatttgtctataattcctaggtggatttttaacttaccttaaaagctctgtgattgttcctttaacaaatatctaaataaatcagattaaaatttttgaacgtgatgaaact

SEQ ID NO: 798629 - DNA, 120 bp, Artificial Sequence
  ENSG00000283361_8 (sequence is synthesized)
accctcctctttccaccactgaggcccaaggctccagttgctctgaggagtgtggaggcccgtgaggtgtgggggtgcggagtggccgtggaagattctgtaccatgggccctgccgtca

SEQ ID NO: 798630 - DNA, 120 bp, Artificial Sequence
  ENSG00000283361_9 (sequence is synthesized)
gtcaagtccaagagcagacgtgagtcgagtggtcagtgggttgcaggagcatcaaaaacagtgtgtgcatccaaaccactgtgaatccccacactgtaaaaacaaaaacttcaaacgtca

SEQ ID NO: 798631 - DNA, 120 bp, Artificial Sequence
  ENSG00000283361_10 (sequence is synthesized)
catattttgtccactttgccctcaatgcacgctttatccatgtgagtgtgagcagacatagagcacagccctcactcctccatccaccaaccgatggcagcagcaagcacagtcaggctt

SEQ ID NO: 798632 - DNA, 120 bp, Artificial Sequence
  ENSG00000283361_11 (sequence is synthesized)
ctcagcacacaggatgaaggaacaagggaagacagccccacggtctgactccgagtcccagctgaggaaccagccaatagcatggacagcactacttcccatcagcatgactgtcagact

SEQ ID NO: 798633 - DNA, 120 bp, Artificial Sequence
  ENSG00000283361_12 (sequence is synthesized)
ggcagccactacatcctgctaatattcagagcaaatttctcatgaaatgccctgtatctgctcctcacatatgcaaagctgaacaatgagttcccatccatggattctgcactggagtct

SEQ ID NO: 798634 - DNA, 120 bp, Artificial Sequence
  ENSG00000283361_13 (sequence is synthesized)
agtgtaatgaagaccacagctctgacatgaaaatgatgatgctattttctcattaaccaaatcctctgatgtgtcgtcgccaacattgcgcacgtggcttcaacgaagatgaaacgaccg

SEQ ID NO: 798635 - DNA, 120 bp, Artificial Sequence
  ENSG00000283361_14 (sequence is synthesized)
acagctgtcctagcgccatgttcactccattcgtctcaggaaaaacccatcccaacctgattagagcaatggagagagggtggcttaaaacagctaagcctttgcataactcgtcttcaa

SEQ ID NO: 798636 - DNA, 120 bp, Artificial Sequence
  ENSG00000283361_15 (sequence is synthesized)
gtcaatcagaaaaattagggaggatctgctgcctaaccttcaaacaaatattttggaattgtctgaattatataaattattcaagatagaagagaaaggagataaggaaagcagaaagaa

SEQ ID NO: 798637 - DNA, 120 bp, Artificial Sequence
  ENSG00000283361_16 (sequence is synthesized)
agctgaggagtggcatcaaaatggcaacactaaactatccaagatctcctgaaaaaaaaaaacaccccagtggagaagaagatcccactcttcaccattattcttcgcgtgttgtttgag

SEQ ID NO: 798638 - DNA, 120 bp, Artificial Sequence
  ENSG00000283361_17 (sequence is synthesized)
aatcccagactgtcttctggctcccgttcttccccctccttggacgccatgacaactgtcacatgaccctgcaaacacagcgtctccaggtctgcaccaggccccagctgctcctctgtc

SEQ ID NO: 798639 - DNA, 120 bp, Artificial Sequence
  ENSG00000283378_0 (sequence is synthesized)
cccgagcgctccagaaagctgcggcgcgagtccgcggggccgacctcggagacgcagctggggccgggcgcggcttggcgggagggtctgcagcgccgagggaggctgctagtgcgtgag

SEQ ID NO: 798640 - DNA, 120 bp, Artificial Sequence
  ENSG00000283378_1 (sequence is synthesized)
gaagagagctagagactggacacgggagacagagcagcgtcagagccgcgcaggggacgggagtgagagcaggagcgacgcagagcggccgtcgccgtgcccgggtctcagggcgcctgg

SEQ ID NO: 798641 - DNA, 120 bp, Artificial Sequence
  ENSG00000283378_2 (sequence is synthesized)
ctgaagtgagcatggcttcagtggcctgggccgtcctcaaggtgctgctgcttctccccactcagacttggagccccgtgggagcaggaaatccacctgactgtgatgccccactggcct

SEQ ID NO: 798642 - DNA, 120 bp, Artificial Sequence
  ENSG00000283378_3 (sequence is synthesized)
ctgccttgcctaggtcatccttcagcagctcctcagagctgtccagcagccacggcccggggttttcaaggcttaatcgaagagatggagctggtggctggactccacttgtgtcaaata

SEQ ID NO: 798643 - DNA, 120 bp, Artificial Sequence
  ENSG00000283378_4 (sequence is synthesized)
aataccaatggctgcaaattgaccttggagagagaatggaggtcactgctgtcgccacccaaggaggatatgggagctctgactgggtgaccagctacctcctgatgttcagtgatggtg

SEQ ID NO: 798644 - DNA, 120 bp, Artificial Sequence
  ENSG00000283378_5 (sequence is synthesized)
ggagaaactggaagcagtatcgccgagaagaaagcatctggggttttccaggaaacacaaacgcagacagtgtggtgcactacagactccagcctccctttgaagccaggttcctgcgct

SEQ ID NO: 798645 - DNA, 120 bp, Artificial Sequence
  ENSG00000283378_6 (sequence is synthesized)
ttctccctttagcctggaaccctaggggcaggattgggatgcggatcgaagtgtacggatgtgcatataaatctgaggtggtttattttgatggacaaagtgctctgctgtatagacttg

SEQ ID NO: 798646 - DNA, 120 bp, Artificial Sequence
  ENSG00000283378_7 (sequence is synthesized)
aagccatgcagagcaatggaattctacttcacagagaaggacaacatggaaatcacattactctggaattaattaaaggaaagcttgtcttttttcttaattcaggcaatgctaagctgc

SEQ ID NO: 798647 - DNA, 120 bp, Artificial Sequence
  ENSG00000283378_8 (sequence is synthesized)
cttccactattgctcctgtgaccctcaccctgggcagcctgctggacgaccagcactggcattccgtcctcatcgagctcctcgacacgcaggtcaacttcaccgtggacaaacacactc

SEQ ID NO: 798648 - DNA, 120 bp, Artificial Sequence
  ENSG00000283378_9 (sequence is synthesized)
atcatttccaagcaaagggagattccagttacttggatcttaattttgagatcagctttgggggaattccgacacccggaagatcgcgggcattcagacgtaaaagctttcatgggtgtt

SEQ ID NO: 798649 - DNA, 120 bp, Artificial Sequence
  ENSG00000283378_10 (sequence is synthesized)
tagaaaatctttattataatggagtggatgttaccgaattagccaagaaacacaaaccacagatcctcatgatgggaaatgtgtccttctcatgtccacagccacagactgtccctgtga

SEQ ID NO: 798650 - DNA, 120 bp, Artificial Sequence
  ENSG00000283378_11 (sequence is synthesized)
cttttctgagctccaggagttatctggctctgccaggcaactctggggaggacaaagtgtctgtcacttttcaatttcgaacgtggaacagagcaggacatttgcttttcggcgaacttc

SEQ ID NO: 798651 - DNA, 120 bp, Artificial Sequence
  ENSG00000283378_12 (sequence is synthesized)
gacgtggttcagggagtttcgtcctctttcttaaggatggcaagctcaaactgagtctcttccagccgggacagtcaccaaggaatgtcacagcaggtgctggattaaacgatgggcagt

SEQ ID NO: 798652 - DNA, 120 bp, Artificial Sequence
  ENSG00000283378_13 (sequence is synthesized)
ggcactctgtgtccttctctgccaagtggagccatatgaatgtggtggtggacgatgacacagctgttcagcccctggtggctgtgctcattgattcaggtgacacctattattttggag

SEQ ID NO: 798653 - DNA, 120 bp, Artificial Sequence
  ENSG00000283428_0 (sequence is synthesized)
atggaagctgatatccagctcatgagacttatccaggaaatgcgggcagagatccacaaactggagaaagagaatcaagccctccggatgaaactcactgcaagtagtcagagagcctca

SEQ ID NO: 798654 - DNA, 120 bp, Artificial Sequence
  ENSG00000283428_1 (sequence is synthesized)
ggctcagggagagaatcaggagacgaaagggaggaggaagcgccaggacaatctccagcaacccttcagggtgccgtttccactgatgcagcaccagcagtgcaggaacaccaaggcaat

SEQ ID NO: 798655 - DNA, 120 bp, Artificial Sequence
  ENSG00000283428_2 (sequence is synthesized)
attgttagacgctattccatttcatcatcagtttgctcatctgctgtaaatgatccctggaaatctgggaaaagtcacccaaagagcggaattctagaaggtcagagaacactgaagtca

SEQ ID NO: 798656 - DNA, 120 bp, Artificial Sequence
  ENSG00000283428_3 (sequence is synthesized)
ttggcatgttctccaattaagaagcaagacatggaagaaaaggtgtttgccacagattctctcaccagcaataggaccagccaaagagcttctcctgagcatgtttgtggttgcagggac

SEQ ID NO: 798657 - DNA, 120 bp, Artificial Sequence
  ENSG00000283428_4 (sequence is synthesized)
aagacaaaggcagtcagtttcctgttacccatggacatgtcttcatattccaaaaattcaagttctttgaaacactcaccaaatcaggccacaaaccagctaagtatcattgcagaatag

SEQ ID NO: 798658 - DNA, 120 bp, Artificial Sequence
  ENSG00000283434_0 (sequence is synthesized)
acactccacaccctcattttccagcagtgagggtagactattaaggctctcatgtcatcaaggatcgaggcaatgggttaatggagactctagacatttgtttcctcaccagtgaaaatt

SEQ ID NO: 798659 - DNA, 120 bp, Artificial Sequence
  ENSG00000283434_1 (sequence is synthesized)
aaatgaagacccaggaatcactacagctatagggatgagaaggacatttcagcagctagagtgtggtggcattatttactcaggagaaaaaagtataggaaactaaagaaaatactgaag

SEQ ID NO: 798660 - DNA, 120 bp, Artificial Sequence
  ENSG00000283434_2 (sequence is synthesized)
ataatctcaaatggtgacaatctttttcaatctcatctacacttcaattttggaatagtctataatatttgagaattaacagaaatattgcaagataaaagctagcaactgttatgtaaa

SEQ ID NO: 798661 - DNA, 120 bp, Artificial Sequence
  ENSG00000283434_3 (sequence is synthesized)
agtatccattttccatggattcccgctaaaagactaacagttactaaatcatccccacaagccaactgcttttaaaaagacctctactacaacacaagatggtgccactagcatattatg

SEQ ID NO: 798662 - DNA, 120 bp, Artificial Sequence
  ENSG00000283434_4 (sequence is synthesized)
gtcaacactttgtgccattagactacttctaccaactgtcctcagccaatacattaacacatcaacatacaggtgaaaaactaaatcaattcaataaccaacctatggccaaagtgcaat

SEQ ID NO: 798663 - DNA, 120 bp, Artificial Sequence
  ENSG00000283434_5 (sequence is synthesized)
cccatagcaatcactttgcagtacctccactgggctccaataagaaggtccagagatgctcagtattgccttctcccaaatctcaggacaaaatttcacagagcttctgtgataggtttc

SEQ ID NO: 798664 - DNA, 120 bp, Artificial Sequence
  ENSG00000283434_6 (sequence is synthesized)
tgaattcaccattgttccatgccaagcatcagaacacaccttcaataggcctccactggagaagttcattgtggcctgctcaaagagccctgaactctcatttgttgcactccaaagctc

SEQ ID NO: 798665 - DNA, 120 bp, Artificial Sequence
  ENSG00000283434_7 (sequence is synthesized)
aaacaacgtcttcatctgacctcaacatgacatcatcactggagctcaatcaagcagccctgagtttacaattacccttctgtaaacctcaaacaacatcttcaagcctagatgtttgct

SEQ ID NO: 798666 - DNA, 120 bp, Artificial Sequence
  ENSG00000283434_8 (sequence is synthesized)
ggagatcactttcattgaagtctcatcaaagagtctcaagttcatcattatttcgcctccaaaatcaagaaataccttccataaacatcatttggacatcatcttccttgggacccaaac

SEQ ID NO: 798667 - DNA, 120 bp, Artificial Sequence
  ENSG00000283434_9 (sequence is synthesized)
gaaaagcccttagctcgacattgcttcaatccaaacctcagaaaacatcctcattggactacctttggacatcttcattgcagcgcaatcaaagatctttgagttcaccatcactcaaca

SEQ ID NO: 798668 - DNA, 120 bp, Artificial Sequence
  ENSG00000283434_10 (sequence is synthesized)
caaaacttcaaacaagtgacttattttggacatcaccttctttcaaacccaatcaaattgctcttacctctccattacttgactctaggcttcagaaaacacctatattgaactctaacc

SEQ ID NO: 798669 - DNA, 120 bp, Artificial Sequence
  ENSG00000283434_11 (sequence is synthesized)
atattttgtccacccatctgagaatttaccattgtttcagctcaattctcagtcaatgtttatgcttgattgtaacttccagaccacgaattcacctgtctgtcactccaagtttcagaa

SEQ ID NO: 798670 - DNA, 120 bp, Artificial Sequence
  ENSG00000283434_12 (sequence is synthesized)
taccacttcaccaaatggcaaacacagagtcacacatctaccatcaccccatccaaaaacaaacatctcaggtcaattattatcaagctccaaacactgcaccaggaacacagctgcttc

SEQ ID NO: 798671 - DNA, 120 bp, Artificial Sequence
  ENSG00000283434_13 (sequence is synthesized)
aacattaggtttcagactccagagtaaaagcagctttcagttttctccaaagacagaatcaaataaagaaattccttggactttaaagtatagtcagccctgcattgttaaaggtggaac

SEQ ID NO: 798672 - DNA, 120 bp, Artificial Sequence
  ENSG00000283434_14 (sequence is synthesized)
tgtccctgatgatgtggtaaataaaattgtcaattctatctcaaataccagaatacagagggatctctgtaggcagattttgtttagaaggatgaggggaaggccaaatcctcatcctgg

SEQ ID NO: 798673 - DNA, 120 bp, Artificial Sequence
  ENSG00000283434_15 (sequence is synthesized)
tcctcgcttgtcatcaaattatgtggtttgcttagcttgtgcttcctgcctaaaatctccatgtaaccatcttagaggaaagaaaaatcctcattgtgcaacactttctgtcataccaac

SEQ ID NO: 798674 - DNA, 120 bp, Artificial Sequence
  ENSG00000283434_16 (sequence is synthesized)
acctgaggccaattctgagggcaaaatagaagtgaaattagttcttatcctttctctaccagagactttctcatcttgtctcccattccctatgaaagaaaaccagcctaatgaagtccc

SEQ ID NO: 798675 - DNA, 120 bp, Artificial Sequence
  ENSG00000283434_17 (sequence is synthesized)
tgaagacaaccttgaaggagtagagaagatacagcagtttttccccacatctgaacgggatatccagggacttaatatgaagcaaatatggtgggcggtagcccccgaaaacaaagttat

SEQ ID NO: 798676 - DNA, 120 bp, Artificial Sequence
  ENSG00000283434_18 (sequence is synthesized)
aggccaacagccccaggctattgactggctgttttatgttaaaaaaaataattctcagccacaatccctgctcccatccacctcctcctccacttcctcctcctccaccacctcctcctc

SEQ ID NO: 798677 - DNA, 120 bp, Artificial Sequence
  ENSG00000283434_19 (sequence is synthesized)
ctcctctgttgcctctgcctcttctgactcctcttcttcatcttcttcctcctcttccttttccatctcatcctcttcctctccttccaaagagtttatgaccctcactctctcacgtcc

SEQ ID NO: 798678 - DNA, 120 bp, Artificial Sequence
  ENSG00000283434_20 (sequence is synthesized)
tgtattccgtaaggtacttagctaccatcggttgcctgcaggggtctcctggcttgagtttatatatagcaaagattaccagctgcatcccagaaaaccaaatcgaagccaatcatcatc

SEQ ID NO: 798679 - DNA, 120 bp, Artificial Sequence
  ENSG00000283434_21 (sequence is synthesized)
tcttaaaacaaagcctgtgaggaacaacaatacagtaaaatggagaaagggagcaaacacactgttcaaatttttccggacaaaatgagaaattgtgattaaattaatctttagtctgtt

SEQ ID NO: 798680 - DNA, 120 bp, Artificial Sequence
  ENSG00000283434_22 (sequence is synthesized)
aagctgaacaagaaaggagagatggaaaacctgcccctaaatgaggtttcctaacctcatgtgttttccagtgaagcgaattacaaaggcattatttactcaggagaaaaaagtatagga

SEQ ID NO: 798681 - DNA, 120 bp, Artificial Sequence
  ENSG00000283434_23 (sequence is synthesized)
gcagcttctttttccatcaagaaaatatttctggacaaaaacaaacccatagctggttggaagcagggcattgggcccagtgttaaagatttgaataagaaagatgcagaagatattaat

SEQ ID NO: 798682 - DNA, 120 bp, Artificial Sequence
  ENSG00000283434_24 (sequence is synthesized)
cataggcttatcaatgcccctaggagatctgtccccctgattgaagcaactctggcctttggaagttcatacccaagaagtatgatatcaatcttatttttaaataaagtaaaaatttga

SEQ ID NO: 798683 - DNA, 120 bp, Artificial Sequence
  ENSG00000283434_25 (sequence is synthesized)
acatttcagcagctagagtgtggtgaaatggcccaaggagaagagtacaaagcaacataatggcagagatgatgttcagatctccagatattgtgtccctgtctcagagtcgccaacaga

SEQ ID NO: 798684 - DNA, 120 bp, Artificial Sequence
  ENSG00000283434_26 (sequence is synthesized)
acttaatttttcatttccttttgacaagtgatgagcttgaaatatggcaggcacacaggcctgagactggagtacggcttcctacttcttcctccgcaaactaaagacagcgagccccag

SEQ ID NO: 798685 - DNA, 120 bp, Artificial Sequence
  ENSG00000283439_0 (sequence is synthesized)
gactgtgtgagggccgggggcctaggcagtcctgggaccccaggccatgggtgagcgagcctatcatggggcccaggtgtgctctggcaccaaccccaggaagtgccaggacttaggaga

SEQ ID NO: 798686 - DNA, 120 bp, Artificial Sequence
  ENSG00000283439_1 (sequence is synthesized)
ctcgattcttcttcttctgggcagcttcatcttgctcaacgtgtggatcaatgtggtgactctgctctggaagcatctgaagagctccttgcggattcttttccgtcattttttccccaa

SEQ ID NO: 798687 - DNA, 120 bp, Artificial Sequence
  ENSG00000283439_2 (sequence is synthesized)
agacaagcagcccagcggcagccatcccatatgtatttgctcctccgtggatcccaagaacctgtgctcaaaagtctcttcccgcgtccatcctcgcccaggcttcctgctcaggcgcgt

SEQ ID NO: 798688 - DNA, 120 bp, Artificial Sequence
  ENSG00000283439_3 (sequence is synthesized)
taaccaccttgactcctggataccagacacgaacgatgagaaggtttctgcgtgctgctgcgtgccccctaaatgtggacatgccggcgttcccagggagtctgcacggggactgtacaa

SEQ ID NO: 798689 - DNA, 120 bp, Artificial Sequence
  ENSG00000283439_4 (sequence is synthesized)
ggcggggatgatgggcgggggagaagcccctcaggtcacagcctcaaaggctcaagcctccttgctctccaggccagagacatcttcccagttcccaaagatgagcaagttggacacggg

SEQ ID NO: 798690 - DNA, 120 bp, Artificial Sequence
  ENSG00000283439_5 (sequence is synthesized)
tccatgccacctgccccaagagagcaagactaagaccccagactgtgccccagccgaggccccagctcaggcccaggtccactccccaacccacactcctgtgtgcaccccaacccaccc

SEQ ID NO: 798691 - DNA, 120 bp, Artificial Sequence
  ENSG00000283439_6 (sequence is synthesized)
ctggacccgctccacggaccacaccgctgtgcacacccctgcccactcctggacccactccaaagcccgcacccctgagggcacccactcccaggcccaggacacctcagcccaggccca

SEQ ID NO: 798692 - DNA, 120 bp, Artificial Sequence
  ENSG00000283439_7 (sequence is synthesized)
agcccacacctcagcccctaccccagctcagacgccagcccacatccaagctcacaccccagcccctacaccggccaaggcctcagctcacactaaagcccatacgtcagcccaggccca

SEQ ID NO: 798693 - DNA, 120 bp, Artificial Sequence
  ENSG00000283439_8 (sequence is synthesized)
aacccactctccgccccacacccctgagtatactcactcccaggcccacagccctgaacacacctcagcccactccccagcccaggctcctatgcctgtcccagcccacccccaggccca

SEQ ID NO: 798694 - DNA, 120 bp, Artificial Sequence
  ENSG00000283439_9 (sequence is synthesized)
tgcccctgagtacacctcagcccatgccccagcgtatatcccagaccactctcatctagtccgcagctccgttcctgtcccaacctctgccccagctcctcccggaactcttgccccagc

SEQ ID NO: 798695 - DNA, 120 bp, Artificial Sequence
  ENSG00000283439_10 (sequence is synthesized)
cactactcctgtcctagctccaacaccagcccctgtcccagcctctgcccccagccctgctccagcactggtcatggccctgactaccactcctgtccctgatcctgtccctgccaccac

SEQ ID NO: 798696 - DNA, 120 bp, Artificial Sequence
  ENSG00000283439_11 (sequence is synthesized)
ccctgcccctatcataactcctataccctctaccccacctgccttcagccatgacctctccactggccatgtggtctatgatgcccgcagggaaaagcagaatttcttccatatgtccag

SEQ ID NO: 798697 - DNA, 120 bp, Artificial Sequence
  ENSG00000283439_12 (sequence is synthesized)
cccccagaaccctgagtattcaagaaaagacttggctaccctcttcaggccccaagagggtcaggacctggtgagttctggcatatctgagcaaacaaagcaatgcagtggggatagtgc

SEQ ID NO: 798698 - DNA, 120 bp, Artificial Sequence
  ENSG00000283439_13 (sequence is synthesized)
caagcttcctgcaggatccatactgggctacctggagttgaggaatatggaatggaagaactcagatgatgccaaagataagttcccccagaccaagacttccccttactgcagcttcca

SEQ ID NO: 798699 - DNA, 120 bp, Artificial Sequence
  ENSG00000283439_14 (sequence is synthesized)
tccttgcagttctgagaagaacacagactcccaggctccattctaccccaaattccttgcctactcccgggatactgcatgtgccaagacttgctttcattctgcaaccactgcccagag

SEQ ID NO: 798700 - DNA, 120 bp, Artificial Sequence
  ENSG00000283439_15 (sequence is synthesized)
cttccaccttaatacaaacccctactgttcttccaacctccaagtctcctcagtccatcctcacttcccaattccccatcccttccctgttcgccaccatttcccaacccctgatccaac

SEQ ID NO: 798701 - DNA, 120 bp, Artificial Sequence
  ENSG00000283439_16 (sequence is synthesized)
cccaatgccctgaatgtcatgagagtctaggccttacccaagattctggccttcaaaggaccccaggcccttcaaaagactccagagttcccaggaatctggaccttgcccaaaacccag

SEQ ID NO: 798702 - DNA, 120 bp, Artificial Sequence
  ENSG00000283439_17 (sequence is synthesized)
acctctacaagaacccaggccttacccaagatccaggcctccacgagaacccaggtcttgctccaaatcaaggcctacatgagttcccaggccttccccaagattcttatctctgccaga

SEQ ID NO: 798703 - DNA, 120 bp, Artificial Sequence
  ENSG00000283439_18 (sequence is synthesized)
atccaagcccttctcaagactttggtcttcacaagaattcaggcattactcaagattcccacccccaaaagaacacaggtctgactcaagaagctggtatccttaggagcccatgtctca

SEQ ID NO: 798704 - DNA, 120 bp, Artificial Sequence
  ENSG00000283439_19 (sequence is synthesized)
cccaatcccctggcctccacaagaaaacaccatttacccaaacttctgatcttcagaggagctcaggctttacacaagactctggaatctataggaatcttgaaccaaaccaagagactg

SEQ ID NO: 798705 - DNA, 120 bp, Artificial Sequence
  ENSG00000283439_20 (sequence is synthesized)
tgatctacaaaaatcaagatctctcccaagcaactgaccaccaaaagaacctaggctcttctaaagattctggaggtcacaagaatacaggcaatgtccaagatccaggagtctgtagta

SEQ ID NO: 798706 - DNA, 120 bp, Artificial Sequence
  ENSG00000283439_21 (sequence is synthesized)
ccgcaggccttactgaagattctggatcacagaagggtccgtatgttccccaagactctgaagtcaataagagctcaggagttatccaggaatcttttctccacaagagcccaggccttg

SEQ ID NO: 798707 - DNA, 120 bp, Artificial Sequence
  ENSG00000283439_22 (sequence is synthesized)
tccaaacctctggcctcccaaagtgctcaggccttacccaaaactcaggagactacaagaatccaggacttatccaagattgtggtggccacaaagttaaaggccttactcaagattcca

SEQ ID NO: 798708 - DNA, 120 bp, Artificial Sequence
  ENSG00000283439_23 (sequence is synthesized)
acctcccaagccttacccaagccactaaagttgaaagaagatttagccttccccaagatgttggagtttacaggagctcagaacatagccaagactctaatctccacaagtgcccaggaa

SEQ ID NO: 798709 - DNA, 120 bp, Artificial Sequence
  ENSG00000283439_24 (sequence is synthesized)
ttaatcaagatcctggcccccataaagacccagcccttgtccaagactctggcctccccaagatttcaggccttacccaggaatctggcccctacaagagctcatgcctcatcccagatc

SEQ ID NO: 798710 - DNA, 120 bp, Artificial Sequence
  ENSG00000283439_25 (sequence is synthesized)
ccagcctctacaagaacccaagccctgccctaggttctgattttgtccagcttttgtccctgcttcagaccccaaagtccacactgtccctgatgaagtcatctgtgcctgagaaggctg

SEQ ID NO: 798711 - DNA, 120 bp, Artificial Sequence
  ENSG00000283439_26 (sequence is synthesized)
ctcagaaggaggacgcacagcggcacgtcctctgggctcgtgtccaactcaatgagaactcctgcccttccaaggcccaagtggtctccaatgacctgcagaccttctcagaggtacctg

SEQ ID NO: 798712 - DNA, 120 bp, Artificial Sequence
  ENSG00000283439_27 (sequence is synthesized)
tattaattgagctgcagtcatcctcctggcgggcaggcagccagcacggggcgtaccgccctgtggatacagttccttcaggctaccagaactatcgtcagatgtctatgcctacccata

SEQ ID NO: 798713 - DNA, 120 bp, Artificial Sequence
  ENSG00000283439_28 (sequence is synthesized)
tcaactggaagtcccactgccctggaccaggcacccaggcagggcatgtggtttttgatgcccgtcagagacggttggcagtgggcaaggacaagtgtgaagctctgtctcctaggcgcc

SEQ ID NO: 798714 - DNA, 120 bp, Artificial Sequence
  ENSG00000283439_29 (sequence is synthesized)
ttcatcaagaggcacccagcaactcggggaaaccatcaaggagtggggatatcagaatgtgatgagaaccttggacaaagaggggacaaaagtgcatcaggaataaagaggcgagagaaa

SEQ ID NO: 798715 - DNA, 120 bp, Artificial Sequence
  ENSG00000283463_0 (sequence is synthesized)
atggcgagtcagaacactgaacaggaatatgaagccaagctggccccatctgttggtggagagccaacaagcgggggcccatctggttcttcacctgatccaaatccagattccagcgag

SEQ ID NO: 798716 - DNA, 120 bp, Artificial Sequence
  ENSG00000283463_1 (sequence is synthesized)
gttttggacaggcacgaggaccaagccatgagccaagatccaggctcccaagataactcaccaccagaagaccgaaaccaacgcgtggtcaacgtggaagacaaccacaacctttttagg

SEQ ID NO: 798717 - DNA, 120 bp, Artificial Sequence
  ENSG00000283463_2 (sequence is synthesized)
ctctccttcccaagaaagctttggacgattgtggaggaagacacattcaagtctgtgagctggaacgatgatggagacgccgtgatcatcgacaaggatctcttccagagggaggttctt

SEQ ID NO: 798718 - DNA, 120 bp, Artificial Sequence
  ENSG00000283463_3 (sequence is synthesized)
caacggaaaggtgcagagaggatcttcaaaacagacaacttgacgagtttcattcgccagctgaacctctatggattctgcaaaacacgcccaagcaactctccaggaaacaagaaaatg

SEQ ID NO: 798719 - DNA, 120 bp, Artificial Sequence
  ENSG00000283463_4 (sequence is synthesized)
cccaactccaaagagaaagaatctggtagctacaagacgctccctacgtatctatcacatcaatgccaggaaagaagcaatcaaaatgtgtcagcagggagcccccagtgttcaggggcc

SEQ ID NO: 798720 - DNA, 120 bp, Artificial Sequence
  ENSG00000283463_5 (sequence is synthesized)
cagtggcacccagtccttcaggcgctctggcatgtggtccaagaagagtgccactaggcatcccctgggaaatgggccccctcaggaaccaaatggcccaagttgggagggcacctctgg

SEQ ID NO: 798721 - DNA, 120 bp, Artificial Sequence
  ENSG00000283463_6 (sequence is synthesized)
gaatgtcacatttacatcttcggctactacctggatggaaggcacagggattcttagtagtctggtttactcagataatggtagtgtaatgtctttgtacaatatctgttactacgctct

SEQ ID NO: 798722 - DNA, 120 bp, Artificial Sequence
  ENSG00000283463_7 (sequence is synthesized)
gttggcctccctctcagtcatgtctccaaatgagccctctgacgatgaggaggagtaggaaggctcctcagattacaagtgtagactctgtgaacagttcagacacactgcaaattcgtg

SEQ ID NO: 798723 - DNA, 120 bp, Artificial Sequence
  ENSG00000283463_8 (sequence is synthesized)
aactcacaggccactaatggcccataaaagttgccattttctaatgagaaacacatttttggtcttaataaagaaaaacaaaattccatggaaataaataataaacaatttaaatgagaa

SEQ ID NO: 798724 - DNA, 120 bp, Artificial Sequence
  ENSG00000283473_0 (sequence is synthesized)
cagtgtaagccaaaagcctcttttaaaaaagcaactctcagatttctcaatttgagtttaatactctgggtaactgagacttgggaaatcaaattgctggcacagcgttaaggcttgcga

SEQ ID NO: 798725 - DNA, 120 bp, Artificial Sequence
  ENSG00000283473_1 (sequence is synthesized)
gggacaaatgttcctttgttcttgttgatttgctgaacgtgaattggctcctggggcagcacagatgcctcacaggcggtcaagtgcgacacatttggttcgactgaatcgatgtcttca

SEQ ID NO: 798726 - DNA, 120 bp, Artificial Sequence
  ENSG00000283473_2 (sequence is synthesized)
catcccttcatgcggttgttctctgggatgaacaatcaatacacccgtcgggaggtcttctgccggaacacctgccatgatctcaagcatttctgggaaagggaaattggcaaacagact

SEQ ID NO: 798727 - DNA, 120 bp, Artificial Sequence
  ENSG00000283473_3 (sequence is synthesized)
tactaccgagaatcagaggaacgtcgtctgggaagaagcgcactgagaaagctcagagaagaatggaagcagaggctggaaacaaagctgaggctgcggaacaatccagaggacactgaa

SEQ ID NO: 798728 - DNA, 120 bp, Artificial Sequence
  ENSG00000283473_4 (sequence is synthesized)
aagaggacaaatgttggctgagagcttcctgcttcattgacacaagaagatgcaaaacactgaggtcactttgctagaagtcagtgcaaattcctgagtccctttgctataccaatcagc

SEQ ID NO: 798729 - DNA, 120 bp, Artificial Sequence
  ENSG00000283473_5 (sequence is synthesized)
tctcacactattgtttccccacctgggagaggacttacctgtaaatcctttcccagtgtttgatggcagttattggccaagtcagtcctctgtgcatgggcgccaggttattatcccaaa

SEQ ID NO: 798730 - DNA, 120 bp, Artificial Sequence
  ENSG00000283473_6 (sequence is synthesized)
tgtctctaaagatagcttatttaatatcgaagctccatgcagcattccttgcttctatataattatcttctaattttgaaatccaaatattttaaactctaaacacaccaagaggaatcc

SEQ ID NO: 798731 - DNA, 120 bp, Artificial Sequence
  ENSG00000283473_7 (sequence is synthesized)
actgtacagtggtattgccccaccatttcacctaggaaacacagctttatggaattcttgttttctttttatgagaagagaaatgcacctatctgcagaaattaaaaaacaattatcaat

SEQ ID NO: 798732 - DNA, 120 bp, Artificial Sequence
  ENSG00000283473_8 (sequence is synthesized)
attgatctaatattcttttttcttcatataaatttaattagctttttcaaaagtatgtttaccaagaataatatcagaataattttaataaaacttggttgtcctgtcatcactatgcac

SEQ ID NO: 798733 - DNA, 120 bp, Artificial Sequence
  ENSG00000283473_9 (sequence is synthesized)
ggttgtcctgtcatcactatgcacatgccttcattttattgctttattttaatctctgcatgtttacactggttggctctctgtcagcccagccaaagcatatctggccattccacagag

SEQ ID NO: 798734 - DNA, 120 bp, Artificial Sequence
  ENSG00000283473_10 (sequence is synthesized)
tgtttaccacacagattctggattttgaaatggtatagtcactcccttgccatctctcaagttcagaagcaccagggtttgatgcttccaagagtgcaaactgtaactgggcctgaggca

SEQ ID NO: 798735 - DNA, 120 bp, Artificial Sequence
  ENSG00000283473_11 (sequence is synthesized)
attattttaaccaagggaagggagaagagatgcaatgatataaagtcctgggtacttgctggctgtaagcagcacctgcaaggccttatatactatacacagaggcactgtatggcagac

SEQ ID NO: 798736 - DNA, 120 bp, Artificial Sequence
  ENSG00000283473_12 (sequence is synthesized)
gcacctgacagcaataacaagataataagttaagcaaatacactgagaatgacattatggtctaagaagaatgtgtgttcggagtcccaagctaaggaatccgggagtggccaaccggga

SEQ ID NO: 798737 - DNA, 120 bp, Artificial Sequence
  ENSG00000283473_13 (sequence is synthesized)
gtttcataccttaattgtgaaggacacctgaacccccagccatcctttggaacataggttgtacaggggatcaaagccttctgttttgggttagatggtggttgctaggtggagggtgct

SEQ ID NO: 798738 - DNA, 120 bp, Artificial Sequence
  ENSG00000283473_14 (sequence is synthesized)
aagtgaaaatgctatataaactgcatgctttttacaaacagtagtggttctcttgtccagcccactgctactggaccatccctatgtaagttcccccaataaaccctatgtctcattcac

SEQ ID NO: 798739 - DNA, 120 bp, Artificial Sequence
  ENSG00000283516_0 (sequence is synthesized)
ggcagactggacttttgagcaggtaaacacacacacatttacaccatgaatatgtgtggacatatgaacctatacatacctacatttcttctttctttttttagatggagtttcactctt

SEQ ID NO: 798740 - DNA, 62 bp, Artificial Sequence
  ENSG00000283516_1 (sequence is synthesized)
tacatttcttctttctttttttagatgactctgcctccaggttcaagtgattcttctgcctt

SEQ ID NO: 798741 - DNA, 120 bp, Artificial Sequence
  ENSG00000283516_2 (sequence is synthesized)
ggcgtgagccaccgtgcccagccacattcctaagaggacatgaacatgctacaattagatcttcacatacatctggttagctccctcaggataaattcctccaaacagaatggctgggct

SEQ ID NO: 798742 - DNA, 120 bp, Artificial Sequence
  ENSG00000283516_3 (sequence is synthesized)
ctaacaggactatatttcagacccttgatcagtttccccacccagccgtcagcaatctcccacccacccaccatgtggggccgtggaaacatggagcagggccatctccaaaggctgttc

SEQ ID NO: 798743 - DNA, 120 bp, Artificial Sequence
  ENSG00000283516_4 (sequence is synthesized)
gaggccacagtgaaggcacacatcacaatggctgttctactggagccaggcccagcaagaggtggacaggtgtggccccagctcctcacacctcctggcaaccgggcctcctcatgagaa

SEQ ID NO: 798744 - DNA, 120 bp, Artificial Sequence
  ENSG00000283516_5 (sequence is synthesized)
ttcctagaaataagcacatgagcactcggagctcagaacacggtgctgcccaggcactgttgctgggacagaggccctccagagcaccaggatggaatcatccccggatccttatcctgc

SEQ ID NO: 798745 - DNA, 120 bp, Artificial Sequence
  ENSG00000283516_6 (sequence is synthesized)
tggtccccctcctccctatggtcctcctcaccagatgtactttgaaggcccccaagttgttcagctgtatgccggcatgtccgtggtggggacgtccatgccggtgcaggccgtgtgtcc

SEQ ID NO: 798746 - DNA, 120 bp, Artificial Sequence
  ENSG00000283516_7 (sequence is synthesized)
ctactgtggaaaccgcatcatcacggtgacgacctttgtcccgggtgccctcacctggctgctgtgtaccaccctcttcctgttcgggtacgtcctgggctgctgcttcctggcattctg

SEQ ID NO: 798747 - DNA, 120 bp, Artificial Sequence
  ENSG00000283516_8 (sequence is synthesized)
cataaggagcctaatggacgtgaagcactcgtgtcccgtgtgtcagcgcgagctcttctactaccaccgcctgtgagcccccaagaaataaatgccaggggtgccacctgggcacacccg

SEQ ID NO: 798748 - DNA, 120 bp, Artificial Sequence
  ENSG00000283516_9 (sequence is synthesized)
aggccctccagagcaccaggatggaatcatccccgggtgagggctcccctcattcaggggccagggctggcagggaccgggaagaagtctactctggagaccgcaggaagcagagaggag

SEQ ID NO: 798749 - DNA, 120 bp, Artificial Sequence
  ENSG00000283516_10 (sequence is synthesized)
acgagggtccctgtgctgagctgggggctgccctcagtcctcaccacccttccccgaaatcctactgtccccaccaatcagggggccacggaacccaatagagaccattgggcagtgggg

SEQ ID NO: 798750 - DNA, 120 bp, Artificial Sequence
  ENSG00000283526_0 (sequence is synthesized)
gcgcaagcggagccggcccgacggcaggcgccgggccagggagccgcgcagcccttgcagccgccgcgggctcggaccatggaggcaggagctggaggggcagggtccgacacgaaaggg

SEQ ID NO: 798751 - DNA, 120 bp, Artificial Sequence
  ENSG00000283526_1 (sequence is synthesized)
ccatggaggcaggagctggaggggcagggtccgacacgaaagggggcggcagccccgccacccccgaggacccccggagccccgcgaagcccgccgcccccgaggatccccagatgcccg

SEQ ID NO: 798752 - DNA, 80 bp, Artificial Sequence
  ENSG00000283526_2 (sequence is synthesized)
gatgcccgcgcagcccgcgctcccgcagctcccgcgccgcccgcggaccctggacgaggacggggcgcccagcgaggacg

SEQ ID NO: 798753 - DNA, 120 bp, Artificial Sequence
  ENSG00000283526_3 (sequence is synthesized)
cccacatcggcttcgttggggagcccccgccctacgcgccgccggaccccaaggccgcgccgctgctgtacccgcccttcccgcaggtgcccgtggtcctgcagcccgcgccgtctgcgc

SEQ ID NO: 798754 - DNA, 120 bp, Artificial Sequence
  ENSG00000283526_4 (sequence is synthesized)
cgccgtctgcgctcttcccgccgcccgcccagctctacccagccgcgcccacgccgcccgcgctcttctcgccgcccgccggggccgccttccccttccccgtgtacaatggcccgatgg

SEQ ID NO: 798755 - DNA, 120 bp, Artificial Sequence
  ENSG00000283526_5 (sequence is synthesized)
ccggtctcatcgccatcgtctactcccacgaggcccgtgcagcactgggcaggggtgacctggcccaggctgaggaggcctcgcggaaggcccgctcgctggtgctcttcagcctgctct

SEQ ID NO: 798756 - DNA, 120 bp, Artificial Sequence
  ENSG00000283526_6 (sequence is synthesized)
tcggggtcttcgtgtctaccagctgggtcatctacgtggtggtggcactctaccttccctgaggctgtggctcctgcggagatgccggatgccggaatgtccacggaaaactggccgggc

SEQ ID NO: 798757 - DNA, 120 bp, Artificial Sequence
  ENSG00000283526_7 (sequence is synthesized)
cagaccctttctctggactcagatccctgccggtggccagctcttgcctgcagagggaatctgggggccagaagagggcaggcttggcagccctcaactgacttgtggctgggcctcagc

SEQ ID NO: 798758 - DNA, 120 bp, Artificial Sequence
  ENSG00000283526_8 (sequence is synthesized)
ctcctcagcctccacaggtggcccactggagcctcagtcagtgtcctaatccaaggtgtctccagagcccggccccagccgtgggacaggagcccaccagagccccatttcccaggagcc

SEQ ID NO: 798759 - DNA, 120 bp, Artificial Sequence
  ENSG00000283526_9 (sequence is synthesized)
tcctctcaaggccttcctgggactcctcttgccttcatctgtgctcttgggaggccatcgtagggaccaaagccttctctgtcttcagagccatctggaaggacactgcaacctccgccc

SEQ ID NO: 798760 - DNA, 120 bp, Artificial Sequence
  ENSG00000283528_0 (sequence is synthesized)
gtatggggaggatgtcaggcaggaccagcagcagctcctggaggggatctcagagctggacatcaggacagggggagtcccctcacagctgcttgtacatggagccctggccttccctct

SEQ ID NO: 798761 - DNA, 120 bp, Artificial Sequence
  ENSG00000283528_1 (sequence is synthesized)
ggggctggatgcctcactcaactgcttcctggcggctgctcactatggccggggccgggtggtcctggctgcccacgagtgcctgctctgtgctcccaagatggggcccttcttgctcaa

SEQ ID NO: 798762 - DNA, 120 bp, Artificial Sequence
  ENSG00000283528_2 (sequence is synthesized)
tgcggtgcgctggctggccagaggccagacaggcaaagttggggtgaacacaaatctaaaagatctgtgtcctctcctatcggagcatggcctgcaatgcagcctggagccccatctgaa

SEQ ID NO: 798763 - DNA, 120 bp, Artificial Sequence
  ENSG00000283528_3 (sequence is synthesized)
cagcgacttgtgtgtctactgctgcaaggcatacagtgacaaggaggctaagcagctgcaggagtttgtggctgagggtggggggctgctgattgggggccaggcctggtggtgggcctc

SEQ ID NO: 798764 - DNA, 120 bp, Artificial Sequence
  ENSG00000283528_4 (sequence is synthesized)
ccagaaccctggccactgccccttggctggcttccctggtaacatcatcctcaactgctttggcctcagcatcctgcctcagactctcaaagcaggctgcttccccgttcccacccctga

SEQ ID NO: 798765 - DNA, 120 bp, Artificial Sequence
  ENSG00000283528_5 (sequence is synthesized)
gatgagaagctaccacttccgcaaggcgctctctcaattccaggctatactgaaccacgagaatgggaacttggaaaagagctgtctggcaaagttgagagttgatggtgcagccttcct

SEQ ID NO: 798766 - DNA, 120 bp, Artificial Sequence
  ENSG00000283528_6 (sequence is synthesized)
acagattcctgcggagggggtccctgcttacatatccctgcacaggctcctgaggaagatgctacgagggtctggcctcccagctgtgagccgggaaaatccagttgccagtgactccta

SEQ ID NO: 798767 - DNA, 120 bp, Artificial Sequence
  ENSG00000283528_7 (sequence is synthesized)
tgaggctgcggtgctctccctggccactgggctggctcactctggaactgactgctcccagctggcccaggggcttggcacctggacctgctcctccagtttgtacccctcaaaacaccc

SEQ ID NO: 798768 - DNA, 120 bp, Artificial Sequence
  ENSG00000283528_8 (sequence is synthesized)
catcaccgtggagatcaatggaatcaacccaggcaacaatgattgctgggtgagtaccgggctctacctcctggaaggacaaaatgcagaagtctcactgtctgaagctgctgcctctgc

SEQ ID NO: 798769 - DNA, 120 bp, Artificial Sequence
  ENSG00000283528_9 (sequence is synthesized)
tggcctgagggtacagataggctgccacaccgatgaccttaccaaggccaggaagctatctcgagcccccgtggtgactcaccaatgctggatggacaggactgagcggtcagtctcctg

SEQ ID NO: 798770 - DNA, 120 bp, Artificial Sequence
  ENSG00000283528_10 (sequence is synthesized)
gcctgtcactatcaggggagctgtgcctgccccatactacaagctgggtaagacatcgctggaggagtggaagaggcagatgcaggagaacctggctccctggggagagctggccacgga

SEQ ID NO: 798771 - DNA, 120 bp, Artificial Sequence
  ENSG00000283528_11 (sequence is synthesized)
caacatcatcctgacagtgccaaccacaaaccttcaggccctgaaggaccccgagcctgtgctccgcctctgggatgagatgatgcaggctgtggccaggctggcggctgagcccttccc

SEQ ID NO: 798772 - DNA, 120 bp, Artificial Sequence
  ENSG00000283528_12 (sequence is synthesized)
tttccgccgtcctgagaggattgtggctgatgtgcagatctcagctggctggatgcattcaggataccccatcatgtgccacctggagtctgtgaaggagatcatcaatgagatggacat

SEQ ID NO: 798773 - DNA, 120 bp, Artificial Sequence
  ENSG00000283528_13 (sequence is synthesized)
gaggagcaggggtgtgtggggccccatccatgagctgggccacaaccaacagtggcatggatgggagttccccccacacactactgaggccacctgtaacctttggtcagtctacgtgca

SEQ ID NO: 798774 - DNA, 120 bp, Artificial Sequence
  ENSG00000283528_14 (sequence is synthesized)
tgaaacagtcctggggatccccagggctcaggcccatgaggctctgagccctccagagcgagagaggagaatcaaggcccacctgggaaagggagcccccctgtgtgactggaatgtatg

SEQ ID NO: 798775 - DNA, 120 bp, Artificial Sequence
  ENSG00000283528_15 (sequence is synthesized)
gacagccctggaaacatatctacagctccaacaggccttcgggtgggagccattcacccagctctttgctgagtaccagaccctctctcacctccccaaagacaacactggcaggatgaa

SEQ ID NO: 798776 - DNA, 120 bp, Artificial Sequence
  ENSG00000283528_16 (sequence is synthesized)
tctatgggtgaagaagttctctgaaaaagtgaagaagaatctggttcccttctttgaggcctggggctggcctatccagaaggaggtggctgacagcctggcctccctaccagagtggca

SEQ ID NO: 798777 - DNA, 120 bp, Artificial Sequence
  ENSG00000283528_17 (sequence is synthesized)
ggaaaaccccatgcaagtgtacctccgtgccaggaagtaaaggatgccccacaaggcgggagagaaaaggcagggtcacgccatcaactccaccatggggctttggccgtgtgctcagta

SEQ ID NO: 798778 - DNA, 120 bp, Artificial Sequence
  ENSG00000283528_18 (sequence is synthesized)
tctggagcctgaatcccgcttccaagcctgaccactagatggtggccacggtcataagaaaaaatggaacccctttctgtaaaaggtgccttgtgcttctttttattgtttttctgccta

SEQ ID NO: 798779 - DNA, 120 bp, Artificial Sequence
  ENSG00000283528_19 (sequence is synthesized)
cgctattgctttccccaagagactcacttcacctcttagtcttccagagaggatctttcatcctgccatcctgaggcttctatttttgaccaatagctctaaagaccacgggttcccata

SEQ ID NO: 798780 - DNA, 120 bp, Artificial Sequence
  ENSG00000283528_20 (sequence is synthesized)
acaacctgatatccctttctcatccctgccatccctgaataaggcttctaatttattatgctttaacaagttttcaaatagcaagcgagacacgctggaatagtggagagagccccaaac

SEQ ID NO: 798781 - DNA, 120 bp, Artificial Sequence
  ENSG00000283536_0 (sequence is synthesized)
acccagcccccagcctggccacaactgcagctgaatggacttctctctgggcctacgcttggggcctaggaataagaagcctgcccaccaagagcctcctgcctgctccaggcatggtcc

SEQ ID NO: 798782 - DNA, 120 bp, Artificial Sequence
  ENSG00000283536_1 (sequence is synthesized)
acctgctggctctccttgtctgtcctgtcccccatctgcctgtgccttcccctgccatggctgtcccccacccccatgctcctgcactgcctgtccctctagtgcagctccctgccccgc

SEQ ID NO: 798783 - DNA, 120 bp, Artificial Sequence
  ENSG00000283536_2 (sequence is synthesized)
ttgtcccagcctcccgggcccaccctgcacctgctcttgcccccgctgccctgcctgtcctcccttgacttgtccccataactcctgtgtctcatgctccggtccacccttgacctgctg

SEQ ID NO: 798784 - DNA, 120 bp, Artificial Sequence
  ENSG00000283536_3 (sequence is synthesized)
ccaggctcccttggctgctgtagctgctgcttcaggggacaacaacgcacttctcgggggcgctgtctgatcatttaggtggactgttgcccaccaggagactgtcagtttcctggagca

SEQ ID NO: 798785 - DNA, 120 bp, Artificial Sequence
  ENSG00000283536_4 (sequence is synthesized)
cttccgtactgctgccctggcaaggaggcaggagctgggtggagtgggagagggatcagctggacccctccctcaagcaggtagaggcagctggctttccccagtcctggagaggtggca

SEQ ID NO: 798786 - DNA, 120 bp, Artificial Sequence
  ENSG00000283536_5 (sequence is synthesized)
gggggaatctgctttgaagttagtttctggatgtgctcctgctggttccagaacctcttcctctgcaacctctggaatggaaggtgttcttctcagagcctcccccacggcccctgaagg

SEQ ID NO: 798787 - DNA, 120 bp, Artificial Sequence
  ENSG00000283567_0 (sequence is synthesized)
acagtggggaggccttggcccaattcccagccctgcctcctccccagcccggggtgcctgggcctccagagtcccctgcccctccctgctcacagatttggggggtgctttggtcagcaa

SEQ ID NO: 798788 - DNA, 120 bp, Artificial Sequence
  ENSG00000283567_1 (sequence is synthesized)
tattgtggggagttactccagaccaccctggccatgcaccccggggtccccgaaggccctggggtctccgagcccggcccccgggagctgtgtgcctttgtgagcggggcggccgcccac

SEQ ID NO: 798789 - DNA, 120 bp, Artificial Sequence
  ENSG00000283567_2 (sequence is synthesized)
atgctgcgggccctgcagccccggcgcacccggccccccaagaggcggcccaaccacagaaggtttctgcacaaccagatctgcaggcagttcaccaagattgaggctgccacccagcgc

SEQ ID NO: 798790 - DNA, 120 bp, Artificial Sequence
  ENSG00000283567_3 (sequence is synthesized)
ctggccctctccatcctgtcccaggaggcacctccccagagaccctcgctccaaaagccacccccaccgcctccatcccccttcctgggagtggcctgtgctgtggcccccactgaggct

SEQ ID NO: 798791 - DNA, 120 bp, Artificial Sequence
  ENSG00000283567_4 (sequence is synthesized)
ccccatgccagcgccagcctgagtctcgctgccctggacacctctaccctcgacctctttgacaacattgcgctcaccccagagtgtgcctcaatgccatgggacccctcctctggttct

SEQ ID NO: 798792 - DNA, 120 bp, Artificial Sequence
  ENSG00000283567_5 (sequence is synthesized)
tccccagcatgccctgggggaagaggctgatctcgtggctcccgactggggttgggtggactgctgggaggtgcctcgtgcctgggattctcaggggatccccgagggttgggggaccag

SEQ ID NO: 798793 - DNA, 120 bp, Artificial Sequence
  ENSG00000283567_6 (sequence is synthesized)
ctccccatgaggccaatcacaacccagcccagaacccaggacaagccagaggcccctccacgacggctctacagccctctccaggagcccccaacctgtccactcccttcctggcagccc

SEQ ID NO: 798794 - DNA, 120 bp, Artificial Sequence
  ENSG00000283567_7 (sequence is synthesized)
ctgggaaaataaaccaacccagacccccacttcagaccactgcctcaggggtctcctcctgggcccaggggccccacctccacctcttcttgctttcctgccttcccccttccttctgcc

SEQ ID NO: 798795 - DNA, 120 bp, Artificial Sequence
  ENSG00000283567_8 (sequence is synthesized)
tagccccatctgggcatccacccctcactctcacccaggctcacctctgcctaatgtctgctctcctgtcatttattcccaaagatgtatcgagcgcctactatgggccaggcccaggtc

SEQ ID NO: 798796 - DNA, 120 bp, Artificial Sequence
  ENSG00000283567_9 (sequence is synthesized)
taggacttgaggattcagctgtgaacgaggcagacgggacccctgcctcagggagctccctgttctgtgtgcatgtgtgtgttttggcggggaacagacaataaaagagtatatccatgc

SEQ ID NO: 798797 - DNA, 120 bp, Artificial Sequence; identical to SEQ ID NO: 766160
  ENSG00000283594_0 (sequence is synthesized)

SEQ ID NO: 798798 - DNA, 120 bp, Artificial Sequence; identical to SEQ ID NO: 766158
  ENSG00000283594_1 (sequence is synthesized)

SEQ ID NO: 798799 - DNA, 120 bp, Artificial Sequence; identical to SEQ ID NO: 766159
  ENSG00000283594_2 (sequence is synthesized)

SEQ ID NO: 798800 - DNA, 120 bp, Artificial Sequence
  ENSG00000283597_0 (sequence is synthesized)
atgaaggttcagtcgtttggggaaagggttgtgcttttcattctaaacgccattatttttggaagattggagagaaatttggatgatgatgacatgttttttctacctcactctgtgaag

SEQ ID NO: 798801 - DNA, 120 bp, Artificial Sequence
  ENSG00000283597_1 (sequence is synthesized)
gaacaagctaaaatcctgtggagacgtggagcggctgttgggttttacacaaccaagatgaaaggcagactgtgtggtgatggcaccggtgcatgctacctgctgcctgtctttgacacc

SEQ ID NO: 798802 - DNA, 120 bp, Artificial Sequence
  ENSG00000283597_2 (sequence is synthesized)
tgctcgatgtctcctgccatgtaccaagcacacccaggaaattccgaggacgtgagccgtcatgcgaggacttctcagaatgacagacccagacagcctgcccctggagacggcagcaag

SEQ ID NO: 798803 - DNA, 120 bp, Artificial Sequence
  ENSG00000283597_3 (sequence is synthesized)
gagaggatgtgtggagaagaactggaagacacaaaggatgatccagagtgtggagtggaagaggaggatgccgggctggcagggcagccaccaggcaagcttacaaggtccagtccctga

SEQ ID NO: 798804 - DNA, 120 bp, Artificial Sequence
  ENSG00000283597_4 (sequence is synthesized)
aactccgcaagcaaatgaaaaacatcctggaattgtgaattcccctgtggcaagtggttatcgttcgtggtggcagtctgctgttacgagcataataggatgaatatggactttgacgtc

SEQ ID NO: 798805 - DNA, 120 bp, Artificial Sequence
  ENSG00000283597_5 (sequence is synthesized)
agatggagctgacttggaatcctggctctgccagctgactggcagaggggttgtggctgtttacataaaggaatcctggtgctccacggaagatgcactaagaacctctgatcctgcaag

SEQ ID NO: 798806 - DNA, 120 bp, Artificial Sequence
  ENSG00000283597_6 (sequence is synthesized)
gcccatctgggccaggtccagaggcctgcctgggctcccaggattcgggtctgagacttgtgtgtctgggagtgtaccttccctggggatctttgaggggccagtgaccccacgggcccc

SEQ ID NO: 798807 - DNA, 120 bp, Artificial Sequence
  ENSG00000283597_7 (sequence is synthesized)
acctacctctgaggtgggctcaggctctagagtacctgagaacgtgctgcgctcagcatgcgacaccgtgccacagtgaggaagtatttccctaagttaattgttgacagttcctaaacg

SEQ ID NO: 798808 - DNA, 120 bp, Artificial Sequence
  ENSG00000283597_8 (sequence is synthesized)
tttcagaagcttactcgttaaaactaatgtggtttctgtttctcaggataaattggtgggactttaccggaaccacagggatgttttactgaatgtacctctttccttatagaagtttaa

SEQ ID NO: 798809 - DNA, 120 bp, Artificial Sequence
  ENSG00000283597_9 (sequence is synthesized)
agatgctcaggaaggggccacacccgttccatctgggctgtagaaacccattgcaggtttgtgcatgccagccctgctgttgccgtgagaccacggacaccaaagaggtttgcaggggta

SEQ ID NO: 798810 - DNA, 120 bp, Artificial Sequence
  ENSG00000283597_10 (sequence is synthesized)
cacgtgtcctttccggacaccaaagaggtttgcaggggtacacgtgtcctttcccgggaggcttcagccacatcagtgctgatgtgcctcaaggcacatgagtgccttgagggcaggggc

SEQ ID NO: 798811 - DNA, 120 bp, Artificial Sequence
  ENSG00000283597_11 (sequence is synthesized)
agtggctggatggtgcctactgtaggcctggagctctcttctggcctggtatacagaaggcactcagagagctcatatgggaagtactgggtaggaatttgggcagatggtgcttctaga

SEQ ID NO: 798812 - DNA, 120 bp, Artificial Sequence
  ENSG00000283597_12 (sequence is synthesized)
ctggctcgaatgtgacattggcttcccccttctcaaatactgatggagccctgtttggtcgctatagtgtatggccgctcttgggatgcagagacaaggacctgctcttaggccccaggt

SEQ ID NO: 798813 - DNA, 120 bp, Artificial Sequence
  ENSG00000283597_13 (sequence is synthesized)
ccaatgggctaggcagagttgtcccagggccgcctgccctcctcaagggtggggcgcaaatccaggctgctttagggagcccaaagcctgctccccgagaggtggggtggtgctttctct

SEQ ID NO: 798814 - DNA, 120 bp, Artificial Sequence
  ENSG00000283597_14 (sequence is synthesized)
gctattgggcccagccttgctgatttcagtaggatttttcccagagaaagctggtcaggccctcttgaggcagacgacccaagttcttgcccctgcttttgggaaaatgcaaatccaatc

SEQ ID NO: 798815 - DNA, 120 bp, Artificial Sequence
  ENSG00000283597_15 (sequence is synthesized)
ccattgccgaggacatcccaaacccctctgtgctcatcactgactttggagaagccaggggccctgctgcctctgctccttgccattggagttcagctgcaggatcagccctgggctgcc

SEQ ID NO: 798816 - DNA, 120 bp, Artificial Sequence
  ENSG00000283597_16 (sequence is synthesized)
tggttactttgttgacagaagaagagggttttacctttttaggatgtaataaagcccctcctgtggcctgatgaggagactaccaacagtcccaagttctgggaatatatcgtctgttcc

SEQ ID NO: 798817 - DNA, 120 bp, Artificial Sequence
  ENSG00000283597_17 (sequence is synthesized)
cttgagcagtcaaaggacacacatggtgggacctgttatttattcatccatgcacccagctgtccatctctctgtccatccatccgtctatccatccatcatccatccatccacctaacc

SEQ ID NO: 798818 - DNA, 120 bp, Artificial Sequence
  ENSG00000283597_18 (sequence is synthesized)
atccatctattcaatccattcatcatccatctatccatccctccatccatccattcatccatctatccatccatcatccgtccatcctccatccatcatccatccatccatcctccatcc

SEQ ID NO: 798819 - DNA, 79 bp, Artificial Sequence
  ENSG00000283597_19 (sequence is synthesized)
tcctccatccatcatccatccatccatccatccatcttccatccatccatcctccatccatccatctatccatccatcc

SEQ ID NO: 798820 - DNA, 120 bp, Artificial Sequence
  ENSG00000283597_20 (sequence is synthesized)
catccatccatccatccatccatccttcatccagccatccatctatccatacatttatcatccatccatccatcatccatccgtccatcctccatccatccattcatcctctatccatcc

SEQ ID NO: 798821 - DNA, 88 bp, Artificial Sequence
  ENSG00000283597_21 (sequence is synthesized)
cctccatccatccattcatcctctcccatcctccatccatccatccatcctccatccgtcatccatccgtccatccatccatccatcc

SEQ ID NO: 798822 - DNA, 120 bp, Artificial Sequence
  ENSG00000283597_22 (sequence is synthesized)
aacagatattcagcatgctttctcagggacatgctctgtgctggggacaggggatataagtgaggtatggatactggcctcaggaaactctcttctctttggaggaatctcttctggagt

SEQ ID NO: 798823 - DNA, 120 bp, Artificial Sequence
  ENSG00000283597_23 (sequence is synthesized)
gttccactggagttttcatctctcttgcacccattacaaagatggaagggtccaattgactagaaatatagtttagagattcatatggagacatcatgaagcctgcctcccccctgcccc

SEQ ID NO: 798824 - DNA, 120 bp, Artificial Sequence
  ENSG00000283597_24 (sequence is synthesized)
ttatacttgggctctctgtgcaggtggcacagaccataaaaggagagtgaagtctacagcctagagggtgccctgtgtgtggtgtcagatgtaacctttcacatgggatgtgtgtgctgt

SEQ ID NO: 798825 - DNA, 120 bp, Artificial Sequence
  ENSG00000283597_25 (sequence is synthesized)
gagcattgtgctatttgagatgaatggttagtattttgtgtttacatgaaaataaatgtttaaaaatgtctcaggggtttgatgaagttactattcaataaaagaaacctctcagggaag

SEQ ID NO: 798826 - DNA, 120 bp, Artificial Sequence
  ENSG00000283597_26 (sequence is synthesized)
gcatgtatccagtagatgtgttggaagatgatcctgacgcacaacaggaagcagctctggcttaccatgcctcacttagggaaggagctggggccccagctgaggttttctgtcttccca

SEQ ID NO: 798827 - DNA, 120 bp, Artificial Sequence
  ENSG00000283597_27 (sequence is synthesized)
tgccatgtaccaagtctgcaggcagttcctgctggtctgtctggaggagcgaggacgcctgtgggaggtggagcgccggggggcctggggccagtgcaccaatatctggctaaaggttca

SEQ ID NO: 798828 - DNA, 120 bp, Artificial Sequence
  ENSG00000283597_28 (sequence is synthesized)
gcttcaccaggcaaggcttccagactgacacacccaggaaattccgaggacgtgagccgtcatgcgaggacttctcagaatgacagacccagacagcctgcccctggagacggcagcaag

SEQ ID NO: 798829 - DNA, 120 bp, Artificial Sequence
  ENSG00000283597_29 (sequence is synthesized)
gcaaaaagcccgtcccaagccctgcatgggctcctactgcacttcaggatttgggggaatgcagaatcgtggtctttgagttttcattaattcaataaagatttctcaaaagcctaaatt

SEQ ID NO: 798830 - DNA, 120 bp, Artificial Sequence
  ENSG00000283597_30 (sequence is synthesized)
ctagacccaagacagtgggaattaaacagggctgaatatgacgctattggctataccaggaccacgcctgagcattgcatgcacgctccagctatgcataacttatttattttaaaagaa

SEQ ID NO: 798831 - DNA, 120 bp, Artificial Sequence
  ENSG00000283597_31 (sequence is synthesized)
ggaaggaagagagggagggaaacaaggtgtttcttaagagtagaggaggggagaggcaacttgttgctttcactggcaacagttaactccataagcaatttcctcacttaaaagaaaaac

SEQ ID NO: 798832 - DNA, 120 bp, Artificial Sequence
  ENSG00000283597_32 (sequence is synthesized)
gccttgttaaaacacatttgccttgagataaaagggtttcttttgggacgatcccaaaatgactttgcttgattcaattaagcaagacctaacgaaagagaattccagcttaagatacgc

SEQ ID NO: 798833 - DNA, 120 bp, Artificial Sequence
  ENSG00000283599_0 (sequence is synthesized)
atgagctccacggatgaagtgtccgtttgcagggctggtttaggcccagagggtggcgagcaggccggcgcccacaccgccagcccgggagccccacggggtgacggccacggccgagac

SEQ ID NO: 798834 - DNA, 120 bp, Artificial Sequence
  ENSG00000283599_1 (sequence is synthesized)
ctcaattttggggggcagcgcagtggcaagggtaagggcaagggcgagagcgggttcacagatcccgagagcttcagcttcgagtctgagagcgaattgatagagcagggaagggtggtg

SEQ ID NO: 798835 - DNA, 120 bp, Artificial Sequence
  ENSG00000283599_2 (sequence is synthesized)
ctctggggccaggaaggccggcctggcaccccggtcgacgaccaagcgggtggtggggactactctttctacctggctgatgagccagccaccatcatgccgccgtccagcgtccaggga

SEQ ID NO: 798836 - DNA, 120 bp, Artificial Sequence
  ENSG00000283599_3 (sequence is synthesized)
cacccgtccccagaaggcgccactgccaaagggtccactgacatctgggcggacctggaggtcggtcccagttggagaggtgcgctgagccccagccctggagaatggcagcaggcctct

SEQ ID NO: 798837 - DNA, 120 bp, Artificial Sequence
  ENSG00000283599_4 (sequence is synthesized)
gccggccctctccacctcagtgttcctgggccaggaccggcctgggagaacccagaaaggggctcgaagagcagattgagcttccaagtggatccccagcagccctccgcggaaggcccc

SEQ ID NO: 798838 - DNA, 120 bp, Artificial Sequence
  ENSG00000283599_5 (sequence is synthesized)
gccgggctgaatactgacgactctgattccgcagatgagagcagcgacttaccggtgattagggtgatcattagcaccaaagaaggaagccaggccaagcccggaagccccaagaagcca

SEQ ID NO: 798839 - DNA, 120 bp, Artificial Sequence
  ENSG00000283599_6 (sequence is synthesized)
ggagacacttgcggacgccgcagtttccaccgcagggagagttaccttcaggttcagggacctctcctgatctctcctccccgcagactcaccccagtcgtggagaggccggctgtggga

SEQ ID NO: 798840 - DNA, 120 bp, Artificial Sequence
  ENSG00000283599_7 (sequence is synthesized)
tggggaaagaggggggtcaggcccagctgctcaggagctgccgttagagggcccctaccccggggcactctgggaaggaaggtggcccaggagaagaaatccctagagggtgcaccagaa

SEQ ID NO: 798841 - DNA, 120 bp, Artificial Sequence
  ENSG00000283599_8 (sequence is synthesized)
ctggccctgcggggagcctttcctgcctgggggcagagactttcagcagttccacctgatccggctagcttcccgccagtgtctggcgtggggctcctggggaagtccgtgagacccaag

SEQ ID NO: 798842 - DNA, 120 bp, Artificial Sequence
  ENSG00000283599_9 (sequence is synthesized)
gagcccaagcacagcagccctgggaagaaacctgcaggaaggaagaccagggagtcccaggctgcggccagagaagataatgacccaaatagagatgaggtcccaagggcccaacttccc

SEQ ID NO: 798843 - DNA, 120 bp, Artificial Sequence
  ENSG00000283599_10 (sequence is synthesized)
acacagaagccagagctgatttctctgtccgtgcgtcgtggagaatacagcagtggtgatcccaacatcagagctccccaagtactaggaacctcacagccctcggcctttaccttgaga

SEQ ID NO: 798844 - DNA, 120 bp, Artificial Sequence
  ENSG00000283599_11 (sequence is synthesized)
cgcctggtgcccagatgccatgcatcctccggtgactggcagccacctgtccatcccccaagaccggaaaggcagcagcagcccccgggagcccagggctgtcctcggtgcatcttgctg

SEQ ID NO: 798845 - DNA, 120 bp, Artificial Sequence
  ENSG00000283599_12 (sequence is synthesized)
cagagggaaattgaagaccttagagaccaactagctgccatgcagttcctcactgacaagttccaggacctgtgaaccagcatcttcctacaagatgagcagctgctacctttggagctc

SEQ ID NO: 798846 - DNA, 120 bp, Artificial Sequence
  ENSG00000283599_13 (sequence is synthesized)
cggagctgcagctaagcgggttccctccatatcctgttcagccagggcttcctctcttctgctgcatttgcccccttcccaacacagttcaaagcagtgtgaaataaagttgttctcata

SEQ ID NO: 798847 - DNA, 120 bp, Artificial Sequence
  ENSG00000283632_0 (sequence is synthesized)
ccaactcagatccaagctcccagcagtcctggctgaagtagcctggggacaggacagcagcgggaacagaaggacgggcaggaggacagaggtccccacctgtcaaaatgcctatcctga

SEQ ID NO: 798848 - DNA, 120 bp, Artificial Sequence
  ENSG00000283632_1 (sequence is synthesized)
agaatctgggagtgtcagaccctaaggtgccccgggcggggaccctgcccctgaggtcctctcggaacccctttgaagaagtttcagggctggaggaagaagaggccggggagctggggt

SEQ ID NO: 798849 - DNA, 120 bp, Artificial Sequence
  ENSG00000283632_2 (sequence is synthesized)
ccctccccaatggaacatcttgtcgccgccgcgccaccctggagaagcttgcgggcctggcccccttccggctgggctgggccccgggccggcgggcaggcagccctggggatgggcagc

SEQ ID NO: 798850 - DNA, 120 bp, Artificial Sequence
  ENSG00000283632_3 (sequence is synthesized)
cccgctctttcttgggccgtgtgctggtaccagggatacgcaggagctcagcagattttggcctcctggcccggctgcatgggacccgagcccacggcgacgaggaggcagcgggggagg

SEQ ID NO: 798851 - DNA, 120 bp, Artificial Sequence
  ENSG00000283632_4 (sequence is synthesized)
ccgcccggagactggccttcctgagactggggcgtggatccaagccccagcgtgcgtccctggctgagagagtggtgcctgcaggcgaggcagctccagagcccccacccaaggtcccag

SEQ ID NO: 798852 - DNA, 120 bp, Artificial Sequence
  ENSG00000283632_5 (sequence is synthesized)
agcccccaaagatgaaggagccattgtcagtgctggagatcctgagcctgatccagcagcgcgaactagcgcgtgcggacgagcacatcctggagctagaggccgaggagctggcgccgt

SEQ ID NO: 798853 - DNA, 120 bp, Artificial Sequence
  ENSG00000283632_6 (sequence is synthesized)
gagcacatcctggagctagaggccgaggagctggcgccgtcgaggggcggcgcgcctgggcctcccaaggccgagggcgctggcgggggccgccgggcgcgggacgtggcgctgctgtac

SEQ ID NO: 798854 - DNA, 80 bp, Artificial Sequence
  ENSG00000283632_7 (sequence is synthesized)
cgctggcgggccccgggccgggagcgtgcgccggggctggcgcggtggcgcagctgggccaggtgctggtacaggaggag

SEQ ID NO: 798855 - DNA, 80 bp, Artificial Sequence
  ENSG00000283632_8 (sequence is synthesized)
aaactacgcgcacgctgggccgaagccgtggcgcgcgcggcccgggagcgcctagaggcagcggctcccggggcgcccgg

SEQ ID NO: 798856 - DNA, 80 bp, Artificial Sequence
  ENSG00000283632_9 (sequence is synthesized)
aggatatggccgtggtgcggggccgcctggcgcccgcctaccccgccggcctgggcgccttcggcgtctacctgcgcggc

SEQ ID NO: 798857 - DNA, 120 bp, Artificial Sequence
  ENSG00000283632_10 (sequence is synthesized)
gtcgcaggctgccgctggccgaccgctacgcgctgctgcactggcacaatcaggtctaccccagagaggtcctagggctggtggacatggccgccctggagaatggggagctggggcccc

SEQ ID NO: 798858 - DNA, 120 bp, Artificial Sequence
  ENSG00000283632_11 (sequence is synthesized)
ttctctcccctggcaccctgcggggtttggaggatgaatgcgtcacagatgttaaggctcagacccgggctgcccttctccgtgtgctgcaggaggacgaagagcactgggggagcctgg

SEQ ID NO: 798859 - DNA, 120 bp, Artificial Sequence
  ENSG00000283632_12 (sequence is synthesized)
ttggggagcggatggcccactgctgcctaggcgggctggcagagttcctgcagagcttccagcagcgtgtggagcgattccatgagaacccagcagtccgggagatgctacctgacacct

SEQ ID NO: 798860 - DNA, 120 bp, Artificial Sequence
  ENSG00000283632_13 (sequence is synthesized)
atatcagcaagaccatcgccctggtcaactgcggccccccactgagagctctggccgagcgcctggcccgggtggggcccccagaaagcgagccggcccgggaagcatctgctagtgctc

SEQ ID NO: 798861 - DNA, 120 bp, Artificial Sequence
  ENSG00000283632_14 (sequence is synthesized)
tggaccatgtgacccggctctgccaccgtgtcgtggccaacctgctgttccaggagctgcagccacacttcaacaagctgatgcgccggaagtggctgagcagcccggaggccctggatg

SEQ ID NO: 798862 - DNA, 120 bp, Artificial Sequence
  ENSG00000283632_15 (sequence is synthesized)
gcatcgtgggcacgctgggtgcccaggccctggccctgcgcagaatgcaggacgagccttaccaggcgctggtagccgagctacaccggcgggcgctggtcgagtacgtgcggcccctgc

SEQ ID NO: 798863 - DNA, 120 bp, Artificial Sequence
  ENSG00000283632_16 (sequence is synthesized)
ctgctccgtgggcgcctgcgctgcagctcggcgcggacccgcagccgcgtggccggcaggctccgggaggacgcggcgcaactgcagaggctgttccggcggctggagtcccaggcctcg

SEQ ID NO: 798864 - DNA, 120 bp, Artificial Sequence
  ENSG00000283632_17 (sequence is synthesized)
tggatgccgtggtgccccatttggctgaagtcatgcagctggaagacacgcccagcatccaggtggaggtgggagtgttggtgcgcgactacccagacatcaggcagaagcacgtggcag

SEQ ID NO: 798865 - DNA, 120 bp, Artificial Sequence
  ENSG00000283632_18 (sequence is synthesized)
ccctcctcgacatccgtggcctgcgcaacacagccgcccgccaggagatcctggccgtggcccgggacctggaactctctgaggagggagccctgtcaccccctcgggaccgtgccttct

SEQ ID NO: 798866 - DNA, 120 bp, Artificial Sequence
  ENSG00000283632_19 (sequence is synthesized)
ttgcagacatccctgtgccccgcccatctttctgtctcagcctccctctcttcctgggccgcctccccctctcccggctggccaggcccagtttggcctgtctgcctcggccccggcctc

SEQ ID NO: 798867 - DNA, 120 bp, Artificial Sequence
  ENSG00000283632_20 (sequence is synthesized)
cgtctctagcgcgacctcgggcccagcgctgagggtcacccaaccgccggccttagtgaccccatctatgctgctgacaagccaacctcccgtacggcgcccctcctgactccctgcctg

SEQ ID NO: 798868 - DNA, 120 bp, Artificial Sequence
  ENSG00000283632_21 (sequence is synthesized)
actccctgcctgggaccacacacccctgggatagaaagacccttagatgtcttttcacccaaccccaaactccctgtacagaagggaaacaaacgccaggcacggtggctcatgcctgta

SEQ ID NO: 798869 - DNA, 68 bp, Artificial Sequence
  ENSG00000283632_22 (sequence is synthesized)
ccccctatctctacaaaaaataaaaaattagctgggcacggtggtgtgtgcctgtagtcccagctact

SEQ ID NO: 798870 - DNA, 89 bp, Artificial Sequence
  ENSG00000283632_23 (sequence is synthesized)
ctctacaaaaaataaaaaattagctgggcactgaggctgaggctggaggatcactggagttcgaggctgcagtgagctatgactgtgcc

SEQ ID NO: 798871 - DNA, 120 bp, Artificial Sequence
  ENSG00000283644_0 (sequence is synthesized)
ggcaaatccttcaaatgcaagaagcccaccaaaaatgtgcaggtctttttaatcaacagacaactgggcaggaacagaagtgacactgacctgtcaaagtggctatggatgctgccataa

SEQ ID NO: 798872 - DNA, 86 bp, Artificial Sequence
  ENSG00000283654_0 (sequence is synthesized)
agtgagccagggaacaaggggacggaagacaggatccaggctgtatctacggagagacacagaagggagcgccactagtcctcagg

SEQ ID NO: 798873 - DNA, 120 bp, Artificial Sequence
  ENSG00000283654_1 (sequence is synthesized)
gttgctgcaagccgatgtctacatgatgagacacagaagtctgtgagccttctcaggccccctttctcccaactcccctcaaaatctcgctcttcctccctcaccctccctagctcccgt

SEQ ID NO: 798874 - DNA, 120 bp, Artificial Sequence
  ENSG00000283654_2 (sequence is synthesized)
gatcctcaacccctacgaatccaaagctgctatctaggagatcatatatcagatggagcttgggatcctgagggagaagggatgagagggggatcccgagccctggccgcagtgagagag

SEQ ID NO: 798875 - DNA, 120 bp, Artificial Sequence
  ENSG00000283654_3 (sequence is synthesized)
gccactcagcgaatccaggctgttctagcagtgcaaggacccctgcttctgagtcgagaccctgcacagtattgccacgctgtctggggagacccagatagcccaaactaccacaggtgc

SEQ ID NO: 798876 - DNA, 120 bp, Artificial Sequence
  ENSG00000283654_4 (sequence is synthesized)
agcctcttgaacccaggatacaaaggagagagttgcctgggggcaaagattcctgacacccatcttcgcggttatgccttgtggccggagcagggtcccccacaactggtccagccagat

SEQ ID NO: 798877 - DNA, 120 bp, Artificial Sequence
  ENSG00000283654_5 (sequence is synthesized)
cccccacaactggtccagccagatgggcctggggtccaaaacactgattttctcctgtatgtgcgagttgctcacacttccaagtgccaccaagagacagtctcactctgttgcccaggc

SEQ ID NO: 798878 - DNA, 120 bp, Artificial Sequence
  ENSG00000283654_6 (sequence is synthesized)
acggggttttgtcatgttgcccaggctgtgtctcaaactcttgggctcaagcaatctgcccaccttggcttcccaaagtatcaggattacaggcccctctgtcatagcctatgctgcctg

SEQ ID NO: 798879 - DNA, 120 bp, Artificial Sequence
  ENSG00000283654_7 (sequence is synthesized)
acaggcccctctgtcatagcctatgctgcctgctgccagctggactcagaagacaggcccctcgctggtaccattgtctactgtgcccaacatctcaccagccccagcctcagccacagt

SEQ ID NO: 798880 - DNA, 120 bp, Artificial Sequence
  ENSG00000283654_8 (sequence is synthesized)
gacatcgtcatggccacattacatgaattgctccatgccttgggtttctctggacagctcttcaagaaatggcgagactgcccctcaggattcagtgttagagagaactgttctacaagg

SEQ ID NO: 798881 - DNA, 120 bp, Artificial Sequence
  ENSG00000283654_9 (sequence is synthesized)
caactagtgacaaggcaagatgagtggggacaactgcttctcaccaccccagctgttagcctcagcctggccaaacacttgggagtgtcgggggcttccctgggtgttcccttggaagaa

SEQ ID NO: 798882 - DNA, 120 bp, Artificial Sequence
  ENSG00000283654_10 (sequence is synthesized)
gaggagggccttctgtcctcgcactgggaggccagactactccagggttctttaatgactgctacctttgatggagcccagcgcactcgactcgacccaatcaccctcgctgccttcaaa

SEQ ID NO: 798883 - DNA, 120 bp, Artificial Sequence
  ENSG00000283654_11 (sequence is synthesized)
aggtcaaccacagcgctgcagaggagctgttgtggggccagggatctggcccagaatttggcttggtgaccacatgtgggactggctcctcagacttcttctgtactggcagtgggctgg

SEQ ID NO: 798884 - DNA, 120 bp, Artificial Sequence
  ENSG00000283654_12 (sequence is synthesized)
gctgccactacctgcacctggacaagggaagctgctcctcagaccccatgctggaaggctgccgcatgtacaagcccttagccaatgggagtgaatgctggaagaaggaaaacggattcc

SEQ ID NO: 798885 - DNA, 120 bp, Artificial Sequence
  ENSG00000283654_13 (sequence is synthesized)
ctgctggggtggataatccccatggggagatctaccatccccagagccgttgcttctttgccaacctcacttcacagctgctccctggggataagcccaggcatccttctcttaccccac

SEQ ID NO: 798886 - DNA, 120 bp, Artificial Sequence
  ENSG00000283654_14 (sequence is synthesized)
acctcaaggaagcagagctcatgggccgctgctacttacatcaatgcacagggaggggagcttacaaggtgcaggtggagggctcgccttgggtcccatgccttcctggaaaggttatac

SEQ ID NO: 798887 - DNA, 120 bp, Artificial Sequence
  ENSG00000283654_15 (sequence is synthesized)
agatacctgggtactatggtcttctcttctgtccccggggtcggctgtgtcagactaatgaagatatcaatgctgttacttccccacctgtgagtctttcaaccccagatccactattcc

SEQ ID NO: 798888 - DNA, 120 bp, Artificial Sequence
  ENSG00000283654_16 (sequence is synthesized)
agctctctttagaattagctgggcctccaggacactctctggggaaggaacagcaagaagggctagctgaagcagtactggaggctttggcgagcaaaggcggcactggcaggtgctatt

SEQ ID NO: 798889 - DNA, 120 bp, Artificial Sequence
  ENSG00000283654_17 (sequence is synthesized)
tccatggcccatcaattaccactagcttggtgtttactgtgcatatgtggaagtcccctggctgccaagggccttcagttgctacactgcacaaggccctgactctgactctccagaaaa

SEQ ID NO: 798890 - DNA, 120 bp, Artificial Sequence
  ENSG00000283654_18 (sequence is synthesized)
aacccctagaagtgtatcatggaggagccaactttaccacacaacccagcaagttgctggttacttcagaccataatccctccatgacccacctaaggctgtccatgggactctgcctaa

SEQ ID NO: 798891 - DNA, 120 bp, Artificial Sequence
  ENSG00000283654_19 (sequence is synthesized)
tgctgctaatcctggtgggtgtaatgggaaccacagcctaccagaaaagagccactcttcctgtgagaccatctgcctcttaccattcaccagagctccacagcacaagggtcccagtta

SEQ ID NO: 798892 - DNA, 120 bp, Artificial Sequence
  ENSG00000283654_20 (sequence is synthesized)
gaggaataagggaggtgtgatgttgcccagaacatgacagggggtaaggaagagaataatttcttgtgagacaactggatggaaaatctattgtgtatacttaatttctactttctttgg

SEQ ID NO: 798893 - DNA, 120 bp, Artificial Sequence
  ENSG00000283654_21 (sequence is synthesized)
aatgcctctttccccggttgtcaatattatatagcctggcaatgaaaaaagggtgaagttttacagttctaaagatccattctttattttggtacaaaaataaattgttcaacctgtaaa

SEQ ID NO: 798894 - DNA, 120 bp, Artificial Sequence
  ENSG00000283654_22 (sequence is synthesized)
tactggcaaaaagaagtcgggaaatacttgtatggtggtactgtccaacctgttttgatgtgcatacagttttcctaagtacccactgagtccatgactctgatctagaatatacatttt

SEQ ID NO: 798895 - DNA, 120 bp, Artificial Sequence
  ENSG00000283654_23 (sequence is synthesized)
tgtatcatggaggagccaactttaccacacaacccagcaagtaagatattccaagtactttcctttcaaatccatggagtccggatgtttgaaattaaatttattaagcactcactcacg

SEQ ID NO: 798896 - DNA, 120 bp, Artificial Sequence
  ENSG00000283683_0 (sequence is synthesized)
ctgagatagcgcttccccattgctcacatgacagaaagctcttcccctgctctgcccccaagacccatcctctccctgcgacatctgtggagatttctcaaggacacggctccaggggtg

SEQ ID NO: 798897 - DNA, 120 bp, Artificial Sequence
  ENSG00000283683_1 (sequence is synthesized)
cagtaactttaaattcctcaaatcccctgagtgcaaggccatggctcagaaaagccttgcaaacaacagcattaatctcccctacaaggacttgacctccgaggtaaccaggcgccgagt

SEQ ID NO: 798898 - DNA, 120 bp, Artificial Sequence
  ENSG00000283683_2 (sequence is synthesized)
ccctccccctcacaggacctacctcacagtacctcctgccccacctccttctccagctgaggatcccacgatgggctctccttcaaaattcgggaagcaggaacttcagttagctcggac

SEQ ID NO: 798899 - DNA, 120 bp, Artificial Sequence
  ENSG00000283683_3 (sequence is synthesized)
ttcagttcctggaaggccaaagtgtccaaattccacgtagaaactgcattaaaagaaagagacaaaattttactgtaagaaaaaatggcccaaggattgactatgttgaggatgacattt

SEQ ID NO: 798900 - DNA, 120 bp, Artificial Sequence
  ENSG00000283683_4 (sequence is synthesized)
accaatgttacccatagatttcaggcattgtataaaagaacatgtggaactccctgctctgttctgtttctctctgactaccagtgcatgaaacccctgtcacgtatcccctagattgct

SEQ ID NO: 798901 - DNA, 120 bp, Artificial Sequence
  ENSG00000283683_5 (sequence is synthesized)
acttggtgtctgagaggttttgtctccggctggtcatgctacatttcttggttccctgaccgggaaacgaggcagacaaaacctgggtagttaaggggctacccgaggcagccccttagg

SEQ ID NO: 798902 - DNA, 120 bp, Artificial Sequence
  ENSG00000283683_6 (sequence is synthesized)
acccgaggcagccccttaggcggcttaggcctgctgtgtggagcatccctgcaggggactccagccagcctgagtgaagccatccgaagagcgatcccagacggagtagtcaaggaaggc

SEQ ID NO: 798903 - DNA, 120 bp, Artificial Sequence
  ENSG00000283683_7 (sequence is synthesized)
ctcgctgtgcagacaacactgagcaaagacttgaaggaagaaagggaacaagatatcaagatatttgggaaaagcatattccaggcagaggtctgagcaaatgcaaagacctgacctgaa

SEQ ID NO: 798904 - DNA, 120 bp, Artificial Sequence
  ENSG00000283683_8 (sequence is synthesized)
tgaggtttgtcttagaagactcttgaagatctttgttctttcctatttttcttcacctagaaccaccatagagcatggtttacccttgctaatagacttagtcatttttggttttttaat

SEQ ID NO: 798905 - DNA, 120 bp, Artificial Sequence
  ENSG00000283683_9 (sequence is synthesized)
ccaagtctctgatatgatatgcatatattttgatctttatgttatgctatagaactgttgctgtagtcagttgtatttaaattaataaacagttatcaggccttgttgtttattactaaa

SEQ ID NO: 798906 - DNA, 120 bp, Artificial Sequence
  ENSG00000283683_10 (sequence is synthesized)
tctgaatcagtgaaaagtctaggccttttaaagtctagagtttaaagatctcaggtcctgggaaccctgaggtagctggattttcaaaacgcaacctgagacactacagttgtgtggccc

SEQ ID NO: 798907 - DNA, 120 bp, Artificial Sequence
  ENSG00000283683_11 (sequence is synthesized)
tatattttggagctgcattcccatgccgtgtgctggggctaaggtggttgagtttcacatttattgacagtgtttttaaagtttgtttctgggagatttgaagtgattttcaaactctgt

SEQ ID NO: 798908 - DNA, 120 bp, Artificial Sequence
  ENSG00000283683_12 (sequence is synthesized)
aacagaaaactctaccctgaaaagcagccaagtgtagagtggttctgttgtggagaagtccattgcttgagtcctctccaagctccttgacgggccccagtgcacctctaaggacttccg

SEQ ID NO: 798909 - DNA, 120 bp, Artificial Sequence
  ENSG00000283683_13 (sequence is synthesized)
gggctcttctgaattgttcgaaggcatcaaaaatgtgataattctggcatacatatacatataaaaaatatccccacatgtcatcctttatttcgtctgctgcttcttagagtccttgta

SEQ ID NO: 798910 - DNA, 120 bp, Artificial Sequence
  ENSG00000283683_14 (sequence is synthesized)
ggtgttctgtctccaggcctgcccttgtaaatgtgctcggctcccctatgagaaaggagtcaaagcttctgtacaccattgtggagtcagggtaaacactctgtgatctcccctgatccc

SEQ ID NO: 798911 - DNA, 120 bp, Artificial Sequence
  ENSG00000283683_15 (sequence is synthesized)
atgcatttaataaaaccaatgttccttctttaaaagtaaaaagtgctccggttcttctacccccatagtagttggctgtgccattggtgtggaagtcggactccttacctgtggccttca

SEQ ID NO: 798912 - DNA, 120 bp, Artificial Sequence
  ENSG00000283683_16 (sequence is synthesized)
gcagcatggggcagggaaggagcctgcactgagtgtctgccattgccagctggatgctggacatacacatctccctctcctcagtctggtgaagaatgggcctgcgctgtccaataggac

SEQ ID NO: 798913 - DNA, 120 bp, Artificial Sequence
  ENSG00000283683_17 (sequence is synthesized)
aagccctgctccagtcacacccggaaggtgactagtccatgcacggccgaagcgtgaggaaactcatcacaggactcattttccttaaaatttagacttgtacagtaaggacttcaactg

SEQ ID NO: 798914 - DNA, 120 bp, Artificial Sequence
  ENSG00000283697_0 (sequence is synthesized)
ctgactgaaggcattttggacttgctaggacagtgataagggccttgggtacaaaatgctcctgattctggtgtagctccatggcgagtcagaacactgaacaggaatatgaagccaagc

SEQ ID NO: 798915 - DNA, 120 bp, Artificial Sequence
  ENSG00000283697_1 (sequence is synthesized)
tggccccatctgttggtggagagccaacaagcgggggcccatctggttcttcacctgatccaaatccagattccagcgaggttttggacaggcacgaggaccaagccatgagccaagatc

SEQ ID NO: 798916 - DNA, 120 bp, Artificial Sequence
  ENSG00000283697_2 (sequence is synthesized)
caggctcccaagataactcaccaccagaagaccgaaaccaacgcgtggtcaacgtggaagacaaccacaacctttttaggctctccttcccaagaaagctttggacgattgtggaggaag

SEQ ID NO: 798917 - DNA, 120 bp, Artificial Sequence
  ENSG00000283697_3 (sequence is synthesized)
acacattcaagtctgtgagctggaacgatgatggagacgccgtgatcatcgacaaggatctcttccagagggaggttcttcaacggaaaggtgcagagaggatcttcaaaacagacagct

SEQ ID NO: 798918 - DNA, 120 bp, Artificial Sequence
  ENSG00000283697_4 (sequence is synthesized)
tgacgagtttcattcgccagctgaacctctatggattctgcaaaacacgcccaagcaactctccaggaaacaagaaaatgatgatctactgcaactccaattttcagagagacaagccca

SEQ ID NO: 798919 - DNA, 120 bp, Artificial Sequence; identical to SEQ ID NO: 798719
  ENSG00000283697_5 (sequence is synthesized)

SEQ ID NO: 798920 - DNA, 120 bp, Artificial Sequence; identical to SEQ ID NO: 798720
  ENSG00000283697_6 (sequence is synthesized)

SEQ ID NO: 798921 - DNA, 120 bp, Artificial Sequence
  ENSG00000283697_7 (sequence is synthesized)
gaatgtcacatttacatcttcggctactacctggatggaaggcacagggattcttagtagtctggtttactcagataatggtagtgtaatgtctttgtacaatatctgttactatgctct

SEQ ID NO: 798922 - DNA, 120 bp, Artificial Sequence
  ENSG00000283697_8 (sequence is synthesized)
gttggcctccctctcagtcatgtctccaaatgagccctctgacgatgaggaggagtaggaaggctcctcagattacaagtgtagactctgtgaacagttcagaaacactgcaaattcgtg

SEQ ID NO: 798923 - DNA, 120 bp, Artificial Sequence
  ENSG00000283697_9 (sequence is synthesized)
aagtcacaggccactaatggcccataaaagttgccattttttaatgagaaacacatttttggtcttaataaagaaaaacaaaattccatggaaataaataataaacaatttaaatgagaa

SEQ ID NO: 798924 - DNA, 120 bp, Artificial Sequence
  ENSG00000283703_0 (sequence is synthesized)
atggtgggtcagagggcccagcacagcccagtcagcctcctgctgctgatacacctctgccttctgcacctgagggcctcaggccagccccacccgacccccgaggcccctgtagaggag

SEQ ID NO: 798925 - DNA, 120 bp, Artificial Sequence
  ENSG00000283703_1 (sequence is synthesized)
gtggtgtctgtccagggagtgcgaggtggctccgtggagctggcctgtggctcagggcctgccccgctgctggtcctctggagcttcacccccctgggctccctggttccccggcctgtg

SEQ ID NO: 798926 - DNA, 120 bp, Artificial Sequence
  ENSG00000283703_2 (sequence is synthesized)
gccgtcaccgatggagccatgtccaaggtggaggccatcgcctcggctctgggagtcgtgagtctgaggaacagcagcctggtgctgggggagcttcacgagggtgcccgtggccacttc

SEQ ID NO: 798927 - DNA, 120 bp, Artificial Sequence
  ENSG00000283703_3 (sequence is synthesized)
ctatgccaggttctgcacgtggctggcggccagctccacgctgcctactcccacctcacgctggctgtgctggtgccggtgtccaagcctcaagtgcgactgagtaacccgtcccctgtg

SEQ ID NO: 798928 - DNA, 120 bp, Artificial Sequence
  ENSG00000283703_4 (sequence is synthesized)
gagggagcctccgtggtggccacgtgtgcagtgcgggagggcacagagcccgtgacctttgcctggcagcatcgggcaccccgaggccttggagaggccctggtgggggtcactgagcca

SEQ ID NO: 798929 - DNA, 120 bp, Artificial Sequence
  ENSG00000283703_5 (sequence is synthesized)
ctattccagctggaccctgtcaaccggacacacctagggtggtacatgtgcagcgccagcaactccgtgaacaggctgagcagtgacggggccttcctggacgtcatttatggtcctgac

SEQ ID NO: 798930 - DNA, 120 bp, Artificial Sequence
  ENSG00000283703_6 (sequence is synthesized)
aagcctgtgatcaccatggagccgctgggactcactgaggagggcttctgggccagtgagagggaagaggtgaccctgagctgtctggctgcctccaacccacctagtcactatgtgtgg

SEQ ID NO: 798931 - DNA, 120 bp, Artificial Sequence
  ENSG00000283703_7 (sequence is synthesized)
ctccgtgaccacacgcaagtccacacggggcctacctatgtcatcgccagagctggccgtgtccacacaggcctgtacacctgcctggcccgcaacagctacctggacacccgcacccag

SEQ ID NO: 798932 - DNA, 120 bp, Artificial Sequence
  ENSG00000283703_8 (sequence is synthesized)
actactgtccagctcaccatctactatccccctgagggacagccctcctgtgcagtgcatcccagccctgaggctgtgaccctgctctgtgcctggcctggggggcttccgcctgcccaa

SEQ ID NO: 798933 - DNA, 120 bp, Artificial Sequence
  ENSG00000283703_9 (sequence is synthesized)
ctgcagtgggaagggcctcagggacctggccctactgcccccagcaacgtcacctggagtcacgcagccgcccagctccccagtggcagcgtcttcacctgcactggccagcacccagcc

SEQ ID NO: 798934 - DNA, 120 bp, Artificial Sequence
  ENSG00000283703_10 (sequence is synthesized)
ctggcaccgcctgccctctgcacagtcatgctctgggagcctctcgggaggcctacctgctggagcacagccacaatgggggaccagttcatcatgctgagctgcgagtggcctggcggc

SEQ ID NO: 798935 - DNA, 120 bp, Artificial Sequence
  ENSG00000283703_11 (sequence is synthesized)
gagccccctgccacgctgggctggcttgacgaacagcagcagcccctgggcggcagcagctcctcgatggccgttcacctcctgcaggcccaagaagatctggctggcagagagttcacc

SEQ ID NO: 798936 - DNA, 120 bp, Artificial Sequence
  ENSG00000283703_12 (sequence is synthesized)
tgccggggcactcacctgctcaggacccctgacccccactgccacctccagctggaagccccacagctggacgtggctgagccccgcgtgtcagtgttggaggggggagaggcctggctg

SEQ ID NO: 798937 - DNA, 120 bp, Artificial Sequence
  ENSG00000283703_13 (sequence is synthesized)
gagtgctctctccgcgggggcacaccacctgcccagctcctctggctggggcctcaacaacaaaaagtggaccccggcacttcaggattcatgctgcaccctgagggtgcccagctgcgc

SEQ ID NO: 798938 - DNA, 120 bp, Artificial Sequence
  ENSG00000283703_14 (sequence is synthesized)
ctgggcatctacgatgctgacccggcacaccacaggggcacctaccaatgcgtggcccgcaacgccgtgggcaatagcagtcagagtgtgctgctggaggtcctgagatatccagctcct

SEQ ID NO: 798939 - DNA, 120 bp, Artificial Sequence
  ENSG00000283703_15 (sequence is synthesized)
cccaatgtcaccatcagccgcctgacctacgggaggcaccggagagaggtgcagcttcaatgggccatcttaggacccgggaacctgacgggcttcctggtgcagcggaaggccagtgcc

SEQ ID NO: 798940 - DNA, 120 bp, Artificial Sequence
  ENSG00000283703_16 (sequence is synthesized)
ctgggcccaggagctggggcgtgggagacagcagctagtgacatcgagccagagagccgaggacggcggctggggggcttggaccccggggtcctttatgccttccgcatcctggctctg

SEQ ID NO: 798941 - DNA, 120 bp, Artificial Sequence
  ENSG00000283703_17 (sequence is synthesized)
aatcaccacactgcaggacatccctctgaggtgaagataccagcggacccccccttcagcgcctacccagcggtgttgggtgcagcaggcacgggaatggtggtagcaacggtggcctct

SEQ ID NO: 798942 - DNA, 120 bp, Artificial Sequence
  ENSG00000283703_18 (sequence is synthesized)
ctactggtgttccagtatgctgcccggcacccagagactttcccccgccttgaaacaccaaccaccaccccaggtttggatcctgcacaagaaaccacggattctccagtgaatgtcacc

SEQ ID NO: 798943 - DNA, 120 bp, Artificial Sequence
  ENSG00000283703_19 (sequence is synthesized)
atcacagtgactgcaacaccataaggcccaaagaggaagatgcaaataggcttagggagggcaggtgggatttgggaagagcccttctgtcagactttggtcataaaaccaacgtagcta

SEQ ID NO: 798944 - DNA, 120 bp, Artificial Sequence
  ENSG00000283703_20 (sequence is synthesized)
agaggtggcaggacaaggaagaggacccacaatggggagacagggatctctgggtgtctgagggcaagtgaaagccatggtactgggaaggatctgtggtgctatagaagtatgagcaag

SEQ ID NO: 798945 - DNA, 120 bp, Artificial Sequence
  ENSG00000283703_21 (sequence is synthesized)
ctagctgcttccagaaaaaaagtctgtggatggagcaattcctaaataaatcagagctgatgttcacgccaatagagggctacttccattgcgactcccacagagacaggctgatggctg

SEQ ID NO: 798946 - DNA, 120 bp, Artificial Sequence
  ENSG00000283703_22 (sequence is synthesized)
ggtcccaggtttggctagtgggaagaagcaaggtgtgtaggtgtgtgttcctttgctcaaccatagcttacgaacatcactgacgctgcagtggtccgactccaggagtcgcagcccaca

SEQ ID NO: 798947 - DNA, 120 bp, Artificial Sequence
  ENSG00000283703_23 (sequence is synthesized)
agatacggagcagaggtactgcagatgtagcttcccgcccccaggctgggggagctggcccacagagcaccggggctgttccagagtcacaatgtcagctgccagcatgactcactagct

SEQ ID NO: 798948 - DNA, 120 bp, Artificial Sequence
  ENSG00000283703_24 (sequence is synthesized)
ccaagtgtgtgtgtctgtttgtgtgtgtgtctgtaatctgggtgaaaacacaaatgaatgcttgttcaactgactagaagactcgggactccgagccgcctctgcaggagacacagatga

SEQ ID NO: 798949 - DNA, 120 bp, Artificial Sequence
  ENSG00000283703_25 (sequence is synthesized)
gaagaaacggcaagaaagccaacgggggacccgccagcacaagggacgtggcgcctgaaaggagacagaaaattgagaagcttaagaagattctgtggttctcacagagttagactttat

SEQ ID NO: 798950 - DNA, 120 bp, Artificial Sequence
  ENSG00000283703_26 (sequence is synthesized)
tagataaggggtttcggctaccctcaaagctctcaggactggggctagggtttaaggaaggcttatttaaatatgggaaataaaatacaaaagggccacacccgatgcaaaagactttgc

SEQ ID NO: 798951 - DNA, 120 bp, Artificial Sequence
  ENSG00000283703_27 (sequence is synthesized)
tggctttctggtcagacaagcctagagatgtgtattttcttagggcagtaaaacaaaacgttttcacaaggaggctaaatttctatcctgaagttcataaacatgtggcgctcggttaat

SEQ ID NO: 798952 - DNA, 120 bp, Artificial Sequence
  ENSG00000283703_28 (sequence is synthesized)
ggtaaaaatagacaatgtgtgaggcgggaccgctcctcctcatcctcccaagctcctctcctacccacctcccttccctccaaggaaacgcaaagttgccccgaggaggtgggcctgcct

SEQ ID NO: 798953 - DNA, 120 bp, Artificial Sequence
  ENSG00000283703_29 (sequence is synthesized)
ccacatcgcccccagggtcaggtatgttctcagcgtcccctaaaacacttgcccaagatcctgctccttcagggccttgatctctgcagtcagaacagaggggtgtgcacaggggagttt

SEQ ID NO: 798954 - DNA, 120 bp, Artificial Sequence
  ENSG00000283703_30 (sequence is synthesized)
caggggaggacaggggtggggggttccaaagaatttcagaggaagacattcgcccaccccaatcacaaactataagcagcgttgtacaaacagggagtattcccaccttcaggggctatg

SEQ ID NO: 798955 - DNA, 120 bp, Artificial Sequence
  ENSG00000283703_31 (sequence is synthesized)
ctatatgaaagcagccttctcttttaatataaaatcatatcaaccaaataaaacctgccaaagctacatcatttaaaatatgtacagtttcacacacaatattacaactttaaggaaaat

SEQ ID NO: 798956 - DNA, 120 bp, Artificial Sequence
  ENSG00000283703_32 (sequence is synthesized)
aaaacatacttttcaatatgatacaaagcatgcatctcaaagtcattactttaaaagagagcaacacaggtaaaattcaatgataaacttcacttcttggcagtactatagctggaatga

SEQ ID NO: 798957 - DNA, 120 bp, Artificial Sequence
  ENSG00000283703_33 (sequence is synthesized)
gatctgtggcatgatcagcccaagatggatgcattgagtcttcatagactcattcgacaaaaacacccagaaagaaaggcttttgctaagaacacttcaaaaggtttagaacattgcaat

SEQ ID NO: 798958 - DNA, 120 bp, Artificial Sequence
  ENSG00000283703_34 (sequence is synthesized)
gtaacttgcaccctggcagcacctgtcaccagactgtcagtgcaaaactgaaagaaaaacattaaaaggagatcgtgaaatgatacagtgggagcggggcagtttatgctaaaacaatca

SEQ ID NO: 798959 - DNA, 120 bp, Artificial Sequence
  ENSG00000283703_35 (sequence is synthesized)
cacagaattctagatgagaaggaacatgaataggcttgaccaatttcgtgatcactgagcacagtaaagatcaaatttccaggtggaggtggtagacagggggcgtcaaggggagaaatg

SEQ ID NO: 798960 - DNA, 120 bp, Artificial Sequence
  ENSG00000283703_36 (sequence is synthesized)
tggacctctggaagacgaagtcataagcagagctctgcccgcggaggccagagagcagcttctctggctgcggagttggagcctcggaggaattccacggcagggatagatcacagcata

SEQ ID NO: 798961 - DNA, 120 bp, Artificial Sequence
  ENSG00000283703_37 (sequence is synthesized)
cggaacgggactggttccatccaaagagtgaaccacaatgcttttggaaagcagtatggaaaaatgggaggagcccagattatggctccagataaactaggttcggattcaggtcccatg

SEQ ID NO: 798962 - DNA, 120 bp, Artificial Sequence
  ENSG00000283703_38 (sequence is synthesized)
gctcactgagtgacttggggattttaatgccaactttgtagatgagttgtgggggttaaatgagttaacagtaacaagcaccgagcacagtgcctggtacacagtagttattcagcacgt

SEQ ID NO: 798963 - DNA, 120 bp, Artificial Sequence
  ENSG00000283703_39 (sequence is synthesized)
gttagtgctgtctcccacactgtaccatgtcctctcatttcctggtgaagtgacattaggtaggactgtttgggtgcctgtgcagggcagagccaactcacgcttagggagaactcatac

SEQ ID NO: 798964 - DNA, 69 bp, Artificial Sequence
  ENSG00000283703_40 (sequence is synthesized)
tgcagggcagagccaactcacgcttagggagaactcataccgcctaaatataaaggcaatatatatatt

SEQ ID NO: 798965 - DNA, 120 bp, Artificial Sequence
  ENSG00000283703_41 (sequence is synthesized)
acctgctcaggacccctgacccccactgccacctccagctggggagcaaaggcaccaacagaggggttccagagaagatgctgaggcaccggcaggccttgaaacaccaaccaccacccc

SEQ ID NO: 798966 - DNA, 83 bp, Artificial Sequence
  ENSG00000283740_0 (sequence is synthesized)
gtgattacactcccctgtggagattcccccagcactggctgtgcacacccagggagcctcacagcccagacctgggcaacact

SEQ ID NO: 798967 - DNA, 120 bp, Artificial Sequence
  ENSG00000283740_1 (sequence is synthesized)
acaaacaagtgggcctagggctcacaaccctaagacattgaattctgccactaactcgaatgagatcgaagccagacccttctcaggtgaaggtgacgaccacacagccagacccatcct

SEQ ID NO: 798968 - DNA, 120 bp, Artificial Sequence
  ENSG00000283740_2 (sequence is synthesized)
ggcctagcagaacttctgacctgtgagttggtgtttgttttaaatatccaaaattggtgagaatttattctgcattgatctaagactaatatactctccatccacaagtttcttcacatt

SEQ ID NO: 798969 - DNA, 120 bp, Artificial Sequence
  ENSG00000283740_3 (sequence is synthesized)
taagactaatatactctccatccacaagtttcttcacattgtggaagtgagaacattcagtgtgtgtgtttgtgtgtgggaaggggaggcagggggctgtgtccagttatggttaaactg

SEQ ID NO: 798970 - DNA, 120 bp, Artificial Sequence
  ENSG00000283740_4 (sequence is synthesized)
gtccagttatggttaaactggcacagcagaaacacagaagctaaactctttgagaggttctcattgcagatccataatcgaaccaccccagccagaacttctgcctgtacagctgctgtc

SEQ ID NO: 798971 - DNA, 120 bp, Artificial Sequence
  ENSG00000283740_5 (sequence is synthesized)
cccatggagacaggcaggcaaagagatgcctctgctgagatgttccccatgccccgaggtctgaagtacagcaacaaggatggaatccctgaggacctagatgggaacttggaagaaccc

SEQ ID NO: 798972 - DNA, 120 bp, Artificial Sequence
  ENSG00000283740_6 (sequence is synthesized)
tgtcatggacctcacagaaggtgacaatgaagcgtcagcctcaactcctccttcagctaaaaggcagaaaacagataccaaggggaagaaggagaggaagcccaccatggatgcagagga

SEQ ID NO: 798973 - DNA, 120 bp, Artificial Sequence
  ENSG00000283740_7 (sequence is synthesized)
aaggagaggaagcccaccatggatgcagaggaggctcagaggatgacaaccctgttttctgccatgtctgaggagcagctatctcgctacgaagtgtgtcgccggtcagctttcccaaaa

SEQ ID NO: 798974 - DNA, 120 bp, Artificial Sequence
  ENSG00000283740_8 (sequence is synthesized)
gcacgcattgcagctctgatgcagtccatcactggcagatcggtgtctgagaacaccgccattgccatggctggaatagccaaggtctttgtgggagaggtggtggaagaggccctggac

SEQ ID NO: 798975 - DNA, 120 bp, Artificial Sequence
  ENSG00000283740_9 (sequence is synthesized)
gtgtgcgaaatgtggggagaaacgcccccgctgcagcccaagcatttacgggaggctgttcgcaggttaaagcccaagggcatcctccccaacagcaactacaaaaaaatcatgttctag

SEQ ID NO: 798976 - DNA, 120 bp, Artificial Sequence
  ENSG00000283755_0 (sequence is synthesized)
tctcagttgcttgctggtctccgtgaagtccaggtcttctaccccaagatgaatttggacggcacttcaggtggtttcccagctgaagaggatcatcataatgaagaaagacaaacaaag

SEQ ID NO: 798977 - DNA, 120 bp, Artificial Sequence
  ENSG00000283755_1 (sequence is synthesized)
aataaaagaaaaacaaaacaccgacataaattttctgaagaattactgcaggaacttaaggaaatatttggagagaactgttatcccgattacacaactaggaaaacactggccatcaaa

SEQ ID NO: 798978 - DNA, 120 bp, Artificial Sequence
  ENSG00000283755_2 (sequence is synthesized)
tttgattgtccggtaaatgtgatagataattggttccagaataaaagagccagacttccacctgcagaaagacgcagaatatttgttcttcagaaaaagcatgattttccagtccaagcc

SEQ ID NO: 798979 - DNA, 120 bp, Artificial Sequence
  ENSG00000283755_3 (sequence is synthesized)
cattcatttttaagctgccaggagacccaggctgcagctcacaactatgccaccaagcagagcctctctggtgcccagagggctctgatgagaagagctggttgctcccatctggagaaa

SEQ ID NO: 798980 - DNA, 120 bp, Artificial Sequence
  ENSG00000283755_4 (sequence is synthesized)
cagtggattcccagtcaagaaatgggctataattgtttctctttggagaaccaagagactcccagtcaacaggtgggcccccagtgctcttatctggagaaaccagggattcccagtcaa

SEQ ID NO: 798981 - DNA, 120 bp, Artificial Sequence
  ENSG00000283755_5 (sequence is synthesized)
attcccagtcaacaggtggcctcccagagttcctatctggtcacaggcactgaaaagcatccaggctgtgctatggggtatggaggtgacacaggaagtgggcattctggaagtgggcat

SEQ ID NO: 798982 - DNA, 120 bp, Artificial Sequence
  ENSG00000283755_6 (sequence is synthesized)
tctactgcctatcattttctcagctacaactctgcagaatgccttcatcctcccccatcttctgtgccatattttcatggagaaaggactgaaaccaaggaaagccagcatgcaagtcct

SEQ ID NO: 798983 - DNA, 120 bp, Artificial Sequence
  ENSG00000283755_7 (sequence is synthesized)
ttccttttggattacgctcaaggtgcatatggggtgaagaaagaccattgtctttgctcattctgtctctcactgctgggacaacagcagcagaatgattggcagtatcacctgcagcag

SEQ ID NO: 798984 - DNA, 120 bp, Artificial Sequence
  ENSG00000283755_8 (sequence is synthesized)
caccaacagcctcagaattacttagaggggatgatgttgcaggaacagctcccaatggactcgggtccttgggatctagggaagcagtggtcctcggctcagtcacagctgcagagtcaa

SEQ ID NO: 798985 - DNA, 120 bp, Artificial Sequence
  ENSG00000283755_9 (sequence is synthesized)
ctgcctcagaataatggaaagccgttgtgctctcaactgcagcacatgtctctccaaatagctgccgactcaccccttctgcctctggggcaagatatgcaggaaagggcttcagagcaa

SEQ ID NO: 798986 - DNA, 120 bp, Artificial Sequence
  ENSG00000283755_10 (sequence is synthesized)
cccaggacccaaatgcagcaactttaagttgaagagtggacaagggtctgcagcagggaaccaaggatgcaactctgcaaagtagtgctaagtgtcagagaaacacagtcgcaggtcagg

SEQ ID NO: 798987 - DNA, 120 bp, Artificial Sequence
  ENSG00000283758_0 (sequence is synthesized)
gggagtctggttagtacaaggggaagcctagtgggtctggcgctccgttttcaagacactcggagtccgtctttgaggggaaaggtcatggccctgaaaccaccttctgccacccagcct

SEQ ID NO: 798988 - DNA, 120 bp, Artificial Sequence
  ENSG00000283758_1 (sequence is synthesized)
gctcccaacgcgccagctaccccagacgccccccctaccacaggtgatccaggtgcttcagctgccccaggttctcccactaccacaggtggtccaggtgccccagctgaggtgccccag

SEQ ID NO: 798989 - DNA, 120 bp, Artificial Sequence
  ENSG00000283758_2 (sequence is synthesized)
cctccatttggattggcagctttgtacttctcttatgagggttcctggacacagaaacccacatctatgcttccacccctacagactatgaaggccaaccagaacagtgaatgggaagag

SEQ ID NO: 798990 - DNA, 120 bp, Artificial Sequence
  ENSG00000283758_3 (sequence is synthesized)
gcttacatcaactcaggccgaactggttggttcggtgcattcgtggtaatgattggcttaggcatcatttatggcttggtcctatattaatgaagtctaggcatagcaacccaggggtcc

SEQ ID NO: 798991 - DNA, 120 bp, Artificial Sequence
  ENSG00000283758_4 (sequence is synthesized)
gctccccaaccgagccactcaccaaacactaaccagccaagtcagccatcaggcaagaaattcaaccgctgagacatctagccaagaaatcctctaaccaaggaactcaacattcaagaa

SEQ ID NO: 798992 - DNA, 120 bp, Artificial Sequence
  ENSG00000283776_0 (sequence is synthesized)
atgtcatggacctcacagaaggtgacagtgaggcctcagcctcagctcctcctgcagccaaaagacggaaaacacatacgaaacgcaagaaggagaggaagcccaccgtggatgcagagg

SEQ ID NO: 798993 - DNA, 120 bp, Artificial Sequence
  ENSG00000283776_1 (sequence is synthesized)
gcacgcattgcgggtctgatgcggtctatcactggcagttcggtgtctgagaacgcggccattgccatggctggaatagccaaggtctttgttggagaggtggtggaagaggccctggac

SEQ ID NO: 798994 - DNA, 120 bp, Artificial Sequence
  ENSG00000283776_2 (sequence is synthesized)
ttgttggagaggtggtggaagaggccctggacatgtgtgagatgtggggagagacgcccccgctgcagcccaagcatttaagggaggctgttcacaggttaaagcccaagggcctcttcc

SEQ ID NO: 798995 - DNA, 120 bp, Artificial Sequence
  ENSG00000283787_0 (sequence is synthesized)
agggtaggtcatgctggcaacaggaagcaacttcttagccagggccggggggcgggtgtctggctggaatctcccctgggtacatggagggtgccagccggctggacctgcagacccagg

SEQ ID NO: 798996 - DNA, 120 bp, Artificial Sequence
  ENSG00000283787_1 (sequence is synthesized)
aagctggaacataggcatggggtgcagggggcattaggctagggtccagggaggggccacagacctgcctcctgcaagcccacagagcctgctccccgagcctctctctgctggcctccc

SEQ ID NO: 798997 - DNA, 120 bp, Artificial Sequence
  ENSG00000283787_2 (sequence is synthesized)
tgccctgcccacacccccactccaccacaggagaagacgtcctgcctcagaggcctgcttcccagtgcgagcacttgtgccctgggtcaggacctctggctggagacctgactcctggtg

SEQ ID NO: 798998 - DNA, 120 bp, Artificial Sequence
  ENSG00000283787_3 (sequence is synthesized)
gagggaaggcggcctgcctgccaagcagcctgcccaccctgggagctagaactggggttctcgtggttcctgcagtcccgtcatccagaggaggccggtagctgagagcagtcctaagca

SEQ ID NO: 798999 - DNA, 120 bp, Artificial Sequence
  ENSG00000283787_4 (sequence is synthesized)
ggctccttccgcccccacccctccagcagctctgttcttgccttggcagagccagcccccaccagcggcagcccccaggactccctccttccccaaaccagagagcctctggctcggaca

SEQ ID NO: 799000 - DNA, 120 bp, Artificial Sequence
  ENSG00000283787_5 (sequence is synthesized)
gatgccatttgtcaatgtccttgcaaacacgtggtgcccagaaaccagggtgggcggcttggccgggccaccccagacaggaggtctgcgggaatatcccatttagcatagctcagcgaa

SEQ ID NO: 799001 - DNA, 120 bp, Artificial Sequence
  ENSG00000283787_6 (sequence is synthesized)
aactgctcccaccttccggccaatctacctctgatgatgcagcctcggctttcccaagcctcttggccgccacccctcaccgctggctcgcagcggacgcgcctgtggttgagccggcga

SEQ ID NO: 799002 - DNA, 120 bp, Artificial Sequence
  ENSG00000283787_7 (sequence is synthesized)
caacagggcgcccctcacgtgtctgggggcagccgctcttccagccctgggcttggccagcagctggccaggggcatgcctgtcacttggggctcacccgcgtctccgtctcccacccca

SEQ ID NO: 799003 - DNA, 120 bp, Artificial Sequence
  ENSG00000283787_8 (sequence is synthesized)
gcccacacggtgttgcggcctgacccaggctgtgtacttggggcctgctttgtgctggggtggcatggaggacagagccctggaggcaggttctagccccatccctggagggactcggcc

SEQ ID NO: 799004 - DNA, 120 bp, Artificial Sequence
  ENSG00000283787_9 (sequence is synthesized)
tctgtggcctcatttctacactagggtgatggtggggccaccccaaagtccccaaggcacagtcgagctcagcatgtccctggcaggttctgggtgctcaggaagcagaatactcaggcc

SEQ ID NO: 799005 - DNA, 120 bp, Artificial Sequence
  ENSG00000283787_10 (sequence is synthesized)
tccacacccctggccccaggtcctccttggaccacaggagacacaggcctcccacctcaggagggaggagggctggcctgaccactgtccctcccaccctaggacacagtcatgctcata

SEQ ID NO: 799006 - DNA, 120 bp, Artificial Sequence
  ENSG00000283787_11 (sequence is synthesized)
tcggctgcgtcgatggcacccgaggtgtgcggcccaagcctccagggaacccctggacccccaccgcccctgctgcccaagccagggaaggacaacttgcgtttgcagaagctcctgagg

SEQ ID NO: 799007 - DNA, 120 bp, Artificial Sequence
  ENSG00000283787_12 (sequence is synthesized)
aaggcagcccggaagaagatgatgggaggcacacacctcgctccacccagggccttccgcacctccctgtcccccgtgagtgaggccagccatgaccaggaggtcacagccccgcacgct

SEQ ID NO: 799008 - DNA, 120 bp, Artificial Sequence
  ENSG00000283787_13 (sequence is synthesized)
ccctaccccgctccccgcacacccccatcatccaccacgtggcatcacccctgcagaagtccacgttctccatcggcctcacccagcgcaggattctagctgctcaattcagggccatgg

SEQ ID NO: 799009 - DNA, 120 bp, Artificial Sequence
  ENSG00000283787_14 (sequence is synthesized)
ggccccaggttgtagcctcggccccagaacctacccggccccccagtggcttcgtccctgtctctgggggtgggggcacccacgtcacccaggtgcacatccagctggcaccatccccac

SEQ ID NO: 799010 - DNA, 120 bp, Artificial Sequence
  ENSG00000283787_15 (sequence is synthesized)
acaatgggacccctgagcctcccaggacagccccagaagtgggatccaacagccaggatggagatgccaccccaagtccccccagggcccagcccctggtcccagtggctcacatccgcc

SEQ ID NO: 799011 - DNA, 120 bp, Artificial Sequence
  ENSG00000283787_16 (sequence is synthesized)
cactgcccaccacagtccaggctgccagtcccttgcctgaggagccccctgtaccacggccgccacccggcttccaggcctcagtgcccagagaggctagtgccagggttgtggtgccca

SEQ ID NO: 799012 - DNA, 120 bp, Artificial Sequence
  ENSG00000283787_17 (sequence is synthesized)
tagccccgacctgccgctcgctggagtcctcaccgcacagcctggtccccatgggccctggcagagagcacctggaggagcccccgatggctggccccgccgctgaggccgagcgagtgt

SEQ ID NO: 799013 - DNA, 120 bp, Artificial Sequence
  ENSG00000283787_18 (sequence is synthesized)
ccagccctgcctgggcctcatcccctaccccaccatcaggccctcacccatgccctgtccccaaagttgcacccaagccccggctcagtggctggacgtggctcaagaagcagctgctgg

SEQ ID NO: 799014 - DNA, 120 bp, Artificial Sequence
  ENSG00000283787_19 (sequence is synthesized)
aggaggccccagagcctccgtgcccagagccgcggcagagcctggagccagaggtgcccacccccacagagcaggaggtgcctgcccccacagagcaggaggtgcccgccctcaccgcac

SEQ ID NO: 799015 - DNA, 120 bp, Artificial Sequence
  ENSG00000283787_20 (sequence is synthesized)
cccgggcccccgcctcccggacctccaggatgtgggatgccgtgctgtaccgcatgtcagtggcggaggcccaagggcgcctggcagggcccagcggtggggagcacaccccagccagcc

SEQ ID NO: 799016 - DNA, 120 bp, Artificial Sequence
  ENSG00000283787_21 (sequence is synthesized)
tcacccgcctgcccttcctgtaccggcctcgcttcaacgcccggaagctgcaggaggccacccggccccctcccacagtccgctccatcctggagctgagcccccagcccaagaacttca

SEQ ID NO: 799017 - DNA, 120 bp, Artificial Sequence
  ENSG00000283787_22 (sequence is synthesized)
accgcacagcgactggctggaggctccagtgaagtggccagaatggcccccagagcccaggaccatgggatggacagaagaaggggctgaggctctagctgggggcccatagttgctgca

SEQ ID NO: 799018 - DNA, 120 bp, Artificial Sequence
  ENSG00000283787_23 (sequence is synthesized)
tgaagatgcaccagggcccaaggggcatggggtgcagggcagcctgggaagggcacatggggtgctgagggaagtctgcatggttaggagggtggtcaggtggacggggcagagaggacg

SEQ ID NO: 799019 - DNA, 120 bp, Artificial Sequence
  ENSG00000283787_24 (sequence is synthesized)
agctggagcccctgggctgcagtggtgtgaggggaacagagaaggggtctgcgtcgggatgtaggatgggggccttgggatgaaaactttaggtaagatggcagaggactgcatctactg

SEQ ID NO: 799020 - DNA, 120 bp, Artificial Sequence
  ENSG00000283787_25 (sequence is synthesized)
acctagcccaggctcctcaggggcctgggcctctcactgatcctcccttttgctgtcaccttttgctgtcaaaggtttggggccagatctctgcttgctgaggcatgggtgcggtcaggc

SEQ ID NO: 799021 - DNA, 120 bp, Artificial Sequence
  ENSG00000283787_26 (sequence is synthesized)
tggcttggccatcggcgtcaggagcagtcagcagttttgctgcctgtgcttcctgatggcagagccagatcctgggactagggtgcaggggggagccctcagccagcgtgggacttggca

SEQ ID NO: 799022 - DNA, 120 bp, Artificial Sequence
  ENSG00000283873_0 (sequence is synthesized)
atgctctcctccacactcagggtggctgtggtgtgcgtgagcaatgtcaacaggagcatggaggcccacagcatcctcaggagaaaagggctaagtgtccggtcttttggaactgaatct

SEQ ID NO: 799023 - DNA, 120 bp, Artificial Sequence
  ENSG00000283873_1 (sequence is synthesized)
catgtgaggctaccaggaccaagacccaatcgtcctgtagtttacgattttgcaacaacatataaggagatgtacaatgacctcctcaggaaagatagagaacgctacacccgcaacgga

SEQ ID NO: 799024 - DNA, 120 bp, Artificial Sequence
  ENSG00000283873_2 (sequence is synthesized)
tatgacacagtggtggaagatctgtgttccagagaacagcagacctttcagcctgtgcacgtgatcaacatggacatccaagataccctggaagatgccaccctgggagctttcctcatc

SEQ ID NO: 799025 - DNA, 120 bp, Artificial Sequence
  ENSG00000283873_3 (sequence is synthesized)
tgtgagatttgccagtgcctgcagcagtcagacgacatggaagacaatctggaagagctgctgttgcaaatggaggagaaggcaggaaaaagctttcttcacaccgtctgcttctactga

SEQ ID NO: 799026 - DNA, 120 bp, Artificial Sequence
  ENSG00000283967_0 (sequence is synthesized)
atgtcatggacctcacagaaggtgacagtgaggcctcagcctcagctcctcctgcagccaaaagacggaaaacacatacgaaaggcaagaaggagagcaagcccaccgtggatgcggagg

SEQ ID NO: 799027 - DNA, 120 bp, Artificial Sequence
  ENSG00000283967_1 (sequence is synthesized)
gcacgcgttgcgggtctgatgcgggctatcactggcagttcggtgtcggagaacgcggccattgccatggctggaatagccaagctctttgttggagaggtggtggaagaggcactggac

SEQ ID NO: 799028 - DNA, 120 bp, Artificial Sequence
  ENSG00000283967_2 (sequence is synthesized)
ctctttgttggagaggtggtggaagaggcactggacgtgtgtgagatgtggggagagacgcccccgctgcagcccaagcatttaagggaggccgttcgcaggttaaagcccaagggcctc

SEQ ID NO: 799029 - DNA, 120 bp, Artificial Sequence
  ENSG00000283980_0 (sequence is synthesized)
aagatggccgccgatctgctgaagttctgcacggagcaggccaagaatgaccccttccttgtgggcatcccggccgccaccaactccttcaaggagaagaagccctatgccatcctatga

SEQ ID NO: 799030 - DNA, 120 bp, Artificial Sequence
  ENSG00000283980_1 (sequence is synthesized)
ctaggggactgaggttgggcctgctgcccacggcctgcccactttacccagatgtccagcaaggtggccatcaacagtgacattgggcaggccctctgggcagtggagcagctccagatg

SEQ ID NO: 799031 - DNA, 120 bp, Artificial Sequence; identical to SEQ ID NO: 799026
  ENSG00000283988_0 (sequence is synthesized)

SEQ ID NO: 799032 - DNA, 120 bp, Artificial Sequence
  ENSG00000283988_1 (sequence is synthesized)
gcacgcgttgcgggtctgatgcgggctatcactggcagttcggtgtcggagaacgcggccattgccatggctggaatagccaagctctttgttggagaggtggtggaagaggccctggac

SEQ ID NO: 799033 - DNA, 120 bp, Artificial Sequence
  ENSG00000283988_2 (sequence is synthesized)
ctctttgttggagaggtggtggaagaggccctggacgtgtgtgagatgtggggagagacgcccccgctgcagcccaagcatttaagggaggccgttcgcaggttaaagcccaagggcctc

SEQ ID NO: 799034 - DNA, 120 bp, Artificial Sequence
  ENSG00000283992_0 (sequence is synthesized)
agcccgacctcaccaggagaacatgcagctcggcactgggctcctgctggccgccgtcctgagcctgcagctggctgcagccgaagccatatggtgtcaccagtgcacgggcttcggagg

SEQ ID NO: 799035 - DNA, 120 bp, Artificial Sequence
  ENSG00000283992_1 (sequence is synthesized)
gtgctcccatggatccagatgcctgagggactccacccactgtgtcaccactgccacccgggtcctcagcaacaccgaggatttgcctctggtcaccaagatgtgccacataggctgccc

SEQ ID NO: 799036 - DNA, 120 bp, Artificial Sequence
  ENSG00000283992_2 (sequence is synthesized)
gctcagcccccacagcccccacagcctggcgccagggctcacagctgcccctccctcgagactggccagcccacctctcccggcctctgcagccaccgtccagcaccgcttgtcctaggg

SEQ ID NO: 799037 - DNA, 120 bp, Artificial Sequence
  ENSG00000283992_3 (sequence is synthesized)
aagtcctgcgtggagtcttgcctcaatctgctgccgtccaagcctggggcccatcgtgcctgccgccccttcaggtcccgacctccccacaataaaatgtgattggatcgtgtggtacaa

SEQ ID NO: 799038 - DNA, 120 bp, Artificial Sequence; identical to SEQ ID NO: 799022
  ENSG00000284018_0 (sequence is synthesized)

SEQ ID NO: 799039 - DNA, 120 bp, Artificial Sequence
  ENSG00000284018_1 (sequence is synthesized)
catgtgaggctaccaggaccaagacccaatcgtcctgtagtttatgattttgcaacaacatataaggagatgtacaatgacctcctcaggaaagatagagaacgctacacccgcaacgga

SEQ ID NO: 799040 - DNA, 120 bp, Artificial Sequence
  ENSG00000284018_2 (sequence is synthesized)
tatgacacagtggtggaagatctgtgttccagagaacagcagacctttcagcctgtgcacgtgatcaacatggaaatccaagataccctggaagatgccaccctgggagctttcctcatc

SEQ ID NO: 799041 - DNA, 120 bp, Artificial Sequence
  ENSG00000284018_3 (sequence is synthesized)
tgtgagatttgccagtgcctgcagcagtcagacgacatggaagacaatctggaggagctgctcttgcaaatggaggagaaggcaggaaaaagctttcttcacaccgtctgcttctactga

SEQ ID NO: 799042 - DNA, 120 bp, Artificial Sequence
  ENSG00000284024_0 (sequence is synthesized)
gtgcgcactgtgcagtttccgcggagcgcagagacgcgctgaagctactcgcggactgcgcgtgaagaaaggcggaaccttcacgctgattggcggcgacgcgggaggctgtagcggccg

SEQ ID NO: 799043 - DNA, 120 bp, Artificial Sequence
  ENSG00000284024_1 (sequence is synthesized)
accggacgcagggggctggcgggaacgtgaagctccgcggtgcctgatggggccgttgggcggccggtagctgttgctgttgggggaccccctcattcctgccgctgccgtccctgctgc

SEQ ID NO: 799044 - DNA, 120 bp, Artificial Sequence
  ENSG00000284024_2 (sequence is synthesized)
ctcatggcggccatcggagttcacctgggctgcacctcagcctgtgtggccgtctataaggatggccgggctggtgtggttgcaaatgatgccggtgaccgagttactccagctgttgtt

SEQ ID NO: 799045 - DNA, 120 bp, Artificial Sequence
  ENSG00000284024_3 (sequence is synthesized)
gcttactcagaaaatgaagagattgttggattggcagcaaaacaaagtagaataagaaatatttcaaatacagtaatgaaagtaaagcagatcctgggcagaagggtgctctcaagggac

SEQ ID NO: 799046 - DNA, 120 bp, Artificial Sequence
  ENSG00000284024_4 (sequence is synthesized)
ccccagctacagcagctcccacagccttttcagaggtgcagttgctccctgtcagagcagccccatggccagactgggtgtgtccggggagcccagcccctgcaccagcaccaaccgcag

SEQ ID NO: 799047 - DNA, 120 bp, Artificial Sequence
  ENSG00000284024_5 (sequence is synthesized)
cactcctggggtagcctccacaccgcagactccagtctcctcttcgagagctggttttgtttctggtggggataggcccttgaccagtgagccccctccaaggtgggcaaggcgaagaag

SEQ ID NO: 799048 - DNA, 120 bp, Artificial Sequence
  ENSG00000284024_6 (sequence is synthesized)
gcggtcagtggccaggactatcgcagccgagttggcagaaaacaggcgattggcacgagaactctcaaagcgggaggaagaaaaactggacaggctgattgctattggtgaggaggccag

SEQ ID NO: 799049 - DNA, 120 bp, Artificial Sequence
  ENSG00000284024_7 (sequence is synthesized)
tgctcagcaagatactgccaatgagctccgcagggatgctgtcatcgcagtcagacgtttggcaacagcagtggaagaggcaactggtgcttttcagctaggccttgaaaaattgcttca

SEQ ID NO: 799050 - DNA, 120 bp, Artificial Sequence
  ENSG00000284024_8 (sequence is synthesized)
gaggttgatttcgaataccaaaagctaggaaccaattacaaaaggctctgcttcctaaactggtagaagtctagttcccaaacctgccttctgaatccctggctccttttctgtgtcctc

SEQ ID NO: 799051 - DNA, 120 bp, Artificial Sequence
  ENSG00000284024_9 (sequence is synthesized)
agaaaaaaacatggatgaaccatttatatccagatagtatgaaaataattgctagttcattttcccaagattctccaccaaatggaagacctttcagaaatgccaggggtgacctaatag

SEQ ID NO: 799052 - DNA, 120 bp, Artificial Sequence
  ENSG00000284024_10 (sequence is synthesized)
aaaacgatggagccacgttctagacagctggttcatcctagctttgtcacagatgtgaagcagtttacctccctccagtggtttcctcatccgtaaaatggggatcaataataactcctg

SEQ ID NO: 799053 - DNA, 120 bp, Artificial Sequence
  ENSG00000284024_11 (sequence is synthesized)
ccctgcctacctcacagggttgttgtgaggatcacgtagttcatagatgtgaaagggtttaaaagtttaaaagcactgtacacatttaagttattaattcatatggccttggctgaggta

SEQ ID NO: 799054 - DNA, 120 bp, Artificial Sequence
  ENSG00000284024_12 (sequence is synthesized)
aggcagattggtttacaagatacagaagtatggatatatactgtgacttcattgcttgaatctttcctttgctggtctaacttgactgcttcatggagtttgaaatcttaatttttaaaa

SEQ ID NO: 799055 - DNA, 120 bp, Artificial Sequence
  ENSG00000284024_13 (sequence is synthesized)
tccctgtgtggctcattagacgactataagcacaacctgtatttgtaccttaatctcttacatttccactgctgtgtatctgacatatctactagtaagcactgttttgtcaaaccgtct

SEQ ID NO: 799056 - DNA, 120 bp, Artificial Sequence
  ENSG00000284024_14 (sequence is synthesized)
ttctctccttcattttactggttcttagtctcctatcaatataaggaaataagaagtgccagggagccgccattgtgtgttacggtttatatcgataatcttcaatataaaatactggcc

SEQ ID NO: 799057 - DNA, 120 bp, Artificial Sequence
  ENSG00000284024_15 (sequence is synthesized)
attttataaaatattaaatatatgtaaattctttgcatttcatattatttgggtccctttatatgcctaaattacatctttaagtttcggttgccattggaacattgtggaaacaattca

SEQ ID NO: 799058 - DNA, 120 bp, Artificial Sequence
  ENSG00000284024_16 (sequence is synthesized)
gattatatcagtttcccatccgctttttagctgatttcattcttttctgttatttttttgtctagtatgttatacagggcaagccctagaaacgtttccttttgaggagctttccaagat

SEQ ID NO: 799059 - DNA, 120 bp, Artificial Sequence
  ENSG00000284024_17 (sequence is synthesized)
gatgttgtagacagaagtttatgtagttaatggcatctggtggaagagaacagctttgtttcctctttaactttgggaacactagaggatggtgtggataaagattgcctgcaatagatg

SEQ ID NO: 799060 - DNA, 120 bp, Artificial Sequence
  ENSG00000284024_18 (sequence is synthesized)
actccttttaagcactagccgtgaacagatgagcctcctccacaccccagacacacactggggagagatgaaggtgataagccacacttccgatttactctagaagggaagacattactc

SEQ ID NO: 799061 - DNA, 120 bp, Artificial Sequence
  ENSG00000284024_19 (sequence is synthesized)
tctgtcattaaactaacttaaagcttttagtgatttacttagtacttttaggaatacaaataggaatctttaggatttaaaaagttttccaataatctagaagttggaaaaataacaaag

SEQ ID NO: 799062 - DNA, 120 bp, Artificial Sequence
  ENSG00000284024_20 (sequence is synthesized)
agtgggcatgttgggggaggttttattttctatcttgcaggctcgagtgcttagctaaatgctggaaatggacataggtggagaaatggtcagagcagcagtgggagcgtacccagaacc

SEQ ID NO: 799063 - DNA, 120 bp, Artificial Sequence
  ENSG00000284024_21 (sequence is synthesized)
atgagtagacggcaagcgagctgctctgccaagccagggatggaggtgtgaggcggctggtgtggtagaatatgttggaatctagttagaattcctggattggaatcctgtcacagtttg

SEQ ID NO: 799064 - DNA, 120 bp, Artificial Sequence
  ENSG00000284024_22 (sequence is synthesized)
tggaatcctgtcacagtttgtttcatcagacaaatcacttgcccttttctattattattatttttttttttttgagaaaaagtctcactgttttgcccaggctggggtgcagtggtgcaa

SEQ ID NO: 799065 - DNA, 120 bp, Artificial Sequence
  ENSG00000284024_23 (sequence is synthesized)
ggcgtgagccaccgtgcccagccaattcatgcctcaatttctttatctccggattgagggatttgtattagattttttttttcctagtaccttccagctctaaaaaaatttgaaatagca

SEQ ID NO: 799066 - DNA, 120 bp, Artificial Sequence
  ENSG00000284024_24 (sequence is synthesized)
ttcctagtaccttccagctctaaaaaaatttgaaatagcataataaaagacaaaatgaaaacgaaattttaattgtaatattttctgtcacagcagcatatgtatatttgaaatactggt

SEQ ID NO: 799067 - DNA, 120 bp, Artificial Sequence
  ENSG00000284024_25 (sequence is synthesized)
aacaattttaaggtagcattctgtggtattaatatttattaatatgctcatgaacttctaagtgccacaccagacatatagactctttactttaaaagagcatatatttaaggcattgaa

SEQ ID NO: 799068 - DNA, 120 bp, Artificial Sequence
  ENSG00000284024_26 (sequence is synthesized)
atggatacagctatattcattctcaattgtcttaggctattatatggaaagatatgtgtcaattataggtaggtaggtaggtaggtagattttctggaaacacagaagtacttgacggag

SEQ ID NO: 799069 - DNA, 120 bp, Artificial Sequence
  ENSG00000284024_27 (sequence is synthesized)
agttaggcctgtattctataaatctattaatggtagcaaagtgcataagacagggatttctttgagatgaaaggagtgctgaagaagagcattggaattaatatttggatgtggtattgt

SEQ ID NO: 799070 - DNA, 120 bp, Artificial Sequence
  ENSG00000284024_28 (sequence is synthesized)
gaaattcaatgggtaaagtaaccctaatgtgggaataaaagtcaagggaaaggtcttgaataagtacacagaaaaataggctaaaaatattaaggggagggaaattggaatacagggaga

SEQ ID NO: 799071 - DNA, 120 bp, Artificial Sequence
  ENSG00000284024_29 (sequence is synthesized)
cagtgtgcaagaaagcaagccaggaatctgcctatgtggtagacccaaccattactacttgaacccccttagaaaagcttttccagcattccataactcaggttcctcatttataaagtg

SEQ ID NO: 799072 - DNA, 120 bp, Artificial Sequence
  ENSG00000284024_30 (sequence is synthesized)
ggaaactcataattgtcctacctacctcacaggggtgttgtgaggatcaaaggaacagatgaatgtatgagcactttcagacatgtaaggcactgtcatgtaacaagtaggggaaagact

SEQ ID NO: 799073 - DNA, 120 bp, Artificial Sequence
  ENSG00000284024_31 (sequence is synthesized)
ctggagcacattagtgctggtgtgtgccaagcccgtgggctgttgaccgtaagggatattcaagtaggaggaggaagagaagatggcattgctaataaaggttgtgatacacaaccatag

SEQ ID NO: 799074 - DNA, 120 bp, Artificial Sequence
  ENSG00000284024_32 (sequence is synthesized)
gattaactgcctcctcaagtccatcatgtaaataaggtgctatgtataccaacttctcaccacctttgtttttctgttcggtaatcctggtgtggacaaataaagttttcacttgtatgt

SEQ ID NO: 799075 - DNA, 120 bp, Artificial Sequence
  ENSG00000284024_33 (sequence is synthesized)
tggcttctcagcaattatccctgagagggaagatcctggagatatcctgagagcacacagagcttccccacaccttcagacttgcaccttgctgtccagaagctgcctagccctcctttc

SEQ ID NO: 799076 - DNA, 120 bp, Artificial Sequence
  ENSG00000284024_34 (sequence is synthesized)
caacccacaatggccagtgccaatagcagtgcgggcatccggtggtccagacaggagacacgaactcttctctccatactaggcgaggcagagtatattcagcgcctccagactgtgcat

SEQ ID NO: 799077 - DNA, 120 bp, Artificial Sequence
  ENSG00000284024_35 (sequence is synthesized)
cacaatgcagatgtctatcaggctgtgtctaagcgaatgcagcaggagggcttccgccgcaccgaacgtcagtgccgctccaagtttaaagttctgaaggcattatatttaaaggcctat

SEQ ID NO: 799078 - DNA, 120 bp, Artificial Sequence
  ENSG00000284024_36 (sequence is synthesized)
gttgcccatgccacaagtatgggtgagccaccacactgtccattttatgatacgttggatcagcttctccgaaatcagatagtgactgacccagacaacttaatggaggatgctgcttgg

SEQ ID NO: 799079 - DNA, 120 bp, Artificial Sequence
  ENSG00000284024_37 (sequence is synthesized)
gccaagcactgtgatcagaacttagtggcctctgacgccccaggggaagagggaaccggcattctaaaatcaaaaaggactcaggcagctgatcatcagcctatcttgaaaacagttaag

SEQ ID NO: 799080 - DNA, 120 bp, Artificial Sequence
  ENSG00000284042_0 (sequence is synthesized)
atgtcatggacctcacagaaggtgacagtgaggcttcagcctcagctcctcctgcagccaaaagacggaaaacacatacgaaaggcaagaaggagagcaagcccaccgtggatgcggagg

SEQ ID NO: 799081 - DNA, 120 bp, Artificial Sequence; identical to SEQ ID NO: 799032
  ENSG00000284042_1 (sequence is synthesized)

SEQ ID NO: 799082 - DNA, 120 bp, Artificial Sequence; identical to SEQ ID NO: 799033
  ENSG00000284042_2 (sequence is synthesized)

SEQ ID NO: 799083 - DNA, 80 bp, Artificial Sequence
  ENSG00000284188_0 (sequence is synthesized)
cgctccgagaagaggcctgcgcgggccatggcggccccccggtttggtggcccccggcgcggcggcgcgcagcacgagct

SEQ ID NO: 799084 - DNA, 120 bp, Artificial Sequence
  ENSG00000284188_1 (sequence is synthesized)
gggatccggaggcggtcgggcggcgcgcggtggccggcgacggcggctcctgctctgggtgctggtgctggcggcggctgttccgcggcccgcgcaggaagaagctcaggcaagctcacg

SEQ ID NO: 799085 - DNA, 120 bp, Artificial Sequence
  ENSG00000284188_2 (sequence is synthesized)
ctcaggcaagctcacgcgcgcgcaggcaaggaggccccggagcgcggcctgtggggcccctcgagcctgcagaggctgcttcagaggctggcgacgtggaggcggcgctacctgcggcgc

SEQ ID NO: 799086 - DNA, 120 bp, Artificial Sequence
  ENSG00000284188_3 (sequence is synthesized)
tggaggcggcgctacctgcggcgcaaggagcggccggaccggctggaggagatcccgctgctggtgctggaccgcgcgcagggcggccacgaggccgcggccggaccccagagcagcgtc

SEQ ID NO: 799087 - DNA, 120 bp, Artificial Sequence
  ENSG00000284188_4 (sequence is synthesized)
taaatgaaagtaaccccagcaccgtaggaatgaaagcacatgcaatgttggggggatgtgcatggaaaccaagggttatcttgaggttcgcagcgagctaaacgagccgcgtcctcctcg

SEQ ID NO: 799088 - DNA, 120 bp, Artificial Sequence
  ENSG00000284188_5 (sequence is synthesized)
cagcctctctttggtccgagggcctcggagcagtaactaaagcctgcgggtgccgcggagccctgggttccccccgctgcgcagttgctgcgggctgggaagcgctgaatcgggggcgga

SEQ ID NO: 799089 - DNA, 120 bp, Artificial Sequence
  ENSG00000284188_6 (sequence is synthesized)
ttgtctcttcctaaacactgcaggggagaaggtgggaaacggttttcaatctctgcaatgccttttttttgagacaggagaaaaaaaaaaaaaaccaactatgttgcccgggctggactc

SEQ ID NO: 799090 - DNA, 120 bp, Artificial Sequence
  ENSG00000284188_7 (sequence is synthesized)
aaactcctggggtcaagcgatcctaagcctcccaagcgttgggattgcaggcgtgagctaccacgccccgtcaaaaaaataaaaaaatcgtttaaagcaggatgctgagcttcacatccc

SEQ ID NO: 799091 - DNA, 120 bp, Artificial Sequence
  ENSG00000284194_0 (sequence is synthesized)
gctggcgctggtgctgcacgagctcggggccgggcgcagccgcgctggggagccgctccgcctgggggtgggcgcagagctgctggtcgacgtgggtcagaggctgcgccgtggagcatc

SEQ ID NO: 799092 - DNA, 120 bp, Artificial Sequence
  ENSG00000284194_1 (sequence is synthesized)
gacgtgggtcagaggctgcgccgtggagcatcagatccatgctgctgctgactcggagccccacagcttggcacaggctctctcagctcaagcctcgggtcctccctgggaccctgggag

SEQ ID NO: 799093 - DNA, 120 bp, Artificial Sequence
  ENSG00000284194_2 (sequence is synthesized)
gccaggccctgcatctgaggtcctggcttttgtcaaggcagggccctgcagagacaggtgggcagggccagccccagggccctgggcttcgaacccggctgctgatcacaggcctgttcg

SEQ ID NO: 799094 - DNA, 120 bp, Artificial Sequence
  ENSG00000284194_3 (sequence is synthesized)
gggctggactcggtggggcctggctggccctgagggctgagaaggagaggctgcagcagcaaaagcgaacagaagccctgcgccaggcagctgtgggccagggcgacttccacctgctgg

SEQ ID NO: 799095 - DNA, 120 bp, Artificial Sequence
  ENSG00000284194_4 (sequence is synthesized)
agtgggtgctgatgtactttggcttcactcactgccctgacatctgcccagacgagctggagaagctggtgcaggtggtgcggcagctggaagcagagcctggtttgcctccagtgcagc

SEQ ID NO: 799096 - DNA, 120 bp, Artificial Sequence
  ENSG00000284194_5 (sequence is synthesized)
ctgtcttcatcactgtggaccccgagcgggacgacgttgaagccatggcccgctacgtccaggacttccacccaagactgttgggtctgaccggctccaccaaacaggttgcccaggcta

SEQ ID NO: 799097 - DNA, 120 bp, Artificial Sequence
  ENSG00000284194_6 (sequence is synthesized)
gtcacagttaccgcgtgtactacaatgcaggccccaaggatgaggaccaggactacatcgtggaccactccattgccatctacctgctcaaccctgacggcctcttcacggattactacg

SEQ ID NO: 799098 - DNA, 120 bp, Artificial Sequence
  ENSG00000284194_7 (sequence is synthesized)
gccggagcagatcggctgagcagatctcagacagtgtgcggcggcacatggcggctttccgcagtgtcctgtcttgagccactgcagtctgggccccatcattaaacgggctgcgtttaa

SEQ ID NO: 799099 - DNA, 120 bp, Artificial Sequence
  ENSG00000284194_8 (sequence is synthesized)
ccagggcgctgcccgggtggccgcggcgctggacgacggctcggcccttggccgcttcgagcggatgctggcggcgcagggcgtggatcccggtctggcccgagccctgtgctcgggaag

SEQ ID NO: 799100 - DNA, 120 bp, Artificial Sequence
  ENSG00000284194_9 (sequence is synthesized)
tccggggacgcctgcgccctgcctgtgagcgtgtggcgcccgctttccctgagccggcggggcagagcgcagggagctggaggtcggcgcttcctctcgtgcttggtccactgacgcgcg

SEQ ID NO: 799101 - DNA, 120 bp, Artificial Sequence; identical to SEQ ID NO: 799026
  ENSG00000284234_0 (sequence is synthesized)

SEQ ID NO: 799102 - DNA, 120 bp, Artificial Sequence; identical to SEQ ID NO: 799032
  ENSG00000284234_1 (sequence is synthesized)

SEQ ID NO: 799103 - DNA, 120 bp, Artificial Sequence; identical to SEQ ID NO: 799033
  ENSG00000284234_2 (sequence is synthesized)

SEQ ID NO: 799104 - DNA, 120 bp, Artificial Sequence; identical to SEQ ID NO: 799026
  ENSG00000284283_0 (sequence is synthesized)

SEQ ID NO: 799105 - DNA, 120 bp, Artificial Sequence; identical to SEQ ID NO: 799032
  ENSG00000284283_1 (sequence is synthesized)

SEQ ID NO: 799106 - DNA, 120 bp, Artificial Sequence; identical to SEQ ID NO: 799033
  ENSG00000284283_2 (sequence is synthesized)

SEQ ID NO: 799107 - DNA, 120 bp, Artificial Sequence
  ENSG00000284306_0 (sequence is synthesized)
atgctctcctccacactcagggtggctgtggtgtgcgtgagcaatgtcaacaggagcatggaggcccacagcatcctcaggaaaaaagggctaagtgtccggtcttttggaactgaatct

SEQ ID NO: 799108 - DNA, 120 bp, Artificial Sequence
  ENSG00000284306_1 (sequence is synthesized)
catgtgaggctaccaggaccaagacccaatcgtcctgtagtttatgattttgcaacaacatataaggagatgtacaatgacctcctcaggaaagatagagaatgctacacccgcaacgga

SEQ ID NO: 799109 - DNA, 120 bp, Artificial Sequence; identical to SEQ ID NO: 799040
  ENSG00000284306_2 (sequence is synthesized)

SEQ ID NO: 799110 - DNA, 120 bp, Artificial Sequence; identical to SEQ ID NO: 799041
  ENSG00000284306_3 (sequence is synthesized)

SEQ ID NO: 799111 - DNA, 120 bp, Artificial Sequence
  ENSG00000284308_0 (sequence is synthesized)
gagggttcccctggtcttaaaaggggcccaagcccccattctggcacaccccactccactgtcctggcagcagcaggtgtggccaatggaggggggtgctggcccccaggattcccccag

SEQ ID NO: 799112 - DNA, 120 bp, Artificial Sequence
  ENSG00000284308_1 (sequence is synthesized)
ccaaactgtctttgtcaccacgtgaggctcacacctttcatccttccccaccttccctagtccctgcactaggttggacagcccccattggctacaggaaagcgggaggggtgtgagtcc

SEQ ID NO: 799113 - DNA, 120 bp, Artificial Sequence
  ENSG00000284308_2 (sequence is synthesized)
cctactccctctttgcagtggccccagcccccttaccgtctgcctgggatctgagtacatattgcagtgatggagatgcagtcacctattgtccagaggcaggagaggcaggtccgagac

SEQ ID NO: 799114 - DNA, 120 bp, Artificial Sequence
  ENSG00000284308_3 (sequence is synthesized)
cgcggggtgacccggtccaaggcggaaaaagtgcggccgcccactgtgccagtgccgcaggtggatattgtgcctgggcggctcagtgaggccgagtggatggcgcttacagccctcgag

SEQ ID NO: 799115 - DNA, 120 bp, Artificial Sequence
  ENSG00000284308_4 (sequence is synthesized)
gagggcgaggacgtcgtaggggacatcttggccgacttgctggctcgagtcatggactctgctttcaaagtctacctgactcagcagtgcattccattcaccatcagccaggcccgggag

SEQ ID NO: 799116 - DNA, 120 bp, Artificial Sequence
  ENSG00000284308_5 (sequence is synthesized)
gccatgctgcagatcaccgagtggcgcttcctggcccgggacgagggagaatctgcagtagctgaggaccccacatggggtgaggacgaggagccttcggcatgcacgacggactcctgg

SEQ ID NO: 799117 - DNA, 120 bp, Artificial Sequence
  ENSG00000284308_6 (sequence is synthesized)
gctcagggttcagtgcccgtgctgcacgcgtccacctcggagggcctggagaacttccaaggcgaagaccctgggggcgtggaccggatccctttaggaaggtcgtggatgggtcgaggc

SEQ ID NO: 799118 - DNA, 120 bp, Artificial Sequence
  ENSG00000284308_7 (sequence is synthesized)
tcccaggagcagatggaatcttgggagccttctccgcagctgagagtcacgtcggcccctcctcccacatcagagctgtttcaggaggcagggcccggaggtcctgtagaggaagcggac

SEQ ID NO: 799119 - DNA, 120 bp, Artificial Sequence
  ENSG00000284308_8 (sequence is synthesized)
ggccagtctagaggcctctcctcggccgggtccttgagcgcgagcttccaactgtcggtggaggaggcgcctgccgacgatgccgacccttctctggatccgtacctggtagccagcccc

SEQ ID NO: 799120 - DNA, 120 bp, Artificial Sequence
  ENSG00000284308_9 (sequence is synthesized)
tgcctcaactggacgcggctggggatcggctggaactcaggtcagagggggtgccctgcatcgcctcgggcgtgttggtgtcctacccctctgtgggcggcgccacccgcccctccgcgt

SEQ ID NO: 799121 - DNA, 120 bp, Artificial Sequence
  ENSG00000284308_10 (sequence is synthesized)
cctgccagcagcagcgggccgggcactcggatgtgcggctgagcgcccaccaccacaggatgcgccgcaaggcggccgtgaaacgcctggaccctgcgaggctcccgtgccactgggtgc

SEQ ID NO: 799122 - DNA, 120 bp, Artificial Sequence
  ENSG00000284308_11 (sequence is synthesized)
gccctctggctgaggtcctggtcccagactctcaaacacgccccttggaagcctaccgcggacgccagcggggcgagaagaccaaggcccgggccgaaccccaagccctcggccccggca

SEQ ID NO: 799123 - DNA, 120 bp, Artificial Sequence
  ENSG00000284308_12 (sequence is synthesized)
cccgtgtctccccggcagcgttcttccctctccggccaggcattcctttccgtgacttggactcgggccccgcactcctgttccccactttaaatttaggcctatcgtcgccatccctcg

SEQ ID NO: 799124 - DNA, 120 bp, Artificial Sequence
  ENSG00000284308_13 (sequence is synthesized)
agtcaaagctgccactcccaaactccaggatccgcttcctcaccacacacccggtgctccctgatgtggcccgcagccgcagccccaagctgtggcccagtgtcaggtggcccagcggtt

SEQ ID NO: 799125 - DNA, 120 bp, Artificial Sequence
  ENSG00000284308_14 (sequence is synthesized)
gggaggggaaggccgagctgctgggcgagctgtgggctggccggacccgcgtgcctccacagggtctggagctggcagacagggagggccaggatcctggcagatggcctcgaaccacac

SEQ ID NO: 799126 - DNA, 120 bp, Artificial Sequence
  ENSG00000284308_15 (sequence is synthesized)
ccccggtccttgaagccacttcccaggtgatgtggaagcccgtgttgctgccagaagccctgaagctggcccctggtgtgagcatgtggaaccggagcacccaggtgttgctcagctctg

SEQ ID NO: 799127 - DNA, 120 bp, Artificial Sequence
  ENSG00000284308_16 (sequence is synthesized)
gtgtgcctgaacaagaggacaaagaaggtagcacctttcctcccgttgagcaacatcccatccagacaggtgccccaaagcccaggtgaccgtagcacagctaatgaagaactcagcccc

SEQ ID NO: 799128 - DNA, 120 bp, Artificial Sequence
  ENSG00000284308_17 (sequence is synthesized)
caaagtgtggtcacgctcctctaagcctgctgcctccctctgatccctgagcctctggcagtagtaactggtccctccctctgctagccagaaataaacacctgagttgccttaggaact

SEQ ID NO: 799129 - DNA, 120 bp, Artificial Sequence
  ENSG00000284308_18 (sequence is synthesized)
aaggcgaagtacactcctcaggagcctctccggactcctctgccattgctcctgctctcccctttccgacatctcactgcccgagtgcatttccccaggaccctgggggcgtggaccgga

SEQ ID NO: 799130 - DNA, 120 bp, Artificial Sequence
  ENSG00000284308_19 (sequence is synthesized)
caccgctgctcccggcaaaccggagcatgcaccgcaggccagcggccgagttcgcccatcccagccatcacttttccaactagtccttagagaagggaagatgagcgagtcgagctcgaa

SEQ ID NO: 799131 - DNA, 85 bp, Artificial Sequence
  ENSG00000284308_20 (sequence is synthesized)
ccaggctggggtgcagtggcgcagtctctctctccttcctcagcctccccacttcagtttctttatctgtcaattgtggttagtg

SEQ ID NO: 799132 - DNA, 120 bp, Artificial Sequence
  ENSG00000284308_21 (sequence is synthesized)
tccccacttcagtttctttatctgtcaattgtggttagtgggctgttaatgaaaattattaggtcaaacatctactaagtatctgtcacatagtaggctcttcgtcaattggcccttttc

SEQ ID NO: 799133 - DNA, 120 bp, Artificial Sequence
  ENSG00000284308_22 (sequence is synthesized)
cttcccactagacaacttgagaaagcttcctcctagcctatagctactcttccgttccacttcttggtttcctgctctgattgccatgttttgttctcacagaggcaggagaggcaggtc

SEQ ID NO: 799134 - DNA, 120 bp, Artificial Sequence; identical to SEQ ID NO: 799026
  ENSG00000284356_0 (sequence is synthesized)

SEQ ID NO: 799135 - DNA, 120 bp, Artificial Sequence; identical to SEQ ID NO: 799032
  ENSG00000284356_1 (sequence is synthesized)

SEQ ID NO: 799136 - DNA, 120 bp, Artificial Sequence; identical to SEQ ID NO: 799033
  ENSG00000284356_2 (sequence is synthesized)

SEQ ID NO: 799137 - DNA, 76 bp, Artificial Sequence
  ENSG00000284373_0 (sequence is synthesized)
atggagacaggcaggcaaacaggtgtgtctgctgagatgttcgccatgccccgaggggaacttggaagaacccagg

SEQ ID NO: 799138 - DNA, 120 bp, Artificial Sequence
  ENSG00000284373_1 (sequence is synthesized)
atgtcatggacctcacagaaggtgacaatgaggcctcagcctcagctcctcctgcagccaaaagacggaaaacagataccaaaggaaagaaggagaggaagcccactgtggatgcagagg

SEQ ID NO: 799139 - DNA, 120 bp, Artificial Sequence
  ENSG00000284373_2 (sequence is synthesized)
gcatgcattgcgggtctgatgcggtctatcactggcagatcggtgtctgagaacgtggcgattgccatggctggaatagccaaggtctttgttggagaggtggtggaagaggccctggac

SEQ ID NO: 799140 - DNA, 120 bp, Artificial Sequence
  ENSG00000284373_3 (sequence is synthesized)
gtctttgttggagaggtggtggaagaggccctggacgtgtgtgagatgtggggagaaatgcccccactgcagcccaagcatttaagggaggctgttcgcaggttaaagcccaagggcctc

SEQ ID NO: 799141 - DNA, 120 bp, Artificial Sequence
  ENSG00000284395_0 (sequence is synthesized)
gcagagcgcggctataaatgcttgtgtccgggtgaaggtctgcctgtggagcaagagctgtcggccccggccagccagcgcctgctgccccggaggccccagaagcgtgggacgcgcgga

SEQ ID NO: 799142 - DNA, 120 bp, Artificial Sequence
  ENSG00000284395_1 (sequence is synthesized)
gatggccgccggtgtgatccggcccctgtgcgacttccagctgcccctgctgcgccaccaccccttcctgccctcagatccggagcccccagagacttcggaggaggaagaggaggagga

SEQ ID NO: 799143 - DNA, 120 bp, Artificial Sequence
  ENSG00000284395_2 (sequence is synthesized)
ggaggaggaggaggaggaggagggcgagggcgaggggctggggggctgcggccggatcctcccgagctcaggccgggcagaggccacggaggaagcagcccccgagggtcccggcagccc

SEQ ID NO: 799144 - DNA, 120 bp, Artificial Sequence
  ENSG00000284395_3 (sequence is synthesized)
gacccagatgcctgcgacgtctacgccgacagccgcccaccccgcagcactgcccgggagctctactatgcggacctggtgcgcctggcccgtggcgggtccctggaggacgaggacacc

SEQ ID NO: 799145 - DNA, 120 bp, Artificial Sequence
  ENSG00000284395_4 (sequence is synthesized)
ccggagcccagggtaccccaagggcaggtgtgcaggccgggcctcagcggggacagggcgcagcccctgggacccctggccgagctcttcgactacgggctgcagcagtactgggggtcc

SEQ ID NO: 799146 - DNA, 120 bp, Artificial Sequence
  ENSG00000284395_5 (sequence is synthesized)
agggcagcggccggctggagcctgacgctggagcggaagtacggccacatcacccccatggcccagaggaagctgcccccatccttctggaaggagccgacccctagccccctgggcctg

SEQ ID NO: 799147 - DNA, 120 bp, Artificial Sequence
  ENSG00000284395_6 (sequence is synthesized)
ctgcaccctggcacgccggacttcagcgacctgctggccagctggtcaaccgaggcctgtcctgagctgcccggcaggggaaccccagccctggaaggggcacggccagccgaggcctag

SEQ ID NO: 799148 - DNA, 120 bp, Artificial Sequence; identical to SEQ ID NO: 799022
  ENSG00000284438_0 (sequence is synthesized)

SEQ ID NO: 799149 - DNA, 120 bp, Artificial Sequence; identical to SEQ ID NO: 799023
  ENSG00000284438_1 (sequence is synthesized)

SEQ ID NO: 799150 - DNA, 120 bp, Artificial Sequence; identical to SEQ ID NO: 799040
  ENSG00000284438_2 (sequence is synthesized)

SEQ ID NO: 799151 - DNA, 120 bp, Artificial Sequence; identical to SEQ ID NO: 799025
  ENSG00000284438_3 (sequence is synthesized)

SEQ ID NO: 799152 - DNA, 120 bp, Artificial Sequence; identical to SEQ ID NO: 799026
  ENSG00000284439_0 (sequence is synthesized)

SEQ ID NO: 799153 - DNA, 120 bp, Artificial Sequence
  ENSG00000284439_1 (sequence is synthesized)
gcacgcgttgcgggtctgatgcgggctatcactggcagttcggtgtcggagaacgcggccattgccatggctggaatagccaagctttttgttggagaggtggtggaagaggccctggac

SEQ ID NO: 799154 - DNA, 120 bp, Artificial Sequence
  ENSG00000284439_2 (sequence is synthesized)
ctttttgttggagaggtggtggaagaggccctggacgtgtgtgagatgtggggagagacgctcccgctgcagcccaagcatttaagggaggccgttcgcaggttaaagcccaagggcctc

SEQ ID NO: 799155 - DNA, 120 bp, Artificial Sequence; identical to SEQ ID NO: 799026
  ENSG00000284465_0 (sequence is synthesized)

SEQ ID NO: 799156 - DNA, 120 bp, Artificial Sequence; identical to SEQ ID NO: 799032
  ENSG00000284465_1 (sequence is synthesized)

SEQ ID NO: 799157 - DNA, 120 bp, Artificial Sequence; identical to SEQ ID NO: 799033
  ENSG00000284465_2 (sequence is synthesized)

SEQ ID NO: 799158 - DNA, 120 bp, Artificial Sequence
  ENSG00000284479_0 (sequence is synthesized)
ctgcgcgccctgctgcgctgcaacctgccccccggcgcccagcgcgtggtggtctccgccgtgctggcgctcctggttctcatcaacgtcgtactgatcttcctgctggccttccgctga

SEQ ID NO: 799159 - DNA, 120 bp, Artificial Sequence
  ENSG00000284484_0 (sequence is synthesized)
gagtttcgacatgtcttcccaagctttcccagctgaagaggatcatcataatgaagaaagacaaacaaagaaaaaaagaaaaacaaaacaccgacataaattttctgaagaattattgca

SEQ ID NO: 799160 - DNA, 120 bp, Artificial Sequence
  ENSG00000284484_1 (sequence is synthesized)
ggaacttaaggaaatatttggagagaacggttatcctgatttcaccactaggaaaacactggccaacaaatttgattgtccggttaacgtgataaacaactggttccagaacaatagagc

SEQ ID NO: 799161 - DNA, 120 bp, Artificial Sequence
  ENSG00000284484_2 (sequence is synthesized)
cagacttccaccggaagaaagacaaagaatatttcttacttggaaaaaacacgatttcccagtccaagcctgtccatttttaagcctccaggaaacccaggctgcagcttccaactatgc

SEQ ID NO: 799162 - DNA, 120 bp, Artificial Sequence
  ENSG00000284484_3 (sequence is synthesized)
cacagagcagagtttttcctgtgccaagagggctctgatgagaagacctggttgctcccttctggagaaacagaggattgcctgtcaacagatgggctacaattgcttctctttggagaa

SEQ ID NO: 799163 - DNA, 120 bp, Artificial Sequence
  ENSG00000284484_4 (sequence is synthesized)
ccaagagactcccagtcaacaggtgggctccatgtgctcttctctggagaaacaagggattcccagtcaacaggtgggttcccagtgctcctatctggtcgcaggtactgaaaagcatcc

SEQ ID NO: 799164 - DNA, 120 bp, Artificial Sequence
  ENSG00000284484_5 (sequence is synthesized)
cattctactgcctatcgttttctcagctacaactctgcagaatgccttcatcctcccccatcttctgtgccatattttcatggagaaaggactgaaaccagggaaagccagcatgcaagt

SEQ ID NO: 799165 - DNA, 120 bp, Artificial Sequence
  ENSG00000284484_6 (sequence is synthesized)
cccttccttttggattacgctcaaggtgcttacggggtgaagaaagaccattgtctttgctcattctgtctctcactgctgcaagaacagcagcagaatgattggcagtatcacccacag

SEQ ID NO: 799166 - DNA, 120 bp, Artificial Sequence
  ENSG00000284484_7 (sequence is synthesized)
cagcaccaacagcctcagaattactcagaggggatgatgttgcaggaacagctgccaatggactcgggtccttgggatctagagaagcagtggccctcggctcagtcacagctgcagagt

SEQ ID NO: 799167 - DNA, 120 bp, Artificial Sequence
  ENSG00000284484_8 (sequence is synthesized)
caactgcctcagaataatggaaagccgttgtgctctcaactgcagcacgtgcctccccaaatagctgccaactcacccctgctgcctctggggcaagatatgcaggtaggggcttcaagc

SEQ ID NO: 799168 - DNA, 120 bp, Artificial Sequence
  ENSG00000284484_9 (sequence is synthesized)
aactcaggactcaaatgcagcagttttaggttgaggggtctacacgggcctgccacaggaacccaaggatgcagctttgcaaagtattgctaagtatcacagaaccatagccacaggtca

SEQ ID NO: 799169 - DNA, 120 bp, Artificial Sequence
  ENSG00000284491_0 (sequence is synthesized)
gttgggggccgttggagtccagcatggcgcggaccccgggggcgctgctgctggcgcctctgctactcctgcagctggcgacccctgccctggtctaccaggactatcagtacttagggc

SEQ ID NO: 799170 - DNA, 120 bp, Artificial Sequence
  ENSG00000284491_1 (sequence is synthesized)
ctgcgacctgggcaagcaggagcgcagccgcgaggtagtgggcacagcgccgggcccggttttcatggacccggagaagctgatccagttacggccctgccggcaacgggattgtccatc

SEQ ID NO: 799171 - DNA, 120 bp, Artificial Sequence
  ENSG00000284491_2 (sequence is synthesized)
ctgcaagcccttcgactgcgactggaggctctgagcccgggtgagagagcagggccggggcaagttgcggggcccagggtgggcgcggagggaggatgtgcggtgcggggcgggtatgaa

SEQ ID NO: 799172 - DNA, 120 bp, Artificial Sequence
  ENSG00000284491_3 (sequence is synthesized)
cgggccccatggtctacgccatctgttattgtcccctgcctcgcctggcagatctggaggcgctgaaagtggcagactcaaagaccctattggagagcgagcgggaaaggctgtttgcga

SEQ ID NO: 799173 - DNA, 120 bp, Artificial Sequence
  ENSG00000284491_4 (sequence is synthesized)
aaatggaggacacggactttgtcggctgggcgctggatgtgctgtctccaaacctcatctctaccagcatgcttgggcgggtcaaatacaacctgaactccctgtcacatgatacagcca

SEQ ID NO: 799174 - DNA, 120 bp, Artificial Sequence
  ENSG00000284491_5 (sequence is synthesized)
tcgtggacaccgtagggatgccagagacataccaggcgcggctgcagcaaagttttcccgggattgaggtgacggtcaaggccaaagcagatgccctctacccggtggttagtgctgcca

SEQ ID NO: 799175 - DNA, 120 bp, Artificial Sequence
  ENSG00000284491_6 (sequence is synthesized)
gcatctgtgccaaggtggcccgggaccaggccgtgaagaaatggcagttcgtggagaaactgcaggacttggatactgattatggctcaggctaccccaatgatcccaagacaaaagcgt

SEQ ID NO: 799176 - DNA, 120 bp, Artificial Sequence
  ENSG00000284491_7 (sequence is synthesized)
ggttgaaggagcacgtggagcctgtgttcggcttcccccagtttgtccggttcagctggcgcacggcccagaccatcctggagaaagaggcggaagatgttatatgggaggactcagcat

SEQ ID NO: 799177 - DNA, 120 bp, Artificial Sequence
  ENSG00000284491_8 (sequence is synthesized)
ccgagaatcaggagggactcaggaagatcacatcctacttcctcaatgaagggtcccaagcccgtccccgttcttcccaccgatatttcctggaacgcggcctggagtcagcaaccagcc

SEQ ID NO: 799178 - DNA, 120 bp, Artificial Sequence
  ENSG00000284491_9 (sequence is synthesized)
tctagcagctgcctctacgcgctctacctgcttccccaacccagacattaaaattgtttaaggagaaccacacgtaggggatgtacttttgggacagaagcaaggtgggagtgtgctctg

SEQ ID NO: 799179 - DNA, 120 bp, Artificial Sequence
  ENSG00000284491_10 (sequence is synthesized)
ccaccgaattccccaagctgagtgttcggccatagcccttcgggactacaattcccaggagggcgcacggcagcgacgtcggcgtcggctgcgtaagcgtccacggcggcgggagcgcca

SEQ ID NO: 799180 - DNA, 120 bp, Artificial Sequence
  ENSG00000284491_11 (sequence is synthesized)
ggggcgtgttctgcccgcggattggccggaagcaggcgccgcttcgaggcccgcggaaaacgcgcgccgagacccgctcctgcagtattagttcttgcagctggtggtggcggctgaggc

SEQ ID NO: 799181 - DNA, 120 bp, Artificial Sequence
  ENSG00000284491_12 (sequence is synthesized)
ggcatggatctcagcgagctggagagagacaatacaggccgctgtcgcctgagttcgcctgtgcccgcggtgtgccgcaaggagccttgcgtcctgggcgtcgatgaggcgggcaggggc

SEQ ID NO: 799182 - DNA, 120 bp, Artificial Sequence
  ENSG00000284526_0 (sequence is synthesized)
ggtgtggggcgtggcagaggggcaagggacactgtggttatctcctttttgctcccagggcccatcatggggtaagaggaggtgggtgaagggcagtaagaacagccctaagaattcaat

SEQ ID NO: 799183 - DNA, 120 bp, Artificial Sequence
  ENSG00000284526_1 (sequence is synthesized)
catccccaattattcacataacagcactgggaaattctactttttgtctacccctggaaagcccaggtgaccctccgggttcccagtagccctctgggggcagtgggctgggggtgggag

SEQ ID NO: 799184 - DNA, 120 bp, Artificial Sequence
  ENSG00000284526_2 (sequence is synthesized)
aggcagctcttctgaatggggtgagcaggtctggcttctcggctttgggctgcactctccctgcccagcccagccgccagcggctccgggtcacagactgggctgggtccgctgtcccac

SEQ ID NO: 799185 - DNA, 120 bp, Artificial Sequence
  ENSG00000284526_3 (sequence is synthesized)
tgagcacactgtgctggaaacaagagttggggccagtctgggccactcctcctgctgggcatccttcccagggtcatgcccatgaaacgggagagcagactcgaggcccagtgtcctgag

SEQ ID NO: 799186 - DNA, 120 bp, Artificial Sequence
  ENSG00000284526_4 (sequence is synthesized)
aggcggaaacaatgggccctttgtcttctttcccaccttcctgcacagcaggcctgggtccagctctcttgagccacgacctgaccctcatctgaacctcctcccgggggttctgagaca

SEQ ID NO: 799187 - DNA, 120 bp, Artificial Sequence
  ENSG00000284526_5 (sequence is synthesized)
atttcttgtccctgagatcaggtccctaaaaatcgacgccactgctgtggcccagacaaccagccctcctatctcggcgtctcgctgaggacatcttccccaccccccacagagcagctt

SEQ ID NO: 799188 - DNA, 120 bp, Artificial Sequence
  ENSG00000284526_6 (sequence is synthesized)
tacaggtggtccttatgggttaagggttctaaagccaggcccaccccacccccgcttggtgattacccaacaattgcttccactgctggtctgagctgggctttgtgacacgctgggctt

SEQ ID NO: 799189 - DNA, 120 bp, Artificial Sequence
  ENSG00000284526_7 (sequence is synthesized)
gggcccttaggggctgcctcagagacatcgggtggacctaagcctccccaacaccaatgagctccccttcccacacccctaatccatcccctacccagtctccctcccagtcccgttcca

SEQ ID NO: 799190 - DNA, 120 bp, Artificial Sequence
  ENSG00000284526_8 (sequence is synthesized)
acaacattgtcacccctccaggccagcagcctgccccttccccctcccccactcggggctcttcctcccggcccccctcccaccctcccaccccaaatgcctcacagccctcttcccgga

SEQ ID NO: 799191 - DNA, 120 bp, Artificial Sequence
  ENSG00000284526_9 (sequence is synthesized)
cttcgtccctgaaccccagtcctcaggtccaacacgtgccccgcggggctgcccaaacccccaccccacccacctccaaatctccctcccagtctggtttcaaatccctctctcgaaacc

SEQ ID NO: 799192 - DNA, 120 bp, Artificial Sequence
  ENSG00000284526_10 (sequence is synthesized)
cttccctaacccccgctgtgccccccaagtcctccttctacagccctgccacctcatcttcctatatcgggccaattcagaacatcccgtcctatatcaccccctatgtgccccgctttc

SEQ ID NO: 799193 - DNA, 120 bp, Artificial Sequence
  ENSG00000284526_11 (sequence is synthesized)
tgaaggagcccccctttttccagccccccacagcaccacttccccaaaacccatgctttgcctgtccctctccctgccctgcccggaagcccccaccccctcctgactcactctacttac

SEQ ID NO: 799194 - DNA, 120 bp, Artificial Sequence
  ENSG00000284526_12 (sequence is synthesized)
ctctccttcccccgcccccccaccacccccagtttaactgccccttcccaactccccccggtctgttcatgcccccctcctctctctcctacaccccgcccgtggaggtcctggtgagcg

SEQ ID NO: 799195 - DNA, 120 bp, Artificial Sequence
  ENSG00000284526_13 (sequence is synthesized)
ggaagccgcacgtggtccccaacgtactgcctgccaccttctacacccccttctcccgctactactcccagccccgctcctaccgctcagggtaccgcggctactccggcgccctgaccc

SEQ ID NO: 799196 - DNA, 120 bp, Artificial Sequence
  ENSG00000284526_14 (sequence is synthesized)
tcccctccatctcccccttgcaatacgacggctctgggcgctctgtccacttctatcatgggtcctaggccgcacgcctattttggaccagaagcctctgccagtaaattcaagctgcta

SEQ ID NO: 799197 - DNA, 120 bp, Artificial Sequence
  ENSG00000284526_15 (sequence is synthesized)
catccggacttcatcagctacctgacagaaaggtacggagtggggtgcctgaagaacagcgtccccttccttcccccttttacacacccacccacatccagtcagcgccctcgcacgagc

SEQ ID NO: 799198 - DNA, 120 bp, Artificial Sequence
  ENSG00000284526_16 (sequence is synthesized)
cccacgcactgaccgataaccagagctccactgtcccgagtgctgtgtgcaaagcactgtcacttcatttactgttttatttagcaccttgatagagggagggtgatatatgtcagtcac

SEQ ID NO: 799199 - DNA, 120 bp, Artificial Sequence
  ENSG00000284526_17 (sequence is synthesized)
caggaaatggacaggaaactcaggataactcaaggaggtttatacaaaggcacagactgggagctgggaccataaggtgcacagcagcagtggcgccgtcagcagcagggcatcagaacc

SEQ ID NO: 799200 - DNA, 120 bp, Artificial Sequence
  ENSG00000284526_18 (sequence is synthesized)
ttcaggcccaaacacagccaacacaaggtgccggaaggaacccggggaccagcctcaacccccttccctccctcctgccaggggttctcaatgtggatgtgcatatggtcctcgtctggg

SEQ ID NO: 799201 - DNA, 120 bp, Artificial Sequence
  ENSG00000284526_19 (sequence is synthesized)
gttgtcacaagggtggtggcggcaagtgccatcagtgggtagaggccagggatgctgctgaacatcacaagaagcacctggccccaagtgtcaacagcactgagactgagaaaccctgct

SEQ ID NO: 799202 - DNA, 120 bp, Artificial Sequence
  ENSG00000284526_20 (sequence is synthesized)
gtggaccagaggctcgaatcccagggcagggagcagttggagaggggtgtgtggatgtggggaggcaaatgaagcccctctaattagtcccgtgctacagaggaagacaggctctgagag

SEQ ID NO: 799203 - DNA, 120 bp, Artificial Sequence
  ENSG00000284526_21 (sequence is synthesized)
gtcaggtgatcggcctggcacagctcgatgtgaactcaggcctgagggcagagcccgtggtcacaccctggcctcactcttggactgtgtgggtccggtcacagggtctgagctccctgt

SEQ ID NO: 799204 - DNA, 120 bp, Artificial Sequence
  ENSG00000284526_22 (sequence is synthesized)
ccctcacacgtgattcctacttaatcaagatgtggagtagagagaaactgcagtctcaggctaaataaacaggccacctatgcccttggcagtgtggttacttagtagcttggggtgaaa

SEQ ID NO: 799205 - DNA, 120 bp, Artificial Sequence
  ENSG00000284526_23 (sequence is synthesized)
aaagggggaacctgtggttcctttctcaccaccccctcccccaaccttacctaaggtctcaaagatctttgtatttagtccacttggaccgaataaagaactgactggagtagaaggccc

SEQ ID NO: 799206 - DNA, 120 bp, Artificial Sequence
  ENSG00000284526_24 (sequence is synthesized)
tcagtttttgaagttttcccacctatttgaatgtgtagttgtgaagtgtgatgatagccatcaagctagtgagctgaaatgtctctttttgcttccaggttcttgaaatcaaagttgatt

SEQ ID NO: 799207 - DNA, 120 bp, Artificial Sequence
  ENSG00000284526_25 (sequence is synthesized)
aacacacattttggagacctatatatgcctagtaccggggctctcatgctgctgacagctttgcatacctgtgaccaggtcagtgcctatggattcatcacaagcaactactggaaattt

SEQ ID NO: 799208 - DNA, 120 bp, Artificial Sequence
  ENSG00000284526_26 (sequence is synthesized)
tccgaccactatttcgaacgaaaaatgaagccattgatattttatgcaaaccacgatctgtccctggaagctgccctgtggagggacctgcacaaggccggcatccttcagctgtaccag

SEQ ID NO: 799209 - DNA, 120 bp, Artificial Sequence
  ENSG00000284526_27 (sequence is synthesized)
cgctgaccccaatgcactgagccctttgcttcttcaagagttgcggccctgatcctctcaagtggccaaaagcttttttaacttttcaatcttcaccttcccttgccaacagagggcact

SEQ ID NO: 799210 - DNA, 120 bp, Artificial Sequence
  ENSG00000284526_28 (sequence is synthesized)
ggggtgaattcaagattttcatcgaggtctgttcaatataggacaccccagcttgtccttggctcatccaagaactcttctgtatctaaaacaatacatctcaatcttggccaagggaaa

SEQ ID NO: 799211 - DNA, 120 bp, Artificial Sequence
  ENSG00000284526_29 (sequence is synthesized)
atggactgctttgctggattggcactgagcaactttaggaaatgtcggtggagtgttcagcaagatcagacagcagtccaggtcaaaggcaaacacacacgctccagcccaaatcctcct

SEQ ID NO: 799212 - DNA, 120 bp, Artificial Sequence
  ENSG00000284526_30 (sequence is synthesized)
ggtggcacatcctaccccagatgctaaagtgattcaaggactccaggacacctcttaagagcctttctaagaacatgataggcttacttctgctccataataaagtgggagaaaaaagcc

SEQ ID NO: 799213 - DNA, 120 bp, Artificial Sequence
  ENSG00000284526_31 (sequence is synthesized)
agaatataacttaagactagataactgcgtacatgatggaccatttttttttttttggctgggtagagaaatcatataaaacgcaggctgtttagcatggagatgactctcagaacactg

SEQ ID NO: 799214 - DNA, 120 bp, Artificial Sequence
  ENSG00000284526_32 (sequence is synthesized)
ggagggtctggcacttgatgggggttagttgcttggcagcctgcctgccactgagggaagtcccattagagatgtatcaccaccttgtcaccaacaggatgatgtcaccaggtaataaac

SEQ ID NO: 799215 - DNA, 120 bp, Artificial Sequence
  ENSG00000284526_33 (sequence is synthesized)
cttcatcctcatatcatggcgtcagtaaatttgaactcagctgacggtagtttcccaagtttattgtaagtggttttaagttaagtctcatccaaacaagttatcacacagcacttaacc

SEQ ID NO: 799216 - DNA, 120 bp, Artificial Sequence
  ENSG00000284526_34 (sequence is synthesized)
aagccctgggatttactgtcttgatgactacacggctttgcacagtctgagatgcttcagtgtgcaaggcagcagctgggggggaggaggggggtcttcacagggacagctggcaagaga

SEQ ID NO: 799217 - DNA, 120 bp, Artificial Sequence
  ENSG00000284526_35 (sequence is synthesized)
cttcctgaggcacatcagttacgttggtcaatttagggcacggtctggttctgcagctttgaaaggtggattctttctattagcacactttacaagagggattgtaaaggattaactcag

SEQ ID NO: 799218 - DNA, 120 bp, Artificial Sequence
  ENSG00000284526_36 (sequence is synthesized)
tcaccagaaacgaaacaccacttcagaaattcagagacctctgatcaacagaacagacatttgggctttaactgctaaagcagctacctacttggggaaaccatggcattctgctgcctg

SEQ ID NO: 799219 - DNA, 120 bp, Artificial Sequence
  ENSG00000284526_37 (sequence is synthesized)
gacagcaggaattaagagagatttcagagttactggcacgaggacaaagcctctcagctcgcttcaccttggcaaccttaaacagtccctccttggtctctatgatagcagtatgttcct

SEQ ID NO: 799220 - DNA, 120 bp, Artificial Sequence
  ENSG00000284526_38 (sequence is synthesized)
ttggatggaatacttggtttggaaataatgtagtcaaatgtaggatatgtaagtactcctcaacagtcacaatccatcctagtatcttaaatagtgattttttttttttaatttacaaaa

SEQ ID NO: 799221 - DNA, 120 bp, Artificial Sequence
  ENSG00000284526_39 (sequence is synthesized)
ctcacaatcatggcggaaggtgaaagccacatctcacatggcagcagataagagaaaaaaaggtagtgatcttttagtaaagaaacctgagactggtagtgggcttggagccagaggatc

SEQ ID NO: 799222 - DNA, 120 bp, Artificial Sequence
  ENSG00000284526_40 (sequence is synthesized)
agaaacctgagactggtagtgggcttggagccagaggatcgcttaagtccgggagttcgagaccagccagggtaacaaattgagacccccccccaactttaaaattaaaaaacgaaagaa

SEQ ID NO: 799223 - DNA, 77 bp, Artificial Sequence
  ENSG00000284526_41 (sequence is synthesized)
agtttgagaccaacctgggcaacatggttgaaaccctgtctctactaaaacaaaaaaaatcagccaggtgtggtagc

SEQ ID NO: 799224 - DNA, 120 bp, Artificial Sequence
  ENSG00000284526_42 (sequence is synthesized)
aaaaacaacaacaacaacaacaacaaaacaaaacaaaaaaaacctctcaaaaaaatgaaaaaaaatttaaatttaaattaaaaaaaaaaatgctgggtctgatggctcacacctgtcatc

SEQ ID NO: 799225 - DNA, 77 bp, Artificial Sequence
  ENSG00000284526_43 (sequence is synthesized)
aacctctcaaaaaaatgaaaaaaaatttaaatttaaattaaaaaaaaaaatgctgggtctgatggctcacacctgtc

SEQ ID NO: 799226 - DNA, 120 bp, Artificial Sequence
  ENSG00000284546_0 (sequence is synthesized)
atgctctcctccccactcagggtggctgtggtgtgcgtgagcaatgtcaacaggagcatggaggcccacagcatcctcaggagaaaagggctaagtgtccggtcttttggaactgaatct

SEQ ID NO: 799227 - DNA, 120 bp, Artificial Sequence
  ENSG00000284546_1 (sequence is synthesized)
catgtgaggctaccaggaccaagacccaatcgtcctgtagtttatgattttgcaacaacatataagcagatgtacaatgacctcctcaggaaagatagagaacgctacacccgcaacgga

SEQ ID NO: 799228 - DNA, 120 bp, Artificial Sequence; identical to SEQ ID NO: 799024
  ENSG00000284546_2 (sequence is synthesized)

SEQ ID NO: 799229 - DNA, 120 bp, Artificial Sequence
  ENSG00000284546_3 (sequence is synthesized)
tgtgagatttgccagtgcctgcagcagtcagacgacatagaagacaatctggaggagctgctgttgcaaatggaggagaaggcaggaaaaagctttcttcacaccgtctgcttctactga

SEQ ID NO: 799230 - DNA, 120 bp, Artificial Sequence
  ENSG00000284609_0 (sequence is synthesized)
atgctggctagaaacaactccttagtgactgaatttattcttgctggattaacagatcatccagagttccagcaacccctctttttcctgtttctagtggtctacattgtcaccatggta

SEQ ID NO: 799231 - DNA, 120 bp, Artificial Sequence
  ENSG00000284609_1 (sequence is synthesized)
ggcaaccttggcttgatcattcttttcggtctaaattctcacctccacacaccaatgtactatttcctcttcaatctctccttcattgatctctgttactcctctgttttcactcccaaa

SEQ ID NO: 799232 - DNA, 120 bp, Artificial Sequence
  ENSG00000284609_2 (sequence is synthesized)
atgctaatgaactttgtatcaaaaaagaatattatctcctatgttgggtgcatgactcagctgtttttctttctcttttttgtcatctctgaatgttacatgttgacctcaatggcatat

SEQ ID NO: 799233 - DNA, 120 bp, Artificial Sequence
  ENSG00000284609_3 (sequence is synthesized)
ggagccacggcccacaccgggtgcatgcttagactcaccttctgcagtgctaatatcatcaaccattacttgtgtgacatactccccctcctccagctttcctgcaccagcacctatgtc

SEQ ID NO: 799234 - DNA, 120 bp, Artificial Sequence
  ENSG00000284609_4 (sequence is synthesized)
aacgaggtggttgttctcattgttgtgggtattaatatcatggtacccagttgtaccatcctcatttcttatgttttcattgtcactagcattcttcatatcaaatccactcaaggaaga

SEQ ID NO: 799235 - DNA, 120 bp, Artificial Sequence
  ENSG00000284609_5 (sequence is synthesized)
tcaaaagccttcagtacttgtagctctcatgtcattgctctgtctctgttttttgggtcagcggcattcatgtatattaaatattcttctggatctatggagcagggaaaagtttcttct

SEQ ID NO: 799236 - DNA, 120 bp, Artificial Sequence
  ENSG00000284609_6 (sequence is synthesized)
gttttctacactaatgtggtgcccatgctcaatcctctcatctacagtttgaggaacaaggatgtcaaagttgcactgaggaaagctctgattaaaattcagagaagaaatatattctaa

SEQ ID NO: 799237 - DNA, 120 bp, Artificial Sequence
  ENSG00000284609_7 (sequence is synthesized)
acttactgggggatatgtaatcaggtccaaaagaattgtaagccttgagcaaatgccatgtgctctatgacatggtagctctggtttgaagtgcagttttccaacaaaccctcttggcaa

SEQ ID NO: 799238 - DNA, 120 bp, Artificial Sequence
  ENSG00000284609_8 (sequence is synthesized)
atttataaataatagtttgatctacaccacaaaatgattcccagaacattcagattctgagatctctgctcaatgcttttgccagtcaagggagaagaagattctgtgactacatctgat

SEQ ID NO: 799239 - DNA, 120 bp, Artificial Sequence
  ENSG00000284609_9 (sequence is synthesized)
ttaaatttttattagtgtgttccatgaagagattttgttgtttctacagatggtgttatgtgtgatttaataaacttgtcttatcatttctcttatgaaatcatcttgtctctttttttg

SEQ ID NO: 799240 - DNA, 120 bp, Artificial Sequence
  ENSG00000284609_10 (sequence is synthesized)
gttttgcatctctggcacttctcacaattttactaaataggtcatggcatctttgtaaaaggaacatatgcactgatatttttcattatcattttatatccttcctctctcctgggctgt

SEQ ID NO: 799241 - DNA, 120 bp, Artificial Sequence
  ENSG00000284609_11 (sequence is synthesized)
tcttaattggacatatatggtaaatttcatgaattataaagatgtcaaagtcacggctttctcacctaaactcagaagtgccaaatatgatagaagcattcttatttttatcaacattgt

SEQ ID NO: 799242 - DNA, 120 bp, Artificial Sequence
  ENSG00000284609_12 (sequence is synthesized)
tacagatataggcagctggatttgatgaaatgtctccattacaaatggtaggtagcttaaagcagaatgagcaccccttgatcttgtccttttgttctatattgtcaccattttgccttt

SEQ ID NO: 799243 - DNA, 120 bp, Artificial Sequence
  ENSG00000284609_13 (sequence is synthesized)
tattattctgacttttcttgttccctttgagaatggcaaaatttgtaccacatgccgtttgcttctgagaacctctatcagtccagtgcatttgatacagcagagaatatgtgtgtctcc

SEQ ID NO: 799244 - DNA, 120 bp, Artificial Sequence
  ENSG00000284609_14 (sequence is synthesized)
accttttattgccaaaggcagcatttacagaggatgattagagaaataatacatgtggacctcaggattccaataagtgggtccattgtttacattataaaactttcattcattgctatc

SEQ ID NO: 799245 - DNA, 120 bp, Artificial Sequence
  ENSG00000284609_15 (sequence is synthesized)
taaaacagcattgaaaattttgaaaaaagcgtgtagttcctactgtaaatgttatttttttactcgttataggtaaatactgcacattaagttagcagaaatattttacacaatggttac

SEQ ID NO: 799246 - DNA, 120 bp, Artificial Sequence
  ENSG00000284629_0 (sequence is synthesized)
atgggttgctgtggttgtggaggttgtggtggctgtggtggctgcggtggtggctgtggtggtggctgtggcagatgcaccacctgcaggtgctaccgggtgggctgctgctccagctgc

SEQ ID NO: 799247 - DNA, 120 bp, Artificial Sequence
  ENSG00000284629_1 (sequence is synthesized)
ggctgctgcagcactcccgtgatctgctgctgccgccgcacctgcagctcgtgtggctacagctgtgggaagggctgttgccagcagaagtgctgctgccagaagcaatgctgttgctag

SEQ ID NO: 799248 - DNA, 120 bp, Artificial Sequence
  ENSG00000284631_0 (sequence is synthesized)
gcaaaaatgacatgttttatttggatgctcttatttactcttttgcatctcgggaatttccatgaaagcagggtgatttcctggagagaagccatggcagagagatggaaaagcagctgg

SEQ ID NO: 799249 - DNA, 120 bp, Artificial Sequence
  ENSG00000284631_1 (sequence is synthesized)
cagccaccttgggttccggcttaacccgaagtctcaaggattcaagtggtttctgagtaaatgaagatcctctcctacatgttagcatctcttggcttgcttttaatctggttttaacag

SEQ ID NO: 799250 - DNA, 120 bp, Artificial Sequence
  ENSG00000284631_2 (sequence is synthesized)
agacaagtgaaaattagcaaatgttttgggtcaaatatagtccataaggatgtaaacaaggaatagtcctagataaccttatcatggaaactgcagtagcaacaacaaggaagtgaccac

SEQ ID NO: 799251 - DNA, 120 bp, Artificial Sequence
  ENSG00000284631_3 (sequence is synthesized)
tggtcatgtgtcctgggtcactccctcttcctttccccaagatggtacataagggtgtcccccagcagaaggaggcatcagacctcctcacctctcctgagtcctctctgctcacttcac

SEQ ID NO: 799252 - DNA, 120 bp, Artificial Sequence
  ENSG00000284631_4 (sequence is synthesized)
ctgagtcctctactgacaccatgggttgctgtggttgtggaagttgtggtggctgtggtggccgctgcggtggtggctgtggtggtggctgcagtggtggctgcggtggtggctgcggtg

SEQ ID NO: 799253 - DNA, 120 bp, Artificial Sequence
  ENSG00000284631_5 (sequence is synthesized)
gtggctgtggtggtggctgtggcagctgcaccacctgcaggtgctaccgggtgggctgctgctccagctgctgcccctgctgccgcggctgctgtggaggctgctgcagcactcccgtga

SEQ ID NO: 799254 - DNA, 120 bp, Artificial Sequence
  ENSG00000284631_6 (sequence is synthesized)
gcgggcccccggcctctgggcaggggctgcaggtatctgccctgtaggtaagactcccatccttcccatcctgtctggtctccccctcctctgtggtcttgaactctgttgctgtttttc

SEQ ID NO: 799255 - DNA, 120 bp, Artificial Sequence
  ENSG00000284631_7 (sequence is synthesized)
tttggtgtttcatgtctttccgtctgaaaagcttccaaactaataggaacgatctcatggaaaaatatgagaacagcacagcagctgtgaaactgtccaggtcactgacctcagggaaat

SEQ ID NO: 799256 - DNA, 120 bp, Artificial Sequence
  ENSG00000284631_8 (sequence is synthesized)
gaaatcacaactcctcgtgtttggtctgatggacatgctcatggctatgcagctccgtcttagttccacttttcccatcggcatgcgatgcttcttttgtttctttgcttttgtgttctt

SEQ ID NO: 799257 - DNA, 120 bp, Artificial Sequence
  ENSG00000284631_9 (sequence is synthesized)
agttatcacataacattgtccaaatttcctaacaaaataaactaagtgcccataaaaacttctctttttgcctttcttccacttgatcacactgaattctggtttgtctgttcagaaact

SEQ ID NO: 799258 - DNA, 120 bp, Artificial Sequence
  ENSG00000284631_10 (sequence is synthesized)
ggagagatgttttatcttttttatcttggaacaaagcctttgaaacacttgtgccctggctcatccctgtaatcccatcactttaggaggccaaggcaggagagtccaggagttcaagac

SEQ ID NO: 799259 - DNA, 120 bp, Artificial Sequence
  ENSG00000284635_0 (sequence is synthesized)
ctcctgagccctctatcctcgcttctcctcagtcctctctactgacaccatgggttgctgtgggtgtggtggctgcggtggtggctgtggtggctgcagtggtggctgtggtggtggctg

SEQ ID NO: 799260 - DNA, 120 bp, Artificial Sequence
  ENSG00000284635_1 (sequence is synthesized)
cggtggtggctgcggcggtggtggctgcggtggtggctgtggcagctgcaccacctgcaggtgctaccgggtgggctgctgctccagctgctgcccctgctgccgtggctgctgtggagg

SEQ ID NO: 799261 - DNA, 120 bp, Artificial Sequence
  ENSG00000284635_2 (sequence is synthesized)
ctgctgcagcactcccgtgatctgctgctgccgccgcacctgcagctcgtgtggctgtggctatgggaagggctgttgccagcagaagggatgctgtcagcagaagtgctgctgccagaa

SEQ ID NO: 799262 - DNA, 120 bp, Artificial Sequence
  ENSG00000284635_3 (sequence is synthesized)
ggctttcctccatcccatcccgtgtgctccctgctgtctccctgtcacccagacttcatggcacttttctgcttggttctcatctctgtagtttaagtaattcttcctattattaaggta

SEQ ID NO: 799263 - DNA, 120 bp, Artificial Sequence
  ENSG00000284635_4 (sequence is synthesized)
gtcacatgggcaactggtacaatgtcattcaagcacaaagatgcaggacattttgagttttgagctcagcaaagcaggatcatgattttgaccatgctttcttctttgaactcttttctc

SEQ ID NO: 799264 - DNA, 120 bp, Artificial Sequence
  ENSG00000284635_5 (sequence is synthesized)
tctaggcattaggtcttcttgtgtgttccacatatgctctgtcttttctgggccatagagtcttttctaggtgttctcctaaaattttctttttttgttttactaattcatggtcttcat

SEQ ID NO: 799265 - DNA, 120 bp, Artificial Sequence
  ENSG00000284638_0 (sequence is synthesized)
tgtgtgggtcacctccgggcctcccctgtgccgggcggacaccatgccggggctggcggccgagggggaggccgagggctggagcccgtccccgccgctgtacgaggagtaccggccgcc

SEQ ID NO: 799266 - DNA, 120 bp, Artificial Sequence
  ENSG00000284638_1 (sequence is synthesized)
gcccctggacagcatccgcctgcccaggtacgtgctgtacctgctgctggccgcgctggtggtggtggccgtcgcctacgccatcgtcgggcacctcatcaaagacctcgcccacgacct

SEQ ID NO: 799267 - DNA, 120 bp, Artificial Sequence
  ENSG00000284638_2 (sequence is synthesized)
tttggcccgaagccagaccaggaggccgcaccccgggagctgcgccccagcctgaccggcgaggacttggaggggctggacctgcagctggccctggcctggcagggcgaggaggacgcc

SEQ ID NO: 799268 - DNA, 120 bp, Artificial Sequence
  ENSG00000284638_3 (sequence is synthesized)
ggcgggggtggggagggagccccctctgaacccccgcctcccccggagccccgccgcccctccattgccttcaaggaccccccatcccgaagctccttctggaagctgatggcaacttga

SEQ ID NO: 799269 - DNA, 120 bp, Artificial Sequence
  ENSG00000284643_0 (sequence is synthesized)
atgggttgctgtggttgtggaggttgtggtggctgcggtggccgctgtggtggctgcggtggtggctgtggtggtggctgtggtggtggctgcggtggtggctgtggtggtggctgtggt

SEQ ID NO: 799270 - DNA, 120 bp, Artificial Sequence
  ENSG00000284643_1 (sequence is synthesized)
ggctgcggtggtggctgcggtggtggctgtggtggtagctgtggcagctgcaccacctgcaggtgctaccgggtgggctgctgctccagctgctgcccctgctgccgtggctgctgtgga

SEQ ID NO: 799271 - DNA, 120 bp, Artificial Sequence
  ENSG00000284643_2 (sequence is synthesized)
ggctgctgcagcactcccgtgatctgttgctgccgccgcacctgccactcatgtggctgtggctgtgggaagggctgttgccagcagaaatgctgctgccagaagcaatgctgctgctag

SEQ ID NO: 799272 - DNA, 120 bp, Artificial Sequence; identical to SEQ ID NO: 611458
  ENSG00000284662_0 (sequence is synthesized)

SEQ ID NO: 799273 - DNA, 120 bp, Artificial Sequence; identical to SEQ ID NO: 768444
  ENSG00000284662_1 (sequence is synthesized)

SEQ ID NO: 799274 - DNA, 86 bp, Artificial Sequence; identical to SEQ ID NO: 611460
  ENSG00000284662_2 (sequence is synthesized)

SEQ ID NO: 799275 - DNA, 120 bp, Artificial Sequence; identical to SEQ ID NO: 611461
  ENSG00000284662_3 (sequence is synthesized)

SEQ ID NO: 799276 - DNA, 120 bp, Artificial Sequence; identical to SEQ ID NO: 611462
  ENSG00000284662_4 (sequence is synthesized)

SEQ ID NO: 799277 - DNA, 120 bp, Artificial Sequence; identical to SEQ ID NO: 611463
  ENSG00000284662_5 (sequence is synthesized)

SEQ ID NO: 799278 - DNA, 120 bp, Artificial Sequence; identical to SEQ ID NO: 611464
  ENSG00000284662_6 (sequence is synthesized)

SEQ ID NO: 799279 - DNA, 120 bp, Artificial Sequence; identical to SEQ ID NO: 768450
  ENSG00000284662_7 (sequence is synthesized)

SEQ ID NO: 799280 - DNA, 120 bp, Artificial Sequence
  ENSG00000284667_0 (sequence is synthesized)
atgggttgctgtggttgtggaggttgtggtggctgcggtggcggctgtggtggtggctgtggcagctgcaccacctgcaggtgctaccgggtgggctgctgctccagctgctgcccctgc

SEQ ID NO: 799281 - DNA, 120 bp, Artificial Sequence
  ENSG00000284667_1 (sequence is synthesized)
ggctgctgcagcacacctgtgatctgctgctgccgccgcacctgctgctcatgtggctgcggctgtgggaagggctgttgccagcagaaaggctgctgccagaagcaatgctgctgctag

SEQ ID NO: 799282 - DNA, 120 bp, Artificial Sequence
  ENSG00000284680_0 (sequence is synthesized)
atgctggctagaaacaactccttagtgactgaatttattcttgctggattaacagatcatccagagttccggcaacccctctttttcctgtttctagtgatctacattgtcaccatggta

SEQ ID NO: 799283 - DNA, 120 bp, Artificial Sequence
  ENSG00000284680_1 (sequence is synthesized)
ggcaaccttggcttgatcactcttttcggtctaaattctcacctccacacaccaatgtactatttcctcttcaatctctccttcattgatctctgttactcctctgttttcactcccaaa

SEQ ID NO: 799284 - DNA, 120 bp, Artificial Sequence
  ENSG00000284680_2 (sequence is synthesized)
atgctaatgaactttgtgtcaaaaaagaatattatctccaatgttgggtgcatgactcggctgtttttctttctctttttcgtcatctctgaatgttacatgttgacttcaatggcatat

SEQ ID NO: 799285 - DNA, 120 bp, Artificial Sequence; identical to SEQ ID NO: 799233
  ENSG00000284680_3 (sequence is synthesized)

SEQ ID NO: 799286 - DNA, 120 bp, Artificial Sequence
  ENSG00000284680_4 (sequence is synthesized)
aacgaggtggttgttctcattgttgtgggtactaatatcacggtacccagttgtaccatcctcatttcttatgttttcattgtcactagcattcttcatatcaaatccactcaaggaaga

SEQ ID NO: 799287 - DNA, 120 bp, Artificial Sequence; identical to SEQ ID NO: 799235
  ENSG00000284680_5 (sequence is synthesized)

SEQ ID NO: 799288 - DNA, 120 bp, Artificial Sequence
  ENSG00000284680_6 (sequence is synthesized)
gttttctacactaatgtggtgcccatgctcaatcccctcatctacagtttgaggaacaaggatgtcaaagttgcactgaggaaagctctgattaaaattcagaggagaaatatattctaa

SEQ ID NO: 799289 - DNA, 120 bp, Artificial Sequence
  ENSG00000284684_0 (sequence is synthesized)
gtgctgtacttctctttcttcctgtgtctctgtgccctggtgtgcctgtacttctctggctgccaggagatgacctataagcatgaagaagcatgttgtggagacattttttggatttga

SEQ ID NO: 799290 - DNA, 120 bp, Artificial Sequence
  ENSG00000284691_0 (sequence is synthesized)
cgcatggtcgccgctccggcccgggcgggcgcagcgctggcagccccgttttccgccagccgggctgccggagagttagacctcccagcctcacggggctgctgtgcggctgcgacgacg

SEQ ID NO: 799291 - DNA, 120 bp, Artificial Sequence
  ENSG00000284691_1 (sequence is synthesized)
ccggcgactgcggcgctgcagcggagacggaaggctcgggaggcggcgccatggactggtgattgcagctggaagtgcccatgaccgagctggcgtcctccgggggcgggtcccctgcgg

SEQ ID NO: 799292 - DNA, 120 bp, Artificial Sequence
  ENSG00000284691_2 (sequence is synthesized)
gggacggggaggagggtctgggggacgagcgaggcctggtcatccaccaccctgcagaggagcagccctaccgctgcccgctgtgcggccagaccttctcgcagcagcccagcctggtgc

SEQ ID NO: 799293 - DNA, 120 bp, Artificial Sequence
  ENSG00000284691_3 (sequence is synthesized)
ggcaccagaaggcgcacgccggagcgggccgcgcggctgccttcgtgtgtcccgagtgcggcaaggccttcagcgtcaagcacaacctcgaggtgcaccagcgcacgcacaccggggagc

SEQ ID NO: 799294 - DNA, 120 bp, Artificial Sequence
  ENSG00000284691_4 (sequence is synthesized)
cgagaagccgcaccagtgcgcgcagtgcggccgctgcttccgcgagccgcgcttcctgctcaaccaccagcgcacccacgcgcgcatgcccgcgccgcacccgcgccgccccggcgtctt

SEQ ID NO: 799295 - DNA, 120 bp, Artificial Sequence
  ENSG00000284691_5 (sequence is synthesized)
ggcggccctacttctgcccccgctgcggcaagagcttcgcgcgcgagggctcgctcaagacccatcagcgcagccacggccacgggcccgagggccaggcggcccacttaggacgcgtgc

SEQ ID NO: 799296 - DNA, 120 bp, Artificial Sequence
  ENSG00000284691_6 (sequence is synthesized)
tatgatgcgcccggggcctgctgccgacggctgcttcccgccccgcacgtgcgtccccgacccctggagatggccctgggccgcagctccctctctagatgggatcccgggagaggggca

SEQ ID NO: 799297 - DNA, 120 bp, Artificial Sequence
  ENSG00000284691_7 (sequence is synthesized)
gcgctggcttgggctcttgaaggtgtgggccgccgccaggctccggccgcccgctcgcgttcctccctcgggaccctctggctggctgcgcacagctgcttccggctcctgccatggttc

SEQ ID NO: 799298 - DNA, 120 bp, Artificial Sequence
  ENSG00000284691_8 (sequence is synthesized)
tccttctctggcccatccggcctagagcagttgcagagtgggcaggatcttaagacccgataggtgcagaacccatctggacacggagaccaggaatggagttccatggaggcctggctg

SEQ ID NO: 799299 - DNA, 120 bp, Artificial Sequence
  ENSG00000284691_9 (sequence is synthesized)
agctatttgataagagcaacgtcgcgggacgcttgccgtctttatgggggcggggagaaggggcgcgggtgtcgctgcgggagagttaccgtatttgcgttgagcagcgcagactgtaga

SEQ ID NO: 799300 - DNA, 120 bp, Artificial Sequence
  ENSG00000284691_10 (sequence is synthesized)
acattgcagccttctgcaaggatggggtggtactgtccttctcacttctcattctcttccattttaaaatgataaacctgggtcagaggatatttaggaagaggcattgtcattaagtcc

SEQ ID NO: 799301 - DNA, 120 bp, Artificial Sequence
  ENSG00000284691_11 (sequence is synthesized)
aagacaagatggtcagatttgttatcctagtgggttacaatccaaaatactctggagcatgctgagattaaggtggttgccaagggaacagaaaacagccatgagtaaataaatcaagac

SEQ ID NO: 799302 - DNA, 120 bp, Artificial Sequence
  ENSG00000284691_12 (sequence is synthesized)
tttaaaggatttagatcgggtctatggccagttgcagagtgggcaggatcttaagacccgataggtgcagaacccatctggacacggagaccaggaatggagttccatggaggcctggct

SEQ ID NO: 799303 - DNA, 120 bp, Artificial Sequence
  ENSG00000284691_13 (sequence is synthesized)
ggcactgcacccgggcatgaggacacatccagtaagaagacctgcctcaagaggtgcactgcggtgaccagtggaggtgactggttggagcctggaattggaagcagattccaagctctg

SEQ ID NO: 799304 - DNA, 120 bp, Artificial Sequence
  ENSG00000284691_14 (sequence is synthesized)
gtggacaaactctccaggcctggtgggaatcacagctggggcagacctcatcctggctgcctggccacaggcccccactctctgccactggtggtaggacgatgcctgtgtggagagctg

SEQ ID NO: 799305 - DNA, 120 bp, Artificial Sequence
  ENSG00000284691_15 (sequence is synthesized)
gcttctctgctcccgcctggtccaccacttggctagagttcagagacaggaagtgattggtctaagctaacacagcaagttggtggcagacctggttctagaggcaaaaccttcttccag

SEQ ID NO: 799306 - DNA, 120 bp, Artificial Sequence
  ENSG00000284691_16 (sequence is synthesized)
atgtgaatgaaacctgcaggcttcattttcctttctgagcagtgcttcttagctctttggagacacgaagcccttggaaaatctgatgaaggttacggaccttccctaggaaaacagata

SEQ ID NO: 799307 - DNA, 120 bp, Artificial Sequence
  ENSG00000284691_17 (sequence is synthesized)
actgacgtagactcaaaaaccccaagcaatttcaggagccactggactccctgaatgaaacccatccctggactccaggctaagaacctcagccctggggacttcacctgctgccctttc

SEQ ID NO: 799308 - DNA, 120 bp, Artificial Sequence
  ENSG00000284691_18 (sequence is synthesized)
cttacctgtcacacattgagccccgagtcaaggccactgtacaagtagtgcccctccctccccctggccaagcctccttcccttgttcaggaataaagaattccgaggagccctttttag

SEQ ID NO: 799309 - DNA, 120 bp, Artificial Sequence
  ENSG00000284691_19 (sequence is synthesized)
tcattcccttctcccagacctaacgaatggtgcgtcaggtttctggagcctcatttcccttccccagacattggcagaggtcccttgggctagattttctcttctggttttgtttcttgt

SEQ ID NO: 799310 - DNA, 120 bp, Artificial Sequence
  ENSG00000284691_20 (sequence is synthesized)
tcactgtgtggtctcaggggaagctggactgctgtggacgctggtgggagcttgagtctggtctgagtctgccccagggagaaagaatcctgcttccaccaaccaagcccagtcagcggt

SEQ ID NO: 799311 - DNA, 120 bp, Artificial Sequence
  ENSG00000284691_21 (sequence is synthesized)
tcctcccagctggccaagtgttcagcccagtgggctggggaggaagaggatgagggcctcgctcctggtgcctgtggctctgggcagggtgagaggtcggtggaggatctttctgtgtgt

SEQ ID NO: 799312 - DNA, 120 bp, Artificial Sequence
  ENSG00000284691_22 (sequence is synthesized)
tctctgagtatgcagcagtgcagttgaagggaacagggcccaggcaggcagcagggcaaggactcctcccatcttcacacctgaaccagtcagcctggaagctacaagttctcacctgcc

SEQ ID NO: 799313 - DNA, 120 bp, Artificial Sequence
  ENSG00000284691_23 (sequence is synthesized)
tccccagaatgaacatcagaaaaggcaaaactgaccagggctgggatgggtttgggtcagcgtggttggagggcagcctgtggatccctgcactggagtcttgctgtcttcgatgcaggt

SEQ ID NO: 799314 - DNA, 120 bp, Artificial Sequence
  ENSG00000284691_24 (sequence is synthesized)
tggatcatacattgttacctcctactgtatgcctcaccctggaatagcagaatgctcagggggagatccgagaacgagaaggtgctcccagccccaggagcttccagtctggctctgatc

SEQ ID NO: 799315 - DNA, 120 bp, Artificial Sequence
  ENSG00000284691_25 (sequence is synthesized)
cttggccgacctagaggaaacctccacacacgccccttttgtgctaatggtgcagtttgtgtccccctctgcccatcactgtgctgtgcttgttcctgcctctgtgccttcccctatact

SEQ ID NO: 799316 - DNA, 120 bp, Artificial Sequence
  ENSG00000284691_26 (sequence is synthesized)
gctcggacatgtcccctttcctctcctctacccagctaagcccttctgatccacggggcccggcttcccaaaccacccagcccacattcctccttcctgctccgaacaggtccggtgtga

SEQ ID NO: 799317 - DNA, 120 bp, Artificial Sequence
  ENSG00000284691_27 (sequence is synthesized)
gcccctgcccccgaactgcgtgctgtcccatggacgctccagtctcttccgtgtgtgtcttgagtccctaactagacagttagctccctgagggcaagggactgtcatttcctcttgagt

SEQ ID NO: 799318 - DNA, 120 bp, Artificial Sequence
  ENSG00000284691_28 (sequence is synthesized)
cctaccagggtctagcacaggactgggctcctaactctcaggaaacacttgtcggctgactggtgcctcaagcgctggagcttgtcggtggccggtaatgggcagtgcacgtggggagag

SEQ ID NO: 799319 - DNA, 120 bp, Artificial Sequence
  ENSG00000284691_29 (sequence is synthesized)
ggtatgtgagttaactcaagggtgccttttcttgggctgtgggctggctcccctgggtcaaaagtggatgtcggaggcctcaggctcttacctccttggggcagtgggagcatcagggac

SEQ ID NO: 799320 - DNA, 120 bp, Artificial Sequence
  ENSG00000284691_30 (sequence is synthesized)
ccccacccccaccccggctctgcaggagtgcacggaagtggtcgtccagcctggatatttctacaggttgctgactcctgcgggagctgactgagtggaataaatgttctctcaacatca

SEQ ID NO: 799321 - DNA, 120 bp, Artificial Sequence
  ENSG00000284691_31 (sequence is synthesized)
attgtctccagtcctgaaaccctcgcccagggccgctccgccgccgggctccggcgctcagcccatgtcacccggggaaaggccggcgcctccgtccgaccctctttcctgtcgctgggg

SEQ ID NO: 799322 - DNA, 120 bp, Artificial Sequence
  ENSG00000284691_32 (sequence is synthesized)
gcggtttgtgggcctggccttgggattaggaaaatagggatggtgctataacggccgaatgcaggcctcagggaatcccgaaagggggaatgtctgggtcggcggatcggggggcttgag

SEQ ID NO: 799323 - DNA, 120 bp, Artificial Sequence
  ENSG00000284691_33 (sequence is synthesized)
gggaggcggcgccatttgcagagtgggcaggatcttaagacccgataggtgcagaacccatctggacacggagaccaggaatggagttccatggaggcctggctggcactgcacccgggc

SEQ ID NO: 799324 - DNA, 120 bp, Artificial Sequence
  ENSG00000284691_34 (sequence is synthesized)
aaaatgggataaaacccacacaaggtagggtgcacatggttattggaaggttcccacgagatcataacatggaaaagggctttgtaaaaggcaaagttatgtccgagtaagggacattat

SEQ ID NO: 799325 - DNA, 120 bp, Artificial Sequence
  ENSG00000284701_0 (sequence is synthesized)
ggcagcgttctggttttctggatggcagcagaggacagggagatgatggaagcccggggtgcgggagaaagttgcccgaccttccccaagatggtgcctggtgactccaagtctgaaggg

SEQ ID NO: 799326 - DNA, 120 bp, Artificial Sequence
  ENSG00000284701_1 (sequence is synthesized)
aagccaagggcttatctggaggcagagtcccagaagccagactcctcctatgactacttggaagagatggaagcttgtgaggacggaggctgccaagggccgcttaaatcgctgtccccc

SEQ ID NO: 799327 - DNA, 120 bp, Artificial Sequence
  ENSG00000284701_2 (sequence is synthesized)
caatcccgagatggagctggagaaggtgcgcatggagttcgagctcacgcggctcaagtacctgcatgagaagaaccagcggcagcggcagcacgaggtggtgatggagcagctgcagcg

SEQ ID NO: 799328 - DNA, 120 bp, Artificial Sequence
  ENSG00000284701_3 (sequence is synthesized)
ggagcggcagcacgaggtggtgatggagcagctgcagcaagaggcggcgccccgcctgttttcaggaggcctccagaacttcctgctgccccagaaccagtttgccatgttcctgtactg

SEQ ID NO: 799329 - DNA, 120 bp, Artificial Sequence
  ENSG00000284701_4 (sequence is synthesized)
cttcatcttcattcacatcatctatgtcaccaaggagatggtcttctttctcttcgccaagcactacctattctgcattgcagccattttgctctgtttgattaaaactttctggtcata

SEQ ID NO: 799330 - DNA, 120 bp, Artificial Sequence
  ENSG00000284704_0 (sequence is synthesized)
atgggctgctgtggttgtggaagttgtggtggctgtggtggtggctgtggtggctgcggtggtggctgcggtggtggctgcggtggtggctgtggtggtgtctgtggcagctgcaccacc

SEQ ID NO: 799331 - DNA, 120 bp, Artificial Sequence
  ENSG00000284704_1 (sequence is synthesized)
ggctgttgcagcacacctgtgatctgctgctgccgccgcacctgccgctcatgtggctgtggctgtaggaagggctgttgccagcagaagtgctgctgccagaagcaatgctgctgttag

SEQ ID NO: 799332 - DNA, 120 bp, Artificial Sequence
  ENSG00000284713_0 (sequence is synthesized)
gtggacaccatgtgactggggtgtggttgactctctgtgtccgattgggtgcttggcaaacacagagagttttgtccaaggccaccttggtccccacctgtccaggttgggaggtgccct

SEQ ID NO: 799333 - DNA, 120 bp, Artificial Sequence
  ENSG00000284713_1 (sequence is synthesized)
gcctggtgtggcctgagctgagcgcctctggccggagcagacggccccggctcccccaggacatgtcacctggagaggtggccctttcaggctccgtccttcttccccgtggtggcccca

SEQ ID NO: 799334 - DNA, 120 bp, Artificial Sequence
  ENSG00000284713_2 (sequence is synthesized)
gcctccctgccaagcttcccggcccccgccccatcccgggcctgctgctgcggagaccgtgggccggcgctggacggcgcggcctccagaagtgatagctaattggggagagaaagggcc

SEQ ID NO: 799335 - DNA, 120 bp, Artificial Sequence
  ENSG00000284713_3 (sequence is synthesized)
caattgtctggcggggccggaagagccgcgtgggctgctgaaagcgtcgggaggaggtggccgcttcgcccagcagctgccgccggggatgtttgcagattacgtcagcgctggcgagca

SEQ ID NO: 799336 - DNA, 120 bp, Artificial Sequence
  ENSG00000284713_4 (sequence is synthesized)
gggggcgcggggacagcgaggggggcgggctcccggcggcctcccgccccccaggcccctggacaatgctgtcattgtcagcacggagagtggttaattctggatgaatggtacacgggc

SEQ ID NO: 799337 - DNA, 120 bp, Artificial Sequence
  ENSG00000284713_5 (sequence is synthesized)
ctcttgaccaaggaggctgctcgtcgtccccagtctgtcctctcacatgccagggaggccccgggctggagtctggcgggcagatctggcctgcttggtggcaccagagagaacagggcg

SEQ ID NO: 799338 - DNA, 120 bp, Artificial Sequence
  ENSG00000284713_6 (sequence is synthesized)
gtcccttgggggcgccggctgcagaggccccaggctggacggagcttcctgtcctgggtctgcacagcagccacttggcagtgccgggctagggtggcagggccccactgcatctcggtt

SEQ ID NO: 799339 - DNA, 120 bp, Artificial Sequence
  ENSG00000284713_7 (sequence is synthesized)
ccagggcagaggctgctgctgccctttggggctgacttcaggcatgacctcctggccaggtggcagctttggccctgacccgctcctggccctgctggtggtgatcctgctagcacgcct

SEQ ID NO: 799340 - DNA, 120 bp, Artificial Sequence
  ENSG00000284713_8 (sequence is synthesized)
catcctgtggtcctgcctcgggacctacatcgactacagactggcccagcggcggccccagaaacccaagcaggactaagcctctgcaggctgcggcctccacgcgccctgtcccgagac

SEQ ID NO: 799341 - DNA, 120 bp, Artificial Sequence
  ENSG00000284713_9 (sequence is synthesized)
tcagccggcccttccagtggtggtgggagggaggggagcagggcaggcgcatgatccccatgtcccacccctggggcaggagctcagagaggcctgagatggatcgtgccttcccagact

SEQ ID NO: 799342 - DNA, 120 bp, Artificial Sequence
  ENSG00000284713_10 (sequence is synthesized)
gaccagggctgtcccgtagaggcagctggccatgtggggagatggaggggccggccttgcaggtccatcaccaggttctggggtccccggttgcagggagtggtcctgggggtgggtctt

SEQ ID NO: 799343 - DNA, 120 bp, Artificial Sequence
  ENSG00000284713_11 (sequence is synthesized)
gggtaagccagaggactcaggtggaggtgccacagagacaaatgtgacctcatcacaagctggccctgttaccaaaggccacgtcctgtctcagctcaccaccctcataactagtctcct

SEQ ID NO: 799344 - DNA, 120 bp, Artificial Sequence
  ENSG00000284713_12 (sequence is synthesized)
cctgcctcccaagggacgagataagtgccgatggctgtcctgatttctccagagcagacccctgggaagggtctcaggacgcacttgtgaggctgagttgacaagccagacgcacttggc

SEQ ID NO: 799345 - DNA, 120 bp, Artificial Sequence
  ENSG00000284713_13 (sequence is synthesized)
tctggttgaccctctgcacactctctaacggtctgaacagttagggcacaatgatccctgcctccctccctcagcaggatatcatgtaggggacaatttaggggacaagccaaggcaccc

SEQ ID NO: 799346 - DNA, 120 bp, Artificial Sequence
  ENSG00000284713_14 (sequence is synthesized)
atcaatgccctctgttcatctgttcctgcaagtgtgtggctgggaagtgcccaggaaggctgacagggcagggaagttgatttgaggccaagcatccagtgctcctgctccacctccgta

SEQ ID NO: 799347 - DNA, 120 bp, Artificial Sequence
  ENSG00000284713_15 (sequence is synthesized)
gcacgttagccgtgatgccagtgacttaacccacagcttggggaagctcaaaggctccacattcgagcctcttgggggaaattcggcaaacacccatgtccaagttccacactgtatttc

SEQ ID NO: 799348 - DNA, 120 bp, Artificial Sequence
  ENSG00000284713_16 (sequence is synthesized)
ctgggatcgttccagcagatcgtggattgcagcgagggctgctgactgcatgcggaactgtgagatggaagggactgtgggcggcagctccagggaggagcatcgaaccagatatcgtct

SEQ ID NO: 799349 - DNA, 120 bp, Artificial Sequence
  ENSG00000284713_17 (sequence is synthesized)
ctgggaggctgggcctggtgatgtggcaacgtcttgctccctgagaggtgatgggtatgctagggatgctcgctcagggaacgtgggccaagtcctctgaacacgaagctcgcagagggg

SEQ ID NO: 799350 - DNA, 120 bp, Artificial Sequence
  ENSG00000284713_18 (sequence is synthesized)
gtgattcctgtgaattctgaaaggacttgggggcgtccagcaagagcaggagcttagatggtggttccagggctggtgttgctgactgggacgagtggacccccagggtgggcatggagt

SEQ ID NO: 799351 - DNA, 120 bp, Artificial Sequence
  ENSG00000284713_19 (sequence is synthesized)
ggggcactggctgggagcctctgccttgctgtgtcctggctgaatgaacccaggacttgctgtgctcagatcctccattcaagagagctacagacacgggggtgctggtgagcaggagcc

SEQ ID NO: 799352 - DNA, 120 bp, Artificial Sequence
  ENSG00000284713_20 (sequence is synthesized)
gagaccatctggggtgggaccgaccaagagtttgaggtgtccagggggtgacgtgaagatgacctattgcagagggtcccttctcattcacgctctgaagtctgcacaggggcaggggct

SEQ ID NO: 799353 - DNA, 120 bp, Artificial Sequence
  ENSG00000284713_21 (sequence is synthesized)
accgtgctccatttcagtttggcctctgttgtatcagccagaggccagcagaactctatggtcactcccccgtgtcacggacaatttgccacctccaccggcagcccagggctctgcctg

SEQ ID NO: 799354 - DNA, 120 bp, Artificial Sequence
  ENSG00000284713_22 (sequence is synthesized)
aaaccgctgcgcgtggaaaacaagcccagagctcaacgttccctaagtgagtggcctttgacagcagtgccaggcagcccagtgggtgcagggcacaccacagatggaggaagggccagg

SEQ ID NO: 799355 - DNA, 120 bp, Artificial Sequence
  ENSG00000284713_23 (sequence is synthesized)
catgcttcccagacagcctctgccagtccaggcaggggctccagggtggctgcgggaaggcagcttaggcggtgcccggcccaaggacttgctgtgctcagatcctccattcaagagagc

SEQ ID NO: 799356 - DNA, 120 bp, Artificial Sequence
  ENSG00000284718_0 (sequence is synthesized)
atgggttgctgtggttgtggaagttgtggtggctgcggtggtggctgtggtggctgcggtggtggctgcggtggtggctgcggtggtggctgtggcagctgcaccacctgcaggtgctac

SEQ ID NO: 799357 - DNA, 120 bp, Artificial Sequence
  ENSG00000284718_1 (sequence is synthesized)
ggctgctgcagcacacctgtgatctgctgctgccgccgcacctgcggctcatgtggctgcggctgtgggaagggctgttgccagcagaaaggctgctgccagaagcaatgctgctgctag

SEQ ID NO: 799358 - DNA, 120 bp, Artificial Sequence
  ENSG00000284723_0 (sequence is synthesized)
atggccttggggaatcacagcaccatcaccgagttcctcctccttgggctgtctgccgaccccaacatccgggctctgctctttgtgctgttcctggggatttacctcctgaccataatg

SEQ ID NO: 799359 - DNA, 120 bp, Artificial Sequence
  ENSG00000284723_1 (sequence is synthesized)
gaaaacctgatgctgctgctcatgatcagggctgattcttgtctccataagcccatgtatttcttcctgagtcacctctcttttgttgatctctgcttctcttcagtcattgtgcccaag

SEQ ID NO: 799360 - DNA, 120 bp, Artificial Sequence
  ENSG00000284723_2 (sequence is synthesized)
atgctggagaacctcctgtcacagaggaaaaccatttcagtagagggctgcctggctcaggtcttctttgtgtttgtcactgcagggactgaagcctgccttctctcagggatggcctat

SEQ ID NO: 799361 - DNA, 120 bp, Artificial Sequence
  ENSG00000284723_3 (sequence is synthesized)
gaccgccatgctgccatctgccgcccactactttatggacagatcatgggtaaacagctgtatatgcaccttgtgtggggctcatggggactgggctttctggacgcactcatcaatgtc

SEQ ID NO: 799362 - DNA, 120 bp, Artificial Sequence
  ENSG00000284723_4 (sequence is synthesized)
ctcctagctgtaaacatggtcttttgtgaagccaaaatcattcaccactacagctatgagatgccatccctcctccctctgtcctgctctgatatctccagaagcctcatcgccttgctc

SEQ ID NO: 799363 - DNA, 120 bp, Artificial Sequence
  ENSG00000284723_5 (sequence is synthesized)
tgctccactctcctacatgggctgggaaacttccttttggtcttcttatcctacacccgtataatctctaccatcctaagcatcagctctacctcgggcagaagcaaggccttctccacc

SEQ ID NO: 799364 - DNA, 120 bp, Artificial Sequence
  ENSG00000284723_6 (sequence is synthesized)
tgctctgcccacctcactgcagtgacactttactatggctcaggtttgctccgccatctcatgccaaactcaggttcccccatagagttgatcttctctgtgcagtatactgtagtcact

SEQ ID NO: 799365 - DNA, 120 bp, Artificial Sequence
  ENSG00000284723_7 (sequence is synthesized)
cccatgctgaattccctcatctatagcctgaaaaataaggaagtgaagggggaaagaagcctccgggacagcagtcatttgcctcagctgcacaaaggccaggccagatggaagagacca

SEQ ID NO: 799366 - DNA, 120 bp, Artificial Sequence
  ENSG00000284723_8 (sequence is synthesized)
gccttcaccgaaggccgcagggagcccggacacccggagctgagcattccggtcacgcctcaaccccaaggggcctgcgcatgctccgcgctgcgcgcggcgcccacggccctgccctga

SEQ ID NO: 799367 - DNA, 120 bp, Artificial Sequence
  ENSG00000284725_0 (sequence is synthesized)
atgggttgctgtgggtgtggtggctgcggtggtggctgcggtggctgcggtggtggctgcagtggtggctgtggtggtggctgcggtggtggctgtggcagctgcaccacctgcaggtgc

SEQ ID NO: 799368 - DNA, 120 bp, Artificial Sequence
  ENSG00000284725_1 (sequence is synthesized)
tgttgctgccgccgcacctgccactcatgtggctgcggctgtggctgtgggaagggctgttgccagcagaagggctgctgtcagcagaagggctgctgcaagaagcaatgctgctgctag

SEQ ID NO: 799369 - DNA, 120 bp, Artificial Sequence
  ENSG00000284730_0 (sequence is synthesized)
cgcacagtcctcggtccctggttcccgccagggatggcggcgcggactctggcgagcgccttggtcctcacgctctgggtttgggcgctggctccggcgggggccgtggacgctatgggc

SEQ ID NO: 799370 - DNA, 120 bp, Artificial Sequence
  ENSG00000284730_1 (sequence is synthesized)
cctcacgcagccgtccgtctggccgagctgctgaccccggaggagtgcggccatttccggtcgctcctggaggcgcccgagcccgacgtggaggccgagttgtcccggctttctgaagac

SEQ ID NO: 799371 - DNA, 120 bp, Artificial Sequence
  ENSG00000284730_2 (sequence is synthesized)
agaccggctggcgcggcctgagccgctcaacaccacgtcggggtctccgagccggcggcggcggcgagaggcggccgaggacccggcgggcagggtagccgggcctggagaggtgtccga

SEQ ID NO: 799372 - DNA, 120 bp, Artificial Sequence
  ENSG00000284730_3 (sequence is synthesized)
ctggccccccaggccgcgtccctgtcctgggaccgcctggctcgggccctgcggcgcagcggccgcccggacgtggccagggagctgggcaagaacctccaccagcaggcgacgctgcag

SEQ ID NO: 799373 - DNA, 80 bp, Artificial Sequence
  ENSG00000284730_4 (sequence is synthesized)
ggcgacgctgcagctgcgcaagttcgggcagcgcttcctgccgcggcccggcgccgccgcccgcgtgccctttgccccgg

SEQ ID NO: 799374 - DNA, 120 bp, Artificial Sequence
  ENSG00000284730_5 (sequence is synthesized)
atcgtggagcgcctgccgcagcccctgtacgagcggagccccatgggttgggcggggccgctggcgctcggcctcctcaccggcttcgtgggggcgctgggcaccggggcgctggtcgtc

SEQ ID NO: 799375 - DNA, 120 bp, Artificial Sequence
  ENSG00000284730_6 (sequence is synthesized)
ctgctcacgctatggatcactggcggcgacggcgaccgggcgtcgcccggcagccccggcccgctcgccacagtgcagggctggtgggaaacaaagctgctccttcctaaagagcggcgc

SEQ ID NO: 799376 - DNA, 120 bp, Artificial Sequence
  ENSG00000284730_7 (sequence is synthesized)
gcgcccccgggggcctgggctgcagatgggccagattctccctcacctcacagtgcccttgccctcagctgtaaaatgggagcacagtcttggggcagtggtgctttggacggtttataa

SEQ ID NO: 799377 - DNA, 120 bp, Artificial Sequence; identical to SEQ ID NO: 611458
  ENSG00000284733_0 (sequence is synthesized)

SEQ ID NO: 799378 - DNA, 120 bp, Artificial Sequence; identical to SEQ ID NO: 768444
  ENSG00000284733_1 (sequence is synthesized)

SEQ ID NO: 799379 - DNA, 86 bp, Artificial Sequence; identical to SEQ ID NO: 611460
  ENSG00000284733_2 (sequence is synthesized)

SEQ ID NO: 799380 - DNA, 120 bp, Artificial Sequence; identical to SEQ ID NO: 611461
  ENSG00000284733_3 (sequence is synthesized)

SEQ ID NO: 799381 - DNA, 120 bp, Artificial Sequence; identical to SEQ ID NO: 611462
  ENSG00000284733_4 (sequence is synthesized)

SEQ ID NO: 799382 - DNA, 120 bp, Artificial Sequence; identical to SEQ ID NO: 611463
  ENSG00000284733_5 (sequence is synthesized)

SEQ ID NO: 799383 - DNA, 120 bp, Artificial Sequence; identical to SEQ ID NO: 611464
  ENSG00000284733_6 (sequence is synthesized)

SEQ ID NO: 799384 - DNA, 120 bp, Artificial Sequence; identical to SEQ ID NO: 768450
  ENSG00000284733_7 (sequence is synthesized)

SEQ ID NO: 799385 - DNA, 120 bp, Artificial Sequence
  ENSG00000284753_0 (sequence is synthesized)
attggctgaagggccggcggctctggctgcccggcggttgagagcatggcctctccaggggcaggtagggcgcctccggagttaccggagcggaactgcgggtaccgcgaagtcgagtac

SEQ ID NO: 799386 - DNA, 120 bp, Artificial Sequence
  ENSG00000284753_1 (sequence is synthesized)
tgggatcagcgctaccaaggcgcagccgattctgccccctacgattggttcggggacttctcctccttccgtgccctcctagagccggagctgcggcccgaggaccgtatccttgtgcta

SEQ ID NO: 799387 - DNA, 120 bp, Artificial Sequence
  ENSG00000284753_2 (sequence is synthesized)
ggttgcgggaacagtgccctgagctacgagctgttcctcggaggcttccctaatgtgaccagtgtggactactcatcagtcgtggtggctgccatgcaggctcgccatgcccatgtgccg

SEQ ID NO: 799388 - DNA, 120 bp, Artificial Sequence
  ENSG00000284753_3 (sequence is synthesized)
cagctgcgctgggagaccatggatgtgcggaagctggacttccccagtgcttcttttgatgtggtgctcgagaagggcacgctggatgccctgctggctggggaacgagatccctggacc

SEQ ID NO: 799389 - DNA, 120 bp, Artificial Sequence
  ENSG00000284753_4 (sequence is synthesized)
gtgtcctctgaaggtgtccacactgtggaccaggtgttgagtgaggtgagccgcgtgcttgtccctggaggccggtttatctcaatgacttctgctgccccccactttcggaccagacac

SEQ ID NO: 799390 - DNA, 120 bp, Artificial Sequence
  ENSG00000284753_5 (sequence is synthesized)
tatgcccaagcctattatggctggtccctgaggcatgctacctatggcagcggtttccacttccatctctacctcatgcacaagggcgggaagctcagtgtggcccagctggctctgggg

SEQ ID NO: 799391 - DNA, 120 bp, Artificial Sequence
  ENSG00000284753_6 (sequence is synthesized)
gcccaaatcctctcaccccccagacctcccacctcaccttgcttccttcaggactcagatcatgaggacttccttagtgccattcagctctgaggccagagcatggtcctccacccttcc

SEQ ID NO: 799392 - DNA, 120 bp, Artificial Sequence
  ENSG00000284753_7 (sequence is synthesized)
aggtagttggaattcctgacttaggacttggggttgggtccaaggtgcttacatcccaggggcctcatgcctaagatagagggtgggagcgaacccacatgaaccaatacagcccagctc

SEQ ID NO: 799393 - DNA, 120 bp, Artificial Sequence
  ENSG00000284753_8 (sequence is synthesized)
caactagatccagattccaggtttcttgcttctttcttgggttcctcagttctctcctgggttccccaacctcctctgccaccacaccaaaccaccagtgatgcatcccctggggcaaag

SEQ ID NO: 799394 - DNA, 120 bp, Artificial Sequence
  ENSG00000284753_9 (sequence is synthesized)
ctcatcataacccctctgcacaccagccagcctggagaccgttgttcctggggcctgttactgatcctcatctagccttgatttatccacaggagactgcaggctttgaacctagattgc

SEQ ID NO: 799395 - DNA, 120 bp, Artificial Sequence
  ENSG00000284753_10 (sequence is synthesized)
tttatgtttctcaccctagctccatccccaacactggtgaccagtcacgcctgggttgtatctctacccaaggaggccacatcataatgaggttcccaggccagcctggcctgtctgtct

SEQ ID NO: 799396 - DNA, 120 bp, Artificial Sequence
  ENSG00000284753_11 (sequence is synthesized)
tacttggcaaccgtccctcaccagcaacatgcacctgagattcccaagtacctgccccccctcccattttggcctggctcctgagacctaagcagcggccacacacacacagagggggtc

SEQ ID NO: 799397 - DNA, 120 bp, Artificial Sequence
  ENSG00000284753_12 (sequence is synthesized)
tgtgtttattcacacactcctggtacagtgaggatggaggaacatttacgaagggcacccctgggttgagaacatctccggggccacagatgtcatccaaaggttcagagcagtccccat

SEQ ID NO: 799398 - DNA, 120 bp, Artificial Sequence
  ENSG00000284753_13 (sequence is synthesized)
ttgggttcccaggggcaagacgcaggggtccaaggtaaaatcggatctgggcccttggaaggtgatgataccttggggagaaggggtctgccagaaagcctcctggggtcaggcctgggc

SEQ ID NO: 799399 - DNA, 120 bp, Artificial Sequence
  ENSG00000284753_14 (sequence is synthesized)
agactggccatgtggttggtaaccgtgtcgggggcttgtctcatcccagcctcaacacccatcctatctgccaggcgcagaagagcgtggccgagactgaggggagggcaggaaccatga

SEQ ID NO: 799400 - DNA, 120 bp, Artificial Sequence
  ENSG00000284770_0 (sequence is synthesized)
agagcctcaagcttcgctgctgggcagttggctggaggggctgctgctgggaacacctggagtctccgcgggcagatctcatattttggattctggatatattataatgagtgacacttt

SEQ ID NO: 799401 - DNA, 120 bp, Artificial Sequence
  ENSG00000284770_1 (sequence is synthesized)
gacagcggatgtcattggtcgaagagttgaagttaatggagaacatgcaacagtacgttttgctggtgttgtccctcccgtggcaggaccctggttaggagtagaatgggacaatcccga

SEQ ID NO: 799402 - DNA, 120 bp, Artificial Sequence
  ENSG00000284770_2 (sequence is synthesized)
gagaggaaagcatgatgggagccacgaagggactgtgtattttaaatgcaggcacccgacaggaggatcctttattcgtccgaacaaggtaaattttggaacagactttcttactgcaat

SEQ ID NO: 799403 - DNA, 120 bp, Artificial Sequence
  ENSG00000284770_3 (sequence is synthesized)
taagaaccgctatgtgttagaagatggaccagaggaagatagaaaagagcaaattgttacaattggaaataaacctgtggagactatcggttttgactctattatgaaacagcaaagtca

SEQ ID NO: 799404 - DNA, 120 bp, Artificial Sequence
  ENSG00000284770_4 (sequence is synthesized)
gctgagcaagttgcaagaagtttctctgaggaactgtgcagtaagttgtgctggtgaaaaaggaggagttgctgaagcatgtcctaatatcagaaaggtagatttgtcaaaaaacctgtt

SEQ ID NO: 799405 - DNA, 120 bp, Artificial Sequence
  ENSG00000284770_5 (sequence is synthesized)
gtcatcatgggatgaagtgatacacattgctgatcagctcagacacctggaagtccttaatgtcagtgaaaataaactaaaatttccctccggttcagtattaactggaacgctttctgt

SEQ ID NO: 799406 - DNA, 120 bp, Artificial Sequence
  ENSG00000284770_6 (sequence is synthesized)
actgaaggttttagtcctcaatcaaacaggaataacgtgggctgaggctcatgcgcagtgtggtggcagcaggcacggtctcgacatgcagaaagacgccagcaagttcgtggatctgtg

SEQ ID NO: 799407 - DNA, 120 bp, Artificial Sequence
  ENSG00000284770_7 (sequence is synthesized)
cgtgctgcagaaatgctccaccagcaactgcatcatcagtgccaaggaccacacatccatgcggatgaacgtggccaaggtgctgcggtgtgtcgcggggtgcccaggcctggaggaact

SEQ ID NO: 799408 - DNA, 120 bp, Artificial Sequence
  ENSG00000284770_8 (sequence is synthesized)
caagttattagatctttcctctaatcaattaattgatgaaaatcagctgtatctgatagcccacctgcccaggttagaacaattaatcctctctgacactggaatttcttctctacattt

SEQ ID NO: 799409 - DNA, 120 bp, Artificial Sequence
  ENSG00000284770_9 (sequence is synthesized)
tccggatgctggaattgggtgcaaaacgtccatgttcccatccttgaagtacctggtagtaaacgacaatcagatatcacaatggtcgtttttcaatgagctagagaagttaccaagtct

SEQ ID NO: 799410 - DNA, 120 bp, Artificial Sequence
  ENSG00000284770_10 (sequence is synthesized)
acgggctttgtcctgcctaagaaaccccctgaccaaagaggacaaagaagcagagacggcgcgactactcattatcgccagcattggccagctgaagacgctgaacaaatgtgagattct

SEQ ID NO: 799411 - DNA, 120 bp, Artificial Sequence
  ENSG00000284770_11 (sequence is synthesized)
ccccgaggagaggcggagagctgagcttgactaccgaaaagcttttggaaatgagtggaaacaggctggtggacataaggatccggaaaaaaacagactcagcgaagaattcctcacagc

SEQ ID NO: 799412 - DNA, 120 bp, Artificial Sequence
  ENSG00000284770_12 (sequence is synthesized)
ccatcccagataccagttcctctgcctgaaatatggtgcacctgaagattgggaactcaaaacacagcaaccacttatgctgaaaaaccagctactaacactgaagataaaataccctca

SEQ ID NO: 799413 - DNA, 120 bp, Artificial Sequence
  ENSG00000284770_13 (sequence is synthesized)
tcaacttgatcagaaagtcctggagaaacaactgccgggctccatgacaattcaaaaggtgaagggattgctgtcacgtcttctcaaagttcctgtgtcagaccttctgttgtcctatga

SEQ ID NO: 799414 - DNA, 120 bp, Artificial Sequence
  ENSG00000284770_14 (sequence is synthesized)
aagtcccaaaaagccgggcagagaaatcgagctggaaaatgacctaaagtcattacagttttattctgtggaaaatggagattgtctattagtgcgatggtgacaaccaactaataaaat

SEQ ID NO: 799415 - DNA, 120 bp, Artificial Sequence
  ENSG00000284770_15 (sequence is synthesized)
ttaaagaccacactgcttatcgtgtctggggttcaccggaaataaatgattcactggaacaattctactgtcaaaacaaagggggtttacaacttgtcctaagtataacaagggatgtat

SEQ ID NO: 799416 - DNA, 120 bp, Artificial Sequence
  ENSG00000284770_16 (sequence is synthesized)
ctacagcacttccggccagagcctcaagcttcgctgctgggcagttggctggaggggctgctgctgggaacacctggagtctccgcgggcaggtgagcttcagaggttcggggagctttc

SEQ ID NO: 799417 - DNA, 120 bp, Artificial Sequence
  ENSG00000284770_17 (sequence is synthesized)
aacctactaatgattttctgatcttatttcatatttatttttacagctcatcactgcatttcatgataagatttaaatattaaatagaaagaaactagctagcctaataaaatctgaaca

SEQ ID NO: 799418 - DNA, 120 bp, Artificial Sequence
  ENSG00000284770_18 (sequence is synthesized)
tgctatgtatgctttctcaatagaaacgtggtaacaatgatggaatttctaaattgagtaattccctttgggaaattttcatttgaattcatttagaaaatttacttgtgaaccctgtat

SEQ ID NO: 799419 - DNA, 120 bp, Artificial Sequence
  ENSG00000284770_19 (sequence is synthesized)
aatgtggactatgtctgtaccagataatttgaagaatgaataatttgaccctggtgataatgcggaaagtcttcattcattaaactccgggcagtagaccgtgtctctttcctctgagac

SEQ ID NO: 799420 - DNA, 120 bp, Artificial Sequence
  ENSG00000284770_20 (sequence is synthesized)
aaagagttcactttgcatgtcctaagttggactttatggtttctaagtattttacatgggattaaaaacccagggtgtaggaaaaaaatttacaaaccgagtctggttgataccccatag

SEQ ID NO: 799421 - DNA, 120 bp, Artificial Sequence
  ENSG00000284770_21 (sequence is synthesized)
agtggagtttataacggcagagctgacttttatggttttattaaggttcagaattgaaatacccatgactgtatatggatgctcatgactttgctcctaaactggtttatggttccacag

SEQ ID NO: 799422 - DNA, 120 bp, Artificial Sequence
  ENSG00000284770_22 (sequence is synthesized)
aaacggaatcaaaatctgaggaatccaagaattatttagggaaattaaaattcttatgttagcacaggattggtagatttatccagtttgcaattgaaatatttattggcccattattac

SEQ ID NO: 799423 - DNA, 120 bp, Artificial Sequence
  ENSG00000284770_23 (sequence is synthesized)
tattcacatcatattatctcgtgttgactaagtaaccaaggctgacgtttgggttcttttctatttcatggtgatgatggtaagttgggaatggaaacagcagtctgaattgttccctat

SEQ ID NO: 799424 - DNA, 120 bp, Artificial Sequence
  ENSG00000284770_24 (sequence is synthesized)
gccgtggagcgtgctggtgccgtctgttaatagtagggagtagttctcacctcgggctgcacatcttcatcacctggggagctgtggaacatgcggcatccttggtcccatcccagatct

SEQ ID NO: 799425 - DNA, 120 bp, Artificial Sequence
  ENSG00000284770_25 (sequence is synthesized)
ttgaactcttgggctcaagtgatccttggcttcccaaagcactggggattacagggattaagcacccggccttaaaataatgccctttaaaactgctgcacaagaacattctcttttctc

SEQ ID NO: 799426 - DNA, 120 bp, Artificial Sequence
  ENSG00000284770_26 (sequence is synthesized)
ctgctgcacaagaacattctcttttctctgaaactgtatattgtgactttgtacaaggaggctttctagtcattccagtgaactgcttgaatcaaagagagagaaagatagtatttacac

SEQ ID NO: 799427 - DNA, 120 bp, Artificial Sequence
  ENSG00000284770_27 (sequence is synthesized)
aaaaccagtcatggctgcacaagaactggccaggccttgcagcttcctactgtggtgagtgacttggacgaggcatctgggtaaggacccctggtggccactgtgaggataaatttgtgg

SEQ ID NO: 799428 - DNA, 120 bp, Artificial Sequence
  ENSG00000284770_28 (sequence is synthesized)
ccacttggaggcctgcaatatattttctttcagtctctaaaagaattaagctatagttctgtccaaagtaaatttctttactatcttttgttattgttgttattaataaaagtgcacatg

SEQ ID NO: 799429 - DNA, 120 bp, Artificial Sequence
  ENSG00000284770_29 (sequence is synthesized)
gggacaatgtggaaaataaatacatttcttggtacatctactctttagcatacatggcccccattaaaaaaaactcagaataaatcaagagttttagaaaaaggaacaaatggactgttc

SEQ ID NO: 799430 - DNA, 120 bp, Artificial Sequence
  ENSG00000284770_30 (sequence is synthesized)
tttataaaacaagatacctttattgttgagaatttagaaattacagattgaacaaaaaagtatcatgattaatgccaccacttagatataagtatcgtaaacgggctgggtgcggtggct

SEQ ID NO: 799431 - DNA, 120 bp, Artificial Sequence
  ENSG00000284770_31 (sequence is synthesized)
cttagatataagtatcgtaaacgggctgggtgcggtggcttatgcttgtcatcttagcacttttggaggccgaggcagttggatcacttaaggccaggaatttgagactagcctggccaa

SEQ ID NO: 799432 - DNA, 120 bp, Artificial Sequence
  ENSG00000284770_32 (sequence is synthesized)
agcacaagattctctacacttaacaaatggctgccggaagtatctggtcatgctgaagctgggtgcgctctctaggaagtaccttagggaggcttttacatggccagtggatagcatacg

SEQ ID NO: 799433 - DNA, 83 bp, Artificial Sequence
  ENSG00000284770_33 (sequence is synthesized)
atcacctgaacctgggagggagaggttgcagtgagtacgagactctggctaaaaagcaaaaagaaaagtttacctctgggagt

SEQ ID NO: 799434 - DNA, 120 bp, Artificial Sequence
  ENSG00000284770_34 (sequence is synthesized)
tctggctaaaaagcaaaaagaaaagtttacctctgggagtagagggagaattgtgtttggagagggccccagaggacttcagttgcatttgtaatatttgtagtgctctttttctttttt

SEQ ID NO: 799435 - DNA, 120 bp, Artificial Sequence
  ENSG00000284770_35 (sequence is synthesized)
cagtgaggtcacgggcaggtttaacagccagtttaaaacctgtgctatctgcaggactgtttgcaggatgggtgctgcggtgtgtcgcggggtgcccaggcctggaggaactctaccttg

SEQ ID NO: 799436 - DNA, 120 bp, Artificial Sequence
  ENSG00000284770_36 (sequence is synthesized)
tattatgacattaaactgtctctagatagcaacagtttgattctaaatggagaccatgggtctgtttgtttgattttaagggtaagctactgcctggggacggggtgggggaagagtatg

SEQ ID NO: 799437 - DNA, 120 bp, Artificial Sequence
  ENSG00000284770_37 (sequence is synthesized)
ggaacgctttctgtactgaaggttttagtcctcaatcaaacaggaataacgtgggctgaggtgctgcggtgtgtcgcggggtgcccaggcctggaggaactctaccttgagtctaacaac

SEQ ID NO: 799438 - DNA, 120 bp, Artificial Sequence
  ENSG00000284770_38 (sequence is synthesized)
gttccttaaatcctccagcctggttcttcaggctttgaagctaagaattcatgagtctttgtccctgatgtactttccattttgttttgatgacattattactccacatttcgcttttat

SEQ ID NO: 799439 - DNA, 120 bp, Artificial Sequence
  ENSG00000284770_39 (sequence is synthesized)
gttatttccttttttatatttcttaatgcaagaagctcgctgcataaacgcttcaggcttgaacagtatgtttaaggaagaaaagcagcctagaggaatcactttcaaatgactccatta

SEQ ID NO: 799440 - DNA, 120 bp, Artificial Sequence
  ENSG00000284770_40 (sequence is synthesized)
gccagcccaatctcctggccacgctcggtgaattctaaatcactcgggggtgggcaagggaagatgtgaagcagccgggcaggtattgttgagtatttcactgctaagaatgttagaaga

SEQ ID NO: 799441 - DNA, 120 bp, Artificial Sequence
  ENSG00000284770_41 (sequence is synthesized)
caaaagcacagatagatggggggatttagagaaatgttgtcactgtttggcctagagcaggaaaaaagtactgctttcctcctctcctgtggaggctgtggtccaggcctaggaactggt

SEQ ID NO: 799442 - DNA, 120 bp, Artificial Sequence
  ENSG00000284770_42 (sequence is synthesized)
ttgcagtatggtactgagcacccagcctggcactgcacggtctggtggaaacgtgagaagtgtcctgtggatcgtgtctcaggtggcaccaggtttctgtcagcgcagaaagagaactgt

SEQ ID NO: 799443 - DNA, 120 bp, Artificial Sequence
  ENSG00000284770_43 (sequence is synthesized)
taccaaaggtgacactcggggaaaacatttgaagtatttgaaggcagtcttctcttgctagttttgagtcaggacacctaaggaacaatgatgtaatacacatgtaaacatgttgctttt

SEQ ID NO: 799444 - DNA, 120 bp, Artificial Sequence
  ENSG00000284770_44 (sequence is synthesized)
catttgttgtcttttgttgagtttcactggtcattaacaatgagctagataagctacagagtctgcagctctgggtagatagaagattctgcccttggaagtggtcgttgtccatcactc

SEQ ID NO: 799445 - DNA, 120 bp, Artificial Sequence
  ENSG00000284770_45 (sequence is synthesized)
aggcacaggctctctggacgcttacctatcctttgtttgtttgtttgttttgtttttacttatagtggcctttggtttatcattcatctcttttgctttcttaaacagaatatggtgcac

SEQ ID NO: 799446 - DNA, 70 bp, Artificial Sequence
  ENSG00000284770_46 (sequence is synthesized)
cctgagtagctgggactatgggtgcccaccaccactgccagctactttttgtatttttagtagatgcttc

SEQ ID NO: 799447 - DNA, 120 bp, Artificial Sequence
  ENSG00000284770_47 (sequence is synthesized)
ctggaattacaggtgtgagccaccatgtcccgcctctttaaggacactttaatctttaagggcacattgattattatagccttgcaaacggtcacatgaggtgattcatgaataaggaat

SEQ ID NO: 799448 - DNA, 120 bp, Artificial Sequence
  ENSG00000284770_48 (sequence is synthesized)
tgaggtgattcatgaataaggaatgtgttttaacttttaccaggtggggatgagttagattttcattgaactgcaagatcttatttttagcctgaccgtaaagatggaaggttgggggag

SEQ ID NO: 799449 - DNA, 120 bp, Artificial Sequence
  ENSG00000284770_49 (sequence is synthesized)
gtgatatttaattggggagtaggagaggagaggtgatattattaaaactgcttgtttatttgaaaacttctagcgtttaattgctgtaggaatgagtaatttcattgggatactgtttaa

SEQ ID NO: 799450 - DNA, 120 bp, Artificial Sequence
  ENSG00000284770_50 (sequence is synthesized)
ttctgttttgataaggatttttcattaatctacctattttactaatgtcacacttttctaggccttcctgaatatttaatttgttttaatctcagaacctaactttccaagggcttagcc

SEQ ID NO: 799451 - DNA, 120 bp, Artificial Sequence
  ENSG00000284770_51 (sequence is synthesized)
tacaggcgtgagctaccgtgcccagcacaggtttcccctttcattcttgaaccatttttgcatagacatgtgagtgtacagtaaagccggtagacaggcctgaatgagttgtgctcccaa

SEQ ID NO: 799452 - DNA, 120 bp, Artificial Sequence
  ENSG00000284770_52 (sequence is synthesized)
gtaaagccggtagacaggcctgaatgagttgtgctcccaaatagagcaaacgggggcaattcaacccatggtgtctcatcttctggaaatacgggcttgtgttttttaatagtatcgtct

SEQ ID NO: 799453 - DNA, 120 bp, Artificial Sequence
  ENSG00000284770_53 (sequence is synthesized)
ttcaaagtgactgtcaggattgaatactttctgagattagggttttgagaaataatttaaggggcaataatttcatccatcctcatagccaaagggcagactctatgtttagagaagcaa

SEQ ID NO: 799454 - DNA, 120 bp, Artificial Sequence
  ENSG00000284770_54 (sequence is synthesized)
aattctagcccatgattcagtgtatcagtaagactctggagaacgggactttgttttgcagtatccagagccatatcttgtgaagctggaagctcaccttgcaaatgcctgagttttggg

SEQ ID NO: 799455 - DNA, 120 bp, Artificial Sequence
  ENSG00000284770_55 (sequence is synthesized)
tttaggaagcctacagccgcatacaggtgccctaatcctgtgaaagcatctttacacagctgataccaaaaagttgtatgttgtaaatgttaaaaattaggtagtcttgattcacttgaa

SEQ ID NO: 799456 - DNA, 120 bp, Artificial Sequence
  ENSG00000284770_56 (sequence is synthesized)
tcattaaaaaagtgatttttaaaatataattccattttaagattgaaacaaatcaaaccccttagattaaaacccagattgttgctttcaacaactatttcagttgggtttactgtatag

SEQ ID NO: 799457 - DNA, 120 bp, Artificial Sequence
  ENSG00000284770_57 (sequence is synthesized)
gaagccatcatgcaggtgtgggcccaagggcagaggaggagcgcgaggggacctggagggtgtttgcccggtctggaattttcggcagcctgcaccgactcttttcccttccatttgatg

SEQ ID NO: 799458 - DNA, 120 bp, Artificial Sequence
  ENSG00000284770_58 (sequence is synthesized)
tggaattctctattgaaactactattttaaagggttactagaaatgatttggttggtcattttgggaaatgtcccttaaacttggggagacatcctctactatgtataacaatatgctat

SEQ ID NO: 799459 - DNA, 120 bp, Artificial Sequence
  ENSG00000284770_59 (sequence is synthesized)
tatctgtcttctcagttgcactatttctaagagtacttaaattaatcacatgcttttccctacaattatacctaagctgagtatatcttcttctgtgataaccagctttgattgaaatgt

SEQ ID NO: 799460 - DNA, 120 bp, Artificial Sequence
  ENSG00000284770_60 (sequence is synthesized)
actcatattaggtaaacattaggcaatgataggaggaaagcaaaactaattctttcaaaatgtcaacaaaatttagaaatatccttcccgatggcactaaaaccctgagaggtatttgct

SEQ ID NO: 799461 - DNA, 120 bp, Artificial Sequence
  ENSG00000284770_61 (sequence is synthesized)
tttattcatactcacacaactttagcatttaaaaactatgagtactaaactgtgaccttcaggatttatgttagatggcagaaagaaaatttgggtattagtctaccatataaatgaact

SEQ ID NO: 799462 - DNA, 120 bp, Artificial Sequence
  ENSG00000284770_62 (sequence is synthesized)
tctttaaaaccaaggttcagaactgagaatcatattggttcctcttcaagttagttcaagttgcccacttcagagatccacaaaatctgacattatttccagaaaccccaaactttggta

SEQ ID NO: 799463 - DNA, 120 bp, Artificial Sequence
  ENSG00000284770_63 (sequence is synthesized)
gctatcctgcaatccaggttgaaattcaaactctcagttactactacagatttctgaactaggccaagttttaaccaaaaactataggtaatggtgaattactaattagccacaatgcat

SEQ ID NO: 799464 - DNA, 120 bp, Artificial Sequence
  ENSG00000284770_64 (sequence is synthesized)
caggatttagaaatattttttcttttataaaataacttggtatttttctgataatcttccaatagataaataaaaacttttcttatgctacagtacaagttgatttttaaggaaatttgt

SEQ ID NO: 799465 - DNA, 120 bp, Artificial Sequence
  ENSG00000284770_65 (sequence is synthesized)
gcaaacattaagaaacaccgcattggttctgggtgaaagtgccagtctggaactctcttgaaagaccatacagtctactgctaaaccctgggactcctcagacttgcactcagattatcg

SEQ ID NO: 799466 - DNA, 120 bp, Artificial Sequence
  ENSG00000284770_66 (sequence is synthesized)
tttgcctgccctgattttagactctgctaattcaagtccctgttatcttgcttgacatcgacaaggatcaccgcaccgttccttcagtttccacagttccgtcagttcccacggagaata

SEQ ID NO: 799467 - DNA, 120 bp, Artificial Sequence
  ENSG00000284770_67 (sequence is synthesized)
ctgaggagaagacagcattcctgtctcacaggtcttctcacacagccacagactgtcctgttgagaaacaaccaaagccgatctgagagtggtgaaactgttttaagagcatcagaaagt

SEQ ID NO: 799468 - DNA, 120 bp, Artificial Sequence
  ENSG00000284770_68 (sequence is synthesized)
atgcacgtagacagcttttatgtattctaatgatgctgaaattatttcaaggataactccgtgtgtggaacaactggtgaggtttgggggtggcacctcctgatttgggaaagcaccagg

SEQ ID NO: 799469 - DNA, 120 bp, Artificial Sequence
  ENSG00000284770_69 (sequence is synthesized)
tcccacagtcctgtggctgtggaatacagaaacaaggcggtgtgtggatgaagagttagtcaacaaatgccattccgtaatgaacgattttagaaaccacaagtgagtttcatgtttgct

SEQ ID NO: 799470 - DNA, 120 bp, Artificial Sequence
  ENSG00000284770_70 (sequence is synthesized)
agtaaaggtgtgtctatggcagtattagtaacagctattattctgatggaatgcttacaatattgcagggactgtaccaagtgctttgtaaatatctcacttaaatctcacagtaatgct

SEQ ID NO: 799471 - DNA, 120 bp, Artificial Sequence
  ENSG00000284770_71 (sequence is synthesized)
gtgaggtaggaactatttccctcttaacaattgaggaacaaacgaagagttaaaaaacttgttccaggtcacagggctggtaaatgaagaggagggattaaagactcccaagctcaagtt

SEQ ID NO: 799472 - DNA, 120 bp, Artificial Sequence
  ENSG00000284770_72 (sequence is synthesized)
cttaaccactagactatttcctagctacgtgaattggtttctatttccagcaatgtagcagaacacagagagaaactcattcaatgttttgacaacacaaaaatgttggataaaattaaa

SEQ ID NO: 799473 - DNA, 120 bp, Artificial Sequence
  ENSG00000284770_73 (sequence is synthesized)
aacctttataaagcatggctcaactccgtgatcaaagaagaaacagggtaggagaaagcactgagtcagcctgtgccttgaaggcagctgctgatccttgggtttggaaggccaagccca

SEQ ID NO: 799474 - DNA, 120 bp, Artificial Sequence
  ENSG00000284770_74 (sequence is synthesized)
gggtcaggagactaatgggagactgacacagagctaggatctctgaggggccacagcctcaggggtgataaaacaaaacacactcagcttgtctgtctcagtcttgcccctcagtgggat

SEQ ID NO: 799475 - DNA, 120 bp, Artificial Sequence
  ENSG00000284770_75 (sequence is synthesized)
ggaaaggagtctctctcccctcagtgcctacccacagcttgcacttaggtaggtctggggctggtagtcagtctgtgtaagcccaacagttccaagccaaaaatctgaagtattcataga

SEQ ID NO: 799476 - DNA, 120 bp, Artificial Sequence
  ENSG00000284770_76 (sequence is synthesized)
tggtagtattcctagatgcatggcagaaaaaaatgtaaatatgtaaatcctctctgtaggaatgcattttaaatagaggactcagtttccaaagacatgagatggtcacaaaaaaaaaaa

SEQ ID NO: 799477 - DNA, 120 bp, Artificial Sequence
  ENSG00000284770_77 (sequence is synthesized)
aaaaaaaaagaccgcatcagaaaacaagcgccatgaacaacagttgtagaaacaacaaactgcaaaatcagacccagcaaagactacagatcccagaattaccagatacaaaaaagaatt

SEQ ID NO: 799478 - DNA, 120 bp, Artificial Sequence
  ENSG00000284770_78 (sequence is synthesized)
atattcaaagatgagacaaagtacagcaaaggaatcagactatcaaagtggaccatgtagatgtgggttgatttcttgtcctggactgagagctgctctgggaccccagctctatgcagg

SEQ ID NO: 799479 - DNA, 120 bp, Artificial Sequence
  ENSG00000284770_79 (sequence is synthesized)
gcttctaactgacagacactgcatgtgccttctgtcccctgcaccttcgatggccaaagtggaagctgcaagaatccagaacagaaatctctgaagctaaagccagctttgtgcttgatt

SEQ ID NO: 799480 - DNA, 120 bp, Artificial Sequence
  ENSG00000284770_80 (sequence is synthesized)
tcttcccagggctctagtttccattttggtctctgcagattcatttttttttctggttcagcaatactgtgttttaaatgatgtcttatatttcatgcagtgtcttatttttatcggtca

SEQ ID NO: 799481 - DNA, 120 bp, Artificial Sequence
  ENSG00000284770_81 (sequence is synthesized)
atgtcttatatttcatgcagtgtcttatttttatcggtcagaagggttgaaggatccttagactgccacactcaatcagtggattctgtcgttcagtttttttttttgagacggagtctc

SEQ ID NO: 799482 - DNA, 120 bp, Artificial Sequence
  ENSG00000284770_82 (sequence is synthesized)
gacctcatgatctgcccgcctcggccttctgttgttaagttttaaagctgcaaataatttctgatcaaatctatggaaactgagtttttttgtaggcaggggaacgttgatttataacct

SEQ ID NO: 799483 - DNA, 120 bp, Artificial Sequence
  ENSG00000284770_83 (sequence is synthesized)
tgagtttttttgtaggcaggggaacgttgatttataaccttttgctttaaactcagaaaaatactgtatgagaaataacctagtggattattgtgaattaaagcaacagcataactatta

SEQ ID NO: 799484 - DNA, 120 bp, Artificial Sequence
  ENSG00000284770_84 (sequence is synthesized)
ggatgctggaattggtatataagattagtaaagttccccactgcccccccacactatacttcagctactttcacttctactgtgtaacttcattcctctttttatagggtgcaaaacgtc

SEQ ID NO: 799485 - DNA, 73 bp, Artificial Sequence
  ENSG00000284770_85 (sequence is synthesized)
acctcaagcaaaccatacccggccatttttgtatttttagtggtaatgggtttcatcatgttggccaggctgg

SEQ ID NO: 799486 - DNA, 120 bp, Artificial Sequence
  ENSG00000284770_86 (sequence is synthesized)
aaagtgctgggattacaggcatgaactcactgtgcccgatctcaaagaacttttgattggagagaatcatggatgtagaatatttgtcataaatatataatgaaaactttaaaaaatgta

SEQ ID NO: 799487 - DNA, 120 bp, Artificial Sequence
  ENSG00000284770_87 (sequence is synthesized)
ataatgaaaactttaaaaaatgtataattaaaaaaataatgaaagaagaaataattgttgagaaatttatgaaaggatatgaaaaattagcatatcctttacaaacccagattggcattt

SEQ ID NO: 799488 - DNA, 120 bp, Artificial Sequence
  ENSG00000284770_88 (sequence is synthesized)
agaattgaggaaaggtgtgtaacatcaatttacttattttggttaagcaaattctatcaaataataatatgtgcagttagtatctcctgttccacctcgtagctgctttacctaaaccat

SEQ ID NO: 799489 - DNA, 120 bp, Artificial Sequence
  ENSG00000284770_89 (sequence is synthesized)
gcattgacacgtacctccaaggcctcaaagtgcccacagtgtgtgctcccacagcattaaaatgcacccccttaacattttatttatcaccccccaccactattccaggcctgaaacagt

SEQ ID NO: 799490 - DNA, 120 bp, Artificial Sequence
  ENSG00000284770_90 (sequence is synthesized)
cttatgaactgtccgtgaggcacttgtttgctgaaacagtaactgagctgaattcttgtggtggttcctatgaacacccgggaagaaacagccagcagaggccgcctgagcctgaaccga

SEQ ID NO: 799491 - DNA, 82 bp, Artificial Sequence
  ENSG00000284770_91 (sequence is synthesized)
gttcaaacaattctcccacaggaggatcctttattcgtccgaacaaggtaaattttggaacagactttcttactgcaattaa

SEQ ID NO: 799492 - DNA, 120 bp, Artificial Sequence
  ENSG00000284779_0 (sequence is synthesized)
ccgctaatgtaccatgccctggtgctggaaagtgcctgagccagctgccccagcggcctcagcactaccaagttggcacaaagctccccaaattcggaggggctcagggaaacgagtgga

SEQ ID NO: 799493 - DNA, 120 bp, Artificial Sequence
  ENSG00000284779_1 (sequence is synthesized)
ggggatgaggaggtgaggggtaaacccatcatttcagttggcatttgagcaggtgccatgctcagcggagatgaggctctcccatctgtaggggccgtattaacatgcacactctaaaag

SEQ ID NO: 799494 - DNA, 120 bp, Artificial Sequence
  ENSG00000284779_2 (sequence is synthesized)
tgcccttcgtttctccagcctcagctttgtccctctcctcctccacgtcaacctggccagagggtctggacgccacagccagggcaccccctgctttggtggtgactgctaatattggcc

SEQ ID NO: 799495 - DNA, 120 bp, Artificial Sequence
  ENSG00000284779_3 (sequence is synthesized)
aggccggcggatcatcgtccaggcagtttcggcagagagccttgggcaccagtgactccccggtcctctttatccactgtccaggagctgcggggactgcgcagggactagagtacaggg

SEQ ID NO: 799496 - DNA, 120 bp, Artificial Sequence
  ENSG00000284779_4 (sequence is synthesized)
gccgaagagtcaccaccgagcttgtgtgggaggaggtggattccagcccccagccccagggctctgaatcgctgccagctcagccccctgcccagcctgccccacagcctgagccccagc

SEQ ID NO: 799497 - DNA, 120 bp, Artificial Sequence
  ENSG00000284779_5 (sequence is synthesized)
aggccagagagcccagtcctgaggtgagctgctgtggcctgtggcccaggcgaccccagcgctcccagaactgaggctggcagccagccccagcctcagccccaactgcgaggcagagag

SEQ ID NO: 799498 - DNA, 120 bp, Artificial Sequence
  ENSG00000284779_6 (sequence is synthesized)
acaccaatgggaatcccaatggggaagtcgatgctggtgcttctcaccttcttggccttcgcctcgtgctgcattgctgcttaccgccccagtgagaccctgtgcggcggggagctggtg

SEQ ID NO: 799499 - DNA, 120 bp, Artificial Sequence
  ENSG00000284779_7 (sequence is synthesized)
gacaccctccagttcgtctgtggggaccgcggcttctacttcagcaggcccgcaagccgtgtgagccgtcgcagccgtggcatcgttgaggagtgctgtttccgcagctgtgacctggcc

SEQ ID NO: 799500 - DNA, 120 bp, Artificial Sequence
  ENSG00000284779_8 (sequence is synthesized)
ctcctggagacgtactgtgctacccccgccaagtccgagagggacgtgtcgacccctccgaccgtgcttccggacaacttccccagataccccgtgggcaagttcttccaatatgacacc

SEQ ID NO: 799501 - DNA, 120 bp, Artificial Sequence
  ENSG00000284779_9 (sequence is synthesized)
tggaagcagtccacccagcgcctgcgcaggggcctgcctgccctcctgcgtgcccgccggggtcacgtgctcgccaaggagctcgaggcgttcagggaggccaaacgtcaccgtcccctg

SEQ ID NO: 799502 - DNA, 120 bp, Artificial Sequence
  ENSG00000284779_10 (sequence is synthesized)
attgctctacccacccaagaccccgcccacgggggcgcccccccagagatggccagcaatcggaagtgagcaaaactgccgcaagtctgcagcccggcgccaccatcctgcagcctcctc

SEQ ID NO: 799503 - DNA, 120 bp, Artificial Sequence
  ENSG00000284779_11 (sequence is synthesized)
ctgaccacggacgtttccatcaggttccatcccgaaaatctctcggttccacgtccccctggggcttctcctgacccagtccccgtgccccgcctccccgaaacaggctactctcctcgg

SEQ ID NO: 799504 - DNA, 120 bp, Artificial Sequence
  ENSG00000284779_12 (sequence is synthesized)
ccccctccatcgggctgaggaagcacagcagcatcttcaaacatgtacaaaatcgattggctttaaacacccttcacataccctccccccaaattatccccaattatccccacacataaa

SEQ ID NO: 799505 - DNA, 120 bp, Artificial Sequence
  ENSG00000284779_13 (sequence is synthesized)
aaatcaaaacattaaactaacccccttcccccccccccacaacaaccctcttaaaactaattggctttttagaaacaccccacaaaagctcagaaattggctttaaaaaaaacaaccacc

SEQ ID NO: 799506 - DNA, 120 bp, Artificial Sequence
  ENSG00000284779_14 (sequence is synthesized)
aaaaaaaatcaattggctaaaaaaaaaaagtattaaaaacgaattggctgagaaacaattggcaaaataaaggaatttggcactccccacccccctctttctcttctcccttggactttg

SEQ ID NO: 799507 - DNA, 120 bp, Artificial Sequence
  ENSG00000284779_15 (sequence is synthesized)
agtcaaattggcctggacttgagtccctgaaccagcaaagagaaaagaaggaccccagaaatcacaggtgggcacgtcgctgctaccgccatctcccttctcacgggaattttcagggta

SEQ ID NO: 799508 - DNA, 120 bp, Artificial Sequence
  ENSG00000284779_16 (sequence is synthesized)
aactggccatccgaaaatagcaacaacccagactggctcctcactcccttttccatcactaaaaatcacagagcagtcagagggacccagtaagaccaaaggaggggaggacagagcatg

SEQ ID NO: 799509 - DNA, 120 bp, Artificial Sequence
  ENSG00000284779_17 (sequence is synthesized)
aaaaccaaaatccatgcaaatgaaatgtaattggcacgaccctcacccccaaatcttacatctcaattcccatcctaaaaagcactcatactttatgcatccccgcagctacacacacac

SEQ ID NO: 799510 - DNA, 120 bp, Artificial Sequence
  ENSG00000284779_18 (sequence is synthesized)
aacacacagcacacgcatgaacacagcacacacacgagcacagcacacacacaaacgcacagcacacacagcacacagatgagcacacagcacacacacaaacgcacagcacacacacgc

SEQ ID NO: 799511 - DNA, 120 bp, Artificial Sequence
  ENSG00000284779_19 (sequence is synthesized)
acacacatgcacacacagcacacaaacgcacggcacacacacgcacacacatgcacacacagcacacacacaaacgcacagcacacacaaacgcacagcacacacgcacacacagcacac

SEQ ID NO: 799512 - DNA, 120 bp, Artificial Sequence
  ENSG00000284779_20 (sequence is synthesized)
acacgagcacacagcacacaaacgcacagcacacgcacacacatgcacacacagcacacacactagcacacagcacacacacaaagacacagcacacacatgcacacacagcacacacac

SEQ ID NO: 799513 - DNA, 120 bp, Artificial Sequence
  ENSG00000284779_21 (sequence is synthesized)
cagcacacacatgcacacacagcacacacgcatgcacagcacacatgaacacagcacacacacaaacacacagcacacacatgcacacacagcacacacactcatgcgcagcacatacat

SEQ ID NO: 799514 - DNA, 120 bp, Artificial Sequence
  ENSG00000284779_22 (sequence is synthesized)
gaacacagctcacagcacacaaacacgcagcacacacgttgcacacgcaagcacccacctgcacacacacatgcgcacacacacgcacacccccacaaaattggatgaaaacaataagca

SEQ ID NO: 799515 - DNA, 120 bp, Artificial Sequence; identical to SEQ ID NO: 540665
  ENSG00000284779_23 (sequence is synthesized)

SEQ ID NO: 799516 - DNA, 120 bp, Artificial Sequence; identical to SEQ ID NO: 540666
  ENSG00000284779_24 (sequence is synthesized)

SEQ ID NO: 799517 - DNA, 120 bp, Artificial Sequence; identical to SEQ ID NO: 540667
  ENSG00000284779_25 (sequence is synthesized)

SEQ ID NO: 799518 - DNA, 120 bp, Artificial Sequence; identical to SEQ ID NO: 540668
  ENSG00000284779_26 (sequence is synthesized)

SEQ ID NO: 799519 - DNA, 120 bp, Artificial Sequence; identical to SEQ ID NO: 540669
  ENSG00000284779_27 (sequence is synthesized)

SEQ ID NO: 799520 - DNA, 120 bp, Artificial Sequence; identical to SEQ ID NO: 540670
  ENSG00000284779_28 (sequence is synthesized)

SEQ ID NO: 799521 - DNA, 120 bp, Artificial Sequence; identical to SEQ ID NO: 540671
  ENSG00000284779_29 (sequence is synthesized)

SEQ ID NO: 799522 - DNA, 120 bp, Artificial Sequence; identical to SEQ ID NO: 540672
  ENSG00000284779_30 (sequence is synthesized)

SEQ ID NO: 799523 - DNA, 120 bp, Artificial Sequence; identical to SEQ ID NO: 540673
  ENSG00000284779_31 (sequence is synthesized)

SEQ ID NO: 799524 - DNA, 120 bp, Artificial Sequence; identical to SEQ ID NO: 540674
  ENSG00000284779_32 (sequence is synthesized)

SEQ ID NO: 799525 - DNA, 120 bp, Artificial Sequence; identical to SEQ ID NO: 540675
  ENSG00000284779_33 (sequence is synthesized)

SEQ ID NO: 799526 - DNA, 120 bp, Artificial Sequence; identical to SEQ ID NO: 540676
  ENSG00000284779_34 (sequence is synthesized)

SEQ ID NO: 799527 - DNA, 120 bp, Artificial Sequence; identical to SEQ ID NO: 540677
  ENSG00000284779_35 (sequence is synthesized)

SEQ ID NO: 799528 - DNA, 120 bp, Artificial Sequence; identical to SEQ ID NO: 540678
  ENSG00000284779_36 (sequence is synthesized)

SEQ ID NO: 799529 - DNA, 120 bp, Artificial Sequence; identical to SEQ ID NO: 540679
  ENSG00000284779_37 (sequence is synthesized)

SEQ ID NO: 799530 - DNA, 120 bp, Artificial Sequence; identical to SEQ ID NO: 540680
  ENSG00000284779_38 (sequence is synthesized)

SEQ ID NO: 799531 - DNA, 120 bp, Artificial Sequence; identical to SEQ ID NO: 540681
  ENSG00000284779_39 (sequence is synthesized)

SEQ ID NO: 799532 - DNA, 120 bp, Artificial Sequence; identical to SEQ ID NO: 540682
  ENSG00000284779_40 (sequence is synthesized)

SEQ ID NO: 799533 - DNA, 120 bp, Artificial Sequence; identical to SEQ ID NO: 540683
  ENSG00000284779_41 (sequence is synthesized)

SEQ ID NO: 799534 - DNA, 120 bp, Artificial Sequence
  ENSG00000284779_42 (sequence is synthesized)
acggccggacactggccccggaagaggagggaggcggtggctgggatcggcagcagccgtccatgggaacacccagccggccccactcgcacgggtagagacaggggcgccctgctggag

SEQ ID NO: 799535 - DNA, 120 bp, Artificial Sequence
  ENSG00000284779_43 (sequence is synthesized)
ctgcagggagggatccagcaggtgactcttcaggctgatttgcccatcccagatagaagccgggagtgttctttcaaaggtgtctttaccttagacactcaataaaatggtaacacagtg

SEQ ID NO: 799536 - DNA, 120 bp, Artificial Sequence
  ENSG00000284779_44 (sequence is synthesized)
agcttggggcagctgccaggatcctggtttctgaaggaggggaagaacttctgctgctggagggtgcagggaagcctcctgagagcagcctcaacttcagggatggggtgtgcaggaaag

SEQ ID NO: 799537 - DNA, 120 bp, Artificial Sequence
  ENSG00000284791_0 (sequence is synthesized)
ccgacgcagccgccggcccgcccgccagtctgggctcctgcacatctggcgatcccgccacatctgggcagccggcgctggagcatgaacggctctcaggcgggcgccgcggctcaggcc

SEQ ID NO: 799538 - DNA, 120 bp, Artificial Sequence
  ENSG00000284791_1 (sequence is synthesized)
gcctggctgagctcctgctgtaaccagtcggcgtcgccgccggagccccccgaggggccgcgcgcggtgcaggcggtggtgctcggcgtgctgtccctgctggtgctttgcggggtcctg

SEQ ID NO: 799539 - DNA, 120 bp, Artificial Sequence
  ENSG00000284791_2 (sequence is synthesized)
ttcctgggcggcggcctcctcctccgcgcccagggcctgacagcgctgctgacccgcgagcagcgcgcgtcccgcgagcccgagccgggcagtgccagcggagaggacggcgacgacgac

SEQ ID NO: 799540 - DNA, 120 bp, Artificial Sequence
  ENSG00000284791_3 (sequence is synthesized)
tcctaggcgcccggctgcgctcggtggtcgcggcctccaggcagcccctgactccgagcggtccggagcatgcccgacggctgctgcggtcccgaccccttacccgaagcggcgcgcccc

SEQ ID NO: 799541 - DNA, 120 bp, Artificial Sequence
  ENSG00000284791_4 (sequence is synthesized)
acacagagaggagaagaagagaagaggagaggagagaagagaagaagagaggagagaagagaagaggagaggagagaagagaacctcagaggatccagaacggcagctggtccttgctgg

SEQ ID NO: 799542 - DNA, 82 bp, Artificial Sequence
  ENSG00000284791_5 (sequence is synthesized)
catcggtttcacctccaccacggtcccccagatgactgtggacatccagtctcgagtctctctttgccatttttggaggcac

SEQ ID NO: 799543 - DNA, 120 bp, Artificial Sequence
  ENSG00000284791_6 (sequence is synthesized)
cttcctagttttgctgtcttttttttttctcagtcttttagactcccagctgtacaacttgattgccttactaatgacctgcttcaaggaggtggacattcctaatttcttctgtgacct

SEQ ID NO: 799544 - DNA, 120 bp, Artificial Sequence
  ENSG00000284791_7 (sequence is synthesized)
cattcctaatttcttctgtgacctttctcaactcccccatcttgccgttgtgacaccttcatcaataacataatcatgtatttccctactgccatatttggttttcttcccatctcgggg

SEQ ID NO: 799545 - DNA, 72 bp, Artificial Sequence
  ENSG00000284791_8 (sequence is synthesized)
ataaaggaagaggtgttggagggtacctcagttcagatgtgtcatcttcccccagaaagggtgcagtggctg

SEQ ID NO: 799546 - DNA, 120 bp, Artificial Sequence
  ENSG00000284791_9 (sequence is synthesized)
tcagatgtgtcatcttcccccagaaagggtgcagtggctgcagtgatgtacacggtggtcacctccatgctcaacccctttatctacagcctgggaaacagggatattaaaagtgtcttg

SEQ ID NO: 799547 - DNA, 120 bp, Artificial Sequence
  ENSG00000284797_0 (sequence is synthesized)
ccccgcgctccgccagcagggagcgcacacgcaggtgcaaggagctggcacctgggcacacacctggccacacacctgtgcagagccggtggcaggccctcccggcgcaggaatggcgtg

SEQ ID NO: 799548 - DNA, 120 bp, Artificial Sequence
  ENSG00000284797_1 (sequence is synthesized)
cccccagctgccgccacttctgcttttggtgctggtggtgctgctgaaagctggtgtgaattacaatactccctttacagatattgtgacctcagagaacagtatggagacatcacctgt

SEQ ID NO: 799549 - DNA, 120 bp, Artificial Sequence
  ENSG00000284797_2 (sequence is synthesized)
cagctctctgatttcttctcccttcgcccacagcacccacagttcaggggaaccccccaaatcctactccagcaccatgagtttggagacagactccataacccacctcagcccctcaag

SEQ ID NO: 799550 - DNA, 120 bp, Artificial Sequence
  ENSG00000284797_3 (sequence is synthesized)
cacaaccagagacaatcacgcaccctagttctggctcccccagtgcagagctcaccccctcttcccattccaccctccccagttccgaatccctgaccccgcactggagccccacttccc

SEQ ID NO: 799551 - DNA, 120 bp, Artificial Sequence
  ENSG00000284797_4 (sequence is synthesized)
acagccccggaacggagcccttgacctccactgaccagaccttggagccccctggcccagctccaggtgacactgggccccgtgagttacacaggaacccgagtgtggtggtggtcgtgt

SEQ ID NO: 799552 - DNA, 120 bp, Artificial Sequence
  ENSG00000284797_5 (sequence is synthesized)
gtttgctggtgtctcttttgctcatcgggtctgtggtcatggctgtgagattctgtcaccggaatgagtccaagtttgagaacctggacgaggtgtccatgggatccgtgaatgacagat

SEQ ID NO: 799553 - DNA, 120 bp, Artificial Sequence
  ENSG00000284797_6 (sequence is synthesized)
tgtcctttgcccaccacctccaggagtgagccctgaggagccaacagagatgggggcatggatggggctggggttcctggggaggagcagaacctgaggaaataaagcccctaccattca

SEQ ID NO: 799554 - DNA, 120 bp, Artificial Sequence
  ENSG00000284797_7 (sequence is synthesized)
gagctgctatcccaagcagggccaacctgggctgcagagccttttggtgtctgaatgcctccctgtgtgttccttcctcagggatccgtgaatgacagattgtcctttgcccaccacctc

SEQ ID NO: 799555 - DNA, 120 bp, Artificial Sequence
  ENSG00000284824_0 (sequence is synthesized)
cacttttaatgtttgctaactgatgtaattgcttcatgtctcatgccctgtatgccctgtgctcttcccacaggtggccttttgccccacccccagcatacaatgatggaaatagccaat

SEQ ID NO: 799556 - DNA, 120 bp, Artificial Sequence
  ENSG00000284824_1 (sequence is synthesized)
gtgagttctccagaagtctttgtcctcctgggcttctccacacgaccctcactagaaactgtcctcttcatagttgtcttgagtttttacatggtatcgatcttgggcaatggcatcatc

SEQ ID NO: 799557 - DNA, 120 bp, Artificial Sequence
  ENSG00000284824_2 (sequence is synthesized)
attctggtctcccatacagatgtgcacctccacacacctatgtacttctttcttgccaacctccccttcctggacatgagcttcaccacgagcattgtcccacagctcctggctaacctc

SEQ ID NO: 799558 - DNA, 120 bp, Artificial Sequence
  ENSG00000284824_3 (sequence is synthesized)
tggggaccacagaaaaccataagctatggagggtgtgtggtccagttctatatctcccattggctgggggcaaccgagtgtgtcctgctggccaccatgtcctatgaccgctacgctgcc

SEQ ID NO: 799559 - DNA, 120 bp, Artificial Sequence
  ENSG00000284824_4 (sequence is synthesized)
atctgcaggccactccattacactgtcattatgcatccacagctttgccttgggctagctttggcctcctggctggggggtctgaccaccagcatggtgggctccacgctcaccatgctc

SEQ ID NO: 799560 - DNA, 120 bp, Artificial Sequence
  ENSG00000284824_5 (sequence is synthesized)
ctaccgctgtgtgggaacaattgcatcgaccacttcttttgcgagatgcccctcattatgcaactggcttgtgtggataccagcctcaatgagatggagatgtacctggccagctttgtc

SEQ ID NO: 799561 - DNA, 120 bp, Artificial Sequence
  ENSG00000284824_6 (sequence is synthesized)
tttgttgtcctgcctctggggctcatcctggtctcttacggccacattgcccgggccgtgttgaagatcaggtcagcagaagggcggagaaaggcattcaacacctgttcttcccacgtg

SEQ ID NO: 799562 - DNA, 120 bp, Artificial Sequence
  ENSG00000284824_7 (sequence is synthesized)
gctgtggtgtctctgttttacgggagcatcatcttcatgtatctccagccagccaagagcacctcccatgagcagggcaagttcatagctctgttctacaccgtagtcactcctgcgctg

SEQ ID NO: 799563 - DNA, 120 bp, Artificial Sequence
  ENSG00000284824_8 (sequence is synthesized)
aacccacttatttacaccctgaggaacacggaggtgaagagcgccctccggcacatggtattagagaactgctgtggctctgcaggcaagctggcgcaaatttagagactccagtgcctt

SEQ ID NO: 799564 - DNA, 120 bp, Artificial Sequence
  ENSG00000284824_9 (sequence is synthesized)
ctgagaaggaagatcaagtttacatcgagcaaagtgaccttggaagacagggcacttgggatgtcgtttttcttctaatattgtttgagctcaaggtagatggaaatctgaaaggagtgt

SEQ ID NO: 799565 - DNA, 120 bp, Artificial Sequence
  ENSG00000284824_10 (sequence is synthesized)
tgctatatatacacatgttgactgtcatcttgttttgtaaactccttgcgttgttgttcagctgttcctcagtatccgaagcgggtggattccaggacgctccgtggataataaactttg

SEQ ID NO: 799566 - DNA, 120 bp, Artificial Sequence
  ENSG00000284824_11 (sequence is synthesized)
acgacgctgagagcgcgcggggagaccggagccggcctgttccccagagcccccggagccctcccagccctcaggcctgcgcctggggtgagctgagcccgggactccgccttgcaggct

SEQ ID NO: 799567 - DNA, 120 bp, Artificial Sequence
  ENSG00000284824_12 (sequence is synthesized)
ccggaaccctcgctgtggctcccccgctcggcccaggccttgaagccgcggcgaacctcttcctaccctacctcggggacctggtggcagcggcggcctcccccagcctggaccccgccg

SEQ ID NO: 799568 - DNA, 120 bp, Artificial Sequence
  ENSG00000284824_13 (sequence is synthesized)
gccgcgggtctcccggcccaaccccaccgacccagaccaagaccgcgccgagccgccgggactcagcgccttcgggtggcggcggtaagcggggaggaaacatggcgccgcccaaatgcg

SEQ ID NO: 799569 - DNA, 120 bp, Artificial Sequence
  ENSG00000284824_14 (sequence is synthesized)
cccggaggccgttaggctgtggagggcgaggaaggcggtccagaggcggccggcaggtccacgtcctgggcgaccgctctgtcgcagttgggcgagacctacctagtcctgacgggtcgt

SEQ ID NO: 799570 - DNA, 120 bp, Artificial Sequence
  ENSG00000284824_15 (sequence is synthesized)
atttccaagacattttcatattctatccattgttttgtgtgcattttattacttctgtatatagaggtaacaacgctaagcttttttgagatgtctgtttcttctagatgttctgaagta

SEQ ID NO: 799571 - DNA, 120 bp, Artificial Sequence
  ENSG00000284824_16 (sequence is synthesized)
cctgatacatgttaaaattagaggtagtaaaatgacacattttgtaaataactttttgttaaaattcataggaaatgttattttgtgggggggggatggcatggtgtttgtggactggtt

SEQ ID NO: 799572 - DNA, 120 bp, Artificial Sequence
  ENSG00000284824_17 (sequence is synthesized)
cagggaaggaggggaaaagggaggtgcagagagctctaagccagtgtgcttacagtgaggcgagattcaccattgtttcttatgattgtgcattttgttttacttatctatgtatacagt

SEQ ID NO: 799573 - DNA, 120 bp, Artificial Sequence
  ENSG00000284824_18 (sequence is synthesized)
gtatctaaaggacaaacgagtcctaatttacaacagctagtctttccagatgttaaagaacttctatcaatagagtaacctatcactagagttcacctctatcaatagagtaacctcatt

SEQ ID NO: 799574 - DNA, 120 bp, Artificial Sequence
  ENSG00000284824_19 (sequence is synthesized)
ctctgcctgatgattcaaaggcatgggaagaccaaaaccatgtggcagttcctgtttttgattttattatatatatgtatataatatgaaagtagtcattaaagtagtctttcctttcgt

SEQ ID NO: 799575 - DNA, 120 bp, Artificial Sequence
  ENSG00000284824_20 (sequence is synthesized)
ttttgaacgctctcaccacaaagaaatgacaagtgtttgagcaaccataggctttgatggcttctcacaggacagaaaacctggatcatcccaaacctgctctgtgaaccctctacttca

SEQ ID NO: 799576 - DNA, 120 bp, Artificial Sequence
  ENSG00000284824_21 (sequence is synthesized)
tgtatgggtttcctcccatgctgcacactgtgagggtcatgcatcaccacagcatgcacagctgagaaatgtggagagtgaaggacccaggccacattgactgtggggatgtaagccagt

SEQ ID NO: 799577 - DNA, 120 bp, Artificial Sequence
  ENSG00000284824_22 (sequence is synthesized)
ggagacacacttcctgaagtaagatgcatttcacaaagctcccagtttccagaaggatggagcaccagtcacccttggtcatggccaaaccctctttgtccttgccctttcctgctctct

SEQ ID NO: 799578 - DNA, 120 bp, Artificial Sequence
  ENSG00000284824_23 (sequence is synthesized)
gggatcacagaacatgtgcactggacacagcttctgccttggaaacacccagactaaggtttccaggcatacaactactaaaatccttggattccttaaagtggtacttgtatgttaatg

SEQ ID NO: 799579 - DNA, 120 bp, Artificial Sequence
  ENSG00000284824_24 (sequence is synthesized)
agttgacaaatggctagtagtccctacgtagcttcaggatgggagctgggcacctgaaagaccaaggcagaattagagaattaagatagtcagacccagcccccaacctccatggaggga

SEQ ID NO: 799580 - DNA, 120 bp, Artificial Sequence
  ENSG00000284824_25 (sequence is synthesized)
agctgaagacgtggaggttcctggaaggtggtgaacctggagagagcatgcaagctccacagcctttccctatacctcaccctatgcatctcttcatctgcatctcttgcgatatccttt

SEQ ID NO: 799581 - DNA, 120 bp, Artificial Sequence
  ENSG00000284824_26 (sequence is synthesized)
acaataaactgctaaatgtagatgcctccatgagttctgtgggctgctctagcaaattaattgaacccaagaagggggctgtggtaacccagacttacagctgattgactggtcagacac

SEQ ID NO: 799582 - DNA, 120 bp, Artificial Sequence
  ENSG00000284824_27 (sequence is synthesized)
acaggtaaaaagaacttgaggcttataattggtattggaaacggggatgtcttatgagacttagccctcacccagcagacctggcgttatttccaggtagatagtgtcaaaactgaattg

SEQ ID NO: 799583 - DNA, 120 bp, Artificial Sequence
  ENSG00000284824_28 (sequence is synthesized)
aaggacacccagctggtgtctgccataggattgattgtttgcttggtgtatgggcttaaccccatcacctttagtcacagaagtcttctgtgttgattgttgagtgagagaatagaaaaa

SEQ ID NO: 799584 - DNA, 120 bp, Artificial Sequence
  ENSG00000284824_29 (sequence is synthesized)
gcgctttagtttgtttttccttatagaacatgttgacattatgtggacatatttaaatttcccttcagacaccaaattcgtacttttgccaataatgtgtacaaaggcatatattctcac

SEQ ID NO: 799585 - DNA, 120 bp, Artificial Sequence
  ENSG00000284824_30 (sequence is synthesized)
agtttcactaacatttgattttgttagtaactttagttttacttgcaaatcttacctcagtatcattttatttggcattgatttaatcattagtgaggtttaacatcttctggtatgttt

SEQ ID NO: 799586 - DNA, 120 bp, Artificial Sequence
  ENSG00000284824_31 (sequence is synthesized)
tggggctatttgtgtttcttcaataaattgtttttttcttaaattttcattgttttacctttttgcttactgatttgtagcggtagttgacatgattctacacatctttgtcatcatata

SEQ ID NO: 799587 - DNA, 120 bp, Artificial Sequence
  ENSG00000284824_32 (sequence is synthesized)
agtgttgaatcgtttttctagtgggacgttttatccttttgctatgttttgtttgtttcctttgtggtacaaaagttttaaatgttatatgtattaaataaactatcaatcatgccttta

SEQ ID NO: 799588 - DNA, 120 bp, Artificial Sequence
  ENSG00000284844_0 (sequence is synthesized)
cctccaccccagggcccaggtagggaccatgtcccctgccattgcattggccttcctgccactggtggtaacattgctggtgcggtaccggcactacttccgattgctggtgcgcacggt

SEQ ID NO: 799589 - DNA, 120 bp, Artificial Sequence
  ENSG00000284844_1 (sequence is synthesized)
cttgctgcgaagcctccgagactgcctgtcagggctgcggatcgaggagcgggccttcagctacgtgctcacccatgccctgcccggtgaccctggtcacatcctcaccaccctggacca

SEQ ID NO: 799590 - DNA, 120 bp, Artificial Sequence
  ENSG00000284844_2 (sequence is synthesized)
ctggagcagccgctgcgagtacttgagccacatggggcctgtcaaaggtcagatcctgatgcggctggtggaggagaaggcccctgcttgtgtgctggaattgggaacctactgtggata

SEQ ID NO: 799591 - DNA, 120 bp, Artificial Sequence
  ENSG00000284844_3 (sequence is synthesized)
ctctaccctgcttattgcccgagccctgccccctgggggtcgccttcttactgtggagcgggacccacgcacggcagcagtggctgaaaaactcatccgcctggccggctttgatgagca

SEQ ID NO: 799592 - DNA, 120 bp, Artificial Sequence
  ENSG00000284844_4 (sequence is synthesized)
catggtggagctcatcgtgggcagctcagaggacgtgatcccgtgcctacgcacccagtatcagctgagtcgggcagacctggtgctcctggcacaccggccacgatgttacctgaggga

SEQ ID NO: 799593 - DNA, 120 bp, Artificial Sequence
  ENSG00000284844_5 (sequence is synthesized)
gctggaggcccatgccctactgccagcaggtgccaccgtgctggctgaccatgtgctcttccctggtgcaccccgcttcttgcagtatgctaagagctgtggccgctaccgctgccgcct

SEQ ID NO: 799594 - DNA, 120 bp, Artificial Sequence
  ENSG00000284844_6 (sequence is synthesized)
ccaccacactggccttccagacttccctgccatcaaggatggaatagctcagctcacctatgctggaccaggctgaggtccaggcccaggggtacttactgatgcccacccccaccccca

SEQ ID NO: 799595 - DNA, 120 bp, Artificial Sequence
  ENSG00000284844_7 (sequence is synthesized)
cccaagcagggacctcaaaatcccctccctttcctgtttggggccttgacacacgctgggctcagggctagggagtctctcttcccacctctgacctctttcagcctctacactgacctc

SEQ ID NO: 799596 - DNA, 120 bp, Artificial Sequence
  ENSG00000284844_8 (sequence is synthesized)
aagtgtcaagttctatcaggctgcttggtctcactaggccccctctttccagagagaaccatggactgacagcaagaagcctgagctcccgacccagctctgtcactgatttgctgagtg

SEQ ID NO: 799597 - DNA, 120 bp, Artificial Sequence
  ENSG00000284844_9 (sequence is synthesized)
actccaagggaatccccaccttgctctgagatttaatcttctctcttaacacgaaggaagctggatgggagagctccaggggcctcccagttctcggcctcagaaagcctcccatcctca

SEQ ID NO: 799598 - DNA, 120 bp, Artificial Sequence
  ENSG00000284862_0 (sequence is synthesized)
ggcaattgccgcggcactgtgcaggtgcctgggcttgacgcgggtgctgctcacccgctgtacaagaaggcggatctttgctctgtatcttctctatccgtttgcagtcatgagtagcga

SEQ ID NO: 799599 - DNA, 120 bp, Artificial Sequence
  ENSG00000284862_1 (sequence is synthesized)
attcctggctgagctgcactgggaggatgggttcgccatcccggtggcgaacgaggagaacaagctactggaagatcagttgtcaaagctgaaggatgaaagagcaagcttgcaagatga

SEQ ID NO: 799600 - DNA, 120 bp, Artificial Sequence
  ENSG00000284862_2 (sequence is synthesized)
gttacgtgagtatgaagagcgaattaattctatgacttctcacttcaaaaatgttaagcaagagctctcaattacacagtctctttgcaaagcaagggagcgtgagactgaaagtgaaga

SEQ ID NO: 799601 - DNA, 120 bp, Artificial Sequence
  ENSG00000284862_3 (sequence is synthesized)
acattttaaggccattgctcaaagagaattgggacgagtgaaagatgaaattcaacggctggaaaatgagatggcttcaatactggaaaagaaaagtgataaagaaaatggcatatttaa

SEQ ID NO: 799602 - DNA, 120 bp, Artificial Sequence
  ENSG00000284862_4 (sequence is synthesized)
agccactcaaaaattggatggtttgaaatgtcaaatgaactgggaccagcaagcattggaggcctggttagaagaatcagctcataaagatagtgatgctctcactctccagaagtatgc

SEQ ID NO: 799603 - DNA, 120 bp, Artificial Sequence
  ENSG00000284862_5 (sequence is synthesized)
acaacaagatgataataaaatcagggcactgactctgcaattagaaagactaactttggaatgtaatcagaaaagaaagatacttgacaacgaacttacagagactataagcgcacagtt

SEQ ID NO: 799604 - DNA, 120 bp, Artificial Sequence
  ENSG00000284862_6 (sequence is synthesized)
agaattggataaagcagcacaagattttcgtaagattcataatgaaagacaagaactcattaaacaatgggagaacacaatagaacagatgcagaagagggatggagacatagataactg

SEQ ID NO: 799605 - DNA, 120 bp, Artificial Sequence
  ENSG00000284862_7 (sequence is synthesized)
tgctttggaattagcaaggataaagcaggaaacgagagaaaaagaaaatttggttaaagaaaagatcaagtttttggaaagtgagattgggaataacacagagtttgagaaaagaatttc

SEQ ID NO: 799606 - DNA, 120 bp, Artificial Sequence
  ENSG00000284862_8 (sequence is synthesized)
tgtggctgatcgtaaacttttaaaatgtagaacggcatatcaggaccatgaaactagtagaattcagctgaagggtgagctggattctttaaaagccactgtgaatagaacttccagtga

SEQ ID NO: 799607 - DNA, 120 bp, Artificial Sequence
  ENSG00000284862_9 (sequence is synthesized)
tttagaagctctgaggaaaaatatttccaagataaagaaggacattcatgaagaaacagcaaggttacaaaaaactaaaaatcataatgagataatacaaacaaaattaaaggagataac

SEQ ID NO: 799608 - DNA, 120 bp, Artificial Sequence
  ENSG00000284862_10 (sequence is synthesized)
tgagaaaaccatgtctgtagaagagaaagctactaatttggaagatatgctaaaggaggaggaaaaagatgtgaaggaagtagatgttcaactgaacctcataaaaggtgtgctgtttaa

SEQ ID NO: 799609 - DNA, 120 bp, Artificial Sequence
  ENSG00000284862_11 (sequence is synthesized)
gaaagctcaggagttacagactgagacaatgaaagaaaaagctgttttatcagaaattgaaggaactcgttcctctctgaaacatctcaaccatcagttacaaaaactggattttgaaac

SEQ ID NO: 799610 - DNA, 120 bp, Artificial Sequence
  ENSG00000284862_12 (sequence is synthesized)
cttgaagcagcaagaaattatgtacagccaggattttcacattcaacaagtggaacggagaatgtcacggttaaagggagaaattaattcagaagaaaaacaagcgcttgaagcaaaaat

SEQ ID NO: 799611 - DNA, 120 bp, Artificial Sequence
  ENSG00000284862_13 (sequence is synthesized)
tgttgaacttaggaagtctttggaagagaaaaaatctacatgtggccttttggaaacacagatcaagaagcttcataatgatctttattttatcaagaaggcacatagtaaaaacagtga

SEQ ID NO: 799612 - DNA, 120 bp, Artificial Sequence
  ENSG00000284862_14 (sequence is synthesized)
tgaaaaacagtcccttatgaccaaaataaatgaactaaaccttttcatcgacagatcagagaaagaacttgataaagccaaaggttttaagcaggatttgatgatagaggacaatctttt

SEQ ID NO: 799613 - DNA, 120 bp, Artificial Sequence
  ENSG00000284862_15 (sequence is synthesized)
aaaacttgaagttaagcgtactcgagaaatgcttcacagtaaggcagaagaagttctttccctagaaaaaagaaaacagcaattatacacagcaatggaagagcgaactgaagaaatcaa

SEQ ID NO: 799614 - DNA, 120 bp, Artificial Sequence
  ENSG00000284862_16 (sequence is synthesized)
aaacaatgcttgcgtcacaaataagatatgttgatcaagaacgggaaaacataagcactgagtttcgcgagcggctaagtaaaattgagaagctgaagaatagatatgaaattctgactg

SEQ ID NO: 799615 - DNA, 120 bp, Artificial Sequence
  ENSG00000284862_17 (sequence is synthesized)
ttgttatgctgcctcctgaaggagaagaggagaaaacacaggcctattatgtaataaaggctgctcaagaaaaagaagaacttcaaagggaaggtgactgtttggatgccaagatcaaca

SEQ ID NO: 799616 - DNA, 120 bp, Artificial Sequence
  ENSG00000284862_18 (sequence is synthesized)
aagctgaaaaagaaatctacgctctagaaaatacccttcaagtgctgaacagctgtaacaacaattataagcaatcttttaaaaaagtgactccatctagtgatgagtatgagctaaaaa

SEQ ID NO: 799617 - DNA, 120 bp, Artificial Sequence
  ENSG00000284862_19 (sequence is synthesized)
ttcaactagaagaacaaaaaagagctgttgatgaaaaatacagatacaaacaaagacaaatcagagaacttcaagaagacatccagagcatggaaaatacattagatgttatagaacatt

SEQ ID NO: 799618 - DNA, 120 bp, Artificial Sequence
  ENSG00000284862_20 (sequence is synthesized)
tggcaaataatgttaaagaaaagttatcagagaagcaggcttattcatttcaactaagtaaagaaacggaggagcagaagccaaaattagaaagagtgaccaaacagtgtgcaaaactca

SEQ ID NO: 799619 - DNA, 120 bp, Artificial Sequence
  ENSG00000284862_21 (sequence is synthesized)
caaaggaaatccgtcttttgaaagacacaaaagatgaaacaatggaagaacaagacatcaaacttcgtgaaatgaaacagtttcacaaagttattgatgaaatgttagttgatatcatag

SEQ ID NO: 799620 - DNA, 120 bp, Artificial Sequence
  ENSG00000284862_22 (sequence is synthesized)
aagaaaatactgagatccgtattatccttcaaacatactttcaacagagtgggttagaactacctacagctagcacaaaaggcagtcgtcagagctctagatctccttcacatacttcac

SEQ ID NO: 799621 - DNA, 120 bp, Artificial Sequence
  ENSG00000284862_23 (sequence is synthesized)
tatcagcaaggtcatctaggagtacaagtacatctacttctcagtcttcaattaaagtactggagcttaaattcccggcctcctcttcactagtaggcagcccttctaggccatctagtg

SEQ ID NO: 799622 - DNA, 120 bp, Artificial Sequence
  ENSG00000284862_24 (sequence is synthesized)
ctagtagtagctctagtaatgttaagagcaaaaagagcagcaaataaacattttaatctcttctgaaaaagttgtaaacacaaaaacaaaaatatactttaaaatacaaaacgacccaac

SEQ ID NO: 799623 - DNA, 120 bp, Artificial Sequence
  ENSG00000284862_25 (sequence is synthesized)
acattttatctagtggaaagtgtaaaaacttagtggtaagtgtaaaaactgatagttttaaaaaaaaaggaacgttctcattttctctactgttttcttcatactgaagaaattaatagc

SEQ ID NO: 799624 - DNA, 120 bp, Artificial Sequence
  ENSG00000284862_26 (sequence is synthesized)
agattcttgacaaggctacatgttatacaagcataggaaaaatgctgtatttcactgtaattctgatgttcgtagtgttagaaaatagtttgcttcattatttcacgaaactacactcac

SEQ ID NO: 799625 - DNA, 120 bp, Artificial Sequence
  ENSG00000284862_27 (sequence is synthesized)
ttctaatgtaacaatctttcaagaagaaatttctaaagatttactgtactattatgagcgtattgcaatgtgaaaatctcatttaccctacaagacaccaaaattaggttttctttattc

SEQ ID NO: 799626 - DNA, 120 bp, Artificial Sequence
  ENSG00000284862_28 (sequence is synthesized)
aaagtaactatttctcagacttttggggagaaaaattgttaaaggcagtttcttcttttgctataatttttaaccaaaaaatagcatcaacccctacccaccccacccccccaaaaaaaa

SEQ ID NO: 799627 - DNA, 120 bp, Artificial Sequence
  ENSG00000284862_29 (sequence is synthesized)
accggtaagagaaacactgtatatcaattttaaaatgcagcataaatttagaaaaatcacttctgaccttgaaataaatcacttctgaccttgaaataaacgcattaaagatttgctttc

SEQ ID NO: 799628 - DNA, 120 bp, Artificial Sequence
  ENSG00000284862_30 (sequence is synthesized)
agatacagccaaccaagtataaacaattttgaaattttcttgatttaataaacgatttaatgaaagctaggtatgacttgatttgcaatagaaatttcatttacagttggaggtagactg

SEQ ID NO: 799629 - DNA, 120 bp, Artificial Sequence
  ENSG00000284862_31 (sequence is synthesized)
ccaaatgtagtagtttttccagttaacacttcattataacatgtgcccaacactttgtactcttggaatagagtgtggaatattataaaactggattttaaataaatgtattagaattca

SEQ ID NO: 799630 - DNA, 120 bp, Artificial Sequence
  ENSG00000284862_32 (sequence is synthesized)
aggggctggagaagctgtgtgtgctacaggagcctgccaggcaatcggaggatcgtgtggtttacttccagccagctgccccgtggtcctccagccagctccgggggccacagttttcac

SEQ ID NO: 799631 - DNA, 120 bp, Artificial Sequence
  ENSG00000284862_33 (sequence is synthesized)
acgctccgggagcgatccgagagccgccttttcgtggaaagttacgctgccgcctggcaacccccgggaacgtcgggaggggcaagttgctgctcatccctcagtgctcaagttgtcaaa

SEQ ID NO: 799632 - DNA, 120 bp, Artificial Sequence
  ENSG00000284862_34 (sequence is synthesized)
caggtgcagtaaaattgtatgcatatgtagtattgaaaaccatgtttccatgttaattgtagacaaatgaaaaaatatagcaaattatgaaaaagaaaatgtcactataatcactatacc

SEQ ID NO: 799633 - DNA, 120 bp, Artificial Sequence
  ENSG00000284862_35 (sequence is synthesized)
tagaattcagctgaagggtgaggtatgtcaactcaaaaaagactggcttgtatgttcacgacaaatcactataaaatataaaataagcataaagcttttcctgtgataaagaaactactt

SEQ ID NO: 799634 - DNA, 120 bp, Artificial Sequence
  ENSG00000284862_36 (sequence is synthesized)
ttcctttttctttttttttttttaatgtctctttgtttgtggaacttttgggatactctgattaaacccctgattaagcaccacggggcgccattcacatcacagctggattctttaaaa

SEQ ID NO: 799635 - DNA, 120 bp, Artificial Sequence
  ENSG00000284862_37 (sequence is synthesized)
aacttagccaaaatacattttatatttcaaatatcctagtcattctgttttaggacaacatgttcttaagactactttggatagggtgactgccactctacacacatatataacaaatgt

SEQ ID NO: 799636 - DNA, 120 bp, Artificial Sequence
  ENSG00000284862_38 (sequence is synthesized)
atgaacaatgttcttatttttgtactattagtgtgtaatgttaccattgatgatgcatttagtatatgctaaatattgtatgacatgcctctagtattttatttcatataatccttacag

SEQ ID NO: 799637 - DNA, 120 bp, Artificial Sequence
  ENSG00000284862_39 (sequence is synthesized)
atgtcttgtgaggaagatactattatctgttttatagagtaagtaatttgtccaggttatactgctagtacacagagagctaggatttgacccctcctgcatttgacttctaaatactct

SEQ ID NO: 799638 - DNA, 120 bp, Artificial Sequence
  ENSG00000284862_40 (sequence is synthesized)
tcaagagtacactgtttagaacattgataagttctagttttctattttattaactgccataacaaataacttgatggccctttgtctttaaaacaccatgtaaaaagaaactgctcttta

SEQ ID NO: 799639 - DNA, 120 bp, Artificial Sequence
  ENSG00000284862_41 (sequence is synthesized)
tgagtcagcagttgttattcaaatctttacttagttataatatttgaaatgattggattctgttaataaggttagaacgtcttcatctttaggcattttattatgtttcttgtaatataa

SEQ ID NO: 799640 - DNA, 120 bp, Artificial Sequence
  ENSG00000284862_42 (sequence is synthesized)
agtttgactagagagtaaaagtgagatagtgagtgtggacatgaatggggtgagaacttagtagggtctaattgttatttaccactggaaagactattgatgtgtcctctggtggttata

SEQ ID NO: 799641 - DNA, 120 bp, Artificial Sequence
  ENSG00000284862_43 (sequence is synthesized)
aaaagaattgccctaaattccttgagggctgcaaaaggtggagagttattactttttttttttcttcttaagaagacaaaattttggtttggagtagtttgtagtctgatgaaatatttt

SEQ ID NO: 799642 - DNA, 120 bp, Artificial Sequence
  ENSG00000284862_44 (sequence is synthesized)
aaaatggttatctttgtttagtggaaaaaaatacttgtttttggatcagataaaactagttttaaatttcaaggctataccactactgctgttttaaattttctgagctctagtttactc

SEQ ID NO: 799643 - DNA, 120 bp, Artificial Sequence
  ENSG00000284862_45 (sequence is synthesized)
gtctattaaatgggggaaaaattaatattattttaggacatttgggagaactagaagcaatttatatcttagcacaattgtaggtactcaatatgtggtattgttttgattatttagaat

SEQ ID NO: 799644 - DNA, 120 bp, Artificial Sequence
  ENSG00000284862_46 (sequence is synthesized)
atgagaatggtatagaatgttagaggtatgactttgtttcttgcccctggcctggattgtgtctgttttgctgtgtggggatggttataattcttccccctttgaactactctgactgct

SEQ ID NO: 799645 - DNA, 120 bp, Artificial Sequence
  ENSG00000284862_47 (sequence is synthesized)
ccctccatcataccattgtcaagtgcttatgccattccaactctggttttaacagagagatacataaattaatagaaatgtaagtgaattaacaaattatattaaagctagttagccttt

SEQ ID NO: 799646 - DNA, 120 bp, Artificial Sequence
  ENSG00000284862_48 (sequence is synthesized)
ggtcattatgaagagctgctcttttcaatagtagcaacagattgtaaagtcatcctgtatgccctctcacatgccactccatctcattttacatacagaaaatagtttcttcaggttgaa

SEQ ID NO: 799647 - DNA, 120 bp, Artificial Sequence
  ENSG00000284862_49 (sequence is synthesized)
aatcacattgttttagctctttttatcaaatttaattttataaaatcacatttttatgcaaaaaattcctcttcttactatcttgctgaaatcttaggtcccaatacttcagagaaatgc

SEQ ID NO: 799648 - DNA, 120 bp, Artificial Sequence
  ENSG00000284862_50 (sequence is synthesized)
aggcaattagaaacagaggagaggaggaacggatagagggaggaagagagggaaagagatcttggaactggaaagtttagatttaggaaacaagaagggaataagagcacaaaccttatt

SEQ ID NO: 799649 - DNA, 120 bp, Artificial Sequence
  ENSG00000284862_51 (sequence is synthesized)
ctgggttctgggtgggaagagggatctaaacaggtataaaactggaaaactggtatctgcaaatgtatgatctatttatgcatatgatggaattagttctaatcaaacatttttctcttt

SEQ ID NO: 799650 - DNA, 120 bp, Artificial Sequence
  ENSG00000284862_52 (sequence is synthesized)
agcaatatgtgattatgtatgtaattaataatagctgacatttacatggcacttctatgtgtcaagcactgttatacacatgctttgacaataacatctttaatcttcacaataacccat

SEQ ID NO: 799651 - DNA, 120 bp, Artificial Sequence
  ENSG00000284862_53 (sequence is synthesized)
gaaggtagaaactgtcctcatctccatttagagatgaggaaactgaggaagagtccatcatactagggtcagatggttagtaggtaattaaagccatctgattctaagagcttgtactct

SEQ ID NO: 799652 - DNA, 120 bp, Artificial Sequence
  ENSG00000284862_54 (sequence is synthesized)
taaccagcaccctatggtttctcagattgttgatatccttactatctgggacttgcgtagaatcaaacaatgaactccaatatgggagtggtaaaccatgtgatgaactggtgtatgctc

SEQ ID NO: 799653 - DNA, 120 bp, Artificial Sequence
  ENSG00000284862_55 (sequence is synthesized)
ccatctcctcataaatggctgtctcctagcacagtcgccctctgtatccacaagctccacatctgcagattcatccaactgaggattgaaaatactcagaaaaatgggtgattgcatctg

SEQ ID NO: 799654 - DNA, 120 bp, Artificial Sequence
  ENSG00000284862_56 (sequence is synthesized)
tgattgcatctgtattgaaaatgtacagacttttttcttgtcattattccctaaatgatatagtgtaacaactatttatataacatttacattttattacataagtaatgtaaagataat

SEQ ID NO: 799655 - DNA, 120 bp, Artificial Sequence
  ENSG00000284862_57 (sequence is synthesized)
actatgccattttatataagggacttgaacatccataccttttggtggtggtagtgcagttgtcctgcaaccaatccccagacaatactgagggatgactgtgattcattaggttgaact

SEQ ID NO: 799656 - DNA, 120 bp, Artificial Sequence
  ENSG00000284862_58 (sequence is synthesized)
ggatgactgtgattcattaggttgaactggaagttatgtattgcctagaattactgaactcatactacatccaaaacatcaattgatgataaaaatgaaaatgtttctatgtgactatcc

SEQ ID NO: 799657 - DNA, 80 bp, Artificial Sequence
  ENSG00000284862_59 (sequence is synthesized)
aaatgaaaatgtttctatgtgactatccatgtgtattatattacagacatagcagaaagagagataataaaacataggat

SEQ ID NO: 799658 - DNA, 89 bp, Artificial Sequence
  ENSG00000284862_60 (sequence is synthesized)
agcaaactaatgcaagggtaggtgggaattgaacagtgagaacacgtggacccaggaaggggatcatcacacactggggcctgttgtgg

SEQ ID NO: 799659 - DNA, 60 bp, Artificial Sequence
  ENSG00000284862_61 (sequence is synthesized)
tggcacatgtatacatatgctgccttgtaagcaggcgctaaacattgattttactaataa

SEQ ID NO: 799660 - DNA, 120 bp, Artificial Sequence
  ENSG00000284862_62 (sequence is synthesized)
tctgatttccaggaaagtgcaaaaagcagatccgcttttttggagatgaatttctgtatctcgatgttgtcaactctcttctcttttcttaaaaagaaaaaaatatatatgaaaattggg

SEQ ID NO: 799661 - DNA, 120 bp, Artificial Sequence
  ENSG00000284862_63 (sequence is synthesized)
ttagacatttctgtatttactttcaacacatatgtgttctctataatttgctaggattatacaacaaagccaattaaaatttgatagcagatcaatatggaaatctgtttatatattaaa

SEQ ID NO: 799662 - DNA, 120 bp, Artificial Sequence
  ENSG00000284862_64 (sequence is synthesized)
tataaaaaaatggctactacttttgtgggtgtgatgtaggttagaacttaaagtgggcagaataaaactcagaaatgaaataagttataagatacagagtaaatatataatttctgtctg

SEQ ID NO: 799663 - DNA, 120 bp, Artificial Sequence
  ENSG00000284862_65 (sequence is synthesized)
cctcttatgtttcttatgccttttgtgaccagaagaggaagaggatgatgatgaagacactgattcatcagcagaagaaacacttgaagaagaagttgattttcttcttttcttctttag

SEQ ID NO: 799664 - DNA, 120 bp, Artificial Sequence
  ENSG00000284862_66 (sequence is synthesized)
cctaaaaaaaacagttcatttgtcatatatatacaaaaatgtttctaaattattcataaagatgtgggccctatttgtttcctttaaagattttataaaagctgtggttcagataaatga

SEQ ID NO: 799665 - DNA, 120 bp, Artificial Sequence
  ENSG00000284862_67 (sequence is synthesized)
gaacctaaaagttggaagaaaaaaaagtgggctaaggacatgagtaggcatttttcaaaagaagacaaacaaatggccaagaagaatatgaaaaaatgctcatcatcattaatcattaga

SEQ ID NO: 799666 - DNA, 120 bp, Artificial Sequence
  ENSG00000284862_68 (sequence is synthesized)
gaaatgtaaattaaagccaacaatcagaatggccattagaaagacagaaaacaagagatgttggtgtggatatggagaaaaatgaatggttatacactgttggtgggaatgtaaattaac

SEQ ID NO: 799667 - DNA, 120 bp, Artificial Sequence
  ENSG00000284862_69 (sequence is synthesized)
acaacctctatggaaaacagaatggtttctcaggtaactaaaaatagaactaccttttgatccagcagtcctactacctggtatctacacaaaagaatagaaatcattaaatcaaaaaga

SEQ ID NO: 799668 - DNA, 120 bp, Artificial Sequence
  ENSG00000284862_70 (sequence is synthesized)
ttgcagcactgtttacaatagcaaagatgtggattcaaccgaagtgtccattgatggatgactggatcaagaaaatgtggtatatatgcacaatgaaatactatccagacagaaaaaaga

SEQ ID NO: 799669 - DNA, 120 bp, Artificial Sequence
  ENSG00000284862_71 (sequence is synthesized)
ctatccagacagaaaaaagaatgaaatcctgtcttttacagcaacaagatataactggaggcccttatcttaagagaaacaactcaggcacagaaaaacaaataccatatgttctcactt

SEQ ID NO: 799670 - DNA, 120 bp, Artificial Sequence
  ENSG00000284862_72 (sequence is synthesized)
atatgtgggagctaaataacgcgtacacatggaggtagagcgtggagtgatagacacggaagactcagaagcatggtggaggtatcagagggacatggataatgagaaattacttaatgg

SEQ ID NO: 799671 - DNA, 120 bp, Artificial Sequence
  ENSG00000284862_73 (sequence is synthesized)
gtacaatgtacagtattccaatgataggtagtacactagtcaccactacacaatatacccatgtaacaaaatatacttgtactccataaatttttacaaataaaaataatcagaaaaaaa

SEQ ID NO: 799672 - DNA, 120 bp, Artificial Sequence
  ENSG00000284862_74 (sequence is synthesized)
atgtatatatatgcatactatctatgtcagcctttaggacgttctttggaattgtttaggtacagctctagagaaccgcttagcccagtgacagcattaccctggtagaaagtcactgag

SEQ ID NO: 799673 - DNA, 120 bp, Artificial Sequence
  ENSG00000284862_75 (sequence is synthesized)
tatgtccactcttagaggaaataattttggcctttagcaattcatagacttcatctttttcagccacacttattacaatgatctttttttaaaaaaattatttttaaaattgtggcaaaa

SEQ ID NO: 799674 - DNA, 120 bp, Artificial Sequence
  ENSG00000284862_76 (sequence is synthesized)
tacatgccattttacctcttttactcctaaattttgaaataaagtgttcctgaacctctttcaggccagaaacattcttctgatttaatatctagtatcaaacctccctccctttcttcc

SEQ ID NO: 799675 - DNA, 120 bp, Artificial Sequence
  ENSG00000284862_77 (sequence is synthesized)
cagtaatatttatacttgattaactctttggcaatttttgctggaaatttttatataagctttggttagttactacatttccatcacggttttgaattctgtatcctatgtgccatattt

SEQ ID NO: 799676 - DNA, 120 bp, Artificial Sequence
  ENSG00000284862_78 (sequence is synthesized)
tgaaggcctgataatttgggctttcactgtaaatcaagcacaacaaataaatgcttggtgccatatgtaggccatgagataaactgttattgtcacaagtcaactattttctgctccaaa

SEQ ID NO: 799677 - DNA, 120 bp, Artificial Sequence
  ENSG00000284862_79 (sequence is synthesized)
gacagccattaggcatttcttcccatagtaaatgcttttattcaaccagttctattctgtacttcataggctgctcaagaaaaagaagaacttcaaagggaaggtgactgtttggatgcc

SEQ ID NO: 799678 - DNA, 120 bp, Artificial Sequence
  ENSG00000284862_80 (sequence is synthesized)
caaactatgttagattgggtcagaaaaactaatcccttttctttcctccccccacgacatttttttttctaagtggttttctagggtgttacttccattattagttcaggatctgtatgg

SEQ ID NO: 799679 - DNA, 120 bp, Artificial Sequence
  ENSG00000284862_81 (sequence is synthesized)
catatcacctctctagggtaattaattcaaagactgaaaaaaaatggcagcatattgctgctctatgttgacaaaacaagaaatggctactacatgcccatagtgtttttctacaagtgg

SEQ ID NO: 799680 - DNA, 120 bp, Artificial Sequence
  ENSG00000284862_82 (sequence is synthesized)
aaaaaatttaaactttcataacaaaaatattggtgcaatttacataatactttaaaattgatttctacttagtatgttgaaattttaaactaaaaatgttctacatttcaggtgatgagt

SEQ ID NO: 799681 - DNA, 120 bp, Artificial Sequence
  ENSG00000284873_0 (sequence is synthesized)
ggtttggttttcaatctgggcaaatgaagaccattctggggttcaaagggctcttttatctgcattccttgatatggacctgcgctggggactggtcagctattcaagtacactgcaccc

SEQ ID NO: 799682 - DNA, 120 bp, Artificial Sequence
  ENSG00000284873_1 (sequence is synthesized)
agttttggttctttgccaggattaaacccacgatattttacaatttgtatgtgaaccccgatgaagtgtttctaggagatggctgccatgtaacccatgttttgccaaatgtctactatg

SEQ ID NO: 799683 - DNA, 120 bp, Artificial Sequence
  ENSG00000284873_2 (sequence is synthesized)
agtttttctaccatcctcatgactgtggtattgtaactcaacctctccaggaagttcttctgcttaaaactaaaatcaggtatatctcaagagactctactgtccgatctgaaatgcctc

SEQ ID NO: 799684 - DNA, 120 bp, Artificial Sequence
  ENSG00000284873_3 (sequence is synthesized)
aatgaagacatgggcagtaacttctgcaacacaatcttgaatctgactgctacactccctcgttcatcaaatgagtacctttattgcaagagaagaaactgttctgtcccctttgatatt

SEQ ID NO: 799685 - DNA, 120 bp, Artificial Sequence
  ENSG00000284873_4 (sequence is synthesized)
gagaggcaatttggaatctctgccatgattgcttaggactgaggatttaatgtgctattttgtgaaaatctgagaagcaggaaggggatttaatgctctcaactgttatccatctgaaaa

SEQ ID NO: 799686 - DNA, 120 bp, Artificial Sequence
  ENSG00000284873_5 (sequence is synthesized)
acctaaattgtgattttaaataaaaagcaggctgccttccactattccctttttaaaataggaactgccactgctcttaactttatgaagttttatttatgaataaagtttatactacta

SEQ ID NO: 799687 - DNA, 120 bp, Artificial Sequence
  ENSG00000284873_6 (sequence is synthesized)
atgaatgggagatagaggtgaggatacacattgcgaatgaagacatgggcagtaacttctgcaacacaatcttggttttaaaagtgaaggttatttttagatatctgctaatatttatct

SEQ ID NO: 799688 - DNA, 120 bp, Artificial Sequence
  ENSG00000284873_7 (sequence is synthesized)
caagaacattaccaaggcgatgactcatgcatatttcatgtgctgttgagcgagatgatagatcttcatcacaccctgcaatttcatttatccatccaaggtacttgtgtttggagagaa

SEQ ID NO: 799689 - DNA, 120 bp, Artificial Sequence
  ENSG00000284873_8 (sequence is synthesized)
cattaaatgtcatcctggaatgtctgtttaatgatgatactggtttctgttttaaaatgtgtcatcatacgtgttcattggatcttcaaccacctattttccaataaaattctgaaaacg

SEQ ID NO: 799690 - DNA, 120 bp, Artificial Sequence
  ENSG00000284906_0 (sequence is synthesized)
ccgggatgtgcaggccgggaggtagaggcaggctgatgggggagggaacgagcagcctgtgagacggggtgacggcggctaccagcccgggcgggcaccgggactggaagagttgcctga

SEQ ID NO: 799691 - DNA, 120 bp, Artificial Sequence
  ENSG00000284906_1 (sequence is synthesized)
gcagccggctggtccggcggccaggctagggcgggggcgagcgcccagttgagcctgctggggctggaggagcgagaagggttctcttcacatttcagagcgaaccagacggacagtaag

SEQ ID NO: 799692 - DNA, 120 bp, Artificial Sequence
  ENSG00000284906_2 (sequence is synthesized)
gtttggaggaagggggatcgttggaagtagcaggaagtggagagaatctggcaataggcgagaaaccgaaagaatcagaaagaagtctatgtgagtagctgaaagcattgggtgaccaga

SEQ ID NO: 799693 - DNA, 120 bp, Artificial Sequence
  ENSG00000284906_3 (sequence is synthesized)
aagaaggtcgctgtaagtgaaggaagagtgaggtgtggctggatcaaagggctaagagaagcgggtctgtgtaagtggatgtgagtgaggatcaaggaaaagccgtggaagtggccgggg

SEQ ID NO: 799694 - DNA, 120 bp, Artificial Sequence
  ENSG00000284906_4 (sequence is synthesized)
gtcggggccgcagaagtgccagacggggccggaaagcagccgagcggagttcaaatttgagagcgtttggaaattggaagacttggtggcgaacgagggtcaggacctgcatcctgcctc

SEQ ID NO: 799695 - DNA, 120 bp, Artificial Sequence
  ENSG00000284906_5 (sequence is synthesized)
agagttatcgacgtatccggaatgtgggatcagaggctggtgaagttggccctgttgcagcatctgcgggccttctatggtattaaggtgaagggtgtccgtgggcagtgcgatcgcagg

SEQ ID NO: 799696 - DNA, 120 bp, Artificial Sequence
  ENSG00000284906_6 (sequence is synthesized)
agacatgaaacagcagccacggaaatagggggtaaaatatttggagtaccttttaatgcactgccccattctgctgtaccagaatatggacacattccaagctttcttgtcgatgcttgc

SEQ ID NO: 799697 - DNA, 120 bp, Artificial Sequence
  ENSG00000284906_7 (sequence is synthesized)
acatctttagaagaacatattcataccgaagggctttttcggaaatcaggatctgtgattcgcctaaaagcactaaagaataaagtggatcatggtgaaggttgcctatcttctgcacct

SEQ ID NO: 799698 - DNA, 120 bp, Artificial Sequence
  ENSG00000284906_8 (sequence is synthesized)
ttgtgatattgcgggacttcttaagcagttttttagggaactgccagagcccattctcccagctgatttgcatgaagcacttttgaaagctcaacagttaggcacagaggaaaagaataa

SEQ ID NO: 799699 - DNA, 120 bp, Artificial Sequence
  ENSG00000284906_9 (sequence is synthesized)
agctatactgttgctctcctgtcttctggctgaccacacagttcatgtattaagatacttctttaactttctcaggaatgtttctcttagatccagtgagaataagatggatagcagcaa

SEQ ID NO: 799700 - DNA, 120 bp, Artificial Sequence
  ENSG00000284906_10 (sequence is synthesized)
tcttgcagtaatatttgcaccaaatcttcttcagacaagtgaaggacatgaaaagatgtcttctaacgcagaaaagaagggcgtgtaccagactttatcctggaaaagataccagccatg

SEQ ID NO: 799701 - DNA, 120 bp, Artificial Sequence
  ENSG00000284906_11 (sequence is synthesized)
ttgggtattgatggtctctgtgctactccatcactggaaggctttgaagaaggtgaatatgaaactcctggtgaatataagagaaagagaagacaacgtgtaggagattttgttagtgga

SEQ ID NO: 799702 - DNA, 120 bp, Artificial Sequence
  ENSG00000284906_12 (sequence is synthesized)
gcactaaataaatttaaacctaacagaacaccttctattacacctcaacaagaaagaattgataatgaaacaaccaccatcggttaaatttgatccaaaaatattgcatctaccagcatt

SEQ ID NO: 799703 - DNA, 120 bp, Artificial Sequence
  ENSG00000284906_13 (sequence is synthesized)
ttcagtggataagttataatttctgaaagaccaagattggaatgactttttgtaacaagtgtgctcgcagatcgactccagtgagaagagctcggggacctcctgagccaagtttaatct

SEQ ID NO: 799704 - DNA, 120 bp, Artificial Sequence
  ENSG00000284906_14 (sequence is synthesized)
cctttgctatttgtgcatggtggctggtcaccaggaggtggccaccaggcttctcctttccccgctgttctaattgctaatccagtatttgcggatagctccaaactgggatatgaccac

SEQ ID NO: 799705 - DNA, 120 bp, Artificial Sequence
  ENSG00000284906_15 (sequence is synthesized)
cattgtatatgcagaccattgactggaacatcatgatctatctgcacatgactgtaaataacaactattggatgtggcacagatggaagctacataaacactctatacaatatggccaat

SEQ ID NO: 799706 - DNA, 120 bp, Artificial Sequence
  ENSG00000284906_16 (sequence is synthesized)
tcaccgggctccctgttagtcttgtgagcaattttaaactcttccacgattctttctctgctttggagtgtttcaattaattctccattatattacaatttacatttttattaagccttt

SEQ ID NO: 799707 - DNA, 120 bp, Artificial Sequence
  ENSG00000284906_17 (sequence is synthesized)
aaatttgagacggctaaaacgcagaacagtgtggagtttggggaagagatgtggctaaagacagcgcatttgcttcctgaatgatggtcccactcagccatccacctatactttctacaa

SEQ ID NO: 799708 - DNA, 90 bp, Artificial Sequence
  ENSG00000284906_18 (sequence is synthesized)
atcagctgatcaacctgataatgaaacaaccaccatcggttaaatttgatccaaaaatattgcatctaccagcattttcagtggataagt

SEQ ID NO: 799709 - DNA, 120 bp, Artificial Sequence
  ENSG00000284934_0 (sequence is synthesized)
gagctcggggaccacgcggaggttgtaattggtctctagaccacacctagttgttgagtgccgctgcttgaaaatctcagttctgccgagatcgcagaatacacacaagctacctttggg

SEQ ID NO: 799710 - DNA, 120 bp, Artificial Sequence
  ENSG00000284934_1 (sequence is synthesized)
caccagagcagacagaaccgcggagcttcagggtggaagattcgtggaaactttgccaaggccaggacctcgtgtgttcccgtccgcccctctgggacggcgccagcccggcaggccgcc

SEQ ID NO: 799711 - DNA, 120 bp, Artificial Sequence
  ENSG00000284934_2 (sequence is synthesized)
gaccgtcctggggctcccgcgcagcgcgatgccggcctcgtccaccgtccacgtgctgcagctgctgcgggagctgctcgccttcgtgctcctcagctacacggtgctcatcggggcgct

SEQ ID NO: 799712 - DNA, 120 bp, Artificial Sequence
  ENSG00000284934_3 (sequence is synthesized)
gctgctggccggctggaccacttacttcctggtgctgaagtgacagcgccgtcgccgcgcccggccccgcctcccgcccggccccgcctcccgcccggccccgcctccctaactcaccag

SEQ ID NO: 799713 - DNA, 120 bp, Artificial Sequence
  ENSG00000284934_4 (sequence is synthesized)
gaaattcccttcaagccctggcccgaactgagtccccgcccacccgccagcgtcacggcgcccgactcagctccgcgccggacccacctccgcgccctcaggccctgcatatgccccgcc

SEQ ID NO: 799714 - DNA, 120 bp, Artificial Sequence
  ENSG00000284934_5 (sequence is synthesized)
ccgcgcggaagttccggcggttggttgccttgcgcggccgttacagcctttgccctaagcctcgccccctttccccctgcctgcccaatcccgactgcttccttgggtgggggcgtggct

SEQ ID NO: 799715 - DNA, 120 bp, Artificial Sequence
  ENSG00000284934_6 (sequence is synthesized)
atggggcgaggcgctctcaggtggaggccgtgccccgctccgcgctcacgaagctgcgtcacttccggcgtgtgcgtctggcgtccgcgcgctgcacaatggcggctctgaagagttggc

SEQ ID NO: 799716 - DNA, 120 bp, Artificial Sequence
  ENSG00000284934_7 (sequence is synthesized)
tgtcgcgcagcgtaacttcattcttcaggtacagacagtgtttgtgtgttcctgttgtggctaactttaagaagcggtgtttctcagaattgataagaccatggcacaaaactgtgacga

SEQ ID NO: 799717 - DNA, 120 bp, Artificial Sequence
  ENSG00000284934_8 (sequence is synthesized)
ttggctttggagtaaccctgtgtgcggttcctattgcacagaaatcagagcctcattcccttagtagtgaagcattgatgaggagagcagtgtctttggtaacagatagcacctctacct

SEQ ID NO: 799718 - DNA, 120 bp, Artificial Sequence
  ENSG00000284934_9 (sequence is synthesized)
tacttgggaaaatgaattcagaggaggaagatgaagtgtggcaggtgatcataggagccagagctgagatgacttcaaaacaccaagagtacttgaagctggaaaccacttggatgactg

SEQ ID NO: 799719 - DNA, 120 bp, Artificial Sequence
  ENSG00000284934_10 (sequence is synthesized)
cagttggtctttcagagatggcagcagaagctgcatatcaaactggcgcagatcaggcctctataaccgccaggaatcacattcagctggtgaaactgcaggtggaagaggtgcaccagc

SEQ ID NO: 799720 - DNA, 120 bp, Artificial Sequence
  ENSG00000284934_11 (sequence is synthesized)
tctcccggaaagcagaaaccaagctggcagaagcacagatagaagagctccgtcagaaaacacaggaggaaggggaggagcgggctgagtcggagcaggaggcctacctgcgtgaggatt

SEQ ID NO: 799721 - DNA, 120 bp, Artificial Sequence
  ENSG00000284934_12 (sequence is synthesized)
gagggcctgagcacactgccctgtctccccactcagtggggaaagcaggggcagatgccaccctgcccagggttggcatgactgtctgtgcaccgagaagaggcggcagatcctgccctg

SEQ ID NO: 799722 - DNA, 120 bp, Artificial Sequence
  ENSG00000284934_13 (sequence is synthesized)
gccaatcaggcgagacgcctttgtgagctgtgagtgcctcctgtggtctcaggcttgcgctggacctggttcttagcccttgggcactgcaccctgtttaacatttcaccccactctgta

SEQ ID NO: 799723 - DNA, 120 bp, Artificial Sequence
  ENSG00000284934_14 (sequence is synthesized)
cagctgctcttacccattttttttacctcacacccaaagcattttgcctacctgggtcagagagaggagtcctttttgtcatgcccttaagttcagcaactgtttaacctgttttcagtc

SEQ ID NO: 799724 - DNA, 120 bp, Artificial Sequence
  ENSG00000284934_15 (sequence is synthesized)
ttatttacgtcgtcaaaaatgatttagtacttgttccctctgttgggatgccagttgtggcagggggaggggaacctgtccagtttgtacgatttctttgtatgtatttctgatgtgttc

SEQ ID NO: 799725 - DNA, 120 bp, Artificial Sequence
  ENSG00000284934_16 (sequence is synthesized)
tctgatctgcccccactgtcctgtgaggacagctgaggccaaggagtgaaaaacctattactactaagagaaggggtgcagagtgtttacctggtgctctcaacaggacttaacatcaac

SEQ ID NO: 799726 - DNA, 120 bp, Artificial Sequence
  ENSG00000284934_17 (sequence is synthesized)
aggacttaacacaggcctcttgttccttcctttctttccgtttctctattgtatccaaaggagaagagtgtaagattttgtttgcatctgaaagagaaaatgcgtctctcctggggtcct

SEQ ID NO: 799727 - DNA, 120 bp, Artificial Sequence
  ENSG00000284976_0 (sequence is synthesized)
actgggaaggaaagtcctgttggaggagttcggtggctgttcacacccgcctcgctgtcttggagtcttgatctgtcgtcggcgggtcgctggcacaggactaaacatggctgaggctgg

SEQ ID NO: 799728 - DNA, 120 bp, Artificial Sequence
  ENSG00000284976_1 (sequence is synthesized)
gctccagccagatctggctggggacagcaccgcgtgggcccaggatccacccagagcaggcaggccttgctggggccccagtcaagtccacttccagtgaggagagccagccgggaggtc

SEQ ID NO: 799729 - DNA, 120 bp, Artificial Sequence
  ENSG00000284976_2 (sequence is synthesized)
agtgccagagctctggtggagcccagaccctgccttccctgagggccgcccctgtcgccgccctggggtccctgtcctcctatcctgactcctgccccagggccaccacccctgaactgt

SEQ ID NO: 799730 - DNA, 120 bp, Artificial Sequence
  ENSG00000284976_3 (sequence is synthesized)
gccctggggcccccaccctccacctggccgactccagctctgggcctgtcagtccacctgggtcctctctgggccctgagtgcctggaccctctgtgccaagcaccagcaagcaaagggg

SEQ ID NO: 799731 - DNA, 120 bp, Artificial Sequence
  ENSG00000284976_4 (sequence is synthesized)
atgaccttgggcacccccaaggtgctgagactacagccagtgagcccctgctgggggccaaagccatggagggtgcctgggcccttccaacctggaaggaggaggggagagagcaggcag

SEQ ID NO: 799732 - DNA, 120 bp, Artificial Sequence
  ENSG00000284976_5 (sequence is synthesized)
cagggcagggggaagaggaggagtgcccgatctgcacagagccctacgggcccagagagcgccgcctggccctgctgaactgtagccacggcctgtgtgtgggctgcctgcacaggctgc

SEQ ID NO: 799733 - DNA, 120 bp, Artificial Sequence
  ENSG00000284976_6 (sequence is synthesized)
tgggctcggcctccagtgccgacctgggccgggtgcgctgcccgctgtgccgccagaagacgcccgtgctggaatgggagatctgccggctacaggaggagctgctacaggccgacgggc

SEQ ID NO: 799734 - DNA, 120 bp, Artificial Sequence
  ENSG00000284976_7 (sequence is synthesized)
ggccggggctgcctgcccttcctgccctgtccaccctgcctgggtgcccggctctggaccctgcgggagcggggaccctgtgcccgccgcctggcgctgctgagcctgctggcccttgag

SEQ ID NO: 799735 - DNA, 120 bp, Artificial Sequence
  ENSG00000284976_8 (sequence is synthesized)
cttctggggctgctgctggtcttcacgccgctcctgctgctgggactgctcttcgtgctcctggaccgctctggccgctgagcagagcccaggacagccccgccgccaacaggccagggg

SEQ ID NO: 799736 - DNA, 120 bp, Artificial Sequence
  ENSG00000284976_9 (sequence is synthesized)
gcccagactggcccacgtccccatgcctgggtgctgtgaggcctgatgaccaggctggaaaaacccaaggttgggtccagggcagtggccttcaatcaagacctcccattgctgaaccca

SEQ ID NO: 799737 - DNA, 120 bp, Artificial Sequence
  ENSG00000284976_10 (sequence is synthesized)
caaccagggctacccagaggcctgaccctgccagagtccatggctgcactgctgcccagacactagctgaacccaaggacaccagcgcccaaggacagctcctggaggaggccagcccag

SEQ ID NO: 799738 - DNA, 120 bp, Artificial Sequence
  ENSG00000284976_11 (sequence is synthesized)
caggaaagtctgtgagcaggaccccattcaccctgcggcagacgggcaccgtactggccacgggctgacgccggccacacttcccctccgagggccagctgagcacagcaggcatgaaag

SEQ ID NO: 799739 - DNA, 120 bp, Artificial Sequence
  ENSG00000284976_12 (sequence is synthesized)
caaacagagatacagcagtgagtcagttccttggagagggcagggactccgcccaccctgtgttcagataagggccagtgtgtgtccctgaaggtcaggccagccgggggaggggtccat

SEQ ID NO: 799740 - DNA, 120 bp, Artificial Sequence
  ENSG00000284976_13 (sequence is synthesized)
gctgcgaaaattcagcctgcaaaggctcctctccccacttgatcaggcccagaccaggtgggggttggcgctggcctgtgttgcaggggacaagggcccacccaggccttggaacataag

SEQ ID NO: 799741 - DNA, 120 bp, Artificial Sequence
  ENSG00000284976_14 (sequence is synthesized)
ctctgcccctgcacaccctcatgtcaccacacctgggatggagacatcaggtggcccagcgagagatggaggactgatcctggaacgtgaagcagctttcaataaaccagctcctgggga

SEQ ID NO: 799742 - DNA, 120 bp, Artificial Sequence
  ENSG00000284981_0 (sequence is synthesized)
aactgtatgttctcttcagacccctccctggcgatgccagattcactgggctggcagattctgcccccaaacctgtccaaccagttgtttgagaggagggggtagctgggaggggcagca

SEQ ID NO: 799743 - DNA, 120 bp, Artificial Sequence
  ENSG00000284981_1 (sequence is synthesized)
ggagatgccaggaacagcttcccctagcacagcacagactacagacaggggagcctctggggctgcagacactgcagacggacggacagacagatggacaacagctggaggcttggcccg

SEQ ID NO: 799744 - DNA, 120 bp, Artificial Sequence
  ENSG00000284981_2 (sequence is synthesized)
gccatagggctctctgcgggacagtcccagctgctagtgtcgctgttgctgctactgacccgtgtccagcctgggacagacgtggctgccccagagcacatcagctatgtgccccagctc

SEQ ID NO: 799745 - DNA, 120 bp, Artificial Sequence
  ENSG00000284981_3 (sequence is synthesized)
tcaaacgacaccttggcggggaggctcaccctgtccaccttcacgctggagcagcctctaggccagttcagcagccacaacatctctgacttggataccatctggctggtggtggccctc

SEQ ID NO: 799746 - DNA, 120 bp, Artificial Sequence
  ENSG00000284981_4 (sequence is synthesized)
atccctgctcctgccaacttctcccagaggggctactatctcacactgagggccaaccgggtgctgtaccagaccagaggccagctccatgtcctccgcgtcggcaatgatacccactgc

SEQ ID NO: 799747 - DNA, 120 bp, Artificial Sequence
  ENSG00000284981_5 (sequence is synthesized)
caaccaacaaaaattggctgcaaccatcccctaccaggacccggcccctacagggtgaagttcctggtgatgaatgacgaaggacccgtggctgaaacaaagtggtccagcgacactcgc

SEQ ID NO: 799748 - DNA, 120 bp, Artificial Sequence
  ENSG00000284981_6 (sequence is synthesized)
ctgcagcaagcccaggcacttcgggctgtccccggcccccagagcccgggcaccgtggtcatcatcgccatcctgtctatcctcctggccgtcctcctcacggtcctcctggctgtgctc

SEQ ID NO: 799749 - DNA, 120 bp, Artificial Sequence
  ENSG00000284981_7 (sequence is synthesized)
atatacacctgcttcaacagctgcaggagcacttccctatcaggcccagaggaggcagggagtgtgagaagatacaccacgcacctcgcgttcagcactcctgccgagggggcttcctga

SEQ ID NO: 799750 - DNA, 120 bp, Artificial Sequence
  ENSG00000285010_0 (sequence is synthesized)
atgaagatctcttgtgtgttgggaaagctcctcatgcttttcgagttgattcatggtctccaagatttgtctataacctgttctgaatcctggctccaggtcaaacttagacgaacgccg

SEQ ID NO: 799751 - DNA, 120 bp, Artificial Sequence
  ENSG00000285010_1 (sequence is synthesized)
ctgttaaatgacctgcaacctttgcaaaacgaactctctctaggaattggctgtcctgtaaacatggtcgaggtggatttctttgggttcctgtatcttctaactttttgtggcatcaga

SEQ ID NO: 799752 - DNA, 120 bp, Artificial Sequence
  ENSG00000285010_2 (sequence is synthesized)
tgcaaagaaggtttccaataatcttagtaatgagagggagagagaatgatagccgtcgtgaatgcagaaggtcagtgggacagcaccgctcactatcacatgaacttgaagacttggaaa

SEQ ID NO: 799753 - DNA, 120 bp, Artificial Sequence
  ENSG00000285010_3 (sequence is synthesized)
tccgtccaagagtgtcctatgtgaacagtgttcccttgttgagctacctcattgtatcccttcctaagtgtaagaacaaagctgtacattctggatgatgaggctaccctacttcacctg

SEQ ID NO: 799754 - DNA, 120 bp, Artificial Sequence
  ENSG00000285025_0 (sequence is synthesized)
tttgcctccatccgccgtgaattccgaaaaaatcagaagctagaggacgctgaggcccgggagaggcagctggagaagggcctggtctttctcaacggcaaattggggaggatcatttag

SEQ ID NO: 799755 - DNA, 120 bp, Artificial Sequence
  ENSG00000285043_0 (sequence is synthesized)
aaacaccgctctggtcaccatggcaacagcgggatgccgcgaacggcttctgggcggggccggtccctcggacgattggacctagcttggcgcggaatccgtgaattgcccgcggcccga

SEQ ID NO: 799756 - DNA, 120 bp, Artificial Sequence
  ENSG00000285043_1 (sequence is synthesized)
gggtgcagctcccggactgactggctctgcccttccccatggacgcctcctctagcccgtggaatccaaccccggctcctgtcagcagccctcccctgctgctccccatccctgccatcg

SEQ ID NO: 799757 - DNA, 120 bp, Artificial Sequence
  ENSG00000285043_2 (sequence is synthesized)
tcttcatcgctgtgggcatctatttgttgctgctgggtctagtcctgctgactaggaactgcctgctggcccagggctgctgcgcggacggtagctccccctgcaggaagcaaggttcct

SEQ ID NO: 799758 - DNA, 120 bp, Artificial Sequence
  ENSG00000285043_3 (sequence is synthesized)
ccgggcccccagactgctgctggacctgtgcagaagcctgcaactttcctctgcctagcccggcccacttcctggatgcttgctgcccccagcccaccagagctgactgggcacctcgct

SEQ ID NO: 799759 - DNA, 120 bp, Artificial Sequence
  ENSG00000285043_4 (sequence is synthesized)
gcccccgctgctgcccactctgcgactgtgcctgtacgtgccagctccccgactgccagagcctcaactgtctctgcttcgagatcaagctccgatgaggacccagggcccctgccctct

SEQ ID NO: 799760 - DNA, 120 bp, Artificial Sequence
  ENSG00000285043_5 (sequence is synthesized)
ggggagcggccagcccccagggcccatgtgccctcctccctgaagagcctttccccacgccactggaaccacagatggcctgccgagcacccaggcctgggaactggaagtggcagcgca

SEQ ID NO: 799761 - DNA, 120 bp, Artificial Sequence
  ENSG00000285043_6 (sequence is synthesized)
gggcctggctccctgcagggcaggactcttggccggctggacggcagctcctctggagggccagaaaagagaggggctagtgctcgggcaggtgccctggcttcccttcccctccacacg

SEQ ID NO: 799762 - DNA, 120 bp, Artificial Sequence
  ENSG00000285043_7 (sequence is synthesized)
tcaacgattctatttgaagttgggcaggggggtggcgctgctcaccacacacaagtgttataggaggagtctggcccttgagtaccgggtacgcaggggtgcctcaaccacactccgtcc

SEQ ID NO: 799763 - DNA, 120 bp, Artificial Sequence
  ENSG00000285043_8 (sequence is synthesized)
acggactctccgttattttaggaggtccctggccaaagatttatttctcttgacaaccaagggcctccgtctggatttccaaggaagaatttcctctgaagcaccggaacttgctactac

SEQ ID NO: 799764 - DNA, 120 bp, Artificial Sequence
  ENSG00000285043_9 (sequence is synthesized)
cagcaccatgccctaccaatatccagcactgaccccggagcagaagaaggagctgtctgacatcgctcaccgcatcgtggcacctggcaagggcatcctggctgcagatgagtccactgg

SEQ ID NO: 799765 - DNA, 120 bp, Artificial Sequence
  ENSG00000285043_10 (sequence is synthesized)
gcattgccaagcggctgcagtccattggcaccgagaacaccgaggagaaccggcgcttctaccgccagctgctgctgacagctgacgaccgcgtgaacccctgcattgggggtgtcatcc

SEQ ID NO: 799766 - DNA, 120 bp, Artificial Sequence
  ENSG00000285043_11 (sequence is synthesized)
tcttccatgagacactctaccagaaggcggatgatgggcgtcccttcccccaagttatcaaatccaagggcggtgttgtgggcatcaaggtagacaagggcgtggtccccctggcaggga

SEQ ID NO: 799767 - DNA, 120 bp, Artificial Sequence
  ENSG00000285043_12 (sequence is synthesized)
caaatggcgagactaccacccaagggttggatgggctgtctgagcgctgtgcccagtacaagaaggacggagctgacttcgccaagtggcgttgtgtgctgaagattggggaacacaccc

SEQ ID NO: 799768 - DNA, 120 bp, Artificial Sequence
  ENSG00000285043_13 (sequence is synthesized)
cctcagccctcgccatcatggaaaatgccaatgttctggcccgttatgccagtatctgccagcaggtgggcctgcagaatggcattgtgcccatcgtggagcctgagatcctccctgatg

SEQ ID NO: 799769 - DNA, 120 bp, Artificial Sequence
  ENSG00000285043_14 (sequence is synthesized)
gggaccatgacttgaagcgctgccagtatgtgaccgagaaggtgctggctgctgtctacaaggctctgagtgaccaccacatctacctggaaggcaccttgctgaagcccaacatggtca

SEQ ID NO: 799770 - DNA, 120 bp, Artificial Sequence
  ENSG00000285043_15 (sequence is synthesized)
ccccaggccatgcttgcactcagaagttttctcatgaggagattgccatggcgaccgtcacagcgctgcgccgcacagtgccccccgctgtcactgggatcaccttcctgtctggaggcc

SEQ ID NO: 799771 - DNA, 120 bp, Artificial Sequence
  ENSG00000285043_16 (sequence is synthesized)
agagtgaggaggaggcgtccatcaacctcaatgccattaacaagtgccccctgctgaagccctgggccctgaccttctcctacggccgagccctgcaggcctctgccctgaaggcctggg

SEQ ID NO: 799772 - DNA, 120 bp, Artificial Sequence
  ENSG00000285043_17 (sequence is synthesized)
gcgggaagaaggagaacctgaaggctgcgcaggaggagtatgtcaagcgagccctggccaacagccttgcctgtcaaggaaagtacactccgagcggtcaggctggggctgctgccagcg

SEQ ID NO: 799773 - DNA, 120 bp, Artificial Sequence
  ENSG00000285043_18 (sequence is synthesized)
agtccctcttcgtctctaaccacgcctattaagcggaggtgttcccaggctgcccccaacactccaggccctgccccctcccactcttgaagaggaggccgcctcctcggggctccaggc

SEQ ID NO: 799774 - DNA, 120 bp, Artificial Sequence
  ENSG00000285043_19 (sequence is synthesized)
tggcttgcccgcgctctttcttccctcgtgacagtggtgtgtggtgtcgtctgtgaatgctaagtccatcaccctttccggcacactgccaaataaacagctatttaagggggagtcggc

SEQ ID NO: 799775 - DNA, 120 bp, Artificial Sequence
  ENSG00000285043_20 (sequence is synthesized)
cgcgaacggcttctgggcggggccggtccctcggacgattggacctagcttggcgcggaatccgtgaattgcccgcggcccgagggtgcaggtgatgggtgctgaccgactggggaagcc

SEQ ID NO: 799776 - DNA, 120 bp, Artificial Sequence
  ENSG00000285043_21 (sequence is synthesized)
cggagtgtggggactgaggaggggagtggcctggggcgcgctggagcctgcgaggaaggcgccgcctcggatcccccgccccccattccccttcccgaattccaccctccggcccagcca

SEQ ID NO: 799777 - DNA, 120 bp, Artificial Sequence
  ENSG00000285043_22 (sequence is synthesized)
aagtgcttgatgttgctgaactgggaatgatagggaaaaaggcaggctcagggcacaagataatgagtcagggtgtagtcctgttgacgctctccccaccatctggtggccgttcctctc

SEQ ID NO: 799778 - DNA, 120 bp, Artificial Sequence
  ENSG00000285043_23 (sequence is synthesized)
ccagccacctcctcgtccctcatggtattcccgtgttcctgcagcccctctccatctccttgtcaccccttcctcctgtactcgtccaggcctcctctagcccgtggaatccaaccccgg

SEQ ID NO: 799779 - DNA, 120 bp, Artificial Sequence
  ENSG00000285043_24 (sequence is synthesized)
gaagcaccggcaaggtgaccccatggcaaggcgcaagccagaagggtccagcttcaacatgacccacctgtccatggctatggccttttcctttcccccagttgccagtgggcaactcca

SEQ ID NO: 799780 - DNA, 120 bp, Artificial Sequence
  ENSG00000285043_25 (sequence is synthesized)
agaggaatcccggtaacctgtcccttcatctgcaggctcttaccctgagacacttgacatttagcccttgcatctatccgttttgtggtaccagggggtccctcctctcctgtccccagc

SEQ ID NO: 799781 - DNA, 120 bp, Artificial Sequence
  ENSG00000285043_26 (sequence is synthesized)
caaaccttttcctttcccctcgggaaagctgccttggctgtcactacctgctgcctattccacatcctgaaccctgtgacctaggcccagggctgctgcgcggacggtagctccccctgc

SEQ ID NO: 799782 - DNA, 84 bp, Artificial Sequence
  ENSG00000285053_0 (sequence is synthesized)
ttatcttattttttaggctggagagcagtagtgtgatcatggctcactgcaaccgtgaactcctgggctcaagcgatcctccca

SEQ ID NO: 799783 - DNA, 120 bp, Artificial Sequence
  ENSG00000285053_1 (sequence is synthesized)
tcaagcgatcctcccacctcagcctacatgcctggagctgggatgacaggcacagttttggcggtatcaacactatattcttctctttgaccaccgcatgctgcctacgtggtagactct

SEQ ID NO: 799784 - DNA, 120 bp, Artificial Sequence
  ENSG00000285053_2 (sequence is synthesized)
caatacgcatggaactgaacctcttacaggatttgtaactcacttctgtggtatctagtaaactggaacacgcgctttccctgggctgctctgtcatcccaggtttcagcactcggaaat

SEQ ID NO: 799785 - DNA, 120 bp, Artificial Sequence
  ENSG00000285053_3 (sequence is synthesized)
cgcttgggcccccgcccagaggcggggcttgggtgggctgaccactcctctggcctccaatactgtcgctgacattctcgtctatgctccagcagccgtacctcactccggtggaggcgg

SEQ ID NO: 799786 - DNA, 120 bp, Artificial Sequence
  ENSG00000285053_4 (sequence is synthesized)
gacttcctacagcacttccggccagagcctcaagcttcgctgctgggcagttggctggaggggctgctgctgggaacacctggagtctccgcgggcagatctcatattttggattctgga

SEQ ID NO: 799787 - DNA, 120 bp, Artificial Sequence
  ENSG00000285053_5 (sequence is synthesized)
tatattataatgagtgacactttgacagcggatgtcattggtcgaagagttgaagttaatggagaacatgcaacagtacgttttgctggtgttgtccctcccgtggcaggaccctggtta

SEQ ID NO: 799788 - DNA, 120 bp, Artificial Sequence
  ENSG00000285053_6 (sequence is synthesized)
ggagtagaatgggacaatcccgagagaggaaagcatgatgggagccacgaagggactgtgtattttaaatgcaggcacccgacaggaggatcctttattcgtccgaacaaggtaaatttt

SEQ ID NO: 799789 - DNA, 120 bp, Artificial Sequence
  ENSG00000285053_7 (sequence is synthesized)
ggaacagactttcttactgcaattaagaaccgctatgtgttagaagatggaccagaggaagatagaaaagagcaaattgttacaattggaaataaacctgtggagactatcggttttgac

SEQ ID NO: 799790 - DNA, 120 bp, Artificial Sequence
  ENSG00000285053_8 (sequence is synthesized)
tctattatgaaacagcaaagtcagctgagcaagttgcaagaagtttctctgaggaactgtgcagtaagttgtgctggtgaaaaaggaggagttgctgaagcatgtcctaatatcagaaag

SEQ ID NO: 799791 - DNA, 120 bp, Artificial Sequence
  ENSG00000285053_9 (sequence is synthesized)
tgtcagtgaaaataaactaaaatttccctccggttcagtattaactggaacgctttctgtactgaaggttttagtcctcaatcaaacaggaataacgtgggctgaggtgctgcggtgtgt

SEQ ID NO: 799792 - DNA, 120 bp, Artificial Sequence
  ENSG00000285053_10 (sequence is synthesized)
cgcggggtgcccaggcctggaggaactctaccttgagtctaacaacattttcatttccgaaaggccaacagatgttctccagacagtcaagttattagatctttcctctaatcaattaat

SEQ ID NO: 799793 - DNA, 120 bp, Artificial Sequence
  ENSG00000285053_11 (sequence is synthesized)
tgatgaaaatcagctgtatctgatagcccacctgcccaggttagaacaattaatcctctctgacactggaatttcttctctacattttccggatgctggaattgggtgcaaaacgtccat

SEQ ID NO: 799794 - DNA, 120 bp, Artificial Sequence
  ENSG00000285053_12 (sequence is synthesized)
gttcccatccttgaagtacctggtagtaaacgacaatcagatatcacaatggtcgtttttcaatgagctagagaagttaccaagtctacgggctttgtcctgcctaagaaaccccctgac

SEQ ID NO: 799795 - DNA, 120 bp, Artificial Sequence
  ENSG00000285053_13 (sequence is synthesized)
caaagaggacaaagaagcagagacggcgcgactactcattatcgccagcattggccagctgaagacgctgaacaaatgtgagattctccccgaggagaggcggagagctgagcttgacta

SEQ ID NO: 799796 - DNA, 120 bp, Artificial Sequence
  ENSG00000285053_14 (sequence is synthesized)
ccgaaaagcttttggaaatgagtggaaacaggctggtggacataaggatccggaaaaaaacagactcagcgaagaattcctcacagcccatcccagataccagttcctctgcctgaaata

SEQ ID NO: 799797 - DNA, 120 bp, Artificial Sequence
  ENSG00000285053_15 (sequence is synthesized)
tggtgcacctgaagattgggaactcaaaacacagcaaccacttatgctgaaaaaccagctactaacactgaagataaaataccctcatcaacttgatcagaaagtcctggagaaacaact

SEQ ID NO: 799798 - DNA, 120 bp, Artificial Sequence
  ENSG00000285053_16 (sequence is synthesized)
gccgggctccatgacaattcaaaaggtgaagggattgctgtcacgtcttctcaaagttcctgtgtcagaccttctgttgtcctatgaaagtcccaaaaagccgggcagagaaatcgagct

SEQ ID NO: 799799 - DNA, 120 bp, Artificial Sequence
  ENSG00000285053_17 (sequence is synthesized)
ggaaaatgacctaaagtcattacagttttattctgtggaaaatggagattgtctattagtgcgatggtgacaaccaactaataaaatttaaagaccacactgcttatcgtgtctggggtt

SEQ ID NO: 799800 - DNA, 120 bp, Artificial Sequence
  ENSG00000285053_18 (sequence is synthesized)
caccggaaataaatgattcactggaacaattctactgtcaaaacaaagggggtttacaacttgtcctaagtataacaagggatgtattttttgttgggaagtgaccatttctaggcttat

SEQ ID NO: 799801 - DNA, 120 bp, Artificial Sequence
  ENSG00000285053_19 (sequence is synthesized)
gtgaccgggatggcgcattttcttgcaccaactaatgcggtgtcgctggcggctgaggagggcggagagttctgtggtgaaatagtgggaaggattcatgtaggcatcgggaagagccta

SEQ ID NO: 799802 - DNA, 120 bp, Artificial Sequence
  ENSG00000285053_20 (sequence is synthesized)
agtccacattataaaataggaagttgatgcggggtacagttactcccggaccggcggcgtgaaagtcgtgatatcatcgttgaactccttaccaccttttaaaaaatttgttattctcca

SEQ ID NO: 799803 - DNA, 120 bp, Artificial Sequence
  ENSG00000285053_21 (sequence is synthesized)
gggcggaagggagcatctgagcgaggaggaagcagaaacctcaccgtttcttcccctccggactctgtgctagcactgtatacgtttgcagttctctgcccagccgctgtggaaaatcgg

SEQ ID NO: 799804 - DNA, 120 bp, Artificial Sequence
  ENSG00000285053_22 (sequence is synthesized)
cctcgaagtgattgaaattccctgtttatatcaggcggcttctttcagatccatcgtctttctcccggagtatgaatggaaggattcagtatgcgcttcacatttgtatgtctctggcca

SEQ ID NO: 799805 - DNA, 120 bp, Artificial Sequence
  ENSG00000285053_23 (sequence is synthesized)
ttctcaaaccaggcccttccctttgaaaagtcttttgcatgggatgttcacttcttagacgcaaggttgtgtgccctggtttcatcgtctaacgcgttagaaggcgctttcatttcttca

SEQ ID NO: 799806 - DNA, 120 bp, Artificial Sequence
  ENSG00000285053_24 (sequence is synthesized)
tgggtgttgagcgccgaccactggggtggcctctgccttcgtagacctgcgcctggtgagacggacagatgctgaacaaaacgatgtgaaattaccgcagtggcagtgccccagaggaga

SEQ ID NO: 799807 - DNA, 120 bp, Artificial Sequence
  ENSG00000285053_25 (sequence is synthesized)
gttccacggtgataggagaatgagggaatttggcttctttagggagggaaaggaagggtttctgagcaagtgaggatcgagctgagagctgaagggctagcaggagttaactaaggaaag

SEQ ID NO: 799808 - DNA, 120 bp, Artificial Sequence
  ENSG00000285053_26 (sequence is synthesized)
agaaaaggaaaagacattccagacaaaaagactaacttgtcagaaagccctgtggcggaagggagcttttccaatatgaagaactgagcctggagagatgggatgagggggagtgtcgaa

SEQ ID NO: 799809 - DNA, 120 bp, Artificial Sequence
  ENSG00000285053_27 (sequence is synthesized)
ccttttaggctttgtaaaggagttttggttttctcctaatagcaatgggatatcttccaaggaatctcaatcaaaagggagagatggctccgattggaatgtcatccctggctgaagagt

SEQ ID NO: 799810 - DNA, 120 bp, Artificial Sequence
  ENSG00000285053_28 (sequence is synthesized)
agaggaagcgaaaaaaagaagagttaaagaggcaaatgcagggaacccgacgaggaggctattgccgtagtagttcacatggtgaaaagaatggagcgtttgtattaatgattatggatt

SEQ ID NO: 799811 - DNA, 120 bp, Artificial Sequence
  ENSG00000285053_29 (sequence is synthesized)
cactctttgaacaaatttctggcagctttttagttttgaaagtgagaagtttcagactctcactgaggtattctgtagttttttcactctaaaaggaaactagtagagttcatgtaacac

SEQ ID NO: 799812 - DNA, 120 bp, Artificial Sequence
  ENSG00000285053_30 (sequence is synthesized)
aatcctttgatttaaaagaaaaacaaaggcgggtgagggtgagagtatatgccacggtgtgtagaatcctttagactcttaagaagacacaaggcggctgggcgtggtggctcacgcttg

SEQ ID NO: 799813 - DNA, 120 bp, Artificial Sequence
  ENSG00000285053_31 (sequence is synthesized)
agaaagacacaagattagctttgaagtttaaatccaatggagaagactcaagaaacagtccaaagaattcttctagaaccctataaatacttacttcagttaccaggctggaaggctgga

SEQ ID NO: 799814 - DNA, 120 bp, Artificial Sequence
  ENSG00000285053_32 (sequence is synthesized)
atttaatcattggctgaaagttccagaggacaagctacagattattattgaagtgacagaaatgttgcataatgccagtttactcatcgatgatattgaagacaactcaaaactccgacg

SEQ ID NO: 799815 - DNA, 120 bp, Artificial Sequence
  ENSG00000285053_33 (sequence is synthesized)
tggctttccagtggcccacagcatctatggaatcccatctgtcatcaattctgccaattacgtgtatttccttggcttggagaaagtcttaacccttgatcacccagatgcagtgaagct

SEQ ID NO: 799816 - DNA, 120 bp, Artificial Sequence
  ENSG00000285053_34 (sequence is synthesized)
ttttacccgccagcttttggaactccatcagggacaaggcctagatatttactggagggataattacacttgtcccactgaagaagaatataaagctatggtgctgcagaaaacaggtgg

SEQ ID NO: 799817 - DNA, 120 bp, Artificial Sequence
  ENSG00000285053_35 (sequence is synthesized)
cagcaggcacggtctcgacatgcagaaagacgccagcaagttcgtggatctgtgcgtgctgcagaaatgctccaccagcaactgcatcatcagtgccaaggaccacacatccatgcggat

SEQ ID NO: 799818 - DNA, 120 bp, Artificial Sequence
  ENSG00000285053_36 (sequence is synthesized)
tgaactattagctttgaagtttaaatccaatggagaagactcaagaaacagtccaaagaattcttctagaaccctataaatacttacttcagttaccagagtctcgctgtgacgcccagg

SEQ ID NO: 799819 - DNA, 76 bp, Artificial Sequence
  ENSG00000285053_37 (sequence is synthesized)
acctcctgggttcaagggaaggctggagagcagtagtgtgatcatggctcactgcaaccgtgaactcctgggctca

SEQ ID NO: 799820 - DNA, 120 bp, Artificial Sequence
  ENSG00000285053_38 (sequence is synthesized)
agagtgagacgctgtttcagaagaaagacacaaggcaagttggttgtcgatacctggaaaaattgaagttcttatgttttcataccactgaaaatgcttgtatgtaaatatcctctggga

SEQ ID NO: 799821 - DNA, 120 bp, Artificial Sequence
  ENSG00000285077_0 (sequence is synthesized)
tttgcccgttacaccccttcgcccgcacctatctagacaggcagctctcggccaccctccggggtcctgattttgaaaagaggagtggaccaatcagatgtggagcgctgtttggcgctg

SEQ ID NO: 799822 - DNA, 120 bp, Artificial Sequence
  ENSG00000285077_1 (sequence is synthesized)
ccatttgagcctgggctgaaactgcgggtgtgacccccccgtggtggctccgggtgtctgcagtggagctgggggcggaagcatgaggctaacggcttggcttcagtgaacgcaccggga

SEQ ID NO: 799823 - DNA, 120 bp, Artificial Sequence
  ENSG00000285077_2 (sequence is synthesized)
tgtgcaggccgggaggtagaggcaggctgatgggggagggaacgagcagcctgtgagacggggtgacggcggctaccagcccgggcgggcaccgggactggaagagttgcctgagcagcc

SEQ ID NO: 799824 - DNA, 120 bp, Artificial Sequence
  ENSG00000285077_3 (sequence is synthesized)
ggctggtccggcggccaggctagggcgggggcgagcgcccagttgagcctgctggggctggaggagcgagaagggttctcttcacatttcagagcgaaccagacggacagtaaggtttgg

SEQ ID NO: 799825 - DNA, 120 bp, Artificial Sequence
  ENSG00000285077_4 (sequence is synthesized)
aggaagggggatcgttggaagtagcaggaagtggagagaatctggcaataggcgagaaaccgaaagaatcagaaagaagtctatgtgagtagctgaaagcattgggtgaccagaaagaag

SEQ ID NO: 799826 - DNA, 120 bp, Artificial Sequence
  ENSG00000285077_5 (sequence is synthesized)
gtcgctgtaagtgaaggaagagtgaggtgtggctggatcaaagggctaagagaagcgggtctgtgtaagtggatgtgagtgaggatcaaggaaaagccgtggaagtggccgggggtcggg

SEQ ID NO: 799827 - DNA, 120 bp, Artificial Sequence
  ENSG00000285077_6 (sequence is synthesized)
gccgcagaagtgccagacggggccggaaagcagccgagcggagttcaaatttgagagcgtttggaaattggaagacttggtggcgaacgagggtcaggacctgcatcctgcctcagagtt

SEQ ID NO: 799828 - DNA, 120 bp, Artificial Sequence
  ENSG00000285077_7 (sequence is synthesized)
atcgacgtatccggaatgtgggatcagaggctggtgaagttggccctgttgcagcatctgcgggccttctatggtattaaggtgaagggtgtccgtgggcagtgcgatcgcaggagacat

SEQ ID NO: 799829 - DNA, 120 bp, Artificial Sequence
  ENSG00000285077_8 (sequence is synthesized)
gaaacagcagccacggaaatagggggtaaaatatttggagtaccttttaatgcactgccccattctgctgtaccagaatatggacacattccaagctttcttgtcgatgcttgcacatct

SEQ ID NO: 799830 - DNA, 120 bp, Artificial Sequence
  ENSG00000285077_9 (sequence is synthesized)
ttagaagaacatattcataccgaagggctttttcggaaatcaggatctgtgattcgcctaaaagcactaaagaataaagtggatcatggtgaaggttgcctatcttctgcacctccttgt

SEQ ID NO: 799831 - DNA, 120 bp, Artificial Sequence
  ENSG00000285077_10 (sequence is synthesized)
gatattgcgggacttcttaagcagttttttagggaactgccagagcccattctcccagctgatttgcatgaagcacttttgaaagctcaacagttaggcacagaggaaaagaataaagct

SEQ ID NO: 799832 - DNA, 120 bp, Artificial Sequence
  ENSG00000285077_11 (sequence is synthesized)
atactgttgctctcctgtcttctggctgaccacacagttcatgtattaagatacttctttaactttctcaggaatgtttctcttagatccagtgagaataagatggatagcagcaatctt

SEQ ID NO: 799833 - DNA, 120 bp, Artificial Sequence
  ENSG00000285077_12 (sequence is synthesized)
gcagtaatatttgcaccaaatcttcttcagacaagtgaaggacatgaaaagatgtcttctaacgcagaaaagaagggcgtgtaccagactttatcctggaaaagataccagccatgttgg

SEQ ID NO: 799834 - DNA, 120 bp, Artificial Sequence
  ENSG00000285077_13 (sequence is synthesized)
tgctactccatcactggaaggctttgaagaaggtgaatatgaaactcctggtgaatataagagaaagagaagacaacgtgtaggagattttgttagtggagcactaaataaatttaaacc

SEQ ID NO: 799835 - DNA, 120 bp, Artificial Sequence
  ENSG00000285077_14 (sequence is synthesized)
taacagaacaccttctattacacctcaacaagaaagaattgataatgaaacaaccaccatcggttaaatttgatccaaaaatattgcatctaccagcattttcagtggataagttataat

SEQ ID NO: 799836 - DNA, 120 bp, Artificial Sequence
  ENSG00000285077_15 (sequence is synthesized)
ttctgaaagaccaagattggaatgactttttgtaacaagtgtgctcgcagatcgactccagtgagaagagctcggggacctcctgagccaagtttaatctcctttgctatttgtgcatgg

SEQ ID NO: 799837 - DNA, 120 bp, Artificial Sequence
  ENSG00000285077_16 (sequence is synthesized)
tggctggtcaccaggaggtggccaccaggcttctcctttccccgctgttctaattgctaatccagtatttgcggatagctccaaactgggatatgagcagcataccaggtggaaagcacc

SEQ ID NO: 799838 - DNA, 120 bp, Artificial Sequence
  ENSG00000285077_17 (sequence is synthesized)
gtagatcaagtgttagaaggctctgggttcctgttgcctgtaagacttggccaaatgattatctttttctcattctctgtttcctggggagggtgagtggaacaaggaaatgacataggt

SEQ ID NO: 799839 - DNA, 120 bp, Artificial Sequence
  ENSG00000285077_18 (sequence is synthesized)
ttaggattcagacagacctgggtgtggatcaaagatctgtgttctgggccaattactttaattgctgagtcgaagtttcctcatctgtaaaatttcgatggagatgagataactacttca

SEQ ID NO: 799840 - DNA, 120 bp, Artificial Sequence
  ENSG00000285077_19 (sequence is synthesized)
tagatttttgtaattattccactgtgaatgaggtaaatatgtgataccttgtatagtgcctgattcttagtgggtatttcacttacaatggggttggggttgtagaagttgcagttatta

SEQ ID NO: 799841 - DNA, 120 bp, Artificial Sequence
  ENSG00000285077_20 (sequence is synthesized)
tcatgaagcttgcttatctcatgactgttaggaaaagcacatgaaaaaacggaggtgaaaggattttgtgaattgtggcagtggtataataattattcttcgatgctggtaaaatatggg

SEQ ID NO: 799842 - DNA, 120 bp, Artificial Sequence
  ENSG00000285077_21 (sequence is synthesized)
tgaaacaataggagtttagaaaatgcttaataataagggtaattcttattatacatcttgtaatgttactctcccaaagtaaaatctggtaatagaaagtaggatttaatactttgagca

SEQ ID NO: 799843 - DNA, 120 bp, Artificial Sequence
  ENSG00000285077_22 (sequence is synthesized)
tttaatactttgagaaggcttatggtatgctcattaaaaatgaatcaatgaaatatttatttaaacacttttatttaaaacatgttatacccttgaatggcgtgccccctgttgacattt

SEQ ID NO: 799844 - DNA, 120 bp, Artificial Sequence
  ENSG00000285077_23 (sequence is synthesized)
tcaaacagacattccaaatcatttccaagtacagtcatccctctgtatcagcccggagattggttctagtatccccttggataccaaaattcacacatactatttttcctctgcttttaa

SEQ ID NO: 799845 - DNA, 120 bp, Artificial Sequence
  ENSG00000285077_24 (sequence is synthesized)
gaattgaagtttgattgtaaaactgttttaatttgaataaaatgatactgaggtagacaagttctctggtaggaatcttcttttattctctttctccattcaaagccacttctagtgagg

SEQ ID NO: 799846 - DNA, 120 bp, Artificial Sequence
  ENSG00000285077_25 (sequence is synthesized)
ttttctctgatctcaggttatattaccttgatagcatatgataaagggtccttaacgtagtctgtgagataactatttttgaagtaggcatatttattccttagttttgttttgcatata

SEQ ID NO: 799847 - DNA, 120 bp, Artificial Sequence; identical to SEQ ID NO: 799707
  ENSG00000285077_26 (sequence is synthesized)

SEQ ID NO: 799848 - DNA, 120 bp, Artificial Sequence
  ENSG00000285077_27 (sequence is synthesized)
aagtgaaggacatgaaaagatgtcttctaacgcagaaaagaaggtacgattacaggctgcagtagtacagactcttatcgattatgcatcagatattggtaagatgtagttgcattatta

SEQ ID NO: 799849 - DNA, 120 bp, Artificial Sequence
  ENSG00000285077_28 (sequence is synthesized)
acagaatttgtttaaatgaggaaaatctctgtttctttcaaaggaactatgaaggcaactgttagaaagttggtatattactgacctcacccccaccctacagtaccggcccctcctgca

SEQ ID NO: 799850 - DNA, 120 bp, Artificial Sequence
  ENSG00000285077_29 (sequence is synthesized)
aagaaacagaatattttgatgggatcgctgatgtttcagactgcaaaagcagctcagggcgtttgcagtcgtgcaagtcaacaagataaccgtctggaccggaagctgggctcctcccgg

SEQ ID NO: 799851 - DNA, 120 bp, Artificial Sequence
  ENSG00000285077_30 (sequence is synthesized)
tctcctaactccaaatccaacaccaagcttctgcagctgccacctcccgtagacttcgcatttcttccgcactctcctctcacgacgggtcttctttgttgtacttaatttcctacgcaa

SEQ ID NO: 799852 - DNA, 120 bp, Artificial Sequence
  ENSG00000285077_31 (sequence is synthesized)
gagccgaagttcccaccaaaggccgagggttaaggttactaaaatcagcgtttctgaatcctgtctcaagttgtctcaactgggcttccgtagaacggtttcttcgtaagagggccttca

SEQ ID NO: 799853 - DNA, 120 bp, Artificial Sequence
  ENSG00000285077_32 (sequence is synthesized)
gcgacagccgagctcggaaaagaacgggaataagttgtctcttacatttcctcaaatactgtgaatggtctgaggcgcaggtcaggtgtatttaaaaacctttaaacagtattcccccgc

SEQ ID NO: 799854 - DNA, 120 bp, Artificial Sequence
  ENSG00000285077_33 (sequence is synthesized)
gtgaaggacatgaaaagatgtcttctaacgcagaaaagaaggaactatgaaggcaactgttagaaagttggtatattactgacctcacccccaccctacagtaccggcccctcctgcaaa

SEQ ID NO: 799855 - DNA, 120 bp, Artificial Sequence
  ENSG00000285162_0 (sequence is synthesized)
agcgttggggtaaggtggatctggctaaacctaacaggattctcactgaagacaggccagggtgatcagacatcacctgggggatggtgcaggatgagaaacctggtcagacattgaggc

SEQ ID NO: 799856 - DNA, 120 bp, Artificial Sequence
  ENSG00000285162_1 (sequence is synthesized)
gatcggatgttgatgttgctggttcttggtaaaacgacttagctagtgtcctttgctaaaactggattttacaaggacgtgcacaaacaggcctagcaggagattcagaagcctgactaa

SEQ ID NO: 799857 - DNA, 120 bp, Artificial Sequence
  ENSG00000285162_2 (sequence is synthesized)
aatttggccaaggaaaaaaatccttgtcaccaggaaagtgaggactattgtcaccaaattcagactgccaattgttaaacatttacctgcacatactgggctcatcttcattattggtaa

SEQ ID NO: 799858 - DNA, 120 bp, Artificial Sequence
  ENSG00000285162_3 (sequence is synthesized)
aatgagctagatgctattttccattagctcacactccaattccaatcgacctgaccatcagaagagacaaaaagggaaaatcctggccagttctcccctacctgatcaaccagtagcata

SEQ ID NO: 799859 - DNA, 120 bp, Artificial Sequence
  ENSG00000285162_4 (sequence is synthesized)
atcagatttgcaagacctcaagaaaagaaacctgaaaatgccactggaggtgtgtgttttgccaaagaaaaaagaatcaaaaacaaaacctgcaggatgaggacaaacaaacaaagagca

SEQ ID NO: 799860 - DNA, 120 bp, Artificial Sequence
  ENSG00000285162_5 (sequence is synthesized)
ggggctcagccatgaaccttgtgatggatgaggaaaagatattctttttctccccttacagtttctggcagccaacatggggtggctgtgacaccccactagttccagaacctgcagatg

SEQ ID NO: 799861 - DNA, 120 bp, Artificial Sequence
  ENSG00000285162_6 (sequence is synthesized)
agatcctgggacaaccaataaaaaaacaacaaaaaggagctgcttccacctgtctcctgtgcccttggtttctgctaatcctacattccaagaataaaagtcttcctatgcgttcctagg

SEQ ID NO: 799862 - DNA, 120 bp, Artificial Sequence
  ENSG00000285162_7 (sequence is synthesized)
cagaagccaagtttccctgctttgggcacgttcaaaatagaaggtattttccgcttctcttgcttctgagcacccacgaaatcaacacatccccaaaacacgcgttgagggagtaaggga

SEQ ID NO: 799863 - DNA, 120 bp, Artificial Sequence
  ENSG00000285162_8 (sequence is synthesized)
aagtgtcctgcacccgccaccctcccgcgctaagagcggcagaggaccccacagcttcgtacttccccggaggagctcctggagtaggagacggcttctagcctggaagaaccccgggtg

SEQ ID NO: 799864 - DNA, 120 bp, Artificial Sequence
  ENSG00000285162_9 (sequence is synthesized)
cgacagttgtgccaggaaacttcaagagtattccctcggctgggcgcacgcagtacatccccaatgctccaatttgaactttgactcggccacgaccaccccactccagtctcactctac

SEQ ID NO: 799865 - DNA, 120 bp, Artificial Sequence
  ENSG00000285162_10 (sequence is synthesized)
ggtgctttctcccctgttggtgctgagggcttttgagactacctgccccgcgctccctaagtccgagggaccgaggcgaggacctgtcccgctgagctggcacgacccacgcagggcagg

SEQ ID NO: 799866 - DNA, 120 bp, Artificial Sequence
  ENSG00000285162_11 (sequence is synthesized)
cggcacttacgcggcgcagtcggtgctcctccctgagccgcggcgcgcaaggaccccagccggttgtccttgcagcgcttcccaaatcaggcagaagtgaggcagccccacccagtcacg

SEQ ID NO: 799867 - DNA, 120 bp, Artificial Sequence
  ENSG00000285162_12 (sequence is synthesized)
aggaccctgcagaactcgagcctttaagcgctcctctaggctcacatgacccagacccacagggcaaaaagtgcgtcgtcgtgtcccaacctcctggtcccagaaacctggccgcatcaa

SEQ ID NO: 799868 - DNA, 120 bp, Artificial Sequence
  ENSG00000285162_13 (sequence is synthesized)
gtcagcgcttcccatgctggaagaagcaagcagccccagggtggaatcttaaaaattaatgaagagcatcggcggggtgccattcaggacttacttgcaagcccaggatttacatttgga

SEQ ID NO: 799869 - DNA, 120 bp, Artificial Sequence
  ENSG00000285162_14 (sequence is synthesized)
aagcgagtggtgtttgattcccactgtttaaaaaggcaacacacgttcgctgatggtctacattccagctgcactagcaatgctgaagaataccagcctcctatatggaaatcatactta

SEQ ID NO: 799870 - DNA, 120 bp, Artificial Sequence
  ENSG00000285162_15 (sequence is synthesized)
tatcagttacagcaagaggcacctcgtcccaagagaatcatttgtcctcgggaggtggaaaacagaccaaaatattatggaagagagtttcatgggatcatctctcgggagcaggcggat

SEQ ID NO: 799871 - DNA, 120 bp, Artificial Sequence
  ENSG00000285162_16 (sequence is synthesized)
gagcttcttggaggcgtggagggtgcctacatccttagagaaagccagcggcaaccaggatgctacacgctggctctcaggtttggaaaccagaccttaaactacaggctcttccacgac

SEQ ID NO: 799872 - DNA, 120 bp, Artificial Sequence
  ENSG00000285162_17 (sequence is synthesized)
gggaaacactttgtgggtgagaagaggtttgagtcgattcatgatctggtgacagatggcttgataacactgtacatagaaacaaaagctgccgagtacatttcaaaaatgacaactaac

SEQ ID NO: 799873 - DNA, 120 bp, Artificial Sequence
  ENSG00000285162_18 (sequence is synthesized)
cccatctatgaacacattggatatgccaccctactcagagaaaaagtatccagaaggctgagcaggtctaaaaatgaaccaagaaaaacaaacgtcacacatgaagaacacacagcggtg

SEQ ID NO: 799874 - DNA, 120 bp, Artificial Sequence
  ENSG00000285162_19 (sequence is synthesized)
gaaaagatctcctccctggttcgaagggctgccctcacacacaacgacaaccacttcaattatgagaagacacacaactttaaggtccacacgttccgaggcccacactggtgtgaatat

SEQ ID NO: 799875 - DNA, 120 bp, Artificial Sequence
  ENSG00000285162_20 (sequence is synthesized)
tgtgccaatttcatgtgggggctcatcgcccaaggggtccggtgctcagactgtggattgaacgtacacaaacagtgttccaagcacgttcccaatgactgccaacctgatctcaagagg

SEQ ID NO: 799876 - DNA, 120 bp, Artificial Sequence
  ENSG00000285162_21 (sequence is synthesized)
gtgtactgttgtgacctcacaacacttgtgaaggctcacaacactcagagacccatggtggtagacatatgcattcgggaaattgaagcaagaggattaaaatcggaaggcctttacaga

SEQ ID NO: 799877 - DNA, 120 bp, Artificial Sequence
  ENSG00000285162_22 (sequence is synthesized)
gtctctgggttcactgaacacattgaagatgtcaaaatggcatttgacagagatggtgaaaaggccgatatatctgccaatgtctatccagacataaacatcatcactggagcccttaaa

SEQ ID NO: 799878 - DNA, 120 bp, Artificial Sequence
  ENSG00000285162_23 (sequence is synthesized)
ctgtatttcagagacttacccatccctgtcatcacatatgatacctattccaaatttatagatgcagcaaaaatctccaatgcagatgagaggctggaagccgtccatgaagtgctgatg

SEQ ID NO: 799879 - DNA, 120 bp, Artificial Sequence
  ENSG00000285162_24 (sequence is synthesized)
ctgctgcctcctgcccactatgaaaccctccggtacctaatgatccacctcaaaaaggttactatgaatgaaaaagacaatttcatgaatgcagaaaatctggggatcgtgtttgggccc

SEQ ID NO: 799880 - DNA, 120 bp, Artificial Sequence
  ENSG00000285162_25 (sequence is synthesized)
actctgatgaggccccctgaggacagcaccctgaccaccctgcatgatatgcggtaccaaaagctgattgtgcagattttaatagaaaacgaagacgttttattctaatccatcagggaa

SEQ ID NO: 799881 - DNA, 120 bp, Artificial Sequence
  ENSG00000285162_26 (sequence is synthesized)
atgagctgaatggccccagcaccatccaagttgacacagctaaaggaataaaaacatttcttaccacttgatttgttttccaagcaagtgctagaatttcctggactgcagaggatcgct

SEQ ID NO: 799882 - DNA, 120 bp, Artificial Sequence
  ENSG00000285162_27 (sequence is synthesized)
gagtggggtactgtgtctcatagacatgcgccacctccacgtgagaacaagggtgaaggtgagggaagcccctcaccttgggtcttttgctgtgcctcctatgtatgtctggtttgctgg

SEQ ID NO: 799883 - DNA, 120 bp, Artificial Sequence
  ENSG00000285162_28 (sequence is synthesized)
aagagtgattaatacatctttaatttattaaaaaacaatgtagacctttaaacttcagtcttattggtaataaaagggaacttaattcatacaggtacttgatacagttatacattttcc

SEQ ID NO: 799884 - DNA, 120 bp, Artificial Sequence
  ENSG00000285162_29 (sequence is synthesized)
acttacaaaaagaagacaattctgttaaatgaaacgtgtatcgtaaaatgtatttttattttacccacgagaatgttgttatttttagcaaatagaactcaatgcagtgcattggttatt

SEQ ID NO: 799885 - DNA, 120 bp, Artificial Sequence
  ENSG00000285162_30 (sequence is synthesized)
accctgtgtaccttgtccctcattttgctgtgacaccctgaaaaagctgaccacaaatgcagtattatcttgacatacctctgtcctcctcagtgctttttaatgaaatttcacctgccc

SEQ ID NO: 799886 - DNA, 120 bp, Artificial Sequence
  ENSG00000285162_31 (sequence is synthesized)
cttgtgttcctgctttggatagtttttgctcttaagcattggcattcttctattgtatggtatgtatttatagcaattgtaggatggtctgaaatgtccacacactttctatgcatacaa

SEQ ID NO: 799887 - DNA, 120 bp, Artificial Sequence
  ENSG00000285162_32 (sequence is synthesized)
attttgtgaattcccaaagtatgctttggaattggtcatagtcttttcgtatcatgagtgtgtatcccagaagatacagaatgcggtcattttacctgaaattatttgagaacactggat

SEQ ID NO: 799888 - DNA, 120 bp, Artificial Sequence
  ENSG00000285162_33 (sequence is synthesized)
gtatctggtctgtgtaaaaagttagcacttaccctcttttcttcctggccaagccctctgaattcatctgttaatatcaaattgtatttttgccacatttctgtattggtgaaaagcgaa

SEQ ID NO: 799889 - DNA, 120 bp, Artificial Sequence
  ENSG00000285162_34 (sequence is synthesized)
tctgcagaataactgtcaacgtttttcattcttgttttacaaacctattttttaaagtgagaataaggttggtttttaccaaatatttgttcctccttgacaaaagtagctctgtgtgga

SEQ ID NO: 799890 - DNA, 120 bp, Artificial Sequence
  ENSG00000285162_35 (sequence is synthesized)
taatatgattttattactacagttccagtcacttggttatatttatcttagcatgagcctttcacaccaagatttctatattttgtaacataggtgaaatatttaaaacatcaaaaactg

SEQ ID NO: 799891 - DNA, 120 bp, Artificial Sequence
  ENSG00000285162_36 (sequence is synthesized)
taaatctagatttttaaaaaatccaactgcaatgtcttttcctttgattgagatgatttgtgtaaactcaccagtcttgctttggagtgagcagaagagaatgactattttacgtggagc

SEQ ID NO: 799892 - DNA, 120 bp, Artificial Sequence
  ENSG00000285162_37 (sequence is synthesized)
atcattgtgtgactgttgacctggacagtcccaagggctatgcagatggactccattggcacagggaggtttgacctcttccctgctattatccctcctcccaactgtacagatttgttt

SEQ ID NO: 799893 - DNA, 120 bp, Artificial Sequence
  ENSG00000285162_38 (sequence is synthesized)
gttgtagtttatgtacttcttgatactgtcaaaaaattatctggaaatggttttattttgtgaagtgaacaatactttgtaatttatgatagtgtaaatggaaggcaaagcatcacatgt

SEQ ID NO: 799894 - DNA, 120 bp, Artificial Sequence
  ENSG00000285162_39 (sequence is synthesized)
attaaattcttctgtctattattctggagtatgtgcaagaaagtggtttggagggatggggtggtggatcatcaaaacattgtttccagatagacgctggcaacaaattttcagtcatca

SEQ ID NO: 799895 - DNA, 120 bp, Artificial Sequence
  ENSG00000285162_40 (sequence is synthesized)
ctgaaacacaatgagaaaacagcatctcatcgagtccccactccttctgcaagctcccttctagagagcctgcttcaagattaaggccctgaggctccacattcactttccataagcccc

SEQ ID NO: 799896 - DNA, 120 bp, Artificial Sequence
  ENSG00000285162_41 (sequence is synthesized)
actgcatggatgcatcatcatacagaggtgaaccgtttagggcaaatcaccctaggccacttggagggtagcagaacaagacttttaaagtcagaaagccctgagtttgatcccagatcc

SEQ ID NO: 799897 - DNA, 120 bp, Artificial Sequence
  ENSG00000285231_0 (sequence is synthesized)
atgaaagattttgtgaggttacagtcctctttccttttgtgcacgattttgactctttctgagcaagagtcagtgtcagtaggatgtacttcctctatgttctgggttgtggctgaacca

SEQ ID NO: 799898 - DNA, 120 bp, Artificial Sequence
  ENSG00000285231_1 (sequence is synthesized)
actttacttggtcaagatcatattttgcattctgatgaagcatctctgggaactggctgtcctgtaaccaatgtaactgcgaagggatatgagtttaattaccctgccactcagtgtggg

SEQ ID NO: 799899 - DNA, 120 bp, Artificial Sequence
  ENSG00000285231_2 (sequence is synthesized)
attcagaaagaggttttctcatatgtaacagttttttattcagcactccactgtaatataatgcacaaaggagtcactggcaaaattcctttgatgtgtattgtatatggctcatctttg

SEQ ID NO: 799900 - DNA, 120 bp, Artificial Sequence
  ENSG00000285231_3 (sequence is synthesized)
caagcactatccataacaatcttacagaattccaaaatgaccctcccgctaccaattcttattctccctggaacttaaccaacgctagcttatttggattgactcggattccatattttc

SEQ ID NO: 799901 - DNA, 120 bp, Artificial Sequence
  ENSG00000285231_4 (sequence is synthesized)
aaaactcctcggtagaggcatctcatcagtcacttctacttaatatgtctcatccattagtccatgagagtgcaaatgtagctatattctaggttcttccatggcaatcctgaaaactct

SEQ ID NO: 799902 - DNA, 120 bp, Artificial Sequence
  ENSG00000285231_5 (sequence is synthesized)
gttgctacagcttacttaaaatttaatttttgaaccactcactacagatttatcactttttggtgccacttcctgagaggacattgggttgggatagagcccagtgcttcatatgttttt

SEQ ID NO: 799903 - DNA, 120 bp, Artificial Sequence
  ENSG00000285231_6 (sequence is synthesized)
aaaaagtgctccttttaaacataggccattatacccttgcatagtctcttataatacaatgtctatgtataatttgtatgtggagttgatcttacaaataaaatgtgctgtccctttggc

SEQ ID NO: 799904 - DNA, 120 bp, Artificial Sequence
  ENSG00000285269_0 (sequence is synthesized)
tctggaaaccatcatacttgggaagcagtattcactcaacatcatcctcagtgtctttgccattattctcggggctttcatagcagctgggtctgaccttgcttttaacttagaaggcta

SEQ ID NO: 799905 - DNA, 120 bp, Artificial Sequence
  ENSG00000285269_1 (sequence is synthesized)
tatttttgtattcctgaatgatatcttcacagcagcaaatggagtttataccaaacagaaaatggacccaaaggagctagggaaatacggagtacttttctacaatgcctgcttcatgat

SEQ ID NO: 799906 - DNA, 120 bp, Artificial Sequence
  ENSG00000285269_2 (sequence is synthesized)
tatcccaactcttattattagtgtctccactggagacctgcaacaggctactgaattcaaccaatggaagaatgttgtgtttatcctacagtttcttctttcctgttttttggggtttct

SEQ ID NO: 799907 - DNA, 120 bp, Artificial Sequence
  ENSG00000285269_3 (sequence is synthesized)
gctgatgtactccacggttctgtgcagctattacaattcagccctgacgacagcagtggttggagccatcaagaatgtatccgttgcctacattgggatattaatcggtggagactacat

SEQ ID NO: 799908 - DNA, 120 bp, Artificial Sequence
  ENSG00000285269_4 (sequence is synthesized)
tttctctttgttaaactttgtagggttaaatatttgcatggcagggggcttgagatattcctttttaacactgagcagccagttaaaacctaaacctgtgggtgaagaaaacatctgttt

SEQ ID NO: 799909 - DNA, 120 bp, Artificial Sequence
  ENSG00000285269_5 (sequence is synthesized)
ggatttgaagagctaaagagtctgcagcaggattggagactgacttgtgactgcgggctgggggggcattcccagtaggaatgtgaagccagaggtttcggattcgtgacatccaccccc

SEQ ID NO: 799910 - DNA, 120 bp, Artificial Sequence
  ENSG00000285269_6 (sequence is synthesized)
tgggcaagtgagagcatctgcaaaatgcaaagagaactacctcatatgcaggatgagccaatggcagtctcaagaaatgtactcgggcgacaccttacctgtggaaagcaaatcttttca

SEQ ID NO: 799911 - DNA, 120 bp, Artificial Sequence
  ENSG00000285269_7 (sequence is synthesized)
aaataagccactgggactcgctcgacttggtggaagttctgcctcaggtgggcatagccaaaaaggggtcattctcttctcggttcctggggaattggatccaactgggagaagaccacc

SEQ ID NO: 799912 - DNA, 120 bp, Artificial Sequence
  ENSG00000285269_8 (sequence is synthesized)
cggttcctggggaattggatccaactgggagaagaccacctgaattctcatcccatctaagttgaagatgctattttttaaaaatttaatttgtaattttaagttctgggatacatgtgc

SEQ ID NO: 799913 - DNA, 79 bp, Artificial Sequence; identical to SEQ ID NO: 289628
  ENSG00000285269_9 (sequence is synthesized)

SEQ ID NO: 799914 - DNA, 120 bp, Artificial Sequence
  ENSG00000285269_10 (sequence is synthesized)
aatagtgctgcagtgaacatacacatgcttgtatctttatttttaaaaatctttttttttgaagacagggtctggctctgttgcccaggcaggagtacagtggcattatctcagctcact

SEQ ID NO: 799915 - DNA, 89 bp, Artificial Sequence
  ENSG00000285269_11 (sequence is synthesized)
cctaagtagctgagaccacagggacacaccattacacctggctaattgttgtattttagtagagatgggatctttctatgttgcctagg

SEQ ID NO: 799916 - DNA, 120 bp, Artificial Sequence
  ENSG00000285269_12 (sequence is synthesized)
gccagagatgctcaattcctggaaaccaaccaaggaagctgctgacatcgggatggctggactttctaaaggtgccttattctcctgttgtgatggtggaggtgggcagaagttgtgtga

SEQ ID NO: 799917 - DNA, 120 bp, Artificial Sequence
  ENSG00000285269_13 (sequence is synthesized)
tgacagcctctggaatcagacggcctggggccacgtcctagctctgccagttttaaaaaaacagcttgatcgagatctgatgaagcaagctgctcttgggagctgccctgtgaggaggcc

SEQ ID NO: 799918 - DNA, 120 bp, Artificial Sequence
  ENSG00000285269_14 (sequence is synthesized)
cacacagcaaggaacaaaggaggagcaaccggatcctgcaacaaacaagtgactgggctgctgtttccccagctcctccacagtaacaaaagccttattcaaaggcctgtgagtcagagg

SEQ ID NO: 799919 - DNA, 120 bp, Artificial Sequence
  ENSG00000285269_15 (sequence is synthesized)
attatgtaaagaagttactttaatctagatgcccctgacttgatggaacacgtccagtgactcctggaagaagatctggaggtctccagagcagcgtggtcccaggaggcatacacagag

SEQ ID NO: 799920 - DNA, 120 bp, Artificial Sequence
  ENSG00000285269_16 (sequence is synthesized)
agccacggccagggctgaaacagtctgttgagtgcagccatgggggacgtcctggaacagttcttcatcctcacagggctgctggtgtgcctggcctgcctggcgaagtgcgtgagattc

SEQ ID NO: 799921 - DNA, 120 bp, Artificial Sequence
  ENSG00000285269_17 (sequence is synthesized)
tccagatgtgttttactgaactactggaaagttttgccaaagtctttcttgcggtcaatgggacagtgggcagtgatcactggagcaggcgatggaattgggaaagcgtactcgttcgag

SEQ ID NO: 799922 - DNA, 120 bp, Artificial Sequence
  ENSG00000285269_18 (sequence is synthesized)
ctagcaaaacgtggactcaatgttgtccttattagccggacgctggaaaaactagaggccattgccacagagatcgagcggactacagggaggagtgtgaagattatacaagcagatttt

SEQ ID NO: 799923 - DNA, 120 bp, Artificial Sequence
  ENSG00000285269_19 (sequence is synthesized)
acaaaagatgacatctacgagcatattaaagaaaaacttgcaggcttagaaattggaattttagtcaacaatgtcggaatgcttccaaaccttctcccaagccatttcctgaacgcaccg

SEQ ID NO: 799924 - DNA, 120 bp, Artificial Sequence
  ENSG00000285269_20 (sequence is synthesized)
gatgaaatccagagcctcatccattgtaacatcacctccgtagtcaagatgacacagctaattctgaaacatatggaatcaaggcagaaaggtctcatcctgaacatttcttctgggata

SEQ ID NO: 799925 - DNA, 120 bp, Artificial Sequence
  ENSG00000285269_21 (sequence is synthesized)
gccctgtttccttggcctctctactccatgtactcagcttccaaggcgtttgtgtgcgcattttccaaggccctgcaagaggaatataaagcaaaagaagtcatcatccaggtgctgacc

SEQ ID NO: 799926 - DNA, 120 bp, Artificial Sequence
  ENSG00000285269_22 (sequence is synthesized)
ccatatgctgtctcgactgcaatgacaaagtatctaaatacaaatgtgataaccaagactgctgatgagtttgtcaaagagtcattgaattatgtcacaattggaggtgaaacctgtggc

SEQ ID NO: 799927 - DNA, 120 bp, Artificial Sequence
  ENSG00000285269_23 (sequence is synthesized)
tgccttgcccatgaaatcttggcgggctttctgagcctgatcccggcctgggccttctacagcggtgccttccaaaggctgctcctgacacactatgtggcatacctgaagctcaacacc

SEQ ID NO: 799928 - DNA, 120 bp, Artificial Sequence
  ENSG00000285269_24 (sequence is synthesized)
aaggtcaggtagccaggcggtgaggagtccagcacaaccttttcctcaccagtcccatgctggctgaagaggaccagaggagcagaccagcacttcaacctagtccgctgaagatggagg

SEQ ID NO: 799929 - DNA, 120 bp, Artificial Sequence
  ENSG00000285269_25 (sequence is synthesized)
cactctactttataaagggtatcccatcgtcctgtgtaagccccgagtctgctgcaccgggtgataatgccagactgcttgggcgctgctgcacatcctcaccaaactcctgaactcctc

SEQ ID NO: 799930 - DNA, 120 bp, Artificial Sequence
  ENSG00000285269_26 (sequence is synthesized)
tctggaccacacatctcctgtgtgggctctgtctcccacactctgtttctggcacaaatctacgtctcttcaagaagcaagttccagggaatatagttccgagttttccaggaaactctt

SEQ ID NO: 799931 - DNA, 120 bp, Artificial Sequence
  ENSG00000285269_27 (sequence is synthesized)
aattgatgtctagtcaagatgacgtgggtacagaatgacagaatgggagtcagatgtttcttgatgctagtacatgcttgctggaaggcagttatgagcctaatttgcaggagcctcatc

SEQ ID NO: 799932 - DNA, 120 bp, Artificial Sequence
  ENSG00000285269_28 (sequence is synthesized)
ctcttgtcctttctctttatctttggtcattctagtggtttctttacctgccctccatagcccagaacctctaccttatattatacaaccatttgtctttctgttctcctggactcacat

SEQ ID NO: 799933 - DNA, 120 bp, Artificial Sequence
  ENSG00000285329_0 (sequence is synthesized)
aacagcttccggcgtgacgcagtagaaaaggtggcgtggctggcgattcgtgttcgtgagggccttttctggtggccgtttgtatgcaggggcaaaaggtgctcttggagaaaactggat

SEQ ID NO: 799934 - DNA, 120 bp, Artificial Sequence
  ENSG00000285329_1 (sequence is synthesized)
ctcagcttggagaacaggaactgccagactttcaaccgcagactcctaggagagatctcagggagagctctccagcagagccttcccaggcaggagcttatgaccggctgagcccccatc

SEQ ID NO: 799935 - DNA, 120 bp, Artificial Sequence
  ENSG00000285329_2 (sequence is synthesized)
aggaagtgcggagccagcctgagttgggagaagagctccagagagtgtgaatgacagaggtggtgccatccagcgcgctcagcgaggtcagcctgcgcctcctctgccacgatgacatag

SEQ ID NO: 799936 - DNA, 120 bp, Artificial Sequence
  ENSG00000285329_3 (sequence is synthesized)
acactgtgaagcacctgtgtggcgactggttccccatcgagtacccagactcatggtatcgtgatatcacatccaacaagaagttcttttcccttgctgcaacctacagaggtgccattg

SEQ ID NO: 799937 - DNA, 120 bp, Artificial Sequence
  ENSG00000285329_4 (sequence is synthesized)
cggcgtgctccgcaacagcttccggcgtgacgcagtagaaaaggtggcgtggctggcgattcgtgttcgtgagggccttttctggtgtaccctcaattcttgaatgttctaacttctagc

SEQ ID NO: 799938 - DNA, 120 bp, Artificial Sequence
  ENSG00000285329_5 (sequence is synthesized)
agcagaataacaaaaggcaaccctgggcttggccagctcaaacaggaagaaagcaaggtgctaagtacccagccagcataggctcaggctgtgaaaggcaaggccatgctagagaaaaag

SEQ ID NO: 799939 - DNA, 120 bp, Artificial Sequence
  ENSG00000285329_6 (sequence is synthesized)
ggagaagatggacctggtctggaggcctaaccagcagtctgacaatgcatagtgaaactccatgggaaaagatgacatgaacttagttgaaagaggttggcaaatgcaaaatcagggctg

SEQ ID NO: 799940 - DNA, 120 bp, Artificial Sequence
  ENSG00000285329_7 (sequence is synthesized)
tcaagatgatgatgatgccaggatcagtgacagctcctactcaactgctaggctaatggcctctaaagtggactttgccatcctttgaccatcagagccaagggagtcttaccaagtctg

SEQ ID NO: 799941 - DNA, 120 bp, Artificial Sequence
  ENSG00000285329_8 (sequence is synthesized)
tttgggaacagcactggcaggtctagtttcctgacttcctggccaggattcctgaagtccttttcatccctgtctgcaccatccacagtgccatcttctacctccgtgggttccccattc

SEQ ID NO: 799942 - DNA, 120 bp, Artificial Sequence
  ENSG00000285329_9 (sequence is synthesized)
tggtgattcagctctccagcctcaatatcacttccttcttggccaggaacagcatcgcttgccataggaggtgcagaggcccaggagcctgaaagagcattcatttcctcataaaagata

SEQ ID NO: 799943 - DNA, 120 bp, Artificial Sequence
  ENSG00000285437_0 (sequence is synthesized)
atgaacgcccctccagccttcgagtcgttcttgctcttcgagggcgagaagatcaccattaacaaggacaccaaggtacccaatgcctgtttattcaccatcaacaaagaagaccacaca

SEQ ID NO: 799944 - DNA, 120 bp, Artificial Sequence; identical to SEQ ID NO: 767534
  ENSG00000285437_1 (sequence is synthesized)

SEQ ID NO: 799945 - DNA, 120 bp, Artificial Sequence
  ENSG00000285437_2 (sequence is synthesized)
aggagcgcttccgggtgagggcggggcctggaggggcagacggggtgggctggacactggcccgtgtgcccaggcctgggacagccctggcctgtttcttcggaggtcctcagggagagg

SEQ ID NO: 799946 - DNA, 120 bp, Artificial Sequence
  ENSG00000285437_3 (sequence is synthesized)
cggcggtgatggaagaacagggacttccaccacaggctccaggacatgtggactgaggggctgtggagtctgggcctgtggctcccgtctgccccatgggacttctgtagtgctgcaggg

SEQ ID NO: 799947 - DNA, 120 bp, Artificial Sequence
  ENSG00000285437_4 (sequence is synthesized)
tccctcgggtgctgtgggccagatccgggcggggacctactgtcctttgggggtgctcttctacgtcccttgtcggtgattggcaaggcctggtccttccaggcctctgggaggcagctc

SEQ ID NO: 799948 - DNA, 120 bp, Artificial Sequence
  ENSG00000285437_5 (sequence is synthesized)
ggcagctcaccccagggtggcccacacctgttcctagcagggcgcctgggaatctagaacagtttagaggggaaagagccacagcaaagaaaagccgaggcagggtgatcacgaggtcag

SEQ ID NO: 799949 - DNA, 120 bp, Artificial Sequence
  ENSG00000285437_6 (sequence is synthesized)
gtaacagagcaggactccatctcagtcaatcaatcaatcaatcaatctcagcggttgaactacccttgacatggttcagctctgtatccacacccaaatgtcatgtcaaattgtaattcc

SEQ ID NO: 799950 - DNA, 120 bp, Artificial Sequence; identical to SEQ ID NO: 767540
  ENSG00000285437_7 (sequence is synthesized)

SEQ ID NO: 799951 - DNA, 83 bp, Artificial Sequence; identical to SEQ ID NO: 767541
  ENSG00000285437_8 (sequence is synthesized)

SEQ ID NO: 799952 - DNA, 62 bp, Artificial Sequence; identical to SEQ ID NO: 767542
  ENSG00000285437_9 (sequence is synthesized)

SEQ ID NO: 799953 - DNA, 120 bp, Artificial Sequence; identical to SEQ ID NO: 767543
  ENSG00000285437_10 (sequence is synthesized)

SEQ ID NO: 799954 - DNA, 88 bp, Artificial Sequence; identical to SEQ ID NO: 767544
  ENSG00000285437_11 (sequence is synthesized)

SEQ ID NO: 799955 - DNA, 120 bp, Artificial Sequence
  ENSG00000285437_12 (sequence is synthesized)
ttgacatccatttaccagtcttccctggcaagattcttctgaattgtgctgccttggccaaaagaggtatgggaggggctgggcgcagtggcttgtgcctgtaatcccaacattttggga

SEQ ID NO: 799956 - DNA, 73 bp, Artificial Sequence
  ENSG00000285437_13 (sequence is synthesized)
aagaccatcctggccaacatggtgacatcccatctctactaaaaatacaataagttagctgggtttggtgcgc

SEQ ID NO: 799957 - DNA, 73 bp, Artificial Sequence; identical to SEQ ID NO: 767547
  ENSG00000285437_14 (sequence is synthesized)

SEQ ID NO: 799958 - DNA, 120 bp, Artificial Sequence
  ENSG00000285437_15 (sequence is synthesized)
acacttggggtctggacgcaacggcggcgggagcatgaacgcccctccagccttcgagtcgttcttgctcttcgagggcgagaagtaagtgacgccggctgcggagggccgaggatcacc

SEQ ID NO: 799959 - DNA, 80 bp, Artificial Sequence
  ENSG00000285437_16 (sequence is synthesized)
ctgcagaacttctggcatggaaaagcccctgtgcaactggtaaagatatcaataagcaccaggaggtatctaaatccacc

SEQ ID NO: 799960 - DNA, 120 bp, Artificial Sequence
  ENSG00000285437_17 (sequence is synthesized)
ggcccctctgggcaaagcacaagttccaagtcttcctcagtctctctgagctacaggaagtccttctgggggcttgctctgggcattttataatcttggtacctttttatcaaaatgaca

SEQ ID NO: 799961 - DNA, 120 bp, Artificial Sequence
  ENSG00000285437_18 (sequence is synthesized)
tttatcaaaatgacaccgacctccatgtcttcacataagccacacttctgtagtggcttattctgtagatgaacacgtgcatttacattcactgtttgtttgtttgtttgtttttgagat

SEQ ID NO: 799962 - DNA, 65 bp, Artificial Sequence
  ENSG00000285437_19 (sequence is synthesized)
cacgattcctagtagctgggactacaggcccacgccacgatgcccggctaatttttgtgttttta

SEQ ID NO: 799963 - DNA, 63 bp, Artificial Sequence
  ENSG00000285437_20 (sequence is synthesized)
aatttttgtgtttttagtagagacggggagcttcccaaagtgctgggattagagacgtgagct

SEQ ID NO: 799964 - DNA, 80 bp, Artificial Sequence
  ENSG00000285437_21 (sequence is synthesized)
tctgccgtgattgtctgcagaactgaggacaacgtgatcactgtattcagctccatcaagaatggtccaggttcttctag

SEQ ID NO: 799965 - DNA, 74 bp, Artificial Sequence
  ENSG00000285437_22 (sequence is synthesized)
cctgtctctactaaaactacaaaaagtctgatgcaggagaattgctaaaacccaggagggagaggttgcagtga

SEQ ID NO: 799966 - DNA, 120 bp, Artificial Sequence
  ENSG00000285437_23 (sequence is synthesized)
tccccagggaagtacctcggctgatttcataaacaggtaccgaaggaagcagaggcatgtggaggacttccccacctcatgcagctatttgggccatggcgtctgaaatttattatttca

SEQ ID NO: 799967 - DNA, 120 bp, Artificial Sequence
  ENSG00000285437_24 (sequence is synthesized)
ttatttcagagtcacccctttgatgaccttggcagtgaactgcagtcatctgtttaggcctttccatggcccacgtcaatgccgttatttctgtttgttgcacatttgatttccttgttg

SEQ ID NO: 799968 - DNA, 89 bp, Artificial Sequence
  ENSG00000285437_25 (sequence is synthesized)
ttcccagatcacaccacgggcatggaccacagagattgcatcttgtgagtctgtagaaatggtcaaggccttgtcctctcttaggtcca

SEQ ID NO: 799969 - DNA, 83 bp, Artificial Sequence
  ENSG00000285437_26 (sequence is synthesized)
tcctgcccttcattggcttcttttcatgaagctcctgccatctacaaaacatgtctcccttcttgaatcacatctctgttatt

SEQ ID NO: 799970 - DNA, 120 bp, Artificial Sequence
  ENSG00000285437_27 (sequence is synthesized)
atctacaaaacatgtctcccttcttgaatcacatctctgttattgaaactctagaagtcaaccgggcatggtggctatgcctataatcccagcattttgggatgccaaggcgggtggatc

SEQ ID NO: 799971 - DNA, 63 bp, Artificial Sequence
  ENSG00000285437_28 (sequence is synthesized)
tgaccaacatggcgaaaccccgtctctaatacaaatacaaaaattagccaagcatggtggaaa

SEQ ID NO: 799972 - DNA, 120 bp, Artificial Sequence
  ENSG00000285437_29 (sequence is synthesized)
caagactccgtctcaaaaaaaaaaaagagaaagaaagtatcatgcttttctgcattctgtgaattgttttagtgagttatcgaacttgagggcatggtgggaacctccaaatttgcagcc

SEQ ID NO: 799973 - DNA, 120 bp, Artificial Sequence
  ENSG00000285437_30 (sequence is synthesized)
agaagtacatgtggtctgaggacacccaagcctgcaggtgtgtctaaagcgagggcagcctagtggggactggtggccttaacctgtggcatttgaggtaacatcagggagttgacatca

SEQ ID NO: 799974 - DNA, 120 bp, Artificial Sequence
  ENSG00000285437_31 (sequence is synthesized)
aagacaaaaaaaaaattgtgtcacacaggccagatgcagtggctcatgcttataatcccagcaatttgaaaggcaaggtaagaggatcgcttgagcttgagtctgaggccgcagtgagct

SEQ ID NO: 799975 - DNA, 120 bp, Artificial Sequence
  ENSG00000285437_32 (sequence is synthesized)
atgaccacaccactgcaccccagtctgggtgacagcgcaagaccccaactccaaaaaggaaaaagaaaaatcacaaggaattgcatgtcagagtgcctgtctttcacagctttaactgct

SEQ ID NO: 799976 - DNA, 120 bp, Artificial Sequence
  ENSG00000285437_33 (sequence is synthesized)
cagagtgcctgtctttcacagctttaactgctgcaggaacgaactttttttttttttttttttttgagagggggtgaggagacacaatctctgctagtgattctcctgcctcagcctccc

SEQ ID NO: 799977 - DNA, 81 bp, Artificial Sequence
  ENSG00000285437_34 (sequence is synthesized)
tgtagatgctatgttgctgaggctggcctcaaactcctggcctcaggtgatcctcccgccatgacctccaaaaccacaggg

SEQ ID NO: 799978 - DNA, 120 bp, Artificial Sequence
  ENSG00000285437_35 (sequence is synthesized)
tgaggctggcctcaaactcctggcctcaggtgatcctcccgccatgacctccaaaaccacagggattgtaggtgtgagcactgcacccagccttatgtttttttctacataaaaaacagc

SEQ ID NO: 799979 - DNA, 120 bp, Artificial Sequence
  ENSG00000285437_36 (sequence is synthesized)
ataaccacaaccccattaaggaaaaatatcactgggcagcaaataatcaatccagaccaatatgatcacaattgctgtgaaggtgagaaaagttcatttttattatgtttccccaagaga

SEQ ID NO: 799980 - DNA, 61 bp, Artificial Sequence
  ENSG00000285437_37 (sequence is synthesized)
caattgctgtgaaggtgagaaaagttcatttttattatgtttccccaagagacgcactcta

SEQ ID NO: 799981 - DNA, 120 bp, Artificial Sequence
  ENSG00000285437_38 (sequence is synthesized)
ggcggacacttggggtctggacgcaacggcggcgggagcatgaacgcccctccagccttcgagtcgttcttgctcttcgagggcgagaagtaagtgacgccggctgcggagggccgaggt

SEQ ID NO: 799982 - DNA, 120 bp, Artificial Sequence
  ENSG00000285437_39 (sequence is synthesized)
gcgcgggcctgcggctgtcgcattctggggtgtctcctgcccatctcttgccccgggagggaaacagcttttgcttgatcgtctgctcggcctgtgtcagccaaatttaaggccgttccg

SEQ ID NO: 799983 - DNA, 120 bp, Artificial Sequence
  ENSG00000285437_40 (sequence is synthesized)
cgaggcagtcgcgagtgtgttcattttgcagatgaggacactgaggcttggaggcgagcaagttgccccggacacaggaagtggcggcgcttgtattcgaacccagagtgtctggttctc

SEQ ID NO: 799984 - DNA, 120 bp, Artificial Sequence
  ENSG00000285437_41 (sequence is synthesized)
catagcccttttcctctgggatctggcagcttcctctttttgtctctcgcccgccacctccatccttcatcccctccgatctgtcagcggcctgcgtaaaagccgcagtggctcctcgct

SEQ ID NO: 799985 - DNA, 120 bp, Artificial Sequence
  ENSG00000285437_42 (sequence is synthesized)
gcctgcgggttgaaggagtccaggggagagagcttgggctcactctgtatctgtgggcgagtggcttgatctgtcggaggccctgtttcctcatctggaaaatgagtttattactgtact

SEQ ID NO: 799986 - DNA, 120 bp, Artificial Sequence
  ENSG00000285447_0 (sequence is synthesized)
gaataggtatcctttataatatcatgatcaacaggaaagagataatatcttctacttaatcctggatactatatctgaagtcagagcatccactccaaagcagagaatttctgaaaaaca

SEQ ID NO: 799987 - DNA, 120 bp, Artificial Sequence
  ENSG00000285447_1 (sequence is synthesized)
aaataatgtcatcatatgatgttagaattttttttcaaatgatggttcctaatacttcacattagaagaactcgaatttgatgaccagtttgagaaacaccagtatatccagattacaag

SEQ ID NO: 799988 - DNA, 120 bp, Artificial Sequence
  ENSG00000285447_2 (sequence is synthesized)
aaaaagcgagtcaaaaggatgatcatgaatataacaacttcgaggaaacatttaaccaaagaccaaagctttttaaacaactgagagtttttataagaaaaagacctcatacagtagtcc

SEQ ID NO: 799989 - DNA, 120 bp, Artificial Sequence
  ENSG00000285447_3 (sequence is synthesized)
ccacttattcatgggggatacatttcaagacccacagagaaggcctgaaatcactgatgtaccaaaccctaaccaggttcttaggatgagctactaaatgacaaatgggtgggtagtaca

SEQ ID NO: 799990 - DNA, 120 bp, Artificial Sequence
  ENSG00000285447_4 (sequence is synthesized)
tagagtgtagatacaccagacaaagaaatgattcacagcccaggcaggacagagcagatcacacaagatttcatcacagtactcagaaaaccacaccatttaaaagttatgaattgttta

SEQ ID NO: 799991 - DNA, 120 bp, Artificial Sequence
  ENSG00000285447_5 (sequence is synthesized)
tttctggaattttccatataatatttttgaccacagtttcccatggataactgaaaccatgggaagtggaactgtggataaggcaggactactgtaactatgacatcaatggtaggaacc

SEQ ID NO: 799992 - DNA, 120 bp, Artificial Sequence
  ENSG00000285447_6 (sequence is synthesized)
tgaagcataattctgctgtagtggattttttcaaaagaaactcatgaatgaaaaataatttattagatataagaaaggatgcatttgtatctcaaactttacttattctggaaataaatg

SEQ ID NO: 799993 - DNA, 120 bp, Artificial Sequence
  ENSG00000285447_7 (sequence is synthesized)
aaaagccaacacctattacataccgacaaaaatgaaaaaataaataaatgtaaagccatagttcagtactgatggaatctgagaaaatttatatgaccgcgaacccatatctctgtactg

SEQ ID NO: 799994 - DNA, 120 bp, Artificial Sequence
  ENSG00000285447_8 (sequence is synthesized)
ggctacacttgtcttgcatccctgacccagcatcagaaaacacatattggagaaaaaccttatgaatgtaaaatatgtggtaagtcctttacccggaacagtaatcttgttcaacatcaa

SEQ ID NO: 799995 - DNA, 120 bp, Artificial Sequence
  ENSG00000285447_9 (sequence is synthesized)
agaatacatactggagagaaaccttatgaatgtaatgaatgtgggaaagcttttagtcagagcactaatcttattcagcatcaaagagtccatactggggagaaaccttatgagtgtaat

SEQ ID NO: 799996 - DNA, 120 bp, Artificial Sequence
  ENSG00000285447_10 (sequence is synthesized)
gaatgtgaaaaaacctttagtcataggtcatcccttagaaatcatgagagaatccatactggagaaaaaccctatccttgtaatgaatgtgggaaagctttcagccatatctctgccctt

SEQ ID NO: 799997 - DNA, 120 bp, Artificial Sequence
  ENSG00000285447_11 (sequence is synthesized)
actcaacatcatagaattcatactggaaagaaaccatatgaatgtactgaatgtggaaaaaccttcagccgcagcacacacctaattgaacatcagggaattcattctgaggaaaaatcc

SEQ ID NO: 799998 - DNA, 120 bp, Artificial Sequence
  ENSG00000285447_12 (sequence is synthesized)
taccagtgtaagcaatgtcggaaagttttttgccacagtacatcactaatccgacatcagagaacccacacaggagagaaaccatatgaatgtaatgaatgtgggaaagctttcagccat

SEQ ID NO: 799999 - DNA, 120 bp, Artificial Sequence
  ENSG00000285447_13 (sequence is synthesized)
accccagccttcattcaacatcaaagaattcatactggagaaaaaccctatgagtgtaatgcatgtggaaaggccttcaatcggagtgcacatcttactgaacaccagagaactcatact

SEQ ID NO: 800000 - DNA, 120 bp, Artificial Sequence
  ENSG00000285447_14 (sequence is synthesized)
ggagagaagccctatgtttgtaaagaatgtggaaaaaccttcagtcgaagtacacaccttactgaacatctaaaaattcattcttgtgtgaaaccctatcaatgtaatgaatgtcagaaa

SEQ ID NO: 800001 - DNA, 120 bp, Artificial Sequence
  ENSG00000285447_15 (sequence is synthesized)
ctgttttgctatagaacatcactaattcgacatcagaggacgcatacaggagagaaaccctaccagtgtaatgaatgtgggaaatccttcagcttaagctcagctctaactaaacataag

SEQ ID NO: 800002 - DNA, 120 bp, Artificial Sequence
  ENSG00000285447_16 (sequence is synthesized)
cgaatacatacaagggagagaccctatcaatgtactaagtgtggtgatgtcttttgtcatagtacatccttaattcgacatcagaaaactcatttcagaaaggaaaccttagcagagtaa

SEQ ID NO: 800003 - DNA, 120 bp, Artificial Sequence
  ENSG00000285480_0 (sequence is synthesized)
gctgacttgataaaaagtagctccaagggggtgggtgagggctattcgagaagcaggaggatgagcgctgagtatggacagcggcagcagcccgggggccgtgggggtcgcagttctggg

SEQ ID NO: 800004 - DNA, 120 bp, Artificial Sequence
  ENSG00000285480_1 (sequence is synthesized)
ccatgagcatcatgaactcgtttgtaaacgacgtgtttgagcagctggcgtgtgaggctgcccggctggcccagtactcgggccggaccaccctgacatcccgagaagtccagacggctg

SEQ ID NO: 800005 - DNA, 120 bp, Artificial Sequence
  ENSG00000285480_2 (sequence is synthesized)
tgcgtctgctgctgcctggggagctggccaagcacgctgtgtctgagggcaccaaggctgtcaccaagtacaccagctccaagtgacccagggcctgacaaaaataaagggtgaactgtt

SEQ ID NO: 800006 - DNA, 120 bp, Artificial Sequence; identical to SEQ ID NO: 264049
  ENSG00000285508_0 (sequence is synthesized)

SEQ ID NO: 800007 - DNA, 120 bp, Artificial Sequence; identical to SEQ ID NO: 264050
  ENSG00000285508_1 (sequence is synthesized)

SEQ ID NO: 800008 - DNA, 120 bp, Artificial Sequence
  ENSG00000285508_2 (sequence is synthesized)
tacactgatgctgaagtactatgagccttcggaacttgtggagagactacaaagttttggttgttatggtccctttagttgggctcatacatttggggtggtacagaatcaaaagcagcc

SEQ ID NO: 800009 - DNA, 120 bp, Artificial Sequence
  ENSG00000285508_3 (sequence is synthesized)
atagtctgggactttcaaatcttcagaagagccaaatccaggggaagtagcaggcttgcaatcttcaggtaaagaagcagctttgaatctgagcttcatatcgaaagaagagatgaaaaa

SEQ ID NO: 800010 - DNA, 120 bp, Artificial Sequence
  ENSG00000285508_4 (sequence is synthesized)
taccagttggattagaaagaactggcttcttgtagctgggatatctttcataggtgtccatcttggaacatactttttgcagaggtctgcaaagcagtctgtaaaatttcagtctcaaag

SEQ ID NO: 800011 - DNA, 120 bp, Artificial Sequence
  ENSG00000285508_5 (sequence is synthesized)
caaacaaaagagtattgaagagtgaagtaaaataaatatttggaattactaatttgtcattaaatcattctatgctgattagcttcataaacattgaactttttgattttatagccacaa

SEQ ID NO: 800012 - DNA, 120 bp, Artificial Sequence
  ENSG00000285508_6 (sequence is synthesized)
tgctgcatattcatactttaattcctaaagaataatttttaatgttaaaacgtgataatgcaataaatagaaaaatgtggtttacaaaataaaaacggtcttcactagttaccacctgaa

SEQ ID NO: 800013 - DNA, 120 bp, Artificial Sequence
  ENSG00000285551_0 (sequence is synthesized)
ctgggtcaaagggtgaagtagaaggaagctggaaacacatagtattttagaagtttttcagagaaatcacaaggcaggaacttctgctcagtttggaagaaagagcattccatcatgacc

SEQ ID NO: 800014 - DNA, 120 bp, Artificial Sequence
  ENSG00000285551_1 (sequence is synthesized)
cttggactgggtgagagcatcatcctttaattaatgtctgcgctgggtcagataaccatcactgtctccaggtgctggaatacagagaggaaccaaacagataaaaatccttgcctgcac

SEQ ID NO: 800015 - DNA, 120 bp, Artificial Sequence
  ENSG00000285551_2 (sequence is synthesized)
ggagcttaccttcagctaagggagacagtcaaaaacaagtcaacacatctaaagaagccactgatgaaacaggctcccccttggaaagaccatctcaccttccaacctctccatcctgca

SEQ ID NO: 800016 - DNA, 120 bp, Artificial Sequence
  ENSG00000285551_3 (sequence is synthesized)
attcatcagatctggaaaccacctcatcagcatccccctggccaactggaagcaaccgtgacgttgtgctgaatacacttgcagagtcgtgctgtggtctctccgagctcatcacggcac

SEQ ID NO: 800017 - DNA, 120 bp, Artificial Sequence
  ENSG00000285551_4 (sequence is synthesized)
ctccctatgcaggagtttcaattcaaggatttagccaaatttgggtgctatttcccttttgtggagggacttttcatcacaatgagaaggacgtcttaggactccaggactttgagagag

SEQ ID NO: 800018 - DNA, 120 bp, Artificial Sequence
  ENSG00000285551_5 (sequence is synthesized)
aaagtgtctctacaagtcaaagcaggaatatcagccttcttacactaggacaactccaaaattgtgtgattggcaaattgacaatcatcgatttgttgactgaacacctgttaggtgtaa

SEQ ID NO: 800019 - DNA, 120 bp, Artificial Sequence
  ENSG00000285551_6 (sequence is synthesized)
ggcacggtgtcatatgctttccttggggcttgccttcaagcagctaacagaaataagaagaaaacaggtgaaaaagacagtgtgataaggccatggtggtggattgtggatgccctgccc

SEQ ID NO: 800020 - DNA, 120 bp, Artificial Sequence
  ENSG00000285551_7 (sequence is synthesized)
gaagaggaagagagacccgagctagcacactcagtccccttgctatgtgatgttctttaccatctcaggactctgcacagagtccccaacagcaagaaggccctcaccagatacagcccc

SEQ ID NO: 800021 - DNA, 72 bp, Artificial Sequence
  ENSG00000285551_8 (sequence is synthesized)
gttgtatcctttgatccaatcaagttgccactcagtattaaccatgacaccttctaagccatcatctcctcc

SEQ ID NO: 800022 - DNA, 120 bp, Artificial Sequence
  ENSG00000285551_9 (sequence is synthesized)
cagtattaaccatgacaccttctaagccatcatctcctcctaatcctcccataacaatgggtataagttatgaaggtgggttagaaactagtgcctatccctcactaagttgccagatgg

SEQ ID NO: 800023 - DNA, 120 bp, Artificial Sequence
  ENSG00000285551_10 (sequence is synthesized)
gaataagctggcttgctacttccctacatctctgaagggctccaccattcctctagcaaccatgctctcaaagctcagagggaggaaaaggaaatggatctaaatggaattccaggtccc

SEQ ID NO: 800024 - DNA, 120 bp, Artificial Sequence
  ENSG00000285551_11 (sequence is synthesized)
acgctggatattttcacaccttacctcatttaatacaacaagcaaggaggtagacaatattgtctacctttgcaaatgaggaaacagaggcttagagaagttaaataatttgcctgagaa

SEQ ID NO: 800025 - DNA, 120 bp, Artificial Sequence
  ENSG00000285551_12 (sequence is synthesized)
taaagctaaaagtagctttaaaatactagagctgggattgcaagtttgatgcaaagtttgtgctctcttcatccttcaccaagatctttcattttccctttaaatatctcttatgtctgc

SEQ ID NO: 800026 - DNA, 120 bp, Artificial Sequence
  ENSG00000285551_13 (sequence is synthesized)
atttcccttccattcccatcactagcactgtcctctaatgccccacccagtggggaagtctccaataggtccccctgcttataacagccaagagggtagctataaactaggtccaataac

SEQ ID NO: 800027 - DNA, 120 bp, Artificial Sequence
  ENSG00000285551_14 (sequence is synthesized)
atgcttcatgtgagggaactgatggacagctgtctaattcataacctctggcctcaacggaatttacagttcagagtccaaaatagcaaggaagtggtgggaagaaggtgagagaaaagg

SEQ ID NO: 800028 - DNA, 120 bp, Artificial Sequence
  ENSG00000285551_15 (sequence is synthesized)
gtgggagggtgagagaggggagggaggggaataaggtgtgggcagtagagggaatctgtcagtctcatggtttgccctaggaaaccttctgctcagccccagcctgcttctgggcactcc

SEQ ID NO: 800029 - DNA, 120 bp, Artificial Sequence
  ENSG00000285551_16 (sequence is synthesized)
tcctcacccctccttgctgtccatatgggttcaatgtgagtaaccacaattgtagagtgtggccatcttcttctgacatggtcctaaataaacctaactgagtagccagaagaatcactt

SEQ ID NO: 800030 - DNA, 120 bp, Artificial Sequence
  ENSG00000285551_17 (sequence is synthesized)
ctaaggtaaacatctgtaaacattggttatatttattttcaatattactggttaacattgtggagctattactgatgggccagactctgtgctaggcacagactttctagggattatttc

SEQ ID NO: 800031 - DNA, 120 bp, Artificial Sequence
  ENSG00000285551_18 (sequence is synthesized)
atttaattctcatggcaaccaccatgcatttgcagataggcaagtcaggctcacaaaaatgtatgcagagcttcagggttgtgatgggtagagccaaacccatctgcccaacccaagggc

SEQ ID NO: 800032 - DNA, 120 bp, Artificial Sequence
  ENSG00000285551_19 (sequence is synthesized)
ccgtgcgctccaaccctgcatcgaactgccaacatagtacaccttttagaaaaagattcttgttgcaaaagtaccataggcagtgtgtgtgtaaggtcattgtaaaagtgtagataagca

SEQ ID NO: 800033 - DNA, 120 bp, Artificial Sequence
  ENSG00000285551_20 (sequence is synthesized)
agaaagtgttataccaccactcagaagtaaccactgttaacatgttggcttatctgctctcaggtgtttctgtgcctgtacatactattcttcttgaataaaaacaggattacacagtgt

SEQ ID NO: 800034 - DNA, 120 bp, Artificial Sequence
  ENSG00000285551_21 (sequence is synthesized)
cgctggactcagccagactcagacagaagtcaggactaacagctgtgggaaggagctacccacttccggtatccttgactcttcaggattacctgcctgcaggtacgagctacccaccat

SEQ ID NO: 800035 - DNA, 120 bp, Artificial Sequence
  ENSG00000285551_22 (sequence is synthesized)
gggtctcctctccactgagagctggacacttgccaggacgacctgtctgtggaaaggagttacccactttgtgtctcctgagagctcctctgttactcagtgaagctcctctccaccttg

SEQ ID NO: 800036 - DNA, 120 bp, Artificial Sequence
  ENSG00000285551_23 (sequence is synthesized)
tccagttgtccaggcattccattcttcctggacgcaagacaaaaacttgggacctgccaaatggtggggctgaaggagctataatacaaacaggggtaaaacacaaaccccgctctccat

SEQ ID NO: 800037 - DNA, 120 bp, Artificial Sequence
  ENSG00000285551_24 (sequence is synthesized)
aatgagagaagagctgtgacccttcaaggagttcagacctgggggctccccaggccagcgttgtgacaccttctttagggctctgtggttcctggtgtctccaagcttctgggcaccact

SEQ ID NO: 800038 - DNA, 120 bp, Artificial Sequence
  ENSG00000285551_25 (sequence is synthesized)
gcgtttctcagtgcccacaatggaagccgcttgtagtacgcctggtccaccatcagccacggacagagccagcacctggagctggcctccccactgcagccagcatgcctggctgtgtgc

SEQ ID NO: 800039 - DNA, 120 bp, Artificial Sequence
  ENSG00000285551_26 (sequence is synthesized)
agtggccagaaacccttcacactcacacatccctcgccactctgcacatggctcacccttgacaggcatggaatctggccagtagctagagctgaatgcagcctgctgggtcaagtgggt

SEQ ID NO: 800040 - DNA, 120 bp, Artificial Sequence
  ENSG00000285551_27 (sequence is synthesized)
ggaatgagcccagcggtcccgaggaaaacttgggcaaaggttccactggccacagaggtttccagctggcagagtgacaccctaaagatcctgtgacattttccgggacactatcatgac

SEQ ID NO: 800041 - DNA, 120 bp, Artificial Sequence
  ENSG00000285551_28 (sequence is synthesized)
cacagactcagcatcaaacagttaaatgaccttcacagaaacccatgagatgaacttaaagaaaagtcatatgagggattcctgcaggtaaaaagcctgccacaatgtagataaccacct

SEQ ID NO: 800042 - DNA, 120 bp, Artificial Sequence
  ENSG00000285551_29 (sequence is synthesized)
ctgccttatcacattggaaaattatggctgagctatgccaggattttgtgaaggctgaggcagaagacaaaagagcctggcttaaagatgtatagacccaccaattccactcctatttct

SEQ ID NO: 800043 - DNA, 120 bp, Artificial Sequence
  ENSG00000285551_30 (sequence is synthesized)
aaacccaaagacatgtccaccaaaagacatacgtaagtatgtccataattgcccaaacttgaatcaactgaatgtccagcaatagtcaaatggggaaattaaacattcaatgaaggacaa

SEQ ID NO: 800044 - DNA, 120 bp, Artificial Sequence
  ENSG00000285566_0 (sequence is synthesized)
gggatttgagggaggttggacaaggggtaggtgtggaagtgcagagtgagttggagaaagaagtctggcaaagaagttgtaatgactcaggaaagggaatagggttgtctctttccctat

SEQ ID NO: 800045 - DNA, 120 bp, Artificial Sequence
  ENSG00000285566_1 (sequence is synthesized)
gggtagaggtagatattttaggaaaaaaagagagagagagaaaaaggataaaactttgttatgatccccccaaaacttgttatgtaagatatatatctactgataggacattttgaaaat

SEQ ID NO: 800046 - DNA, 120 bp, Artificial Sequence
  ENSG00000285566_2 (sequence is synthesized)
tagtatcagctttatatttgggcacatgatttcactgagatggttctttggcagagcagattaaaatgatgttcctgaaatgaaactcgagtctccaaaataattggctcattttaagca

SEQ ID NO: 800047 - DNA, 120 bp, Artificial Sequence
  ENSG00000285566_3 (sequence is synthesized)
aaatattattgatgatcaacagtgactggcacataatgattgtttaaatatttgttggctaagtcagggaatgaatgatatgctttggcaattatataaaggtctcagggaagtagaaga

SEQ ID NO: 800048 - DNA, 120 bp, Artificial Sequence
  ENSG00000285566_4 (sequence is synthesized)
tatggctccagctatggctgtggctatggctctggttatggctgtggctatggctccagctatggctgtggctatggctctggttatggctgtggctatggctccagctatggctgtggc

SEQ ID NO: 800049 - DNA, 120 bp, Artificial Sequence
  ENSG00000285566_5 (sequence is synthesized)
tatggctctggctacagctgtggctatggctctggctctggctgtggctatggaactggctacggctgtgggtatggctgtggttatggaactggctatggctgtggatgtggctctggc

SEQ ID NO: 800050 - DNA, 120 bp, Artificial Sequence
  ENSG00000285566_6 (sequence is synthesized)
tctggctactgtggctaccggccattttgctttagaagatgctattcttcctgctaaaacatcactgtcagaggacaatttgcttctaaaatgacacggctaaagataatactgattcaa

SEQ ID NO: 800051 - DNA, 120 bp, Artificial Sequence
  ENSG00000285566_7 (sequence is synthesized)
ggattcatactccaagatttctatatccaagaattacatgcttgacagagtcttggacctctagcctcacatttctttgaatgaaatcatggccataggatccacggtgtcatctgactg

SEQ ID NO: 800052 - DNA, 120 bp, Artificial Sequence
  ENSG00000285566_8 (sequence is synthesized)
ttttccaaatgttatcttttgctcccttaatctctgactctctgttatgactgtgttaatgatcataacatctacaattggggaagtcaatcatttgtaataaaaatggttctttattcc

SEQ ID NO: 800053 - DNA, 62 bp, Artificial Sequence
  ENSG00000285687_0 (sequence is synthesized)
ccgggaaacctccagagaagccgctgccaaatggaaaaggatccacggaatcttctgattgg

SEQ ID NO: 800054 - DNA, 67 bp, Artificial Sequence
  ENSG00000285687_1 (sequence is synthesized)
ggtccacacaaccagtaagaggccgcgcttggaccctgtcctcgctgatcgctccgcaacccagcct

SEQ ID NO: 800055 - DNA, 77 bp, Artificial Sequence
  ENSG00000285687_2 (sequence is synthesized)
gcctgcagtcaggcaccagggccccgagcctcttctcgaggtgaagccgacacacagccgccccgagggtggctgcc

SEQ ID NO: 800056 - DNA, 79 bp, Artificial Sequence
  ENSG00000285687_3 (sequence is synthesized)
accggcccaggtgcccagcgtcgacaggcagcctccgcacagcagaccttgcctgccgccatgatggggcccagcctct

SEQ ID NO: 800057 - DNA, 120 bp, Artificial Sequence
  ENSG00000285723_0 (sequence is synthesized)
ttggggtggtacagaatcaaaagcagccctgttttccaaatacctaaaaacgacgacattcctgagcaagatagtctgggactttcaaatcttcagaagagccaaatccaggggaagtag

SEQ ID NO: 800058 - DNA, 62 bp, Artificial Sequence
  ENSG00000285765_0 (sequence is synthesized)
aaggatccacggaatcttctgattggaccctgtcctcgctgatcgctccgcaaccgaaatgt

SEQ ID NO: 800059 - DNA, 62 bp, Artificial Sequence
  ENSG00000285814_0 (sequence is synthesized)
aaggatccacggaaccttctgattggaccctgtcctcgctgatcgctcagctaccgaaatgt

SEQ ID NO: 800060 - DNA, 120 bp, Artificial Sequence
  ENSG00000285891_0 (sequence is synthesized)
gttccactagaggagagtaagtgccagtgttccgccaactcaggaactgaccagaccctgcaggcacagtgagaagactcccgggagaaaactcaggagtaaaaatggagatagtaatac

SEQ ID NO: 800061 - DNA, 120 bp, Artificial Sequence
  ENSG00000285891_1 (sequence is synthesized)
ttcccactgaaactaccataaacatccagaaaatggagcaggaaaacacagcccagggatcagaaaagccctcagtccagtcagttaaaccttggagtgaccaggaaatccggagtttcc

SEQ ID NO: 800062 - DNA, 120 bp, Artificial Sequence
  ENSG00000285891_2 (sequence is synthesized)
tgcaagaatgggaatttcttgaacgtgaggtgtacagggtgaagaagaagtatcacatagtatcaaaagcaattgctcagcgtctcaagcagaggggtatcaacaagagctggaaggaat

SEQ ID NO: 800063 - DNA, 120 bp, Artificial Sequence
  ENSG00000285891_3 (sequence is synthesized)
gctaataagcttgcaggacttatacttcactattcaggaggccaaccagaggccaaggtgccaacccttgccatgtccttatggtgaggccctgcacaggattctggggtacagatggaa

SEQ ID NO: 800064 - DNA, 120 bp, Artificial Sequence
  ENSG00000285891_4 (sequence is synthesized)
gatcagcgtcttctcaggtcctccctgtgcagatgtggttaacctcgcacctcccgagcacccgccccaggcctatggcgttcccatagtctttcaggagccgatgtgggccccaacacc

SEQ ID NO: 800065 - DNA, 120 bp, Artificial Sequence
  ENSG00000285891_5 (sequence is synthesized)
tgtgatctatgtggaaaatcctcaggtacccggatgggagccctggaacatgaatggtcatgttccatatatgtatcctgctttgcctccggcagccccaggccccctgacacagtgggc

SEQ ID NO: 800066 - DNA, 120 bp, Artificial Sequence
  ENSG00000285891_6 (sequence is synthesized)
catctctactgactgatccaggtcttgaagacatttagaatctggatcctgattcatcagaaagactgaaaaacagcacaatctgtgtgtgttagtgaatgactccttcctctcctcacc

SEQ ID NO: 800067 - DNA, 66 bp, Artificial Sequence
  ENSG00000285937_0 (sequence is synthesized)
aggaggacaccggcccaggtgcccagcatcgaccggcagcctccgcacagcagccatgatggggcc

SEQ ID NO: 800068 - DNA, 120 bp, Artificial Sequence
  ENSG00000285938_0 (sequence is synthesized)
actacatccggcagcggggtggcccctagctcctgctgcccccccgccctttctccccgcccgcccccggagctcagccgatttctgaggctccaactctacccactccctccccgggcc

SEQ ID NO: 800069 - DNA, 120 bp, Artificial Sequence
  ENSG00000285938_1 (sequence is synthesized)
gccgccgccgcgccttcccccattcttactccctcgaggagagccacaggttgcaaatccaaccaacctcgcaatctatttttgcaaaatcactcacaaagatctccctttcgcgcccgc

SEQ ID NO: 800070 - DNA, 120 bp, Artificial Sequence
  ENSG00000285938_2 (sequence is synthesized)
gcccgctcctcccgcgccgggtcccctcagccacggccacaaagtgcccttctctcctcctgagtcttgcacataaggaacgcgggctggggctctgttcgtctttctcctcgcccaaga

SEQ ID NO: 800071 - DNA, 120 bp, Artificial Sequence
  ENSG00000285938_3 (sequence is synthesized)
tacacatagaaaacttggagccaaagcatttggcaagagcggaaaaaaaaagaattaaaaggtaaaataatgatcatgagcagcggcggcggcagcggcaccagcggcaacagcggcggc

SEQ ID NO: 800072 - DNA, 120 bp, Artificial Sequence
  ENSG00000285938_4 (sequence is synthesized)
agaaacttcttgcatcaccacttctaagaaccccagttctaagaatcaacagagctcaattctcggaatttgagcttcggactttaccactgctacgtggcaggggaggacttggtgtca

SEQ ID NO: 800073 - DNA, 120 bp, Artificial Sequence
  ENSG00000285938_5 (sequence is synthesized)
gctctccgagatttttactgcccctggccaaccaaaagccctcaaagccacaagattttttcactggccggcatatttcgaggtcctcataagcagagcgtctcggatttggaggttccg

SEQ ID NO: 800074 - DNA, 120 bp, Artificial Sequence
  ENSG00000285938_6 (sequence is synthesized)
gttcgaggctcgaggggcctgaaggtggctctccctccccgggcccaagacgatggtatggcctgctccgccaccatcacgtgggctcctcctctgtgacgtcggcgccttcgctgtagc

SEQ ID NO: 800075 - DNA, 120 bp, Artificial Sequence
  ENSG00000285938_7 (sequence is synthesized)
aaagctcggcctctggaattctgagaactaatttgctattcggtgacataagagggggagtgcgctttgctttcccggggtctggggctaattccttctttcttacccataaactcagca

SEQ ID NO: 800076 - DNA, 120 bp, Artificial Sequence
  ENSG00000285938_8 (sequence is synthesized)
gatcgagctaaatgcacaaaagggagcgagaggtttgaaccactgggaaaagtatgttatatatatagtagggttagagaggcgagtaagagaaaaataaaataaaataaacatcacagc

SEQ ID NO: 800077 - DNA, 120 bp, Artificial Sequence
  ENSG00000285946_0 (sequence is synthesized)
gtagtcccatcgtttgcccagggttaagaggacaagagtaactggactttctccaagatgtcctatcagaaacaccagcagaaatggcagctccctgccaagtgcctccccaaatatcca

SEQ ID NO: 800078 - DNA, 120 bp, Artificial Sequence
  ENSG00000285946_1 (sequence is synthesized)
tgctctctagtttcactccggtttccacgattctacctgcgtcagccccagcattctgactgctgtgagcacgagtcttctagatgttccacttgctatagctctggagactgcagctga

SEQ ID NO: 800079 - DNA, 66 bp, Artificial Sequence
  ENSG00000285950_0 (sequence is synthesized)
accggcccaggtgcccagcgtcgactggcagcctccgcacagcagccatgatggggcccagcctct

SEQ ID NO: 800080 - DNA, 120 bp, Artificial Sequence
  ENSG00000285976_0 (sequence is synthesized)
gcaagggcgcctcggcgcgtgtattggctccttcggctgcgggccggctcggctacgcgctctgctccgagccgctcactgcatggtagagtctggtgcccccgccgccgcctgcatcgc

SEQ ID NO: 800081 - DNA, 120 bp, Artificial Sequence
  ENSG00000285976_1 (sequence is synthesized)
cgccaccgccgctccgccacgaccaccgccgcctcctgccctgcagccaccgccaccgcctgtgtcgccgccgcctcgggaccggctgtatgattaggccacaatcttcaatgagtaaac

SEQ ID NO: 800082 - DNA, 120 bp, Artificial Sequence
  ENSG00000285976_2 (sequence is synthesized)
atattcctcaattctgtggtgttcttggtcacacatttatggagtttctgaagggcagtggagattactgccaggcacagcacgacctctatgcagacaagtgaactgtagaaactgatt

SEQ ID NO: 800083 - DNA, 120 bp, Artificial Sequence
  ENSG00000285976_3 (sequence is synthesized)
actgctccaccaagaagcccccataagagtggttatcctggacacagaagtgttgaattgaaatccacagagcattttacaagagttctgacctggatggggtaaacctcagtgcacttc

SEQ ID NO: 800084 - DNA, 120 bp, Artificial Sequence
  ENSG00000285976_4 (sequence is synthesized)
ttttctgttggcctcagtattactggattgaagaattgctgcttcttgttaggaggttcatttcacttatcattacttacaacttcatactcaaagcactgagaatttcaagtggagtat

SEQ ID NO: 800085 - DNA, 120 bp, Artificial Sequence
  ENSG00000285976_5 (sequence is synthesized)
attgaagtagacttcagtttctttgcatcatttctgtattcaatttttttaattatttcataaccctattgagtgttttttaactaaattaacatggctcgaatgaaccgcccagctcct

SEQ ID NO: 800086 - DNA, 120 bp, Artificial Sequence
  ENSG00000285976_6 (sequence is synthesized)
gtggaagtcacatacaagaacatgagatttcttattacacacaatccaaccaatgcgaccttaaacaaatttatagaggaacttaagaagtatggagttaccacaatagtaagagtatgt

SEQ ID NO: 800087 - DNA, 120 bp, Artificial Sequence
  ENSG00000285976_7 (sequence is synthesized)
gaagcaacttatgacactactcttgtggagaaagaaggtatccatgttcttgattggccttttgatgatggtgcaccaccatccaaccagattgttgatgactggttaagtcttgtgaaa

SEQ ID NO: 800088 - DNA, 120 bp, Artificial Sequence
  ENSG00000285976_8 (sequence is synthesized)
attaagtttcgtgaagaacctggttgttgtattgctgttcattgcgttgcaggccttgggagagctccagtacttgttgccctagcattaattgaaggtggaatgaaatacgaagatgca

SEQ ID NO: 800089 - DNA, 120 bp, Artificial Sequence
  ENSG00000285976_9 (sequence is synthesized)
gtacaattcataagacaaaagcggcgtggagcttttaacagcaagcaacttctgtatttggagaagtatcgtcctaaaatgcggctgcgtttcaaagattccaacggtcatagaaacaac

SEQ ID NO: 800090 - DNA, 120 bp, Artificial Sequence
  ENSG00000285976_10 (sequence is synthesized)
tgttgcattcaataaaattggggtgcctaatgctactggaagtggaacttgagatagggcctaatttgttatacatattagccaacatgttggcttagtaagtctaatgaagcttccata

SEQ ID NO: 800091 - DNA, 120 bp, Artificial Sequence
  ENSG00000285976_11 (sequence is synthesized)
ggagtattgaaaggcagttttaccaggcctcaagctagacagatttggcaacctctgtatttgggttacagtcaacctatttggatacttggcaaaagattcttgctgtcagcatataaa

SEQ ID NO: 800092 - DNA, 120 bp, Artificial Sequence
  ENSG00000285976_12 (sequence is synthesized)
atgtgcttgtcatttgtatcaattgacctttccccaaatcatgcagtattgagttatgacttgttaaatctattcccatgccagaatcttatcaatacataagaaatttaggaagattag

SEQ ID NO: 800093 - DNA, 120 bp, Artificial Sequence
  ENSG00000285976_13 (sequence is synthesized)
gtgccaaaatacccagcacaatacttgtatatttttagtaccatacagaagtaaaatcccaggaactatgaacactagaccttatgtggtttattccttcaatcatttcaaacattgaaa

SEQ ID NO: 800094 - DNA, 120 bp, Artificial Sequence
  ENSG00000285976_14 (sequence is synthesized)
gtagggcctacatggttatttgcctgctcactttatgtttacatctcccacattcataccaatatacgtcaggtttgcttaaccattgatttttttttttttttaccaagtcttacagtg

SEQ ID NO: 800095 - DNA, 120 bp, Artificial Sequence
  ENSG00000285976_15 (sequence is synthesized)
attattttacgtgtttccatgtatctcactttgtgctgtattaaaaaaacctccattttgaaaatctacgttgtacagaagcacatgtctttaatgtcttcagacaaaaaagccttacat

SEQ ID NO: 800096 - DNA, 120 bp, Artificial Sequence
  ENSG00000285976_16 (sequence is synthesized)
taatttaatgtttgcactctgaggtgcaacttaacagggagggcctgagaaaagaatgggagggggctattaattatttttagcaaaatgttgcctttgtcttgtgcaaacatgtagaat

SEQ ID NO: 800097 - DNA, 120 bp, Artificial Sequence
  ENSG00000285976_17 (sequence is synthesized)
atgctctttaatttagtaaaatatttttttaaaaggtagagatgctttgttattgtaatcataaacttcctgaaattcttgtaatttttttcccatacttatcagaagtgtgtttaccaa

SEQ ID NO: 800098 - DNA, 120 bp, Artificial Sequence
  ENSG00000285976_18 (sequence is synthesized)
cttatttttgtttgaaagtgtgattttttttttccttcccaacctctcttgcaaaaaaagaaatgggtttctgctaatgaattgagcagacatctaatattttatatgccttttgagctg

SEQ ID NO: 800099 - DNA, 120 bp, Artificial Sequence
  ENSG00000285976_19 (sequence is synthesized)
aatgttagttcaaccatatatttatactgtctggggatgtgtggttatagttctgtgggagaaataattttgtcagtgttcaccagcttgtaaaaacttagtgcgagagctgaaacatct

SEQ ID NO: 800100 - DNA, 120 bp, Artificial Sequence
  ENSG00000285976_20 (sequence is synthesized)
aaataaataatgacatgcatttatcatcattgagattggtttgcttaaaattaacttattttgtagaagacaaaatgaattgcacttcacttaatgtgtgtcctcatctttttacaaata

SEQ ID NO: 800101 - DNA, 120 bp, Artificial Sequence
  ENSG00000285976_21 (sequence is synthesized)
aatgaaggattataaatgatgtcagcattttagtaaacttttagacaaaatttgttagggtcattcatgaaaactttaatactaaaagcactttccattatatactttttaaaggtctag

SEQ ID NO: 800102 - DNA, 120 bp, Artificial Sequence
  ENSG00000285976_22 (sequence is synthesized)
ataattttgaaccaatttattattgtgtactgaggagaaataatgtatagtagaggacagccttggtttgtaaagctcagttccactagttcatggttttgtgcaacttctgagcctcag

SEQ ID NO: 800103 - DNA, 120 bp, Artificial Sequence
  ENSG00000285976_23 (sequence is synthesized)
ttttctcctttgcaaattaataattacatacctttatagattttgaaattaatttaaatattagtatttggtacatgaaggcttaatgttaagtttcctttaatgatccacaataatccc

SEQ ID NO: 800104 - DNA, 120 bp, Artificial Sequence
  ENSG00000285976_24 (sequence is synthesized)
tttgatcacgttaatctaaatctagatgtctttgtctaattttttttgaatagcagttataaatgtaaaggactcaaagtttaagtaaaaagtgatactccaccttgtgtttcaaagaat

SEQ ID NO: 800105 - DNA, 120 bp, Artificial Sequence
  ENSG00000285976_25 (sequence is synthesized)
ttagttccacctcttcataccagtttaacacttaatatatttcattggattttagacagggcaaaaggaagaacaggggcctctggaggcccttggttatttaaatcttggattatttgt

SEQ ID NO: 800106 - DNA, 120 bp, Artificial Sequence
  ENSG00000285976_26 (sequence is synthesized)
gatagtaatcacaaatttttggctaatttttaacctgaggttttgttttttttttaaaggaaatgcagcctagtcttgagaacataattttatataatcaattactaaatgttaaactat

SEQ ID NO: 800107 - DNA, 120 bp, Artificial Sequence
  ENSG00000285976_27 (sequence is synthesized)
taccacacagcccataaaacagcatttgcgtttattgagagagaggatgtgccatcatgattaatgaaaactatcttttgagtttgaaaagaaattaatttgcagtgtttggattgtata

SEQ ID NO: 800108 - DNA, 120 bp, Artificial Sequence
  ENSG00000285976_28 (sequence is synthesized)
tatggtgctaaaaataaattaatttactttataaaccttatctgtacattatacgatgtgatgaaatttgctttttatccaaatattttgtatcttgtaaatatggctaattataggaat

SEQ ID NO: 800109 - DNA, 120 bp, Artificial Sequence
  ENSG00000285976_29 (sequence is synthesized)
gcctataatacatcttagattccttatatctaataagagttcaaagagttatgagttgaagtcttgaatgcaggaaactatctgatagtgttctaaaatttggttacttgggtttggata

SEQ ID NO: 800110 - DNA, 120 bp, Artificial Sequence
  ENSG00000285976_30 (sequence is synthesized)
cccttagtgggatgatgtaaatagaggctagctacctaggcttgtctatagcaaccataatgttgatgtaagtaatgcggttactgaatcataagaaaatgccatctctttttagttgaa

SEQ ID NO: 800111 - DNA, 120 bp, Artificial Sequence
  ENSG00000285976_31 (sequence is synthesized)
ggaaaactctggaagtaggtgccattggtcattctgcagtgcactgcaaccattgtttcccctagtgccctcttttccctagggcattgctctcctattcccacgccttaacacagctct

SEQ ID NO: 800112 - DNA, 120 bp, Artificial Sequence
  ENSG00000285976_32 (sequence is synthesized)
atacctagaagcagccagcccaggcatgcagtcacatttaatcacatcccccttctagagtgcttcaaaatgatgtagtccctcaacttggctaaagaatctcaatctcttgaaatttat

SEQ ID NO: 800113 - DNA, 120 bp, Artificial Sequence
  ENSG00000285976_33 (sequence is synthesized)
ttttttaatgtcatattcatctggtaaatatctactgtttgccaggcatttaagaatatggcaaagaacataaaagatggtgtcaccagattttggtcaccaatgagtacccgacccgtt

SEQ ID NO: 800114 - DNA, 120 bp, Artificial Sequence
  ENSG00000285976_34 (sequence is synthesized)
gccatgattaagagagaatgctttctattggagtttcaggaaatataatttgagaatactttaaagggaagtggaagtataagtgaatgatatttttcttttacatgtaaacaatgaagt

SEQ ID NO: 800115 - DNA, 120 bp, Artificial Sequence
  ENSG00000285976_35 (sequence is synthesized)
tatttcaaagttaagttttaaacaaaatacatgaagtagtgtctgccatacatgttaatattctacattcttgcttccttaaattaatatgtttgtgtgtatatatgtgcctcacacctg

SEQ ID NO: 800116 - DNA, 120 bp, Artificial Sequence
  ENSG00000285976_36 (sequence is synthesized)
aattgaaaattaaagactggtttaaaagtggtttaaaagtgacatttaatgtttctccattacgtttggggtaaccagcctaagtggaatcttggaaggaaagtaagggaaaaacttgta

SEQ ID NO: 800117 - DNA, 120 bp, Artificial Sequence
  ENSG00000285976_37 (sequence is synthesized)
tttgccttcaatgaattaaaccagtgatatgtgttaacgtatgaatgaaaggattgatggtgattttataattatatatattgccgcagtaaccagttaataaattgatagctaccattt

SEQ ID NO: 800118 - DNA, 71 bp, Artificial Sequence
  ENSG00000286014_0 (sequence is synthesized)
atgggacagattttgggaaagatcatgatgagccatcaaccgcagccccaggaagagcggagcccccagcg

SEQ ID NO: 800119 - DNA, 63 bp, Artificial Sequence
  ENSG00000286014_1 (sequence is synthesized)
gaggtggtggatgatgaagtgaaaaggaagagggaatgtttggatgaatctgatgatgagcca

SEQ ID NO: 800120 - DNA, 120 bp, Artificial Sequence
  ENSG00000286014_2 (sequence is synthesized)
acgcattcatttcttcctggctctctatctggccaatgacatggaggaggacgacgaggcccccaaacaaaacatcttctacttcctgtacgaggagacccgctctcatatacccttgct

SEQ ID NO: 800121 - DNA, 120 bp, Artificial Sequence
  ENSG00000286014_3 (sequence is synthesized)
tacgaggagacccgctctcatatacccttgctcagtgagctttggttccagttatgccgttacatgaacccgagggccaggaagaactgctctcagatagccttgttccggaagtatcgg

SEQ ID NO: 800122 - DNA, 120 bp, Artificial Sequence
  ENSG00000286014_4 (sequence is synthesized)
aactgctctcagatagccttgttccggaagtatcggttccacttcttttgttccatgcgctgcagggcttgggtttccctggaggagttggaagagatccaggcttatgacccagagcac

SEQ ID NO: 800123 - DNA, 120 bp, Artificial Sequence
  ENSG00000286019_0 (sequence is synthesized)
gaggctgcttcgctgcacacccgagaaagtttcagccaaacttcgggcggctgaggcggcggccgaggagcggcggactccgggcgcggggagtcgaggcatttgcgcctgggcttcgga

SEQ ID NO: 800124 - DNA, 120 bp, Artificial Sequence
  ENSG00000286019_1 (sequence is synthesized)
gcgtagcgccagggcctgagcctttgaagcaggaggaggggaggagagagtggggctcctctatcgggaccccctccccatgtggatctgcccaggcggcggcggcggaggaggcgaccg

SEQ ID NO: 800125 - DNA, 120 bp, Artificial Sequence
  ENSG00000286019_2 (sequence is synthesized)
agaagatgcccgccctgcgccccgctctgctgtgggcgctgctggcgctctggctgtgctgcgcgacccccgcgcatgtgtcgagatggctatgaaccctgtgtaaatgaaggaatgtgt

SEQ ID NO: 800126 - DNA, 120 bp, Artificial Sequence
  ENSG00000286019_3 (sequence is synthesized)
gttacctaccacaatggcacaggatactgcaaatgtccagaaggcttcttgggggaatattgtcaacatcgagacccctgtgagaagaaccgctgccagaatggtgggacttgtgtggcc

SEQ ID NO: 800127 - DNA, 120 bp, Artificial Sequence
  ENSG00000286019_4 (sequence is synthesized)
gatgtgcctcagggtttacaggagaggactgccaatactcgacatctcatccatgctttgtgtctcgaccttgcctgaatggcggcacatgccatatgctcagccgggatacctatgagt

SEQ ID NO: 800128 - DNA, 120 bp, Artificial Sequence
  ENSG00000286019_5 (sequence is synthesized)
gcacctgtcaagtcgggtttacaggtaaggagtgccaatggaccgatgcctgcctgtctcatccctgtgcaaatggaagtacctgtaccactgtggccaaccagttctcctgcaaatgcc

SEQ ID NO: 800129 - DNA, 120 bp, Artificial Sequence
  ENSG00000286019_6 (sequence is synthesized)
tcacaggcttcacagggcagaagtgtgagactgatgtcaatgagtgtgacattccaggacactgccagcatggtggcatctgcctcaacctgcctggttcctaccagtgccagtgccttc

SEQ ID NO: 800130 - DNA, 120 bp, Artificial Sequence
  ENSG00000286019_7 (sequence is synthesized)
agggcttcacaggccagtactgtgacagcctgtatgtgccctgtgcaccctcgccttgtgtcaatggaggcacctgtcggcagactggtgacttcacttttgagtgcaactgccttccag

SEQ ID NO: 800131 - DNA, 120 bp, Artificial Sequence
  ENSG00000286019_8 (sequence is synthesized)
aaacagtgagaagaggaacagagctctgggaaagagacagggaagtctggaatggaaaagaacacgatgagaattagacactggaaaatatgtatgtgtggttaataaagtgctttaaac

SEQ ID NO: 800132 - DNA, 71 bp, Artificial Sequence; identical to SEQ ID NO: 800118
  ENSG00000286038_0 (sequence is synthesized)

SEQ ID NO: 800133 - DNA, 63 bp, Artificial Sequence; identical to SEQ ID NO: 800119
  ENSG00000286038_1 (sequence is synthesized)

SEQ ID NO: 800134 - DNA, 120 bp, Artificial Sequence; identical to SEQ ID NO: 800120
  ENSG00000286038_2 (sequence is synthesized)

SEQ ID NO: 800135 - DNA, 120 bp, Artificial Sequence; identical to SEQ ID NO: 800121
  ENSG00000286038_3 (sequence is synthesized)

SEQ ID NO: 800136 - DNA, 120 bp, Artificial Sequence; identical to SEQ ID NO: 800122
  ENSG00000286038_4 (sequence is synthesized)

SEQ ID NO: 800137 - DNA, 120 bp, Artificial Sequence
  ENSG00000286053_0 (sequence is synthesized)
atgcccagccgagggacgcgaccagaggacagctctgtgctgatccccaccgacaattcgaccccacacaaggaggatctaagcagcaagattaaagaacaaaaaattgtggtggatgaa

SEQ ID NO: 800138 - DNA, 120 bp, Artificial Sequence
  ENSG00000286053_1 (sequence is synthesized)
ctttctaaccttaagaagaataggaaagtatataggcaacaacagaacagcaatatattctttcttgcagaccgaacagaaatgctgtctgagagcaagaatatattggatgaactgaaa

SEQ ID NO: 800139 - DNA, 120 bp, Artificial Sequence
  ENSG00000286053_2 (sequence is synthesized)
ttctgctgagcatttcagtcaagatttaaaagaggacttactatataatcttaaacagcggggacccaatagtagtaaacaattgttaaagtctgatgttaactaccagtgtttattttc

SEQ ID NO: 800140 - DNA, 120 bp, Artificial Sequence
  ENSG00000286053_3 (sequence is synthesized)
tgctcacgtcctacacttgaggggtgttttgactacccagcctgtggaagatgaaagaggcaatgtgtttctatggaatggagaaatttttagtggaataaaggttgaagctgaagagaa

SEQ ID NO: 800141 - DNA, 120 bp, Artificial Sequence
  ENSG00000286070_0 (sequence is synthesized)
gcctggattctcccagagattgcctggaacaccagctcgggtcctcgcacaccatcctgcgggtgcagcccagaactgtcttctgaggaagaggtgctctcctgggcccccactgtcccc

SEQ ID NO: 800142 - DNA, 120 bp, Artificial Sequence
  ENSG00000286070_1 (sequence is synthesized)
aggcctcagcaaggcaagtgaggtgctgccgtcatccaggctggacagttcagtgatttgcctgaggccccacagcagagttcaactggagacagagaaaccagctagaggcagagggag

SEQ ID NO: 800143 - DNA, 120 bp, Artificial Sequence
  ENSG00000286070_2 (sequence is synthesized)
gtaacacggagtcccccagaaaggtctgggctgcgcgtgcttcaggtaacctcccttgaccttcaggagaacgagaaggctgcctgatcagagagtccctgaagaagattctgtggctac

SEQ ID NO: 800144 - DNA, 120 bp, Artificial Sequence
  ENSG00000286070_3 (sequence is synthesized)
aggcttcagcagagtgtgagggagaccccggttatttcctcagctatttccaccaaatcctcctgtctttcgtggccaacaccccaggcaaggcttggggcccccgtctgctgctggacg

SEQ ID NO: 800145 - DNA, 120 bp, Artificial Sequence
  ENSG00000286070_4 (sequence is synthesized)
cagagccatgaagaagaagttagtggtgctgggcctgctggccgtggtcctggtgctggtcattgtcggcctctgtctctggctgccctcagcctccaaggaacctgacaaccatgtgta

SEQ ID NO: 800146 - DNA, 120 bp, Artificial Sequence
  ENSG00000286070_5 (sequence is synthesized)
caccagggctgccgtggccgcggatgccaagcagtgctcgaagattgggagggatgcactgcgggacggtggctctgcggtggatgcagccattgcagccctgttgtgtgtggggctcat

SEQ ID NO: 800147 - DNA, 120 bp, Artificial Sequence
  ENSG00000286070_6 (sequence is synthesized)
gaatgcccacagcatgggcatcgggggtggcctcttcctcaccatctacaacagcaccacacgaaaagctgaggtcatcaacgcccgcgaggtggcccccaggctggcctttgccaccat

SEQ ID NO: 800148 - DNA, 120 bp, Artificial Sequence
  ENSG00000286070_7 (sequence is synthesized)
gttcaacagctcggagcagtcccagaagggggggctgtcggtggcggtgcctggggagatccgaggctatgagctggcacaccagcggcatgggcggctgccctgggctcgcctcttcca

SEQ ID NO: 800149 - DNA, 120 bp, Artificial Sequence
  ENSG00000286070_8 (sequence is synthesized)
gcccagcatccagctggcccgccagggcttccccgtgggcaagggcttggcggcagccctggaaaacaagcggaccgtcatcgagcagcagcctgtcttgtgtgaggtgttctgccggga

SEQ ID NO: 800150 - DNA, 120 bp, Artificial Sequence
  ENSG00000286070_9 (sequence is synthesized)
aggccttctacaacggcagcctcacggcccagattgtgaaggacatccaggcggccgggggcattgtgacagctgaggacctgaacaactaccgtgctgagctgatcgagcacccgctga

SEQ ID NO: 800151 - DNA, 120 bp, Artificial Sequence
  ENSG00000286070_10 (sequence is synthesized)
acatcagcctgggagacgtggtgctgtacatgcccagtgcgccgctcagcgggcccgtgctggccctcatcctcaacatcctcaaagggtacaacttctcccgggagagcgtggagagcc

SEQ ID NO: 800152 - DNA, 120 bp, Artificial Sequence
  ENSG00000286070_11 (sequence is synthesized)
ccgagcagaagggcctgacgtaccaccgcatcgtagaggctttccggtttgcctacgccaagaggaccctgcttggggaccccaagtttgtggatgtgactgaggtggtccgcaacatga

SEQ ID NO: 800153 - DNA, 120 bp, Artificial Sequence
  ENSG00000286070_12 (sequence is synthesized)
cctccgagttcttcgctgcccagctccgggcccagatctctgacgacaccactcacccgatctcctactacaagcccgagttctacacgccggatgacgggggcactgctcacctgtctg

SEQ ID NO: 800154 - DNA, 120 bp, Artificial Sequence
  ENSG00000286070_13 (sequence is synthesized)
tcgtcgcagaggacggcagtgctgtgtccgccaccagcaccatcaacctctactttggctccaaggtccgctccccggtcagcgggatcctgttcaataatgaaatggacgacttcagct

SEQ ID NO: 800155 - DNA, 120 bp, Artificial Sequence; identical to SEQ ID NO: 109952
  ENSG00000286070_14 (sequence is synthesized)

SEQ ID NO: 800156 - DNA, 85 bp, Artificial Sequence
  ENSG00000286070_15 (sequence is synthesized)
ggccactgcacttgaagcgggccgtggaggagccccggctgcacaaccagcttctgcccaacgtcacgacagtggagagaaacat

SEQ ID NO: 800157 - DNA, 83 bp, Artificial Sequence
  ENSG00000286070_16 (sequence is synthesized)
tatgacgtgaagcgggccgtggaggagccccggctgcacaaccagcttctgcccaacgtcacgacagtggagagaaacattga

SEQ ID NO: 800158 - DNA, 120 bp, Artificial Sequence
  ENSG00000286070_17 (sequence is synthesized)
ccatcgtccgcacggctggtggctgggcagctgcctcggactccaggaaaggcggggagcctgccggctactgagtgctccaggaggacaaggctgacaagcaatccagggacaagatac

SEQ ID NO: 800159 - DNA, 120 bp, Artificial Sequence
  ENSG00000286070_18 (sequence is synthesized)
tcaccaggaccaggaaggggactctgggggaccggcttcccctgtgagcagcagagcagcacaataaatgaggccactgtgccaggctccaggtggcctccctggcctgtctccccactc

SEQ ID NO: 800160 - DNA, 120 bp, Artificial Sequence
  ENSG00000286070_19 (sequence is synthesized)
gactcacgccttcgccgtagcatctttcgcagcggaccgaagagaagaaaagtaggccagagccgaactctcttcctgccaagatgtctattggtgtgccgattaaagtactgcatgagg

SEQ ID NO: 800161 - DNA, 120 bp, Artificial Sequence
  ENSG00000286070_20 (sequence is synthesized)
ccgagggccacattgtgacatgtgagacgaacaccggtgaggtatatcgggggaagctcattgaagcagaggacaacatgaactgccagatgtccaacatcacagtcacatacagagatg

SEQ ID NO: 800162 - DNA, 120 bp, Artificial Sequence
  ENSG00000286070_21 (sequence is synthesized)
gccgagtggcacagctggagcaggtatacatccgtggcagcaaaatccgctttctgattttgcctgacatgctgaagaacgcacccatgttaaagagcatgaaaaataaaaaccaaggct

SEQ ID NO: 800163 - DNA, 120 bp, Artificial Sequence
  ENSG00000286070_22 (sequence is synthesized)
caggggctggccgaggaaaagctgctattctcaaggcccaagtggccgcaagaggaagaggacgtggaatgggacgtggaaacatctttcaaaagcgaagataattttctaagttgaaca

SEQ ID NO: 800164 - DNA, 120 bp, Artificial Sequence
  ENSG00000286070_23 (sequence is synthesized)
ctccaggaatcggtgtctctatcaggaacccttaaccctgacccggactcccagctgggacccggggtgtcggagtggcaagagcgctgtcaggcctggtgaagggtgtgagctgtccaa

SEQ ID NO: 800165 - DNA, 120 bp, Artificial Sequence
  ENSG00000286075_0 (sequence is synthesized)
cggccaggctggtacaggcggctgctcgcggaggcacttctccgagcgtgacgtgcggactccgctccactgcggcccgcccgcccgccggtctagccgccgcctccttcgctccctgag

SEQ ID NO: 800166 - DNA, 120 bp, Artificial Sequence
  ENSG00000286075_1 (sequence is synthesized)
cacgccaggcgagggtcagctgccggggcgacgcggcgcggagagggcgggcgggggggctgtgggagcgccggtctctatatggcggcggctctgtcgggcctggctgtccggctctcg

SEQ ID NO: 800167 - DNA, 120 bp, Artificial Sequence
  ENSG00000286075_2 (sequence is synthesized)
cgctcggccgccgcccgctcctatggggtcttctgcaaggggctgactcgcacgctgctcatcttcttcgacctggcctggcggctgcgtatcaacttcccctacctctacatcgtggct

SEQ ID NO: 800168 - DNA, 120 bp, Artificial Sequence
  ENSG00000286075_3 (sequence is synthesized)
tccatgatgctcaacgtccgcctgcaggttcatattgagatccattgaaggccctcccagactgacgaaggcgtgacctcaggcccaccgcatccaagaacacgaagcatgagggacaga

SEQ ID NO: 800169 - DNA, 120 bp, Artificial Sequence
  ENSG00000286075_4 (sequence is synthesized)
agagggcccctcggcacctgcctggcacaagtgcagcaggccggaggaggtgactcggacaaactatcatgcagccttaagaaaagaatgccggagggcccttggcctgcagatgcaccc

SEQ ID NO: 800170 - DNA, 120 bp, Artificial Sequence
  ENSG00000286075_5 (sequence is synthesized)
tcctggatgaataagcctgtggttgatggaaattcacaaagtgaggcattatcactggaaatgagaaaggatccgagcggggctggcctctggcttcacagtggcggcccagtgcttcca

SEQ ID NO: 800171 - DNA, 120 bp, Artificial Sequence
  ENSG00000286075_6 (sequence is synthesized)
tatgtgagagaatcagtaagaagaaatccagcctcagcagccactccgagcacagccgtgggtttgttccctgctccaacagagtgttttgctcgggtgtcctgcagtggtgttgaagct

SEQ ID NO: 800172 - DNA, 120 bp, Artificial Sequence
  ENSG00000286075_7 (sequence is synthesized)
ctggggcggcgagactggctgggaggagggcccagggccactgacggccacagaggacagtgccccaaaggagagcctcgggtgtcacgactgccacgccatcaaaaagtgccggaaatg

SEQ ID NO: 800173 - DNA, 120 bp, Artificial Sequence
  ENSG00000286075_8 (sequence is synthesized)
ggaagttttcaggatgacccaccaagtgcttttcccaagggtctgggctctgagttggaacccgcttgcctgcactccatcctgtctgcaacgctgcacgtgtatcccgaagtgctcctg

SEQ ID NO: 800174 - DNA, 120 bp, Artificial Sequence
  ENSG00000286075_9 (sequence is synthesized)
aagcaaacaatagaattcaagaaaatgcttaaaagcacctcagatggtctgcagataacactggggttactggctctgcaaccttttgaattagcaaatacattatgccatagttaaggt

SEQ ID NO: 800175 - DNA, 120 bp, Artificial Sequence
  ENSG00000286075_10 (sequence is synthesized)
acaagcagaacaataccaatagattaattttaagagttgtcttagaatgatttctttcgcattaagtctggatgcaaactgtgcagcccttaggttcctgctgtagttttgtacgacctg

SEQ ID NO: 800176 - DNA, 120 bp, Artificial Sequence
  ENSG00000286075_11 (sequence is synthesized)
gcagacttaaagtaaattgagtttaaattcaaagccagttgatgcggaaggaacttttttggcatgtgttaaattgtgctttaaaagacatataaagaattgggaaacatttcaggagac

SEQ ID NO: 800177 - DNA, 120 bp, Artificial Sequence
  ENSG00000286075_12 (sequence is synthesized)
gatcatagcctgtataaataccagattagaacatacggatttaccatgaagttctgtcttcaacatccattctaaagggctactgtcccaaatcctgtgtgtccttttgacttgtctgat

SEQ ID NO: 800178 - DNA, 120 bp, Artificial Sequence
  ENSG00000286075_13 (sequence is synthesized)
cacccaatggaagtggatacttgtaaagtctacaccactgtacttggcgttaaatcttgctgaattcgtggtaagctgttaccatgtctacattttgtagaatgattttggtctgcagca

SEQ ID NO: 800179 - DNA, 120 bp, Artificial Sequence
  ENSG00000286075_14 (sequence is synthesized)
aaattcgatttcacttctcatacccctttccttccacttgaaatgcaatttagacagaggccctgtggtgaaagttgcaatattaagtttacctttagaagatcccttctcaaactcaga

SEQ ID NO: 800180 - DNA, 120 bp, Artificial Sequence
  ENSG00000286075_15 (sequence is synthesized)
accctagcagtgttaccttaaacaaaaatgagctcgagaaaaaagtagctcagttacagagaagcaaatcgagttatttcccacataaaaagtttcccagattctaagaattgcagtatc

SEQ ID NO: 800181 - DNA, 120 bp, Artificial Sequence
  ENSG00000286075_16 (sequence is synthesized)
ctgtaccctaaaatttttcaaggtgactcctgttgtcgtctgttgataactttaataaaggtcatttaaggacataagtttttaaagactcccaaagtgaaacttaaacattttcgggat

SEQ ID NO: 800182 - DNA, 120 bp, Artificial Sequence
  ENSG00000286075_17 (sequence is synthesized)
tatcgattgcatatatcagtttatgctgtgtgctgaattactatgccatgtgctattttagtgtttggggaaaatgaaaaataaaatttgttctttagcttaataaatatgtcttatttt

SEQ ID NO: 800183 - DNA, 120 bp, Artificial Sequence; identical to SEQ ID NO: 565986
  ENSG00000286079_0 (sequence is synthesized)

SEQ ID NO: 800184 - DNA, 120 bp, Artificial Sequence
  ENSG00000286094_0 (sequence is synthesized)
atggacacccgctccgggagccagtgttccgtcaccccagaagccatacgcaacaatgaagagctggtcttgccgccccgcatctccagagtgaacggctggtcgttacccctgcactac

SEQ ID NO: 800185 - DNA, 120 bp, Artificial Sequence
  ENSG00000286094_1 (sequence is synthesized)
ttccgggtggtgacttgggctgtcttcgttggcctttccttggccaccttcaggatcttcattcccctcctgcctcactcgtggaaatacatcgcctatgtggtgaccggggggatcttc

SEQ ID NO: 800186 - DNA, 120 bp, Artificial Sequence
  ENSG00000286094_2 (sequence is synthesized)
tcgttccacctcgtcgtccacctgatcgcgtcctgcatcgacccggccgactccaatgtcagactcatgaagaactattctcagcccatgcccctcttcgacagatcaaaacatgcacac

SEQ ID NO: 800187 - DNA, 120 bp, Artificial Sequence
  ENSG00000286094_3 (sequence is synthesized)
gtgatccagaatcagttctgccacctgtgcaaggtcaccgtgaacaagaaaaccaaacactgcatttcctgcaataagtgtgtgtccggcttcgaccaccactgcaaatggatcaacaac

SEQ ID NO: 800188 - DNA, 120 bp, Artificial Sequence
  ENSG00000286094_4 (sequence is synthesized)
actgtggcctcggccacagctggcatgctctgcctgatcgccatcctgctgtatgtcctcgtccagtacctcgtgaaccccagggtgctccgcacggaccccaggtatgaagatgtcaag

SEQ ID NO: 800189 - DNA, 120 bp, Artificial Sequence
  ENSG00000286094_5 (sequence is synthesized)
aatatgaacacgtggctgctgttcctccccctgttcccggtgcaggtgcagactctgatagtcgtgatcatcaggatgctcgtgctcctgctggaccttcttggcttggtgcagctgggc

SEQ ID NO: 800190 - DNA, 120 bp, Artificial Sequence
  ENSG00000286094_6 (sequence is synthesized)
cagctgctcatcttccacatctacctgaaggccaagaagatgaccacctttgagtatctcattaatacccgcaaagaagagagttcaaaacatcaagcagtgaggaaagatccatacgtg

SEQ ID NO: 800191 - DNA, 120 bp, Artificial Sequence
  ENSG00000286094_7 (sequence is synthesized)
caaatggacaaaggatttctccagcaaggagctggcgccctgggctcatctgcacagggagtcaaggccaagagctccctgctgatttacaaatgcccatgtcacttctgcacttcagta

SEQ ID NO: 800192 - DNA, 120 bp, Artificial Sequence
  ENSG00000286094_8 (sequence is synthesized)
aaccaggacggggattcgaaggcacaggaagcagatgatgccccgagtacatctacacttgggctgcaacaagaaacaacagagcccatgaaaactgacagtgctgaaagtgaagactga

SEQ ID NO: 800193 - DNA, 120 bp, Artificial Sequence
  ENSG00000286094_9 (sequence is synthesized)
atctacctgagtatgtcccccaccctaagcccccgatccccccaagcctggttggtcagagctgctcatcttacacctctacttgagtatgtccctaaccctgagccccccacacctggg

SEQ ID NO: 800194 - DNA, 120 bp, Artificial Sequence
  ENSG00000286094_10 (sequence is synthesized)
gccagagtctttgtcccccgtgtgcgcatgtgttcagggtcagcctctcccagaagtgagatcatggacaaaaagggcaaatcacaggaagaaattaaatccatgagggcccagcaggcc

SEQ ID NO: 800195 - DNA, 120 bp, Artificial Sequence
  ENSG00000286094_11 (sequence is synthesized)
cagcaagaagctgaactcacgctgagacctgcaggagcgctgccgggtgcttgaagtaacaagtttaaaatgttcagagaaaatggaatggaatctattaggcaagaacaggacattatg

SEQ ID NO: 800196 - DNA, 120 bp, Artificial Sequence
  ENSG00000286094_12 (sequence is synthesized)
ggtggtcttgcttggtctcacagtgggcacagcggtaggcggtcagtcatgttgctgaacgacggagggtaaactccccagccccaaggaaacctgtgttggaagtaacaacaacctccc

SEQ ID NO: 800197 - DNA, 120 bp, Artificial Sequence
  ENSG00000286094_13 (sequence is synthesized)
tgctcctggcaccagccgttttggtcatggtgggccagctgcaaagcgtcttccattctctgggcagtggtggccccgaggctgtggcctctcagggggtttctgtggacacgggcagca

SEQ ID NO: 800198 - DNA, 120 bp, Artificial Sequence
  ENSG00000286094_14 (sequence is synthesized)
gagtgtgtccaggccagcccccaagaatgccctgctcctgacagcttggccaacgcctagtcagggcagaggggatcgggtgggtcaggctctgggctcacctccatctccagagcatcc

SEQ ID NO: 800199 - DNA, 120 bp, Artificial Sequence
  ENSG00000286094_15 (sequence is synthesized)
cctgcctgcagttgtggcaagaacgcccagctcagaatgaacacaccccaccaagagcctccttgttcataaccacaggttaccctacaaaccactgtccccacacaaccctggggatgt

SEQ ID NO: 800200 - DNA, 120 bp, Artificial Sequence
  ENSG00000286094_16 (sequence is synthesized)
tttaaaacacacacctctaacgcacatcttacagtcactgttgtcttgcctgagggttgaattttttttaatgaaagtgcaatgaaaatcactggattaaatcctacggacacagagctg

SEQ ID NO: 800201 - DNA, 120 bp, Artificial Sequence
  ENSG00000286095_0 (sequence is synthesized)
atgtctaaagcagctcctgccaaaaagccagtggctgtggccccagctcctggatgtaccctggacatcaatgacccacaggtccagagtgcggccattcgtatccaggcctcttaccgg

SEQ ID NO: 800202 - DNA, 120 bp, Artificial Sequence
  ENSG00000286095_1 (sequence is synthesized)
ggccacaggtcccggaaggagctgcgcgagaaggggccgccgcgggtgctggagccgctgaaggacgtggtgctgatcgaaggcagcgcggccaagctcacttgccgcatttcggctttc

SEQ ID NO: 800203 - DNA, 120 bp, Artificial Sequence
  ENSG00000286095_2 (sequence is synthesized)
ccggacccattcatccgctggagtaaggacggcaaggagctacgtgacggtcccaagtaccgctacgtcttcgaggaccctgacgtggtggcactggtggtgcgcgacggcgagctggca

SEQ ID NO: 800204 - DNA, 120 bp, Artificial Sequence
  ENSG00000286095_3 (sequence is synthesized)
gggacccgacaacactaaggcgcgcaaaggcaccaccgtgacgctgactgcggagatcctgggagagcctgcgcccgacgtaggctggaccaaggacggggaggacatcgaggaggatga

SEQ ID NO: 800205 - DNA, 120 bp, Artificial Sequence
  ENSG00000286095_4 (sequence is synthesized)
cagggtgttcttcgagatcggcagcaccaccacgacgctgaccattcgccgggccacgcctcaggacagcggcaagtacgaggtgtacgtggagaacagcctgggcatggaccagagctt

SEQ ID NO: 800206 - DNA, 120 bp, Artificial Sequence
  ENSG00000286095_5 (sequence is synthesized)
cgctcgcgtcgacgtggcctgaacggcacccccggaccttccgccctggcgccgagcccgggggtggtgggacccacagccctccaccagcttgcttaataaagctgctctctgaccctc

SEQ ID NO: 800207 - DNA, 120 bp, Artificial Sequence
  ENSG00000286102_0 (sequence is synthesized)
gcccgtgggcccaggcgcgtagtgcgtacagagccagcgaggtgctgcggcgcgtcacgggccgccggcgggacccggggccgcaatccaatgggccgggccaggaagacgcccgagccc

SEQ ID NO: 800208 - DNA, 120 bp, Artificial Sequence
  ENSG00000286102_1 (sequence is synthesized)
caatgggccgggccaggaagacgcccgagccccgggccggctggctcgcctgctcggccagctccgggccgaagcggcttcgcggtccgaggtgccgcggctgctgaagctggtggagcg

SEQ ID NO: 800209 - DNA, 120 bp, Artificial Sequence
  ENSG00000286102_2 (sequence is synthesized)
gaggtcagcgagcggcggctgcaggagggactcgcggcagtgcgcgaggagctgggcgccgagattgaggcgctgcgcgcggagcttcgagcggagctggacgctctgcgcgcgctgctg

SEQ ID NO: 800210 - DNA, 80 bp, Artificial Sequence
  ENSG00000286102_3 (sequence is synthesized)
gcgccacgccccgcggcccgaccctgctgcggacgctcggcaccgtgagcgccctggtcgccgcctccaggcccgcagac

SEQ ID NO: 800211 - DNA, 120 bp, Artificial Sequence
  ENSG00000286102_4 (sequence is synthesized)
aggcccgcagacgacgccccggacggcccagcagaatgcggagcgcaccgagccccggtcaggaagaaccacaagaagatgccagtgccgcctggggccccgcaaggtggcggggactga

SEQ ID NO: 800212 - DNA, 120 bp, Artificial Sequence
  ENSG00000286105_0 (sequence is synthesized)
ggggaaggcggagcttggacgagccgagaggcggggctcaaagttcctacccgcgagagggaagaagcagcttccacactagcatatttacctgtctgtctccagtgccaagctcagccc

SEQ ID NO: 800213 - DNA, 120 bp, Artificial Sequence
  ENSG00000286105_1 (sequence is synthesized)
ccagcacctgtagatacacaatagatgtctgctgagaggtgctctggtaaaacaagtataaaatgaatgtcaggatgttctccctcatggtgggcatcttctctgtccttaataccaccc

SEQ ID NO: 800214 - DNA, 120 bp, Artificial Sequence
  ENSG00000286105_2 (sequence is synthesized)
agttcttcatctttgacctgaaccagaagacacacatttgctatgaggccaagttcagcatctacgtggactcaaagtcggagctagtcacttggaccctgttccacagggctaatatca

SEQ ID NO: 800215 - DNA, 120 bp, Artificial Sequence
  ENSG00000286105_3 (sequence is synthesized)
gcactggcctctccctcaccaccatcatcatcggctgcttcctcttttattgtatccacaagaatatctacatggggctgctgatctatgccatgtggatcatcacttacgagctcatca

SEQ ID NO: 800216 - DNA, 120 bp, Artificial Sequence; identical to SEQ ID NO: 586985
  ENSG00000286105_4 (sequence is synthesized)

SEQ ID NO: 800217 - DNA, 120 bp, Artificial Sequence; identical to SEQ ID NO: 586986
  ENSG00000286105_5 (sequence is synthesized)

SEQ ID NO: 800218 - DNA, 120 bp, Artificial Sequence; identical to SEQ ID NO: 586987
  ENSG00000286105_6 (sequence is synthesized)

SEQ ID NO: 800219 - DNA, 120 bp, Artificial Sequence; identical to SEQ ID NO: 586988
  ENSG00000286105_7 (sequence is synthesized)

SEQ ID NO: 800220 - DNA, 120 bp, Artificial Sequence
  ENSG00000286106_0 (sequence is synthesized)
gccaaacttccggcggcggctgaggcggcggccgaggagcggcggactcggggcgcggggagtcgaggcatttgcacctgggcttcggagcgtagcgccagggcctgagcctttgaagca

SEQ ID NO: 800221 - DNA, 120 bp, Artificial Sequence
  ENSG00000286106_1 (sequence is synthesized)
ggaggaggggaggagagagtggggctcctctatcgggaccccctccccatgtggatctgcccaggcggcggcggcggcggcggcggaggaggaggaggaggcgaccgagaagatgcccgc

SEQ ID NO: 800222 - DNA, 120 bp, Artificial Sequence
  ENSG00000286106_2 (sequence is synthesized)
cctgcgtcccgctctgctgtgggcgctgctggcgctctggctgtgctgggcggcccccgcgcatgcattgcagtgtcgagatggctatgaaccctgtgtaaataaaggaatgtgtgttac

SEQ ID NO: 800223 - DNA, 120 bp, Artificial Sequence
  ENSG00000286106_3 (sequence is synthesized)
ctaccacagtggcacaggatactgcaaatgtccagaaggcttcttgggggaatattgtcaacatcgagacccctgtgagaagaaccgctgccagaatggtgggacttgtgtggcccaggc

SEQ ID NO: 800224 - DNA, 120 bp, Artificial Sequence
  ENSG00000286106_4 (sequence is synthesized)
tcagggtttacaggagaggactgccagtactcgacacctcatccatgctttgtgtctcgaccttgcctgaatggcggcacatgccatatgctcagccgggatacctatgagtgcacctgt

SEQ ID NO: 800225 - DNA, 120 bp, Artificial Sequence
  ENSG00000286106_5 (sequence is synthesized)
caagtcgggtttacaggtaaggagtgccaatggaccgatgcctgcctgtctcatctctgtgcaaatggaagtacctgtaccactgtggccaaccagttctcctgcaaatgcctcacaggc

SEQ ID NO: 800226 - DNA, 120 bp, Artificial Sequence
  ENSG00000286106_6 (sequence is synthesized)
ttcacagggcagaagtgtgagactgatgtcaatgagtgtgacattccaggacactgccagcatggtggcacctgcctcaacctgcctggttcctaccagtgccagtgccttcagggcttc

SEQ ID NO: 800227 - DNA, 120 bp, Artificial Sequence
  ENSG00000286106_7 (sequence is synthesized)
acaggccagtactgtgacagactgtatgtgccctgtgcacactcgccttgtgtcaatggaggcacctgtcggcagactggtgacttcacttttgagtgcaactgccttccagaaacagtg

SEQ ID NO: 800228 - DNA, 120 bp, Artificial Sequence
  ENSG00000286106_8 (sequence is synthesized)
agaaataagaggaacagagctctgggaaagagacaggcaagtctggaatggaaaagaacacgatgagaattagacactggaaaatatgtatgtgtggttaataaagtgctttaaactgaa

SEQ ID NO: 800229 - DNA, 120 bp, Artificial Sequence
  ENSG00000286131_0 (sequence is synthesized)
gtcctccttctgcttttacttctcctgcatgacagttgttttcttcatctgagcagacaccagcttcagatgctcgaggtgagaaacatgcctttcagtttgggctactggtttacttaa

SEQ ID NO: 800230 - DNA, 120 bp, Artificial Sequence
  ENSG00000286135_0 (sequence is synthesized)
actcctgaggttggtgccaggccctgctgaggatgaggctgtccagagccttcgcttggccgctgctgtgcagtatagccacaactgttaaagctccatttgccacagcacccagtgact

SEQ ID NO: 800231 - DNA, 120 bp, Artificial Sequence
  ENSG00000286135_1 (sequence is synthesized)
gtgggggccactacacagatgaatatggcaggatcttcaactacgctgggccgaaaactgaatgcgtctggatcatcgagttgaaccccggggagatagtcacggtggccattccagacc

SEQ ID NO: 800232 - DNA, 120 bp, Artificial Sequence
  ENSG00000286135_2 (sequence is synthesized)
tcaaaggattcgcatgtggcaaagaatacgtggaagtgctggatggacctccagggtctgagtccttggacaggatttgtaaagccttcagtacattctattactcttcttccaacatca

SEQ ID NO: 800233 - DNA, 120 bp, Artificial Sequence
  ENSG00000286135_3 (sequence is synthesized)
atattactttgttgacgcttggtcaacacattaataggaagatcgggggaagaggcacctgctgatgctcccctgctctgcctgagcctggttctgcatatgttggacagaggctatacc

SEQ ID NO: 800234 - DNA, 120 bp, Artificial Sequence
  ENSG00000286135_4 (sequence is synthesized)
tgggactgcagaaataagattgagtcatagttctcctggatcagcattgggtgagggagagggaatgtgaccctgtgacccttccagaaaaaggtacgggttctgtctcagcatttctgt

SEQ ID NO: 800235 - DNA, 120 bp, Artificial Sequence
  ENSG00000286135_5 (sequence is synthesized)
acacccacatctttagtgttagaagatcatatgtgaaaactttatctttcctgtcttcttgatatagaagtgggtatctctgagaagccatctttctctctattgatcttattatatgcc

SEQ ID NO: 800236 - DNA, 120 bp, Artificial Sequence
  ENSG00000286135_6 (sequence is synthesized)
tgccctgtagcattttctagtgtatttctgcaaagtgagtagtatatgaactatatactataaggaatgtataatacacatattctatatgaatatataatcctagaaaatatatataaa

SEQ ID NO: 800237 - DNA, 71 bp, Artificial Sequence; identical to SEQ ID NO: 800118
  ENSG00000286137_0 (sequence is synthesized)

SEQ ID NO: 800238 - DNA, 63 bp, Artificial Sequence; identical to SEQ ID NO: 800119
  ENSG00000286137_1 (sequence is synthesized)

SEQ ID NO: 800239 - DNA, 120 bp, Artificial Sequence; identical to SEQ ID NO: 800120
  ENSG00000286137_2 (sequence is synthesized)

SEQ ID NO: 800240 - DNA, 120 bp, Artificial Sequence; identical to SEQ ID NO: 800121
  ENSG00000286137_3 (sequence is synthesized)

SEQ ID NO: 800241 - DNA, 120 bp, Artificial Sequence; identical to SEQ ID NO: 800122
  ENSG00000286137_4 (sequence is synthesized)

SEQ ID NO: 800242 - DNA, 120 bp, Artificial Sequence
  ENSG00000286140_0 (sequence is synthesized)
ggaaagggtggccgagcgcgggcggaggacggagaagggggcggcgagggccggaatctcgagcttgttttcacttgctttttaaagacagaaagctcatggtgcaaattgttatttcca

SEQ ID NO: 800243 - DNA, 120 bp, Artificial Sequence
  ENSG00000286140_1 (sequence is synthesized)
gggaatccctgtgctgatcgtggggcatcatatcctgtatgggaaaatcatccacctggagaaaccttttgcagtccttgtcaaacacactcctggggatcaggactgtgatgagcttgg

SEQ ID NO: 800244 - DNA, 120 bp, Artificial Sequence
  ENSG00000286140_2 (sequence is synthesized)
ccgcgagactggcacccggtacctggtgacagcactcatcaaagacaagatccttttcaaaacccgccccaagcccattatcaccagcgtccccaagaaagtatgaaagaacctcggatt

SEQ ID NO: 800245 - DNA, 120 bp, Artificial Sequence
  ENSG00000286140_3 (sequence is synthesized)
ttccctagagagcggccaactccttggactcgtgctccgctgccacctcgaggacggctcgacggttccctgggaccacaggggggtcctgttctgaacacaggccacccactgggtgtg

SEQ ID NO: 800246 - DNA, 120 bp, Artificial Sequence; identical to SEQ ID NO: 554416
  ENSG00000286140_4 (sequence is synthesized)

SEQ ID NO: 800247 - DNA, 120 bp, Artificial Sequence; identical to SEQ ID NO: 554417
  ENSG00000286140_5 (sequence is synthesized)

SEQ ID NO: 800248 - DNA, 120 bp, Artificial Sequence; identical to SEQ ID NO: 554418
  ENSG00000286140_6 (sequence is synthesized)

SEQ ID NO: 800249 - DNA, 120 bp, Artificial Sequence; identical to SEQ ID NO: 554419
  ENSG00000286140_7 (sequence is synthesized)

SEQ ID NO: 800250 - DNA, 120 bp, Artificial Sequence
  ENSG00000286140_8 (sequence is synthesized)
ccaggaccaaaccccaatctgagatcaggctttttagggacaaaccctgcccccaggtcaggtgtgtttccaggcccaggccttgggcccaacccaagaccaagtggcctgggcccaggc

SEQ ID NO: 800251 - DNA, 120 bp, Artificial Sequence
  ENSG00000286140_9 (sequence is synthesized)
cctaatctagatgccagagcaggtggcctcttgggcacaggatctggtcttaacttaagaatggctggacctcaaggcctcgatcttgcccccattctaagagcagcaggtcttttagga

SEQ ID NO: 800252 - DNA, 120 bp, Artificial Sequence
  ENSG00000286140_10 (sequence is synthesized)
gcaaattcagcttctttctcacaggcttctggaaacatgggcacaagcccatcctccatggcaagagtacctggccccatgggcccaaactcgggtcctagctctcggggaattggcctt

SEQ ID NO: 800253 - DNA, 120 bp, Artificial Sequence; identical to SEQ ID NO: 554423
  ENSG00000286140_11 (sequence is synthesized)

SEQ ID NO: 800254 - DNA, 120 bp, Artificial Sequence; identical to SEQ ID NO: 554424
  ENSG00000286140_12 (sequence is synthesized)

SEQ ID NO: 800255 - DNA, 120 bp, Artificial Sequence; identical to SEQ ID NO: 554425
  ENSG00000286140_13 (sequence is synthesized)

SEQ ID NO: 800256 - DNA, 120 bp, Artificial Sequence; identical to SEQ ID NO: 554426
  ENSG00000286140_14 (sequence is synthesized)

SEQ ID NO: 800257 - DNA, 120 bp, Artificial Sequence; identical to SEQ ID NO: 554427
  ENSG00000286140_15 (sequence is synthesized)

SEQ ID NO: 800258 - DNA, 120 bp, Artificial Sequence; identical to SEQ ID NO: 554428
  ENSG00000286140_16 (sequence is synthesized)

SEQ ID NO: 800259 - DNA, 120 bp, Artificial Sequence; identical to SEQ ID NO: 554429
  ENSG00000286140_17 (sequence is synthesized)

SEQ ID NO: 800260 - DNA, 120 bp, Artificial Sequence; identical to SEQ ID NO: 554430
  ENSG00000286140_18 (sequence is synthesized)

SEQ ID NO: 800261 - DNA, 120 bp, Artificial Sequence; identical to SEQ ID NO: 554431
  ENSG00000286140_19 (sequence is synthesized)

SEQ ID NO: 800262 - DNA, 120 bp, Artificial Sequence; identical to SEQ ID NO: 554432
  ENSG00000286140_20 (sequence is synthesized)

SEQ ID NO: 800263 - DNA, 120 bp, Artificial Sequence; identical to SEQ ID NO: 554433
  ENSG00000286140_21 (sequence is synthesized)

SEQ ID NO: 800264 - DNA, 120 bp, Artificial Sequence; identical to SEQ ID NO: 554434
  ENSG00000286140_22 (sequence is synthesized)

SEQ ID NO: 800265 - DNA, 80 bp, Artificial Sequence
  ENSG00000286175_0 (sequence is synthesized)
atggcgacgcccggccgcccgtgggcccaggcgcgtagtgcgtacagagccagcgaggtgctgcggcgcgtcacgggccg

SEQ ID NO: 800266 - DNA, 120 bp, Artificial Sequence
  ENSG00000286175_1 (sequence is synthesized)
caatgggccgggccgggaagacgcccgagccccgggccggctggctcgcctgctccgccagctccgggccgaagcggcttcgcggtccgaggtgccgcggctgctgaagctggtggagcg

SEQ ID NO: 800267 - DNA, 120 bp, Artificial Sequence; identical to SEQ ID NO: 800209
  ENSG00000286175_2 (sequence is synthesized)

SEQ ID NO: 800268 - DNA, 80 bp, Artificial Sequence
  ENSG00000286175_3 (sequence is synthesized)
cgcgccccgcggcccgaccctgctgcggacgctcggcaccgtgagcgccctggtcgccgcctccaggcccgcagacgacg

SEQ ID NO: 800269 - DNA, 120 bp, Artificial Sequence
  ENSG00000286175_4 (sequence is synthesized)
aggcccgcagacgacgccccggacggcccagcagaatgcggagcgcaccgagccccggccaggaagaaccacaagaagatgccagtgccgcctggggccccgcaaggtggcggggactga

SEQ ID NO: 800270 - DNA, 120 bp, Artificial Sequence
  ENSG00000286190_0 (sequence is synthesized)
ggctgggggcggaaggaggagccaggcgaagcggcgcctcagctgagaggaccggcggaccctgcagaggccccctgcccctctggctccgcccccacccgggtcgctagaaatacagcc

SEQ ID NO: 800271 - DNA, 120 bp, Artificial Sequence
  ENSG00000286190_1 (sequence is synthesized)
gtagccccgcccaccgcccactgcgctctgacccagacccggctgacccacctacccgcgatcctgcccatggctgacgggctctttcggcgcagaccctggggtctcgagcagattcgc

SEQ ID NO: 800272 - DNA, 120 bp, Artificial Sequence
  ENSG00000286190_2 (sequence is synthesized)
ccggaccccgagtccgaaggcctgtttgacaagcctcccccggaagaccctcccgctgcccgcgggcccaggtcggcgtcggccgcgggcaagaaggctggtcggcgcgcgggcgggagg

SEQ ID NO: 800273 - DNA, 120 bp, Artificial Sequence
  ENSG00000286190_3 (sequence is synthesized)
gcgcaggggggccgcgccgggcagcccccgaaggccgcatcgcgccccccgcccaagaaggaggcgcctccactggacgagggctgctatctcgaccattttccgcacctctccatcttc

SEQ ID NO: 800274 - DNA, 120 bp, Artificial Sequence
  ENSG00000286190_4 (sequence is synthesized)
atctacgcagccatcgccttctccatcacctcctgcatctttacctatatccatttacagcttgcctgagtggccagcgcgggacggggtgggcgcaggaccgagcggggagggaaaggg

SEQ ID NO: 800275 - DNA, 120 bp, Artificial Sequence
  ENSG00000286190_5 (sequence is synthesized)
aaaacggggctcggcattttgtgttttagaacagcgctgcacccccttcatgtagctttcgatgcttgtttctttccgtctttgttgtcactatctttgtctatcagtacgaaagtacaa

SEQ ID NO: 800276 - DNA, 120 bp, Artificial Sequence
  ENSG00000286190_6 (sequence is synthesized)
ttttggggtgtgattgagccccgtttataattagaatgcccctggacccctaccactctgtgacgtgggggcacgcgcagggatcccatcattttgtgtttggggagctcagagtgcgcc

SEQ ID NO: 800277 - DNA, 120 bp, Artificial Sequence
  ENSG00000286190_7 (sequence is synthesized)
caatcttggaatctttaagggatgagccagacccagacccgcggccttctagagagggtccggcagggagggtcggcgccctggcccggggtgggccggagccctgtgatgctgcatcgc

SEQ ID NO: 800278 - DNA, 120 bp, Artificial Sequence
  ENSG00000286190_8 (sequence is synthesized)
ccccaggaggagccagctgtgccccagagttggcgcggccgagagaggacaagagcgcgcagcaggcgaagctggagggcgggactcgactttgttgtcgctgcccggaggagtcgagac

SEQ ID NO: 800279 - DNA, 120 bp, Artificial Sequence
  ENSG00000286190_9 (sequence is synthesized)
tggtacccggaggagctgtctcaccaggagaccacgtcctggaagtgtccgggactcgcgggacctgtggctgcagaccccgccggcacgcaggcccagagctggcgcactcctgaggat

SEQ ID NO: 800280 - DNA, 120 bp, Artificial Sequence
  ENSG00000286190_10 (sequence is synthesized)
gagactctgggggccctagccggggtccacgggagggctgtccttggggactctaggatggcttcgttctggcccggctcacttctggagctgtgagacccaagacaaaaggggctgagg

SEQ ID NO: 800281 - DNA, 120 bp, Artificial Sequence
  ENSG00000286190_11 (sequence is synthesized)
gatttctcattgacaagagttcgtgcgggaaaaccacctgatccctagggatttgtcatcttaagactcaaaaggcttaataccaggaaccaccttggcaagatatttacccaccggcca

SEQ ID NO: 800282 - DNA, 120 bp, Artificial Sequence
  ENSG00000286190_12 (sequence is synthesized)
tctctgtttactcatgaatgttaaatgttaaaacgcagcgctctaaccctgcatattatttacttgcaaatgtctgtaatctgtaattgtgatgcctctgatggaataaattatcttttt

SEQ ID NO: 800283 - DNA, 120 bp, Artificial Sequence
  ENSG00000286219_0 (sequence is synthesized)
agacatgtgggttctttcaaacatactggacttcctccttaggttttagttgtgttagtcaatagttgaatgttgaaggagaggatgccaagggatattaaagaagttgtccagtgtaca

SEQ ID NO: 800284 - DNA, 120 bp, Artificial Sequence
  ENSG00000286219_1 (sequence is synthesized)
gaagcttactggaaggagtggccaactagttaaaggtttgacacctcaatatcaacaaaatgccaagtggatcattttgactctcacagcaatccaactggacatttgaccatgccccgt

SEQ ID NO: 800285 - DNA, 120 bp, Artificial Sequence
  ENSG00000286219_2 (sequence is synthesized)
ggtcagtggagagcttcttctctgaaggccacttttgtctagcacatcaaggctatacacctctttcactaagaagaatttggcacttttatgttgtgagagctgagattcaccattctc

SEQ ID NO: 800286 - DNA, 120 bp, Artificial Sequence
  ENSG00000286219_3 (sequence is synthesized)
caccatcctgagaagagctttgatagaagggctactcctgagcattgcagtgtcgagatggctatgaaccctgtgtaaatgaaggaatgtgtgttacctaccacaatggcacaggatact

SEQ ID NO: 800287 - DNA, 120 bp, Artificial Sequence
  ENSG00000286219_4 (sequence is synthesized)
gcaaatgtccagaaggcttcttgggggaatattgtcaacatcgagacccctgtgagaagaaccgctgccagaatggtgggacttgtgtggcccaggccatgctggggaaagccacgtgcc

SEQ ID NO: 800288 - DNA, 120 bp, Artificial Sequence
  ENSG00000286219_5 (sequence is synthesized)
gatgtgcctcagggtttacaggagaggactgccagtactcgacatctcatccatgctttgtgtctcgaccttgcctgaatggcggcacatgccatatgctcagccgggatacctatgagt

SEQ ID NO: 800289 - DNA, 120 bp, Artificial Sequence; identical to SEQ ID NO: 800128
  ENSG00000286219_6 (sequence is synthesized)

SEQ ID NO: 800290 - DNA, 120 bp, Artificial Sequence
  ENSG00000286219_7 (sequence is synthesized)
tcacaggcttcacagggcagaagtgtgagactgatgtcaatgagtgtgacattccaggacactgccagcatggtggcacctgcctcaacctgcctggttcctaccagtgccagtgccttc

SEQ ID NO: 800291 - DNA, 120 bp, Artificial Sequence; identical to SEQ ID NO: 800130
  ENSG00000286219_8 (sequence is synthesized)

SEQ ID NO: 800292 - DNA, 120 bp, Artificial Sequence; identical to SEQ ID NO: 800131
  ENSG00000286219_9 (sequence is synthesized)

SEQ ID NO: 800293 - DNA, 120 bp, Artificial Sequence
  ENSG00000286219_10 (sequence is synthesized)
tgaattgacattaacagtaggtgatcaactttactatgtgcttgtgcttttgcttttgatggagtaattcattgttttcttatccacctaaatgcacccagctgcccttgattttctctg

SEQ ID NO: 800294 - DNA, 120 bp, Artificial Sequence
  ENSG00000286219_11 (sequence is synthesized)
ggctactggccttcacaaccctctcccatgtaccctctctgactttggggtaaccctcccctaacttaaagctagagaattctgaaactgaggaggggatcctctgttaatcagtgagca

SEQ ID NO: 800295 - DNA, 120 bp, Artificial Sequence
  ENSG00000286219_12 (sequence is synthesized)
ctttttgatgagctgatagatgatatatgagagactatgcgtggcacaatactttgttacactcttcactgatacaagtgttctagagtgcacacacaacccaaagatagaaataaaaag

SEQ ID NO: 800296 - DNA, 120 bp, Artificial Sequence
  ENSG00000286219_13 (sequence is synthesized)
aggagcagtgtcggggagcttggggcctggtgttccatggagagggagaaaggaacaagcttggccaattcattcaactccttataaaaatgatgaggaggctgaaaaccaagaattttg

SEQ ID NO: 800297 - DNA, 120 bp, Artificial Sequence
  ENSG00000286219_14 (sequence is synthesized)
attgggaacagaatacaagcagctgaagcagatgaattactaagcaacaaagatcctgtttttatacaaatatccttagtacaaaaacaaaagaaggaaaactgtaggggggagtaatgt

SEQ ID NO: 800298 - DNA, 120 bp, Artificial Sequence
  ENSG00000286219_15 (sequence is synthesized)
gctaagtaagcagaattgcctccaaaagaagttgttctagttactctttcagagtgggaatcttagattctggtattgtggatatggttcacatataatgggattgtgtgttttattttg

SEQ ID NO: 800299 - DNA, 120 bp, Artificial Sequence
  ENSG00000286219_16 (sequence is synthesized)
gaggaattaaaggtcatagtttggtcctcagtataaaatcaactggtaatttgttcatttcatttggtaaaaatgtattgactgcctgctatgttctaggcaccatgctgtgtatttgga

SEQ ID NO: 800300 - DNA, 120 bp, Artificial Sequence
  ENSG00000286219_17 (sequence is synthesized)
tggaatacagctatacaaagcattgtcacataattgaaatgaaaattttatattatttaagtcacaagaacaagctatttaattatattacttttagtttctcttttaataaagaataga

SEQ ID NO: 800301 - DNA, 120 bp, Artificial Sequence
  ENSG00000286219_18 (sequence is synthesized)
gctatcattctagatactaaataagtattttcttaacataatattactatccactttatcttgtagaagaaataactaaaatacatctgtcttcactcctgtatttgtttgcattttaag

SEQ ID NO: 800302 - DNA, 120 bp, Artificial Sequence
  ENSG00000286219_19 (sequence is synthesized)
gattaaagacagaaatagaaatgtaaacaactttattttgaaaatatttcaacactgcaaatatctctgggtctgatattctagtaatctaattggctagtaattgatgttagtgtgatt

SEQ ID NO: 800303 - DNA, 120 bp, Artificial Sequence
  ENSG00000286219_20 (sequence is synthesized)
aaaggaagtttttagctgagagagagtgattattcactcccatagcctctgcattgttatccattagccacgataagaaccttagggaattctgagagtgtgtccaggaaaggatctgtc

SEQ ID NO: 800304 - DNA, 120 bp, Artificial Sequence
  ENSG00000286219_21 (sequence is synthesized)
aaactagaatagtatctcctccttgagaaaggaaataaccaaggattccgcagctgagaggctgccagggctagtgaaatagagtaaggaaatcttggctgtctcttattctctggttgt

SEQ ID NO: 800305 - DNA, 120 bp, Artificial Sequence
  ENSG00000286219_22 (sequence is synthesized)
agtttaacgcaagacacttatttactcactgatggtgtgtgtgtgtgtgggaggggagattagcatgaggggtgggaatggggagatttgatgaagagaaaactaacatttttttggtga

SEQ ID NO: 800306 - DNA, 120 bp, Artificial Sequence
  ENSG00000286219_23 (sequence is synthesized)
ctcaggaactgtgccaggtacttccatgcttattagctcaattacacaaaaatcttgggaccaggtattatttttcaagtcttcccacatgaagtaactgaagtttggagatgttaagtg

SEQ ID NO: 800307 - DNA, 120 bp, Artificial Sequence
  ENSG00000286219_24 (sequence is synthesized)
attcacccaaagttgtacagctaatatgtggttaggctgggtcctgaaaccgaggcagtttattttcaaagcctttgctttgtgcatcttactgcgccacattgcactgcacatctgctt

SEQ ID NO: 800308 - DNA, 120 bp, Artificial Sequence
  ENSG00000286219_25 (sequence is synthesized)
cctgaaagcactttgtaggtgtgtaaaacttttcgttaaatgctttaagctgtttgggttaaaaatatatgttcatgttataagaaaaccaagacactcctaattataatcaaatagtac

SEQ ID NO: 800309 - DNA, 120 bp, Artificial Sequence
  ENSG00000286219_26 (sequence is synthesized)
tgtgtgtgtgtgtgtgtgtgtgtgtggtatatatatatatatcgcattgtgcagatgtttaaaagtagttacatagactagttcttgcttttcagggtcccataatctaaaccagatgac

SEQ ID NO: 800310 - DNA, 120 bp, Artificial Sequence; identical to SEQ ID NO: 309514
  ENSG00000286219_27 (sequence is synthesized)

SEQ ID NO: 800311 - DNA, 120 bp, Artificial Sequence
  ENSG00000286219_28 (sequence is synthesized)
gatttcatgctcattgttcgtatgtcccaggtggagttcagaaaatattcagttcatttccacaaagggaaatagtgcctagagatggttttcttttaaaaagtccttttcataatgcag

SEQ ID NO: 800312 - DNA, 120 bp, Artificial Sequence; identical to SEQ ID NO: 309516
  ENSG00000286219_29 (sequence is synthesized)

SEQ ID NO: 800313 - DNA, 120 bp, Artificial Sequence; identical to SEQ ID NO: 309517
  ENSG00000286219_30 (sequence is synthesized)

SEQ ID NO: 800314 - DNA, 120 bp, Artificial Sequence; identical to SEQ ID NO: 309518
  ENSG00000286219_31 (sequence is synthesized)

SEQ ID NO: 800315 - DNA, 120 bp, Artificial Sequence; identical to SEQ ID NO: 309519
  ENSG00000286219_32 (sequence is synthesized)

SEQ ID NO: 800316 - DNA, 120 bp, Artificial Sequence; identical to SEQ ID NO: 309520
  ENSG00000286219_33 (sequence is synthesized)

SEQ ID NO: 800317 - DNA, 120 bp, Artificial Sequence; identical to SEQ ID NO: 309521
  ENSG00000286219_34 (sequence is synthesized)

SEQ ID NO: 800318 - DNA, 120 bp, Artificial Sequence
  ENSG00000286219_35 (sequence is synthesized)
tgactatatttaaatggttaatttacaattttttccctgcaaaggatactgtagtcactgtgagtattttagtattactgtaggactcaagagggaattaaaactacaaaaatgacgcgt

SEQ ID NO: 800319 - DNA, 120 bp, Artificial Sequence
  ENSG00000286219_36 (sequence is synthesized)
cttgtatgacacagaaagaaatgtttcttcacagagggaggagaaaaatatcttcaagagagaactaatagaatcaaatcaatgaaccatgtctcatctttttggataagtaactgttag

SEQ ID NO: 800320 - DNA, 120 bp, Artificial Sequence; identical to SEQ ID NO: 309524
  ENSG00000286219_37 (sequence is synthesized)

SEQ ID NO: 800321 - DNA, 120 bp, Artificial Sequence; identical to SEQ ID NO: 309525
  ENSG00000286219_38 (sequence is synthesized)

SEQ ID NO: 800322 - DNA, 120 bp, Artificial Sequence; identical to SEQ ID NO: 309526
  ENSG00000286219_39 (sequence is synthesized)

SEQ ID NO: 800323 - DNA, 120 bp, Artificial Sequence
  ENSG00000286219_40 (sequence is synthesized)
aaagagctctctgatctttcctttccaaacaatgaaggtttatcctttgtaaactacctctgtactccacaggctgatgatatgtgatatccctatatcattaaagtaaagcctaagcac

SEQ ID NO: 800324 - DNA, 120 bp, Artificial Sequence
  ENSG00000286219_41 (sequence is synthesized)
cggcggctgaggcggcggccgaggagcggcggactcggggcgcggggagtcgaggcatttgcgcctgtgcttcggaccgtagcgccagggcctgagcctttgaagcaggaggaggggagg

SEQ ID NO: 800325 - DNA, 120 bp, Artificial Sequence
  ENSG00000286219_42 (sequence is synthesized)
agagagtggggctcctctatcgggaccccctccccatgtggatctgcccaggcggcggcggcggcggcggcggcggcggaggaggcggcgaccgagaagatgcccgccctgcgccgctct

SEQ ID NO: 800326 - DNA, 120 bp, Artificial Sequence
  ENSG00000286224_0 (sequence is synthesized)
cgcagcttgctcacttccgacagagaaaaacaaaaggtgacagttcgcattcggagaaaaagacggcgaagaggaagggctcggctgtcgatgcgtctgtccaggaggagagtccggtaa

SEQ ID NO: 800327 - DNA, 120 bp, Artificial Sequence; identical to SEQ ID NO: 787664
  ENSG00000286228_0 (sequence is synthesized)

SEQ ID NO: 800328 - DNA, 79 bp, Artificial Sequence; identical to SEQ ID NO: 787665
  ENSG00000286228_1 (sequence is synthesized)

SEQ ID NO: 800329 - DNA, 71 bp, Artificial Sequence; identical to SEQ ID NO: 787666
  ENSG00000286228_2 (sequence is synthesized)

SEQ ID NO: 800330 - DNA, 120 bp, Artificial Sequence; identical to SEQ ID NO: 787667
  ENSG00000286228_3 (sequence is synthesized)

SEQ ID NO: 800331 - DNA, 85 bp, Artificial Sequence; identical to SEQ ID NO: 787668
  ENSG00000286228_4 (sequence is synthesized)

SEQ ID NO: 800332 - DNA, 120 bp, Artificial Sequence; identical to SEQ ID NO: 787669
  ENSG00000286228_5 (sequence is synthesized)

SEQ ID NO: 800333 - DNA, 120 bp, Artificial Sequence; identical to SEQ ID NO: 787670
  ENSG00000286228_6 (sequence is synthesized)

SEQ ID NO: 800334 - DNA, 78 bp, Artificial Sequence; identical to SEQ ID NO: 787671
  ENSG00000286228_7 (sequence is synthesized)

SEQ ID NO: 800335 - DNA, 120 bp, Artificial Sequence; identical to SEQ ID NO: 787672
  ENSG00000286228_8 (sequence is synthesized)

SEQ ID NO: 800336 - DNA, 120 bp, Artificial Sequence; identical to SEQ ID NO: 787673
  ENSG00000286228_9 (sequence is synthesized)

SEQ ID NO: 800337 - DNA, 120 bp, Artificial Sequence
  ENSG00000286237_0 (sequence is synthesized)
agaggagagctgaggagaggagggggaggccgacgacctgggccctgggcctctgaaggtctggcgtattctgacaggacacagtgagcgtctgtagaggagaggcttgaaataaaggag

SEQ ID NO: 800338 - DNA, 120 bp, Artificial Sequence
  ENSG00000286237_1 (sequence is synthesized)
cacgaatattgcctggatttctggaggcctactttaaggctggccaattctgcaagaaaggcaaggaggaggagactggctcacagctctggaggacccccttctgtcagctgtggggct

SEQ ID NO: 800339 - DNA, 120 bp, Artificial Sequence
  ENSG00000286237_2 (sequence is synthesized)
tgacaccacttgaacaagaaaaggagggggaaactgcaccacatcagtgaagccgagtggtcctccagagcaaaggccagccttccttccagctgtctggccaaggagcttcaggatctt

SEQ ID NO: 800340 - DNA, 120 bp, Artificial Sequence
  ENSG00000286237_3 (sequence is synthesized)
ctagcaagcaccccagaggcagaagactgtcatccatggtacaggactgcggcgaacaagctgactgcgcagtcacgtggggctgacggtgggtcatgtgaccaggctctgcattaggcc

SEQ ID NO: 800341 - DNA, 120 bp, Artificial Sequence
  ENSG00000286237_4 (sequence is synthesized)
tgccgagaggagtgttttcttgcatccagaaaagacctgagaggcggacgacacctgtgctccgcagagcagaacgtgggaggaacggcgggatgttaaggtaggagctcaagaagcaga

SEQ ID NO: 800342 - DNA, 120 bp, Artificial Sequence
  ENSG00000286237_5 (sequence is synthesized)
gagtctacctgcccgacgcgttcgtggagaggagcagcggttgctgttggaggaggtctgtttctttctaggttcctgtagagatctgtatgtagctgttcacttggaagttaattaaga

SEQ ID NO: 800343 - DNA, 120 bp, Artificial Sequence
  ENSG00000286237_6 (sequence is synthesized)
aagaacaaaaactattcatttggattcaaggtccatctccactggtggctgtggtggctttggattgttggaagaccatcaccttcagcaggtctgcacttgggaacaatcattctcccc

SEQ ID NO: 800344 - DNA, 120 bp, Artificial Sequence
  ENSG00000286237_7 (sequence is synthesized)
cagcccgagcgtgcctctgccctctgtatcattgacagaggctgtatgtttggaaagagaactttgtgactgcagaactgacagttgactctaattcttgctaccaagtttttccccgac

SEQ ID NO: 800345 - DNA, 120 bp, Artificial Sequence
  ENSG00000286237_8 (sequence is synthesized)
ccagtgaaagagtgttaagacttcgacctaggacacattgagaaccaaggccaagactggacagggccatataactgggcttcaaccatggctgggactaagaataagacaagagcccag

SEQ ID NO: 800346 - DNA, 120 bp, Artificial Sequence
  ENSG00000286237_9 (sequence is synthesized)
gccaaaactgaaaaaaaggctgctatacaagctaaagctggagcagagagggaggctactggtgttgttaggcctgtagccaagaccagggccaaagcaaaagccaagacagggtctaag

SEQ ID NO: 800347 - DNA, 120 bp, Artificial Sequence
  ENSG00000286237_10 (sequence is synthesized)
acagatgcagtagcagagatgaaggcagtgtctaagaacaaggttgttgctgagacgaaggaaggagctctgtcagagcctaagactctgggcaaagccatgggagatttcactcccaag

SEQ ID NO: 800348 - DNA, 120 bp, Artificial Sequence
  ENSG00000286237_11 (sequence is synthesized)
gctgggaatgagtccaccagctccacatgtaaaaatgaggctggtactgatgcctggttctgggctggggaagaggccactatcaattcctggttctggaatggagaagaggctggtaat

SEQ ID NO: 800349 - DNA, 120 bp, Artificial Sequence
  ENSG00000286237_12 (sequence is synthesized)
agtttcagcactaagaatgataaacctgaaattggtgcccaggtctgtgctgaggagttggaacctgcggctggggccgattgcaaacctaggtcaggggctgaggaggaggaggaagag

SEQ ID NO: 800350 - DNA, 120 bp, Artificial Sequence
  ENSG00000286237_13 (sequence is synthesized)
aatgttattgggaactggttttgggaaggagatgatactagttttgaccctaatcctaaacctgtgagcaggatagttaagcctcagcctgtgtatgaaattaatgaaaaaaataggccc

SEQ ID NO: 800351 - DNA, 120 bp, Artificial Sequence
  ENSG00000286237_14 (sequence is synthesized)
aaggactggtctgaggtaactatctggcccaatgcccctgctgtaactccagctgtgttaggatttagatcccaggcaccatctgaggcaagccctccttcatatattgttctggcctcc

SEQ ID NO: 800352 - DNA, 120 bp, Artificial Sequence
  ENSG00000286237_15 (sequence is synthesized)
gctgaagaaaatgcctgttctttgcctgtggcaacagcttgccgcccttctaggaacactcgctcatgctcacagcctatccctgagtgtcgttttgattctgacccctgcatccagacc

SEQ ID NO: 800353 - DNA, 120 bp, Artificial Sequence
  ENSG00000286237_16 (sequence is synthesized)
atagatgagattagacgtcaaatcaggatcagggaggtaaatgggattaagccatttgcttgtccttgcaaaatggaatgctatatggattctgaggaatttgaaaaacttgttagctta

SEQ ID NO: 800354 - DNA, 120 bp, Artificial Sequence
  ENSG00000286237_17 (sequence is synthesized)
cttaagtcaactactgatcctcttattcataaaatagcacggattgcaatgggtgtccataatgttcacccatttgcccaagagtttattaacgaagtaggtgtagtgacacttattgaa

SEQ ID NO: 800355 - DNA, 120 bp, Artificial Sequence
  ENSG00000286237_18 (sequence is synthesized)
agcttgctcagttttccttcccctgaaatgagaaaaaagactgtaattactctgaatcctccttctggggatgaaagacaacgcaaaattgaattacatgttaagcatatgtgtaaagaa

SEQ ID NO: 800356 - DNA, 120 bp, Artificial Sequence
  ENSG00000286237_19 (sequence is synthesized)
accatgtcatttcctttgaactcaccgggacagcaatctggattaaagatactaggacaactgactactgattttgtccatcactacattgttgccaattacttttcagagcttttccat

SEQ ID NO: 800357 - DNA, 120 bp, Artificial Sequence
  ENSG00000286237_20 (sequence is synthesized)
ttgctgtcctcaggaaattgcaaaaccagaaatcttgttttgaaactacttttaaatatgtctgaaaatccaactgcagccagagacatgatcaatatgaaggcattggcagcattaaaa

SEQ ID NO: 800358 - DNA, 120 bp, Artificial Sequence
  ENSG00000286237_21 (sequence is synthesized)
ctcatctttaaccagaaagaggcaaaagccaatcttgttagtggtgtggccatatttattaacataaaggagcatatcagaaaaggctcaattgtagttgttgatcacttgagttataat

SEQ ID NO: 800359 - DNA, 120 bp, Artificial Sequence
  ENSG00000286237_22 (sequence is synthesized)
acactcatggccattttcagggaagttaaagagattattgaaacaatgtaaaatgagccagagatagaacattttaagccatcttcaaactctagcaggctgtacattacagtgtacaca

SEQ ID NO: 800360 - DNA, 120 bp, Artificial Sequence
  ENSG00000286237_23 (sequence is synthesized)
tttgggggtatcaaatgaatattataccttgggctgaaaatgtttgatttttatcttgtctagattggcatatttttaacattttacttaagatagcaaaccagttcgttttaagtaagc

SEQ ID NO: 800361 - DNA, 120 bp, Artificial Sequence
  ENSG00000286237_24 (sequence is synthesized)
taacttgttcattagtatctgtggcttaaaatggcaaaaaagaaaatatccttgagtttgtaatctagttacagaagtaaggcatacacacacacaaagataacagtacctagagagaga

SEQ ID NO: 800362 - DNA, 120 bp, Artificial Sequence
  ENSG00000286237_25 (sequence is synthesized)
gtgtgtgtgagtgtgcgtgtctctgtgtgtgcacgtgcacgctcatggccaaatgtgcgcactctacataaaggaggcaggagttcctataggctatttaatgtaagagaaactattttt

SEQ ID NO: 800363 - DNA, 120 bp, Artificial Sequence
  ENSG00000286237_26 (sequence is synthesized)
ctcctgttccagctgtatcagatactcgttccgcaacacagaaatgactcagaatctcagacaaaatgtattatttgttcaattttaattttgctactacattcataactcttaaattgt

SEQ ID NO: 800364 - DNA, 120 bp, Artificial Sequence
  ENSG00000286237_27 (sequence is synthesized)
taggctgtttcatttacatcaaagttatctcacaaaagagaaggcaggaaacgttttgtgagtgcctattctatgtcaaacactgtgttggcaccatattttacaagtttttttcctctt

SEQ ID NO: 800365 - DNA, 120 bp, Artificial Sequence
  ENSG00000286237_28 (sequence is synthesized)
ctcacagtgatcttgtgagttagttacttatatttttattagaactcattattctgggtaccctccaatgagaattagagaggttaaataccttttcctagattcccacagcaggaaggt

SEQ ID NO: 800366 - DNA, 120 bp, Artificial Sequence
  ENSG00000286237_29 (sequence is synthesized)
ggcatagctgttttgtctgacaccagaacccatctcaccacactgctttacagtcttcctgaaggacattttgaggtgggggggccttcaaagctcagagactggtttgaatggtttaat

SEQ ID NO: 800367 - DNA, 120 bp, Artificial Sequence
  ENSG00000286237_30 (sequence is synthesized)
tttgcaatggatcatgtccatgccaggtgttacaattcttaacttcctccaaattcgtgtgtccattagacatttggctacatctggctggaggtcaggagaaaattctgaggtaaatag

SEQ ID NO: 800368 - DNA, 120 bp, Artificial Sequence
  ENSG00000286237_31 (sequence is synthesized)
atggattttatctggcagtgtcgaaaatagtaggagcctaaaactttgttcaatgagtaagatgtagatttggagtcatcagcaggggaaacttgttagatgtcctttgtatctttttct

SEQ ID NO: 800369 - DNA, 120 bp, Artificial Sequence
  ENSG00000286237_32 (sequence is synthesized)
atccatttgtattttttctttcccaaagagctgaaatcattttataccctgaatttaaaaggtaattgcttttttcctccttgcgaaatcataccttaatttttttttttttttttttta

SEQ ID NO: 800370 - DNA, 120 bp, Artificial Sequence
  ENSG00000286237_33 (sequence is synthesized)
ccatttatgatttattctcctatgtgtcatatgaaaggccaaggggctttatcttttactagtaggcaagcctgggcatttctgcatttgtgccagctaacactacaaaatagacttaat

SEQ ID NO: 800371 - DNA, 120 bp, Artificial Sequence
  ENSG00000286237_34 (sequence is synthesized)
tagagaaatttagacccagaattgcagcttcaacaacacaaaacaggaaagctagaagaggttgctgtgtcaacctacaagatagtgattcttggaagttggtatggaccagaaagcatt

SEQ ID NO: 800372 - DNA, 120 bp, Artificial Sequence
  ENSG00000286237_35 (sequence is synthesized)
cccaggacatttaggctatggctgagttctctaagactcagggtgggaattataatccctggtctaagctgatatgaaagtttctatgtgtgaaaatatggagttatatgctttgagatt

SEQ ID NO: 800373 - DNA, 120 bp, Artificial Sequence
  ENSG00000286237_36 (sequence is synthesized)
ttctgccagttaaactaaaacaagatcatactgtaaatgtttgtaacttgcttccccccactgtatactgtaaacatctttgcatgtcaataaatatgcctctacaacatatttttgaat

SEQ ID NO: 800374 - DNA, 120 bp, Artificial Sequence
  ENSG00000286237_37 (sequence is synthesized)
cacttaatatttttcccatgttaacagttggtatatagtgttgtaaacctttattgcatattctcataacatacaatatacacattcttttgcaaaaatgggaacacagtattgagactt

SEQ ID NO: 800375 - DNA, 120 bp, Artificial Sequence
  ENSG00000286237_38 (sequence is synthesized)
gccttttcctcttaacacttatcttttcaatttagtattatatagatctgtcacatgctttttatctaataactttatagaaatataattgccatacattaagctgcatgttgaaagtat

SEQ ID NO: 800376 - DNA, 120 bp, Artificial Sequence
  ENSG00000286237_39 (sequence is synthesized)
gaaagtatacagtgtgatcagttttggaatgtatatacacacaaaaccataaccacaatcaaaattgtaaatacattcatcacccaccaaagctactttttttttgagacagagtcttgc

SEQ ID NO: 800377 - DNA, 79 bp, Artificial Sequence
  ENSG00000286237_40 (sequence is synthesized)
cctctgcttcccaggttcaagtgattctcgtgcctatccgactaatttttttttttattttttgtatttttagtagaga

SEQ ID NO: 800378 - DNA, 120 bp, Artificial Sequence
  ENSG00000286237_41 (sequence is synthesized)
aggcgtgagccaccatgcccagcctcccccaaagcttcttaatgcccttttgtaatccctccctcccctctctccctgtgcccctaacccaggcaaccatgggacattttctgacaaaat

SEQ ID NO: 800379 - DNA, 120 bp, Artificial Sequence
  ENSG00000286237_42 (sequence is synthesized)
gacaaaatagaattgttttcatttcctgtaattgtgtataaatggactcatatagcatgtactctttggtcgggaggggatctggcttatttcacttagtgtaattatttgagattcatc

SEQ ID NO: 800380 - DNA, 120 bp, Artificial Sequence
  ENSG00000286237_43 (sequence is synthesized)
catatcatgtgtctcactatttcattgctttttattgccaagtagtattccaccatatggctttaccacagtttatttatccattcacttattgatggacatttgggctgttcagagttt

SEQ ID NO: 800381 - DNA, 120 bp, Artificial Sequence
  ENSG00000286237_44 (sequence is synthesized)
ggccattataagtaaagcagctatgagcatttgtgtacaagtgtttttatggacataggctttcatatctttggaatgacatctaacaatattgaatcttcgacccatgaataaaatctc

SEQ ID NO: 800382 - DNA, 120 bp, Artificial Sequence; identical to SEQ ID NO: 593236
  ENSG00000286264_0 (sequence is synthesized)

SEQ ID NO: 800383 - DNA, 120 bp, Artificial Sequence
  ENSG00000286264_1 (sequence is synthesized)
cgggtcctgacagtactgtccatctgcctgagcgccgtggccacggccacgggggccgagggcaaaaggaagctgcagatcggggtcaagaagcgggtggaccactgtcccatcaaatcg

SEQ ID NO: 800384 - DNA, 120 bp, Artificial Sequence
  ENSG00000286264_2 (sequence is synthesized)
aagctggaagatgggacagagtttgacagcagcctgccccagaaccagccctttgtcttctcccttggcacaggccaggtcatcaagggctgggaccaggggctgctggggatgtgtgag

SEQ ID NO: 800385 - DNA, 120 bp, Artificial Sequence
  ENSG00000286264_3 (sequence is synthesized)
ggggaaaagcgcaagctggtgatcccatccgagctagggtatggagagcggggagctcccccaaagattccaggtggtgcaaccctggtgttcgaggtggagctgctcaaaatagagcga

SEQ ID NO: 800386 - DNA, 120 bp, Artificial Sequence
  ENSG00000286264_4 (sequence is synthesized)
gtggagctgctcaaaatagagcgacgaactgagctgtaaccagactggggaggggcagggggagaggcccccatcagggaccagactgttccaaaaaaaaaacaaaaaacaaaaacaaac

SEQ ID NO: 800387 - DNA, 120 bp, Artificial Sequence
  ENSG00000286264_5 (sequence is synthesized)
ccacagcccgggctggggggagccggggtgcaagagggcaggctggatcaggccgggcagaagcggaccgggctccgagtgtcaacgagagctaggtgacgaggaaattgggggtggggg

SEQ ID NO: 800388 - DNA, 120 bp, Artificial Sequence
  ENSG00000286264_6 (sequence is synthesized)
ccggagctgtccggagatgccgcagggggagggttctcacgccgcacggggcggagtcctgggactcggggcgggacgtggaaccgggacgggtgggacctccgagctggtgccagtgga

SEQ ID NO: 800389 - DNA, 120 bp, Artificial Sequence
  ENSG00000286264_7 (sequence is synthesized)
aggcggagcccggcggcggggggcggagctaggagggtcgggggacggagcctggctcttgaaggaggagctggaggaggtgaaaggcggagcctcggggtcggaagcagagggggacgg

SEQ ID NO: 800390 - DNA, 120 bp, Artificial Sequence
  ENSG00000286264_8 (sequence is synthesized)
agcggaggcgctgggggcggggcttcagccggtgagtggcgtggctacggctccggaaaaggggtctagttctgtcgaaggcggggctgcaggcccgggggcggtaccgcgtcctccgaa

SEQ ID NO: 800391 - DNA, 120 bp, Artificial Sequence
  ENSG00000286264_9 (sequence is synthesized)
gggcggtgccaaggagccaagtgaggagcctggcccgagtaatggccccgggcgtcctcgcgggggtggtctccgtggtggccgggcttggggacgccgtaggccgagaactccaccggg

SEQ ID NO: 800392 - DNA, 120 bp, Artificial Sequence
  ENSG00000286264_10 (sequence is synthesized)
agaggtggtgtgggtggagcgggctcggcggccagcagacacagggccagtctgggtgccccggagacccccaagggctcagagttggggcggcgccccgggcggaagcacagggccagg

SEQ ID NO: 800393 - DNA, 120 bp, Artificial Sequence
  ENSG00000286264_11 (sequence is synthesized)
ggggatgtgtgggtgcctcggggccggccccctgcagcggccgcagaggtgttggtgtgctggaccgggggcagctgggtgtggcgtgagtggggccgcccagtcggggcaactgcagtg

SEQ ID NO: 800394 - DNA, 120 bp, Artificial Sequence
  ENSG00000286265_0 (sequence is synthesized)
ggggcgggccaatggctgtgacggataaggggtgtggggtgcggggacaatgggccagagcttctcatgcagcctgcaccagcgccgggtcggagagtcagaggccaccctgagatggac

SEQ ID NO: 800395 - DNA, 120 bp, Artificial Sequence
  ENSG00000286265_1 (sequence is synthesized)
gcataccgcctgcccgcaattcggccaggcctcgagcctgctccgccttcccgctgcggtagcgccgccggggaaacgccgccacgggctgcatgggcagcgctcgcgccccgccgctga

SEQ ID NO: 800396 - DNA, 120 bp, Artificial Sequence
  ENSG00000286265_2 (sequence is synthesized)
ccgtccagtcttcgaatcccagtaagagacgccgctggcctagggacagtggttggggctggcccggggcattcgcgcggccttgcagcctgcaggccttcccagccgacagagctgctg

SEQ ID NO: 800397 - DNA, 120 bp, Artificial Sequence
  ENSG00000282221_0 (sequence is synthesized)
agaaccagtccgaccagcttggcgctgggacgcctccccgcgctgtgccgcggcccggggtgccgaggagctgggctgggggcggggacccctgccgggaacccgacttagcccggagac

SEQ ID NO: 800398 - DNA, 120 bp, Artificial Sequence
  ENSG00000282221_1 (sequence is synthesized)
gctcaagagcaagaagccgagcggaaaagttagcgcaggttgtggaaatcatatgagttccctgctagtgacattggagtgcacagatgaatatcgacaaggctccagggagttctgaac

SEQ ID NO: 800399 - DNA, 120 bp, Artificial Sequence
  ENSG00000282221_2 (sequence is synthesized)
ctggatcctctgacccggggcctgacactgtcagggaagctgctgtctccctagggacctactgaatgttcttcccatggctggtcagtgctgacacctcaacacaggaagagaaatact

SEQ ID NO: 800400 - DNA, 120 bp, Artificial Sequence
  ENSG00000282221_3 (sequence is synthesized)
cctatgaagtcatctgaagcctggtcatgccagggacacttcacgaaggcaggaacagtcctgtttctaaaagcccaaaatctaacagcctctctacagatataaaagcccaaagacatg

SEQ ID NO: 800401 - DNA, 120 bp, Artificial Sequence
  ENSG00000215866_0 (sequence is synthesized)
taatcaggcagcccagcggtcccttcaaaccgaggcagggaagctctacgtcttgggggccgcatggtgccgagagcgcagaccagacccgccccgcctctccgtgccacgcacgcgctc

SEQ ID NO: 800402 - DNA, 81 bp, Artificial Sequence
  ENSG00000215866_1 (sequence is synthesized)
gaccagacccgccccgcctctccgtgccacgcacgcgctcggctccgcgcttaatgcaacgcgaatgaaatttggtgccat

SEQ ID NO: 800403 - DNA, 120 bp, Artificial Sequence
  ENSG00000215866_2 (sequence is synthesized)
aacatctcaccaattttaaatcggatcttctcagcttagcggctgaagactgatgctgccagatgactttggaagccccctggaccatcacagatgcccagctttggataactcttacag

SEQ ID NO: 800404 - DNA, 66 bp, Artificial Sequence
  ENSG00000215866_3 (sequence is synthesized)
gcccagctttggataactcttacagtggaggacaggaatgcatccagatggcctgaagtaactgaa

SEQ ID NO: 800405 - DNA, 74 bp, Artificial Sequence
  ENSG00000215866_4 (sequence is synthesized)
cactcctgcctaacagagaacaatcccctttgactgtaatttattcactgactctttttggactcagcccacct

SEQ ID NO: 800406 - DNA, 120 bp, Artificial Sequence
  ENSG00000215866_5 (sequence is synthesized)
tttctttggaggcagaaattgggcataaaacaatatgagggatggtctcctcccttactgtctttcaggagatccaagaactctcttggggtctggattgggacctctttcagtaacagt

SEQ ID NO: 800407 - DNA, 120 bp, Artificial Sequence
  ENSG00000215866_6 (sequence is synthesized)
gggtctggattgggacctctttcagtaacagtattctaggattgattctggaacttaaaaaggatgttaggggaaaagctgatccatggtttagtgtcaggcctctgagcccaagccatc

SEQ ID NO: 800408 - DNA, 61 bp, Artificial Sequence
  ENSG00000215866_7 (sequence is synthesized)
ctgagcaccttgtgacccccgcccctgcctaccagagaacaacctcctttgactgtaattt

SEQ ID NO: 800409 - DNA, 120 bp, Artificial Sequence
  ENSG00000215866_8 (sequence is synthesized)
ggaagctctacgtcttgggggccgcatggtgccgagagcgcagaccagacccgccccgcctctccgtgccacgcacgcgctcggctccgcgcttaatgaagcagtatctgactgtgttgc

SEQ ID NO: 800410 - DNA, 120 bp, Artificial Sequence
  ENSG00000215866_9 (sequence is synthesized)
tttggtagggttttcccctgggactctggcccatgactctggaggggtggcactttcttgactcaggtgtgatgagtccatcccctttccgctgtatgaacagtagtcttggtggttaac

SEQ ID NO: 800411 - DNA, 120 bp, Artificial Sequence
  ENSG00000215866_10 (sequence is synthesized)
ttggtggttaacagcacaagatagggtcattcccaggctgactcgagttttccttctttccaccctttggtaagaacatgatcttcaggctggtgctgttttactggaaattctaggggt

SEQ ID NO: 800412 - DNA, 120 bp, Artificial Sequence
  ENSG00000215866_11 (sequence is synthesized)
atttacaaaatgttcatggcagggcccacttcacagggctgtgaggattacagaggataatctgggtgaggcgcatcagccccagcgccgcctgccacaattctatccggccccacatat

SEQ ID NO: 800413 - DNA, 120 bp, Artificial Sequence
  ENSG00000215866_12 (sequence is synthesized)
gcatcgtccataagcgtccggcccctgcattctcgcttttccacgtggccgaggtgcacaccccaacccactgggccagtctccccgccctcttacctgctcttctttcccgactcgtct

SEQ ID NO: 800414 - DNA, 120 bp, Artificial Sequence
  ENSG00000215866_13 (sequence is synthesized)
ttaatacccaccaggagccagtcgccgcgggcctggctctgtggtggcaagttgcatgggttctcccatcaggacctcccgatgagcctacgaggtcggttctattactgtcgccacttc

SEQ ID NO: 800415 - DNA, 120 bp, Artificial Sequence
  ENSG00000215866_14 (sequence is synthesized)
agagggaggaaacaggcccgcagggttggggaacttcccgaggtcactgaactggtgtcaggcccagattggaatccaaacacatcccagcccatgcccggctccccagcgccggctccc

SEQ ID NO: 800416 - DNA, 120 bp, Artificial Sequence
  ENSG00000215866_15 (sequence is synthesized)
aggcgtcttcccgggtgccagcggcacccgcatccattcaaatgctgcccagtccccgctcctcagtcgcttccctctactacgcgcccgcatctccccccgacccctcagggtcaggcc

SEQ ID NO: 800417 - DNA, 120 bp, Artificial Sequence
  ENSG00000215866_16 (sequence is synthesized)
tctcggtggcttttcctttttctcttccagaaactaaggggtgagaccgacgtttgtgtgccggacgcgtgcaggtggcggcgacgctcccgggagacgcggggggagaaccagtctgtg

SEQ ID NO: 800418 - DNA, 120 bp, Artificial Sequence
  ENSG00000261604_0 (sequence is synthesized)
tgaaacatttctctaaaactttatttcaaagttattcacctcaccgttaataaggtgtatgattaatgctctgtgccagtatttgcaggcctgcccattgccggcaatggactttgagaa

SEQ ID NO: 800419 - DNA, 120 bp, Artificial Sequence
  ENSG00000261604_1 (sequence is synthesized)
aacccatttcctggcacccaaaagttaaattactcttttcaaaacataccgatctccccaacacttgcaaaagtattacatgcaccattttgccaccattctttaaatcagaacttacat

SEQ ID NO: 800420 - DNA, 120 bp, Artificial Sequence
  ENSG00000261604_2 (sequence is synthesized)
acttttgtcactgctggcctggacttaacattccagattccagagccagtgttttattgtcccagctcttttcttcctctttaggatttatcaattttagaaaaagggcatgtttgtttt

SEQ ID NO: 800421 - DNA, 120 bp, Artificial Sequence
  ENSG00000261604_3 (sequence is synthesized)
gctattttcaaagggtttgtgcgtatcacattttaccacattttaccccaattttaccacactggggaatgttgtcacattccccaagctagaaatgttttccaaaaaccacaggtactt

SEQ ID NO: 800422 - DNA, 120 bp, Artificial Sequence
  ENSG00000261604_4 (sequence is synthesized)
tctgtaatcttgttgttcaaagtacaaaattcttacatgttaaaaaattttttaattggagattagtacctctgctttcttctgacagaagtacacaattcattataccatgtttaaaaa

SEQ ID NO: 800423 - DNA, 120 bp, Artificial Sequence
  ENSG00000261604_5 (sequence is synthesized)
aggagacttacgaaatgcatttcagaactgtctgcccaggtgatgaaaagagtaatcagttatccactagcaactttccacctaggtcaaggatggccccatgggcacctaactcccctg

SEQ ID NO: 800424 - DNA, 120 bp, Artificial Sequence
  ENSG00000261604_6 (sequence is synthesized)
cacctttgggctgtgcaattgggagtaccaaacaagttctgcagacattccacgtcagggaggctgaagtgaaaggtatacagctagaatccaaagagaggtactatcatattctctgag

SEQ ID NO: 800425 - DNA, 120 bp, Artificial Sequence
  ENSG00000261604_7 (sequence is synthesized)
aacctggtcaaagacttcatggaattagttaccacagcagtgactggagtagaaggcagggcagagaagatctgaagtggggcccaacatttctgatgcgtagatcaaaggcttaaggct

SEQ ID NO: 800426 - DNA, 120 bp, Artificial Sequence
  ENSG00000261604_8 (sequence is synthesized)
ggaataaactcagcatgtttgaggaatgcaagagaagggagagtgggtgaagacatactaagccttggtgagtatggtactgagttgaagcaggaagagatcagatcccacaggagtctg

SEQ ID NO: 800427 - DNA, 120 bp, Artificial Sequence
  ENSG00000261604_9 (sequence is synthesized)
caaggctgaataaggaatatacatagaatgaatagtgcttactactgaataaagtagtccaggaaagacattctttttaatattaaaagataaagccccaatatataacccatctgagga

SEQ ID NO: 800428 - DNA, 120 bp, Artificial Sequence
  ENSG00000261604_10 (sequence is synthesized)
tttctaatcataatcttcagcatcaaattactgcctttataacatagtttggggagatgaaaacaaaaatcacagatcaactattttctcccactaccagcaaagaaaaaatgaggaacc

SEQ ID NO: 800429 - DNA, 120 bp, Artificial Sequence
  ENSG00000261604_11 (sequence is synthesized)
tatgacttaagagcagttgctagaaattttaaagaaagggttcacttttatgtcaagatcagacaactttaaattatttaaagatcctgttacccttgctctgttgactgccacttcagt

SEQ ID NO: 800430 - DNA, 120 bp, Artificial Sequence
  ENSG00000261604_12 (sequence is synthesized)
gtttctttcaggacactccaaacagcagacaagagataaagtgtttcaactgtgtcacaagaggacagaaagtggctgtttgcatctgtttgggtctagtgtcaacctcaaagttactca

SEQ ID NO: 800431 - DNA, 120 bp, Artificial Sequence
  ENSG00000261604_13 (sequence is synthesized)
agattgaattcttaaagccatactaaataatatcctacaatgtgcaagcagaagtgaccttagagaacgctagcctctaaatgacccagaaagtaaattatgactaagtatgaaagccag

SEQ ID NO: 800432 - DNA, 120 bp, Artificial Sequence
  ENSG00000261604_14 (sequence is synthesized)
acatgacatgatgataaaatatgagctgatcagtattagaaaatatataatttggtttatttcctaattcatagaatcctaagacttgatggtgctcttagggatcatctaatccaaaat

SEQ ID NO: 800433 - DNA, 120 bp, Artificial Sequence
  ENSG00000261604_15 (sequence is synthesized)
tactgccaatgcagggattccttctataaaacccctggggatcactagcaacatgggacttttaggttggagactctagctggtagtgggcagttctacgttcaccactaaatttgctct

SEQ ID NO: 800434 - DNA, 120 bp, Artificial Sequence
  ENSG00000261604_16 (sequence is synthesized)
tatttgattgccagcccttagtcttagcttttttaaggaaaacagtaactcatttcataaatatttatagcaaagtctatatatgcttgccacgcaatttgagagttaatttctttgttt

SEQ ID NO: 800435 - DNA, 120 bp, Artificial Sequence
  ENSG00000261604_17 (sequence is synthesized)
caagtgtaggaataattatcagtgtaaattcctccattctagatgaacagctccttaaagacaagaccatatatcttgtacattttcaaatttctgccttaaacagagcaccttgcttat

SEQ ID NO: 800436 - DNA, 120 bp, Artificial Sequence
  ENSG00000261604_18 (sequence is synthesized)
attaggatttcaaatgtttgtgaaatgataaatgaatggaatgagtgaacgaactgaaatgaaattaatgcccatatttaaaaatagaatattagctgatttcttgccgaagttgttagt

SEQ ID NO: 800437 - DNA, 120 bp, Artificial Sequence
  ENSG00000261602_0 (sequence is synthesized)
gcaatgataaagaaaataaccttctgaaaatttgtatagatcagaaataaagtattttttgtggaagactatttttaagtattgaaggtactatttcctttcttgaattcatattgcaga

SEQ ID NO: 800438 - DNA, 120 bp, Artificial Sequence
  ENSG00000261602_1 (sequence is synthesized)
atttcctttcttgaattcatattgcagatgtacggtgtggatttattggtttatctctgcaaaccttaaagtagaagattgcaagggccaggtgtggtggatcacgcctgtaatcccagc

SEQ ID NO: 800439 - DNA, 120 bp, Artificial Sequence
  ENSG00000261602_2 (sequence is synthesized)
ttttaattaaaaaaaaagtagatgactgcagcaaagaagagatttattagctcttcctttcaaggtatctgtgtactgtatataaacaacaaaagctgaccaagagtggtacttgtgcta

SEQ ID NO: 800440 - DNA, 120 bp, Artificial Sequence
  ENSG00000261602_3 (sequence is synthesized)
ggcatattagtaactgctttgtaattgaaagcaagaaatatcataaacaagcattagatggctaactaccaaacaagttaagtcccttagggcaggtagattcagtcttttccttctctg

SEQ ID NO: 800441 - DNA, 120 bp, Artificial Sequence
  ENSG00000261600_0 (sequence is synthesized)
gtgtgtttttgcaactatgaagtgaatggtttcctggggaaaattgtgactttgtataactatttttgaaaccagaataaattatatttcacttgcatattcttaaattattaaaatttt

SEQ ID NO: 800442 - DNA, 120 bp, Artificial Sequence
  ENSG00000261600_1 (sequence is synthesized)
cagaagtcagtgatacagaaatactattttgcaatgttaatctgtttgagtctttggagaaagtggtttcattgtaggtacatgatgcactcttaatattttaaacaaatagttcactct

SEQ ID NO: 800443 - DNA, 120 bp, Artificial Sequence
  ENSG00000261600_2 (sequence is synthesized)
aaagcaattatgttgtcatgtgcctttaaccagctttagtaattactataatctcatatttatgatagttttgttaggtgacaggaccaaatgaaaatattttatgttttcccatcactt

SEQ ID NO: 800444 - DNA, 120 bp, Artificial Sequence
  ENSG00000261600_3 (sequence is synthesized)
catcactttagattttatcattgtgtaaattactgggtttttagcatttcctaatgtgaagttttaatcatttttaagtatacatattttttttctgtaccatttaaataaaatattttt

SEQ ID NO: 800445 - DNA, 120 bp, Artificial Sequence
  ENSG00000266469_0 (sequence is synthesized)
gccctgacggcgctcccgggagcagccggtgcgcggcggcggcacgaccccctgcgcctccgaggcagacgagcccatcgggagaaggcgaggcagggaagtgcctaaaccaacgggata

SEQ ID NO: 800446 - DNA, 120 bp, Artificial Sequence
  ENSG00000266469_1 (sequence is synthesized)
ggattcaaaactaggtgacaaactcatgagaaatccaacctggctgaatgtctgagaggctgctactgtatcaacatcacaagataaagcactctggtatcacctgcccatatcctcctt

SEQ ID NO: 800447 - DNA, 120 bp, Artificial Sequence
  ENSG00000266469_2 (sequence is synthesized)
agtgtcacccaagacatttgactctgatgtggttaattgataacttttcttgctccactttacaatgttttgtttcctacatcttattaccttgggacacaaaagtggcagagttgttga

SEQ ID NO: 800448 - DNA, 120 bp, Artificial Sequence
  ENSG00000266469_3 (sequence is synthesized)
gagaacactagaggaaatgagacaggaaagaaagccaaagctgattttccaactctatgctgactccaacctgcagaaaaagctgaatatagaaatcttcttccatatatgatgaagtca

SEQ ID NO: 800449 - DNA, 120 bp, Artificial Sequence
  ENSG00000266469_4 (sequence is synthesized)
ctccacttacgacataacacacaaaggaatcacctggctttttttttttaacccagaagagttgtgctggggaccatgccccatcccgctgatacagatcctgaatggaataatcaggaa

SEQ ID NO: 800450 - DNA, 120 bp, Artificial Sequence
  ENSG00000266469_5 (sequence is synthesized)
tggcacagtgcaggtgtcaatatcaaagtaaggccgcagaatttttgagaggaccctccaaatactgagaacttctgttgcactcgaaacagtctcctggatttctatatttttatgtga

SEQ ID NO: 800451 - DNA, 120 bp, Artificial Sequence
  ENSG00000266469_6 (sequence is synthesized)
agggctcttattgatgtcccccagaatccagactcagacctatttctccaaaaaggtccaattgggttgctacatagtagcaagggtttatcttcatgctcacctagcattccaggcccc

SEQ ID NO: 800452 - DNA, 120 bp, Artificial Sequence
  ENSG00000266469_7 (sequence is synthesized)
ccgcgggcaaacaggcacgcacctgcctgcacagaacctcagcctctgcccgcgcccgtcgcccctcgtcacttgttccccaggatcctgtacttttaatgtttttgcttgacttcagcc

SEQ ID NO: 800453 - DNA, 120 bp, Artificial Sequence
  ENSG00000266460_0 (sequence is synthesized)
agattgctccttcctctgctattcctgaaagtgcttgcactctcagggacctaagagtagaaggatccacgggaaggctgagaccgccaccgcgacattcgcatgtttggagagactgcc

SEQ ID NO: 800454 - DNA, 120 bp, Artificial Sequence
  ENSG00000266460_1 (sequence is synthesized)
tcacactcggatgcactaatgcagtgcacgacattctcagtggtgaaattttccacagctggggctgtaggaggacttatgttgtggtttaagagcttcctacagcccttgtaaacctat

SEQ ID NO: 800455 - DNA, 120 bp, Artificial Sequence
  ENSG00000266460_2 (sequence is synthesized)
aaaatgccaacgcttaatttaaagaagatgaggactctgatagacctaacagatgctgtgtccatcctgagataatgatgatgttcttggggatggaccccacatcaccccacatgacag

SEQ ID NO: 800456 - DNA, 120 bp, Artificial Sequence
  ENSG00000266460_3 (sequence is synthesized)
actcatgtaacagactcactctcccacctgtggccagggcatctaggtacttggattggcagcctcatcaggacctcatgaagagaagggaattatccccctaaaaaggggttctcttat

SEQ ID NO: 800457 - DNA, 120 bp, Artificial Sequence
  ENSG00000266466_0 (sequence is synthesized)
tgcctggccatggaacactctagcggaggagagcaaagtcctccccaaaccaaggccacaataactagcacggtgctctgcacatcatatgcactcagcacttgtgaaattgagttgaat

SEQ ID NO: 800458 - DNA, 120 bp, Artificial Sequence
  ENSG00000266466_1 (sequence is synthesized)
cagaaacaaaacgaggagcagaggtcaagtcctgcaaaagataaaccgtgctatctccgtgacaacaagcccaagttagcctgctagaggatgaaacactttgcggaagagaaccaaagt

SEQ ID NO: 800459 - DNA, 120 bp, Artificial Sequence
  ENSG00000266466_2 (sequence is synthesized)
tgcccagtccacaagccaactcactctcaacagcagagctgtctggtcaccagcagctgacccccttctcccatacacacacatgaagattgctataccttataaaggtacggcaggttt

SEQ ID NO: 800460 - DNA, 120 bp, Artificial Sequence
  ENSG00000266466_3 (sequence is synthesized)
tataggtatagcaattaatttatggcaggagcctgccataaattgctgacttgctcaatcatgagctaaataagttttgggatggctcattacacagtaacagctaactaacacacccag

SEQ ID NO: 800461 - DNA, 120 bp, Artificial Sequence
  ENSG00000266466_4 (sequence is synthesized)
acaggatgccaggattaacaacatgctgactacaagttagctggcacactatagggaccgtctaggtactgaattccttttccccttattagaagttgggtcccttgaattataaagaaa

SEQ ID NO: 800462 - DNA, 120 bp, Artificial Sequence
  ENSG00000266466_5 (sequence is synthesized)
tgcatgtagacatgtatgtgcttaaaactcacacagtatcacacaacacaggaggaaatagatgacagcctgaccactagggcaaaggccaaatagcaaggtaaggcatttgtctggaat

SEQ ID NO: 800463 - DNA, 120 bp, Artificial Sequence
  ENSG00000266466_6 (sequence is synthesized)
ctattccctccaaatctaaactctggaggtcaaggctgtggacaggacccacctcctgggaccccgctgtcctctgatctctggaggggagaatggccccaccaagcagcagatgggcag

SEQ ID NO: 800464 - DNA, 120 bp, Artificial Sequence
  ENSG00000266466_7 (sequence is synthesized)
cagtggcctacctgtggccacctcctgctggcagcccctgctctctcagggcactctctcttcctttgggactgagaagagatgtgggtagggagggggagctccctccctcctggcaga

SEQ ID NO: 800465 - DNA, 120 bp, Artificial Sequence
  ENSG00000262558_0 (sequence is synthesized)
gtgtggatccagagaccagaggccaaagagatgtgataaactatgtcagtgactggagccgaccctggtcagtccctggggcaggcatggcagcaagaggctggtttccacatgtgccca

SEQ ID NO: 800466 - DNA, 120 bp, Artificial Sequence
  ENSG00000262558_1 (sequence is synthesized)
gagtttgcttcatggaaaggccagctctgcgcaaaggtccaggggggaccagtcacgaaggtgtgaagaggcctgagtgtttgtcttccattcagctgagaaaggcagaacgccgccaca

SEQ ID NO: 800467 - DNA, 120 bp, Artificial Sequence
  ENSG00000262558_2 (sequence is synthesized)
ctgctgcacagacggcaccttctacacctttacactcctcacactgagctccagggtccggacagctgtgcacctgccacctttagcaaagcgaaggccaggggcccctgctggccttct

SEQ ID NO: 800468 - DNA, 120 bp, Artificial Sequence
  ENSG00000262558_3 (sequence is synthesized)
cgcccagtcttcctgggcaagagaaacagcccctccttccccttcttcctgggtgaatgtgatgaggatgaccaattagaatagccccacccccaaggcagggtaattggctcagggctg

SEQ ID NO: 800469 - DNA, 120 bp, Artificial Sequence
  ENSG00000262558_4 (sequence is synthesized)
ggcatgtgacccagacccagccatactgagtcctcctggggtcttgccagagttcctgtgcaataaacccactgtctgggacggtaagcacggcactagctcacgatggccagtagccac

SEQ ID NO: 800470 - DNA, 120 bp, Artificial Sequence
  ENSG00000262558_5 (sequence is synthesized)
ctggctcccccttgaaacggcctgtctgccggtgcagctaaacagagctgagagatgaaggcacagcatgagccctgatgtgcgctttctgctcctgctcctgctcctgccccttcggag

SEQ ID NO: 800471 - DNA, 120 bp, Artificial Sequence
  ENSG00000262558_6 (sequence is synthesized)
gcctgtgccagtggcagctgggcccggagacaccaggccggcactgctctctttcgaggcacccgtgtttgtgccgacgctgactcccggttgtctgcagcagccacgtggccgaaatgg

SEQ ID NO: 800472 - DNA, 120 bp, Artificial Sequence
  ENSG00000225102_0 (sequence is synthesized)
agtaacaagagagtcaaaacagtccctccctccagagctttgatcacacaacagttttgtaaccatgttctctcagaaagttccatagtccacccatctggaacaaaatagtgatttcca

SEQ ID NO: 800473 - DNA, 120 bp, Artificial Sequence
  ENSG00000225102_1 (sequence is synthesized)
acaacatgtttaacaacagacttcccaggcatgcttcaggagagaatgcgagaacataattttagaaccagaaggaaacttagagatgatgagaacttaacactggatttcacaggtgag

SEQ ID NO: 800474 - DNA, 120 bp, Artificial Sequence
  ENSG00000225102_2 (sequence is synthesized)
aaatggagaccctgactggagaactttcttgggtcacacaactagttatccactttcagcttggtcttctttcaatcttcatttgcctcctaaataaaagatctgctggctcggactcaa

SEQ ID NO: 800475 - DNA, 120 bp, Artificial Sequence
  ENSG00000225105_0 (sequence is synthesized)
acagttaaggaatctgaagatgaaaaagatgaggggacattcccaaagtcgcacagccctcaagccagtgcgaaaatgtggaccccgctgccttgtctggtgcccatttctggagagaga

SEQ ID NO: 800476 - DNA, 120 bp, Artificial Sequence
  ENSG00000225105_1 (sequence is synthesized)
tgcacgggttaagaatctcccttgttgtggatttcagaccttgagtgtacagctccccatctggactctcgtgaaggtcgtggtaaacaacacacagagcatctctttgtcacgggctca

SEQ ID NO: 800477 - DNA, 120 bp, Artificial Sequence
  ENSG00000225106_0 (sequence is synthesized)
ccataattctgaggcctcacagccatgtggaactgccccgtccaatcacgagaaagctccagggctttgtgacaagatgcagtcccaacatcctgtttcagtctaaccataacttgggtg

SEQ ID NO: 800478 - DNA, 120 bp, Artificial Sequence
  ENSG00000225106_1 (sequence is synthesized)
ttccgctccaaacacgacctctgtgtctgaacactcagcccactagcatttgtgattctgagtcctcagccgtggagaatcaggaggaaaacaggagttgtcactggtagagaaggaagc

SEQ ID NO: 800479 - DNA, 120 bp, Artificial Sequence
  ENSG00000225106_2 (sequence is synthesized)
ggggggtcattcagagaccccagttgttggggggacctgctttccaggagaagaaaggagcttcagaaccttcaatacctgctcctgtgccccaccaggctgtggcctctttcataagga

SEQ ID NO: 800480 - DNA, 120 bp, Artificial Sequence
  ENSG00000225106_3 (sequence is synthesized)
aagagcaataagtcttcaggagagaattaacatccaatggattcccagaaaacttttccctcgatgtaccagcaaacacctacaatgccctgaaaagccgcctctgcgaccccaatgcag

SEQ ID NO: 800481 - DNA, 120 bp, Artificial Sequence
  ENSG00000225106_4 (sequence is synthesized)
atcacacgtcctgtcccagcccctgcagcctccacgcggcgggtgcactgccaggcacgggaaggcagcgctggcgagtagaactggcccatctcgcagataggaagctgagcctcaggg

SEQ ID NO: 800482 - DNA, 120 bp, Artificial Sequence
  ENSG00000225106_5 (sequence is synthesized)
ggggcggtggtgtggtgtggggagcttctgacttgcacatcctgagggaaccttctgcagctgatgtgtgaactggaccccaggccgtgcctccgaggaatccccaaggctatggcccct

SEQ ID NO: 800483 - DNA, 120 bp, Artificial Sequence
  ENSG00000225106_6 (sequence is synthesized)
caggtcctgctggggtgttggcccccacctctgcctcagaatgcaggggttctgcagggaagccgcagaccagcctgctgccttgggccctagggacactgcagccccagaaagtactgt

SEQ ID NO: 800484 - DNA, 120 bp, Artificial Sequence
  ENSG00000225106_7 (sequence is synthesized)
gggggacaaaagagttgtttctcgggggagaaaacacctgtgaggaaatgcaggtgccacagagggaaatcctcctggggaggagggtacctgttccatcctcggccgacacgggactgc

SEQ ID NO: 800485 - DNA, 120 bp, Artificial Sequence
  ENSG00000225106_8 (sequence is synthesized)
ctggtgcctggtacccacagccgctacctgccgcacgcatctctccatggtttgctaattacttccattagttttaaacaaacttgacaagagacagaagggtccagagagaaattaaat

SEQ ID NO: 800486 - DNA, 120 bp, Artificial Sequence
  ENSG00000225107_0 (sequence is synthesized)
atgattttgaggcctccccagccatgtgggactacagggtctcactttgtcacccagcctggagtctagtagtgtgatgatagctcactgcagcctagacctgtccaggctcaagcagtc

SEQ ID NO: 800487 - DNA, 120 bp, Artificial Sequence
  ENSG00000225107_1 (sequence is synthesized)
agtcctcccacctcagccccatggagtagatgggattacaggaacctgaactctcagcaagaatgaacgtatagaaccatctcaaatttagcggctaaggactaggtccttggccagaac

SEQ ID NO: 800488 - DNA, 120 bp, Artificial Sequence
  ENSG00000225107_2 (sequence is synthesized)
ctactgaaggctctcaaaataggaggtccatagacacagagtcccatataacattacatcagaccaaggtcatgggattagccaatcaatcacatactgtaacccagaaactgtctgcct

SEQ ID NO: 800489 - DNA, 120 bp, Artificial Sequence
  ENSG00000225107_3 (sequence is synthesized)
gaattctccaatatatttaatgcatgggtccaagaaccagataaacataggagttatttcacttgtcattatatctcgtaacccattggaggaatctgtgtgcactatccctgtaactct

SEQ ID NO: 800490 - DNA, 120 bp, Artificial Sequence
  ENSG00000225107_4 (sequence is synthesized)
gagatttgtgagtttagagaacctgtttctcagaataagaatgctactattaggggacaaagaaagagtcccattaaactttaatctatgactgtcatccagttactttgagctccactt

SEQ ID NO: 800491 - DNA, 120 bp, Artificial Sequence
  ENSG00000225107_5 (sequence is synthesized)
gccaacagaccagtgatgaagaaaggaatcaccattctggcaagagtcatcgactctgatcatcaggaggtgatagagctgtattgctcagaggagtcaaggaaatatatgtgttttact

SEQ ID NO: 800492 - DNA, 120 bp, Artificial Sequence
  ENSG00000226455_0 (sequence is synthesized)
catcctgcctctgtggatggggaaggcagtctctctactgtcatctttaatcttagcacagttctcgcagtcctcgtgtgggcgctggcacgcagcatccttccggcacacaaacaggcc

SEQ ID NO: 800493 - DNA, 120 bp, Artificial Sequence
  ENSG00000226455_1 (sequence is synthesized)
tgcatgcgcaggaactcagcacagcggatgacctcgcggatgttttctctgctgagtaacagcttggcagtgtaggcaaactgtaacagcggcccaaagcccctggctgtgacctgcaaa

SEQ ID NO: 800494 - DNA, 120 bp, Artificial Sequence
  ENSG00000226455_2 (sequence is synthesized)
acaaacagggaaatcgccaacattaccatcagcactgctattgtcccgaatccctcaactgaagcaagataaccagacagtgctaatgtcccagaataaagactgcaaaggggcagttaa

SEQ ID NO: 800495 - DNA, 120 bp, Artificial Sequence
  ENSG00000226455_3 (sequence is synthesized)
gcctggttcctgatgttctgtggcaaggaatctggctccctgggaacagggcgaggaggagaactcacagagagggaggctgcagggtgagcccccgctcccgtcctccgcgtaggaata

SEQ ID NO: 800496 - DNA, 120 bp, Artificial Sequence
  ENSG00000226455_4 (sequence is synthesized)
agtggttcttgcaagcactgctgaccacacaggaaggtgacgcatgtctacaaatcctgtacaaatcaaatgaaagcagcaatcatggggtccttgctagaggctatggtagcagtgata

SEQ ID NO: 800497 - DNA, 120 bp, Artificial Sequence
  ENSG00000226455_5 (sequence is synthesized)
caaaattttagcggggggagtgagtgcacagcaaggtgaactggtaaactttgtagctgacttctgtgtgtattaaactcaccgcagcatacagagccaaaattcttgcaaggacctgta

SEQ ID NO: 800498 - DNA, 120 bp, Artificial Sequence
  ENSG00000226454_0 (sequence is synthesized)
ctggccctgggaagacccagctttgagcctcaggttgtgtctaatcatctctctgtccttgggccagtcaactcacctgttcgtgctgccacagagacagaggggccacatcagagagaa

SEQ ID NO: 800499 - DNA, 120 bp, Artificial Sequence
  ENSG00000226454_1 (sequence is synthesized)
tctgagatgggaccagtggaaaggtgtgcattttaagaaggatttgcttccccatcttgtgccttctgtgtcttgcagcacgacctggccctccacctaggaatcataccttcatccccc

SEQ ID NO: 800500 - DNA, 120 bp, Artificial Sequence
  ENSG00000226454_2 (sequence is synthesized)
atactcataagcatcctcattcctgtttccttgtggatgtcatggtctgctgtgaagtctgcttggtgacccgtccagacctgacttggtataaatgattttgttgcagagaataacaaa

SEQ ID NO: 800501 - DNA, 120 bp, Artificial Sequence
  ENSG00000226454_3 (sequence is synthesized)
tcatgcttcaaagagccagcagattcattctggtcagaactctgctttcagttcaagttcctgcacaaatctccacatgaaaagagagcagaaatccacccggatggtttttattctgat

SEQ ID NO: 800502 - DNA, 120 bp, Artificial Sequence
  ENSG00000226454_4 (sequence is synthesized)
gacttgtggtgggactgccaggttccatgacacggcttattctaagagggagggaagcgggtgtagacacccactttactgccctttactggtgtgaccttggcagagaagctttccttc

SEQ ID NO: 800503 - DNA, 120 bp, Artificial Sequence
  ENSG00000226454_5 (sequence is synthesized)
gtctagtcctgatgttgtagaaatggtgacagttccaagccatgcccaggctccttgaaagatctaggcccctcactggagggccctcagagctcaggcccagcctgcaggatcctgaat

SEQ ID NO: 800504 - DNA, 120 bp, Artificial Sequence
  ENSG00000226454_6 (sequence is synthesized)
attgagatggggaacagtgggttcattcattccagtgcacacttggccacactgtctcatgtcaaggtcatttgagccccagacccctgcccatctccacgtgccttggatctctagctg

SEQ ID NO: 800505 - DNA, 120 bp, Artificial Sequence
  ENSG00000226454_7 (sequence is synthesized)
gccagctggctaagccagccaagctgaggagacccatcctggggagtcacaggtgggaccccccaacccctgccaggaggcatgatcttaagacatggggggaagataggtgagacctgt

SEQ ID NO: 800506 - DNA, 120 bp, Artificial Sequence
  ENSG00000226454_8 (sequence is synthesized)
gtgaggcaaagtcccacagccaactccactgagtgccaccctagaggcccctgccctaggctacccagtgattatgaaagagctgctccctgtcaatcagggcctccaccccacgatgag

SEQ ID NO: 800507 - DNA, 120 bp, Artificial Sequence
  ENSG00000226454_9 (sequence is synthesized)
gggtagcggaaagggccagattctgtttcctcatcccacccaggcaagggaaggctttgtgtggcaacttcccaatttcatgttttaattttcaaaaaggaaataaattctctccagctg

SEQ ID NO: 800508 - DNA, 120 bp, Artificial Sequence
  ENSG00000229797_0 (sequence is synthesized)
gagccagcccagccctgccgaccgcagcactctcggaagggctcggccacccggagcctcgtcacgagtcttacccagggttcggagcgggcctgcaagaaggggcaggccaggctgggg

SEQ ID NO: 800509 - DNA, 120 bp, Artificial Sequence
  ENSG00000229797_1 (sequence is synthesized)
ctgcaaggcagggtcttcccttggagaagggacctgactctattattaagagaacgaaagaggcacttgccctacagtgtgtagagcatggcctctctcctggaatggcatcttatacat

SEQ ID NO: 800510 - DNA, 120 bp, Artificial Sequence
  ENSG00000229797_2 (sequence is synthesized)
ggatatttggactctcagaacagcggtctggattttcctctttgacctttgcttacatggggttcctcagaaagcagagtctcagataaaatatatatgctatatcttttgaagaacgca

SEQ ID NO: 800511 - DNA, 120 bp, Artificial Sequence
  ENSG00000229797_3 (sequence is synthesized)
gttccagggaagcaggagaaaagaaaaggagaatgagtcagacaagcaaggaaagcgaccggaattgtgccccaaagagctggcggctgcgtggtaggacatgcatactgtgtttaagct

SEQ ID NO: 800512 - DNA, 120 bp, Artificial Sequence
  ENSG00000229797_4 (sequence is synthesized)
cccatttcacctttcattttctgaaagacctgtgaactgccgcatctcacaggggaagaacccacagaacattaacatctccatttccaggctgcagaggtaccaagccagtggatcctc

SEQ ID NO: 800513 - DNA, 120 bp, Artificial Sequence
  ENSG00000229797_5 (sequence is synthesized)
tgcaggcctctctgaaactgcctggctggctcatgccctctcattctgtccagtcattgacggtggctacactgcattgatctgggaacacaatgtcatttcttccctgacggcgaagag

SEQ ID NO: 800514 - DNA, 120 bp, Artificial Sequence
  ENSG00000229797_6 (sequence is synthesized)
acaaatccagcaagccacagagcccctgtcacggagtggaaagcgatggtctctgaagagaatcaacaaggggagttaaaaaaagcagaaccaggctgggcacggtagctcacacctgta

SEQ ID NO: 800515 - DNA, 120 bp, Artificial Sequence
  ENSG00000229797_7 (sequence is synthesized)
atcccagcactttgagaggtcgaggtgggcggatctcctgtgctccaaagtttgggaccagactgggcaacacagggagaccccatctctactaaaaataataaaaaatacattcgtggg

SEQ ID NO: 800516 - DNA, 120 bp, Artificial Sequence
  ENSG00000229797_8 (sequence is synthesized)
attaagagaacgaaagaggcacttgccctacagtgttgtgtgcatagtggatgtgcagccagcattggctcatgtgtgaaggagcatacactcctggaaagtctgagcatgtccatacgc

SEQ ID NO: 800517 - DNA, 120 bp, Artificial Sequence
  ENSG00000229797_9 (sequence is synthesized)
gcctgccccaactgcccagagccctactggctgagcggatccctaatgtccttagttaagctctcaccctgcatgactgttttcctcagaagaaggcactagtggggacaccttttcctg

SEQ ID NO: 800518 - DNA, 120 bp, Artificial Sequence
  ENSG00000229797_10 (sequence is synthesized)
gggtctctatgcagggaatgggctggatgtgtacagacctggccaccatgcctttgggggctggtgtcacggccaggccatgactctaaagaatgaggggggctgggtgaggtggctcac

SEQ ID NO: 800519 - DNA, 120 bp, Artificial Sequence
  ENSG00000283573_0 (sequence is synthesized)
gacttgctttgccaatcttgttgcagctcatcaattcttggcagccccacccctcccagctgggcccaggacgcacagtaggtcctcagcgcacacccatgggactgagttggtgaatgt

SEQ ID NO: 800520 - DNA, 120 bp, Artificial Sequence
  ENSG00000283573_1 (sequence is synthesized)
agcctggctcttgtcctgattatctgggtgacttcaggtgacaacactgaggtctggtgactcacccagggtcatgcagcctgtgagtggcagagtgagccgggaacctggctgctggct

SEQ ID NO: 800521 - DNA, 120 bp, Artificial Sequence
  ENSG00000283573_2 (sequence is synthesized)
gagaaatttcagggcttcttctttgagtgcccagcaggattgcagcaccacatggctctggggctctcccactggccagtctgggctgaagggaatgaagtgaagagagggagtttcccc

SEQ ID NO: 800522 - DNA, 120 bp, Artificial Sequence
  ENSG00000283573_3 (sequence is synthesized)
taaagatctgacaaatgccaaggactttgcctacgctggatgtgtagccgaagactgtcccaggctgctcagaggggcggaagcaaactcgctgcatctccagaagcccctcagaggtca

SEQ ID NO: 800523 - DNA, 120 bp, Artificial Sequence
  ENSG00000283579_0 (sequence is synthesized)
gtcctgactcaacagcgtggctgcgttcagagcacttttccggagctaggtccttgctatccagagggatcttggtcaactggacagaggtggtgaagaccaggggccattatgaatgga

SEQ ID NO: 800524 - DNA, 120 bp, Artificial Sequence
  ENSG00000283579_1 (sequence is synthesized)
caagtgctctctgatgcatttatttatctacatcatccccaaagtcactgacagaaatacaaacaggatccaaaagatcagaatgggcttttcttgggcttccctgccttcccagcgacc

SEQ ID NO: 800525 - DNA, 120 bp, Artificial Sequence
  ENSG00000283579_2 (sequence is synthesized)
cttcccaggtccagtagcagctgctgagaacagagggagcagctggcctggcagggggccacacttagctttggctttctcagcgtttacatccaccgcccacgcaggggatgcaggttt

SEQ ID NO: 800526 - DNA, 120 bp, Artificial Sequence
  ENSG00000283579_3 (sequence is synthesized)
aaattggatgtgaatagggagtatttaatttggactcgtgaatacggagtatatttaagtggccttaaccactttgactttgcttgcagtcagctgtcactgggcatcagtctgaagcct

SEQ ID NO: 800527 - DNA, 120 bp, Artificial Sequence
  ENSG00000250567_0 (sequence is synthesized)
tcagcagaatacctgctcagcttctacagtgaaggaggggctcaaggtcaccaatgcaaaacccacctgaggtggatgcctcctgtaggacgcactgaagcaccaaagttctgccaggaa

SEQ ID NO: 800528 - DNA, 120 bp, Artificial Sequence
  ENSG00000250567_1 (sequence is synthesized)
ttcattgatgaaagcagatgacatctgagataatacctggtcagactcaccttaagcccatggaggatttatctttgtttctaccaactgtacaataagattttaaaatagcacattctt

SEQ ID NO: 800529 - DNA, 120 bp, Artificial Sequence
  ENSG00000250567_2 (sequence is synthesized)
aaattcccaagtcaattagttcatactaagagaatacaaacttatttaacatcaacctaagtaaaatccactggagaagataagtgtgtagcttagaattacagattgtattctctagtc

SEQ ID NO: 800530 - DNA, 120 bp, Artificial Sequence
  ENSG00000250567_3 (sequence is synthesized)
aaagatacataaattaggccttaaaaagttactttggatcatgtttacttttattactgtctatctggatagataattggatgttattgctcatccctcattttctagaatgagtgttct

SEQ ID NO: 800531 - DNA, 120 bp, Artificial Sequence
  ENSG00000250564_0 (sequence is synthesized)
gcaatggctgaaaatggagatgaagagtttcactctcagaggaggattttgttcttcaattgtggagtgatctctatcaccagtgactaaagatgttggagcacagagagccatacccca

SEQ ID NO: 800532 - DNA, 120 bp, Artificial Sequence
  ENSG00000250564_1 (sequence is synthesized)
aaatatgatgcttcggcatgctgactgctttgaaaattgaaaggcctcagaaataatcctcagtgccagggtctccctctgacctccccctacctccctttctctctgatcctgtctctc

SEQ ID NO: 800533 - DNA, 120 bp, Artificial Sequence
  ENSG00000250564_2 (sequence is synthesized)
cacaatttgcctttgatcccttccctgaaatttcattaaccagagaaaattaaaacttctatcacaaaggaagagactgaacattaaacaccatagctacagcccagacaaacttcttcc

SEQ ID NO: 800534 - DNA, 120 bp, Artificial Sequence
  ENSG00000250564_3 (sequence is synthesized)
caaaccattgtttgttctcctgcctgttaaattgccagagaatcattcacaagataaagtctgccttctgggtccattcattccccactaaaaatcttttactcctacaccctcatgtct

SEQ ID NO: 800535 - DNA, 120 bp, Artificial Sequence
  ENSG00000250564_4 (sequence is synthesized)
ccttcctccatgaagaagggtctataaacctctaggcctcattgggttattgggtaatcattctcatgcagttcccctgtgctctgcatgttaaataaatttgtatgcctttttctccta

SEQ ID NO: 800536 - DNA, 120 bp, Artificial Sequence
  ENSG00000250564_5 (sequence is synthesized)
acagggcctggaaagtgtcccccgaaaatgcttcagagtgaaaacttacacgaaagaacttctggttaaacgtggcagaggagtctcttgtgaattgtgaatctctgctccctcccaagc

SEQ ID NO: 800537 - DNA, 120 bp, Artificial Sequence
  ENSG00000250564_6 (sequence is synthesized)
aaaagagttaaaaaaaaaaaaacaaaaacccgacaaggtctctgagaatagaagaggaggcagcagcagacggaggatgtcaccacattttcgtaaggtgggaagcagaggaaggagtgg

SEQ ID NO: 800538 - DNA, 120 bp, Artificial Sequence
  ENSG00000250564_7 (sequence is synthesized)
gtaaggtgggaagcagaggaaggagtggtgagtcacacagaggcatggagggagctgaggcctgatcccacagaggggaggagagaggcaggtggaactgctgggagacagaggaccgcg

SEQ ID NO: 800539 - DNA, 120 bp, Artificial Sequence
  ENSG00000281591_0 (sequence is synthesized)
gttggctgtctgtggtattgcagtttcactagtgctgtagcaaacactcatctttcttctcagcagacacaaactgtcatctatatgactccatcatgtccttcagcactccacatcagg

SEQ ID NO: 800540 - DNA, 120 bp, Artificial Sequence
  ENSG00000281591_1 (sequence is synthesized)
agagaaagaatctagtcattagacaatttatcaaaaagccaaacatttcaacacatattctactgttttaattctctcctgaaggagatactgggagttgggcattttctcattagccca

SEQ ID NO: 800541 - DNA, 120 bp, Artificial Sequence
  ENSG00000281591_2 (sequence is synthesized)
gttactgttctgggtgaaaaaataaactgcagtggacaggctgtaagccagacttcatcaaatttctgcaccaatgaaaaaaaaatttacaagagaaaaacaaaaaaccctattaaacgt

SEQ ID NO: 800542 - DNA, 120 bp, Artificial Sequence
  ENSG00000281591_3 (sequence is synthesized)
cacggacaaggccagagtttgaatatactgtggtcatctctgctccagtgcaaactgttttcagaaagcctacttctattttccttgctgtaacagaggaacatttcctgtcttatgctt

SEQ ID NO: 800543 - DNA, 120 bp, Artificial Sequence
  ENSG00000281591_4 (sequence is synthesized)
attctactctgcaatcccctaaggctttttctctccctcccagaatcttaaagtgcattcgaactcacaggcaaaatcctcccagaatcttgtgagaacataaatgatctgactagtttg

SEQ ID NO: 800544 - DNA, 120 bp, Artificial Sequence
  ENSG00000281591_5 (sequence is synthesized)
gcattgcttttggggatctgggaaaatctgtgcacacttctggagacccttgtcatgccattatttataaatctattgtgcctcaagtcagaagtgtgtgaggggagatggggagacatt

SEQ ID NO: 800545 - DNA, 68 bp, Artificial Sequence
  ENSG00000281591_6 (sequence is synthesized)
ggagggacggggggaggaaggcagggaggaaaagcggtcctcggcctccgggagtagcgggacccccg

SEQ ID NO: 800546 - DNA, 65 bp, Artificial Sequence
  ENSG00000281591_7 (sequence is synthesized)
ctgcgggcacccggaaacatgcagggaagggtgcaagcccggcaacgttgccgcacgcgggaatc

SEQ ID NO: 800547 - DNA, 120 bp, Artificial Sequence
  ENSG00000286060_0 (sequence is synthesized)
tgccagacagtgggcgcagatgcagatctcagatatattttcaactacgaatagaatgtgagttcttcatggaacacttcgactttgctctccaacttatccaggccatattcccaatgg

SEQ ID NO: 800548 - DNA, 120 bp, Artificial Sequence
  ENSG00000286060_1 (sequence is synthesized)
caagaattataaatgcatttcaaccaccgcattgggtttataacatttgaaggaaaggccaaatagggaactgtcaagcttttgctggagaaccaaaacagtaagacaggcacaagatat

SEQ ID NO: 800549 - DNA, 120 bp, Artificial Sequence
  ENSG00000286060_2 (sequence is synthesized)
tgtaccccagtgcttagcctgtcgtgttgtaacataactaaaagctatttttcactcgctttgctttaattaccaagggttttggtgttctaaattgctactgtccaagcatcccctgat

SEQ ID NO: 800550 - DNA, 120 bp, Artificial Sequence
  ENSG00000286060_3 (sequence is synthesized)
atagctgtagtccaagaagttgaaggggtcctaagggaattaagggaatacagctgcagcccccaacaaatacctcaaatcctaaaatatgcaaactctacagaatgattgatggtatat

SEQ ID NO: 800551 - DNA, 120 bp, Artificial Sequence
  ENSG00000286060_4 (sequence is synthesized)
tctcagtattacttcaaacttcataaagtgcttgcaaacacaattatcacttcagctacatcctccctgcttgtgaacttgctgaaaaaatctgcttcttaataatagcagctaccattt

SEQ ID NO: 800552 - DNA, 120 bp, Artificial Sequence
  ENSG00000286060_5 (sequence is synthesized)
gttaaacactttaatcaagcactgctgtgtgttgttttgtttgatcctcccacaataaccttattacataagcattactacaatcatatccactgccagatgaaaaaactgagatacaga

SEQ ID NO: 800553 - DNA, 120 bp, Artificial Sequence
  ENSG00000286060_6 (sequence is synthesized)
gaagttagaagtcacacaattagcaagtgtcagagctgagatttcaactgattgcctgacagcggcactctcactcaaacagtaagctatgctgctttcttgctaaatctttatcatgcc

SEQ ID NO: 800554 - DNA, 120 bp, Artificial Sequence
  ENSG00000286060_7 (sequence is synthesized)
catagcttgggtttgcctacaaaaaaaagtttgagccatgaatacagcccttgacattttattgaccatgacagaggaaaaaaggtggcacatgatcacacttacgaaattgtttcaagg

SEQ ID NO: 800555 - DNA, 120 bp, Artificial Sequence
  ENSG00000286060_8 (sequence is synthesized)
aaagaaaaagtagagaatcacaaggacaatctagttatgaaaatatttacctgaatagtctctgtaatcattgtagagcaggcaagagaaataataagttattgcccagggactccatcc

SEQ ID NO: 800556 - DNA, 120 bp, Artificial Sequence
  ENSG00000286060_9 (sequence is synthesized)
atatttggggacctcaagataaagccttgatgggaatgtggcatgccttacaaagtgttacaaaaagcaggtccaggatatgagactttatttcttcttaggcaatacactgaggtacct

SEQ ID NO: 800557 - DNA, 120 bp, Artificial Sequence
  ENSG00000286060_10 (sequence is synthesized)
ctgggtccagctcttaaaagctaatgcttccgttctcaagtaggcagtggagccactgttttctcagaataagaagatacttctttcagtttgtgtgacatttgtgaagaagaatttttc

SEQ ID NO: 800558 - DNA, 120 bp, Artificial Sequence
  ENSG00000286060_11 (sequence is synthesized)
aagttttcctgaacacttttccatatttgttgcaataatagaagactattcaaattaacctcatccattcaggtatttaacatcaatatattcacattcagagataaaaggaacttttct

SEQ ID NO: 800559 - DNA, 120 bp, Artificial Sequence
  ENSG00000286060_12 (sequence is synthesized)
atctggagagcttcttattaactgttcttatctggtcaaatttcactagtcagaccacaggaagttgtagatcctagcactgcccggatattggactttctcccacatctctgcctggga

SEQ ID NO: 800560 - DNA, 120 bp, Artificial Sequence
  ENSG00000286060_13 (sequence is synthesized)
actgccagctgagttattgctgtcggagaagtatgcagtgtgtctgggctttggggttatctgatcagcagaggcatcggtctctactaaatggaatgaaaaagcctactgtgcattctg

SEQ ID NO: 800561 - DNA, 120 bp, Artificial Sequence
  ENSG00000286060_14 (sequence is synthesized)
tgctgatatgtgacagtcttcagagaaaggactcctttcttagatggcatgacccattaaatattgctccaggtcaacagaagaaggaaattgctgtcccgcctcaggtacccatctgct

SEQ ID NO: 800562 - DNA, 120 bp, Artificial Sequence
  ENSG00000286060_15 (sequence is synthesized)
ataacccttggccctttgcacctcactttatagccacttgaatctaagtgtcatcctcaccagtcctatcctactgtgtgttcctgcagataacaatagtgtcttgggcttcctgagatg

SEQ ID NO: 800563 - DNA, 120 bp, Artificial Sequence
  ENSG00000286060_16 (sequence is synthesized)
ccacttgctaaaggccaatgccttatacttggtgctcattccatatttggccaatgtcaaaactttcaacattgctttattgagctctcgatactgttttattggcatgtaaagcctgtc

SEQ ID NO: 800564 - DNA, 120 bp, Artificial Sequence
  ENSG00000286060_17 (sequence is synthesized)
ataattcatcttcgaaggcagtcatcttcattcctttccacatggcaccaatgtcatttcattaatttaccaggtggtaaaaacatactcaaaaccattcattctgaggatcttttagat

SEQ ID NO: 800565 - DNA, 120 bp, Artificial Sequence
  ENSG00000286060_18 (sequence is synthesized)
ttttaaatctttatatttgttcacctccaataatatgtcatgaaagctaatttctggccttacagaccgtatgctactcctaggggagagaaaaatggcaaaataagtccttcaattcac

SEQ ID NO: 800566 - DNA, 120 bp, Artificial Sequence
  ENSG00000286061_0 (sequence is synthesized)
gagctagcacaagaggccaacctgcatggactgcttccacagatcccttgtcctctgacttacagttgaattcaccaaatagaagacattggaaatgagacccgagggttggaggaggag

SEQ ID NO: 800567 - DNA, 120 bp, Artificial Sequence
  ENSG00000286061_1 (sequence is synthesized)
gagctccggcagccattctggaccaggaggtagccttgaagatggaagccacatgttgggatggtgaatccaaaagatgaggagcctgtatcccctgtgacaccagaactgccataccag

SEQ ID NO: 800568 - DNA, 120 bp, Artificial Sequence
  ENSG00000286061_2 (sequence is synthesized)
ccctgggttcctccatctatactgccttcatatggtaaagaaatattcttggatcttgttaggtgtctgttgcagccaaacacaatcccaactgatattcactgtaaatgattccatggc

SEQ ID NO: 800569 - DNA, 120 bp, Artificial Sequence
  ENSG00000286061_3 (sequence is synthesized)
aagacctatacctcactcggcagagtctcacctatgctgttcgcagcaacgcatcggccgcaggcacagagcgccatggccagagcccaccagggcagccgcctcgcaccacaaccaagg

SEQ ID NO: 800570 - DNA, 120 bp, Artificial Sequence
  ENSG00000286061_4 (sequence is synthesized)
gcctcacagcgcgcaatcaaagatggaaaagcagaagctcagaaaatggaggctaagtaacttgttcaagatcacagagcaagcagatgccacagctggaatctgaacccagcctgcaat

SEQ ID NO: 800571 - DNA, 120 bp, Artificial Sequence
  ENSG00000286062_0 (sequence is synthesized)
agagagagtgatccaacagagagagcaagtaggatatagctgcgcctttcatgacagcctcagaagccacaaatcaccgtgtctgctatgttttattcatcagaagtgagtcgctgagtc

SEQ ID NO: 800572 - DNA, 120 bp, Artificial Sequence
  ENSG00000286062_1 (sequence is synthesized)
caaccatattcacagggaggcaaagtaagctctacctcttaaaggaaaggagtatccaagaatttgtggatatattttaaaacggccacaaggacggctggccctcactaggcctccagg

SEQ ID NO: 800573 - DNA, 120 bp, Artificial Sequence
  ENSG00000286062_2 (sequence is synthesized)
ggttcctggcaactccagccactcatgaggtggaagaatacacggaaaaagttaaaacaaatgaagatatttcctcctcaacatttggaaaccttctgctggccgagaatgcctgaactt

SEQ ID NO: 800574 - DNA, 120 bp, Artificial Sequence
  ENSG00000286062_3 (sequence is synthesized)
gaacagtaagccctgagagacctcagatggacagaattcaactcatcacatttcttggttcttgacacgctctcctcgttagtccatcacatattgcacggattcattcatatcgctgca

SEQ ID NO: 800575 - DNA, 120 bp, Artificial Sequence
  ENSG00000286062_4 (sequence is synthesized)
tgtaggctgctttgacctgctgtagaatatctcattgtgtggatgcacatgtggatcactgagtatgtcagagctggcaagatacgtcagaagagaaaggagaaactcttaactaaatag

SEQ ID NO: 800576 - DNA, 120 bp, Artificial Sequence
  ENSG00000286062_5 (sequence is synthesized)
agttggaaataaaataattgtctgtatggaataagatcaaaggtcccacatgttaaagtcaaccccagatgaattaaagtcttacatgtcaaaaaaaattgaaacttttagaagaaaatt

SEQ ID NO: 800577 - DNA, 120 bp, Artificial Sequence
  ENSG00000286062_6 (sequence is synthesized)
ccttaaggtagagaaagatttcttaaagaagacacttacaggattgattacaaacaaaaagactggtacatttgaatgtattatgttaagaacttttccaccaaaagaaagcctcgattt

SEQ ID NO: 800578 - DNA, 120 bp, Artificial Sequence
  ENSG00000286062_7 (sequence is synthesized)
cctcatttttaagatgaggataataatccctaccttatagaattctaataagatgaaatgaagcaacatatacaaaatacttagcacagatcctaacacctacaaaataataaatggtaa

SEQ ID NO: 800579 - DNA, 120 bp, Artificial Sequence
  ENSG00000286062_8 (sequence is synthesized)
cgattattattcttctcaaacaacaatcctattatttatcaaataatactgagtaatatgacaagacatatttaaaccacacaagccatatgcagacaagtgtttaatatcatagtgata

SEQ ID NO: 800580 - DNA, 120 bp, Artificial Sequence
  ENSG00000286062_9 (sequence is synthesized)
gtttcaagagagagataataatttattctacatttatcagaggtctatagcccagtagtcaataaatacttatctatagtcaataagtactatcaagcatccatgccaggaaccatgcta

SEQ ID NO: 800581 - DNA, 120 bp, Artificial Sequence
  ENSG00000286062_10 (sequence is synthesized)
ggggctgattaatttacatcaatcaccatgacttttttcccacaaactaacacacacacaatcttcatagatttttctgtgatcacagcaaggaaaagacctacgcatgtttggatcatc

SEQ ID NO: 800582 - DNA, 120 bp, Artificial Sequence
  ENSG00000286062_11 (sequence is synthesized)
tgtgtacagtcctacagaagaactttgacactatcagagacagaaatctcagaatagtccaactctcacttatttgtgctaatgaaagagtaaagtaaaagagacaattaaaatgggaaa

SEQ ID NO: 800583 - DNA, 120 bp, Artificial Sequence
  ENSG00000286066_0 (sequence is synthesized)
gagaaaaagatggccttgatttaaaaatgatacaacaagtacctcgaatgggcatgctttctgctctgcgctgcaaacacaattaagaggcatctcttcagcaccagatcacctcaatag

SEQ ID NO: 800584 - DNA, 120 bp, Artificial Sequence
  ENSG00000286066_1 (sequence is synthesized)
tatctgtgtcatccttgacgtacatcgtggccggcttggaaaaagaaaaggttggatgttttgtactctgcggcgggggccaaggtagtttgtttttcacttgttctccttgtatttaac

SEQ ID NO: 800585 - DNA, 120 bp, Artificial Sequence
  ENSG00000286066_2 (sequence is synthesized)
accacgagtaaaaaatagggagtaaaaatagcatgttggcctcttatcttagtctgtgatcatggtgacagtgaaaatattatggcctgcttctcttgggagcaactccaatcacactgg

SEQ ID NO: 800586 - DNA, 120 bp, Artificial Sequence
  ENSG00000286066_3 (sequence is synthesized)
cttattataacttgaaataacggatggagaaataccttccataccagcttcagactgagcaccctaaattagtttctgttcacatttagaaagttgggtgccaaaaatggaatgcagttg

SEQ ID NO: 800587 - DNA, 120 bp, Artificial Sequence
  ENSG00000286066_4 (sequence is synthesized)
tggcaaagagaggttgttgctttaatggtatctttgaataaaatgagaaaggagaagccccctttttcttttaaaaagaaaaagaaagagagagacttgatctatgctgcatcaaaggaa

SEQ ID NO: 800588 - DNA, 120 bp, Artificial Sequence
  ENSG00000286066_5 (sequence is synthesized)
ggaaatgaaattaatgtcctcgaaaggagtttgttttgctgagctgtttttcagttctttgatagcttcctttctaaggtggcatttctgtttccttttgcaaagagtgttatatttatt

SEQ ID NO: 800589 - DNA, 120 bp, Artificial Sequence
  ENSG00000286066_6 (sequence is synthesized)
cctcaaaatgagattattttggccacatcaagtgttagagaaactcctcaatgtacttcctctgtagatatttttcagctggagtgcttctgcagtcaattggtataatgggctgaacta

SEQ ID NO: 800590 - DNA, 120 bp, Artificial Sequence
  ENSG00000286066_7 (sequence is synthesized)
ccccaaattcccccccagagccctaactcccactacttcaatgtgactgtatttggagacaggacatttaagggagtgaatatgttaaaatgaggccattagggtgggccctaatccaat

SEQ ID NO: 800591 - DNA, 120 bp, Artificial Sequence
  ENSG00000286066_8 (sequence is synthesized)
ctgactggagtcataagaagagaaaatttgaatgcacagagacagcagggatgtgtgtgtgcacagaggaaagaccatgtgaggacgcagtgagaaggcggccgtctgcaagccaatgaa

SEQ ID NO: 800592 - DNA, 120 bp, Artificial Sequence
  ENSG00000286066_9 (sequence is synthesized)
tgaggcctcagaagaaatcccatctgccaacaccttgatcttggacttccagtctccagaactgtgagaagataaattcctgttgtgtaagccacccggtctgtagaattttgttatggc

SEQ ID NO: 800593 - DNA, 120 bp, Artificial Sequence
  ENSG00000286066_10 (sequence is synthesized)
aacctgggcaaactaatacaactggggtgggagcgggatgtccctttacagaaaagacagcttttcagaaggtgggttcgtcaggacaccagggaagggagctcaagtttaaagagagaa

SEQ ID NO: 800594 - DNA, 120 bp, Artificial Sequence
  ENSG00000286066_11 (sequence is synthesized)
agcattcggctgctctgtcttccctaagctcctggaggccacctgcagtcctgggctcacaatcccttcctcacatcaccacaacctctgcttctggcatcacttctactacttactctc

SEQ ID NO: 800595 - DNA, 120 bp, Artificial Sequence
  ENSG00000286066_12 (sequence is synthesized)
atctcctggaccctcttagaggcacaagagcccctgtgattacatcaaccccatccagatcatccaagatactctccccatcctgagatccttaacttaatcacatctgtaaagtccctt

SEQ ID NO: 800596 - DNA, 120 bp, Artificial Sequence
  ENSG00000286066_13 (sequence is synthesized)
tgccatatcaagtcacatttgcaggtcctggagattaagatatagacaattttaggagaccattactcagcctatcacagactccaaagaggttttgtttatgtggcttatatttgtcaa

SEQ ID NO: 800597 - DNA, 120 bp, Artificial Sequence
  ENSG00000286067_0 (sequence is synthesized)
gtgtcttgatctgttgctcaggctgaatgcagtggtgcgatcacaactcactgcagcctcaaactcctgggctaaagccatcctcctgctttagcctccccagcagctgggactataggc

SEQ ID NO: 800598 - DNA, 86 bp, Artificial Sequence
  ENSG00000286067_1 (sequence is synthesized)
tcctcctgctttagcctccccagcagctgggactataggcatgtgcaaccacgcccagctaatctttaattttttgtagagacagg

SEQ ID NO: 800599 - DNA, 86 bp, Artificial Sequence
  ENSG00000286067_2 (sequence is synthesized)
cctcccaaagtgctaggattacaggtataagctactgtgccagggtgaggcataaagttttttgttgttgttgttgttttgttttt

SEQ ID NO: 800600 - DNA, 120 bp, Artificial Sequence
  ENSG00000286067_3 (sequence is synthesized)
ctggcccggcataaagttttaatttaagcaaaaagcaagtaataaaagtactgtcagccacggcctattgagggaccacatgctgtgttctaaacactttccaggaattatctcatttag

SEQ ID NO: 800601 - DNA, 120 bp, Artificial Sequence
  ENSG00000286067_4 (sequence is synthesized)
gtctccggacaatcttgatggaaattctccccactttacagatgagaaaactgaggctgagggagggggttgcccaaggtcacagaggtagcaagtgttagacatgtggtttgtatctag

SEQ ID NO: 800602 - DNA, 120 bp, Artificial Sequence
  ENSG00000286067_5 (sequence is synthesized)
gtctatctggttccaaagtccatgctgctaaccatttcaccacatcagaatgtcaaggacagctcatctgaaaggaaaaagcctcaacaaggcaagaggtcatgccccaaaggtctccag

SEQ ID NO: 800603 - DNA, 120 bp, Artificial Sequence
  ENSG00000286067_6 (sequence is synthesized)
ctgacccacgtggaagtatgaagtcagcagctgctgcgtcccagcctcctgatcccctcgacctgagaggctgggagcacccagggaggaaggaatgtcccagctgagcacttctccagc

SEQ ID NO: 800604 - DNA, 120 bp, Artificial Sequence
  ENSG00000286067_7 (sequence is synthesized)
tcacagcaaggccagggcatgacagtgtccctggctcaggggcaaggcacccaaacactgagatgccaagatccagctacccacactgaggtaagggaggagaaggatgagggaggggcg

SEQ ID NO: 800605 - DNA, 120 bp, Artificial Sequence
  ENSG00000286067_8 (sequence is synthesized)
gcagggcagggaagatggagggttcacagggcaccttgaaatccgacagcgaagccatcagctcgtccagctccctggtggcagaggaggccgagatgcgtgtctgctgttgggtggagg

SEQ ID NO: 800606 - DNA, 120 bp, Artificial Sequence
  ENSG00000286067_9 (sequence is synthesized)
tgacgcgctgcgggctgctcatctcgccctggttcacagtgatggcagggctgcagggtgggcacagcatcagtggggagcccacagtcagccccacacttcccggggatcagatcgacc

SEQ ID NO: 800607 - DNA, 120 bp, Artificial Sequence
  ENSG00000286067_10 (sequence is synthesized)
tctcacctcggacactggggtctcaccatccccaaccccagggaggtccaccagctccctgtctctcctggggacccatcactgggtcagaagaaagggcagttcaatggcaccaggaag

SEQ ID NO: 800608 - DNA, 120 bp, Artificial Sequence
  ENSG00000286067_11 (sequence is synthesized)
tgccaggaagactcctctagcccccagcccaagtgaaagctggcctgcgaaacaagcccaagcgccctgtgtttcctccacaacactggacatggaggtgaggctactgcagtaacacga

SEQ ID NO: 800609 - DNA, 120 bp, Artificial Sequence
  ENSG00000286067_12 (sequence is synthesized)
cggcactggtaagagctcgcgtgttgggcactcaccatgtgtgccacgcactacacaccagaaaccattccaagcgctttacatggattactggttctcacccttactgaggtaggtggt

SEQ ID NO: 800610 - DNA, 120 bp, Artificial Sequence
  ENSG00000286067_13 (sequence is synthesized)
cttatcccagtgatcccataagttcttgtcccattttacagatgggaaaactaaggcttgagagctgacagtaactgtcagagccaagatgtgaaccccactgtgtggccccaaagcctg

SEQ ID NO: 800611 - DNA, 120 bp, Artificial Sequence
  ENSG00000286067_14 (sequence is synthesized)
tgctaagagctgctaagctccaggcgccctcagcctgcacaacgtctgtcctttctgactggcagtgactggctgaaggcagggatggtgtccatgtgactcaccactatccccccagtg

SEQ ID NO: 800612 - DNA, 120 bp, Artificial Sequence
  ENSG00000286067_15 (sequence is synthesized)
cctggcaaatggcagacacgggagggagtgggtgataccagggctaaggggacagacactggacccggggcaggctgggccagcccttccccacctggggagggcccagtgggtactcac

SEQ ID NO: 800613 - DNA, 120 bp, Artificial Sequence
  ENSG00000286067_16 (sequence is synthesized)
acggggctgggcacggagctctccagttcatccaagagactctccacactgggccgcacgtcctccaggccccggcccccattccgcttaggcttctctttcgtcaggggcccagctttg

SEQ ID NO: 800614 - DNA, 120 bp, Artificial Sequence
  ENSG00000286069_0 (sequence is synthesized)
gcagaagctagtggggtttcttcggagcgattgtttagtattcatggggcgacgcaatctctcccacatctgcttagcacagcaagtcctgtcatataactgtctcccgcactgtctgtc

SEQ ID NO: 800615 - DNA, 120 bp, Artificial Sequence
  ENSG00000286069_1 (sequence is synthesized)
cataaagaatgtctcggaattggtgtaattcagagaaattaatgacgactttccgcgggacggctccctgggggatgattaacacttcatcgtccatctgatgcgcggggcccagcactc

SEQ ID NO: 800616 - DNA, 120 bp, Artificial Sequence
  ENSG00000286069_2 (sequence is synthesized)
catcgcgaacatttgggccgtggccagccgcattaaagttgtctttcaggaggtgtagcctggttgtggcctggggagtttggctgttctgtgtggtgtgcctccacggtgtggtctcca

SEQ ID NO: 800617 - DNA, 120 bp, Artificial Sequence
  ENSG00000286069_3 (sequence is synthesized)
gtgagctgctcagcaggtgtagacccgggcagggcgaagctctctgggctgttgactgtgaggcccctccccaccggtagatttccaagcctcttcagttttgcattcagccacagcaga

SEQ ID NO: 800618 - DNA, 120 bp, Artificial Sequence
  ENSG00000286069_4 (sequence is synthesized)
atccgaatgaatactgagtgctaaaggaagatttttaggttgaatgaaaaggatattgaatagaaacttggacttataagagtttcagaaatggtaaactcctccagggcaggacctgac

SEQ ID NO: 800619 - DNA, 120 bp, Artificial Sequence
  ENSG00000286069_5 (sequence is synthesized)
tcttcagaggaattttttaatccccctccccagaagtgcccacgtcaaggccatagtagagaaggagctcaagagcaatccctaagcaaccacgcttggaagcatcctgcaacagaggga

SEQ ID NO: 800620 - DNA, 120 bp, Artificial Sequence
  ENSG00000286069_6 (sequence is synthesized)
tttgttccagactcagatttaatccactattaccttttcgtaagacaagtgttgtctgaaggagtctgtgtgtaattttgagacaaaaggattgcagaactcagctcccaggttgtctca

SEQ ID NO: 800621 - DNA, 120 bp, Artificial Sequence
  ENSG00000286069_7 (sequence is synthesized)
tatctgattcttcgaaagaggaaaagaagcgaactcttctgcacaatagctgagcagataggagagaaaaagcttgaagattcacagtggagcaaggctaattggagccttcctcagagc

SEQ ID NO: 800622 - DNA, 120 bp, Artificial Sequence
  ENSG00000286069_8 (sequence is synthesized)
agctcaactatcccagttttacctatcccattccttgccattcccacttgtaattctgtcttggcaagaacaccatactgaaggttcttaaagcagtttgtagactttaattagttctgt

SEQ ID NO: 800623 - DNA, 120 bp, Artificial Sequence
  ENSG00000286069_9 (sequence is synthesized)
ggaaagtcagtcaaagctcagccttcattctgccaacagagacaacagtggtgggtgtggaaggaaggcaagaagaagatggacacccagagcagttgtgcaacttactgaaggccatgt

SEQ ID NO: 800624 - DNA, 120 bp, Artificial Sequence
  ENSG00000286069_10 (sequence is synthesized)
aaacccctgagtcttgataaaagtgtcttagccttctagattcctaaacaggtagtgggctcatcctactaacctactttgctagggtgttgttgatgaatgcttataaaccctgtccta

SEQ ID NO: 800625 - DNA, 120 bp, Artificial Sequence
  ENSG00000286069_11 (sequence is synthesized)
gatgataggtttggaagattgttaaagaaagcatgtcattaagtccctactcaccccctccttgacaaatagccctggagggaaatgaatattagccagaatcgtagggcctccacttca

SEQ ID NO: 800626 - DNA, 120 bp, Artificial Sequence
  ENSG00000286069_12 (sequence is synthesized)
atggaatgaactgagattcaacaacaagagaaatgttccaacagtgagggaaatcaacaatgtgctgggggtgaagggtaggggttgggaaggcctaaacaggtgaccattgccagacag

SEQ ID NO: 800627 - DNA, 120 bp, Artificial Sequence
  ENSG00000286069_13 (sequence is synthesized)
cccagacaagatcatcacagaatagctgattcccattagacactgtgggtgatcattatcttaaaattcaggacactatttttgtagtagtttcccttcctctctttgtaagagcagaag

SEQ ID NO: 800628 - DNA, 120 bp, Artificial Sequence
  ENSG00000286069_14 (sequence is synthesized)
acctctctggggcctatcacaagacaagcgggtgtttgcaaatgagggacgtactttgagactgaattgctctgtgcttctctaaaagacatggttaagagtttgggcgctgatgttaga

SEQ ID NO: 800629 - DNA, 120 bp, Artificial Sequence
  ENSG00000286069_15 (sequence is synthesized)
gactgagattaaaatccttccttgccacttccatcagtataaatttggataagtttcttaacttctctaagccttgattttctcacctataaaatgggcctaataatagtgcctaactta

SEQ ID NO: 800630 - DNA, 120 bp, Artificial Sequence
  ENSG00000286069_16 (sequence is synthesized)
gaggtttgttgtaaaggttaaatgcaattattcaggtaaagccttaatggagcctgatatgtagtaagcactcaatccattttatctactgactcttttctctgtgtgggttacccactt

SEQ ID NO: 800631 - DNA, 120 bp, Artificial Sequence
  ENSG00000286069_17 (sequence is synthesized)
tggagattgtccccagtaatttctttggtcaagtcttgatctccctggccccttggctgtcttctcccaccatgatcagtgagaagttgaggagcactaataccaaattctttttcatgt

SEQ ID NO: 800632 - DNA, 120 bp, Artificial Sequence
  ENSG00000286069_18 (sequence is synthesized)
tagttaggagaaagcagaattacgaaggtcaacctgctggtgtaaaaaaatattacatagattagccctgctctacatattagatatgttctcaaaatgcctaagtggcctttttttttt

SEQ ID NO: 800633 - DNA, 120 bp, Artificial Sequence
  ENSG00000286069_19 (sequence is synthesized)
tggggccggcagggagccctggctacccaagcattgccgtctgtctctctccctccactggctccatctgccgtcgctgaggtcgtgacaaggaggcaaacagcaaaacggcaaacagct

SEQ ID NO: 800634 - DNA, 63 bp, Artificial Sequence
  ENSG00000286069_20 (sequence is synthesized)
atacatgtgccatgttggtgtgtgcccaccccctggcaggccctggtgtgtgatgttccccac

SEQ ID NO: 800635 - DNA, 120 bp, Artificial Sequence
  ENSG00000286069_21 (sequence is synthesized)
ttgggtaatctttaaatgactttatttgcaagtctgagtaatatactcatagaaacaagaatcacagttaagggaagggaaactaatatttgagcttgagacactttccatatccaagtc

SEQ ID NO: 800636 - DNA, 120 bp, Artificial Sequence
  ENSG00000286069_22 (sequence is synthesized)
caattgaatcctcccaatcacccaataaagagatcttattattcccattttatatgttaaacaaccaaaactcagagaggttaattaatactctcaaaatcactcttctaggggtggtgg

SEQ ID NO: 800637 - DNA, 120 bp, Artificial Sequence
  ENSG00000286069_23 (sequence is synthesized)
agcctaagtttgaatgcagctctggctcccaaacctgtccattttctactatgtcatgctcaaaggcatattctgcttttgtccattgtcagcctatgtgcatttaagtttcccacacaa

SEQ ID NO: 800638 - DNA, 120 bp, Artificial Sequence
  ENSG00000286069_24 (sequence is synthesized)
attcaagaagaattttatccatcaattcacatgaccttgagtattaatttagtttaaaaatctttccccttatgatttaaaaaatattcactttaagaaattatctgccatgtgcaggat

SEQ ID NO: 800639 - DNA, 120 bp, Artificial Sequence
  ENSG00000267731_0 (sequence is synthesized)
aggactttgaagacccaagcagccaaaaaatagctaattcctccttatttcagttggtatgaagagaaggttactaataatgctgctcttccagcacaagtcttctgggctgtcagtgag

SEQ ID NO: 800640 - DNA, 120 bp, Artificial Sequence
  ENSG00000267731_1 (sequence is synthesized)
cttggtcagtgggaaccacaggaaattatgagttatgtttgttatatatgagaggaaaattgaggctaccagtcttgtcacagggtttatagataattgccttgtgtgccaccatgcctg

SEQ ID NO: 800641 - DNA, 120 bp, Artificial Sequence
  ENSG00000267731_2 (sequence is synthesized)
gagccaccgcgcccagcaccccattaaatcttatcacaaagcctcttcaaacttggctccaatggagggaattgatacttcagcaatattctgtcttctactccatgagcataaactgat

SEQ ID NO: 800642 - DNA, 120 bp, Artificial Sequence
  ENSG00000267731_3 (sequence is synthesized)
gctatcctgagcaaactagaatgattaccctatgaaggttcagtaactataataggggtatttttggcattagtttgagacctacagcctgtgccaaaagtgaacaggaagcatcacatt

SEQ ID NO: 800643 - DNA, 120 bp, Artificial Sequence
  ENSG00000267731_4 (sequence is synthesized)
taaaagatgtataaaatatgtctatatctatccatttgatatggcttgactgtgtcaccacccaaatcttatttggaattcccacatgttgtaggagggaaccggtaggaggtaattgaa

SEQ ID NO: 800644 - DNA, 120 bp, Artificial Sequence
  ENSG00000267731_5 (sequence is synthesized)
tcatgggggcaagtctcccgtgctattttcatgatagtgaataagtctcacgatatctgatggttttaaaaaaaggagttcccctgcacaagctctctgtgtttgcctactgccatccat

SEQ ID NO: 800645 - DNA, 120 bp, Artificial Sequence
  ENSG00000267731_6 (sequence is synthesized)
gacgtgacttgctcctccttgccttctaatacatcatctatctggttatttcatacatattttctagcattttattattggtttcttcaaaactcttcagaaactaatatatgtatattt

SEQ ID NO: 800646 - DNA, 120 bp, Artificial Sequence
  ENSG00000267731_7 (sequence is synthesized)
attttccaccatgatcaactgtgcatattaatatatattatttggtatatgaatgtggattcataattgagattatgttccaatgagtcatagtaaaagtacagaaaattaatatttcta

SEQ ID NO: 800647 - DNA, 120 bp, Artificial Sequence
  ENSG00000267731_8 (sequence is synthesized)
atgccttatcaaccgatgattattataaaattagcctttatgtcaagttctcattgctcttgaatttcattccaaacagaattttggaattcatattatttggaatagtatagctgtcat

SEQ ID NO: 800648 - DNA, 120 bp, Artificial Sequence
  ENSG00000267731_9 (sequence is synthesized)
acctaaattagtttaataacccacatctaatgcaaatttacattaagattttacataaataattatggtgtagagtatgacaatcctatttcaaaaccacagagcccttagaaaaacaaa

SEQ ID NO: 800649 - DNA, 120 bp, Artificial Sequence
  ENSG00000267731_10 (sequence is synthesized)
ttcttgatttttcagatatctcaaatactgtaaaatacagtataactaagaataattagccatgaggtcaaacttcaatttcaaacattataaaagtaaaattaagagttaaaatctaaa

SEQ ID NO: 800650 - DNA, 120 bp, Artificial Sequence
  ENSG00000267731_11 (sequence is synthesized)
tcaaatttgaaaacgttatataagatttatgcattcattagaaagtgatttattgtaattttataagatttgccaatttttaaaggtgtatttttgatcaatgcaattaaatgttaaaat

SEQ ID NO: 800651 - DNA, 120 bp, Artificial Sequence
  ENSG00000267731_12 (sequence is synthesized)
tatacattattagttcatgacacattttcaaatatgaatgtgatgtagaaacaggtgattatcagaaaataaactctgtttttagtttaagactaaattaaagctaccaaaaagaaattt

SEQ ID NO: 800652 - DNA, 120 bp, Artificial Sequence
  ENSG00000267731_13 (sequence is synthesized)
agtttcaagataggaaagtttatttgtaaggatgctgggatgtttgaacccaagatgagtgatgtttaaaaggttttgcaatggcattcaatgaataaaaaatgtttagagttcagtaac

SEQ ID NO: 800653 - DNA, 120 bp, Artificial Sequence
  ENSG00000267731_14 (sequence is synthesized)
ttcagttaccattttggacagataacaagagatccaatctgactagcagagaatagtgtaagacatttagaatagttagcagtttaaatcagagggtagacagattattttccaatgtag

SEQ ID NO: 800654 - DNA, 120 bp, Artificial Sequence
  ENSG00000267731_15 (sequence is synthesized)
agtacatatttctccatttgcataatcctcaccagtgggtagaatttatgaagaatagaatttggttcatggaaagaaaagcaggcaggaactaaatcagatataactttcttcatattt

SEQ ID NO: 800655 - DNA, 120 bp, Artificial Sequence
  ENSG00000267731_16 (sequence is synthesized)
aataactgaagtttactcctattttgagactcaattctgatagaagttggaaaattaatctgtcagtttaaccctatctctaaccccctgccatgtagagaattgaactagccttcgctc

SEQ ID NO: 800656 - DNA, 120 bp, Artificial Sequence
  ENSG00000267731_17 (sequence is synthesized)
tcataagtggaattttaaaaaataatgagttacatgagctgataagcacacatgcatagtcaatgttaaggcttagcatttataaaatttgggatgataatttatggcaaatgtttaaca

SEQ ID NO: 800657 - DNA, 120 bp, Artificial Sequence
  ENSG00000267731_18 (sequence is synthesized)
catttaataagataaatagtttttaaggcattgaataggtaggagttcatatgagtttactctgggttgctattacttttacatagtcaaactttattttgtagtatttttcttcttgat

SEQ ID NO: 800658 - DNA, 120 bp, Artificial Sequence
  ENSG00000267731_19 (sequence is synthesized)
tctctagtcactatgataattattagtatggatggtgacttttatttccaagcacagcataatccacaataacataacatttaaaagcaaaggctctgtatcgattattaacatgaacaa

SEQ ID NO: 800659 - DNA, 120 bp, Artificial Sequence
  ENSG00000267731_20 (sequence is synthesized)
tttcctttgctaccatactccatccagataaagaactgaatgttcctctgaaccttccaattaatttcctccattgtgatgaatcctccatagatttattggcaaaacattatttctaag

SEQ ID NO: 800660 - DNA, 120 bp, Artificial Sequence
  ENSG00000267731_21 (sequence is synthesized)
tgttctccaccctactataaattgtctcaaaatagtttgtgtctaccaacaaggtagtatagactataaacttaataaatagtaattattgataattatgagataccaggatgctaatga

SEQ ID NO: 800661 - DNA, 120 bp, Artificial Sequence
  ENSG00000267731_22 (sequence is synthesized)
aactttattgcttgtattgagaaatgagagtataaattgagtataaaatgaaaagacttgaatgcttagtaaagcatataatgtagctaaagttattaaacagatatatgtatatgccaa

SEQ ID NO: 800662 - DNA, 120 bp, Artificial Sequence
  ENSG00000267732_0 (sequence is synthesized)
atccctgcagtgattcctcagtaattcaccaccagaagcaccatcaccttccttctgtgtccctccacaaagccagttgggacttctagatatttttgaaggcatattgaactagatggt

SEQ ID NO: 800663 - DNA, 120 bp, Artificial Sequence
  ENSG00000267732_1 (sequence is synthesized)
gttctagggtactaatttcaagctgttgttctcctaaccatgccaccatagcagcaattttattctgatgcatagatttgtatagagaggggaacggaacaaagataaagaaacagccac

SEQ ID NO: 800664 - DNA, 120 bp, Artificial Sequence
  ENSG00000267732_2 (sequence is synthesized)
gtggacgtgtggtggaagatcgtttgaaggaggagaagagcaagtcaaaggccctgaggcaagagcacactgggcatgttcaagggcctgccctgaacaatcgtgtacagggagtacaag

SEQ ID NO: 800665 - DNA, 120 bp, Artificial Sequence
  ENSG00000267732_3 (sequence is synthesized)
tccctcattcctctgcagcagcaggaaatgggctctgtccaggccactggactccactgatgtgctgaataagtggaactcgtctttttgaaatgaatgcctcgggtacgtcctgttccc

SEQ ID NO: 800666 - DNA, 120 bp, Artificial Sequence
  ENSG00000267732_4 (sequence is synthesized)
agcccctcggctgacatttcagaaacacagcccaagctgaaatgggcagcctgcccatggaagagatggggcagagggagactgtggcctgttcacacagtttggtggaaagtgaagact

SEQ ID NO: 800667 - DNA, 120 bp, Artificial Sequence
  ENSG00000267732_5 (sequence is synthesized)
gaaggggcttcatcgggtgctatgggatacctgcatttcactgtacaaccttggactctccctccctccatgagcaataggagaactcctaggaacaagtctaacactaggacttccagc

SEQ ID NO: 800668 - DNA, 120 bp, Artificial Sequence
  ENSG00000267732_6 (sequence is synthesized)
aatcttgagactaaagccagaggtcacgtgaactacataaactaaattcctccaaatacaaaccaagcttcccaccccaactctccttagctgaaagggtgctcacaggtactccaacac

SEQ ID NO: 800669 - DNA, 120 bp, Artificial Sequence
  ENSG00000267732_7 (sequence is synthesized)
ctcctgaagtgtgttggaagtgtgcccaagtggaaagcatcaatatacttcatcaattgctaagaagatatcatattgtaatgttattagtaattcaattattaaaatgtattagtgtta

SEQ ID NO: 800670 - DNA, 120 bp, Artificial Sequence
  ENSG00000267732_8 (sequence is synthesized)
ttgtatagagagggtaagaaattattccatgaagtgatcccttctcagaattttaaataagaaatggaaaaactttctgtactctcagagttttcataatttcccctggggtaggagggc

SEQ ID NO: 800671 - DNA, 120 bp, Artificial Sequence
  ENSG00000267732_9 (sequence is synthesized)
acggaacaaagataaagaaacagccacgtggacgtgtggtggaagatcgtttgaaggaggagaagagcaagtcaaaggccctgaggcaagagcacactgggcatgttcaaggggattctg

SEQ ID NO: 800672 - DNA, 120 bp, Artificial Sequence
  ENSG00000267732_10 (sequence is synthesized)
ggagttggaagaggccaacttttcctacctgcagtttgaagattaaggacttagagatttgttgagaggctgcttccgagaggttactgatacactgaggacaggaactactgactactc

SEQ ID NO: 800673 - DNA, 120 bp, Artificial Sequence
  ENSG00000267732_11 (sequence is synthesized)
tgaatgagggaaaaacatccagtttggggtgatcctgttttgcaatggcagctgtcagccataacatggtgggaaataacggtaaataaacctcctgtgattggcaagaatataaaaaaa

SEQ ID NO: 800674 - DNA, 120 bp, Artificial Sequence
  ENSG00000267732_12 (sequence is synthesized)
tccaaaaggaaaattccaaatgccttggcatctgggtagggcaatattttgcagcaagaagtctctatcatctctgagtcaccattcataggaaacagctcagccccttcggggattctg

SEQ ID NO: 800675 - DNA, 120 bp, Artificial Sequence
  ENSG00000267735_0 (sequence is synthesized)
cacctggctggtgttgctccggtacagcggctgcaggcttcggcccacggccccctccgggctgttgatgagtgccctgccgtcccgccagcctccggagctctcgtccagatacttgta

SEQ ID NO: 800676 - DNA, 120 bp, Artificial Sequence
  ENSG00000267735_1 (sequence is synthesized)
tgacaactggatgactccacccagactagcgactctatggtccccacccagaagctgactcagcaactgttttccacagctccaggattgcagcaaggcacccattccctagccctcctg

SEQ ID NO: 800677 - DNA, 120 bp, Artificial Sequence
  ENSG00000267735_2 (sequence is synthesized)
cccaccaaactgttcttgaataaccctagcctctgaattttcagggaggctgattcaagtaataaaactcccatctcccatttagctggatgtatgtggattaaactctctctattgcaa

SEQ ID NO: 800678 - DNA, 120 bp, Artificial Sequence
  ENSG00000263609_0 (sequence is synthesized)
atgcgctttagcgaggcagtctcgggcgcccagctgtcagagctgttagcctgcttaaacagaggaaaatggtacaggcagagctggtctggtatcaggaaaaaggctgcctacgataat

SEQ ID NO: 800679 - DNA, 120 bp, Artificial Sequence
  ENSG00000263609_1 (sequence is synthesized)
ccactgcaggaccctaaaagtctcgaccttagggccccctcggaccgtctccaaggtcgggtcccgctggagaaggaggcatttcgagagtgttggaaacaccttatttgtagaatctac

SEQ ID NO: 800680 - DNA, 120 bp, Artificial Sequence
  ENSG00000263609_2 (sequence is synthesized)
gaagggacattttggaacccattgagacctatagtgaaacactgattgtttcacaatgaaaactgaaaacgttatctaggaaaatgctttgcgtgtgtagattctactcagacaggaaat

SEQ ID NO: 800681 - DNA, 120 bp, Artificial Sequence
  ENSG00000263609_3 (sequence is synthesized)
tggaaactctcctttggtacaatcgacaaagagatatttcaaagcccattgaggcttactgtgaaaaatagaatatccagtgataaaaactataaaaaaggtttgaaatactctaagaca

SEQ ID NO: 800682 - DNA, 120 bp, Artificial Sequence
  ENSG00000263609_4 (sequence is synthesized)
ttttggagctcttggggcctataatgaagaaacgtatatcctgcgatgaaaacttgaaacaagctacctgtgaaaatgctttgcaatgtgtagattcatctgacagttaaacctttgttt

SEQ ID NO: 800683 - DNA, 120 bp, Artificial Sequence
  ENSG00000263609_5 (sequence is synthesized)
tgattcaacaggggtttgggaacatactttttatataacttatgaatggacatttcagagcccattgaagcctatactgaaaatccaaatatcctgcgataaaaactaggagtaagctat

SEQ ID NO: 800684 - DNA, 120 bp, Artificial Sequence
  ENSG00000263609_6 (sequence is synthesized)
ttaagctgttgctttgatttagcaggttggaaaccctctttttctacaatctactagggtactattcggaccaaattgaggcctatactgaaaaactgattatcccgtgataaaaactag

SEQ ID NO: 800685 - DNA, 120 bp, Artificial Sequence
  ENSG00000263609_7 (sequence is synthesized)
aaaaaagctgtcagtaaaaatgctgtgcaatatgtggattcatgtcacaaatttaaacctctgcatttattcagcaagtttggaatacctttttgtagaatatacaaagggatgtttcac

SEQ ID NO: 800686 - DNA, 120 bp, Artificial Sequence
  ENSG00000263609_8 (sequence is synthesized)
acctataaaagcctatagtaaaaaagttggatacactcttgttgtagaatctacaaagagacattttgaagttcattgaggtctatagtgaaaaaccaaatatccagtgatagaaactat

SEQ ID NO: 800687 - DNA, 120 bp, Artificial Sequence
  ENSG00000263609_9 (sequence is synthesized)
aaagaagctatctctgaaaatactttatgatgtgtgatttcatttcacaagttgaacttttcttttgattcaacagcaggttggaaacactcttttgtaaaatctacaaagaaacatttt

SEQ ID NO: 800688 - DNA, 120 bp, Artificial Sequence
  ENSG00000263609_10 (sequence is synthesized)
ttggaaacactcttttgtaaaatctacaaagaaacattttggagtccattgaggcctatagtgaaaaactgaatatttcgccttgaaaaccagaaacaagctatctgtgaaaatgctttg

SEQ ID NO: 800689 - DNA, 120 bp, Artificial Sequence
  ENSG00000263609_11 (sequence is synthesized)
attcagctggctggcaacactctttttgtaaaatctacaatgggacatttcagagaccattgaagtctacagaaaaagactgaatatcccatgattaaaactagaaacaagctatccatc

SEQ ID NO: 800690 - DNA, 120 bp, Artificial Sequence
  ENSG00000263609_12 (sequence is synthesized)
attatagtacaaaaccaaatattatgcaattaaaactacaaacaagctattggggaaaatgctttgcaatgtgaagatttgtctcacagaggtaaacacttacttacatacagcaggttg

SEQ ID NO: 800691 - DNA, 120 bp, Artificial Sequence
  ENSG00000263609_13 (sequence is synthesized)
ttatttggattaagtaggttggaaacactctttttatagaatctacgaatggatattttagagcccagtgaagcctataatgagaaaccaagcattccatgataaaaactagaaacaagc

SEQ ID NO: 800692 - DNA, 120 bp, Artificial Sequence
  ENSG00000263609_14 (sequence is synthesized)
tatctgtgaacatgctttgagatctgtggattcatctcacagggctaaaccattattttggttcagcaggtaggatacactgttcttctagaacctaagaagggacacttcagagctgat

SEQ ID NO: 800693 - DNA, 120 bp, Artificial Sequence
  ENSG00000263609_15 (sequence is synthesized)
ttaggcctacagtaaaaaaccgcatatcccatgataaaaactagaaacatgctatctatgtaaatactttgtgatgtgtatattcatgtcacataattaaacttttgtttttattaaaaa

SEQ ID NO: 800694 - DNA, 120 bp, Artificial Sequence
  ENSG00000263603_0 (sequence is synthesized)
gctgatttctaagggcctctctcaagaagctcgtgttgataaaaaggtaatttcaggtgctcacttgagagctgtgaattaaaaacagggaaaagatggcgggtgagggcagcaggcgag

SEQ ID NO: 800695 - DNA, 120 bp, Artificial Sequence
  ENSG00000263603_1 (sequence is synthesized)
gactgttttgtttgcagggggccagggtaggtcactctgctgcggtgaccttgcggctgagccctgaacaatgagcagccgcagccaacatgcagggatcctgcttgggggctggaactg

SEQ ID NO: 800696 - DNA, 120 bp, Artificial Sequence
  ENSG00000263603_2 (sequence is synthesized)
gaatgttgaatgtttcaggaacaggagggaggacagaatggggcttggagagcttggtggcaccagttcacccacagcctctgggctctagtgaggaaatgagaccccagcagagaccag

SEQ ID NO: 800697 - DNA, 120 bp, Artificial Sequence
  ENSG00000263603_3 (sequence is synthesized)
ggcgggcaaggaggccaggacaacatacaggtgacataggatggcggcatgggcctgggtgctgtgcttagagccagaagtgggcaggtcgcgagatacttgagaggcagagcccacagg

SEQ ID NO: 800698 - DNA, 120 bp, Artificial Sequence
  ENSG00000263603_4 (sequence is synthesized)
acttgctgatggcttctgtgagggggatgacagggaaggtgaggaatcaaggcagagtctcagctttgggatctgagattcattcaacaaataattcagtgccgcgtgccaggcctattc

SEQ ID NO: 800699 - DNA, 120 bp, Artificial Sequence
  ENSG00000263603_5 (sequence is synthesized)
gcctattctaaaagttgaggatatgaagacaacaatggtgatggcctcaagcagtaatcccagcactttgggatgttgaggcaggaggatctcttgagcctgggaggtggaggctgcagt

SEQ ID NO: 800700 - DNA, 71 bp, Artificial Sequence
  ENSG00000263603_6 (sequence is synthesized)
ccagcacttagggagacgaaatcgcgccactggcactccagcctgggcgacagagggaggctccgtctcaa

SEQ ID NO: 800701 - DNA, 120 bp, Artificial Sequence
  ENSG00000259168_0 (sequence is synthesized)
tcaggtatttctgacaacatgtgcatttatttgtattagaagtacaaacgtaggaatccaaatacaaatacagagggcggcccagccacgaggcccagctgagggcacggcggggacggg

SEQ ID NO: 800702 - DNA, 120 bp, Artificial Sequence
  ENSG00000259168_1 (sequence is synthesized)
acgcacgaagcggggcgcggcgccgcccgtgtcgccaaggcacgtcgggcgccagtgcgccctcatttcactaggacaccacgagccgcacggatagcggggagccacgtcctctgcgca

SEQ ID NO: 800703 - DNA, 120 bp, Artificial Sequence
  ENSG00000259168_2 (sequence is synthesized)
ggggaggagggcggcgggacctcgggaccgcccggagccagggcctccaatccctcgcgggacgacagggacacaggggctactggaggccacttggtgagggcgggtccctgctggggc

SEQ ID NO: 800704 - DNA, 120 bp, Artificial Sequence
  ENSG00000259168_3 (sequence is synthesized)
aggaggcgcacgcactggggcagggcgcggccccctcggggccaagcgcatccacaccggtgctctaagatgattccaaaatgttttcggattctggaatctcccggcctacctcccatc

SEQ ID NO: 800705 - DNA, 120 bp, Artificial Sequence
  ENSG00000259168_4 (sequence is synthesized)
ggcaggaaggattccatgggaacagagagcagtccgcgcctctctccttcccttcctgcctgggccatctcccaggacccctgacagtttcacctcccacacaggcttcacagagagagg

SEQ ID NO: 800706 - DNA, 120 bp, Artificial Sequence
  ENSG00000259168_5 (sequence is synthesized)
accctgcccacaccccggctgcttcaagcctgacctgacgccttcctgtgacctgcgaatacgacttcctagacaagggtggggatggctgtttgccatctaaatcttgaaaagtacttt

SEQ ID NO: 800707 - DNA, 120 bp, Artificial Sequence
  ENSG00000259168_6 (sequence is synthesized)
tggcttatcgggtcaacttgaccagaatgcacgaatgatcaaggagtcgcccaggtgtgcaccccggtcacaacagtgatgctcaagggctctccaaaggaggcaggcttgtgtggaccc

SEQ ID NO: 800708 - DNA, 120 bp, Artificial Sequence
  ENSG00000259168_7 (sequence is synthesized)
cagagggactcctgatcagaaattgcagatgaaatttcttacgggtagagtttaaaatcgctcaggaaaagcactcaaaaagagttgcaagatcatggagtgaattccaagtgctttgtg

SEQ ID NO: 800709 - DNA, 120 bp, Artificial Sequence
  ENSG00000259168_8 (sequence is synthesized)
ccttgagagcactgaaccgatacggtgataagaataatggttggagaccaggtgtaattcttcaagtctcaaaggaaatcacagaaaatttccattttggcagctgagataaaaatgatc

SEQ ID NO: 800710 - DNA, 120 bp, Artificial Sequence
  ENSG00000259168_9 (sequence is synthesized)
gtgtgcaccccggtcacaacagtgatgctcaagggctctccaaaggaggcaggcttgtgtggaccccagagggactcctgatcaggttagaaggacgtggaaagaatactacctgcaagc

SEQ ID NO: 800711 - DNA, 120 bp, Artificial Sequence
  ENSG00000259168_10 (sequence is synthesized)
tgtttctgttgtttgagccacacagttggtagaactgttaaagtagctccaggaaactaattcagtgactaatgtttttgaacagtctttgtgcattttaaataaacatatttaatatat

SEQ ID NO: 800712 - DNA, 120 bp, Artificial Sequence
  ENSG00000253147_0 (sequence is synthesized)
gtgagataggagactttttctaaccaatggaaggtggcaaaggtgtgtgagtcacatccttgagtatgttttgttagaatgtcacgtttgtgattttattacgtcactttatataaggct

SEQ ID NO: 800713 - DNA, 120 bp, Artificial Sequence
  ENSG00000253147_1 (sequence is synthesized)
ctgtctccctaggattttttgcttgctggcttgatgaattaagccaggtggaaaggttttctttaagtgggcagcctcaagccaacagccagcaaggaataaaagccctatattccacaa

SEQ ID NO: 800714 - DNA, 120 bp, Artificial Sequence
  ENSG00000253147_2 (sequence is synthesized)
cctaagaaaataaattcttccaacaacctgagtaaggttggaagctgattcttctccagactcccagatgagaacacaggcaggctgactcttgagtccagccttgtggaacccagagaa

SEQ ID NO: 800715 - DNA, 120 bp, Artificial Sequence
  ENSG00000253147_3 (sequence is synthesized)
atggaaatgagtatcatgaagttttaaatgaacagtgtaaaacagaagacatcagcattcattaggtcccagacctctttgagaatctgatgaaattctggacaacctctcctcccacaa

SEQ ID NO: 800716 - DNA, 120 bp, Artificial Sequence
  ENSG00000253147_4 (sequence is synthesized)
acaagatgtactagaatacctacacataaaatgttgcattcaattttggaatgtgaagagatcatttgaagccgatccagaggcctctaaggtaggacttgactggtgcagtattggtgg

SEQ ID NO: 800717 - DNA, 120 bp, Artificial Sequence
  ENSG00000253147_5 (sequence is synthesized)
ctgctgggtcagatgagctccctgctattccaagaaacaatacatgtttgcagccactaagatttgaggacttttgttattactgcctatcctgacagactcaggtgctacaactattta

SEQ ID NO: 800718 - DNA, 120 bp, Artificial Sequence
  ENSG00000253147_6 (sequence is synthesized)
agggctgaccggatctcactctggcacctagactggagggtactggcatgaactcctgggctcagatgtcctcccacctccaccttctgagtagccggaattacaggaatgaaccatcat

SEQ ID NO: 800719 - DNA, 120 bp, Artificial Sequence
  ENSG00000253147_7 (sequence is synthesized)
agatttcaagctccctgaagatgaaggctgaatcctacacctcgcttgtatcctccatggctcattgaacaagtgctagctagctacatggagactgctcaataaatattgaataactca

SEQ ID NO: 800720 - DNA, 120 bp, Artificial Sequence
  ENSG00000253141_0 (sequence is synthesized)
aggaaagtcagtctgcttttgatgaggaggttcaggaaggcattatttgtctcaatctatcccctctccccaacagtgaacaagaaagcagatatccttgctgactgttggcagccgttg

SEQ ID NO: 800721 - DNA, 120 bp, Artificial Sequence
  ENSG00000253141_1 (sequence is synthesized)
tgggaccacaaaggcaccagcctcaggagatgggaagactgagttgccagggacgttgctgagccattagagccatccttacccacaagcccaccccaccttgggacttcctcttgggca

SEQ ID NO: 800722 - DNA, 120 bp, Artificial Sequence
  ENSG00000253141_2 (sequence is synthesized)
agtctgtgaatctccatgttgttgaatccgttttgaattggcttttctttttcttgaagctcaaggcattttaattggcataacctagcctataaaaggaagattaatttccttgaccgc

SEQ ID NO: 800723 - DNA, 120 bp, Artificial Sequence
  ENSG00000253141_3 (sequence is synthesized)
aagaaagtggaattcgaattagagggaatgagatattgagatatctccctccatagccagagctgccttgcaagacagcagggttcaggcttcgagttgtggtgcaattggcccacatcc

SEQ ID NO: 800724 - DNA, 120 bp, Artificial Sequence
  ENSG00000253141_4 (sequence is synthesized)
accccaccctctcttcacgcagcagatgactgggacataaagaagctgatggggccactgccaccgaatttccacctgcagcccttctcgggggccaccaccatgctcctcaacagctgt

SEQ ID NO: 800725 - DNA, 120 bp, Artificial Sequence
  ENSG00000253141_5 (sequence is synthesized)
cactgacaggacagagcttgaggatcttgaggagctactgaccctgcagaaccgctctgagaccagggggagcttttccaggtgaaacgattcatggctaggctgatttaactaatgggt

SEQ ID NO: 800726 - DNA, 120 bp, Artificial Sequence
  ENSG00000253141_6 (sequence is synthesized)
ttttcatcagagtaatacatattcagatatgtcccatgctcagtgatggcatcaagcaatgtcaggattagatgggaaattagaggcaatttgctccaagtgtctacttgtgtaccctcc

SEQ ID NO: 800727 - DNA, 120 bp, Artificial Sequence
  ENSG00000253141_7 (sequence is synthesized)
caatggtcttctgtcttctaggaagctcccaagttcattttttattcaaagcgaaccaggagagttctgtctacactcatttctatgcatagaacttgacgctttaaaaagacaatgctg

SEQ ID NO: 800728 - DNA, 120 bp, Artificial Sequence
  ENSG00000253141_8 (sequence is synthesized)
aattctagtttccctgcccctacaccagcccaatcctctgttcttattcccatctgacggtgtcacccagggcactaacccagtagtaccaggcaccgaataggcatccagtaggtgttg

SEQ ID NO: 800729 - DNA, 120 bp, Artificial Sequence
  ENSG00000253141_9 (sequence is synthesized)
aatgtcgtatgtagcggacaagggccactttggaaagtcatgtttcatcgcttcactcctccctgtgagtctgggtgctctgaagcccctctctcgatccccccatgagacacacagaat

SEQ ID NO: 800730 - DNA, 120 bp, Artificial Sequence
  ENSG00000253141_10 (sequence is synthesized)
ttagaccctgtcatcaatgttaaaggtcagctaacatggtttccaaaccaagcatgtgtcaccatgtatcacttgggcttgaacccaggttggctgaattatccatgcatctaggcaacc

SEQ ID NO: 800731 - DNA, 120 bp, Artificial Sequence
  ENSG00000253141_11 (sequence is synthesized)
acctatacatccattcatgcagctcatggaaatgtttggagtgcaagcacagttccaggtgttgtggcagatacaaagaatatgatagagggcctggtcctggtggatccaggatgttgt

SEQ ID NO: 800732 - DNA, 120 bp, Artificial Sequence
  ENSG00000253141_12 (sequence is synthesized)
gggggagactgttctaatgagccatctctgtgttgagttatgtgataagagctgtgatagagattctgcaaagaatccgggcctgggcattcaggcctgggatctgcacaagtgggtcct

SEQ ID NO: 800733 - DNA, 120 bp, Artificial Sequence
  ENSG00000253141_13 (sequence is synthesized)
cgtgctgcccttatttaaggctcaaaaggtaccactctcccagacatcaataccacttcactgtcaaatttcccttcccacaatcctgtcctgtggtggtgtgctggagagggagcatta

SEQ ID NO: 800734 - DNA, 78 bp, Artificial Sequence
  ENSG00000253141_14 (sequence is synthesized)
caatcctgtcctgtggtggtgtgctggagagggagcattacctccagtgtcccttaaccatacctaagaatataacta

SEQ ID NO: 800735 - DNA, 120 bp, Artificial Sequence
  ENSG00000253141_15 (sequence is synthesized)
gcagaaccgctctgagaccagggggagcttttccagtagaatgaaaggattgcttctgctttaacctctgatgctttatcaaggccgagctgagggctgcactatcgggagcttgatgag

SEQ ID NO: 800736 - DNA, 120 bp, Artificial Sequence
  ENSG00000253141_16 (sequence is synthesized)
acaatgctacatccctgcctctaacatcgggacaaccaggccttcctcacaggcattatcgggactataagataagatgcataaggttttatctccagagagaaggcagctatggtccaa

SEQ ID NO: 800737 - DNA, 120 bp, Artificial Sequence
  ENSG00000253141_17 (sequence is synthesized)
ggtcaaacacagaggctacaactagaaacctctagaccaagtttggtccatgtggtgttctctatagagtttctttctttttaatttggattttcaatactttaaaattaagagcacaca

SEQ ID NO: 800738 - DNA, 120 bp, Artificial Sequence
  ENSG00000253143_0 (sequence is synthesized)
ttctgagaagggcaagtggtccaaaatgggaggtgggacttcatccatttcatcaataaacatttgctaaatgtttatactaaggctaggtattgagacagacacaaacacaggataact

SEQ ID NO: 800739 - DNA, 120 bp, Artificial Sequence
  ENSG00000253143_1 (sequence is synthesized)
aaaatatgtctttgttgctggacatggtggcatgtacctgtagtcccagatacttgggagctgaggcaggaggacagcttgagcccagaacttctgggctgtagtgagctatgctcactg

SEQ ID NO: 800740 - DNA, 120 bp, Artificial Sequence
  ENSG00000253143_2 (sequence is synthesized)
ggtgtccacactaaactggcatcaatatcatgacctcccaggagtgaggcccactaggttgcctaaggagaggtgaactggcccaggtcagaaatgaagtaggtcaaaatttctgtgcta

SEQ ID NO: 800741 - DNA, 120 bp, Artificial Sequence
  ENSG00000253143_3 (sequence is synthesized)
cacctatgaatagccacttcactccagcctgggaaacttagcaagaccctatctctaaaagctagctaaacaaataatatgcctttgtccttggagagctcactgcctaaaggagagaga

SEQ ID NO: 800742 - DNA, 120 bp, Artificial Sequence
  ENSG00000253143_4 (sequence is synthesized)
ctgaaaattaaataaataattacagttcaacattataacacagatatgtgcaaatgattgaaggaactctgatacttacgggagcatgaaggaagactgacccacatcagagcaaataag

SEQ ID NO: 800743 - DNA, 120 bp, Artificial Sequence
  ENSG00000253143_5 (sequence is synthesized)
aaacgacatttgtgccaaagcttaaagagtgagttagattttatttagggtttaggttctaaatgctgatgttggccgggtgcggtggtcttagaaaatgcaacatttgagcgggaaagc

SEQ ID NO: 800744 - DNA, 120 bp, Artificial Sequence
  ENSG00000253142_0 (sequence is synthesized)
gggagacatggttcatttcatagcatatgggaaaggctgagggaagagcaggtttaggagatgagtacaagagctcagggcctctgatctggacatgatcttcatcagatcacactccag

SEQ ID NO: 800745 - DNA, 120 bp, Artificial Sequence
  ENSG00000253142_1 (sequence is synthesized)
ctatgacagtgattgtccaagctccattccctgtctctcctcccagactaggacatcttcttcttctgggttcccacatcattctaggttccagtggcacttttcttacttgatgcaagg

SEQ ID NO: 800746 - DNA, 120 bp, Artificial Sequence
  ENSG00000253142_2 (sequence is synthesized)
atgtgggatttgggaacatggtttcatctctccaaccacaataccagcaactttcaggcaactgtctgatgccacacagcaaatctgccccagggcagagggggcagtaggtaggcagta

SEQ ID NO: 800747 - DNA, 120 bp, Artificial Sequence
  ENSG00000253142_3 (sequence is synthesized)
aatgccacctaggctgggttcaaggatgtggccaaaaaagcagaacttccgacaaacttggaaaactagtcaggttactgaaacaggaacttaagcttctcagcaaattagacgtaacat

SEQ ID NO: 800748 - DNA, 120 bp, Artificial Sequence
  ENSG00000253142_4 (sequence is synthesized)
ataaactggaaaaatcagtgaacttgaagatagagcaacagaaatgatctaaagaaatataaagagagaaaagaaggctgggggacagaacagagcacccaagcattgtgagacaacata

SEQ ID NO: 800749 - DNA, 120 bp, Artificial Sequence
  ENSG00000253142_5 (sequence is synthesized)
aaatggtctaacatatgtatagttgggatctcattaagaaaagagagcagagtagaactatttgaagagataatgaccaagaacttgttaaagaaaggcaacataccacaagtccaagat

SEQ ID NO: 800750 - DNA, 120 bp, Artificial Sequence
  ENSG00000253142_6 (sequence is synthesized)
actcagagaaccttaatcagaatttttaaaaaaatccacctagatgtgtcatgatcaaactgctaaaaaccaaagataaattctgaagacaaccaaggaaaacagaatgccggtgtcccc

SEQ ID NO: 800751 - DNA, 120 bp, Artificial Sequence
  ENSG00000259163_0 (sequence is synthesized)
agtagcccaaaagacaaagtccttctcaacaaagcctaaccaacaggcaatggattatagtgattcagaggaaagataagaaggttcctttgtcttggacctccactagacatcaaggaa

SEQ ID NO: 800752 - DNA, 120 bp, Artificial Sequence
  ENSG00000259163_1 (sequence is synthesized)
acatgccaaaaaagtaaacaacaaaggcccccacacctttccaaactacaacccaaaataagttgatctgagaaacaaattgcaatgccgcatgcaaagcagatgtgtccaaattcatgt

SEQ ID NO: 800753 - DNA, 120 bp, Artificial Sequence
  ENSG00000259163_2 (sequence is synthesized)
aggaccagacacatcctgaacctttcagtgcaacagctgttcaagactttcttcaaaatcatccaagcacaagggttgataaaatacacacaaaatggctgatgctcaaaccaaccaaaa

SEQ ID NO: 800754 - DNA, 120 bp, Artificial Sequence
  ENSG00000259163_3 (sequence is synthesized)
cttcaaactgaagagctgaaggagttgtatcaagatacagagtgcagcaagtataggaaacattagagaaactgacctgtctggagatggcaagctgcagagccaggtagaaagctgctt

SEQ ID NO: 800755 - DNA, 120 bp, Artificial Sequence
  ENSG00000259163_4 (sequence is synthesized)
ggtgatctgtgggtgacaggctgtgggccctgaaaaagtatttacggctattagtacatgggagaggaggccatttttactttccctatcaagcaagtcttctccacatttgcattctta

SEQ ID NO: 800756 - DNA, 120 bp, Artificial Sequence
  ENSG00000259163_5 (sequence is synthesized)
tactaagggcccgtatttatttaactatgtaatgcttcatttaaactcttcttctttgtccacctacacatgtaaaccatttccctcttaccactgtataaaggtacagaataggagtgc

SEQ ID NO: 800757 - DNA, 120 bp, Artificial Sequence
  ENSG00000259163_6 (sequence is synthesized)
ttccatgcaggtttggcagtaaccagggagaattagaacccgaagctagatttcgaaatagagctctggactgaagcattcttgcacaaccatcccacagatggcttccggtctcgctcc

SEQ ID NO: 800758 - DNA, 120 bp, Artificial Sequence
  ENSG00000259163_7 (sequence is synthesized)
tctccccagcagatgggtctctgtgtcgtgctgggacgcagtgaagccatgtgtgcacttggcaaggcgatggctgctttgacagggtcttactctatcacccaggctggagtgcagtgg

SEQ ID NO: 800759 - DNA, 120 bp, Artificial Sequence
  ENSG00000259163_8 (sequence is synthesized)
atcactgctcattgcagcctcaacctcccagggcccaagcgatcctcccatcttagcctcccaaggtgctgggaccacaggcgtgctccccacgcccagctaatttatagaattttttgt

SEQ ID NO: 800760 - DNA, 120 bp, Artificial Sequence
  ENSG00000259163_9 (sequence is synthesized)
ttttttgtagacccggggtttcaacatgctatccaggctagtctggaactactaggctcaagtgatcctcccactttggcatcccaaaaccctgggattacaggcataagccaccacgcc

SEQ ID NO: 800761 - DNA, 120 bp, Artificial Sequence
  ENSG00000259163_10 (sequence is synthesized)
aaatggcttatttctaaggtccactcagtatatagcagcttttataattttacaaatattggctttccatgaatttgtacatcaaagaatatttttctttggtgtttataaaagtgagat

SEQ ID NO: 800762 - DNA, 120 bp, Artificial Sequence
  ENSG00000259163_11 (sequence is synthesized)
tgaaaaatcatggtttctctcataattattcaggaaaaataatacacaattatgaagaaatttttagatttattttatcttctttcacaaataataaatttacagaaccctcaaaaagaa

SEQ ID NO: 800763 - DNA, 120 bp, Artificial Sequence
  ENSG00000253149_0 (sequence is synthesized)
cttgagacgtccttgcagaccctctccctcacctgcactgtctctggattccccatcataaccagtgtgtcctgctagaattgtatctgcttgcccctagaagatggacaggagtggatc

SEQ ID NO: 800764 - DNA, 120 bp, Artificial Sequence
  ENSG00000253149_1 (sequence is synthesized)
gtgaagggagcacaaattacaacccactgctcaagagtccatatccagatccaagaaacagttcttacagctgagctctgtgcccagtgaacacacaactacgcatttttaagcaaaaga

SEQ ID NO: 800765 - DNA, 120 bp, Artificial Sequence
  ENSG00000259166_0 (sequence is synthesized)
tctccacaatgccaaaagtgcaatgagcttcatgctgaatactgatttgaagtgtggttcaccacacagacttaaattgtccttcccacaactttatctgagaagcatgacaacggtgac

SEQ ID NO: 800766 - DNA, 120 bp, Artificial Sequence
  ENSG00000259166_1 (sequence is synthesized)
aatcacaggactagttttattggtcaggatgtggtgttactatattaaagcgcttcaagttttcatagcgctcgtcaaacagagacctcggaacgctctgcagacattaattaatgttcg

SEQ ID NO: 800767 - DNA, 120 bp, Artificial Sequence
  ENSG00000259166_2 (sequence is synthesized)
ttccgatgagaaaggaagaaacgaggggttcaaggccgcgccgttgtgagtccgctgcggaactaggaactgaaaccccgtggttcccaatgagccagcgaaagtctgtcgaagtattga

SEQ ID NO: 800768 - DNA, 120 bp, Artificial Sequence
  ENSG00000259166_3 (sequence is synthesized)
gcacccctattgaagactgtgggagttttggcggcttaatgggattgtgttcggtccttcaggctctcctttaaaagattccatggcaccaacgagactccaataaaagggcctctctaa

SEQ ID NO: 800769 - DNA, 120 bp, Artificial Sequence
  ENSG00000280881_0 (sequence is synthesized)
ggcagaaggggtgaaaagtagcctcgatgtgaaagtccttgtgtgtccctgaggggggaagtaagtcacagtcgggacactggttcctgtcactgggtgcagcacaaagaaggaccccag

SEQ ID NO: 800770 - DNA, 120 bp, Artificial Sequence
  ENSG00000280881_1 (sequence is synthesized)
gacatgcggtgcagacgggagcacagagagggagaaaaccacacacgtggccattgatgcccttggttgacagagttgacgggattttctctggctctcaccttgagggcatcatcagca

SEQ ID NO: 800771 - DNA, 120 bp, Artificial Sequence
  ENSG00000280881_2 (sequence is synthesized)
tcctgaagtcactagcgggcctctgtgcagatgtcctttcgaggggcttcaggctgtggaagtgaccagtgaacacaggacctgcctggactcccagcctcacagcacagcaccacagcc

SEQ ID NO: 800772 - DNA, 120 bp, Artificial Sequence
  ENSG00000280881_3 (sequence is synthesized)
tggaactttactccatcaaaacatccaaataaaaatatgtagactccccaccctatcccatctgctatagggttctaattcccccacagacatcccctcacagtgctttctcccatgacg

SEQ ID NO: 800773 - DNA, 120 bp, Artificial Sequence
  ENSG00000280881_4 (sequence is synthesized)
ggggactcctgagctggactccatccctcccctaccagaaaagcacaggtgctgtggcatgagttcaaccgcctgaaattccctgatcttcagagtaataattctaaaatagggcaataa

SEQ ID NO: 800774 - DNA, 120 bp, Artificial Sequence
  ENSG00000280881_5 (sequence is synthesized)
tacccctgtcagtgttcttggaagaacttctcattacttgaggccccagaaatgcaaacactcctccggttttccagcgtgctgtcaaccctggcatcagagctcttcctgccgtgggca

SEQ ID NO: 800775 - DNA, 120 bp, Artificial Sequence
  ENSG00000225815_0 (sequence is synthesized)
gatcagcctaggcctattaatcagtctaagttccagcctggactgagcgagtctcgagaaagccagctcctctccttttgtgctgaagggcaggggaggggaaccaagattgaggatcaa

SEQ ID NO: 800776 - DNA, 120 bp, Artificial Sequence
  ENSG00000225815_1 (sequence is synthesized)
ggctgcgctgcttcagtgccttcgtggacaaccaaattccagttgccagctttcttcgtaggcatctgttcctcacaaaatggcttcagcggaacataactttccaaaagaagagcactc

SEQ ID NO: 800777 - DNA, 120 bp, Artificial Sequence
  ENSG00000225815_2 (sequence is synthesized)
cagcccctgcctctacgttcacctatctttctgagtcagcttttcagcaacaaatgccaccaagctagttagctgacagtaccaactacagaaggaaatcatgttggaaatgtcactgag

SEQ ID NO: 800778 - DNA, 120 bp, Artificial Sequence
  ENSG00000225815_3 (sequence is synthesized)
gcagaaggagactgggtggcaagtgtatttaggattctgaggaaaatgtctgttaagtcgaccttggtaacttaactgaaacagtatatgtgtaaatccattgaaaatccctggcctttt

SEQ ID NO: 800779 - DNA, 120 bp, Artificial Sequence
  ENSG00000225815_4 (sequence is synthesized)
acaacttctgtcccaatggaaatcagatcacaggactgtttacaagagaccacgattcatttggataaagacccatgacagcacggcccaggattatttgaaattttagtaacctaagct

SEQ ID NO: 800780 - DNA, 120 bp, Artificial Sequence
  ENSG00000225815_5 (sequence is synthesized)
ttaaaaatattctaaaagcaaaataatgaggggcagccacttagaaataacgactgtgaacaaatgacctccactagaagactccttaacaagtcggaaagaagcaaggaaaggggaaga

SEQ ID NO: 800781 - DNA, 120 bp, Artificial Sequence
  ENSG00000225815_6 (sequence is synthesized)
tcatagtgagggtggacaagacccgaggcagaggaacctgaagcccgccattaccagcggagcagcttccggttgttcacttgacttctctctgtctctgcctccagcaccggtgatcca

SEQ ID NO: 800782 - DNA, 120 bp, Artificial Sequence
  ENSG00000225815_7 (sequence is synthesized)
ctcatggcactctggcaatcacttgtaatttttattgtttaaagaaatgtcagcatttccgttttccctaactttagttaacctgggcccttcacgtagctaagtggccaccagaaaagc

SEQ ID NO: 800783 - DNA, 120 bp, Artificial Sequence
  ENSG00000225815_8 (sequence is synthesized)
actttatgctgttgtttcatagcacagcaggtcctcagttttgctgtaattttattgctgtaaaaagaaagcataaagtgtgtacaaaagaatttaaatgttaaaatgaaatatgataga

SEQ ID NO: 800784 - DNA, 120 bp, Artificial Sequence
  ENSG00000225811_0 (sequence is synthesized)
aagtctccgaagggtgctgtccctgtcaatgaaataagaagcggctagctgatgtagcgtctccagagtgaccgaagagctattggtggtggaatcacttccttcagctcgtttgctcaa

SEQ ID NO: 800785 - DNA, 120 bp, Artificial Sequence
  ENSG00000225811_1 (sequence is synthesized)
cttccgcttgtccacaaaaattgttagttttgggttgctgagagcataaatgtgaaaataggcaggagttacagaattacagagttcctctacattaagaataactttcaggcccatttg

SEQ ID NO: 800786 - DNA, 120 bp, Artificial Sequence
  ENSG00000225811_2 (sequence is synthesized)
ttttacatcctactggtgtttaacctggagtcttttgctattttacgaagagtattgaaacatgtctctctggagtcaaatatttcatttcagacacctccctttatgatgtcaatctaa

SEQ ID NO: 800787 - DNA, 120 bp, Artificial Sequence
  ENSG00000225811_3 (sequence is synthesized)
gggctgagctaagggaaataaatgtgattattgttatgagggcatacagtgagatggcagcagcctgtaagccagaaacagaagcatcaccagaaactgaccatgctggtaccctaatct

SEQ ID NO: 800788 - DNA, 120 bp, Artificial Sequence
  ENSG00000225811_4 (sequence is synthesized)
cagacttccagatttctgaagaacttcaaagaaacaaaagtctattgtttaagccacctagtctgtcacattttgttatggcaatgtgagctaactaatacactacctttaaaatataaa

SEQ ID NO: 800789 - DNA, 120 bp, Artificial Sequence
  ENSG00000225818_0 (sequence is synthesized)
ttatcagtgtatatgaatgagacaggaaaagcagatatgttgaccaggaagaaaaataagagaaattagagagatcaggcatttcttctatctgcctcagaaagcaagatggtgctaaca

SEQ ID NO: 800790 - DNA, 120 bp, Artificial Sequence
  ENSG00000225818_1 (sequence is synthesized)
atgggatgtgctagagggctggaatatttgaggatggggtggcaaaaactggaaaaagatttttaacagaaagtcagagatgccaaagattaccttcctttttattcagacaaactatcc

SEQ ID NO: 800791 - DNA, 120 bp, Artificial Sequence
  ENSG00000225818_2 (sequence is synthesized)
aatcctgaaactaggactctctttctcaatcagccaacaagaagcctagtgagagccaaaggaggacaactgcagcatcagtcaatcagcaagtgtgggggactctggggacagaattta

SEQ ID NO: 800792 - DNA, 120 bp, Artificial Sequence
  ENSG00000225818_3 (sequence is synthesized)
gaagatctcctttctcttcattacttgtcttctgtgtacaatgctttattaccttcacataagcaaagggcttggtggagagcagagagcaaatagataatataagaatctcacccccaa

SEQ ID NO: 800793 - DNA, 120 bp, Artificial Sequence
  ENSG00000225818_4 (sequence is synthesized)
ctggaatatttgaggatggggtggcaaaaactggaaaaagatttttaacagaaagtcagagatgccaaagattaccttcctttttattcaggtaaactgacaaactatcctgtaaggtcg

SEQ ID NO: 800794 - DNA, 120 bp, Artificial Sequence
  ENSG00000225819_0 (sequence is synthesized)
aacctggcatgagcatgaaactggaaattaacaaggaatgatgcagatgaacacctgcagcaagaaccactctacacctgtccacaggatgtctgaaaaatgaggctgtgttcccacaaa

SEQ ID NO: 800795 - DNA, 120 bp, Artificial Sequence
  ENSG00000225819_1 (sequence is synthesized)
tttttgcctcagaatcccaagcggtaagcaccatgaacccctcagttcatatctcaatcttcctttctattggattttgttctcaatttctaacttcttactagattatatctcatttaa

SEQ ID NO: 800796 - DNA, 120 bp, Artificial Sequence
  ENSG00000225819_2 (sequence is synthesized)
ttctacttgttaaagctgatttattctaaaatttgatgaagcaaaagtctggattttgcctcaatataataagaaccacttaattataaacattgatgcagggctttgctaacctgcatt

SEQ ID NO: 800797 - DNA, 120 bp, Artificial Sequence
  ENSG00000229306_0 (sequence is synthesized)
gtggtggctcagtgttcactctgaaaaatgaaaaattgcccatttttgtgaaaaagttctacgatatgtgaatctcgctctgtggtccaagctggagtgcagtggcgggagctcggctca

SEQ ID NO: 800798 - DNA, 120 bp, Artificial Sequence
  ENSG00000229306_1 (sequence is synthesized)
gacggctaattttttctttgtatacttttatttaattcggcttaggttacttgtttattagtagtagttttgcatctatgggattgttgtataaaataaatggtttaaatatgtaggata

SEQ ID NO: 800799 - DNA, 120 bp, Artificial Sequence
  ENSG00000229307_0 (sequence is synthesized)
aaagccctttctatgaaggttacaggctctatatctgctttcatgatgacatttgtctatgtttttgtaggattctattctgacaagcacaaaaccctgcaccaagttgaacctgtcctt

SEQ ID NO: 800800 - DNA, 120 bp, Artificial Sequence
  ENSG00000229307_1 (sequence is synthesized)
aacagaagagcagcgtagcagtctgtctattcttgctccacattcagctaaatgccaactccgatccctttgagatggtgaacaggctgaacccagggatcgtgtcatccctcagtatcc

SEQ ID NO: 800801 - DNA, 120 bp, Artificial Sequence
  ENSG00000229307_2 (sequence is synthesized)
agacttcttcagagaaccatgtggtgaaacttcttgattaaggtcgcaaaagaagagacaactatacattttgtgatgctgaagggaaatgtacaagagcactactgaagaagtccagcc

SEQ ID NO: 800802 - DNA, 120 bp, Artificial Sequence
  ENSG00000229301_0 (sequence is synthesized)
ttattgtccctcccctggccacaccccttcagacatgcgtagtgctccccttggtccagcgcgggaagctccctcgtgagtgtccgaaactattagctcactcactgcctcatgtgaaga

SEQ ID NO: 800803 - DNA, 120 bp, Artificial Sequence
  ENSG00000229301_1 (sequence is synthesized)
ttaactcttaagtactccacaactacacgcttttgaaactggcgttggcatagcgttagttctgtgcagggcggacgcagcaggacagaatctccctgggcatcttttcggagcatcaat

SEQ ID NO: 800804 - DNA, 120 bp, Artificial Sequence
  ENSG00000229301_2 (sequence is synthesized)
gcagaaataaggagggacagctctacctatgtttggagtccatgaatgtgtcatcttgctgtgtttgtaaatagaaatttatttcacaaaatgactcaactgcttcttcactaacatgtt

SEQ ID NO: 800805 - DNA, 63 bp, Artificial Sequence
  ENSG00000229301_3 (sequence is synthesized)
atttcacaaaatgactcaactgcttcttcactaacatgttcaaaaacttgcaagaggaagatc

SEQ ID NO: 800806 - DNA, 120 bp, Artificial Sequence
  ENSG00000229308_0 (sequence is synthesized)
agattgggaaagaagatttatttctgcaactggttacagggagaaggtcggagtaactaaccagaccaactcacagttgcaatttattttagcttatatatataattgaagctttttgct

SEQ ID NO: 800807 - DNA, 120 bp, Artificial Sequence
  ENSG00000229308_1 (sequence is synthesized)
tgcctgcaggagtgtttcttaatcaatctaatcttaactaggggtctgcaagtaggaaagtttattagatttcttcctgaatggacgagtttaagaaaatccaggagctgtaacactcac

SEQ ID NO: 800808 - DNA, 76 bp, Artificial Sequence
  ENSG00000229308_2 (sequence is synthesized)
gtctcaccgcaaaggtctccagcttcactgctgagccagcgagactatgaacccaccagaaggaaaaaactccgaa

SEQ ID NO: 800809 - DNA, 120 bp, Artificial Sequence
  ENSG00000229309_0 (sequence is synthesized)
ccagcttgcaggtggcagataatgagacttctcagcctccataatcatataatgagaatgaagacttttatgatgagccacttctactaaatgaatattaaacggcaaactctctgcatg

SEQ ID NO: 800810 - DNA, 120 bp, Artificial Sequence
  ENSG00000229309_1 (sequence is synthesized)
aggagcagttttacaagcaccacatctgccacacacaggtagcaaataccactggaaggtccaagatccaggggcccacatctgctaagggctttcatgccgtgtcatcccatgaggaaa

SEQ ID NO: 800811 - DNA, 120 bp, Artificial Sequence
  ENSG00000229309_2 (sequence is synthesized)
gacagagggatcctgttctctgcaaatgcaaacagttcttttattacaaggctttttcaaggggaagagaaaactcatttggcagataaggttaaccttttaaaaaatcaagtgtgttaa

SEQ ID NO: 800812 - DNA, 60 bp, Artificial Sequence
  ENSG00000278071_0 (sequence is synthesized)
gacgcagctgatttttgtattttaagtacagctggggtttcatcatgttggtcaggctgg

SEQ ID NO: 800813 - DNA, 120 bp, Artificial Sequence
  ENSG00000278071_1 (sequence is synthesized)
ctgggattacaggcgtgagccaccttgtccggccctgaagcttatagtttttaatattctataattcctgaagttttcatagtctgcctctttgcttcttatttttcaggaaacaagtta

SEQ ID NO: 800814 - DNA, 120 bp, Artificial Sequence
  ENSG00000278071_2 (sequence is synthesized)
ccggtgcgttgtttgcaagagtgcttcagcagtcagtgtctttcttgttgtttgccagataaagatattttgtctgcatatctgcatagcttaacagtaactcaggtgctgacgtagaag

SEQ ID NO: 800815 - DNA, 120 bp, Artificial Sequence
  ENSG00000278071_3 (sequence is synthesized)
taaagcatgtgagaatgcttttggatcatacacttttcacataataacaaatttttctcgaattggtttaacagtatcgttttatgctttttaaaatgtatctttgatatgagttgtttg

SEQ ID NO: 800816 - DNA, 120 bp, Artificial Sequence
  ENSG00000278071_4 (sequence is synthesized)
tcatttgcacaagttaatgattttacctccccagctgcaacatatttttcaaatttaggaacccaacttaaccatctgaacatccttcttaaaaaaaataaagaagaaagctcacaacta

SEQ ID NO: 800817 - DNA, 120 bp, Artificial Sequence
  ENSG00000278075_0 (sequence is synthesized)
cagttcccagaccctcccccgcgctgtgtgcctggcgtcctcggacccagccatgtcgtgggcacctggggcaccagctgacctgcctgtcgggggaggcaggtctgagccccaggtggt

SEQ ID NO: 800818 - DNA, 120 bp, Artificial Sequence
  ENSG00000278075_1 (sequence is synthesized)
ctcctgctgccgtgtaatggacagtgggaccctctggtgaggtgtccccctcctgcttcgggctgcggccaccatgtctcaggtttcctggatgaactcattaaaatgaagcatagagca

SEQ ID NO: 800819 - DNA, 120 bp, Artificial Sequence
  ENSG00000227418_0 (sequence is synthesized)
aaggcactctggcacccagttttggaactgcagttttaaaagtcataaattgaatgaaaatgatagcaaaggtggaggtttttaaagagctatttataggtccctggacagcatcttttt

SEQ ID NO: 800820 - DNA, 120 bp, Artificial Sequence
  ENSG00000227418_1 (sequence is synthesized)
tcaattaggcagcaacctttttgccctatgccgtaacctgtgtctgcaacttcctctaattgggaaatagttaagcagattcatagagctgaatgataaaattgtactacgagatgcact

SEQ ID NO: 800821 - DNA, 120 bp, Artificial Sequence
  ENSG00000227418_2 (sequence is synthesized)
gggactcaacgtgaccttatcaagtgagcaggcttggtgcatttgacacttcatgatatcagccaaagtggaactaaaaacagctcctggaagaggactatgacatcatcaggttgggag

SEQ ID NO: 800822 - DNA, 120 bp, Artificial Sequence
  ENSG00000227418_3 (sequence is synthesized)
tctccagggacagcggaccctttggaaaaggactagaaagtgtgaaatctattagtcttcgatatgaaattctctgtctctgtaaaagcatttcatatttacaagacacaggcctactcc

SEQ ID NO: 800823 - DNA, 120 bp, Artificial Sequence
  ENSG00000227418_4 (sequence is synthesized)
tagggcagcaaaaagtggcaacaggcaagcagagggaaaagagatcatgaggcatttcagagtgcactgtcttttcatatatttctcaatgccgtatgtttggttttattttggccaagc

SEQ ID NO: 800824 - DNA, 120 bp, Artificial Sequence
  ENSG00000227418_5 (sequence is synthesized)
ataacaatctgctcaagaaaaaaaaatctggagaaaacaaaggtgcctttgccaatgttatgtttctttttgacaagccctgagatttctgaggggaattcacataaatgggatcaggtc

SEQ ID NO: 800825 - DNA, 120 bp, Artificial Sequence
  ENSG00000227418_6 (sequence is synthesized)
aaagatacaacctttgcagagagcatgctttcctaagggtaggcacgtggaggactaagggtaaagcattcttcaagatcagttaatcaagaaaggtgctctttgcattctgaaatgccc

SEQ ID NO: 800826 - DNA, 120 bp, Artificial Sequence
  ENSG00000227418_7 (sequence is synthesized)
ttgttgcaaatattggttatattgattaaatttacacttaatggaaacaacctttaacttacagatgaacaaacccacaaaagcaaaaaatcaaaagccctacctatgatttcatatttt

SEQ ID NO: 800827 - DNA, 120 bp, Artificial Sequence
  ENSG00000227418_8 (sequence is synthesized)
ctgtgtaactggattaaaggattcctgcttgcttttgggcataaatgataatggaatatttccaggtattgtttaaaatgagggcccatctacaaattcttagcaatactttggataatt

SEQ ID NO: 800828 - DNA, 120 bp, Artificial Sequence
  ENSG00000227418_9 (sequence is synthesized)
ctaaaattcagctggacattgtctaattgttttttatatacatctttgctagaatttcaaattttaagtatgtgaatttagttaattagctgtgctgatcaattcaaaaacattactttc

SEQ ID NO: 800829 - DNA, 120 bp, Artificial Sequence
  ENSG00000227418_10 (sequence is synthesized)
ctaaattttagactatgaaggtcataaattcaacaaatatatctacacatacaattatagattgtttttcattataatgtcttcatcttaacagaattgtctttgtgattgtttttagaa

SEQ ID NO: 800830 - DNA, 120 bp, Artificial Sequence
  ENSG00000227418_11 (sequence is synthesized)
aactgagagttttaattcataattacttgatcaaaaaattgtgggaacaatccagcattaattgtatgtgattgtttttatgtacataaggagtcttaagcttggtgccttgaagtcttt

SEQ ID NO: 800831 - DNA, 120 bp, Artificial Sequence
  ENSG00000227418_12 (sequence is synthesized)
tgtacttagtcccatgtttaaaattactactttatatctaaagcatttatgtttttcaattcaatttacatgatgctaattatggcaattataacaaatattaaagatttcgaaatagaa

SEQ ID NO: 800832 - DNA, 120 bp, Artificial Sequence
  ENSG00000227418_13 (sequence is synthesized)
agctgaatgataaaattgtactacgagatgcactgggactcaacgtgaccttatcaagtgagatggagtcttgccctgtctccaaggctggagcccaatggtgtgatcttggctcactgc

SEQ ID NO: 800833 - DNA, 120 bp, Artificial Sequence
  ENSG00000245293_0 (sequence is synthesized)
agtgctgatcagatgacagttacaatagaatcattcttcttttgccagaagtgcaaatcatttcccaaatgtggccttgggttttcaggagcccagtagtgacttctgtggtccctgact

SEQ ID NO: 800834 - DNA, 120 bp, Artificial Sequence
  ENSG00000245293_1 (sequence is synthesized)
tgcaccctcaccctattattggagttgtgcttcatttctctgtgtggaaagagtgaagtattgggaaatatgaccctggtcaccaaaccaactcagagacagcaagtgctttggcaaagg

SEQ ID NO: 800835 - DNA, 120 bp, Artificial Sequence
  ENSG00000245293_2 (sequence is synthesized)
aaagggctggcacagagaacagagtcgatttctcattgtcttcaccaatcttctgaacccgtgaatactttttgcatgatgatttgaagcagccaggaggccaagacagcggccaggaga

SEQ ID NO: 800836 - DNA, 120 bp, Artificial Sequence
  ENSG00000245293_3 (sequence is synthesized)
agcagcaaggaattgagccttgtacatttttctcaaaaaaataaaagatggggaaccaccatgctcgagataagaaattagtctgtgaagagaccttcaagttctgtaaatggtagaaaa

SEQ ID NO: 800837 - DNA, 120 bp, Artificial Sequence
  ENSG00000245293_4 (sequence is synthesized)
aaatttaaatgagacatatctttctcaatttgcatcccaattattttcttaaattgtcattcactgtaacctagggaaaacagaattcagaatcacatggcagtaatgattttcatgtcc

SEQ ID NO: 800838 - DNA, 120 bp, Artificial Sequence
  ENSG00000245293_5 (sequence is synthesized)
tttccctaactctaccatgactccgctcccctaacacacctaggtgtctttctttcctttgtggctcatgcaatttcttctgcctgcaattccagtaagaatggagactctgggaatgga

SEQ ID NO: 800839 - DNA, 120 bp, Artificial Sequence
  ENSG00000245293_6 (sequence is synthesized)
tttcagaattattcaggaggaataattttcaggatgtgtgagtgatcaaatctaggggccaagcaagtcaaagagtgaaagaagagctcagaagttgaacacatttaagaggaaagatga

SEQ ID NO: 800840 - DNA, 120 bp, Artificial Sequence
  ENSG00000245293_7 (sequence is synthesized)
aaattttggttcagtggtgtcagtagtcaactagatggaagtgtaagaaggaagatggaaatgggagactacaaaataggaaacagagctacaaagagaaataaagtaatccaaagaaag

SEQ ID NO: 800841 - DNA, 120 bp, Artificial Sequence
  ENSG00000245293_8 (sequence is synthesized)
agcatttattagtggacaccaagagttggacgtagatcctttggaaatgtaatatttcaattgctcacaaattctccaaattgacaatatggcaagtctattcaaagataagtaagtcat

SEQ ID NO: 800842 - DNA, 120 bp, Artificial Sequence
  ENSG00000245293_9 (sequence is synthesized)
ggtacacagaccaactctattacaccaaggacacataccaagactaggagaaaagagagactgggaggaataattctgccttcggaccagaggaagagagcaagagttagagacagcttc

SEQ ID NO: 800843 - DNA, 120 bp, Artificial Sequence
  ENSG00000245293_10 (sequence is synthesized)
ctggaagaggtggcatttgagctagctctttaagtttcaatgggagaagaaagaaaaggcatctggaaacaaggaagcagcagtagcaaatgaggaagaatcagaagggaagccagagag

SEQ ID NO: 800844 - DNA, 120 bp, Artificial Sequence
  ENSG00000245293_11 (sequence is synthesized)
caccattatcaccagaggatataccaaatccagtcattcataagctatttattttgtgtgattttaaacaatagctgctatcggctgggcacggtggttcacgcctataatcctggcact

SEQ ID NO: 800845 - DNA, 67 bp, Artificial Sequence
  ENSG00000245293_12 (sequence is synthesized)
ctaaaaatacaaaataaaaattagccaggcgtggtgtcgttggaaggtggaggttgcagtaagccaa

SEQ ID NO: 800846 - DNA, 120 bp, Artificial Sequence
  ENSG00000245293_13 (sequence is synthesized)
ttttacagagaaggttcctaaattttaatttagtacatatattttttcattctagtttaagttacctgaattagcaatgcactgtgctccataactttatggcatttttatccataaatg

SEQ ID NO: 800847 - DNA, 120 bp, Artificial Sequence
  ENSG00000245293_14 (sequence is synthesized)
gcatttatatttgtgaagttctttgctttattttaaaaagcagtaatggatatatgtttaagtgaatgtggcaacatcggttatccccattaggctatctaaaaccccacgacatgaaaa

SEQ ID NO: 800848 - DNA, 120 bp, Artificial Sequence
  ENSG00000245293_15 (sequence is synthesized)
gggtccactgcattcaaagaaaagaaattatccaagcatcttcactgctctcaccttttcattggccattgaatggtaccaccaaaacagtcgtgttgtgatataataagcaatgatcac

SEQ ID NO: 800849 - DNA, 120 bp, Artificial Sequence
  ENSG00000245293_16 (sequence is synthesized)
atcgatagtgtagtgttcgtgtgctacaagaatgcagatgatcccggcagcactcagcagccagcagattaaatgataccaccagaagtgacgaggcgaatctggacagtagaaaaatta

SEQ ID NO: 800850 - DNA, 120 bp, Artificial Sequence
  ENSG00000245293_17 (sequence is synthesized)
cagagttaataagattcccagagatgaatgtaatgattacagtctgtcctaacgaccttaagtagaataacccaggatcaggaagtcaccagaaggataaaactgataacctaaactgag

SEQ ID NO: 800851 - DNA, 120 bp, Artificial Sequence
  ENSG00000245293_18 (sequence is synthesized)
tcactatgaactgcccaggatctgctcaggtaggagggaggcagaggggctccctggcagcgggcgtaatagtcattcactggggaagctggtaacactagacattctaggccttaccca

SEQ ID NO: 800852 - DNA, 120 bp, Artificial Sequence
  ENSG00000245293_19 (sequence is synthesized)
cgtgaataagctgtttagtaagaaagaacagaattgtttcttattaggtttgctggaattgctgcatactggctcacataaaggagccactttcccactggaaagaaagatagtagggat

SEQ ID NO: 800853 - DNA, 120 bp, Artificial Sequence
  ENSG00000245293_20 (sequence is synthesized)
caaaagaaaaggtggtggtctatgaaaataaggggggaaatgggaaagcaggagtaatttcaggttttaaatttatattatttctccaggggtatgtgtagggtaagggggtcagaagga

SEQ ID NO: 800854 - DNA, 120 bp, Artificial Sequence
  ENSG00000245293_21 (sequence is synthesized)
atggcattgtggctagcaatattttgattctcagcaattttacactgttattgccaatagaaactataaaacattccctctgtaaaggttagggttcctaaccattcacttatggactca

SEQ ID NO: 800855 - DNA, 120 bp, Artificial Sequence
  ENSG00000245293_22 (sequence is synthesized)
gccttcctggtaaagccacttaaaagttcattctacttactagctgtaagagacaactgtggcactcactggtttaaacatgatggtcctccccttctcacacaagtgttaatgacaaat

SEQ ID NO: 800856 - DNA, 120 bp, Artificial Sequence
  ENSG00000245293_23 (sequence is synthesized)
ataactgaaaccagagttcatctctagcagcttggtgatctgttttattttaaagctgtattagctcacaataaaagttaatccaataaactgaaattgatttcatatttaactatgttt

SEQ ID NO: 800857 - DNA, 120 bp, Artificial Sequence
  ENSG00000245293_24 (sequence is synthesized)
acatttatagtgatatttacattcacatgtagaaagatgattgaatagcaaaaggatccatttccagaactttatatttatttatttattttttgagagggagtttcgctcttgtcgccc

SEQ ID NO: 800858 - DNA, 84 bp, Artificial Sequence
  ENSG00000245293_25 (sequence is synthesized)
gcacgatcttggctcactgcaacctctgtcccctgggttcaagcgattctcctcgccattatgcctggctaattttgtattatt

SEQ ID NO: 800859 - DNA, 120 bp, Artificial Sequence
  ENSG00000245293_26 (sequence is synthesized)
gccactgcgcccagcccatttccagaactttaaatgaaataccaaatcaggtatcattcaaatataatctcttggtaaaactagccgttgctctgttggtcccaaatggcacacagtaag

SEQ ID NO: 800860 - DNA, 120 bp, Artificial Sequence
  ENSG00000245293_27 (sequence is synthesized)
gtgagcgcgggcttgagacctgctgagcagcgggacctggcggctggcgttctggtgtggggccgagaacagacccttcttctgaaaagccactggccccttgttctatgaagtcgattt

SEQ ID NO: 800861 - DNA, 120 bp, Artificial Sequence
  ENSG00000245293_28 (sequence is synthesized)
gcccaggcttgacagtgtcttggcacaatgttgtgggaagaataagcacaatgaagaggtgcctcaggaagaggacacactcagccacccacctcatgggactgctatgagaatgactga

SEQ ID NO: 800862 - DNA, 120 bp, Artificial Sequence
  ENSG00000245293_29 (sequence is synthesized)
aataattaattgtgaagagctttgtgcccctgggagtaagaacactatgacacaactggagaaactggttattttaccaaggcttaggctggaatggtgtgctttcctttaaagaatcaa

SEQ ID NO: 800863 - DNA, 120 bp, Artificial Sequence
  ENSG00000245293_30 (sequence is synthesized)
acttgacttatggagccaataaaagcctcttgggaaaactggcctcatacatgtctacacagtccctgtatagggttcctgacctgtggaagagggacgcagatatctcaacccaaccct

SEQ ID NO: 800864 - DNA, 120 bp, Artificial Sequence
  ENSG00000245293_31 (sequence is synthesized)
tcactgaagacatgagatatattataaaacaagaaatttagttccaatgtatccaagctgtcccttcggaaggtgatcagaagagagaaatgagtttggaaaagaaaaggaatagctgaa

SEQ ID NO: 800865 - DNA, 120 bp, Artificial Sequence
  ENSG00000245293_32 (sequence is synthesized)
caagagcaagtgatttcagaaatctaaaccctgagaaaacatgggtaacagagaagaacttctgctgtgatatctacttctgcagggagtagagaaacagaagtagaaggtaaatctgag

SEQ ID NO: 800866 - DNA, 120 bp, Artificial Sequence
  ENSG00000245293_33 (sequence is synthesized)
atgagcacagagatatcaagtgaattgcccaaggtcaccaactagtaagcagtgaagccagcatttggtactttggtagctctgactcggcaggctgttctacccctctttgggaaaagc

SEQ ID NO: 800867 - DNA, 120 bp, Artificial Sequence
  ENSG00000245293_34 (sequence is synthesized)
gtcgcaaatgagcacacagcttcagggtgaattcttacagcaaagaaaaggaaatgggatagcacagccctgctatgtcagaagaaccaacatcagacatcagtggattctcatagcaac

SEQ ID NO: 800868 - DNA, 120 bp, Artificial Sequence
  ENSG00000245293_35 (sequence is synthesized)
atgtaattcccaggctgggtcggtaactcctccaatctttccaattacgttcatttcagatataggggacagaaatgctccagaaaagaactagaccatatttggaggaggagagaagga

SEQ ID NO: 800869 - DNA, 120 bp, Artificial Sequence
  ENSG00000245293_36 (sequence is synthesized)
gtacacccttcatctgtgttgtgaactatgtggaggagagtagtatgttacagtacagagagtcttggggaggccatgtgcatgtgtcttcaggcctccacctcctttcaacttgaggag

SEQ ID NO: 800870 - DNA, 120 bp, Artificial Sequence
  ENSG00000245293_37 (sequence is synthesized)
ctctgcttttccttctattttagaggggttacccaaaatctcatctgaaatctgggttccatggctaaagaagtttaaaaactgatagtgccatgacaaagccctggatcagaagtcaca

SEQ ID NO: 800871 - DNA, 120 bp, Artificial Sequence
  ENSG00000245293_38 (sequence is synthesized)
aaacaagaatccaagaatctctctctcagtttggccacaaacaagtcatgattaatcctgggccaactacttccttgggaaacaccaccatctctcagtcagcaaagacagaaccagaga

SEQ ID NO: 800872 - DNA, 120 bp, Artificial Sequence
  ENSG00000245293_39 (sequence is synthesized)
gagagactctgcaagttcaggaagaaaggttccaactacttttactctccgttgcatctcctaatgtcaccacttcctcagagcagggtttagtcactactacaaaacattgctcaggaa

SEQ ID NO: 800873 - DNA, 120 bp, Artificial Sequence
  ENSG00000245293_40 (sequence is synthesized)
ctgcagagccactagcctggcatgtggtgacacattcccaacacaattctctaacattctgatttcccttgcaaagataaattcaagcgaacttagaactcttaaagatcagattgagat

SEQ ID NO: 800874 - DNA, 120 bp, Artificial Sequence
  ENSG00000245293_41 (sequence is synthesized)
tgaatgccattggctttctccccatacctatgctcctacacatctcttcagcccagcacagggttttaaaagctcactgcttaacacagggctatctcctctgctggttatgagctgcaa

SEQ ID NO: 800875 - DNA, 120 bp, Artificial Sequence
  ENSG00000245293_42 (sequence is synthesized)
ggatagagtccatgtcctgtttgtgttggtgttcctggccactagccaagaacctgcagcccagccctagaatagcagttgaatgaatgtggcagcccacacactcaaagacaccagaat

SEQ ID NO: 800876 - DNA, 120 bp, Artificial Sequence
  ENSG00000245293_43 (sequence is synthesized)
tatcttaccctttcccagagagcttcaggtacctttcttttcctaaatgagtcactaatgtgtctgtataaatatggtttccatatatgtcacagagcccaaacatttcatctgacttac

SEQ ID NO: 800877 - DNA, 120 bp, Artificial Sequence
  ENSG00000245293_44 (sequence is synthesized)
tgtggtttactttttgtgactgcatttttattatatcttatataaaaagggggatataacagaaggaaaaaacagtaaagcaaaaacccatatctagcttcagagcattacatatccact

SEQ ID NO: 800878 - DNA, 77 bp, Artificial Sequence
  ENSG00000245293_45 (sequence is synthesized)
ttgtgaagagctttgtgcccctgggagtaagaacactatgtgctcctgaatgcaggtttctgataactgtggagact

SEQ ID NO: 800879 - DNA, 120 bp, Artificial Sequence
  ENSG00000245293_46 (sequence is synthesized)
attctcaaagtatgcagtgctgaaagaccttgaagagctttcttaaatgatgttatggttaaaatttctatgattgcagtccttgaaatcataaaagaataaatacatccttggaaaaga

SEQ ID NO: 800880 - DNA, 120 bp, Artificial Sequence
  ENSG00000245293_47 (sequence is synthesized)
acgatggagatgagcggcacccgcgggcggtcgctgaagacctcggcctgctgcaccagcgcctcgcgcacgctgtggaagtcgctgaggaccaccaccaggtagtggccgataaagaag

SEQ ID NO: 800881 - DNA, 120 bp, Artificial Sequence
  ENSG00000245293_48 (sequence is synthesized)
gccatttcctgtctctctttagcagccttgcctaatccacttacagcatcttgccaaatcatcatccaaattcccttcaactttactcttccatatgtgctcctagtcttatgttcatgt

SEQ ID NO: 800882 - DNA, 120 bp, Artificial Sequence
  ENSG00000245293_49 (sequence is synthesized)
gggaaagaagcttgtgattttgaaactccatttcacagtggatgtacagatggtctttataaggtagctactcggttctagaacacagaatgtggaacagaagaaaatccaattagtaac

SEQ ID NO: 800883 - DNA, 120 bp, Artificial Sequence
  ENSG00000245293_50 (sequence is synthesized)
agttcaggatgcaggtgtgaggcagcctgggggcgcgggcggccggaaggggcacaggaactgcagcccccacgcacctggagactcatccgcggcatccgcgtacccacagcccacgac

SEQ ID NO: 800884 - DNA, 120 bp, Artificial Sequence
  ENSG00000242741_0 (sequence is synthesized)
aagcagactactattgccacagatcctctttgaatacgtctcacgagatccgatgggtttatcaggagtttctgcctttgcttcttcctcattctctcttgctgccaccatataagaagt

SEQ ID NO: 800885 - DNA, 120 bp, Artificial Sequence
  ENSG00000242741_1 (sequence is synthesized)
catgattctgaggcctccccagccatgcggaactgataccccatggttctcctaccaccagatgctactgaggctaaactgactggactgaggaaaaatatctgtggggaaaactttctt

SEQ ID NO: 800886 - DNA, 120 bp, Artificial Sequence
  ENSG00000242741_2 (sequence is synthesized)
tggggaaaactttctttcagaatccaactttgaaccagagaaatccattctcttgaagctgtctgctgtggagaagttggccttaccaatctgcctttgaagttcaagttatacaggatc

SEQ ID NO: 800887 - DNA, 120 bp, Artificial Sequence
  ENSG00000242741_3 (sequence is synthesized)
tgcgaggctacctgtgaatgaatggttggttggtcactacttgcaagtttttcaggagctcctgaaagattactgcataaataagggaagatggagaccagacctctggctactgttgct

SEQ ID NO: 800888 - DNA, 120 bp, Artificial Sequence
  ENSG00000242741_4 (sequence is synthesized)
ataaggactgttatttcccctattttataaaagaggagctgaggctcagagagattatgttacttgcccaagatcagatagctagtaagtggcagagatgagattctgtctgagtccagc

SEQ ID NO: 800889 - DNA, 120 bp, Artificial Sequence
  ENSG00000242741_5 (sequence is synthesized)
ttacaccataactgatattcttgacaatcgggctggatagaaaaggataagatatgagaattttggtgctatgatttgaattttccttccaaagctcatgttgaaacttaatccccaaag

SEQ ID NO: 800890 - DNA, 120 bp, Artificial Sequence
  ENSG00000242741_6 (sequence is synthesized)
taacagtactgataggtggggtctttaacatggagtcccagaattggatcgtgagggctctgccctgataaatgaattattccactcatgattaatggattaatagatcatcatgggagt

SEQ ID NO: 800891 - DNA, 120 bp, Artificial Sequence
  ENSG00000242741_7 (sequence is synthesized)
ggaacagtggctttataagaagaggaagagagacctgaggtagaacactcagcgcccttgccatgtgatgctctgtactgccttgggactctgcagagtctctctaccagcaagaaggtc

SEQ ID NO: 800892 - DNA, 120 bp, Artificial Sequence
  ENSG00000242741_8 (sequence is synthesized)
ctcaccagatgcagtcccttgaccttggccttcttagcttctacaactgtcataaataattttttctttataaattacccagttttgggagttctattataagcaataaaaaccagtcaa

SEQ ID NO: 800893 - DNA, 120 bp, Artificial Sequence
  ENSG00000242741_9 (sequence is synthesized)
gaaggtgctttggagagccagtagtttacacatcttttccacacatacataaggcagcttgaatttctggtaattgtgagggcttgacccttgcaactatttccaatatacccctggtgg

SEQ ID NO: 800894 - DNA, 120 bp, Artificial Sequence
  ENSG00000242741_10 (sequence is synthesized)
tactgaacattctctatatgccagatgcaaaattggctaccacattggaaactgatattgaatttctcaacgagtccaacagagtcagttttcctccaacactgaaacagaccttgcttt

SEQ ID NO: 800895 - DNA, 120 bp, Artificial Sequence
  ENSG00000242741_11 (sequence is synthesized)
cttcagttgagcaacaactaaagattatggacccagctcgtgtggaggtgccatattgcataaacagtgcatacagtgagccctcgcattcacactcagcatgatgtgattacgacagta

SEQ ID NO: 800896 - DNA, 120 bp, Artificial Sequence
  ENSG00000242741_12 (sequence is synthesized)
tgtatttccatagggactaaatcatgcttaggcagagcagttttacatctttctcatgcccattcactttagggcatgtgtttgttgggtggcattgtcagcattgtttaattatttacc

SEQ ID NO: 800897 - DNA, 120 bp, Artificial Sequence
  ENSG00000256925_0 (sequence is synthesized)
gtcacactgcagagcgtatttaaagagacacctcgctccgcgctcgctccccagcaccagaccctcgcccgaaaacgccgccgggcggactgcacgaccctgtgttattcccaaagacaa

SEQ ID NO: 800898 - DNA, 120 bp, Artificial Sequence
  ENSG00000256925_1 (sequence is synthesized)
tctccatccgtggagaagctgcaggaacagaaatatacacaagaaaatggatttggaaggaattttccatcctttatttaacattctcaagtccagatatgccagaaccgaggtgcacct

SEQ ID NO: 800899 - DNA, 120 bp, Artificial Sequence
  ENSG00000256925_2 (sequence is synthesized)
gtcgtgaacccgtctgagtgtgagtcagcagggcagccgcagccggtgtagacagacagggcctgtggctgtgcagaaagcgtccctgtccccctaccccaaccctcctgcatcctgggc

SEQ ID NO: 800900 - DNA, 120 bp, Artificial Sequence
  ENSG00000256925_3 (sequence is synthesized)
cacagagctgggcatccagagccaaggcgagtgtggaggccagggtgccaggggcggcgcagcccagcctcccacccgcagcgaggtttgggctctgcacacatcccacaggtccctatc

SEQ ID NO: 800901 - DNA, 120 bp, Artificial Sequence
  ENSG00000256925_4 (sequence is synthesized)
ctgccccaaggggcctcctacccgacaaggtgggtccaagtccactccagttttcgtcacaaactccgttttctggggcacgtgctggcctggtggcagcctcagcaagagtctcaggaa

SEQ ID NO: 800902 - DNA, 120 bp, Artificial Sequence
  ENSG00000256925_5 (sequence is synthesized)
ctgccctgggggactccacacccctccacctgttccccctttggccctgggtgaccccacacccctccacctgttccccctttggccctgggtgaccccacacccctccacctgttccct

SEQ ID NO: 800903 - DNA, 120 bp, Artificial Sequence
  ENSG00000256925_6 (sequence is synthesized)
ccttggcctccacccttgcatggctacttctgccccaggttctgtgacactggcgcctgttcagggggtccccaggccctgctgccatggattttgaggggcctgaaggatgtactattg

SEQ ID NO: 800904 - DNA, 120 bp, Artificial Sequence
  ENSG00000256925_7 (sequence is synthesized)
ggaggttgtcatgaagactcacagaggcagaattagatgcaggggtgacagcgttccgcttccccggcctctcattatggggcttttgagcgggatgtgctcagggccccactgccccat

SEQ ID NO: 800905 - DNA, 120 bp, Artificial Sequence
  ENSG00000256925_8 (sequence is synthesized)
ctagctggtgttcccagagcccctctgtggggacactgtgctggtccctgaactccagctgagggacacagggtccaggcaggcgacggtctagttcccagctggagacgctctaggcac

SEQ ID NO: 800906 - DNA, 120 bp, Artificial Sequence
  ENSG00000256925_9 (sequence is synthesized)
cccaggacctggccgccctgactccctggacaccgttcccttggagcctcggagccccccctggtgtcccctgggtgatggtcctggacaagagggctgggaagaagcgggcagcaaggg

SEQ ID NO: 800907 - DNA, 120 bp, Artificial Sequence
  ENSG00000256925_10 (sequence is synthesized)
gaggattctgccccagacgtccccaggccgggggtccccatgggctctgccctgacgtcttactcctgcacccagcggctcccaccacagagactgctccagaagtctccgggcgctgtg

SEQ ID NO: 800908 - DNA, 120 bp, Artificial Sequence
  ENSG00000256925_11 (sequence is synthesized)
tggcaggatgaggagctgcccccctggaggatcacgcaggcctctgggtggcattcagcagggttggctgcggcaccggctgaccacagggcccacctttccagtcccggcaggagagaa

SEQ ID NO: 800909 - DNA, 120 bp, Artificial Sequence
  ENSG00000256925_12 (sequence is synthesized)
gcgtctcaaccatgttgcaggcacacgggtgagggtgctgcctgcctccctgactcttacctccccaagagaggaaaacaaaagaaaaaaagataagaccaggaaatggaaataagacaa

SEQ ID NO: 800910 - DNA, 120 bp, Artificial Sequence
  ENSG00000256925_13 (sequence is synthesized)
agtccatgaagagtctcgtggtgagaaagacagaattcctagccaggaaaatgccccgtgcttgccccttggaggcaggtgctcaccacggcagggtctatctaggtgtttattaaggtg

SEQ ID NO: 800911 - DNA, 120 bp, Artificial Sequence
  ENSG00000256925_14 (sequence is synthesized)
tctcaccacgtatcgcccggattcaccagagatgcagaggcggaggatacgttcctgtttacattgatacatagttacataggtgaagagctttacagtgaggaagcggctcacgcggcc

SEQ ID NO: 800912 - DNA, 120 bp, Artificial Sequence
  ENSG00000256925_15 (sequence is synthesized)
atgagggacccaggcaggagctgctgttgctgccccaggtgcgattccttcctcctcagggaggctcagctccccgctgcagccaggtgggcccaggcaggcctccttggcctacagcgc

SEQ ID NO: 800913 - DNA, 120 bp, Artificial Sequence
  ENSG00000256925_16 (sequence is synthesized)
agacggccaagtgctggtcacggccattgcatctacaccacccctttctcagcagcaactccacgagtgctcgatgggaaactgcagacagcagccttgccaagcggatgcccagggccg

SEQ ID NO: 800914 - DNA, 120 bp, Artificial Sequence
  ENSG00000256925_17 (sequence is synthesized)
accaccgcagcccctccagccacgttctccatcagggcagcctcctgctggcttcggcactgcaggtagcacaccagcgaggggtgggcctgtgtgccacgaagcgtcatccatggacgt

SEQ ID NO: 800915 - DNA, 120 bp, Artificial Sequence
  ENSG00000256925_18 (sequence is synthesized)
gccacgaagggttattcttcttttgactttttctgatggtttaaaactgtaagaacacacagctcacagtccacacggaagcaggcatgtggctcctgcctcactgtgggaggaaagatg

SEQ ID NO: 800916 - DNA, 120 bp, Artificial Sequence
  ENSG00000256925_19 (sequence is synthesized)
ttctcaaaagaaatggctgggtttgcggaggggtttgtggagggccgggcagtctgaacacagcccagctggccttggtggaggtgggcctggcacaggggggtgggagcagttcttcct

SEQ ID NO: 800917 - DNA, 120 bp, Artificial Sequence
  ENSG00000256925_20 (sequence is synthesized)
gacgcaaatcctaacgccttcaacactgaccttccaaagaaacagctgctggacgccgcccgacagcaacgagagccccactcctgaggcgcgcgactctcgagggctttgttgtttatt

SEQ ID NO: 800918 - DNA, 120 bp, Artificial Sequence
  ENSG00000256925_21 (sequence is synthesized)
tggcacccgaggcccaggctcacagggtctcgggtgcatgggaccccccagcccttcccactgctctgcgattcttcctcccttctggaaaggtcagtttggggttctattctgggaggg

SEQ ID NO: 800919 - DNA, 120 bp, Artificial Sequence
  ENSG00000256925_22 (sequence is synthesized)
gccaggccgccacctggcctcattaactgggcaggccactgggacctcctccgaaatgctggggccatggccgaagacttgcctcccgccaggagccttcagccctcttagtagtggatg

SEQ ID NO: 800920 - DNA, 120 bp, Artificial Sequence
  ENSG00000256925_23 (sequence is synthesized)
tgggcttcctccctctgaggggacgtcctgatggacacgagatgtggggcgcccgtgggtggccgcctgctcctgccacagtcccccttggggcctgagctgcggctgctgcctccgtag

SEQ ID NO: 800921 - DNA, 120 bp, Artificial Sequence
  ENSG00000256925_24 (sequence is synthesized)
ggaaggaacaatgggggatgggcccgcccctacccagagagagtgggccgtgttgcctgcaaggcctcagccaggggaccacgtttctctgcatcttgtggctttgggttctgcaggctg

SEQ ID NO: 800922 - DNA, 120 bp, Artificial Sequence
  ENSG00000256925_25 (sequence is synthesized)
tttgtgggagaacgggaaacagtcccagagatgacgctgcctcatgcaggttaacagagttggaggtcaggccgacgcctgaggctcaggacgctgatgggtgccttccctcgccagggg

SEQ ID NO: 800923 - DNA, 120 bp, Artificial Sequence
  ENSG00000256925_26 (sequence is synthesized)
tgagcccccagccccgtcttccctcgccagggtgagcccctccccagccccgagtttggaggggccgtggctgccggggactcgcgtgaggagcttgctgtaaatacggagctctggagc

SEQ ID NO: 800924 - DNA, 120 bp, Artificial Sequence
  ENSG00000256925_27 (sequence is synthesized)
cccacatggtggcctgggcggcacgcctgtgggatggggaaaccgaggcacagacagtcacgtgctcttccagttgcaggttagaccccacttgcggttgtgtgttccagaagtctccgg

SEQ ID NO: 800925 - DNA, 120 bp, Artificial Sequence
  ENSG00000256925_28 (sequence is synthesized)
ggggagcgggcagcctggccgcagagcgcgcgggacccagggccaccgtcctcccgagacagcggcagcagccgccactcaccgtgcggaattaaaaacggctctctggttgccacggca

SEQ ID NO: 800926 - DNA, 120 bp, Artificial Sequence
  ENSG00000256925_29 (sequence is synthesized)
accagccgtctccccccagcgtcagtttgaatttgtgcagaccattcctagccaagattcaagccaacagattcgtgcttaccctgaggtgaagcctcgtttgagaaccaaataataaaa

SEQ ID NO: 800927 - DNA, 120 bp, Artificial Sequence
  ENSG00000256925_30 (sequence is synthesized)
atatttaaaaatcaatctgcgccccactcccggctccggagccaaactcaaccatctcgggctgcacaaagccagaggcgcgccggggggtttgcaccgggaaccggcaccgagtgaccc

SEQ ID NO: 800928 - DNA, 120 bp, Artificial Sequence
  ENSG00000256925_31 (sequence is synthesized)
cagcccggccgcggcgcctgctctgcctggatgtggctcgagctccgggccgggcgcgcggggcgggggccctggattatccgtggcgcctcccgccccagcggagccgaaagttactcg

SEQ ID NO: 800929 - DNA, 120 bp, Artificial Sequence
  ENSG00000256925_32 (sequence is synthesized)
gttactcggagctgctttcctcgcggccagtgtcacctcggggcgcgagcttttctgccgagccgcggccccgcgcgtccctcccgccgcccagacccgcgcgtccttcccacctgctgt

SEQ ID NO: 800930 - DNA, 120 bp, Artificial Sequence
  ENSG00000256925_33 (sequence is synthesized)
ggccgaagcggctgccggggcggccgggccgcgctcccggagacagacgcgctgcgctccccccgccggggacccgctctccattcgcgagggcagcggccgagctgggaccgagttatc

SEQ ID NO: 800931 - DNA, 120 bp, Artificial Sequence
  ENSG00000256925_34 (sequence is synthesized)
gagttatcaacagattgcggggctgcggcgccggccggtgagtcacagccccgcgcacgagcggcccagcccggccagcagcgccgccgcctctgcgcgcacctcccgcggcgacagcgg

SEQ ID NO: 800932 - DNA, 120 bp, Artificial Sequence
  ENSG00000256925_35 (sequence is synthesized)
tgtctcccgggaggctcctggcacatcacagttggggcccagaggaggccccggccggtggggggagtggccctggcttgtctctttccctgcacacggactggagccctgccctgagtc

SEQ ID NO: 800933 - DNA, 120 bp, Artificial Sequence
  ENSG00000256925_36 (sequence is synthesized)
ccacggggactttgcgggggaacttctcgaaggtgctgtgggggcagagggaggtggtggagccagccaggctctgggaggccccagagaagctcccactgcccacctcagtcctagctg

SEQ ID NO: 800934 - DNA, 120 bp, Artificial Sequence
  ENSG00000256925_37 (sequence is synthesized)
gttttgggccctgggctgggcccccacaggctccaaagggaaaggttgtccaagggaaagccctggaggccgctggtatccgggtaggacacacagaaggctaccaggtgctgtgggggc

SEQ ID NO: 800935 - DNA, 120 bp, Artificial Sequence
  ENSG00000256925_38 (sequence is synthesized)
cctggggtccggcacttgaggcagacaggtccactggcttgcgaatgtcctgctgcccccgcacgtggtggtcaggacccgggagggctgcccctccccccccattccacacctagtgat

SEQ ID NO: 800936 - DNA, 120 bp, Artificial Sequence
  ENSG00000256925_39 (sequence is synthesized)
aacctaggtgaaggagagagagccagggggagctggcactgccacgtgttccagagctgcccttgggcagagtctgtggggctcggccttgtgaggggtgggggcaccgggtgtctcctg

SEQ ID NO: 800937 - DNA, 120 bp, Artificial Sequence
  ENSG00000256925_40 (sequence is synthesized)
ctcactcacagctgccccccagggcccctcccccgctgctctgcgagcccctccctggagctgcccttggagggcacctgcttcaggtctcatctccagggtggtgctggggaccgggca

SEQ ID NO: 800938 - DNA, 120 bp, Artificial Sequence
  ENSG00000256925_41 (sequence is synthesized)
tgtcagcacttgccctgccaccagaggtcactgccccgggccctgggcccccggccctctgctcactgttcatcagcaaagcgtctgctttctggactgcagggttggctgcggcaccgg

SEQ ID NO: 800939 - DNA, 120 bp, Artificial Sequence
  ENSG00000256923_0 (sequence is synthesized)
tctcatccagcctcataaagctatgaggatggctataacatgacatcacggaagcaaaggctttcactttctggagtgaaaagagaaagggaacatggacatgctccttgaatggttaat

SEQ ID NO: 800940 - DNA, 120 bp, Artificial Sequence
  ENSG00000256923_1 (sequence is synthesized)
ccaagacttctacacatcaactccccgctctggagtctcctctgttgtcataaaccattgggttgtccagaatcttggctctcaaaacatggtccatgaaccagcagtattagcatcacc

SEQ ID NO: 800941 - DNA, 120 bp, Artificial Sequence
  ENSG00000256923_2 (sequence is synthesized)
tatgaatttgtgtccaacttagactactgagtcataatcttcattgtaacatgatatgcagatgatttgtaatttgtatgaacattagaacgttaaagtttgagaaggtctggcctgaaa

SEQ ID NO: 800942 - DNA, 120 bp, Artificial Sequence
  ENSG00000256928_0 (sequence is synthesized)
tggcaccacagggacacagaaaccactgaggcccaaggtgtgctccagccccaccaagtcttctccctaaagctcctgagatcttggggctggctgggcaggctagggctctgtatcaca

SEQ ID NO: 800943 - DNA, 120 bp, Artificial Sequence
  ENSG00000256928_1 (sequence is synthesized)
gtcctgccgggatcaagtctattttttcagtttcattaaaaacagctgggggaggggcaggcacatgcattaagccccttccgtaggcagagccatggatggacagccccatgggggcct

SEQ ID NO: 800944 - DNA, 120 bp, Artificial Sequence
  ENSG00000256928_2 (sequence is synthesized)
tgaaggcagaggccctggaagcagcaaaaacggggctggataaagctactaatgggagggatggtagagcccagctccccagtcccccacaacccagcccagaacctacaaagagctgaa

SEQ ID NO: 800945 - DNA, 120 bp, Artificial Sequence
  ENSG00000256928_3 (sequence is synthesized)
ttcacagtcagaaaaatggacccagcgatggccacagatgtgcccaagattagaacccagggactcactctcctagcccaggactttctgctaccccttccctttatagacctgctggaa

SEQ ID NO: 800946 - DNA, 120 bp, Artificial Sequence
  ENSG00000256928_4 (sequence is synthesized)
gaggagggggacgcacatctgctctagggccctgtacagaggcacgggggtcggggcatccttcaggggagcaacatggcagcagggccaggggcggggctcagcctgctcctgtacaca

SEQ ID NO: 800947 - DNA, 120 bp, Artificial Sequence
  ENSG00000256928_5 (sequence is synthesized)
gtgcccgccggccacctgcctcctcactggggcagacgctcccacctccaggccttggtctttgctgtctcgtctgctgggccattgcttctcggtcctcacagtcccagctgcagctcc

SEQ ID NO: 800948 - DNA, 120 bp, Artificial Sequence
  ENSG00000254694_0 (sequence is synthesized)
agagtgagatcctgtctctaaagaaaaaaaaattaattaattatacaagtaatatatgattttattcccatgctaaaaatagtcaaacaacaaagatcatgtaacaacccatgtaatcag

SEQ ID NO: 800949 - DNA, 120 bp, Artificial Sequence
  ENSG00000254694_1 (sequence is synthesized)
tggttttttttcctctggttcttactcaacgcatttacatatatgtctagtgtatacagtatacgcgtgtgcggcgtacgcagtatacgcgtgtccggcatacgcagaatatgcgtgtct

SEQ ID NO: 800950 - DNA, 120 bp, Artificial Sequence
  ENSG00000254694_2 (sequence is synthesized)
ggtgtacgcagtatatgcgtgtctggtgtatgcagtatatgcatgtgtacatatgtatgtacacatatatatctatatatatatcacattgtacaatttacattatacttttttcctctg

SEQ ID NO: 800951 - DNA, 120 bp, Artificial Sequence
  ENSG00000254695_0 (sequence is synthesized)
acgtctcgacaactctgagatatggaggcataggaagctctgggatcctggaagaaaatgtaaaagagaaattgggaccccaggacaagaagtccaagagaaatggcagaagactcctac

SEQ ID NO: 800952 - DNA, 120 bp, Artificial Sequence
  ENSG00000254695_1 (sequence is synthesized)
gcaatctctgtcaccaccgtaggggcaaaggcagagcaattgggaccaatgaccccaactaggaacatagcctggacacttgggcaaacagctgataggagttcattttgtgaagctgtc

SEQ ID NO: 800953 - DNA, 120 bp, Artificial Sequence
  ENSG00000254695_2 (sequence is synthesized)
agtggctttggagatggaaggaatagagggagagcagatcctcaaacacagcctgcatctctccctgctcccctcccaccctccagttttccagccagaggcatttgctctaaggcccag

SEQ ID NO: 800954 - DNA, 120 bp, Artificial Sequence
  ENSG00000254695_3 (sequence is synthesized)
gctgtggcccacctatcaccgctacccaagtagtacaggaaaaggaaatttgaagaggaaaagaggcaccagggatgaggacacaccgagaaaagaccatgtgaagacatggcgagaaga

SEQ ID NO: 800955 - DNA, 120 bp, Artificial Sequence
  ENSG00000254695_4 (sequence is synthesized)
cagccagctgcaagccaaggagtgaggcctcagaagaaaccaaccctgccgacaccttgaccttggacttctagtctctagaattatgcgaaaataaattcctgttgtttaagccaccca

SEQ ID NO: 800956 - DNA, 120 bp, Artificial Sequence
  ENSG00000254690_0 (sequence is synthesized)
ccactgcccagcgcaggcccccttcccttcctccaccaggctgagtggagaaccctaaagctacgggacaggctcccgttccccgtgcctacacagggtgctggctctggcagaaagaca

SEQ ID NO: 800957 - DNA, 120 bp, Artificial Sequence
  ENSG00000254690_1 (sequence is synthesized)
agggccaaggaggccactgcagcccggcccttctgtgccctgggcccctcctcattgcagcaccacccaccgcaccaccctgggacagaggaaacacatggaggccatagcatagagcct

SEQ ID NO: 800958 - DNA, 120 bp, Artificial Sequence
  ENSG00000254690_2 (sequence is synthesized)
gtctgtttatagatctctgcctgtcttgtccgtccatccactgtgtgtatatatctgtgtatctctgtggagcggggaacgggacagttgtgtaaaaatccaaaatacaattctgactat

SEQ ID NO: 800959 - DNA, 120 bp, Artificial Sequence
  ENSG00000254691_0 (sequence is synthesized)
taaaggaactatggaaatgtttaccccaactttttattttgaaaaatgttaaacctacagaatagttatgtgaataatataatacatttccatatatcctttacctaaatcctcaagttg

SEQ ID NO: 800960 - DNA, 83 bp, Artificial Sequence
  ENSG00000254691_1 (sequence is synthesized)
aatacatttccatatatcctttacctaaatcctcaagttgttaacattttaccatgtttgtttcttttctcactctaaacaca

SEQ ID NO: 800961 - DNA, 71 bp, Artificial Sequence
  ENSG00000254691_2 (sequence is synthesized)
agagtttcttctgctcaagacagttcttcttaaggaaagattgatgagctgttcctagctgttccttgtgt

SEQ ID NO: 800962 - DNA, 120 bp, Artificial Sequence
  ENSG00000254691_3 (sequence is synthesized)
aaggaaagattgatgagctgttcctagctgttccttgtgtttttgtttgcttttgcttttgttttcctattcaccttctaaagctggttgttgtggaaggctgatatagttggatatttg

SEQ ID NO: 800963 - DNA, 120 bp, Artificial Sequence
  ENSG00000266928_0 (sequence is synthesized)
gttggtttcttggggaactagaaacgaggctctcccagtgtgtgccaacatgcttggcactttcgggatgctatgggtcaggcaccagataaacacacccagggacagaggatagctgct

SEQ ID NO: 800964 - DNA, 120 bp, Artificial Sequence
  ENSG00000266928_1 (sequence is synthesized)
caggaatttctggtggcagctctttgtggactcgcgaaaaattggctgaaaaggaaggactgtgacccaaagatgcccagctccctggaatagggcacgttacagtgggctgaggagcta

SEQ ID NO: 800965 - DNA, 120 bp, Artificial Sequence
  ENSG00000266928_2 (sequence is synthesized)
tccagcccttccctggccagttccctgtgacctcctaggctggagaaaccaagaccaatggcagcttccaaccagcttggcataagtggttggcaaggcagagcacccccatctgtgccc

SEQ ID NO: 800966 - DNA, 120 bp, Artificial Sequence
  ENSG00000266928_3 (sequence is synthesized)
agctgcaggtcttgaagtctctcagtcatcagctcacccaggacatccagttcatcagccagtcttgtgggttaactcgtattctgattctctttactgttccctctggttttaaaaaaa

SEQ ID NO: 800967 - DNA, 120 bp, Artificial Sequence
  ENSG00000266925_0 (sequence is synthesized)
ggctcagagaggctgaatatcctgcccaaggttttgcccctgcttgccccgattccaggctgctctgtcctggctcagtggggctctacttttccttcctcctgccctgaagcctgtggc

SEQ ID NO: 800968 - DNA, 120 bp, Artificial Sequence
  ENSG00000266925_1 (sequence is synthesized)
tctggcttgtccacccagggctgggggccctgcagcagccccctctctcccctcagcttctctgcccccctcctcagccccctaagctgcctcctgccttcccagtctgagttggctggg

SEQ ID NO: 800969 - DNA, 120 bp, Artificial Sequence
  ENSG00000266925_2 (sequence is synthesized)
gagcttgtaaaacagccccaccagcaggcttgtcctgagtggtgctgatgcaggagttggagcagggctgcgaatcttcttggggactctgatgatctgtctggttggagaatcactgca

SEQ ID NO: 800970 - DNA, 120 bp, Artificial Sequence
  ENSG00000266925_3 (sequence is synthesized)
agccaaggcgtggcattggccaatggtgattcccggcctcctcaggtatgctatgatctccgcctcatgcttgacatgggcaggacgaaggagggaggaaggaggcagggtgcggggagg

SEQ ID NO: 800971 - DNA, 120 bp, Artificial Sequence
  ENSG00000266925_4 (sequence is synthesized)
aatcctctgcctggaggatgcccactgggcttctctatgctcaccaggcttagaggtcctggctcttggccaccttggggcaagtgtgcatcactgatgcagaggaaacgcctcctcctc

SEQ ID NO: 800972 - DNA, 120 bp, Artificial Sequence
  ENSG00000266925_5 (sequence is synthesized)
ttctgtcaactcagatcctctgaggccctgctggtgcctccctctgctgggaccctttcagggatcaaggccaggagggcagccccctcctctactgctgaggctcagcggggtaatgct

SEQ ID NO: 800973 - DNA, 120 bp, Artificial Sequence
  ENSG00000266925_6 (sequence is synthesized)
cagcgttagttttccctccagggtcaaatgataagttcttctaaggtcagagactacgtcatcatttccctcttcacccccagcccccgagagctgtgcacacagcagctgcgtgatcta

SEQ ID NO: 800974 - DNA, 120 bp, Artificial Sequence
  ENSG00000266925_7 (sequence is synthesized)
tggagttggctgagcagtttggcgcgttggtcagcaacttcctgcagcttctcagcccacgcagatcctcaggtctgcagtgctgggcttgtgtataatcccaccctgacacctcctgga

SEQ ID NO: 800975 - DNA, 120 bp, Artificial Sequence
  ENSG00000266925_8 (sequence is synthesized)
atggggaacttggcggggggcagtgagccaatgagaaaggggtgtgtgtgcacgcacacacggtgggggcagagagtgaagagttctcggagactccactgtgagagtcggtgtgaatcc

SEQ ID NO: 800976 - DNA, 120 bp, Artificial Sequence
  ENSG00000266925_9 (sequence is synthesized)
tggcttgggagttggagctggctccggtctgtgctctctcacttttgtgctgcttaacctggataaggctttcgccctctccggttggggtattgatagcctttggtgaccttgaagacc

SEQ ID NO: 800977 - DNA, 120 bp, Artificial Sequence
  ENSG00000266925_10 (sequence is synthesized)
attttcagttctgagggtgatgggtctgtggttggactggaactccaggcccaccctgacacctgaacgctgaggtttttgtccaagattccggggtcccctttgtccctctttggggtg

SEQ ID NO: 800978 - DNA, 120 bp, Artificial Sequence
  ENSG00000266925_11 (sequence is synthesized)
gtccctctttggggtgggggtgggtgtggggaagagagagatcagtgtctctttctatacggactgtgtctatatagaaagaagtagacatgagagactccattttgttctgtactaaga

SEQ ID NO: 800979 - DNA, 120 bp, Artificial Sequence
  ENSG00000266924_0 (sequence is synthesized)
gaagttacacaagttgtttgtagaaaatatggaaattaccaagaagcaggaaggggaatccgaatccctcaaatgcagcggggagacggtgtgactttgcctcctgttctccttcgttcc

SEQ ID NO: 800980 - DNA, 120 bp, Artificial Sequence
  ENSG00000266924_1 (sequence is synthesized)
tgctgagtgtgagaggcctgcttaggtgctgagaggtgtgaggggcactaagcctccaggcatccagcaaccctcggccgcgtgtcgcacacatcccgggtttcggacgagtgtgaagct

SEQ ID NO: 800981 - DNA, 120 bp, Artificial Sequence
  ENSG00000266924_2 (sequence is synthesized)
acagggggacaggagagcgtcggtgaccagggtcagcatccggtgaggtgcagttttgtcctgcctttcacctgagctcctgaggggtgcccggtgcagaaaaagtcttcagagaccccc

SEQ ID NO: 800982 - DNA, 120 bp, Artificial Sequence
  ENSG00000266924_3 (sequence is synthesized)
ccagtggccgcgcgcaccacgtggttgaaccccgaagaaggctgaactccatccaagcccctgaggccagacatctccacggttcccagttttccaatactgcggagagttttccagcct

SEQ ID NO: 800983 - DNA, 120 bp, Artificial Sequence
  ENSG00000266924_4 (sequence is synthesized)
ctccagggcagaggctgtgtctggtgaatgtccaggcactgcagcgcctggcacacggcactgggtaggtgcttaacacaacatgtgaacaaatatttattgaactacataaaggtaaac

SEQ ID NO: 800984 - DNA, 120 bp, Artificial Sequence
  ENSG00000254698_0 (sequence is synthesized)
tttcaaattatctaaatatggttttctttgtctttttctttcaactttgtcgaagtttgttttttcctaatttgtgcaattactaattatatgactcttggataagttactttaccttta

SEQ ID NO: 800985 - DNA, 120 bp, Artificial Sequence
  ENSG00000254698_1 (sequence is synthesized)
ctttctgggttgttgtaaggattggatttttttaaatgcacatagcacatgcctagcatatagttatggatctgtagtaatagatgttagctatttttcttcttcttctttttttttttt

SEQ ID NO: 800986 - DNA, 66 bp, Artificial Sequence
  ENSG00000254698_2 (sequence is synthesized)
ttttttttttttattttttttgagatggagtttctctcttgtcaggagaatcacttgaacccagga

SEQ ID NO: 800987 - DNA, 120 bp, Artificial Sequence
  ENSG00000254699_0 (sequence is synthesized)
atagagaagaaacttttccaagatcataagtggtggagagaagttttccaaggagaaaacctgggctaagtattaaaaacaacaacaataaaatcagacagaactgaaagagaagaagaa

SEQ ID NO: 800988 - DNA, 120 bp, Artificial Sequence
  ENSG00000266921_0 (sequence is synthesized)
actcgtccacccgcctgagccaacttgcccgcgactcagagtgtgtctggactccgcttcctccaatgccaaaggaaaatgtctataatctcactcttcagcgggaagcgttggactccg

SEQ ID NO: 800989 - DNA, 120 bp, Artificial Sequence
  ENSG00000266921_1 (sequence is synthesized)
cggtggtccttgactacacacaccgcagtgcccaccgggaacgtattccatatctctgagcgcctggtggggaatgtggactgtgaccctgtgagtcgtccgtctctcttcctgagtctt

SEQ ID NO: 800990 - DNA, 120 bp, Artificial Sequence
  ENSG00000266921_2 (sequence is synthesized)
tgagcgaaaatagtgtatagacaggaattcctgaagtctaaacgcctcccacgatgacaggagtgttattgggaagagaacaaacgaggagataaaatcttcaaggattaggataatctg

SEQ ID NO: 800991 - DNA, 120 bp, Artificial Sequence
  ENSG00000266921_3 (sequence is synthesized)
acgatgggaggttaaaactaacggtttaaaggatgagccaggtggaatggtttggcaggggcaatgaggagcaggaagacaccagcccctactccagaagctgtgggaccactggtttgg

SEQ ID NO: 800992 - DNA, 120 bp, Artificial Sequence
  ENSG00000266921_4 (sequence is synthesized)
caggaaaagccacccccatttaagatcacagctactagtggagaagcggtgtcgtcatggaatagctatcttcccataaacttttcatggactggatgaaatgtatcatcagcatggatt

SEQ ID NO: 800993 - DNA, 120 bp, Artificial Sequence
  ENSG00000266921_5 (sequence is synthesized)
ctgtgataaattacaagatacaaactcaaaaggaactgctttctatgtgcctcatattttaatgtttctcccctttgtgaatgcttaggtgagactgtagtcatgaaaactgagtaaaga

SEQ ID NO: 800994 - DNA, 120 bp, Artificial Sequence
  ENSG00000266921_6 (sequence is synthesized)
ctttattacacacattactgaggcttctctccaatgtggacattctgaagttgaagacttgaggcctgaatgaagcacataccaccctcctcatacttccgtagtttctctcccgtgtgg

SEQ ID NO: 800995 - DNA, 120 bp, Artificial Sequence
  ENSG00000266921_7 (sequence is synthesized)
agcttctgaagcataataaaattcaagtgatccagcaattctattactgggtatatccaaaggaaaggaaattagtatgtcacggagatatctgcactcccaggttcattgtagcactac

SEQ ID NO: 800996 - DNA, 120 bp, Artificial Sequence
  ENSG00000266921_8 (sequence is synthesized)
tcacaatagtcaagataaggaatccacctaagtgtctatcaatacatgaatgaagaaaaggtggcatatatacacaatggaatcctctttagacataacaaggaaacaaaattttatcat

SEQ ID NO: 800997 - DNA, 120 bp, Artificial Sequence
  ENSG00000266921_9 (sequence is synthesized)
gagttttcaaggacattgttaatataagccaagcaaagaaagagaaatactgactgtcctcactcatatggaagttaaaaaaagttgattttgtagtagagagtagaacagtggatgtag

SEQ ID NO: 800998 - DNA, 120 bp, Artificial Sequence
  ENSG00000266921_10 (sequence is synthesized)
acaggcaaggaagtgtaggaggtaggtgagatggccaaaggttggccaacagatacaaaagaggttcttctatctgtgcagccatgggcatgtctccaggcacaatcccctgtgctagtt

SEQ ID NO: 800999 - DNA, 120 bp, Artificial Sequence
  ENSG00000266921_11 (sequence is synthesized)
cccttatcagtgcctgtagcttgattgtcttccccaggctgctttttgtgttatgtggggatgagacactgacccgtttggctgggggtctccagggacccttcccttgctgtctaccaa

SEQ ID NO: 801000 - DNA, 120 bp, Artificial Sequence
  ENSG00000266921_12 (sequence is synthesized)
ctcctctcaaatggattttgaattttccaacacaaagaaatggtaaatgtttgaggtaacagatacaccaattacactgattggatcactataaattgtatgcacacattaaaatagcac

SEQ ID NO: 801001 - DNA, 120 bp, Artificial Sequence
  ENSG00000266921_13 (sequence is synthesized)
gttgtaccccataaatatgaacaattatgtgtcatttagaaataatgataaaagtatatccagattcaagcgcctcttgtagcgtctcccacaatcctcacatttggatgggttttcccc

SEQ ID NO: 801002 - DNA, 120 bp, Artificial Sequence
  ENSG00000266921_14 (sequence is synthesized)
actatagtctctcggctggtctttacggtatgtcctgtgtacaagcctctttccacagtcctcacatttgaatggttttttctggcagtggagtctcttatgattcaaaatacttgaggc

SEQ ID NO: 801003 - DNA, 120 bp, Artificial Sequence
  ENSG00000266921_15 (sequence is synthesized)
ccggctaaagttcttcccacattccttacaattataaggtctctctcccgtgtggaccctctggtgcaagtcaagattaaacttagtaacatagcccttcccacactcctcacatttata

SEQ ID NO: 801004 - DNA, 120 bp, Artificial Sequence
  ENSG00000266921_16 (sequence is synthesized)
tggcttttcaccactgtgggatctctgatgggaagacagttgtgaatttgtataaaatccctttccacattcttcacatttgaagcttttttctccactgtggactcgctgatggttcaa

SEQ ID NO: 801005 - DNA, 120 bp, Artificial Sequence
  ENSG00000266921_17 (sequence is synthesized)
aaggcatgaggaccatctgaagctcttcccacattctttacaattatatggtttttctcctgtgtggaccacctgatgcttataaaaatctagcctaccaataaagccttttccacactg

SEQ ID NO: 801006 - DNA, 120 bp, Artificial Sequence
  ENSG00000266921_18 (sequence is synthesized)
acactgcgagaaagcggtcgcacaggtagggtggagagaggcaggctgagcgaggtcaaagtcctggaaacgctcacagcagggcacagaggaccccgccaattccaacccccgggatgc

SEQ ID NO: 801007 - DNA, 120 bp, Artificial Sequence
  ENSG00000266921_19 (sequence is synthesized)
gagcacagcacccccatcccagaaagcttccgtggacgggaaaaaaaccccattccccgcccccaccaaacctccgctctccgccaaggcttcttttcccttgcttggatcatcgatcat

SEQ ID NO: 801008 - DNA, 120 bp, Artificial Sequence
  ENSG00000266921_20 (sequence is synthesized)
cgggtcgttgcgaccccaagcgaaggtgacaagttcagaaggacccgccagacgcagaaatggctcaaactacgcggttatgtagcaaccgcaggctcacacaccggaagtgctcgcgtc

SEQ ID NO: 801009 - DNA, 120 bp, Artificial Sequence
  ENSG00000266921_21 (sequence is synthesized)
taaaggtgactatcatcaacaattatttacaaattgctaaaaatgtgttgtagtctcacaaatgcaccacactgtaacagtctctctgtaacagtctctcttatcccccggagttcttaa

SEQ ID NO: 801010 - DNA, 120 bp, Artificial Sequence
  ENSG00000266921_22 (sequence is synthesized)
tctcacgtccaatatgattaagaagcacagacacaagggtgaaattggagtaaaagtttaataagtgaaagaaaaaagctctccacagtggagatggggatccaaataagttgcccagta

SEQ ID NO: 801011 - DNA, 120 bp, Artificial Sequence
  ENSG00000266921_23 (sequence is synthesized)
gggaaggggaaggaatgcacttagcctgcgggctgtcttggagaaagcgtgattcagcttggtctgggaccttggcccgggaccaatcaggaaccgaagtgatgattcataagggctatt

SEQ ID NO: 801012 - DNA, 120 bp, Artificial Sequence
  ENSG00000266921_24 (sequence is synthesized)
cagcttggcccgggaccaatcaggagttgaagtgattattcctaagggctattcagcttggcctgggaccaatcaggagctgaagtgatgatttacagaggctgggcttttccttttcca

SEQ ID NO: 801013 - DNA, 120 bp, Artificial Sequence
  ENSG00000266921_25 (sequence is synthesized)
caaaagaaagtgccaacctgaacctactgaagcccactgtgttcatgcccacaaaagaagaaactttttcctcggagcctgctgattatacaaaggacaaaggcatttctgtgtctggtc

SEQ ID NO: 801014 - DNA, 120 bp, Artificial Sequence
  ENSG00000257342_0 (sequence is synthesized)
gtgggtgcttcacacctttttcactgggattgtgctggaggtgataggcagcattctaccatttcctcagcaacagaggtgaaggctcctcaactcagaagcacaaattgtaggggacag

SEQ ID NO: 801015 - DNA, 120 bp, Artificial Sequence
  ENSG00000257342_1 (sequence is synthesized)
ggtgggcagggaaagggagaaggaaatcccaaggcaattcaatagaagagggtaaaacgactccaaacatcactaagggcaggtgggggcctgcttgctcagtgcctgctaagtgtcctg

SEQ ID NO: 801016 - DNA, 120 bp, Artificial Sequence
  ENSG00000257342_2 (sequence is synthesized)
aagccacagaggagaggaagaggattgagtgagagttcaggagagcaaatatcacaggcccggtgaggtctcaaggtggctgccagcaggggcagcagcattcacccagggcccccacac

SEQ ID NO: 801017 - DNA, 120 bp, Artificial Sequence
  ENSG00000257342_3 (sequence is synthesized)
ccacagagttgcccgagaggtccacagctcagctccactctgctgtttggccctcaggggttccagggtggggaggatctcgatcccataacgcatctcactcagctcctccaggttcag

SEQ ID NO: 801018 - DNA, 120 bp, Artificial Sequence
  ENSG00000257342_4 (sequence is synthesized)
gctcccgacaccgccggtcagacttgcgggtaacaggagtcccagaagcagcagtcctaacaaactggacagcagcgtttccgccgccatctttcgttccccttcttatgcagagaatct

SEQ ID NO: 801019 - DNA, 120 bp, Artificial Sequence
  ENSG00000257346_0 (sequence is synthesized)
ggcgccggccctcgagcggcaaacaccaggtgccagggcgtgagcaacagtttgcgtggaggccactcggtctccacagccacaaatgaagcccggcgctgcaagtcccggtccaggaag

SEQ ID NO: 801020 - DNA, 120 bp, Artificial Sequence
  ENSG00000257346_1 (sequence is synthesized)
agcagcaccggcgtgggcaccacccggcctgacgcatcggccgccaaaacccagtctccgcggtgcagttcccgcagccctttccgctcgccgctccacaggcgcacagttgcatttccc

SEQ ID NO: 801021 - DNA, 120 bp, Artificial Sequence
  ENSG00000257346_2 (sequence is synthesized)
ggaaagggccacaatgttccacggccaaggaggaaagaaggaatgccccttttcccatctctaggtaggaggaaggcttcagggcagaagcaaaaggaattatttcttccctggacaggt

SEQ ID NO: 801022 - DNA, 120 bp, Artificial Sequence
  ENSG00000257346_3 (sequence is synthesized)
tttcctaacaaagtaacctggaaaactatggcaattaatcagaggaaatccgtacccctccctctccccccacctccccactccatacacaattaggtggtgtaatggaaagtatatagg

SEQ ID NO: 801023 - DNA, 120 bp, Artificial Sequence
  ENSG00000257346_4 (sequence is synthesized)
gcttagaatcaggagtcctgaattctagtcccagccatgccactttaaattgtgagagtttaaattgcttttcctcctgggggaagtccagctctcagatgtaaaatgagggtggcagtg

SEQ ID NO: 801024 - DNA, 120 bp, Artificial Sequence
  ENSG00000257346_5 (sequence is synthesized)
gttccagctaaggctctgccagtccggagagcccctatctctcccatctctgctctagatgcagcccagaagggcgtgggagtagcacctgagaataacggtctccttgtgcggatctgg

SEQ ID NO: 801025 - DNA, 120 bp, Artificial Sequence
  ENSG00000257346_6 (sequence is synthesized)
ccacaatgttccacggccaaggaggaaagaaggaatgccccttttcccatctctagttctaacattcaagatcactggccaggctggatgaagtggctcacacctgtaatccagcacttt

SEQ ID NO: 801026 - DNA, 76 bp, Artificial Sequence
  ENSG00000257345_0 (sequence is synthesized)
agggtctaactgtggcccaggctggaatgctgcggcatcattacagctcactgcagcttcgacctcccccacagtg

SEQ ID NO: 801027 - DNA, 120 bp, Artificial Sequence
  ENSG00000257345_1 (sequence is synthesized)
agcacagggaggaggaggtgcatgcaagcgatactgcagggccagaatcagaatcatcagcacgtagcaactgattggatttctggagcaagaaagaagagttgaagataatgttgaact

SEQ ID NO: 801028 - DNA, 120 bp, Artificial Sequence
  ENSG00000257345_2 (sequence is synthesized)
ttctcattgggagattttactaacattattgagcaattactgcatgatggatgttacgctaagagcattctacaattattatacctcttacgtctcccagtagttctgttaagcactgaa

SEQ ID NO: 801029 - DNA, 120 bp, Artificial Sequence
  ENSG00000257345_3 (sequence is synthesized)
tgtggagcaggctatgcaaagaggggtacctctcccagtcagaggcatcagagaaggcttcctggtggagaacgtgtgtgatggacttatggactcattcactgcatcgatcttgggcac

SEQ ID NO: 801030 - DNA, 120 bp, Artificial Sequence
  ENSG00000257345_4 (sequence is synthesized)
tgcccagcttcatgttccactctcccgtttatcccaaattgctgaggatttcctaagaaccatcactttccagagctcattattttctgttatttgcctcagcagcacaagctgttttca

SEQ ID NO: 801031 - DNA, 120 bp, Artificial Sequence
  ENSG00000257345_5 (sequence is synthesized)
caaagaaataaagggtcttctattccagaagagttcttctatgcatgtaggtgagcagacagtgcagagccatgctgaggtgtgtgtgccttgctgtcactgtctctcctccgggaggaa

SEQ ID NO: 801032 - DNA, 120 bp, Artificial Sequence
  ENSG00000257345_6 (sequence is synthesized)
cactaggctcctgtacaccaggcttcccacagcccaggaggaacacatccacgccttgccagtcatttgcatcttagtaagactaaaactaataaaactaacaataaaacttaaaataga

SEQ ID NO: 801033 - DNA, 120 bp, Artificial Sequence
  ENSG00000257345_7 (sequence is synthesized)
ttattttgccctgaaagcagatgatggtgttaaataaagcaacaaattaaatgtggatgttagtgctgcaatggaggaaaacttgcagaaaaattgacctgacttatttaatcaagtgca

SEQ ID NO: 801034 - DNA, 120 bp, Artificial Sequence
  ENSG00000257345_8 (sequence is synthesized)
gagacattactgtgctacctggggagctattcaaatacaatacaatctatatgccttccacctgagcaaccaagttcttacagcgctaactagagaaggtgcaggggagggggggaggac

SEQ ID NO: 801035 - DNA, 120 bp, Artificial Sequence
  ENSG00000256699_0 (sequence is synthesized)
aattcctgtccgggaattgtcctgtgctccagccatggctaggactcatatggagggagtctcccggagcctcgtgaagcccttctcgctgtcccgggcttttgttggcagcctcctcct

SEQ ID NO: 801036 - DNA, 120 bp, Artificial Sequence
  ENSG00000256699_1 (sequence is synthesized)
ttgaggaggtgcctgctgcatctgtcactgcagccctgtctctggagtgggcggaggcagcctggggaacccatttatctcctgcaggctggaagtgtgctatgaggttcctggcagagc

SEQ ID NO: 801037 - DNA, 120 bp, Artificial Sequence
  ENSG00000256699_2 (sequence is synthesized)
aagactccatctccccagcctcctccatccgtctcccagggtgcctttgttttgaatcatttttgatttcaatttaagaagagaaagaagaggctgagacgaaggaaggagggactccag

SEQ ID NO: 801038 - DNA, 120 bp, Artificial Sequence
  ENSG00000256699_3 (sequence is synthesized)
cagctctgtcactgtgccgtcgtcctccacggagaccactttcaccgggacggccaccgtcttccccgtgaggatggctgtgttcaggatttctgcctcctggaagaccaaacacaccct

SEQ ID NO: 801039 - DNA, 120 bp, Artificial Sequence
  ENSG00000256699_4 (sequence is synthesized)
tccatcacatcccctcctgagacggcccagtccctgggatttacagatggcacagagagcttttgtcacttgcccagggtcacccagctagaaattaatgaaggcaggatttgaacctgg

SEQ ID NO: 801040 - DNA, 120 bp, Artificial Sequence
  ENSG00000256699_5 (sequence is synthesized)
gaagtccagctcccgagtccatgcatcagctaactcaaataggtctaaacgtggacatgacgacggtagcttaagccgccgaaggatggccagaggggcctggtgttgtgaaagaagctt

SEQ ID NO: 801041 - DNA, 120 bp, Artificial Sequence
  ENSG00000256699_6 (sequence is synthesized)
gcaccgcaccaccagtgcgagcacacccatgctcatcctcagtgactcctctagaattcttgtgattttttaactggtgggggacagagagatcataggagcccatttttcagatagaga

SEQ ID NO: 801042 - DNA, 120 bp, Artificial Sequence
  ENSG00000256699_7 (sequence is synthesized)
aaactgagcctcaagacccgggggaggatcaaaaggaacaagtggtattctggaaaaaagtggaacaatgctgtttaacttgctggccgaaactggctcatcacaaaggagagagacaga

SEQ ID NO: 801043 - DNA, 120 bp, Artificial Sequence
  ENSG00000256699_8 (sequence is synthesized)
cgagggagcagtgtggccacttctgacatcagtctcagggaaaacagtttctcacattcgtggtaaaaactgaagagcatctccactctaacgataaaaatcaaaaggcctttcatgttt

SEQ ID NO: 801044 - DNA, 120 bp, Artificial Sequence
  ENSG00000256699_9 (sequence is synthesized)
ttgcacattcaggttaatataatgagaaatgacgctgggaatgactgatgagcagctgtaagcccatatgtctggggtgttgcctttttctctgaatagcatacgtgtttctgcctacca

SEQ ID NO: 801045 - DNA, 120 bp, Artificial Sequence
  ENSG00000256699_10 (sequence is synthesized)
agatctcagcgtggctgagtgactgagccttcaggcttggtatttccctgcctcctctgtgtatttccaattctttgacgtcacgaattttctgttttggacagctttgccttttccagg

SEQ ID NO: 801046 - DNA, 120 bp, Artificial Sequence
  ENSG00000256699_11 (sequence is synthesized)
aggtgaatggtacggggatgactcacagaagtcttcagataagaggaggacaaaagagacccttgttcagtggcagaagtacctgtaaagccttagctttgcctgagatatgacctataa

SEQ ID NO: 801047 - DNA, 120 bp, Artificial Sequence
  ENSG00000256699_12 (sequence is synthesized)
ctgctctgatttttggaccccagaaaacccttgaaagctcagcttccttattgctgcgtggtcaccttatcacagcactgcagagcctaggaaataaaggcacagactctctttagaaaa

SEQ ID NO: 801048 - DNA, 120 bp, Artificial Sequence
  ENSG00000256694_0 (sequence is synthesized)
taaaagagagtgaagaaatgaggccaaccagatgcagtgtacagacttgggccacagtgggggaggtgacagcagacggtttggtgggaaggaacgcaccagagccccatgggcctgcct

SEQ ID NO: 801049 - DNA, 120 bp, Artificial Sequence
  ENSG00000256694_1 (sequence is synthesized)
ggccagctcgcttggtcatcctggtaaaacagcagagctctctgttccaagaggcccacgcgcagccccacatgcctgctgatctgtgtacacacgtgtgtgcactctagcaagcctcac

SEQ ID NO: 801050 - DNA, 120 bp, Artificial Sequence
  ENSG00000256694_2 (sequence is synthesized)
tttaattgtgaagaaacatgggaaccggtgctcccacccgggctgtgggagtgtggtgcggtggggcctggacacggggagggtccgaagtggggccagctccctggagtcaggcatgtc

SEQ ID NO: 801051 - DNA, 120 bp, Artificial Sequence
  ENSG00000256694_3 (sequence is synthesized)
tgtctcaagctgcccctgtcccttgctgaatgggaacccccaccagctgcctcgggagcccgtgtccttacactctattcggatctgctccagctccgtcacctcagcaatggactcctt

SEQ ID NO: 801052 - DNA, 120 bp, Artificial Sequence
  ENSG00000256694_4 (sequence is synthesized)
catctcgtccgagcccagggcacagaaatgcagcacctgcttcttctcggagcccgagagcggggtcaccagtgtgatgccatgagagtaatctggaaagcagaccccaggcccccagtg

SEQ ID NO: 801053 - DNA, 120 bp, Artificial Sequence
  ENSG00000256694_5 (sequence is synthesized)
ggctgtgagcagcagcagccgagggccagagccagccagacatgaggagggcacggggtctcatgcctccacccactctgctgtccagcccttctccctcaactcgccccagccatttca

SEQ ID NO: 801054 - DNA, 120 bp, Artificial Sequence
  ENSG00000256694_6 (sequence is synthesized)
tccattcattccttctcaaagacttacactggctgtcaaagacttacactcgttctcaaagagctggaactgcatgcccagcaggccaactgacttgcaaaaggtgtacgtggaggagct

SEQ ID NO: 801055 - DNA, 120 bp, Artificial Sequence
  ENSG00000256694_7 (sequence is synthesized)
cttcttcttcgggcaaagtttgagaatctgttcaggagagggaaacaggcatgccctgatgaacagacactcacggacacatggatgcacaaacacccgggggatgcacgatcacacaaa

SEQ ID NO: 801056 - DNA, 120 bp, Artificial Sequence
  ENSG00000256694_8 (sequence is synthesized)
cccacgcagtgatgaatgtgcacatacagcttctgtgagctgagccctggagatacaggagaactcaggacagagcccctgcccttaaggtgcttatggaatgtggagtgtcacagtgtc

SEQ ID NO: 801057 - DNA, 120 bp, Artificial Sequence
  ENSG00000256695_0 (sequence is synthesized)
cctgggccagtgcttgagaaacagttttgatcatccccatttacagaagagaaaacagcctcagagaggttaagagacttcctctggatcacacagctaatgtgcactaatggggctttg

SEQ ID NO: 801058 - DNA, 120 bp, Artificial Sequence
  ENSG00000256695_1 (sequence is synthesized)
tggcaacaggaggcccggtgaaatccccggtgagagcagccttttcgccgtggcctgccgtgaagcactatggcagcacccacacctgccaggactgaagatgaagaaaccgaggcccag

SEQ ID NO: 801059 - DNA, 120 bp, Artificial Sequence
  ENSG00000256695_2 (sequence is synthesized)
agggactgacgcacttgctcgagacctaccccaagccagtctgttctcttaacgtctattctgcagtttgatatgtgaccattcacagtgagcttggtcaatacaaagatgttcccagaa

SEQ ID NO: 801060 - DNA, 120 bp, Artificial Sequence
  ENSG00000256690_0 (sequence is synthesized)
aagtgggcacaggggcgtcaggggctggtggacccaggccgcttcttctttctccgtctcgtttggagagctccttggggctgctccaaacccgagagcttccgcttggcagctgcctcc

SEQ ID NO: 801061 - DNA, 120 bp, Artificial Sequence
  ENSG00000256690_1 (sequence is synthesized)
aaggatgcccaaagttcatctgtctctgtgtcttctaggggcaccttgttgggttcttgaggctcttggggctcatcctgggaggtcctcacatctatgcccttggctcccacattcccg

SEQ ID NO: 801062 - DNA, 120 bp, Artificial Sequence
  ENSG00000256690_2 (sequence is synthesized)
aaagatgagggaccttaaggagccaggcatgctgagacagaaacatgaacggagggcacaggaggcggggcctccacaagaccatgagttggaggtgggagagacaacttaccttatgct

SEQ ID NO: 801063 - DNA, 120 bp, Artificial Sequence
  ENSG00000256690_3 (sequence is synthesized)
ccagaccccgtggattctggatcctgtgtatcctcaagactctgtccaagccacaggaggctagtagaggctttgaagggtggcactgcaacccacgcacactgcctgccagccccttca

SEQ ID NO: 801064 - DNA, 120 bp, Artificial Sequence
  ENSG00000256690_4 (sequence is synthesized)
ggctgggcccgcctccgggaaggagccttaaagaaccagctgcccggtggtgtccgcgcccagtcccccagagtggtcgtgcagggaggtcctcacatctatgcccttggctcccacatt

SEQ ID NO: 801065 - DNA, 120 bp, Artificial Sequence
  ENSG00000256690_5 (sequence is synthesized)
gcccagtagacgccctagagaaggggggaagcatccgtgataactggctggccaataaccaaccattcattgtttcctgttccaatcactttccatttcaacatttaatctgcaacaaaa

SEQ ID NO: 801066 - DNA, 120 bp, Artificial Sequence
  ENSG00000256691_0 (sequence is synthesized)
gcaagatgggtgtaaatctttctagagcacagctgaaaagttaaatggcttgtcctagagtacacagctcagcagagccaagagtaaaatggaaatccagtgcttttccatctatgctgc

SEQ ID NO: 801067 - DNA, 120 bp, Artificial Sequence
  ENSG00000256691_1 (sequence is synthesized)
agtgaacctccactagagttttatgcaagtccaacctcccagcaatagggagaaaaagcaattatagcctttcttgatatttaacctagctaaaaacttcagcccagagaaaatcttcca

SEQ ID NO: 801068 - DNA, 120 bp, Artificial Sequence
  ENSG00000256691_2 (sequence is synthesized)
actgagccctaagcttgtgcagtgattaatgctttccatgtcttttccatccgcctgcagttatgctacaagatctctgggtaaaggactagccaggtctgtctaacacatactttttgg

SEQ ID NO: 801069 - DNA, 120 bp, Artificial Sequence
  ENSG00000256691_3 (sequence is synthesized)
tgtgacttaacagactggtttctaccactttcagcctgaagtgacagtgcttttaaatgttggttgcaggcaggggactattgccccctcccaagcacttcaacttccttggcttctgtc

SEQ ID NO: 801070 - DNA, 120 bp, Artificial Sequence
  ENSG00000231426_0 (sequence is synthesized)
atgaagaagggagctattaaagctgaaaagagtaaagaagcaaaggtgagtagacgtcaacgagtaacagtgaagacctagccgtgcctggagtaaattaaggtgatctatgtctccggc

SEQ ID NO: 801071 - DNA, 120 bp, Artificial Sequence
  ENSG00000231426_1 (sequence is synthesized)
tttccaagccagcagcaaataatcccaaaggaggtaaacatctaaaagaaaggaatgaaaacaggttttatttataaatgcctcactgttggaacctgcatgaatgaaagctgaatctca

SEQ ID NO: 801072 - DNA, 120 bp, Artificial Sequence
  ENSG00000231426_2 (sequence is synthesized)
aatttcctgggagatatccagtactttttgggctgtaaacagcaaaacaaacagcctttcttgtaatatgctacgtctagtgctaactgaattcaagaagtttatgagtgtggggaaagt

SEQ ID NO: 801073 - DNA, 120 bp, Artificial Sequence
  ENSG00000231426_3 (sequence is synthesized)
aacttgatgtctttgcaaacttacaaatttgcttcagtttaaattttgaccaaaaattcatctcaggaatatgttttggaataattctttgctattagttataaatgtgacaaatatcgt

SEQ ID NO: 801074 - DNA, 120 bp, Artificial Sequence
  ENSG00000231426_4 (sequence is synthesized)
ttaaacaataaaatattattttatacaacaaattatggcaacaaattccttgtagtgatagattttttaaaatctttaaatcatagatagggatttattatgctccatgtcaattatatg

SEQ ID NO: 801075 - DNA, 120 bp, Artificial Sequence
  ENSG00000231426_5 (sequence is synthesized)
tgaatttttatgtttctctattgtatataattgaaaaacataagacaaagaaatcacttattagtacgttgatagataaacgtgcttgatgccaaatatagacacacaaaatacacttaa

SEQ ID NO: 801076 - DNA, 120 bp, Artificial Sequence
  ENSG00000231426_6 (sequence is synthesized)
ttcttctgtaagaactcttaaacatctatgagaaacatcttatcaaattgatttccccctttctccttagtaaaaaaatcctgacgtttttaggttgacacaatgccactcagctaaaca

SEQ ID NO: 801077 - DNA, 120 bp, Artificial Sequence
  ENSG00000231426_7 (sequence is synthesized)
atgacatttcccagactcctttgtgtttaagtgtggccgtataactaggttgtgcccaaagacaattaagtataactgttgggtataatttttctgaaaagtctccttaaaaatatgacg

SEQ ID NO: 801078 - DNA, 120 bp, Artificial Sequence
  ENSG00000231426_8 (sequence is synthesized)
gtttttccttgctttctttttttccttgttatttagagtacgagtattgtatctgtagctccagcagccatcttggaccagaatatgatggtctggagaatgtaagccatgtgcagaatg

SEQ ID NO: 801079 - DNA, 120 bp, Artificial Sequence
  ENSG00000231426_9 (sequence is synthesized)
atacttacagacaagggactgtgtacttcattgaaccgtaaagctgccatagttgccttggatactctccttgtggacaccttttatgtgcaagaaaaataaactatcttgtttaagcca

SEQ ID NO: 801080 - DNA, 84 bp, Artificial Sequence
  ENSG00000231426_10 (sequence is synthesized)
agatcttcacatcaccagtatgatggaattgaagcccaagattggtaatgttatgccagcagcaaataatcccaaaggaggtaa

SEQ ID NO: 801081 - DNA, 120 bp, Artificial Sequence
  ENSG00000231426_11 (sequence is synthesized)
ttagattaagaggaaccatacttgagatttatttgaagaacggcacacctgacgatcctcatctgtacctggacctcatctaaacatcaatatcctggactttgagcatgagttaatgct

SEQ ID NO: 801082 - DNA, 120 bp, Artificial Sequence
  ENSG00000231424_0 (sequence is synthesized)
acgcgatgaatgaataaagtacactgacacacagatattctgctctgccagtccagctgagggtccaagccccttacaggctccctgctgagccctgtaaacagttgcgactcggcaggg

SEQ ID NO: 801083 - DNA, 120 bp, Artificial Sequence
  ENSG00000231424_1 (sequence is synthesized)
agcctgtaagcacctgggaccctcagaatatctgtgtgtcagcgtactttattcaccggtcattgggtcaggggtctgcaagggacagactccccacagctggtgacccctcgagaggag

SEQ ID NO: 801084 - DNA, 120 bp, Artificial Sequence
  ENSG00000231424_2 (sequence is synthesized)
ccctgcccccagctggtgccccatgtgaggcgctgtgtgaggaactgtgtgaggaatgctgtgaaggaaacgcgacgaaccgcccgaaaacgaagacagacagaacagcatgtggagact

SEQ ID NO: 801085 - DNA, 120 bp, Artificial Sequence
  ENSG00000231424_3 (sequence is synthesized)
cacacagtgaaattttcctccaagaagtactgcatgaacataccaggaaaaccaaaagaattcacaggacctttgaaagaagtggcttgccgctgcaaactccatgagacagctgaaaaa

SEQ ID NO: 801086 - DNA, 120 bp, Artificial Sequence
  ENSG00000231424_4 (sequence is synthesized)
ggaaagctatgaccgagaaaccaaggaactcactatcttgtcctcttggatgccagctataaattgaatcaagttggacaccggaattttgaccactttccacctttctatcgtggtcag

SEQ ID NO: 801087 - DNA, 120 bp, Artificial Sequence
  ENSG00000231424_5 (sequence is synthesized)
gggtactaactggaagaaaggaatgcgaatgattaccaatcctgctgcaagtgcttaaagaagatggaatcagagtgtgggaaccaggctgaactacatgactgacagtagatgaccgcc

SEQ ID NO: 801088 - DNA, 120 bp, Artificial Sequence
  ENSG00000231424_6 (sequence is synthesized)
actgccacgggatccacagggtccacaaagactggtaaaaggttttccaaaattgaacaaagaaaggctactgaatctgcagcccagttggaggcagcagtcaccaatcacccccctcaa

SEQ ID NO: 801089 - DNA, 120 bp, Artificial Sequence
  ENSG00000231424_7 (sequence is synthesized)
gatctcaaagtccatcagccattcaccacaccctttcctgatccttttttgtacacagaaagactccttaccagggacagaacacataattggacctggccacaaagctgtttctaccaa

SEQ ID NO: 801090 - DNA, 120 bp, Artificial Sequence
  ENSG00000231424_8 (sequence is synthesized)
ttttccagtcagccctgaagtactaataacaatcttgacactctttattcattattgtggatatctttaaaatgtgtatttaataataattcttagtaagtaataaataatacttattca

SEQ ID NO: 801091 - DNA, 120 bp, Artificial Sequence
  ENSG00000231424_9 (sequence is synthesized)
agtacataaaggggtagaattcctaaccttatttcgtattatcaacaatccagtaagtatgagtatgtccatattgtagatgagtctcaagaggccaagtgacttgcttaaggccagata

SEQ ID NO: 801092 - DNA, 120 bp, Artificial Sequence
  ENSG00000231424_10 (sequence is synthesized)
gtggtcaagtttctgaaggagggtctatttctactcttccaattgctaagttcaaaatgttttcaacattctttgcttggacacttaacgtcagggcccccgtattccattctagaatga

SEQ ID NO: 801093 - DNA, 120 bp, Artificial Sequence
  ENSG00000231424_11 (sequence is synthesized)
agtttcttcctaaattcacataggactagcattccaaattctgaaaggtgttaatcttagggatttaaggaacaagtgatgagaatttctgggaattctcaggaatttcaaaagtcctaa

SEQ ID NO: 801094 - DNA, 120 bp, Artificial Sequence
  ENSG00000231424_12 (sequence is synthesized)
ttatttccaacgttctttacactcttcactcattattatggatatctaaaaattatttctttaaattattaatgttatttaaataaggtaacattcagattatctaacaaaataacggga

SEQ ID NO: 801095 - DNA, 120 bp, Artificial Sequence
  ENSG00000231424_13 (sequence is synthesized)
aaaataacgggagtatacagagtcacatatcaatattaccaatataagatcttgttttgcttcccaaacccattatttcttgaaacactactcacagaatttgtataaaatatttaatac

SEQ ID NO: 801096 - DNA, 120 bp, Artificial Sequence
  ENSG00000231424_14 (sequence is synthesized)
aataaaacataaaaatattaattttatttacaagaatgattcaccattagcagcatacaaggccatgagcacatagttaaactgcaagcatctacaagcttgcatctacaagcaaatctg

SEQ ID NO: 801097 - DNA, 120 bp, Artificial Sequence
  ENSG00000231424_15 (sequence is synthesized)
attacactgtgaccacttcactcttacctgctcctgtcctggtaacaaaaacatgaaccttaaacttctgctccaagtggcatcactttctgagactcatttgactcaataagttttcta

SEQ ID NO: 801098 - DNA, 120 bp, Artificial Sequence
  ENSG00000231424_16 (sequence is synthesized)
tgttgtttattgagttcaattctctcagaatataatatttttcacatttctccaatgtttcagctgatttttcttgggatctaggatttagaaaagtatattcaggtagaagaaatgcta

SEQ ID NO: 801099 - DNA, 120 bp, Artificial Sequence
  ENSG00000231424_17 (sequence is synthesized)
ggaagaaatacctgcggggaaacactacttaggacaggcagaaatctgggatcatgagcttttgggtacagcagttagggcaaacgattcgtgttccaagaaagagaagggcaacaacta

SEQ ID NO: 801100 - DNA, 120 bp, Artificial Sequence
  ENSG00000231424_18 (sequence is synthesized)
agtgagcttttttaacaatatttcctcctttttgaaataaagagccttttaagcctcatgttaggtaatgagtatcctacgtagaattaaaatccactatcttcccaggaagaggtatta

SEQ ID NO: 801101 - DNA, 120 bp, Artificial Sequence
  ENSG00000231424_19 (sequence is synthesized)
tttaggagttaattgctagttgcttgtttagtctttctgtggctgtcagattattcctgaatgggagcctcataaacaagaagcttcctagcatgtcctctccagaccaaatggacgtgt

SEQ ID NO: 801102 - DNA, 120 bp, Artificial Sequence
  ENSG00000231424_20 (sequence is synthesized)
aaatcagctgtgtctttcggatcttaaggggagaaggttgggatttattcctgggcaagcctgaagaaaacattaccctaatggatgaaatatgtttgcacaaaaagacttttaaaaagt

SEQ ID NO: 801103 - DNA, 120 bp, Artificial Sequence
  ENSG00000231424_21 (sequence is synthesized)
gttgcattggtctttcccaacttgatgtcctcttccttgaaaagaaagagagtgcagaaaaattcatccgaattagcctagctttgtccttaaatgaagagtaacggattaactttgctt

SEQ ID NO: 801104 - DNA, 120 bp, Artificial Sequence
  ENSG00000231424_22 (sequence is synthesized)
tggtttagataagcaccaaaagaaatagtcactgtctccaggaattattcacacaccttcaacaatgtagtctagaagtcccattctctcctggccatatacagcaatagaaactcactt

SEQ ID NO: 801105 - DNA, 120 bp, Artificial Sequence
  ENSG00000231424_23 (sequence is synthesized)
cctgttttctcaagccagattcccctatcaattcaattcttcccaagaagactctcactgatttctcaattctcaatgtagtcagcaagaaaattggtcctggaaaaaatatttgacttt

SEQ ID NO: 801106 - DNA, 120 bp, Artificial Sequence
  ENSG00000231424_24 (sequence is synthesized)
ctgcatagaaaataatggtctctttaagattgcaagcccactgtggaggaattttggcttattttatgttttgtaccctgatgaagcacaggaaataggaaaatagagtatttttcttgg

SEQ ID NO: 801107 - DNA, 120 bp, Artificial Sequence
  ENSG00000231424_25 (sequence is synthesized)
caaacctggggtatgtttggtttagcaattggacaatttttagtttaaactgggcagcaaacatgaagccactctcaaaactgtgtgtcaggttctcaagcataattaggaaattatata

SEQ ID NO: 801108 - DNA, 120 bp, Artificial Sequence
  ENSG00000231424_26 (sequence is synthesized)
aataggaaaattcatcatcactaacggttttttctgaaatctatatgatagaagtgcacaggaagtaaaatatgttgggttttttcttttttctcttttttgtgattgattttgtcataa

SEQ ID NO: 801109 - DNA, 120 bp, Artificial Sequence
  ENSG00000231424_27 (sequence is synthesized)
gaaggcttagaacctcaaagaaacttgagagatggcgaggtccacagtgaacccaaagaacagcactcgttagctaactagaagctggtatcttgctcgcgttggtgccataccactcag

SEQ ID NO: 801110 - DNA, 120 bp, Artificial Sequence
  ENSG00000231424_28 (sequence is synthesized)
cattgaagatatataagaatagtgtaaaagggtattttaaaattattcttatatgggtatctgattcaaatttgaaatgtagatgtcactttttcatcactcaaacaggtgaggctccat

SEQ ID NO: 801111 - DNA, 120 bp, Artificial Sequence
  ENSG00000231424_29 (sequence is synthesized)
ctggacagagtctgatatataattcttatttgaggcttgcccctagaactcaccatacatgtgtctctttgcagaaaaaattttagcagaaccaataggggtcaatctgtgattttatcc

SEQ ID NO: 801112 - DNA, 120 bp, Artificial Sequence
  ENSG00000231424_30 (sequence is synthesized)
aaattatcttctagcttttatattccattctatgatgtctatcatttttaattttttaaagactaatttttccatataataatcattctgggatgtacagtgagatcttacttggcaaga

SEQ ID NO: 801113 - DNA, 120 bp, Artificial Sequence
  ENSG00000231424_31 (sequence is synthesized)
tagttcatattcatgtgaaatgtaagcatattatctccattgaaaaatcttcctcagtttgtatttggtattgacattattgtcttccaataaaagactatagaaaatttgatataaaca

SEQ ID NO: 801114 - DNA, 120 bp, Artificial Sequence
  ENSG00000231424_32 (sequence is synthesized)
aacatagagatatattaatgttattcaccaagagaagtatatatatatattatcaaatataataaccaatatgataataatgattatcagtgcttgttgtctgatgttagccaatgttct

SEQ ID NO: 801115 - DNA, 120 bp, Artificial Sequence
  ENSG00000231424_33 (sequence is synthesized)
gcctcaagggcaggtctgcatatatgatagtctctgaattcatagtgggaattttgtttttggtatggatgtccaattaattgaattaatcaacatatgccaacagtttgtttattactt

SEQ ID NO: 801116 - DNA, 120 bp, Artificial Sequence
  ENSG00000231424_34 (sequence is synthesized)
tgcagctcaatctattgatcaatggcttccgttcctagatcccacatcttacagatcaaaccttacatcataagggcattcatggagcttctgtttccattactacatactttattggtc

SEQ ID NO: 801117 - DNA, 120 bp, Artificial Sequence
  ENSG00000231424_35 (sequence is synthesized)
ggtctgtctacttttttgtagatttatacaattatactgttttaatcaactgtattgaggcataatttacatataataaaatgtacatatttcaggagtacagtttaataatctttaaca

SEQ ID NO: 801118 - DNA, 120 bp, Artificial Sequence
  ENSG00000231424_36 (sequence is synthesized)
tatatagtcatgtaaccaccatgccagccatgatagggaacaattccattagctcagacagattccttatgaccttcacagtcaatttccccaaccgaagccctaggcagccaactggac

SEQ ID NO: 801119 - DNA, 120 bp, Artificial Sequence
  ENSG00000231424_37 (sequence is synthesized)
ttctttctactcctatagatttttcctttctagagtctcacataatggaattaaatatatgcactcctttgctttatcttcttgcactcaacctgtttttgagatatatccatgttgtcg

SEQ ID NO: 801120 - DNA, 120 bp, Artificial Sequence
  ENSG00000231424_38 (sequence is synthesized)
cctgcatcagtgatttgatccttcttattgtcatgcagtattctattttatgcatataccacaaatgtctatccactcacctgttgtgggcatttaggttgtttccatttggtactatta

SEQ ID NO: 801121 - DNA, 120 bp, Artificial Sequence
  ENSG00000231424_39 (sequence is synthesized)
ttgaatttcttttgctgtaatgccacacagagaacctgagcctcctgatctgcagcccaggactcttgccaatgtatctgagttgttgtttgatagtatggaaggaaaacggagcctgaa

SEQ ID NO: 801122 - DNA, 120 bp, Artificial Sequence
  ENSG00000231424_40 (sequence is synthesized)
gtgtgacacaggtactgtgttaatatttcatgtatgttgtctcctttaattttgccactaatctctgatgtaggtatcattttacaaaagaagaaaaaagactcaggggataagcaactt

SEQ ID NO: 801123 - DNA, 120 bp, Artificial Sequence
  ENSG00000231424_41 (sequence is synthesized)
gcccaagattacactgaaagtaagtagctaaacaggaactggaaccaaggtccatgttttttccattacatcatgttgtcccctgaaattcccctctgaagaattcctgttaatgcttgc

SEQ ID NO: 801124 - DNA, 120 bp, Artificial Sequence
  ENSG00000231424_42 (sequence is synthesized)
gcctcatctcatgcgtcaaaactatatcctattcctttaagaccaagcagttgtggaaatggttaataattttctcaaggcatgggttgagcccatgccccccgtgcagcagaattaatg

SEQ ID NO: 801125 - DNA, 120 bp, Artificial Sequence
  ENSG00000231424_43 (sequence is synthesized)
ggagactcctggaaactgcggtgatggcaggaataagtctctgcttatggcaatttaggtacagtagtaaaccaagggagacatttttggtagaagtcttttagactcttggactctttt

SEQ ID NO: 801126 - DNA, 120 bp, Artificial Sequence
  ENSG00000231424_44 (sequence is synthesized)
acatctaaaagcttgactggacaagttgaattgcatgcaacaaaactttctgtagttttcttaaaaatatattacgatttcccttctccctgcttatctagagcaaagacaaggattgca

SEQ ID NO: 801127 - DNA, 120 bp, Artificial Sequence
  ENSG00000231424_45 (sequence is synthesized)
caaacatacccaccccaatcccacatctccgtctgctgaggttgtaaaatataccttcccattctttctttctacatttaacaaattttgaactataataatcacagaaaagtacagagg

SEQ ID NO: 801128 - DNA, 120 bp, Artificial Sequence
  ENSG00000231424_46 (sequence is synthesized)
ttaacaccataaacatgttgtactcaccacccagcttttatcaaatttaatattttgtcatattttattctcatatttttaagaaataaaatatttcagatgtattagaagcacccagta

SEQ ID NO: 801129 - DNA, 120 bp, Artificial Sequence
  ENSG00000231424_47 (sequence is synthesized)
tacctgtcccaatcctatcctctgcccccttgttcagaagttgcttttgctgaaattgtttctgaaacaattcagaaattttatgaaattatttctcacttctatgatttttttgcattt

SEQ ID NO: 801130 - DNA, 120 bp, Artificial Sequence
  ENSG00000231424_48 (sequence is synthesized)
ttactacatacatatatgtttacaaacaacatactattagagtgtgcatttttaaactttttataaagggtggcacatctttctacaacatgtcctcccctcaaagttatgtttctaagt

SEQ ID NO: 801131 - DNA, 120 bp, Artificial Sequence
  ENSG00000231424_49 (sequence is synthesized)
gaataaatgtagctgtgtttccttcattttctatttctgaatagtattccattgtttgaacatgtcacaatatgtttattctcccattgaaggacattttgtttgtctccaatattttgt

SEQ ID NO: 801132 - DNA, 120 bp, Artificial Sequence
  ENSG00000231424_50 (sequence is synthesized)
tattgcaaaccatgctgcaattaacatttttgttcatgtcttcctgtgcacatgtgtgagtttctctaactgtccaggattgctagccttattttacctctgcttaactgaatgacacta

SEQ ID NO: 801133 - DNA, 120 bp, Artificial Sequence
  ENSG00000231424_51 (sequence is synthesized)
actccctttgaactttgagaatggtgactggaagatgacaattcatgttgttttcaggaaaggttcctctcagaaactgttattaggtacggagaaggaaacacatgtccttgatgaagt

SEQ ID NO: 801134 - DNA, 120 bp, Artificial Sequence
  ENSG00000231424_52 (sequence is synthesized)
aagaaaaataaaaaagacttcggaagttgaaaataatggcaaatggggaatgatacagctttgcatgggttctaataaaaaaaagtctcagaagagaaaaaaataatattttcataaaaa

SEQ ID NO: 801135 - DNA, 120 bp, Artificial Sequence
  ENSG00000231424_53 (sequence is synthesized)
tcccttttggaaggcatccagacaggcgaggtcaattctagcttggaggcaagccgctgtgactattttgagatttccaagcaggaaagccacaggggtgaagtgcagctggaagagagg

SEQ ID NO: 801136 - DNA, 120 bp, Artificial Sequence
  ENSG00000231424_54 (sequence is synthesized)
gagccaagagtttcatcagcaaagacttcatcttgacttgttttgcaaagaaacaaaggtgggaggtctttgctcttcctcagggatgtgttgaatattcaaaaatattaattttggagc

SEQ ID NO: 801137 - DNA, 120 bp, Artificial Sequence
  ENSG00000231424_55 (sequence is synthesized)
tgaatctcctgaggacgcccattctaagtctccatggcccttcaacaagaaatcaaaatgacacaacatacagaccaggaagtctccagatggactacaacctctgggcacccccaaatg

SEQ ID NO: 801138 - DNA, 120 bp, Artificial Sequence
  ENSG00000231424_56 (sequence is synthesized)
tccaatgtccaacacaaaccataatccagtatttaagatgagcctagaatttttaataattgcaagggaaatagcttcatttgacaatccacaaagtgctgcaattataggtagggtgtt

SEQ ID NO: 801139 - DNA, 120 bp, Artificial Sequence
  ENSG00000231424_57 (sequence is synthesized)
ttcagccttacaggtggctcttccagaatacagggccagttccacacaacaatgcccctagcatttttatgtactttgatgccctttttctctacctctagatactaggtttaatcctat

SEQ ID NO: 801140 - DNA, 120 bp, Artificial Sequence
  ENSG00000231424_58 (sequence is synthesized)
tccccagcaccccattctgaatcatcatcaccagacaacttcctcttgtgtcctcccaattgaaggcctgactgtacaactcccttggtactttctgcttagtagctgtttatttgaatg

SEQ ID NO: 801141 - DNA, 120 bp, Artificial Sequence
  ENSG00000231424_59 (sequence is synthesized)
tataaatgtgtaaacaggaatagaggttcaatgtgttctttttcctggaagtattcgtattattaactttagaattaatgaattaattcaagagaattattaactaatggggggactttt

SEQ ID NO: 801142 - DNA, 120 bp, Artificial Sequence
  ENSG00000231424_60 (sequence is synthesized)
aggaaccaggaaggattagagagggtatcagagggcatctctgttgcaagacagagacagttactgtttagatccatttctgagtaatttcagctctgtttccaggaatatacttaagaa

SEQ ID NO: 801143 - DNA, 71 bp, Artificial Sequence
  ENSG00000231424_61 (sequence is synthesized)
tgagtaatttcagctctgtttccaggaatatacttaagaaaatattctgatcacccaagatagatgcagtg

SEQ ID NO: 801144 - DNA, 120 bp, Artificial Sequence
  ENSG00000231422_0 (sequence is synthesized)
gaaagagcttaaggagaagctctgacaagggatagacagtttacttatggaaacaagcagaaaattaaatctggtctctgcccagcaagcatctcacctcccaccatagcgtctggcaga

SEQ ID NO: 801145 - DNA, 120 bp, Artificial Sequence
  ENSG00000231422_1 (sequence is synthesized)
gaagtgagccaaggtggcccctggcgcagcaaatgtttggcacatccatttgcacaggagggggaagaaggcgcattctcaaacacccttcccatcacctttcaggatcttaggtgcctt

SEQ ID NO: 801146 - DNA, 120 bp, Artificial Sequence
  ENSG00000231422_2 (sequence is synthesized)
ctctacagccatggcacaaacctttaccactagggggcggctagacatttcgattggctaccaggcaagcggccagctcaggacaggagcagtgctctgtgaaagaatggattcctggtt

SEQ ID NO: 801147 - DNA, 120 bp, Artificial Sequence
  ENSG00000231422_3 (sequence is synthesized)
tgttctaagtacaaacaagggggaaatgcttctgcagggttaaatgaggttgacacgctccccgcggctgaccagacagtccctcctaactcttacccaccctgggcagctctctcagcg

SEQ ID NO: 801148 - DNA, 120 bp, Artificial Sequence
  ENSG00000231422_4 (sequence is synthesized)
cggtgtggggcgggagtgggagctgatggggggtgctctctattcagactctacttgttctagactgagtcactggtgggggcagcggtgtttgaaagtgggcatcactcttgggctccc

SEQ ID NO: 801149 - DNA, 120 bp, Artificial Sequence
  ENSG00000231422_5 (sequence is synthesized)
acattgactgtagttttacggaatgtttggctctctgcgtgatgtttttacttaccaaagacacagacctgggcttcctggggtcccccttctgcagctgtgataatcagcagtcttccc

SEQ ID NO: 801150 - DNA, 120 bp, Artificial Sequence
  ENSG00000231422_6 (sequence is synthesized)
tacagtggcacggaccaggcaggtttctcaccagccaagccccaatgccgcctttcaagtctgttcttgtttccctagaccccttttcttctttttcccaaaccccagacgttctgctgg

SEQ ID NO: 801151 - DNA, 120 bp, Artificial Sequence
  ENSG00000231422_7 (sequence is synthesized)
tgtcacctctcttaatccttgagatcactgtgatcaagtctttcttcctgcccaagactagttttaggagaggaagccctgctatatcacttgggctggtgcaactcaccgcaggctcac

SEQ ID NO: 801152 - DNA, 120 bp, Artificial Sequence
  ENSG00000231422_8 (sequence is synthesized)
tgcatcctcaaactcctgggctcaaacggtcctctcacctcagcctcctgtgtagctaggactattccctgccagtgtgcccagcctcaatctgcttttacaaactgaaagatcatggga

SEQ ID NO: 801153 - DNA, 120 bp, Artificial Sequence
  ENSG00000231422_9 (sequence is synthesized)
gagtcacatctttctgggaaggagaattagaaggaggaagtaaatgtcttccttgccaaattgtggtaagagagagtgacgatgttgttggggtgaaggtaggaagtgattttctcacta

SEQ ID NO: 801154 - DNA, 120 bp, Artificial Sequence
  ENSG00000231422_10 (sequence is synthesized)
agaagagggtcctggcccatatttttacttcagctgctcaaatgacaagtttaaataaggaaaaagattccaaaaaaggaattcaggaacatttcctgtgggaccaggctgtgctgccat

SEQ ID NO: 801155 - DNA, 120 bp, Artificial Sequence
  ENSG00000231422_11 (sequence is synthesized)
ggccttctgttcatgatttatggatgagacagaggatgatgttggctccatctggaaagtgggtcagccagtctttgaggagacaccttggaggcctaggaatagtgctgtggatacaga

SEQ ID NO: 801156 - DNA, 120 bp, Artificial Sequence
  ENSG00000231422_12 (sequence is synthesized)
tgacataagtttagagacagataggagagtgaagaaaggacttgaccctcagaaagtgaaattcaacttcagcctgaagtggaacactgctcaagataaaggctctgcaaaatgtactgt

SEQ ID NO: 801157 - DNA, 120 bp, Artificial Sequence
  ENSG00000231422_13 (sequence is synthesized)
aaatgattcacaaccgttaatgcaaagatccaggtgaagaaatatcctgaagaaaaacccgtcctgatctcaaatgctacccccagaggcctgccagagcacagaactttccacaggcaa

SEQ ID NO: 801158 - DNA, 120 bp, Artificial Sequence
  ENSG00000231422_14 (sequence is synthesized)
attgctggaccactggctaaggacagtaagaagggctggccatgttattcaggaggcaaagtgtgttggcacctatggagacgtttgtaccattggcttatcagatgtgtcagcccagtg

SEQ ID NO: 801159 - DNA, 120 bp, Artificial Sequence
  ENSG00000231422_15 (sequence is synthesized)
acttgcaaagggtgaggggtggtcatgtagcccatgagactcattcatttggggtcaagaccacagaagaaatggtaattgataatgatttatttccttcctttcccttccctttctgtt

SEQ ID NO: 801160 - DNA, 120 bp, Artificial Sequence
  ENSG00000231422_16 (sequence is synthesized)
cctttctttcatttctttaattgacctcaggacctctgattaaccataatccttggttccatacactttcatcattggtccatttatgatctcatttatttaattattttaattagacaa

SEQ ID NO: 801161 - DNA, 120 bp, Artificial Sequence
  ENSG00000231422_17 (sequence is synthesized)
ccatgagtccaccacctagtacaaaaactaggacatcgacaatattttacatctaactctatagtccttccctttctcatcctcatacctcactccacccaaggagctcagccacctccc

SEQ ID NO: 801162 - DNA, 120 bp, Artificial Sequence
  ENSG00000231422_18 (sequence is synthesized)
ggaatcctgtattcacaatttccttgcttttgtttttaaaagtgtgagtatcccacagtttatgtaactgttctcctgttgatgagcccttatgttgtttttaggtttttcatatttaaa

SEQ ID NO: 801163 - DNA, 120 bp, Artificial Sequence
  ENSG00000231422_19 (sequence is synthesized)
tagtgatgtagcaatattattgtacatatcacagggtatacctgtgtgagagtttcttttgcgtatatatcgagatggaaattgctcatagagtaggtgaatacttgacatcacaagata

SEQ ID NO: 801164 - DNA, 120 bp, Artificial Sequence
  ENSG00000231422_20 (sequence is synthesized)
atgcaaattatcttccaaaacatactaattttacatttctaccagcagagtacaatttgtagatccacatcccctccatttttctccatgtccaatgccagtaacttggcattattggac

SEQ ID NO: 801165 - DNA, 120 bp, Artificial Sequence
  ENSG00000231422_21 (sequence is synthesized)
ttttaaatttttgtcaggcatgtcagtttcacttgtatctcactgtgttttgatttgcatttccacacttagtaatatggttgaacatccctttcatgtttactggtcacatatgtttct

SEQ ID NO: 801166 - DNA, 120 bp, Artificial Sequence
  ENSG00000231422_22 (sequence is synthesized)
tttgttttgaaatttctgttcatgtcttctggtcatttttcaattgggataaaagtacttttatgctgatatgcaggaacagtgatttttctaaataataaaaatctttcaaaatttaaa

SEQ ID NO: 801167 - DNA, 120 bp, Artificial Sequence
  ENSG00000231421_0 (sequence is synthesized)
aatgacccaacagaaaagccagcactgaaaatgaagacaaagacgcaaaggccaataaatattcacaaaacgtcacttcactaacatttccagttccagatgacaggaggccctcaggga

SEQ ID NO: 801168 - DNA, 120 bp, Artificial Sequence
  ENSG00000231421_1 (sequence is synthesized)
ctcaggaggcaggagcacggggaggtgacagcgccagcagcaggagggcaggcctctgccttggcacgagcggggccacagctcctggcgggctgcgggggccgggaagcccgagcagcc

SEQ ID NO: 801169 - DNA, 120 bp, Artificial Sequence
  ENSG00000231421_2 (sequence is synthesized)
tggcgctcctggcccctgcacacgcttccctccctccaccccgttcctccctctctctgtgccttgggccccgtgggatgcgctcacatccagactcaccaggcccgagacgttgggaga

SEQ ID NO: 801170 - DNA, 120 bp, Artificial Sequence
  ENSG00000231421_3 (sequence is synthesized)
atggagaagcgcttgcgagccaaaagtcctccaggagcacctgaaggaagcttcgcctgcacctgggacacccttccctgatgctggcctcaaggcaggcgcgccgcacacgcttccggt

SEQ ID NO: 801171 - DNA, 120 bp, Artificial Sequence
  ENSG00000231421_4 (sequence is synthesized)
ccatgacgaccacagctcagaagagcacgcgaacccagcctccacaaagagaaaatggcggaatgggccttcgcctcccttttataacggctgtactcaaccgctgtatcttggaagctt

SEQ ID NO: 801172 - DNA, 120 bp, Artificial Sequence
  ENSG00000231421_5 (sequence is synthesized)
acaactcttattggataatagtctcctgctctgactggataatcttaactaatcagagttggagacttatccaatctgtgttgtagtacagagtctgctctcatcctatcagaaagaggc

SEQ ID NO: 801173 - DNA, 120 bp, Artificial Sequence
  ENSG00000231421_6 (sequence is synthesized)
ttccagggtatgtcatttgaatacagacattataaaagggaggcaaagatctgcacctgccgtggaggttgggctcatgtgctcctctgcattggagttagccaaggagcgtgtgcagaa

SEQ ID NO: 801174 - DNA, 120 bp, Artificial Sequence
  ENSG00000231421_7 (sequence is synthesized)
cacttgcctcataggccagccgtagagaaggatgtcccaggtgcaggcgaagttttgttcatgtgttcctggaggatttttcccgtggcaagcgcttctccatcctccagcatctcaggc

SEQ ID NO: 801175 - DNA, 120 bp, Artificial Sequence
  ENSG00000231421_8 (sequence is synthesized)
ctggctggccactcagtattccttgtccctggcctcgcagcccacccgggaagccacagtgaccagccaccaggtgtgccatcacggaggaagtccaggttggagaggtggtctccttct

SEQ ID NO: 801176 - DNA, 120 bp, Artificial Sequence
  ENSG00000231421_9 (sequence is synthesized)
gtgagcaggtccacctctccccccactgaggcccctttctgcctgtgacagccccacctcaagggccatggcacagccatcagctccagctgccagcatgctactgccatgccccgagtg

SEQ ID NO: 801177 - DNA, 120 bp, Artificial Sequence
  ENSG00000231421_10 (sequence is synthesized)
tccatctgggccccggttcatgacctgttgtctttctgtatctactttctgcagcccctcactgaggaggcctcctgggtttgtccagtgcctgctattaaagctttgctccaagttcaa

SEQ ID NO: 801178 - DNA, 120 bp, Artificial Sequence
  ENSG00000231421_11 (sequence is synthesized)
tgcaggtgggaagggtgatcaggccttcagctgacagtttcctggagtctccatgcttagtcacacgttgcagctttttgctccccgaaaatggtgaagtccatctatagtctaacgaca

SEQ ID NO: 801179 - DNA, 120 bp, Artificial Sequence
  ENSG00000231421_12 (sequence is synthesized)
gaaaaaccacttgctcagcttctccttgtaaattcctggtgagtgcctccaggcctactgctgtgctgtttctttttcttcttcctgctgcgctgaacccctgccctttcattcttgggc

SEQ ID NO: 801180 - DNA, 120 bp, Artificial Sequence
  ENSG00000231421_13 (sequence is synthesized)
ctgtgctaatttctgtgcattcccaactgtgatttttcaccaatttgggggaacctcctctgccaggtcctgcttcatgccagcagcgcttgcaggagcctgggctggctggcatccctg

SEQ ID NO: 801181 - DNA, 120 bp, Artificial Sequence
  ENSG00000279848_0 (sequence is synthesized)
tccacccacccatccatccatccatccatccttccactcgtatctatccacccacttatgtatccatccatccatccatccatccatttcttcatccagctaagaaatcagggtctcaaa

SEQ ID NO: 801182 - DNA, 120 bp, Artificial Sequence
  ENSG00000279848_1 (sequence is synthesized)
tacaaatgtctccaggaaacagtaatataaatgagaaaatcttggtgaatcctgtggcaaaagggaaccgtcactatccttctcctcctcctcatcaacatcaatatatctgtcatttat

SEQ ID NO: 801183 - DNA, 120 bp, Artificial Sequence
  ENSG00000279848_2 (sequence is synthesized)
tgaatgtgtccattcatcttccattctttcaacatttactgaagcctgactatgctagttaagacctgattggcttctgtggatatgatcaaagaaaacagtgttgctgaaaactccttt

SEQ ID NO: 801184 - DNA, 120 bp, Artificial Sequence
  ENSG00000279848_3 (sequence is synthesized)
acaccaatctgtgtatctggctaatacctagcctcttacccagggacttttctttctcttctcctgatgaacacattgaaattctgctgcaacaagtgtgcttgcttgccaagggctgga

SEQ ID NO: 801185 - DNA, 120 bp, Artificial Sequence
  ENSG00000279848_4 (sequence is synthesized)
accaataggtgttaggtgaagggtggtcagatcagtggtatcaggagtaggaggcgtcactaaaaatcttaaagagaaggatctaggcacattcaagcatttcagacttttttcctagtg

SEQ ID NO: 801186 - DNA, 120 bp, Artificial Sequence
  ENSG00000279848_5 (sequence is synthesized)
cagggtcagcctcaaggcctttaatctgggcaaatctgacctcgtaaaacaactcctaagatactctctccaatagcaataatcctaaatggcatttactgaacacctactgtatacaga

SEQ ID NO: 801187 - DNA, 120 bp, Artificial Sequence
  ENSG00000279848_6 (sequence is synthesized)
acattgttctttccatatgttatctcattgaatcctacagcgagctttcaagaggtgaatcctgttatccagctctggatgaggaaagagactcagattcaaagaacatcgtgccatgtt

SEQ ID NO: 801188 - DNA, 120 bp, Artificial Sequence
  ENSG00000279848_7 (sequence is synthesized)
atgcaaggtcacatgactgataagaagcaggattaggattggaactcaggatttagagcccatagttatctccaaaatttagcacatcaaaattccttggaagcttttctagcccattga

SEQ ID NO: 801189 - DNA, 120 bp, Artificial Sequence
  ENSG00000279848_8 (sequence is synthesized)
ttcttagtgagtaagatccccaggtgatcctgatgcaggtgttttgcagaccacactctgacaaactccacctgaaccttgctgagacatgtttggggggacttttatttttgcagcatc

SEQ ID NO: 801190 - DNA, 120 bp, Artificial Sequence
  ENSG00000279848_9 (sequence is synthesized)
ctttggttgatcattgtccttaggaatgtgacagtgctcagagaagaatcaacatggggctgggggagtgccagggtagcagttacttacacatgaactttttgtttgcgaaagtttcag

SEQ ID NO: 801191 - DNA, 120 bp, Artificial Sequence
  ENSG00000279847_0 (sequence is synthesized)
gaagaatcatatcttattcagtacttcaatttagacagcaaatcctccctcttcttcccaaaagtgagcctgaggggagaaaccttgactctccagttgaccactgtgtctctcgacaca

SEQ ID NO: 801192 - DNA, 120 bp, Artificial Sequence
  ENSG00000279847_1 (sequence is synthesized)
atgagaggcatggaaggccattacctcattcacaggaatctcagcatggctctgcaacttcaaagaaggcagttcggggaacagcagacacagctcctttggaaagaatatctgccgccc

SEQ ID NO: 801193 - DNA, 120 bp, Artificial Sequence
  ENSG00000279847_2 (sequence is synthesized)
gaggatgggctctgcctatggaggcaacagtgagtgtcttcagagcccatcagtggcagtggaattaatgaagaaagcaatggcaggaaaagttgaataaagcagacccttcatggtaaa

SEQ ID NO: 801194 - DNA, 120 bp, Artificial Sequence
  ENSG00000279847_3 (sequence is synthesized)
atcaaagcaacaagaagctagggcagaggatttagagggcaagcaagcatgggccaggactttgacagcattcatccagcagcatgcgaactccaaagagaacccgatctccaaagacaa

SEQ ID NO: 801195 - DNA, 120 bp, Artificial Sequence
  ENSG00000279847_4 (sequence is synthesized)
atgtgggacaatcactggaggaaccccagttacatttggtcagagtgtggcgaggggaaccttctcaggaaagaaaatagaggtcctgttttaggaaaaaaaataaagatcagaaacctg

SEQ ID NO: 801196 - DNA, 120 bp, Artificial Sequence
  ENSG00000255279_0 (sequence is synthesized)
tctatcaggacctgtgagacttccctcaagagctggttgttaaaaagagcctaggacctcttccctctcttgcttcctctcttgccttgtgatcttcacatcctgactctccttcacctt

SEQ ID NO: 801197 - DNA, 120 bp, Artificial Sequence
  ENSG00000255279_1 (sequence is synthesized)
tcatagtcctgagaacaaaacagttcagatcaactcaacaatattccaagtgggctttgcagagcatcttctggactaagtagaaggagaaggagaaggagccagaccttccctgtggcc

SEQ ID NO: 801198 - DNA, 120 bp, Artificial Sequence
  ENSG00000255279_2 (sequence is synthesized)
atgctttctctaaaacagccctgatgacttactttttcaggttgaggtctgagtaagcctccatattatgtaataataattatattattatgtaataatataaaataatgatatcaatta

SEQ ID NO: 801199 - DNA, 120 bp, Artificial Sequence
  ENSG00000255279_3 (sequence is synthesized)
cttatcaagaatcatgcctttcctgttgcagagtagaagtaaacaaaatcaagaaatctccaatgctcacacaattttaacaggtttggccaatacaacagagacgtgaaaaccaacaga

SEQ ID NO: 801200 - DNA, 120 bp, Artificial Sequence
  ENSG00000255279_4 (sequence is synthesized)
ctaggattccttgacattctgttactgagagtctgcagtctcaagactttaaggataatagttccaaaggaatgttatctgtacgttttttctgagtaaacacttccatttcaagcaaaa

SEQ ID NO: 801201 - DNA, 120 bp, Artificial Sequence
  ENSG00000255279_5 (sequence is synthesized)
ggatgactaacaaaaacctgaaatgcatagtatgcaagaaggagtgttgtaagaactgtgtagaatctaaatcctaggattccttgacattctgttactgagagtctgcagtctcaagac

SEQ ID NO: 801202 - DNA, 120 bp, Artificial Sequence
  ENSG00000255279_6 (sequence is synthesized)
tttaaggataatagttccaaaggaatgttatctccttgctatttggtggaaatgacctcactcttagcatcaggggtgtggctgattggcttaacctaatctatgccccaccccttctgg

SEQ ID NO: 801203 - DNA, 120 bp, Artificial Sequence
  ENSG00000255279_7 (sequence is synthesized)
ttggggctaatgaaagagactgaatccaaaaacataagcagaagcctgcttgggtcctcctctctcattgcttggagtcatactggtgagtataggataaattctggagcctggaatatg

SEQ ID NO: 801204 - DNA, 120 bp, Artificial Sequence
  ENSG00000255279_8 (sequence is synthesized)
aaaactgactgtcaacacatggtagagttgtcactgagctgctgcctccagcttcagtagggaccagttctatctctaaactgtttcagttttgtgatgcaataaattccacttactgct

SEQ ID NO: 801205 - DNA, 120 bp, Artificial Sequence
  ENSG00000255276_0 (sequence is synthesized)
agtgaactggattggattagccgctggtcttgtccttaaataatacatcccagtcttcaaaccctacaaggaaagtaaagacaattattaggagaaactctgtgagaatactagacattc

SEQ ID NO: 801206 - DNA, 120 bp, Artificial Sequence
  ENSG00000255271_0 (sequence is synthesized)
taatgatacctgtgcctgctccatctctctctttcttctcctgccttgatgtcttgaaggtcatttgttctagaagatgatatgcctataacaaggaggaaggtcacccagcctgcacca

SEQ ID NO: 801207 - DNA, 120 bp, Artificial Sequence
  ENSG00000255271_1 (sequence is synthesized)
gaatgcagatttaaagatgtcactggggccgggctcacacctgtcatccctggactttgtgcagccaagacggctggaccactcaagcccacccagcaagggcccggtcaacagctctca

SEQ ID NO: 801208 - DNA, 120 bp, Artificial Sequence
  ENSG00000255271_2 (sequence is synthesized)
gatgaatagaggtgaacaccaaaatcagaggaaaaggtggctggtgttcttcctggaacatttcatttttgaaccagagaaggctcatcttgaagcgttaataaagaagcttttatttgt

SEQ ID NO: 801209 - DNA, 120 bp, Artificial Sequence
  ENSG00000255270_0 (sequence is synthesized)
catgtgggtgtgcaggagggaagagctcccatctccggggatcttccatgacattctccatgacagcaggccaacaggaagtggcagaaccttcatgacaaagcattggagtgctgcttc

SEQ ID NO: 801210 - DNA, 120 bp, Artificial Sequence
  ENSG00000255270_1 (sequence is synthesized)
tagtgtgaatcctgtcatggataggaccatgtatcctgtacactctccaggtgcccagtgaatatgagcttctctgaactgactgaagaccacaagatgaaaactggaaactcgcagcct

SEQ ID NO: 801211 - DNA, 120 bp, Artificial Sequence
  ENSG00000255270_2 (sequence is synthesized)
agcgttcagtgcgggcttctctggctgatacactcgccatggaccttgctatccctgagctgggaccctaatggatgtgcatgagtttgtctccaacttgtaaaaaatgtgcttttgcaa

SEQ ID NO: 801212 - DNA, 120 bp, Artificial Sequence
  ENSG00000255270_3 (sequence is synthesized)
gaatgagtgaatcacagactgaaagaatatatttacaatgcatacacctgacaaaggtttcacatccagaatatataaagatttcctagaaatgcgcaataaaaagacaactcaaaaaaa

SEQ ID NO: 801213 - DNA, 120 bp, Artificial Sequence
  ENSG00000255272_0 (sequence is synthesized)
gatgggccacctgttttaaatccaaaagctggtaggagtttcaggtacactgcatttgcttctgctgtcctattgcacttggacttggtgcagctatgacctaatgcagaagacaaagta

SEQ ID NO: 801214 - DNA, 120 bp, Artificial Sequence
  ENSG00000255272_1 (sequence is synthesized)
tgaagctaccaaactgtcagggccagaactaagcctgtataattgataggaaccttctgggtgcatgatgagtggatcttctgataagatacatttaaagtgtcccctgttggtggcttc

SEQ ID NO: 801215 - DNA, 120 bp, Artificial Sequence
  ENSG00000255272_2 (sequence is synthesized)
ggggctaaggatgtgaccaagaatggcctgtaatcctgaagcctgccaagattgcatcattgaaacaatgcttcctaccaggtggagagaaaatgcagtattcttatctgagacgtaata

SEQ ID NO: 801216 - DNA, 120 bp, Artificial Sequence
  ENSG00000255272_3 (sequence is synthesized)
gaggccagagtgctgaacaacactatccaccagttccgtagccccatagggctggggaagccactggtatatggaaccttactgtaccctgttgaggcttaaacatgtcagtggccacta

SEQ ID NO: 801217 - DNA, 120 bp, Artificial Sequence
  ENSG00000237862_0 (sequence is synthesized)
ggtaggttgccaggttaaggaaataaaaatgcagggcagccagttcaagctgaatttcagaccgtgcatgttaactagatgtcctgtatttactgtggcaaccttacccccaggggacat

SEQ ID NO: 801218 - DNA, 120 bp, Artificial Sequence
  ENSG00000237862_1 (sequence is synthesized)
ttggcaatgtctggaggcagttttggttgtcactggggatggttaggtgctaccagcatctggtgggaaggcaccgggggtgcttttaaacatttcacaatgcataggacagctgaggcc

SEQ ID NO: 801219 - DNA, 120 bp, Artificial Sequence
  ENSG00000237862_2 (sequence is synthesized)
aaaaaaaaaaaaaaaaattatccagcctaaaatgtcagttgtaacaagggtgagaacccctgtattaaatgaaagatagcaaaaaccccataagaaccccataagatatggtaggatctc

SEQ ID NO: 801220 - DNA, 120 bp, Artificial Sequence
  ENSG00000237862_3 (sequence is synthesized)
atttgtacgtcctgtatttactctggcaaccctacccccaggggacatttggcaatgtctggggttgttactgcggatggggttgtgtgtgtgtgtgtttctttttttctttttacacac

SEQ ID NO: 801221 - DNA, 120 bp, Artificial Sequence
  ENSG00000237862_4 (sequence is synthesized)
ccaactaagccatagaatcgcatagaaaaaggtatggaaggtcacatacctaagtcatgtggggtagggagtggtcattccttttactctaaataccttctgcagtgttttattatttgt

SEQ ID NO: 801222 - DNA, 120 bp, Artificial Sequence
  ENSG00000237862_5 (sequence is synthesized)
atcaaaacaatagatatttcacaaagtgaacacacccatggcatggcctcctgatgaagatgaagaacatggccactgctccatgaggccctttgcagtcctgccagcctctccctcgag

SEQ ID NO: 801223 - DNA, 120 bp, Artificial Sequence
  ENSG00000237862_6 (sequence is synthesized)
ggctgcgaggggaactgctgtcctgacttccaacctgctttgggctccacatgaaccgaattctgcccgacgtcctcgcttgagactggcgtctttccctcagcaacgtgtcatgattca

SEQ ID NO: 801224 - DNA, 120 bp, Artificial Sequence
  ENSG00000237862_7 (sequence is synthesized)
ttcatgtggatcggagcagcggttggatcattttcattgctgtgaaatacaccacaatggatttatgcattcaaccgttgatggacatttgggtcgtttcccgtttggcaagatgatgaa

SEQ ID NO: 801225 - DNA, 120 bp, Artificial Sequence
  ENSG00000237862_8 (sequence is synthesized)
gaaagctgccgcagaaccagatagagctggggactcacgacccgtgctgacgactggatgcaagaggaggaaggactttggtggagagaaggaatcaaaaggaaccaagaatgtgagaca

SEQ ID NO: 801226 - DNA, 120 bp, Artificial Sequence
  ENSG00000237862_9 (sequence is synthesized)
agaggacttgctggtggggtcccctgctgtgtccccagagtcccagcatgtgcctgacacacagcaggtgcctgattgatagtgacggttccccaaaggctgctggagtcacctctggga

SEQ ID NO: 801227 - DNA, 120 bp, Artificial Sequence
  ENSG00000237862_10 (sequence is synthesized)
ttctgcacaggctccaccctctggggaggtgtgcttggtagaggacacgaaggctgcttgttggggttaccttagtacctgggtgaagagtaaaaagtaattaataataacgaaagaaaa

SEQ ID NO: 801228 - DNA, 120 bp, Artificial Sequence
  ENSG00000237862_11 (sequence is synthesized)
ttgcacgggtttacgctgccatccaccagagatgaaagttccgcctgggctgctgcctcctggccaagcctggctgggttgtagcttttgcgctttagtccctctggtgggtgtgtaaat

SEQ ID NO: 801229 - DNA, 120 bp, Artificial Sequence
  ENSG00000237862_12 (sequence is synthesized)
tgctaatcactgtgattttaattcgcatttccctgatgatgaagctgagcactttttcataactttatgggccatttgattgtcctcttttgtgaaatgcctattcgggccattggtcca

SEQ ID NO: 801230 - DNA, 120 bp, Artificial Sequence
  ENSG00000237862_13 (sequence is synthesized)
tttttccatgaggttatctccgtttctctcattgatttgtaattaagagtcctgttgcaaatctcttttcccgctgtgcggcttcttgccttttccttcgcttacaacgctccatgctgt

SEQ ID NO: 801231 - DNA, 120 bp, Artificial Sequence
  ENSG00000237862_14 (sequence is synthesized)
cctggaccctagcatcacccaggcctaggtaatagaagggtggcttttgtaaagcgactcaaggctgagaagggaacagacactcttagcacaataagctacaggctgaaaaacagccgg

SEQ ID NO: 801232 - DNA, 120 bp, Artificial Sequence
  ENSG00000237862_15 (sequence is synthesized)
aggtgaatctttgcagcgtgaatggtctggctgtcttttataaaagtaactcgattggactagaccccatgagggactctgctcctccgctcccctttccctgaggacctaattccccac

SEQ ID NO: 801233 - DNA, 120 bp, Artificial Sequence
  ENSG00000237863_0 (sequence is synthesized)
ctctgagcgcacgacagcgggcaaaacaacacgtgaccacagcctcacgcggcggccgctgcggatcctgctaccggcgcaatggaggggcgcgagcggccaccagtagagaccgaaaaa

SEQ ID NO: 801234 - DNA, 120 bp, Artificial Sequence
  ENSG00000237863_1 (sequence is synthesized)
ctttagaaaaagaaaagctcatacctagaacaaaggaccacgctgaatgcatattctagagcacatttcacatccctcgcgtcaacaagaagaagaagaggagctttgatgcatttcagt

SEQ ID NO: 801235 - DNA, 120 bp, Artificial Sequence
  ENSG00000237863_2 (sequence is synthesized)
tcggaagggagctagaggcagaacgagtgtggatgctgagagatccctgactgtgactgctacatatttcagctgcgtagtcacatatatacaagattccctgcacttacaaccaaaatg

SEQ ID NO: 801236 - DNA, 120 bp, Artificial Sequence
  ENSG00000237863_3 (sequence is synthesized)
ataacaaatgctctcatttgggattttgtttgatagtcattaggatattttataagtctttccaagcacaaggtttttttctttttttttttaaagagaaatgtgacaaataaggcaaca

SEQ ID NO: 801237 - DNA, 120 bp, Artificial Sequence
  ENSG00000237863_4 (sequence is synthesized)
aggtagccgcgtttgcagacttcctccccgacgggcaggtcctcctcttcggactcggagtctgaccgggagccagtggccgtggagagccacatggctcccggacaagacgacccggtc

SEQ ID NO: 801238 - DNA, 120 bp, Artificial Sequence
  ENSG00000237863_5 (sequence is synthesized)
ccaatgagtgcggtcggggttcccgaggaaagaagcggggtggtcaccactgctgctagagctgccgctgccgccgctgctgcacctcttagtcttcttgtcgcttggtcgcgagtgaag

SEQ ID NO: 801239 - DNA, 120 bp, Artificial Sequence
  ENSG00000237863_6 (sequence is synthesized)
gagcaactcgccatggtgatgcacgatggttttaaggcactcccgagcccgctgcacccctgacagaagcccgcgactctgaggcacacgaataacagcgatgcattcaaaatgaacatg

SEQ ID NO: 801240 - DNA, 120 bp, Artificial Sequence
  ENSG00000237863_7 (sequence is synthesized)
atctttattaatcagaatgcacttctagcccacgaaacacaggttccctaaatacagtgtttctgcctatttgattaacgatgactatgaaagcacaaatttgggggcctgcaatgtata

SEQ ID NO: 801241 - DNA, 120 bp, Artificial Sequence
  ENSG00000237863_8 (sequence is synthesized)
cagccatattggaaaaaattggactcgattcttactgaaataaccagtgttgggctgtgaaggtatttttctgtgggaaatgctttggaaggtgcctttaaaagaatctcaaaatattgc

SEQ ID NO: 801242 - DNA, 120 bp, Artificial Sequence
  ENSG00000237863_9 (sequence is synthesized)
taaatgaaatgggaaaatactggagatttttaaatcctcatgtcctttttcctgtacatatagtttttacatagagcagtaggcttacaatttatataattttgcatcctgttcttttca

SEQ ID NO: 801243 - DNA, 120 bp, Artificial Sequence
  ENSG00000237863_10 (sequence is synthesized)
ctgaacattatacaatatttccccatattattatgcatcagcataaatatcatttaaaatacaacatattatccaacacaatcgatgaatattaatgtaattaatcatctgctttggggc

SEQ ID NO: 801244 - DNA, 120 bp, Artificial Sequence
  ENSG00000237863_11 (sequence is synthesized)
atttaggttgttttcatttttttcagtattataaataacatgtcaatgaatatcttctacctacagccttttaaaattcccattgggtaaaaactgagcactggaattagtaggctaaaa

SEQ ID NO: 801245 - DNA, 120 bp, Artificial Sequence
  ENSG00000237863_12 (sequence is synthesized)
gatatgaatatttaatacattatttttcaaaaatattatattagtttaccctgtcaccagactgattgtcagcattggacattcttatttttaaaaaattagagataagatgggtgaaac

SEQ ID NO: 801246 - DNA, 120 bp, Artificial Sequence
  ENSG00000237863_13 (sequence is synthesized)
gagcgcacgacagcgggcaaaacaacacgtgaccacagcctcacgcggcggccgctgcggatcctgctaccggcgcaatggaggggcgcgagcggccaccagtagagtctggttcattct

SEQ ID NO: 801247 - DNA, 120 bp, Artificial Sequence
  ENSG00000237863_14 (sequence is synthesized)
ttccagccgcacaaggcggcggatcgagcttcttgggagaaagtgtcggcaccccctgaaaacgggttgacgaccagggcgctcagaactgcttcccaccgctctgcaggcactcccgag

SEQ ID NO: 801248 - DNA, 120 bp, Artificial Sequence
  ENSG00000237864_0 (sequence is synthesized)
tgaccctccaagttgggagtttcgaggaccccctgaacttagagctcctgggccgtctttccctgagaatgaagccaacacaggcaggattgagcttagagtctgaattagatggtgcct

SEQ ID NO: 801249 - DNA, 120 bp, Artificial Sequence
  ENSG00000237864_1 (sequence is synthesized)
agtgaccgcctctgaactcctggacccagctacacctgaagccactctaccccacattttctaggactttcctgtatgactgcatggctaatagcacttctcctcgacaccggtgctgtt

SEQ ID NO: 801250 - DNA, 120 bp, Artificial Sequence
  ENSG00000237864_2 (sequence is synthesized)
catcctgtcttggcgtctgcctcgcgatgaccctgggctcacagtctggccactgcagctgagtgtcgcactggctcaggtgtggcaacacgggggttgaaaggctctgaaccaggcacc

SEQ ID NO: 801251 - DNA, 120 bp, Artificial Sequence
  ENSG00000237864_3 (sequence is synthesized)
aggagccctgcgccccaggccagccctccgcaaaccagctttgtgtcctcggacaactccaggcccatcctgggtcttgctgtctggagagaggaggaagccggccacactctccaagaa

SEQ ID NO: 801252 - DNA, 120 bp, Artificial Sequence
  ENSG00000237864_4 (sequence is synthesized)
cattcagcctccgcactgcatggcctctgcttggtttctggctgggcccagggctctgcttgcagtgtggagccgcagtggtgggtccccatgcgagcccccgccactgtctgctgtcat

SEQ ID NO: 801253 - DNA, 120 bp, Artificial Sequence
  ENSG00000267675_0 (sequence is synthesized)
acttgggcagatcctgcaactttctgtagttggagtgtgtccagttctctgtaaatttcaatcttgttaatgttcaaaagcctcccctccccagcagctgccgagcggtggcctgggccg

SEQ ID NO: 801254 - DNA, 120 bp, Artificial Sequence
  ENSG00000267675_1 (sequence is synthesized)
agctctgaggtctctcctgatgttgggggcaaggaaggtagccagatggctgagttcttccacttgctggtgggcctgtcggaggcaggagctccctggtatctgctttagcgaagaagg

SEQ ID NO: 801255 - DNA, 120 bp, Artificial Sequence
  ENSG00000267675_2 (sequence is synthesized)
tgggagcagtgttcagctccaccccaggccctctgtcactggggacctgccacaggaaggggctttgtccccttttggtccagcctggggaatgccagctcccaaggcccacttttggca

SEQ ID NO: 801256 - DNA, 120 bp, Artificial Sequence
  ENSG00000267675_3 (sequence is synthesized)
ctcctggagcactctggaaaagctccagtaggtcctcttggtagtgctgaggccccagaactgggatggcagggctgtctctggcttcccagccatagcgtcctacaccccacagatccc

SEQ ID NO: 801257 - DNA, 120 bp, Artificial Sequence
  ENSG00000267675_4 (sequence is synthesized)
ttctgccctctagcacaggcagccagcgggtacccagcctctatggtcacacaagcttcctcttggctgtctcaatgcccttcttccatggcgtgccctcatatggaccctcgattccgc

SEQ ID NO: 801258 - DNA, 120 bp, Artificial Sequence
  ENSG00000230487_0 (sequence is synthesized)
gagcggctcgggttccgcgctgccggcagggcttgggggcgccttagagccgaaccccgttttttcaggaaagggcgctgcgaccacccccgtcccgggcctcagcccctctgctgcaga

SEQ ID NO: 801259 - DNA, 120 bp, Artificial Sequence
  ENSG00000230487_1 (sequence is synthesized)
ccctcgggatcgtcgctggaaagattctgaagcttggcggagaggggtgtgtgagtggacaccagtgaagtaacggtttttgtgttacgatgatttctgttttcctctgctgccctgtaa

SEQ ID NO: 801260 - DNA, 120 bp, Artificial Sequence
  ENSG00000230487_2 (sequence is synthesized)
gattgaattaaacaagacgtgcaaagcaagtggttcacgagggtcttgctccgtcgcccagtctggagtgcagtggcaagatctctgctcagtgcagccttgaactctcaggctcaagaa

SEQ ID NO: 801261 - DNA, 120 bp, Artificial Sequence
  ENSG00000230487_3 (sequence is synthesized)
tgctggatgctgggacccaccagtgggcaagagggccgtgcccaccccttcctggaagagacactcactcagtaaatgcagagattcagtgttggggtaaccccagcacacagccctgag

SEQ ID NO: 801262 - DNA, 120 bp, Artificial Sequence
  ENSG00000230487_4 (sequence is synthesized)
ggaggaagcccagtgatttgatcggatttgcttttctcttctgcctcggattctgtccaacccctggaaggacctctgaggtgtcccgtggctggttctaggccccattcaagcctcctc

SEQ ID NO: 801263 - DNA, 120 bp, Artificial Sequence
  ENSG00000230487_5 (sequence is synthesized)
ctccaggaagccttcccagtcctgggcatctgtagccagctcggtgtttctcacctggggcctgggacgtctcccattctgaactgccgtgttttgggtttactgttctctggcttttgg

SEQ ID NO: 801264 - DNA, 120 bp, Artificial Sequence
  ENSG00000230487_6 (sequence is synthesized)
tcccagccggacggtggcctcttgtgttcagggacaaggcaaggagcatccatgcacccccacagtacccaggctgggtctgtgcccgccaggcccccggcaaagcttggatgatccggg

SEQ ID NO: 801265 - DNA, 120 bp, Artificial Sequence
  ENSG00000230487_7 (sequence is synthesized)
ctgggctgttctcctgctgctctcctgctgctggcctcgctgtatcagctgatggccatcgcgcctcctgcacccgtcatcccgccctgcacgcccccgccacgtggatgagctccctgg

SEQ ID NO: 801266 - DNA, 120 bp, Artificial Sequence
  ENSG00000230487_8 (sequence is synthesized)
ggagttaatggctaatggagtctccgctctctcttgtcaaatgcagccatcatccgctggtgctttaagggactctctcccgtccccaccctattctcaggtggctcctaccgacaccac

SEQ ID NO: 801267 - DNA, 120 bp, Artificial Sequence
  ENSG00000230487_9 (sequence is synthesized)
ctaatggtgaaccccaacacgaggacacaggcagtgccctctcaggaccactgtgggtgccaccaggcacgacttcctaaacacccacagagcaaaaacctggaaattcagccgaggcac

SEQ ID NO: 801268 - DNA, 120 bp, Artificial Sequence
  ENSG00000230487_10 (sequence is synthesized)
tgggaccccaacctctcccagagtggccccagctccacggcgtctgcatggctctggccgtgagcagagcagccccgacctccgtcctgacccagggcgccggagcgccactgcggatct

SEQ ID NO: 801269 - DNA, 120 bp, Artificial Sequence
  ENSG00000230487_11 (sequence is synthesized)
caccaccacacaagccagacctgctaggaagcccttcccggccaccagctctcgggcgatgcacacaacagggccttttgaattccctgaggttaaggttccccttgagtctcctgggct

SEQ ID NO: 801270 - DNA, 120 bp, Artificial Sequence
  ENSG00000230487_12 (sequence is synthesized)
acaagcaaatcccccgaggggagaagtccaggctgacacagcctcctgcacccctgccttgggaggccacacctcgtttgcctctagaaccgacgactggggagcactgtttgcagagtt

SEQ ID NO: 801271 - DNA, 120 bp, Artificial Sequence
  ENSG00000230487_13 (sequence is synthesized)
ctctctctctgggtaagttccggagccacatctcactggatccaccacggcctgggtggacggctctcgtgtgtttatagctgggtccctcgcttgggagctgcctccgggtgggcggcc

SEQ ID NO: 801272 - DNA, 120 bp, Artificial Sequence
  ENSG00000230487_14 (sequence is synthesized)
tctccagcctgtttgagtgctccacccggagcaggaagagggccgtgtgctctgggcagtggttccttgggcactgcatggtccttgcttccctccagggcccaccttccctggccgctg

SEQ ID NO: 801273 - DNA, 120 bp, Artificial Sequence
  ENSG00000230487_15 (sequence is synthesized)
catcccagccgagggcaggccccttttgccagctgaaggcagaaaggccggcagccctggggtggcggcgggcagagaaaccccccggagtggtctccgttcttctaaaagtgatgttga

SEQ ID NO: 801274 - DNA, 120 bp, Artificial Sequence
  ENSG00000230487_16 (sequence is synthesized)
cccccgtgtcgcaggcagctggcagggtggcagttcgatctgtcgttacgggcttgcaccactgcggtctcccacccagggagcagctctgtccaaccacagcgagcctccagctcctac

SEQ ID NO: 801275 - DNA, 120 bp, Artificial Sequence
  ENSG00000230487_17 (sequence is synthesized)
cctctgcctgggctggggcagagcctggggtctgggtgggagaagcgtgactctgggatgagaccttacaaagcaggttcctcctgggagtcagcccgggtctaaacgcagctgggcatg

SEQ ID NO: 801276 - DNA, 120 bp, Artificial Sequence
  ENSG00000230487_18 (sequence is synthesized)
aaggggtgccatcggatgtcgagttaggaggacgagagacctccagccccggcacccgcatgtctctttggaaaccagctttggctgcgcccctggggacactgtctgccgtggcctccc

SEQ ID NO: 801277 - DNA, 120 bp, Artificial Sequence
  ENSG00000230487_19 (sequence is synthesized)
gctctcctccccggcacaggcagggggtctccctcctccaccgccactcccttggcctcgccctccccgccaggcacctggcttttccccaccgacccccccgggggactgcggccccca

SEQ ID NO: 801278 - DNA, 120 bp, Artificial Sequence
  ENSG00000230487_20 (sequence is synthesized)
gaaaggctgcactctgggagcaaagtggcctgaaaccagagaaaagaacgccgggggatttggcttaaactcgttaaacccaatgaaccctcttgccgaacgatcgcagtctgcgcccgg

SEQ ID NO: 801279 - DNA, 120 bp, Artificial Sequence
  ENSG00000230487_21 (sequence is synthesized)
tcttttaatctcgttcgggcctcggggtaatttgtttagctgtgctgatcagctgaaggttaattcaattggacttgggttatttatttgtgcccggatttgctaagtgtcattggaggt

SEQ ID NO: 801280 - DNA, 120 bp, Artificial Sequence
  ENSG00000230487_22 (sequence is synthesized)
atccgccccctcccgccagctccaggctgaggcagtcttgggaggctggagccctgggaggctggagccccaggtgcagtggctcttgttcctggatgcaggggatatctgagcactgtg

SEQ ID NO: 801281 - DNA, 120 bp, Artificial Sequence
  ENSG00000230487_23 (sequence is synthesized)
ctgggagtccagcctcgcccagctctggtgttgatactggacggttctgtcacatgacctatcctaaccgaggctgaaggacctgcttcccaggacccgtcccctccctcagggggacct

SEQ ID NO: 801282 - DNA, 120 bp, Artificial Sequence
  ENSG00000230487_24 (sequence is synthesized)
aaaggcgttttccccaccctgcctcagtgttcccattcacacattgggaacagcaccctgttctcctgcggcctcccaggctgggctttgtagctgcagcccccaccccgcctggcgacc

SEQ ID NO: 801283 - DNA, 120 bp, Artificial Sequence
  ENSG00000230487_25 (sequence is synthesized)
ggggcagaaggacgctgaggtcgcagagcgggcagacgggttggccgggcgggcagacctcctgcacggagccgggatccttctcaggcagcggcagatgatggattgcacgtggacact

SEQ ID NO: 801284 - DNA, 120 bp, Artificial Sequence
  ENSG00000230487_26 (sequence is synthesized)
gcctgggatgcgtgcgacttggcagcctgcccctttcctgccctgggatcagacgccctggcgggtgtccttttcctggtcccctgtcctcctagcctggggcggcgtctggagcgggga

SEQ ID NO: 801285 - DNA, 120 bp, Artificial Sequence
  ENSG00000230487_27 (sequence is synthesized)
ggctcacccctgtgcccacgtcctcaggccacctgccagtccctgcccaccccggccgcggaggggctgtggagactcagggagttctgggatggcacagagggcccaggctggtagcaa

SEQ ID NO: 801286 - DNA, 120 bp, Artificial Sequence
  ENSG00000230487_28 (sequence is synthesized)
ccaaagccgtgggaaatgtgggagggatggcaggtgtcccccgaggagtagcccaggtgccccggaggctgctgagagggttgagagtgcagagacgaggggcccagggaagtcttggat

SEQ ID NO: 801287 - DNA, 120 bp, Artificial Sequence
  ENSG00000230487_29 (sequence is synthesized)
tctctcgccatcttcaatgtcggagcccagacggggcaaggcgaggaggagcccggggcgaagacgccacccacattcctccttcccgcaggcttcttctccttctagcccttccaggag

SEQ ID NO: 801288 - DNA, 120 bp, Artificial Sequence
  ENSG00000230487_30 (sequence is synthesized)
agaaaccatcccacaagtccagagtagtggcgtccccggggccatgtctcctgagcaaacactgttttctaggagtccgaggggcctcagccatctaggtcaatccctttgcagaacggt

SEQ ID NO: 801289 - DNA, 120 bp, Artificial Sequence
  ENSG00000230487_31 (sequence is synthesized)
gaaggaatctgaagcccagagagggaaaacaatgcctcctgggtcacacagcccatcaggggcagggcagggacgaacggcgagaaaaggaccagcgcgagaggagatccccagcagtga

SEQ ID NO: 801290 - DNA, 120 bp, Artificial Sequence
  ENSG00000230487_32 (sequence is synthesized)
ttcctcagccaagcccagcgtctacccacatccacacctcacagccacctgatggggaaggcaccattgccccttttcaaaggtgagaaaacagaggctcagagaggttcagcaacttct

SEQ ID NO: 801291 - DNA, 120 bp, Artificial Sequence
  ENSG00000230487_33 (sequence is synthesized)
cccacagctacttcgttgtagaactgcagttccaggtgtccccgagctctcccttcccgagccatctgctcctgccctcctatccgagccctggccctcccagtcaaagccgggtagtgg

SEQ ID NO: 801292 - DNA, 120 bp, Artificial Sequence
  ENSG00000230487_34 (sequence is synthesized)
ctgttcagaagccttggggctagtcaatcccagctgtctcggaccagggccccccccaggaggagaccctgaaggatgcagttgagaatatgtgctttctttggtaggtgatctcaggaa

SEQ ID NO: 801293 - DNA, 120 bp, Artificial Sequence
  ENSG00000230487_35 (sequence is synthesized)
ttgcaggggaaagagggggagcgtgttagtgtaggctctccggagaagcagaaccaacgcacagaggagatttaggatgaggaatctggtttatgtgactctgggggctgagaaggccca

SEQ ID NO: 801294 - DNA, 120 bp, Artificial Sequence
  ENSG00000230487_36 (sequence is synthesized)
ccatctgtgttgcaagctggaaacccagggaagcctgaggtgtgattcaaactcagctcaggtctggaggcctgagaaccagggcagccgatggtggacatccagtccaggggcaagaga

SEQ ID NO: 801295 - DNA, 120 bp, Artificial Sequence
  ENSG00000230487_37 (sequence is synthesized)
tgacgagatgtcccggctccagtggcgaggcaggaaatgaggggtgaactcctcctccctctgctgtctgttctattcaagttcttgagggattggattatgcccagccacttggggagg

SEQ ID NO: 801296 - DNA, 120 bp, Artificial Sequence
  ENSG00000230487_38 (sequence is synthesized)
gcagtccaccttcctgagtccacaattcaaatgctgatctaatccagaaacactctcacagacacagtgtgtagtctgggcaccccacagtgcacttaagtggacacataaaattaacca

SEQ ID NO: 801297 - DNA, 120 bp, Artificial Sequence
  ENSG00000230487_39 (sequence is synthesized)
tcccagggagtgagatgggtaagggaagatgggccacagtgggtgtgtctccatgcctacccccactgtgggcagctgctggagcacacgcctcaaagtcttccctgagggagagggagc

SEQ ID NO: 801298 - DNA, 120 bp, Artificial Sequence
  ENSG00000230487_40 (sequence is synthesized)
tgaggtgtttatatcccagctctgtcaggcattggctgaatgtccacactcctggatcaccgcctctcatcctcatgatgtcccatggtcctcatttcacaagtgagctctgggtacatg

SEQ ID NO: 801299 - DNA, 120 bp, Artificial Sequence
  ENSG00000230487_41 (sequence is synthesized)
gggagcatcagtcacaccctgggtcagtacctcagctgtctctcacatgacatcctcattatccacactgcaaagccaaccatccctatgatgggttcattgtggatcatgacttagtgg

SEQ ID NO: 801300 - DNA, 120 bp, Artificial Sequence
  ENSG00000230487_42 (sequence is synthesized)
gtcaagagtttggaagtggctcagctgggcggttcttctgctccatgtggctgccagatggtaccctgctggtgggcagtctggtctagagggtccatgatggctttactcacatgcctg

SEQ ID NO: 801301 - DNA, 120 bp, Artificial Sequence
  ENSG00000230487_43 (sequence is synthesized)
gcatcttgacagggacagctggaaggcaaggttcagctgggactgtccacagagctcctccctgtggcctttccagcatggtggtctcagggtagctggacttcctgcatgacagctcag

SEQ ID NO: 801302 - DNA, 120 bp, Artificial Sequence
  ENSG00000230487_44 (sequence is synthesized)
ggctcccagagctactgtcccaagagatagaaggtggaaactgccagtctcttaggctaggaccagaaaccagcacccctgcacccacagccttttggtagtgatgaaataaacataaga

SEQ ID NO: 801303 - DNA, 120 bp, Artificial Sequence
  ENSG00000230487_45 (sequence is synthesized)
tttatcattttaatcattcgtaagtgggattaaatacatttacaatattgtgtaaccatcggcactgtctatatctaaaactttttcatcatctgcaataaaaactctgtatgcattaaa

SEQ ID NO: 801304 - DNA, 120 bp, Artificial Sequence
  ENSG00000230487_46 (sequence is synthesized)
ccctggatgaacgtttgtggaactggattgaattaaacaagacgtgcaaagcaagtggttcacgaggtagtgtgggggtgtagggatggggactgacccgggaggcaggacacagcccaa

SEQ ID NO: 801305 - DNA, 120 bp, Artificial Sequence
  ENSG00000230487_47 (sequence is synthesized)
gccctgccttggcctcacctctaacttgctgatgaccttggatgattcccttcccatcctgggcctctgttttctcatctgtaaaatgggcagattggcaatgtggcctccaggtctgta

SEQ ID NO: 801306 - DNA, 120 bp, Artificial Sequence
  ENSG00000230487_48 (sequence is synthesized)
gcctaggaaccccctagcgctgggagcccggccctgctcgaccacgggctttgggctggaggcgtcatcgtcgccacagcgaacgcttatttggcaccgagtgtccgccaggcatcgctc

SEQ ID NO: 801307 - DNA, 120 bp, Artificial Sequence
  ENSG00000230487_49 (sequence is synthesized)
aattaaacaagacgtgcaaagcaagtggttcacgagattcgattgctgtagggaccccgtgggtgtggaatcagacagtattggtcctttcatgactggcttatttcacaaaacccgatg

SEQ ID NO: 801308 - DNA, 120 bp, Artificial Sequence
  ENSG00000230487_50 (sequence is synthesized)
agggcttgggggcgccttagagccgaaccccgttttttcaggaaagggcgctgcgaccacccccgtcccgggcctcagcccctctgctgcagaccctcgggatcgtcgctgggtcttgct

SEQ ID NO: 801309 - DNA, 120 bp, Artificial Sequence
  ENSG00000230483_0 (sequence is synthesized)
tttcaaaaaaagatgagtctcttgtcaggcaacacaagtcagggcaggggtgggtgcagaccccagagcagcttcgcagtctggatgggggtgctcccccgtcacgccacagggccagct

SEQ ID NO: 801310 - DNA, 120 bp, Artificial Sequence
  ENSG00000230483_1 (sequence is synthesized)
gggcacgttttctgcccggggagttgtgcctgtcaggggagacagccccatgacactgctgtgcctccggggaggccaggagggacaaggagcggttcctttgggtgagggtctgtggtg

SEQ ID NO: 801311 - DNA, 120 bp, Artificial Sequence
  ENSG00000230483_2 (sequence is synthesized)
aggcaccaggagggccattgtctgctggggggctggaggatgaccagccagttggcatagaggctggggcaggatggtgagtcctccagcagcagtgggtgggtggagcagttcacacgg

SEQ ID NO: 801312 - DNA, 120 bp, Artificial Sequence
  ENSG00000230489_0 (sequence is synthesized)
caccatctccggacgcaaagctttcgcattcagcttgaggagctaaaccatttcaagccaaggtttcttcacagattaggataaaggatgaagagaagtaaactgaattactaaggatgc

SEQ ID NO: 801313 - DNA, 120 bp, Artificial Sequence
  ENSG00000230489_1 (sequence is synthesized)
aacattaatggagagagccaagtgatgtaaatcgtggctggccatgagtggatcttgagtgccagttatctagagaaattccacgtggctgttccaggatggattaggcaccaatgactc

SEQ ID NO: 801314 - DNA, 120 bp, Artificial Sequence
  ENSG00000230489_2 (sequence is synthesized)
aatcctgcccctttaacacctttccagagagaggcaacccatggagggtcacagcaagatgggatggttgtgcctggtagtaaaaatatgtatcactcttcatttcatccagctttgaag

SEQ ID NO: 801315 - DNA, 120 bp, Artificial Sequence
  ENSG00000230489_3 (sequence is synthesized)
cttctgctagcagctcacacatgaccccaagggcagctcctcaagtctgctaaagaaaagttaagtagaattaattttgttcaatatctcccattttgttagattcatcattttcagtca

SEQ ID NO: 801316 - DNA, 120 bp, Artificial Sequence
  ENSG00000230489_4 (sequence is synthesized)
agaatgacaatattaatggaaccaaaagaatatatactattaacatttcgtcttaattctacaaatgtctaaaagtctctgtaattcccttaaaaataaaaaaaatgcaatattaattta

SEQ ID NO: 801317 - DNA, 120 bp, Artificial Sequence
  ENSG00000243902_0 (sequence is synthesized)
acagacacacgcgggccaccccacggccacgcaccccgcacccacacccgcgctcacactcacattcacactcacactcacacgcgcaggccccgcggccgccgcttcccggaggcggtg

SEQ ID NO: 801318 - DNA, 120 bp, Artificial Sequence
  ENSG00000243902_1 (sequence is synthesized)
cttggcccggatcccggctggggctggggtgacaaattctaccgccagtaatcacttgtgaaaaatcaacagtgaagcccagtggctcccggtcccccggagaaatctgagtggatttcc

SEQ ID NO: 801319 - DNA, 120 bp, Artificial Sequence
  ENSG00000243902_2 (sequence is synthesized)
gcctcgcctgggcctcacttttctcatctgtatcatggagttggcaccaccggctctgccctcaaggtttgccgcgcctgcagaggcccctgagcattcagcaggtgctcactcagcagg

SEQ ID NO: 801320 - DNA, 120 bp, Artificial Sequence
  ENSG00000243902_3 (sequence is synthesized)
agctgccagacgttgaatgtgtgatgggaatcattggatgctgccgcctctccgcccacccgccacctgacactgcctcctggctctccatcactgcccaggagtcgggcagcctccccg

SEQ ID NO: 801321 - DNA, 120 bp, Artificial Sequence
  ENSG00000243902_4 (sequence is synthesized)
agtgatagtgcttttaagatgtttaaagttggctcaggattaaatgagttaatatgggaagtgcggaggcccagccagtgcaagcactgaagacttttcatcttgtcggaggccgcccat

SEQ ID NO: 801322 - DNA, 120 bp, Artificial Sequence
  ENSG00000243902_5 (sequence is synthesized)
ccctccccgggctacctctcagggggcttcgctgtccgacactggagcctccatttcccccttgcggtccccacatgcactgcccctgtcttgggacagccctgagggtactggagggca

SEQ ID NO: 801323 - DNA, 120 bp, Artificial Sequence
  ENSG00000243902_6 (sequence is synthesized)
gggaagcgttcgccccttgggaccctgggggaggagcaggtggaggaggcagagccaggagggcgggcctagccggcgcctggtacatagtaggtgctccataaatgtttattgaatgaa

SEQ ID NO: 801324 - DNA, 120 bp, Artificial Sequence
  ENSG00000243902_7 (sequence is synthesized)
tgaatggaggccatgcaggcagaggcagccgtgctgcgcaggcactggtgaaagagcgggtccagtggacactggtgacaaattctaccgccagtaatcacttgtgaaaaatcaacagtg

SEQ ID NO: 801325 - DNA, 120 bp, Artificial Sequence
  ENSG00000243902_8 (sequence is synthesized)
aagcccagtggctcccggtcccccggagaaatctgagtggatttccagaagaacaagtccaatctctgccctgctgccctccatctgtctatttctctcctagacttcggcttcagacag

SEQ ID NO: 801326 - DNA, 120 bp, Artificial Sequence
  ENSG00000243902_9 (sequence is synthesized)
gcttcccaggaggttaatagcagcttctcaccaggatatttggctttttaaggaatctccttgcctctttcttctctgtgaggatattctcaggatggttgcggtggagaagggaaggaa

SEQ ID NO: 801327 - DNA, 120 bp, Artificial Sequence
  ENSG00000243902_10 (sequence is synthesized)
ggagactctcgaggcatttgccaactaaggggggcacttaggggtaggtggggggggccagttccgggcagaacttggggcagacagtgccctgtttccagaacagctcccagtgccggg

SEQ ID NO: 801328 - DNA, 120 bp, Artificial Sequence
  ENSG00000243902_11 (sequence is synthesized)
ctgggctgggcttaaatgcagtgggagaagctcaagggtggggtggggtcacaggctccacttggaatgggccaggtcatttgactatgggggcatttctgagcctggtggggcctcagt

SEQ ID NO: 801329 - DNA, 120 bp, Artificial Sequence
  ENSG00000243902_12 (sequence is synthesized)
ctcccctcctggaaggtgggcctgatgatccatgccagcctgtaaaggaagggaaagagttttgctgagctgcagaaggaggtgcagacaaggcgaggggctgggtgttgggggaggcca

SEQ ID NO: 801330 - DNA, 120 bp, Artificial Sequence
  ENSG00000243902_13 (sequence is synthesized)
gctgagcgcccaggacccctctggccccaccccaggtccttgggctccaactgctctcagccctgccctgagctcaggaatgggcccaggcctgagaaggaggtcaaaactctgcagccc

SEQ ID NO: 801331 - DNA, 120 bp, Artificial Sequence
  ENSG00000243902_14 (sequence is synthesized)
ttccactactacttcggggggctcagcacagctcctctgggctcaggtccccaggcctttccctgatgtaaccccccagtcaggcccgcacagtaggggaggtccacctcttatgtgtgt

SEQ ID NO: 801332 - DNA, 120 bp, Artificial Sequence
  ENSG00000243902_15 (sequence is synthesized)
gttttaaattgcggtaaaatgtacgtaacatgaaatttaccattttagctctgtaagcatacaggtccgtggcattcggtacattcacattcctgtgtggccatgaccaccatccatttc

SEQ ID NO: 801333 - DNA, 120 bp, Artificial Sequence
  ENSG00000243902_16 (sequence is synthesized)
cggggcttctgcatgatcccgaacagaagcttgcacgccctgcgccacgccccctcccatgtcaacccccgtaaccgctggtcttcgtctctatgaattaaactattccaggtacctccc

SEQ ID NO: 801334 - DNA, 120 bp, Artificial Sequence
  ENSG00000243903_0 (sequence is synthesized)
acttctgacaaacagaataaagaggaagtgacagaaccaaaaatccaggcagattcctgaagcttgcagactgctgggaaccagcaacacagaacattgttttagaaagaggaaagcgaa

SEQ ID NO: 801335 - DNA, 120 bp, Artificial Sequence
  ENSG00000243903_1 (sequence is synthesized)
gactttgctttataaggctcttgcagtcactgctagaggattctcaaactcacaggaacatttggaaaccactgtaagctttcacaaagtgctttcatatactttaatatagattgctct

SEQ ID NO: 801336 - DNA, 120 bp, Artificial Sequence
  ENSG00000243903_2 (sequence is synthesized)
gagacccagtcatcagatcccagcagaagctcatgacatcatgccaagttctgtttgtactttggaaatagtctaaaaggagatggtcatttctccactcagtgttaggatcatcactca

SEQ ID NO: 801337 - DNA, 120 bp, Artificial Sequence
  ENSG00000243903_3 (sequence is synthesized)
gggttaaggtgaataaaacttactcaccctcacaccattgactgtatgggtctgctgtttttggctacacagtgtccatccttgtagggacccaccctcctccattggatatagcctggt

SEQ ID NO: 801338 - DNA, 120 bp, Artificial Sequence
  ENSG00000243903_4 (sequence is synthesized)
gggacagttgatggaagtatcctactctctccttccaaggatgaacttttgagtaaataggtcattgaatgctcccttccaggaatcttaatttaaaccaaggattgagtagaatgaaaa

SEQ ID NO: 801339 - DNA, 120 bp, Artificial Sequence
  ENSG00000248029_0 (sequence is synthesized)
cagagaaattagaagagagcactatcccctctgacggggcaggtactgcctcatatgttgctttgggctaaaaccctgggtctctaggtgctgagagaagctagaaggaaggatgacaaa

SEQ ID NO: 801340 - DNA, 120 bp, Artificial Sequence
  ENSG00000248029_1 (sequence is synthesized)
gtctgtaattcctgggaaatgagacaggcagcatagcccatccaggctctgactcacttggagaccttctctcttctggctccatccatcccccacgtcaatcataacaaagaggaaatc

SEQ ID NO: 801341 - DNA, 120 bp, Artificial Sequence
  ENSG00000248029_2 (sequence is synthesized)
cacttattttcaatcactgctgtgcctacactttcaattccagggtccttttatcacttggttgtgtttgcttagaaaactaccaccctagttaaaataaactcttcacctgtaactcat

SEQ ID NO: 801342 - DNA, 120 bp, Artificial Sequence
  ENSG00000248027_0 (sequence is synthesized)
agcttttgtccccaaatccattcaaacaaaagaagctccgactcctccaacccacccttcggacccgcaccccgcggggactctccagatgcgggtgtccactcccccgccagccctact

SEQ ID NO: 801343 - DNA, 120 bp, Artificial Sequence
  ENSG00000248027_1 (sequence is synthesized)
tactcctcaacgccccaatgagcagagagccgtccttaatgagctccttgatgaacttgttggttcgctccagctcaatctcgtgacactgcaagcgctccctgaaatctgggctgtcca

SEQ ID NO: 801344 - DNA, 120 bp, Artificial Sequence
  ENSG00000248027_2 (sequence is synthesized)
agtaggaatcgctgaactccagagtgggcagccccatggcacaggcgctgccagcggcggccgcggacacgtccgggccggaggtttggggaagggagaggcagtaattctgtttgtcag

SEQ ID NO: 801345 - DNA, 120 bp, Artificial Sequence
  ENSG00000248027_3 (sequence is synthesized)
ttaatgaaatgacatgacataaacaccagtggactgtgtctcaccagaggtgattttgtatttactcattactctgcctgaaagacaaaaaatcacccaggccaaacagtttcctttcaa

SEQ ID NO: 801346 - DNA, 120 bp, Artificial Sequence
  ENSG00000248027_4 (sequence is synthesized)
cttttgccatgttgctgttcctatcaactgaatccagtgccaaactgctgagatacgaaacgataaaatataacattctcttcttgtttttcattaaatcatcgtactgtgattaagtct

SEQ ID NO: 801347 - DNA, 120 bp, Artificial Sequence
  ENSG00000248027_5 (sequence is synthesized)
ttaaaaatgcatcattggtgtttcataagttgcatttaatatgttggatgtcaatgtttagttttctttaaaagtgttacatgccagggcagatgtattgtacattctatgatacaggtt

SEQ ID NO: 801348 - DNA, 120 bp, Artificial Sequence
  ENSG00000248027_6 (sequence is synthesized)
atcatttgcccattcatgtatgtaatgatatgttttatgtctactgtctacattactaaggtctgggtggggaagtgatttctataaaaagacagaagcattatccgtgacctcaagcag

SEQ ID NO: 801349 - DNA, 120 bp, Artificial Sequence
  ENSG00000248027_7 (sequence is synthesized)
cacagcctcacacagatgctgtactaataatacattgatgctattgtttatcaatatgtttccactcaggcccatcattgcatttacatggaattaggattttttctcctacccttcact

SEQ ID NO: 801350 - DNA, 120 bp, Artificial Sequence
  ENSG00000248027_8 (sequence is synthesized)
catgattccctaaagtttatcatgttataatgggcttatttcttgtaggtgttttcatagttactcatgcttattcctatgattcatactttaattatacctgctagtcaggctttctct

SEQ ID NO: 801351 - DNA, 120 bp, Artificial Sequence
  ENSG00000248027_9 (sequence is synthesized)
tatgccacattaacacagctacttgagaaaaaccagaaatgcttttgctttgaggtgggtttactgtcggttttgaactgttgtttccatgcatgattctctccatcataattaactgaa

SEQ ID NO: 801352 - DNA, 120 bp, Artificial Sequence
  ENSG00000248027_10 (sequence is synthesized)
ccagattctttcctagagaatagactttctatataaaagatcagcaatacctgcaagcctgttttcataaacaaatgtaatggattgaaatatagcctgtccagaaatttccacttcata

SEQ ID NO: 801353 - DNA, 120 bp, Artificial Sequence
  ENSG00000248027_11 (sequence is synthesized)
acacatgacaccgtaagctgcgtggtaagcttcgcaaatattattggctgacaggctctttggcacagagaaatgtctctttgttttcctgattctggaatgggatatgtgggctttgtt

SEQ ID NO: 801354 - DNA, 120 bp, Artificial Sequence
  ENSG00000248027_12 (sequence is synthesized)
tacttgcttttgagagcaaatagatagtagaggatagtaaactaatatggcatttgtaaatctgcctaaaactgtttcttgacgtagatcatgtctgacacttaagcctggcacttcgta

SEQ ID NO: 801355 - DNA, 120 bp, Artificial Sequence
  ENSG00000248027_13 (sequence is synthesized)
tgtactcagtaagtgttattgtcaagctattattacttttcaattaattatgtagatttagaccacccagactcagctgatctgaggttaagttcaagcctggtaagagatgactaaaca

SEQ ID NO: 801356 - DNA, 120 bp, Artificial Sequence
  ENSG00000248027_14 (sequence is synthesized)
gaaaccaagtgtttcttcttggtttcccctcctcccagctcctggtaaccattgtactttctgtctctatgaatttgacaatgtaggtatctcatataaatgaaattatacaatatttgc

SEQ ID NO: 801357 - DNA, 90 bp, Artificial Sequence
  ENSG00000279712_0 (sequence is synthesized)
ttttcacatatttctgcctgtttagatgcctacccagattaagggtggatctgcctttcccagcccagtgactcaaatgttaatctcctt

SEQ ID NO: 801358 - DNA, 88 bp, Artificial Sequence
  ENSG00000279712_1 (sequence is synthesized)
catccaatgaagttgacactcagaactaaccatcacgccatgacataggacaagttattgcctgggacaaaaatgagctcataaacaa

SEQ ID NO: 801359 - DNA, 120 bp, Artificial Sequence
  ENSG00000279712_2 (sequence is synthesized)
gacaagttattgcctgggacaaaaatgagctcataaacaaagaagcttccttacatacagattttatagattctctagtaaaaacaacttccaaggtcacctcctcctcctcccagtcct

SEQ ID NO: 801360 - DNA, 120 bp, Artificial Sequence
  ENSG00000279712_3 (sequence is synthesized)
ctgtccgcccccccacagcctgagcacccacatcataaatggggagcagctggtgtcccagattttgggacccttccctgtccttggcgtctgatgctctatggcttcttggacatttgt

SEQ ID NO: 801361 - DNA, 120 bp, Artificial Sequence
  ENSG00000279712_4 (sequence is synthesized)
tttattcacaaacactgaagaatcagtttaattagacatcttccaattctatgtcaagcccttggaaatcccaagtgtttagcagttaggagggagggtataaaggctcctgctgaggtc

SEQ ID NO: 801362 - DNA, 120 bp, Artificial Sequence
  ENSG00000279712_5 (sequence is synthesized)
acagtctgggggcaggattgggccggaggggcagccttagagaggatgcaattagctggtattgaaaataacagaagaaagaaatcctcaggtgcagggccactcacacacaccttgacg

SEQ ID NO: 801363 - DNA, 120 bp, Artificial Sequence
  ENSG00000279712_6 (sequence is synthesized)
taagggtcagcaaacgaggaaggagaaaaattgagtgagttctcagatgtttatcattagcagaaacccactgggtaggcttagattattagtgtaactcagtggcactcaccctgcaca

SEQ ID NO: 801364 - DNA, 120 bp, Artificial Sequence
  ENSG00000279712_7 (sequence is synthesized)
gaaccatgaacaggcactgcttcccaaaagcaatgggcccaatcccagggccctctgtaatctgtcctgatgcatggttaaaagcttagtattgcgactctttaatttagaaaaatcaat

SEQ ID NO: 801365 - DNA, 120 bp, Artificial Sequence
  ENSG00000279712_8 (sequence is synthesized)
caaactttgacaatttttccttcttccctccctctccttcctccctttactgcctccctccctctccttcctccctagtccctctccttcctccctaagtccctctccctcttctctctc

SEQ ID NO: 801366 - DNA, 120 bp, Artificial Sequence
  ENSG00000279712_9 (sequence is synthesized)
cttcctccctgtccttcctcccctcctccctctctttactgcctctccctcctccctctccttcttccctctccttcctccttgtctctcctccctctccttcctccttctccttcctcc

SEQ ID NO: 801367 - DNA, 120 bp, Artificial Sequence
  ENSG00000279712_10 (sequence is synthesized)
ctacctccctctccctcctccctctctttcctccctccctctcctttctcccttccttctcttcttccttcagttaggaaggaagtgccattacatgccaggcactggtatcaggacagg

SEQ ID NO: 801368 - DNA, 120 bp, Artificial Sequence
  ENSG00000279712_11 (sequence is synthesized)
ggatacaaagaaaatgcctaattcatgcaagtcattttagcttgcacccggtatgtcttggattgctagttctgagagaaaggaaccagcgcaccaggaagaccctcaggcagccccatg

SEQ ID NO: 801369 - DNA, 120 bp, Artificial Sequence
  ENSG00000279712_12 (sequence is synthesized)
gacagttctgtgcagagagggatccaggcccccagccaacagctggcaacaaatgccactcatgtggatgaggccttggaagtagacccttcatctcaatcaaactttgatgactacagc

SEQ ID NO: 801370 - DNA, 120 bp, Artificial Sequence
  ENSG00000279712_13 (sequence is synthesized)
ctggccaacatctgactgcagacaggagagaccccaagcgaggactacccagcaaactcttcccaaatgtatggctcatagaatctgtgtacacgataaaggcccctaagtgctggggtg

SEQ ID NO: 801371 - DNA, 120 bp, Artificial Sequence
  ENSG00000279712_14 (sequence is synthesized)
atccatcatgcaacattcgataactgcaacagacactgagcccagtggttggtgcaccatcaatgctcagacagtggtggctgctgcttctgtcaaataacagcagttccatgttctgac

SEQ ID NO: 801372 - DNA, 120 bp, Artificial Sequence
  ENSG00000279712_15 (sequence is synthesized)
agatgtcctagattattccaggaagtcgcatggctccagactccctccacacccacagtgccccctgaggaagcctggccccacagatggtgactggcgggagccatcagaccccctgtc

SEQ ID NO: 801373 - DNA, 120 bp, Artificial Sequence
  ENSG00000279712_16 (sequence is synthesized)
tgattgattgcacttgagtgctagagaggaggccatgagagaaagtcacacacgtgaaactcacacgggaaaccacagcctctgcacctccgcaggacacggcacggtagctcagccaga

SEQ ID NO: 801374 - DNA, 120 bp, Artificial Sequence
  ENSG00000279712_17 (sequence is synthesized)
gccttggcgaccttgggtgcccttcgcgagctcctgcttccggagccggctctgcagctgttcttcctcctcttgtgtctcttgtagcttataataaaaatctctctctgggaatttctt

SEQ ID NO: 801375 - DNA, 120 bp, Artificial Sequence
  ENSG00000279712_18 (sequence is synthesized)
tgttctttgagcatttctttgtttcttgcagcctaaaagagcccatctcaaacaacaagggtctgggtggaggaagggttaaggacatcttatttagactcaaagagcccaatcaagcct

SEQ ID NO: 801376 - DNA, 120 bp, Artificial Sequence
  ENSG00000279712_19 (sequence is synthesized)
tctgcctgaatggaatgatttgtgcagttcctcggtgagacaagaagctgcttctctgctctgcctactaagaaggcctggatttccatacataagtagataaacacaacgtgctgaagg

SEQ ID NO: 801377 - DNA, 120 bp, Artificial Sequence
  ENSG00000279712_20 (sequence is synthesized)
cagacagggaaagcaagaaagaacacactattcattaacttctccgcttcctaataggatcaccacgggctgagcaacatttctgcttgagtaccccagcacaaagccctgtctgggcct

SEQ ID NO: 801378 - DNA, 120 bp, Artificial Sequence
  ENSG00000279712_21 (sequence is synthesized)
cagccacctggtaattctcaattaggctccacggcagcactaacggctggctgttggctcctacaggtagagcttattcaacaaggggcccgagctgtatgcccggagatcacgcatgcc

SEQ ID NO: 801379 - DNA, 120 bp, Artificial Sequence
  ENSG00000279712_22 (sequence is synthesized)
cagcctgctgggccaccgtgggcgctgggcagtctctctgcatttgaccctttcatgatgcagctcccagttccctggggtgggggctgaggagcctggcaagccagtgtggccatcccc

SEQ ID NO: 801380 - DNA, 120 bp, Artificial Sequence
  ENSG00000279712_23 (sequence is synthesized)
aagttactcagcaccacaggcagcagcattttacagcacataggagggagcaaaccttgcaaaaatggatcgatagagactgcttattgaaagaaccttgaacaagcacatgtgtaagga

SEQ ID NO: 801381 - DNA, 120 bp, Artificial Sequence
  ENSG00000279712_24 (sequence is synthesized)
ttgagaatgtggtgtctgaactggcagcatgtgcccagagcagcacagacctcccaggaaaatgaagagaggaaatcgaggtcccagcagccccaaggccctatcttcctgtttctgcaa

SEQ ID NO: 801382 - DNA, 120 bp, Artificial Sequence
  ENSG00000279712_25 (sequence is synthesized)
tcacagagtcttcaccttgccttttgctcaaagcaccggacatcaacctgtgggccattgtccacatttggctgtctgtacctagacctgcactgatggatgtggcatgctcagaggtgg

SEQ ID NO: 801383 - DNA, 120 bp, Artificial Sequence
  ENSG00000279712_26 (sequence is synthesized)
agcagattcaggctgttgtcaacaatggttttgaactcaccatcatgttctaagttaaatattcctccgtgcatcatccacctgaatggttgttctgtgatccctggaacaagaagatag

SEQ ID NO: 801384 - DNA, 120 bp, Artificial Sequence
  ENSG00000279712_27 (sequence is synthesized)
agctccaaatggcacaaccagataagcatcacccacccccgctcaagaattctgttcgaagtgtgcttattcccacctgggcacacaatgtacccatacaataaagcttgctgaagttgc

SEQ ID NO: 801385 - DNA, 120 bp, Artificial Sequence
  ENSG00000279712_28 (sequence is synthesized)
aaacctgcccgaacatggggctctcctacgtgaccatgcacctaaagggctccaatccctctgccaatcaccctaagaagtttccaacctgctccatttggctgagaatcctttactggc

SEQ ID NO: 801386 - DNA, 120 bp, Artificial Sequence
  ENSG00000279712_29 (sequence is synthesized)
tccccatcaccagtgtgaattaagtcgcacccccttagccttcctccagagccttctctgaattgacccagcctggatttcacctgtcagtcattctttgatatccttgtctgtgagtcc

SEQ ID NO: 801387 - DNA, 120 bp, Artificial Sequence
  ENSG00000279712_30 (sequence is synthesized)
cttatcctgaatatgctgagcccctactgaatacgccctcccaccgtgaggcaggatagcgccgtgtggaaggcacaggcctgtggatcagacagacctggactctgattacttaatctg

SEQ ID NO: 801388 - DNA, 120 bp, Artificial Sequence
  ENSG00000279712_31 (sequence is synthesized)
tttgaacctcagtttcctcatctataaattcaaaatactcatcatcgtctgtgctgtgtagggttggcaagaggattacacgtcagtcctggaaagcaggactcaaggcccagcatgcag

SEQ ID NO: 801389 - DNA, 120 bp, Artificial Sequence
  ENSG00000279712_32 (sequence is synthesized)
tgcacactaaccacccgtcgacactccagggccccccactctaagcatgcctactgtgtggtgaagtcactgccttcattgcggttatggccatcatcctcctcacttctgcctttcccg

SEQ ID NO: 801390 - DNA, 120 bp, Artificial Sequence
  ENSG00000279712_33 (sequence is synthesized)
tggtgacctggactccttctcaccccttcctgcatggcccctgctcaccccttcctttcccagcctctgctggaggctccaagctccagatcctgatgtagggccagccttgaccatgtc

SEQ ID NO: 801391 - DNA, 120 bp, Artificial Sequence
  ENSG00000279712_34 (sequence is synthesized)
tgcctgagcctggattgctgttctgtggctggactttgtggggatttgcaacagccgagcctcaccatgcccagctcagaggccgtccttagcatgagtcctttcatgtgacatcattta

SEQ ID NO: 801392 - DNA, 120 bp, Artificial Sequence
  ENSG00000279712_35 (sequence is synthesized)
attaagtgttatattgtatgggtctataaatgtccacctgaatttaaatctgccaataaaactaaaaatctcctataaaaggaagacaatgattgtgagcagatatggccaaatgcccat

SEQ ID NO: 801393 - DNA, 120 bp, Artificial Sequence
  ENSG00000279712_36 (sequence is synthesized)
aaatcagaaggggtgatgtctccaggcagaggctggaattggagtcactaagtcaggtagggaccatcacccacagccaaggggcctttctttcagatgccactgtgtacatttaggatg

SEQ ID NO: 801394 - DNA, 120 bp, Artificial Sequence
  ENSG00000279712_37 (sequence is synthesized)
tgatgatctgaagtgtggaacagtcacccccacagtgcatgtagctgagggcacgccaggaccctgacgccaagctgcccggccccacctgggcactcttcctaccgcagcagaagcgaa

SEQ ID NO: 801395 - DNA, 120 bp, Artificial Sequence
  ENSG00000279712_38 (sequence is synthesized)
tttcgggcctagaggaaatcgagcctgtccatccagggacaaacccaggcctggtgggccctgtgcgggagtttcccagaggtaacctggtacccagccaggggcagacaagtaactgtg

SEQ ID NO: 801396 - DNA, 120 bp, Artificial Sequence
  ENSG00000279712_39 (sequence is synthesized)
ccttcactcgtgggtttctcactgggaccctgagaggttctgagagcagggagcatccctgggtaaaggagacatggttgcacctgaaagaagggtgctgggctgtagaacgctgcacag

SEQ ID NO: 801397 - DNA, 120 bp, Artificial Sequence
  ENSG00000279712_40 (sequence is synthesized)
aggtgagcccagagctgagacagattgcacctggggcctctgccctccagcccggggcctgttctcctgggcaaggcagcaaaccttgtagcgtagttctctgtgcccatccagtctcga

SEQ ID NO: 801398 - DNA, 120 bp, Artificial Sequence
  ENSG00000279712_41 (sequence is synthesized)
ggtcacatgtagaaaactgcagttttctaagaaaaaccaggcttccagtgggtgtaaagccttgagctcccagctggtccatcaaggctcagactggtttccagcacagtcccatgatgg

SEQ ID NO: 801399 - DNA, 120 bp, Artificial Sequence
  ENSG00000279712_42 (sequence is synthesized)
gctcagctcagcaccgagtgtgcacagaacgcccacgcagtatctcagaaagtgtggaatccaggactgacaagcgtgccctatctccctccagccagggttctggcatccactcagaga

SEQ ID NO: 801400 - DNA, 120 bp, Artificial Sequence
  ENSG00000279712_43 (sequence is synthesized)
gcctctcagacccaggggacctggaaatgctagcctttcctaatcaaccccacctcccttccactccacaatccccccgtcaccttaaccatcccaccatcctggctcaggccctctgcc

SEQ ID NO: 801401 - DNA, 120 bp, Artificial Sequence
  ENSG00000279712_44 (sequence is synthesized)
tccctgtagagctgtttatacccatgactttcctcttcctggagcctggttccccaggacggtcagtgccgcaggcctccacctgcctcaccccagtggtctcaggtgctttatagggag

SEQ ID NO: 801402 - DNA, 120 bp, Artificial Sequence
  ENSG00000279712_45 (sequence is synthesized)
tctacccatccaatctcccagcacctggctgaggaggtgatttccacattctaagacaccagctgctgctctactgtgccatgaaataagatgccagcattttaataagagcttcctggg

SEQ ID NO: 801403 - DNA, 120 bp, Artificial Sequence
  ENSG00000279712_46 (sequence is synthesized)
ggtggggaagtagggcatagaaatacaagtctctcttggtaaatggacacatgcattctgagacatctgacttcagaaacacacgtcttaggattcaggaaatgtgatatggcccacctt

SEQ ID NO: 801404 - DNA, 120 bp, Artificial Sequence
  ENSG00000279712_47 (sequence is synthesized)
tttcaggaaagcagagaaggcagtgacttgcccattatggcttcagtgtcatgccaggtcactgtgcaagatgctactatttacgggagacttccagggtcaatgtggctgagtggcaga

SEQ ID NO: 801405 - DNA, 120 bp, Artificial Sequence
  ENSG00000279712_48 (sequence is synthesized)
gctgggacaagacttgggggtaaagcagaccctggccataatgccaactccgccatctataagctgcaggactggggcgagtcacttgaactctcctagcctccgtttgcccataggcag

SEQ ID NO: 801406 - DNA, 120 bp, Artificial Sequence
  ENSG00000279712_49 (sequence is synthesized)
tgggcaggtggtccaggttcaacttcctcattgcaatacccacctccaaaaagctgtgaaaactagaagcatttttcgaactcattcaatgataagaccccacctgacgtgacctggcct

SEQ ID NO: 801407 - DNA, 120 bp, Artificial Sequence
  ENSG00000279712_50 (sequence is synthesized)
ctttggtaaccaaatctgacctgagctacctgcagttctttagtctttgatggatcagattcccaagaatattcatatgtttcatgtagaactgctatatcagttgtgtttgattacagg

SEQ ID NO: 801408 - DNA, 120 bp, Artificial Sequence
  ENSG00000279712_51 (sequence is synthesized)
tgctgtccccaacccctggggtgctccatgcagatggactggggccagggccatcatctccatcctatggactctgatcagtcaccttcccctattttcaggggtggttaacaagagccg

SEQ ID NO: 801409 - DNA, 120 bp, Artificial Sequence
  ENSG00000279712_52 (sequence is synthesized)
ggactggcacagctctctgggctctggtcacatgtcctttgctgtcctacaaacttttgggagtgtgctccgggaaatggtgccctggtggggagggctgctcctgagaagctcccatgg

SEQ ID NO: 801410 - DNA, 120 bp, Artificial Sequence
  ENSG00000279712_53 (sequence is synthesized)
tttatttggccacatgcaggggctcttgccctctcaagggaaaccacacagcagggatgagagggccgagggccaagtgccagaggtacaagtcctgagacaaggtctggagtcaagggt

SEQ ID NO: 801411 - DNA, 120 bp, Artificial Sequence
  ENSG00000279712_54 (sequence is synthesized)
cgcgggtcaggggagcactggcgtcactgagtaacatcttcatgaagtgactcttccagagcagcggacgtcaagggtggggctgcctctgcctaggccagggattaccctcttgcttca

SEQ ID NO: 801412 - DNA, 120 bp, Artificial Sequence
  ENSG00000279712_55 (sequence is synthesized)
gatttggaactgaaaccgctgggatcggcgcctccactgggggcctaaatcccctgttactctttttcaatgccttgtcatcgctgtcctgtttgatattcttgtctgtttccttttgct

SEQ ID NO: 801413 - DNA, 120 bp, Artificial Sequence
  ENSG00000279712_56 (sequence is synthesized)
ggaacacagaggaaatttatacctcattcttagaaaaaggaaaaaaagatagttgtgcgattgtgggcagaaatagtcaattgtcagctgtttacaggatggggcattggcggattcaga

SEQ ID NO: 801414 - DNA, 120 bp, Artificial Sequence
  ENSG00000279712_57 (sequence is synthesized)
ctgggactcccacccactgtgaagacccttgaaagtgataccactgcaaacctataggagggccccgaaggaaaattctccttgcaaactgtcctgcccctgaagctttgattcctttcc

SEQ ID NO: 801415 - DNA, 120 bp, Artificial Sequence
  ENSG00000279712_58 (sequence is synthesized)
tgctgctgataccgctgtctgtctgttccacatgagctcctctctcctctgctcggccgtcctggactacacaaaatctcagtcctgccacagcctgatgctcttcccccacacccccaa

SEQ ID NO: 801416 - DNA, 120 bp, Artificial Sequence
  ENSG00000279712_59 (sequence is synthesized)
gcacacacaccgcacaacatactcagcacctagattcccaggctgggccaggaatagggcctgagtctatggggttcccatcagcatcttcatggggggatcctacaaaaacagccatcc

SEQ ID NO: 801417 - DNA, 120 bp, Artificial Sequence
  ENSG00000279712_60 (sequence is synthesized)
gcagctctttgcccaaatatataggaagtgacttcttttcttttgtgccttctcatcaaagggtggcatcagactaatatgggttttgtttgccacagctttctgtcaaaagaccttggg

SEQ ID NO: 801418 - DNA, 120 bp, Artificial Sequence
  ENSG00000279712_61 (sequence is synthesized)
caagttccaaatacatccatcctcagaagagctatatattaaggatttctgtatagtaaattatcactggatgcattggctgcaaaaacaagcatttgtcacctcacagggtctgtggtt

SEQ ID NO: 801419 - DNA, 120 bp, Artificial Sequence
  ENSG00000279712_62 (sequence is synthesized)
caggaatctgagtgtggctttgctgtgtactgctgccttaagttcattcactttcaagatgttgggctgggctgagtctcatctgaaggttgggctgtggaaggatcgacatggctgtga

SEQ ID NO: 801420 - DNA, 120 bp, Artificial Sequence
  ENSG00000279712_63 (sequence is synthesized)
gcaggattcagtcatctatgggctggcagtctgagggtgtcactcctctgtcgctgcagccagatgtctctgcctgttcctggccccatgagtcccttcacaggctcacaacctggcagc

SEQ ID NO: 801421 - DNA, 120 bp, Artificial Sequence
  ENSG00000279712_64 (sequence is synthesized)
tcgctcccctctgagtgaacaagggagggagagagtgagacagaagtcactgtcctttggtagcctcatttcagaagtgacattccagcagttttggccacattctgtttattagaaaga

SEQ ID NO: 801422 - DNA, 120 bp, Artificial Sequence
  ENSG00000279712_65 (sequence is synthesized)
agtcaataggtgcagtctgtactcaggggtggagcttacacaagggctgagttcctggagggggttatccctggagtaatctgagagccacctactcatgccaactgcatgtatttcaag

SEQ ID NO: 801423 - DNA, 120 bp, Artificial Sequence
  ENSG00000279712_66 (sequence is synthesized)
agacacacacatacacagagccgcacatatacacatggcttctggacacactgtaagaacccaataaatggcaactaacttttcttaattactaagaccaattaacatttgactgttatt

SEQ ID NO: 801424 - DNA, 120 bp, Artificial Sequence
  ENSG00000279712_67 (sequence is synthesized)
cacctgccagtttaaggtccttgaaacaaactcattttttaaagtaggggcaaaatgtctgtggtttgccagtttggccactgagtcatcatctgacctgagcatgtgctctctggccct

SEQ ID NO: 801425 - DNA, 120 bp, Artificial Sequence
  ENSG00000279712_68 (sequence is synthesized)
cggcatccacacctcggagatgcaaggctgctctgtcctctcacctgcatgcatgctggactgtgtgccttttcctgtaacctggccagacttcactggcccccagcttagcccaggtcc

SEQ ID NO: 801426 - DNA, 120 bp, Artificial Sequence
  ENSG00000279712_69 (sequence is synthesized)
ccagctctggtggccttcactggtccctgttcagagaggagaatcttgattctacaactcctggctcttcccaggaccacatgaccttccacaccacctcactgtgtcccatggatcatc

SEQ ID NO: 801427 - DNA, 120 bp, Artificial Sequence
  ENSG00000279712_70 (sequence is synthesized)
ttcctcctgttaccaactgaggtccttacagaggaggctggtcatatccctcaggggccagcaactcccacagtgactgcacagggcggtattcagaggacacttgctggcctggatgca

SEQ ID NO: 801428 - DNA, 120 bp, Artificial Sequence
  ENSG00000279712_71 (sequence is synthesized)
ggctgagaagagatcacacctaaggtcagcatgctgccatccaggatgggggaggagactggtccttctgggaagagcaagtagttccgtgtggctggagcatgaagacctgacccaggt

SEQ ID NO: 801429 - DNA, 120 bp, Artificial Sequence
  ENSG00000279712_72 (sequence is synthesized)
catctggggcactgaaggagctctccattcatcctgggagtatatggaactttggcagctaatcctctctagcctgcagccagggccaagctgatatttgtgtgtcaacaacaggagtga

SEQ ID NO: 801430 - DNA, 120 bp, Artificial Sequence
  ENSG00000279712_73 (sequence is synthesized)
acagttcctcggtgctcaccacaggccaggctctgttcagcatttggcatttttaatcaatttgattcccaccacagccctaggaggtaaatgcaattattatcctcactccataagtga

SEQ ID NO: 801431 - DNA, 120 bp, Artificial Sequence
  ENSG00000279712_74 (sequence is synthesized)
ggaaactagagcacaaaggggtttgatgatgcattcaaagtcacagggccaagaagtgatagagtccaggtttgatccaggcccagagtcctaagtgctctatgatttttcctggggatg

SEQ ID NO: 801432 - DNA, 120 bp, Artificial Sequence
  ENSG00000279712_75 (sequence is synthesized)
acacaaccaagtcctgctgcaaggcctgggaaggccagccttggagaggatggtgcataggaagcaccttcactggtctagttagaaacaggagaccaaacgagaggatgaggcctcaga

SEQ ID NO: 801433 - DNA, 120 bp, Artificial Sequence
  ENSG00000279712_76 (sequence is synthesized)
ggggatggggatttgggaatgactgacaggacatgaaggaggttaggatggacaggatctggtggccacttagctgggcaggcactcagatgagtgtctgtgaagagcaggacagcatct

SEQ ID NO: 801434 - DNA, 120 bp, Artificial Sequence
  ENSG00000279712_77 (sequence is synthesized)
gtcagaggctgtgccgccaagtctgttcctgatgttcctgaccacgtgatttgaagtcaaagggtccgttagtagccacccaaatgcattcatctcacccactgcccaggtagagctgat

SEQ ID NO: 801435 - DNA, 120 bp, Artificial Sequence
  ENSG00000279712_78 (sequence is synthesized)
ttgtcaggagaagggaattgcaatctgtattagtctgtcctcactgctaataaagacatacccacatttctgagactgggtaatttataaaggaaagcggtttaattgacttacagttcc

SEQ ID NO: 801436 - DNA, 120 bp, Artificial Sequence
  ENSG00000247624_0 (sequence is synthesized)
ggttccgccctgggtggggagaagccctgctgcaccactcgggcttcccagagcggggctggcccgcgggggaaactgaggcccgggaccccgaccggcgcctgcactgcgctggtagga

SEQ ID NO: 801437 - DNA, 120 bp, Artificial Sequence
  ENSG00000247624_1 (sequence is synthesized)
gtgctgtcaccgacgtcgtagagccgccgagggtgtttctgtagggtaaacatgaagcctcggctatattccaggcattttcacttggaaacattttacataaagtatttgaaggtctag

SEQ ID NO: 801438 - DNA, 120 bp, Artificial Sequence
  ENSG00000247624_2 (sequence is synthesized)
ataaagaataacagagtgatccatactacatgatgaggagctgtccaaacaccatgcagatgctcctaggattcttaaactagccaaaaataattccaggcattgtcagatataggataa

SEQ ID NO: 801439 - DNA, 120 bp, Artificial Sequence
  ENSG00000247624_3 (sequence is synthesized)
gtacatgaagacagcattagtcgcagtagcgaagacacggaaacaacctaagtgttcaccaacagatgaatggatgaagcaaatgtagcatatatacacagtggaatactattcagcctt

SEQ ID NO: 801440 - DNA, 120 bp, Artificial Sequence
  ENSG00000247624_4 (sequence is synthesized)
taaaaagaaggaaatctggctaactgcaacaacatggatgaacctggaggatattatataagtgaaataagccaggcatggaaagtttttgtagagatgaagtcttgctgtgttgcccag

SEQ ID NO: 801441 - DNA, 120 bp, Artificial Sequence
  ENSG00000247624_5 (sequence is synthesized)
gctggtctccaactcctgtactcaagctagcttcctgctttggcctcccaaactgctggaattaagttgtctgccctattgctcaacaagataaaatgtctgggctggtggctggaggct

SEQ ID NO: 801442 - DNA, 120 bp, Artificial Sequence
  ENSG00000247624_6 (sequence is synthesized)
atttctttgagggacttaggaacttcattctgggcaatcttcccaaaaggtacacagctctggacgtaccaacactctatttaaaaaccagtaaggtagagtggaaggcagagctgagtg

SEQ ID NO: 801443 - DNA, 120 bp, Artificial Sequence
  ENSG00000247624_7 (sequence is synthesized)
aaactgaaacctggtatttgctggaggtttctttctggaaagctgacagcacacctctgaccctctccaaaaggtctgatatgaaatattgcgacaaagttggaatcaactggcaggcat

SEQ ID NO: 801444 - DNA, 120 bp, Artificial Sequence
  ENSG00000247624_8 (sequence is synthesized)
ttcagtagatgtgctaatagcatgcaacaatgggaaggcgccaaaactgaactgaggtggtgaaatgaggtagagataagcaagtaccgcaaaaaaggaggcaagagaaatggcaaaact

SEQ ID NO: 801445 - DNA, 120 bp, Artificial Sequence
  ENSG00000247624_9 (sequence is synthesized)
ggggtggttcaaagaaggaaacagggtttgatgccaatggttattgtctggcttattcgagtagtttttaaagggagaggaagggagaggtgtgtcgctacctgctggtactgtggtgtg

SEQ ID NO: 801446 - DNA, 120 bp, Artificial Sequence
  ENSG00000247624_10 (sequence is synthesized)
cctttattgcgtttggacatccaagcagacctatttatttgttccctaagcaaatatttattgaatatgtattatgtcctaggcactgtgtatcagaaataactgcatatatgagccttg

SEQ ID NO: 801447 - DNA, 120 bp, Artificial Sequence
  ENSG00000247624_11 (sequence is synthesized)
gagggtgattgtggttgatatgcattgacatgggtgaaagggaagagacatattttcaactttgtatttttcaacacatccagctgcgtgctttcagcccagcaggtgctcaaaataggt

SEQ ID NO: 801448 - DNA, 120 bp, Artificial Sequence
  ENSG00000247624_12 (sequence is synthesized)
ttactgaggtgaaaaccaattcttgcctctaaagggtgttccatggtctcacaggaattaggaaggagtgaggagcatctttagtaaataaacaatgtgctcatagcataaaaaatacaa

SEQ ID NO: 801449 - DNA, 120 bp, Artificial Sequence
  ENSG00000247624_13 (sequence is synthesized)
attttgcttcttgtcttggctgacgtcatcatcacacaaccagtttctcaagctgaaacatgagtcatcctcttccttcatctctctcaccctccaaaaacaattgtcaaccatgctctg

SEQ ID NO: 801450 - DNA, 120 bp, Artificial Sequence
  ENSG00000247624_14 (sequence is synthesized)
tcaattatactgcagaaacgttactcaaatgtaattccttcatgtatctccgcattcccttgcctttcacattcctggaacacaagtgcccaataagtatttgttgattagtaattgccc

SEQ ID NO: 801451 - DNA, 120 bp, Artificial Sequence
  ENSG00000247624_15 (sequence is synthesized)
aatgaatgctgtaagaagaaaagatgaagaaaaggagaaaacaaggtaaggaaaggaaggagggagatggaaggaaggaaagaggtagatgtttccaaagcatgctttacaaagacatga

SEQ ID NO: 801452 - DNA, 120 bp, Artificial Sequence
  ENSG00000247624_16 (sequence is synthesized)
gccattttgtggataactgtagcattgttaccttatgtttactggagaaaaaataaaatgaataatcataataacaatgacaaaaaagttattttccttcccaatattttttccttgaca

SEQ ID NO: 801453 - DNA, 120 bp, Artificial Sequence
  ENSG00000247624_17 (sequence is synthesized)
ataccaaactaaaagtttcactctggttattacgatctctattctggttattatgccatacaaagatgaactcattgacaaagaaaaatatcaagaatcttcccctgatgacaaagtgta

SEQ ID NO: 801454 - DNA, 120 bp, Artificial Sequence
  ENSG00000247624_18 (sequence is synthesized)
gccccgaaacataatagaaggtctgtgttaccctttgtggcatccaggggatttatcatcccactccaatacccccacctaggagagaacctgtcagcctctccagtaatttctgccacg

SEQ ID NO: 801455 - DNA, 120 bp, Artificial Sequence
  ENSG00000247624_19 (sequence is synthesized)
atgctcactgggcccttacgtagactgactgacttctctattgctacttatcttgtatctttaaggccatgtgaactcgattgaattacaagtctttgtaggcagttgctatgccttata

SEQ ID NO: 801456 - DNA, 120 bp, Artificial Sequence
  ENSG00000247624_20 (sequence is synthesized)
ttaattttcctagttcttattgattgatttatgtattcagaaactctctgttgagtgcctgctctgtaccagacactgtgcaaggcactatgggtataactgtgaaaagaacagaaaata

SEQ ID NO: 801457 - DNA, 120 bp, Artificial Sequence
  ENSG00000247624_21 (sequence is synthesized)
tatccattattctgtacatcctcacagaggctgtaaataaatactgttgacattagttatgataattcccaaccctaattatctgggcagagtcataaacagtgagactgtaggctgaaa

SEQ ID NO: 801458 - DNA, 120 bp, Artificial Sequence
  ENSG00000247624_22 (sequence is synthesized)
gagactgtggaaaaggcatagaaagacctttgaactagcagaacatatttctttgagggacttaggaacttcattctgcaaatctgtttccaatgcctgttaagtacaaaacaccgtgtg

SEQ ID NO: 801459 - DNA, 120 bp, Artificial Sequence
  ENSG00000247624_23 (sequence is synthesized)
gacatgttcctattctcaagacgtttgctatacagtaggaaggagaggagggcctgctctctgccaaacactgtcctaggagttttgcacaatccattgagtattctctatatttttaac

SEQ ID NO: 801460 - DNA, 120 bp, Artificial Sequence
  ENSG00000247624_24 (sequence is synthesized)
agccctgagagagtctggatccattgcagccattttgaaattaacaaataataagggaaggccaacaaggacagatgtataaaagtataatgaatcataacaagagcttcatcctcctgg

SEQ ID NO: 801461 - DNA, 120 bp, Artificial Sequence
  ENSG00000241505_0 (sequence is synthesized)
aagtgtttcttctgatgtctcattttaacaagaggatgatgtctgtgtgagaaattctacactgaataagactggttgggactcaaagaagctacaaggatgcacttttccagcacaaac

SEQ ID NO: 801462 - DNA, 120 bp, Artificial Sequence
  ENSG00000241505_1 (sequence is synthesized)
atgttctaggttggatgatcaaatgcatatgcctagcaattgaaatctccaactaggaacaaaaaactaatcacaaaaagcaaaggattcactttggtgttcacagtaggagcaacagca

SEQ ID NO: 801463 - DNA, 120 bp, Artificial Sequence
  ENSG00000241505_2 (sequence is synthesized)
gcagcagctgcaatggcttcagccatatcaaatatcctgtggcacagagggcttcgaggttaagagatacaaatttgcttaccgcatgaactttgcagtttgatttttactttgatttgg

SEQ ID NO: 801464 - DNA, 120 bp, Artificial Sequence
  ENSG00000241505_3 (sequence is synthesized)
tcaccttgctttctttgctcttgattgttttctagccctacttctgtgactacattaaataattctttagctaataataatccttccaataaattcactcttctgcttgaatgattcaca

SEQ ID NO: 801465 - DNA, 120 bp, Artificial Sequence
  ENSG00000226453_0 (sequence is synthesized)
ggaccctctgagccaggtgcgggatattatctcatggtgtgccgttttttaagccagtcggaaaagcacagtattcgggtaggagtgacccgattttccaggatccagtccaagaataag

SEQ ID NO: 801466 - DNA, 120 bp, Artificial Sequence
  ENSG00000226453_1 (sequence is synthesized)
tccaagaataagtaaatggcatccttccagtggagagctgacagctgggattgaaacaagatccagaattcaccctgctgtttctccatgagtctgacctgcatcaactgcctcccttat

SEQ ID NO: 801467 - DNA, 120 bp, Artificial Sequence
  ENSG00000226453_2 (sequence is synthesized)
tctgggattccagttgtggagctcaaggacaagtccattctgggctggctgtatccaacttctttagtccaactatatccccactggaagccaggctctttccaacagctgtcacccatg

SEQ ID NO: 801468 - DNA, 120 bp, Artificial Sequence
  ENSG00000226453_3 (sequence is synthesized)
cctctttctatgtttgttatctgtctctaggttctggtaactacttccttcccttgccccttctggcctagggtgctaccaatccctcctccaaatccaactgtcactagcctcaaagta

SEQ ID NO: 801469 - DNA, 120 bp, Artificial Sequence
  ENSG00000226453_4 (sequence is synthesized)
cttgtagcttcctcaccttactttcaccttaataaatggtccccctactatctctcttcaaagcacccaatttgagtgtgccatctgtttcttgccaggatcctggttggtacatcaacc

SEQ ID NO: 801470 - DNA, 120 bp, Artificial Sequence
  ENSG00000226453_5 (sequence is synthesized)
ccacagggccctcactgcccccatagtcaccttggtcatcttctgcctccctgaaagactaaattcagtcagttcagatacatacacatccagacatgtcagggaaaactccattttgta

SEQ ID NO: 801471 - DNA, 120 bp, Artificial Sequence
  ENSG00000226453_6 (sequence is synthesized)
aggatctctgcttaaaatgccaaaagtttgaaagttggcaaacacttgagaaaagcacagttctctgtcttactcttactctaaacttggagataaatgcatttttaaaattgtgcatgt

SEQ ID NO: 801472 - DNA, 120 bp, Artificial Sequence
  ENSG00000226453_7 (sequence is synthesized)
tagagtgctaacgtgtacaagatcatttctggtgagacaccacaaacaatattttatgaggccaaaataagaaagaaggaaatgaaatagctcaggaatctcaggaagagctcatcgaac

SEQ ID NO: 801473 - DNA, 120 bp, Artificial Sequence
  ENSG00000226453_8 (sequence is synthesized)
actttgcctttatctcagaccattttatccacagccctgttaatcaggattggatatacctccatgagggagtcttaaacggagggaaagagatgccacaactaaaaaaaagaatgcaat

SEQ ID NO: 801474 - DNA, 120 bp, Artificial Sequence
  ENSG00000226453_9 (sequence is synthesized)
agaagtttgtcttaatgcctgttctgtgatgcacaactttcgtaagccaaaattttaaccttatgaacaatcagttctgtgctgcccttagcagagaaccataaattaaagataagcaat

SEQ ID NO: 801475 - DNA, 120 bp, Artificial Sequence
  ENSG00000226453_10 (sequence is synthesized)
ggttcagactttccagggccttgactcaggagtaactctgaaatcccaaccaaatatgtatttggttaagcaatttggcacatttttctattttgaggcattaaactataattacaagtc

SEQ ID NO: 801476 - DNA, 120 bp, Artificial Sequence
  ENSG00000226453_11 (sequence is synthesized)
acttttatttcattccaaataaatgtccctaaagtagatagaactagaggtttcctttttttaaaaaaaggaaacaggaaaacaacaaacaaaaccaaaaagaacaaaagcaaaacaaaa

SEQ ID NO: 801477 - DNA, 120 bp, Artificial Sequence
  ENSG00000226453_12 (sequence is synthesized)
tggcagaactcttcagcctgaaaaagcgatggttgggtaggacattgggataagggtatgtcagaggcagaatatgcttaaaacttgcaaaatcaagaagactgctaatcagatatggtt

SEQ ID NO: 801478 - DNA, 120 bp, Artificial Sequence
  ENSG00000226453_13 (sequence is synthesized)
gaactggtaaacagaatacaaagatgaagcagtagggtcccttcttttggccagctccaaggataattggagtgatactatgatatgcttccgttcgttttcatccatgtcaaccatgaa

SEQ ID NO: 801479 - DNA, 120 bp, Artificial Sequence
  ENSG00000226453_14 (sequence is synthesized)
agacagagttgatctcagcctgagctagagatggatccccatccatgtacctttgctcaactgtcctcagaccagatccagaattcaccctgctgtttctccatgagtctgacctgcatc

SEQ ID NO: 801480 - DNA, 120 bp, Artificial Sequence
  ENSG00000226453_15 (sequence is synthesized)
ttttctttttgaatacttctcctttttggccagaaagcatttttcttgtgcctgacaaaataagcaaaatgcaaactagacaaagaatagtgtaccttaaaaaaatactgtatgaatgta

SEQ ID NO: 801481 - DNA, 120 bp, Artificial Sequence
  ENSG00000226453_16 (sequence is synthesized)
tttattttggctgatgaagatatttccctaagatccgaagactccatagaagctacttttattagaacctcagtgtttgatcagatccagaattcaccctgctgtttctccatgagtctg

SEQ ID NO: 801482 - DNA, 87 bp, Artificial Sequence
  ENSG00000226453_17 (sequence is synthesized)
gggggctcttcccgcttcgctcggcacttctcctttttgccaccttgtgaagaaggtgcgttgtttcccctttggcttccgccatga

SEQ ID NO: 801483 - DNA, 120 bp, Artificial Sequence
  ENSG00000226453_18 (sequence is synthesized)
actggcagcttttccatttccttctagcatggagtgccccagacttctccacagaagccactaatgagcttcttgcctttcaagcccctgattcactaataacagaatttcagcaatgtc

SEQ ID NO: 801484 - DNA, 120 bp, Artificial Sequence
  ENSG00000226453_19 (sequence is synthesized)
tgaagttcgggaccttatcttttcttcctttagaaaacaaacaagcaaagaaaatatgttacttgctgaagccactgactcaatcctgtctgtttaaggttttaaaacagagaatttatt

SEQ ID NO: 801485 - DNA, 120 bp, Artificial Sequence
  ENSG00000226453_20 (sequence is synthesized)
caagaatctcagcttctgctttgcaaatgagttgaaagcttaaggatttgaccccaactttcaaaatccagaattcaccctgctgtttctccatgagtctgacctgcatcaactgcctcc

SEQ ID NO: 801486 - DNA, 120 bp, Artificial Sequence
  ENSG00000226453_21 (sequence is synthesized)
actcagactggagtgcagtggcaggatcttggctgactgcaacctttgcctcctggcagaactcttcagcctgaaaaagcgatggttgggtaggacattgggataagggtatgtcagagg

SEQ ID NO: 801487 - DNA, 120 bp, Artificial Sequence
  ENSG00000226453_22 (sequence is synthesized)
aaaggtgttttattaaagaagcatatggacaaggaactatctctgaaatgttttcagagcttctctggtgttacatgcatagtaaatattttctttaaattagatgaaaaatatccagaa

SEQ ID NO: 801488 - DNA, 120 bp, Artificial Sequence
  ENSG00000237286_0 (sequence is synthesized)
atagtggacctagaactcccagaggccctgtgtcctccattcccccacacctggctggcaggaagctccggcagaccacgtgcatgtgcctgcacctgctttatgggagaattgagccct

SEQ ID NO: 801489 - DNA, 120 bp, Artificial Sequence
  ENSG00000237286_1 (sequence is synthesized)
ggtgacatttgtttcccccgggtcaccctggcggagtagcccttgggcacccctcacctcgagttggaggtctcggctcctcatgaccgccatgttcttctcctcactgagctgtgcgta

SEQ ID NO: 801490 - DNA, 120 bp, Artificial Sequence
  ENSG00000237286_2 (sequence is synthesized)
gcgcatggctaagttgtagttgtcgtccttcaccttgaccagctcgtcattgtagctgtcccgctcttccttcatcttgtagtaccgctcctggaaggttagcagctccacgcgcgtcag

SEQ ID NO: 801491 - DNA, 120 bp, Artificial Sequence
  ENSG00000237286_3 (sequence is synthesized)
cgtcatctgcttcttctcatcctccagctgccgcaacctggccagcagctcgcagcgttgcaggtccttggccttcatctgctgctgcagcttgatgacctcgttcatcaggaagacgga

SEQ ID NO: 801492 - DNA, 120 bp, Artificial Sequence
  ENSG00000237286_4 (sequence is synthesized)
taaatttgatggtatgtcaaccccgattgtttggtgaagccgcctgcagtactgtttcgagaaacattccaaagttacatccaagctcagtgggaaagcatgctgattactgatgtctgc

SEQ ID NO: 801493 - DNA, 120 bp, Artificial Sequence
  ENSG00000237286_5 (sequence is synthesized)
catggatgccagagagtcgcagctgatgagccacttaccaccagccacgctgggggacagtgattatcaaaccttctaaactgatccatagaaagaaaaacatttaacattgtggtctag

SEQ ID NO: 801494 - DNA, 120 bp, Artificial Sequence
  ENSG00000237286_6 (sequence is synthesized)
tgaccatagacaaagataactctacaagtacatgtgtatacacatgtacataatgtaaaattaaaacaagcttcacaaaccatatttattacctttactgaatatgataaaccccccctc

SEQ ID NO: 801495 - DNA, 120 bp, Artificial Sequence
  ENSG00000237286_7 (sequence is synthesized)
cagaagtcaggctagaaaagcttgtggaacccttctcggaatatttttaaacagataaagtacatcagattacaaaagaaaccaattataataaaatccagttatcaaatattaaataaa

SEQ ID NO: 801496 - DNA, 120 bp, Artificial Sequence
  ENSG00000237280_0 (sequence is synthesized)
caagatcacaccactgccctccagcatggtcaacagaacgagactgtcttgaaaaaaaaaaagataaattatggtatttgctttggaattaaataattagtaacttttagtaaggtttgg

SEQ ID NO: 801497 - DNA, 120 bp, Artificial Sequence
  ENSG00000237280_1 (sequence is synthesized)
taaaggtttagtaacctttagttaacccagttaacttctgtgtcttatatttgtctttgtactgaagtagttgaatgccactgacccacagaatgagttgccagagaactggagcaacat

SEQ ID NO: 801498 - DNA, 120 bp, Artificial Sequence
  ENSG00000237280_2 (sequence is synthesized)
tgtttcaatttatatttatattatatttacacttgatcttagccaaaaggctgagaaagcgattttatattatatttataaagatcactttagctttctcctggagactggattggtagg

SEQ ID NO: 801499 - DNA, 120 bp, Artificial Sequence
  ENSG00000237280_3 (sequence is synthesized)
gacaaggtgacattggtgaacttggttagaaagtcagtcaagcccgtgtgagctactgagcccagcataagtcatatttaaaacaatgggaatgggtaggaacacctagagatagagtgt

SEQ ID NO: 801500 - DNA, 120 bp, Artificial Sequence
  ENSG00000237280_4 (sequence is synthesized)
gggaaatagaatagggtccagtatacagctgtgccaaatttcacatgtacaggttagatagtggagtgggtcagttctgttgggaatgccctgaaagtttgaataatgataagcacgtcc

SEQ ID NO: 801501 - DNA, 90 bp, Artificial Sequence
  ENSG00000237281_0 (sequence is synthesized)
aatacggtcccagaaaaactacaggatgaggtgatcttctgcagcttggaaaaaaaaaagcgatggatggagtttcactcttatcaccca

SEQ ID NO: 801502 - DNA, 64 bp, Artificial Sequence
  ENSG00000237281_1 (sequence is synthesized)
ggcccagagtggtggcagtggaggcagggagaagtgttcacattctgggtacctttgaaggcca

SEQ ID NO: 801503 - DNA, 120 bp, Artificial Sequence
  ENSG00000237281_2 (sequence is synthesized)
ctcggctctgcaagacactcccagacctgcctgtgtcctattcgtctcccctctgcagacagaggctctcctcaagactttgttctgcaaaacccccaccactacccctaagaaggcaaa

SEQ ID NO: 801504 - DNA, 120 bp, Artificial Sequence
  ENSG00000237281_3 (sequence is synthesized)
agggcaactgaggcatgaagcagggggcacgcacgggggagtcccacattcctgatctgactccccaggcatattgtgctgcttctggggagcttgccacggcctgcctcctcccgggtt

SEQ ID NO: 801505 - DNA, 120 bp, Artificial Sequence
  ENSG00000237282_0 (sequence is synthesized)
tggacagcactgtctggactctagaagatgctctgattcaagaggatgtaaagaaattctctaagccgataagaaaaatagaagaaacccaaatgggcaatgagtgcatgggaactcact

SEQ ID NO: 801506 - DNA, 120 bp, Artificial Sequence
  ENSG00000237282_1 (sequence is synthesized)
cacctcagtggaaaggagggaatggcaagccagcccactgaagcccactggggacataggacaagtctgcaaagcagagacagcccctccaggaagagcgaccaggccttgagaggacat

SEQ ID NO: 801507 - DNA, 120 bp, Artificial Sequence
  ENSG00000237282_2 (sequence is synthesized)
tcagctgtcctgcagcctgggtcaggcacctaggcagctttatggcaggcggagatgcaccacccacatcctctttccaggcagggcttgctgccctggctgtagcgagtgcggcagcag

SEQ ID NO: 801508 - DNA, 120 bp, Artificial Sequence
  ENSG00000237282_3 (sequence is synthesized)
gtggcctccagctatcagcaacttcagagagctgccttgcctgaggtcccgtcccttctggggaagctcccatctgccagggggctacaaaagcacagtggacaccatgatgggcaattc

SEQ ID NO: 801509 - DNA, 120 bp, Artificial Sequence
  ENSG00000237282_4 (sequence is synthesized)
tggctgatgggagcaccacctggtggctgaggcattcttgggccacatagcagttgactgccctctccaccatcttttcacaagtgttaatcccaataaacacccatcctcttccatccc

SEQ ID NO: 801510 - DNA, 120 bp, Artificial Sequence
  ENSG00000237283_0 (sequence is synthesized)
acagatggctctgcacaatatgcaggtaccacccaaaagtggacagctgcagcactgtagcccctttctaggacatctctgaaggacagtggtgaagtgaaatcttcccagtgggcagaa

SEQ ID NO: 801511 - DNA, 120 bp, Artificial Sequence
  ENSG00000237283_1 (sequence is synthesized)
cttcgagcagtgctcccctttgtgcactttccttggaaaaagaaatggccagatgcgtgattatatactgattcatgggctgtcgccagtggtttggtcagatggtaagggacttggaag

SEQ ID NO: 801512 - DNA, 120 bp, Artificial Sequence
  ENSG00000237283_2 (sequence is synthesized)
ttggtgacaaagaaatttggggaagacttatgaggatggatcactctgattgatcacaaagtgtgaagatattgtatctcatgtgagtgcccaccaaaggttgacctcagcagaggagga

SEQ ID NO: 801513 - DNA, 120 bp, Artificial Sequence
  ENSG00000237283_3 (sequence is synthesized)
gaggaggattttaataatcaagtggaaggataggatgacctgttctgtggaaaccactcaacctctttcctcagccatccttgtcatcattcaatgggcccacgaacaaagtggtcatgg

SEQ ID NO: 801514 - DNA, 120 bp, Artificial Sequence
  ENSG00000237283_4 (sequence is synthesized)
ggtcatggtagcagggatgaaagttacacatgggctcagcaacatagacttctactcaccaaggctgacctggctacagccattgctcagtgcccaatttgcaagcagcagagaccaaca

SEQ ID NO: 801515 - DNA, 120 bp, Artificial Sequence
  ENSG00000237283_5 (sequence is synthesized)
ctgtgccctccatatgataccatccttcagggtgatggtatccactaggtatccactaggtagccagctacctagtggcaggttgattatattggacctcgtccaacatggaaaaggcag

SEQ ID NO: 801516 - DNA, 120 bp, Artificial Sequence
  ENSG00000237283_6 (sequence is synthesized)
cagtttgtcctcaccagaatagatgctccggatatgggtttgcttatcctacacccaatgcttctgtcaagactgccatctgtggccacatggaatgccttatccaccatcacggtgttc

SEQ ID NO: 801517 - DNA, 120 bp, Artificial Sequence
  ENSG00000237283_7 (sequence is synthesized)
gccacatggaatgccttatccaccatcacggtgttctacatggcattgcctctgaccaaagcgctcactttacagctaaagaagtgcagcagggggctcatgctcatggaattcactggt

SEQ ID NO: 801518 - DNA, 82 bp, Artificial Sequence
  ENSG00000237283_8 (sequence is synthesized)
ttcatgggtccaggaagtcctagtgatccattagcacaatttttgcttcctgtttccatgacattagttctgccggcttaga

SEQ ID NO: 801519 - DNA, 120 bp, Artificial Sequence
  ENSG00000237283_9 (sequence is synthesized)
ttgcttcctgtttccatgacattagttctgccggcttagaggtcttagttccagagggatgaacactgttaccgggagacacaacaaatctggaagtcaagattgccacctggccacttt

SEQ ID NO: 801520 - DNA, 120 bp, Artificial Sequence
  ENSG00000237283_10 (sequence is synthesized)
gggctcctcctacctctaagtaaaacggctaaaaagggagttacagtgttagctggggtgattgacctggattatcaagatgaaatcaatctactgtttcacaatagagtactggaggtt

SEQ ID NO: 801521 - DNA, 120 bp, Artificial Sequence
  ENSG00000237283_11 (sequence is synthesized)
tctatcaagatatctttaagcccactgattctttccttggccatgtctgatttacaggtgataggtaatgaagatcttcaccggaattggcctcttgatcttggactttccagcctccag

SEQ ID NO: 801522 - DNA, 120 bp, Artificial Sequence
  ENSG00000237283_12 (sequence is synthesized)
aactgcaagccaaataaacatattgtgtataaatcatccaatctgtggtattctgttataacagcaaaaagtgaactgagacagtttattctttaggtaggacttttgttttctaattgc

SEQ ID NO: 801523 - DNA, 120 bp, Artificial Sequence
  ENSG00000237283_13 (sequence is synthesized)
ctaatgtcactcaatctccaaagttttaaatccaaacttttagatttataacttatggacttaaaaatccattcctattaggctagtcactttctagtcctttgagataaagtgatgaac

SEQ ID NO: 801524 - DNA, 120 bp, Artificial Sequence
  ENSG00000237283_14 (sequence is synthesized)
aatatgaatatggcttttgctcttatcatatgtatagtctaatgcaacaagaagttattgagaaacgttaacactgaagagtaatatgaaaggaagattgcaggatgccaagtcaaccta

SEQ ID NO: 801525 - DNA, 120 bp, Artificial Sequence
  ENSG00000237283_15 (sequence is synthesized)
tacgagagaggtatctatgaaacaaaaagaaatcctttctgaagaaatattattatatgaaaccttctgttggccagaataaagagaaatcgggtgggaatattctaggcaaagtgagaa

SEQ ID NO: 801526 - DNA, 120 bp, Artificial Sequence
  ENSG00000237283_16 (sequence is synthesized)
aatgagaaaattcccagtgaagtgtggagcacaggatgttcaagggactgcagaaaggatgatcttttgatcatccaaatcctaatcaaattatggatgaaatggcatggaaaagagata

SEQ ID NO: 801527 - DNA, 120 bp, Artificial Sequence
  ENSG00000272254_0 (sequence is synthesized)
gagtaactttagcttgatatagtgttatttcatggttgattatgccttgattgttttgcttgatctgaatgttttcagtctttgcttaattttacctgtgactgaaagagttttgaaaac

SEQ ID NO: 801528 - DNA, 120 bp, Artificial Sequence
  ENSG00000272254_1 (sequence is synthesized)
gtcattggtaccaacttctactttctatagctagagtttaatgagtgacacaactgacctgtgtcagatcagaaagaaaacataagggcagtacaatttcataaagtctactattgtgct

SEQ ID NO: 801529 - DNA, 120 bp, Artificial Sequence
  ENSG00000272254_2 (sequence is synthesized)
taaaactttccatttcctcattttatacatttaactgattgtaccagattccactgatagtaataattaagggaagagtttaagatgatgtatttctggacattaaacccatacaaccca

SEQ ID NO: 801530 - DNA, 120 bp, Artificial Sequence
  ENSG00000272255_0 (sequence is synthesized)
tcctagctccctttgctaggtgcctttttgcagtgcatgcacaggacagatgtactctgtggcctggctttgggtccttcatctggctttgggacccctcctatggccacagtgaccaca

SEQ ID NO: 801531 - DNA, 120 bp, Artificial Sequence
  ENSG00000272255_1 (sequence is synthesized)
atgcacagaaatagcttttatttgctcatctcactacttgtcccctcgccaccacctcccgccatgaaaattctttgaaggtaaggaggagtcccctacctgccttgggcccgaagcttg

SEQ ID NO: 801532 - DNA, 120 bp, Artificial Sequence
  ENSG00000272255_2 (sequence is synthesized)
gggaccatgctaattgctttttgaacataggcttattaaatccacaggcttggacacctgtgtgaggttacaaagtagcaaaaccaggatttcaatccatgccttgtctgaggcattttc

SEQ ID NO: 801533 - DNA, 120 bp, Artificial Sequence
  ENSG00000272255_3 (sequence is synthesized)
catgactgccatttatctgctaatatctgtcattgattaaacatccagtgactggaaatggccacatggagaggagtgtgggagttaggatctccaataaagatggccaatttggaactc

SEQ ID NO: 801534 - DNA, 120 bp, Artificial Sequence
  ENSG00000272256_0 (sequence is synthesized)
acggcgcacggaaacgcaggggagcctgcaccggctgacggcggcggaaaagggcgaacgaagcgcctgagggccctggcagcactcaccagggtcgttccagcccagggcagggcccgc

SEQ ID NO: 801535 - DNA, 120 bp, Artificial Sequence
  ENSG00000272256_1 (sequence is synthesized)
ggtcagcagaaacaaatgcaagccgaggagcaagcagtacccggccgctcccggcccgcaggctgcggccatggcgctcgatgaagatggcgccgggctgccagacgcctacgggccgaa

SEQ ID NO: 801536 - DNA, 120 bp, Artificial Sequence
  ENSG00000272256_2 (sequence is synthesized)
caacggatccgtgcgccaaccctacgtcactgccgctgcggcccgtggggctcagtgagtggccgccgtgggcccccgcccctggagcacagcgcggcttggggcggggcgaggcggtgt

SEQ ID NO: 801537 - DNA, 120 bp, Artificial Sequence
  ENSG00000272256_3 (sequence is synthesized)
ggctggaggcgggttggaggcgtggcgccgcggtgtgggcggggccgagggcctgtcgccgccgcgcccgcgggcggggcgagggcagcgcgcagctttgttgtgtctcgtctgagattc

SEQ ID NO: 801538 - DNA, 120 bp, Artificial Sequence
  ENSG00000272256_4 (sequence is synthesized)
tgagattcgggaagcttctgtgcgtaggcgatgcagtttgagaggctgaaaacgtcacgacgcgaaatctaagaaatgtagtcaaattatgtattattaaaacctcaataattgtaccaa

SEQ ID NO: 801539 - DNA, 120 bp, Artificial Sequence
  ENSG00000272259_0 (sequence is synthesized)
acatgataggggagctggaggaacctgccgtctccgccatcgagcgcccctccgagctggggttggacgctgccagtttgcacagcagcaggttggatctatgaacacgagacacagaaa

SEQ ID NO: 801540 - DNA, 120 bp, Artificial Sequence
  ENSG00000272259_1 (sequence is synthesized)
caccagctggaggagcccaggaggcccagcaggtgaggttatccacagaataggcacgccgccctagtccatggatcactgagtgcccagaccagggcttcagggggttccagccgaggc

SEQ ID NO: 801541 - DNA, 120 bp, Artificial Sequence
  ENSG00000272259_2 (sequence is synthesized)
tttgtgaaccggatcctgggtcactgagtaaccagactggtctcaggaggttccagctgaggctttgtgaaccagatcctgggtcactgagtgcccggaccaggggttcaggaggttccg

SEQ ID NO: 801542 - DNA, 120 bp, Artificial Sequence
  ENSG00000272259_3 (sequence is synthesized)
cggacgaggctttatgaaccggatcctcctctttgcatttcaaacagtgggaaccatcttagtccatgggccactgagtgcccggaccagggcttcagggggttccagccgaggctttgt

SEQ ID NO: 801543 - DNA, 120 bp, Artificial Sequence
  ENSG00000272259_4 (sequence is synthesized)
gaaccagatcctgggtcattgagtgcccggaccaggggttcaggaggttctggccgaggctttatgaaccggatcctcctctttgcgtttcaaacagcgggaaccatcgtagtccatggg

SEQ ID NO: 801544 - DNA, 120 bp, Artificial Sequence
  ENSG00000272259_5 (sequence is synthesized)
ccactgagtgcccggaccagggccccggggcttcctgacagcaggaacaacaggaatcattcaaaccctggagcccagagggcaggacgggagcggccttttgtcccccgcgggcaggcc

SEQ ID NO: 801545 - DNA, 120 bp, Artificial Sequence
  ENSG00000272259_6 (sequence is synthesized)
agggaggtggacaggccgggagcctgaagcctgagcagctggaggctcgctcattctcccgtggtcactgtgttcccggagccccaacagagggccaattgtcccacggggcggtgcctg

SEQ ID NO: 801546 - DNA, 120 bp, Artificial Sequence
  ENSG00000272259_7 (sequence is synthesized)
acatgataggggagctggaggaacctgccgtctccgccatcgagcgcccctccgagctggggttggacgctgccagtttgcacagcagcagggagacaagagacacacagccacagagga

SEQ ID NO: 801547 - DNA, 120 bp, Artificial Sequence
  ENSG00000272259_8 (sequence is synthesized)
caaggccatatgagatggaggcagagactggagagatgccgccacaagccaaggatgtgtggggccaccaggagctgggggaggtgaggaacagattctccagagagcctgtggagggaa

SEQ ID NO: 801548 - DNA, 120 bp, Artificial Sequence
  ENSG00000272259_9 (sequence is synthesized)
ccagcctaccaacaccttggtgctgggcttctggcctcagaactcagacagtgaatctgtgttgtttgaagcctcctagtttggtccttggttacagcagccccaggacactcagtcccc

SEQ ID NO: 801549 - DNA, 120 bp, Artificial Sequence
  ENSG00000272259_10 (sequence is synthesized)
agcagcccctgcagcaaatctcagtgtctctccccccatctgtttgcagaggccccatcaacgaacaaatgcagacaactcttcctggagttttgcattaaagacaagaagctgggggca

SEQ ID NO: 801550 - DNA, 120 bp, Artificial Sequence
  ENSG00000272259_11 (sequence is synthesized)
cagcgagggggacatgaggtcaaggcgctgctgctttgttaggtaggggagattgagcatgtttgtatcctgatgggaatggacaagcagcaggagcatctgatggcacagcaaccaggg

SEQ ID NO: 801551 - DNA, 120 bp, Artificial Sequence
  ENSG00000272259_12 (sequence is synthesized)
ggccaccccttaaggacaggtgggccggcttgccttggagcatgggtgcttgctcacaggctcggggcaaggcacagatgcgggaggcacagacgcggcagtgggagcagctgggtccat

SEQ ID NO: 801552 - DNA, 120 bp, Artificial Sequence
  ENSG00000272259_13 (sequence is synthesized)
cttctcccagctctgggcacaggtgggaggcacagtgcgtgctttccctgcaggcttcctgtgcttcgccccgagccatctccccaggtctgagttcctctgctggtccaggagggtctc

SEQ ID NO: 801553 - DNA, 120 bp, Artificial Sequence
  ENSG00000272259_14 (sequence is synthesized)
agtgcggtgggacaaactcgttccattggtggatggagacacacccagtgtggacagaggctgcaagcatcagagggcgtgtccatgcggcagtattggtgtcatggccataaggttggc

SEQ ID NO: 801554 - DNA, 120 bp, Artificial Sequence
  ENSG00000272259_15 (sequence is synthesized)
acttcctacagactccggccttgcattttcagcagctggagctgttcacagcatccttctcacaggagttttgggagcacaaccaggtgtttctctgatccgtaagagcctcctgcccgt

SEQ ID NO: 801555 - DNA, 120 bp, Artificial Sequence
  ENSG00000272259_16 (sequence is synthesized)
tcatccatcaacagcctctggggacaccttcggcagcaggaatcactggtgttgggtactgagtttgaatttctgtgcccacctttgcgctggcacaaaggggctggctatgtggaagca

SEQ ID NO: 801556 - DNA, 120 bp, Artificial Sequence
  ENSG00000272259_17 (sequence is synthesized)
gaatgtggggcccttgctttaaagacctcagaggctggttgaagggataaacctcacacccccaaaattgagagaaaacatcaagggagctgcaccgcagcaccaccttgctctctgggc

SEQ ID NO: 801557 - DNA, 120 bp, Artificial Sequence
  ENSG00000272259_18 (sequence is synthesized)
ttcagcaccagggaggcggacagctccattcactgtggccgccaccgcccatccaggactccagccctccccgcatcatcgctctgcttggctgtcgggggaggagagcggctgctgctg

SEQ ID NO: 801558 - DNA, 120 bp, Artificial Sequence
  ENSG00000272259_19 (sequence is synthesized)
tgcatgggtgcttgggggcggtggggggtggggtgcagaggaggcaccaccctacccggggccatcaccaaccaatggggatgggagcgggtagataaatgccccagcctccccagcgtc

SEQ ID NO: 801559 - DNA, 120 bp, Artificial Sequence
  ENSG00000272259_20 (sequence is synthesized)
ggtggacagtttggaagtgcattcattctccatggcttcccagagggcccccagcaggcctgagcagcagctcttgtgaaactgccctccatgggctgctctctcttcctgtctcactgt

SEQ ID NO: 801560 - DNA, 120 bp, Artificial Sequence
  ENSG00000272259_21 (sequence is synthesized)
taccttcgtccaagtccttgtctccaccagggcttacatttggggtgcctagaaaaggagagagcatataatcaatgccagggtgagtggggggacacccagagccatgaggtcccaagg

SEQ ID NO: 801561 - DNA, 120 bp, Artificial Sequence
  ENSG00000272259_22 (sequence is synthesized)
agggggcgatggcagggtggcccgtgaggcaggtggtctgggcccaatccccggctcaggatggacagaaggcaggagcagcctctgtgggggctggtgacagtgtgagctggcccagca

SEQ ID NO: 801562 - DNA, 120 bp, Artificial Sequence
  ENSG00000272259_23 (sequence is synthesized)
gtgggtgggcttggctccaagggtgccacagggactgtgaagcaggctggagagggtggcgagcgggcctccagtgggaaaaccaggcatggcactgaggcgggcaggtaagttcagccc

SEQ ID NO: 801563 - DNA, 120 bp, Artificial Sequence
  ENSG00000272259_24 (sequence is synthesized)
tacactcctcctccttccggccggactctcacgtggatctctccttctggctgtgcaggttggatctatgaacacgagacacagaaacaccagctggaggagcccaggaggcccagcagc

SEQ ID NO: 801564 - DNA, 120 bp, Artificial Sequence
  ENSG00000272259_25 (sequence is synthesized)
gctccgtgggcggccaccttgccatggggccacagcagccattccagaggctcccccagtgccctcctcgcccgggggggggtgctcccgggtgtggtccggctgaggagtctcactcgc

SEQ ID NO: 801565 - DNA, 120 bp, Artificial Sequence
  ENSG00000272259_26 (sequence is synthesized)
aggaaaggtggcgtgtgacgggctggagccggcctgcgaagtctgcctggtggccatggctcaggggcctgtgtctcccggacgcccccagcggggcctctcttgaagggactttgtgct

SEQ ID NO: 801566 - DNA, 120 bp, Artificial Sequence
  ENSG00000272259_27 (sequence is synthesized)
cctgccaggagaaaacagccctaacagctgcctcctgggccatttccaaacattcgtgtgtcaggccagagagcgccagttcgttgcccttttgggtggttccaaacgtgtggagttggg

SEQ ID NO: 801567 - DNA, 120 bp, Artificial Sequence
  ENSG00000272259_28 (sequence is synthesized)
gccctggcagcttcggaccaccagccccccttcactgaggggttcgtcatcaccaagcctcagccagagatgttaaactggaaaaacaatcacggacccccgtgggggaagcagcttctg

SEQ ID NO: 801568 - DNA, 120 bp, Artificial Sequence
  ENSG00000272259_29 (sequence is synthesized)
gtctggggacagtcatgagctctgcatgcagctgccggtgtcccttctcggtgcctggcgggtatcagggctcacccttggcctggccacacctaccgcctctcaggcccacacctcttc

SEQ ID NO: 801569 - DNA, 120 bp, Artificial Sequence
  ENSG00000272259_30 (sequence is synthesized)
ccggaagacacctggaggcttcaacaccggctcacgccctttcctggaagaaacctggaggctctgacgccggcccacactccttcccgaagaaacctggaggcttggacgccggcccat

SEQ ID NO: 801570 - DNA, 120 bp, Artificial Sequence
  ENSG00000272259_31 (sequence is synthesized)
acccatttttggacaccgggggcttcaatatctgtggcatcagctcctcagctctctcttccctcagcatcccactgacccgaaattccaggagatcccgagatgggccaaacacaaaac

SEQ ID NO: 801571 - DNA, 120 bp, Artificial Sequence
  ENSG00000271781_0 (sequence is synthesized)
caaggttgcatgactacctacacagaggggccagccacagcctcctctcacaccggccagtggctgagcccatgaggacactgaggctgggaagccacagaggaggttggcggggccact

SEQ ID NO: 801572 - DNA, 120 bp, Artificial Sequence
  ENSG00000271781_1 (sequence is synthesized)
gggactggacagggtcaaggatgagaccagctcgcacccggggccctggatggagcctcccctccagcttctctgggactgaggctgggagctgtcaggaagacgaacaggactcgctgg

SEQ ID NO: 801573 - DNA, 120 bp, Artificial Sequence
  ENSG00000271781_2 (sequence is synthesized)
ccctggttgcctctgccgtcccctagagctgggggagcctgcaaggcagtcagctggagagagggtccgggttcaggcatccttctgagcagtttcatggcttttctggcataactttcc

SEQ ID NO: 801574 - DNA, 120 bp, Artificial Sequence
  ENSG00000271781_3 (sequence is synthesized)
aggaacatgcacgacccaggagacacccaagacccaggggatgtgtgacccgggagacacatgtgacatcgccacggagcacagcagagacggaacagctgcaaaggtcacggcgcccac

SEQ ID NO: 801575 - DNA, 120 bp, Artificial Sequence
  ENSG00000271781_4 (sequence is synthesized)
ccagagctggtagatggggcgctggcgccgcagaggtgggccccacagccttccacacaggggcatctgacccacggcccggccccttgcaaagccaaggccgcagagggggaaggtgca

SEQ ID NO: 801576 - DNA, 120 bp, Artificial Sequence
  ENSG00000271781_5 (sequence is synthesized)
ggagctctgagatgaaagaggtgatgagtttgcggcaatgtaggaatgaaatacatcggccacaggaggacgcaggtgcaaaccaccgaaataaagccattgccacacaggcggacagga

SEQ ID NO: 801577 - DNA, 120 bp, Artificial Sequence
  ENSG00000271780_0 (sequence is synthesized)
gtcgtgtgacccgtctggtgtagtcctggaacaagggttttgctgcggagggaaacggccagagacctcgatctaagaccggggtttggagactggcgggcctcggaacagcagagctag

SEQ ID NO: 801578 - DNA, 120 bp, Artificial Sequence
  ENSG00000271780_1 (sequence is synthesized)
cggacttccggtctggccctctgctcacggccgagggcaaggcgggttaggtcacttgctgaggaaagagctcaatatgtcacgtgttcctctcccaatgacgtggacctcagttccctc

SEQ ID NO: 801579 - DNA, 120 bp, Artificial Sequence
  ENSG00000271780_2 (sequence is synthesized)
tccagtgaagtgggcacagtgttgcccgaaaaagggtgctctggggcttgcctgagacgggacgcgtggaaatgccctgccgaatatgaatggggcgatggcctcgcgggacggagcagc

SEQ ID NO: 801580 - DNA, 120 bp, Artificial Sequence
  ENSG00000271780_3 (sequence is synthesized)
ccaggaaagctgaccgtgggctgggttgtggagcggagccccagggcctcggctgacttagcggccagtcgtacatagtgggtatgcggcgggcccgacgccagtcgttgtggaccactg

SEQ ID NO: 801581 - DNA, 120 bp, Artificial Sequence
  ENSG00000271780_4 (sequence is synthesized)
gacccacagaccctccgccaggttgcctttgcgaggcaagaagcgaaggttggcgagccagctgggagtacccaccccctccatgcctggtggagtcacccaagccccagcgacaccccg

SEQ ID NO: 801582 - DNA, 120 bp, Artificial Sequence
  ENSG00000271780_5 (sequence is synthesized)
gcctgcccaaggtactggtgaccctggaggccggggccctggcttctcagtcagggtctcctccccatggcggcagagctgtctggcgttttgagccctttacaccaggggcaagagggc

SEQ ID NO: 801583 - DNA, 120 bp, Artificial Sequence
  ENSG00000271780_6 (sequence is synthesized)
tgcaggccagagccagcaaaagagaagaagcagagggaatgagaaacctagaaggtggaacgggaaggagggagtgaaatgggcaaaggcctccaaaaaaaacaacttccgcctcctaag

SEQ ID NO: 801584 - DNA, 120 bp, Artificial Sequence
  ENSG00000271780_7 (sequence is synthesized)
tttagtgcatttaactctataaatatctattgaacacctactggatgccaggcacttttctaggcactgggcagctagcattaaacagaaggcagaaacccctgccttcaacaaaatcta

SEQ ID NO: 801585 - DNA, 120 bp, Artificial Sequence
  ENSG00000271787_0 (sequence is synthesized)
ggtacagttaaatgacacaggacacacatccaatgtaaaatcaagttttatatgattcaaagagaaaagttacattacacatgctcgtttaaataatgtcaaagtctgttacataaaaca

SEQ ID NO: 801586 - DNA, 120 bp, Artificial Sequence
  ENSG00000271787_1 (sequence is synthesized)
aaagtgcacgaggggagcccacctctccagcggccgtcagcacccagagccgccagctgagggctccatgccgaatccatacacaaggtttgtggttctcagaagagttttcagacagga

SEQ ID NO: 801587 - DNA, 120 bp, Artificial Sequence
  ENSG00000271787_2 (sequence is synthesized)
actgtttccaacttaaaatctttcaacagacaaatggaggtggaagggggatggtttacacaaagtatttccaaatgtaatcaggaaatggaagtgtaaattaaaaccgttttcaacatg

SEQ ID NO: 801588 - DNA, 120 bp, Artificial Sequence
  ENSG00000271784_0 (sequence is synthesized)
ctccgtacacgttcggcaacgctcagtaagtggctcttcccgactccttggctctccggaaatcttcggtgactctcgcagccggctttgggggcccacctctcagttggtcgtctcttt

SEQ ID NO: 801589 - DNA, 120 bp, Artificial Sequence
  ENSG00000271784_1 (sequence is synthesized)
ccggaaaacttcggcgcctctcgagaaaaacgtcggacgcgctttgctctcttcagaagtctcttccgggacagctgtaccctctagtagtctctttttggaactcctcttcccctgact

SEQ ID NO: 801590 - DNA, 120 bp, Artificial Sequence
  ENSG00000271784_2 (sequence is synthesized)
gtcagagtcggaagggtcagacaatgaaccatgtttccgacatcctcttaagtgctaggataactaccatttagtgcattcagaagaaataaggttaaatgatgaaaatccttacagaaa

SEQ ID NO: 801591 - DNA, 120 bp, Artificial Sequence
  ENSG00000271784_3 (sequence is synthesized)
agaaaattgagactcagagctggcagagggggtggtaagatggggtggggagtgggggctggggaatccgggaaagtcttccggagacagaacctaaactgaattgggaataattaaact

SEQ ID NO: 801592 - DNA, 120 bp, Artificial Sequence
  ENSG00000271784_4 (sequence is synthesized)
ttttcagtttctacctgtttcattacaaagcttataataacacaggctgtagcaaattcttacaatacggaactttgcacacgcacacataaataaataaactacctatcccccttgtga

SEQ ID NO: 801593 - DNA, 120 bp, Artificial Sequence
  ENSG00000271789_0 (sequence is synthesized)
cgccccactgcactccagcctgggcaacaatgcaagacccctcaagacaaaacaagcttatttgatgggccttaaggaatattcctgtactccaactgttatgaaaataaaagagagtag

SEQ ID NO: 801594 - DNA, 120 bp, Artificial Sequence
  ENSG00000271789_1 (sequence is synthesized)
attcctgtactccaactgttatgaaaataaaagagagtagatgaaaagatcgactacacagctacaagacttaactaatgtaagatccggaaaagatgtttaggtgatcagggtggcaca

SEQ ID NO: 801595 - DNA, 120 bp, Artificial Sequence
  ENSG00000271789_2 (sequence is synthesized)
cttgatggcaggtagggtgcatcatctgagactgagggtataacccatgacagtcagtggggttgaacggagtccacaagctctctgggtggcctgctccattggcaagatgagggccac

SEQ ID NO: 801596 - DNA, 120 bp, Artificial Sequence
  ENSG00000271789_3 (sequence is synthesized)
ctcctctaagaattcttcatatctttaaaactgctcttcacatttttatgttttttccaaatttattgtccttcctcaaagacactatgttgtgtccatatagaattgattattacatga

SEQ ID NO: 801597 - DNA, 120 bp, Artificial Sequence
  ENSG00000271789_4 (sequence is synthesized)
aacaaatattaatgtttcacttaattcattaaacattaaggaaatgtttaatgaagttatttgatgtctctgagcttctggctccttttcaggtaaatgaaaacatcctaaagaatgaaa

SEQ ID NO: 801598 - DNA, 120 bp, Artificial Sequence
  ENSG00000271789_5 (sequence is synthesized)
ctgtttcttcagccatacttaaattttttttttctgtgatctgagagacaaaactttattaatagccaatcatctaaaaaggagggaaaattatggaacacaggaagatccttacaagaa

SEQ ID NO: 801599 - DNA, 120 bp, Artificial Sequence
  ENSG00000271789_6 (sequence is synthesized)
aatttcttggtaaaatagttccaaatttcagcaccctccccgatgagttagtgaaacagcaaatggacctcactaaaaggcagttaagctacagactctgaggacagttacaaaggagga

SEQ ID NO: 801600 - DNA, 120 bp, Artificial Sequence
  ENSG00000271789_7 (sequence is synthesized)
gctttcctgcagaaaacagaaccagagacaggctgagtgtgagctagttttaggcattcatgttgaataaccatttgttaatatggctgtatccaattataatcaatcaatcaggttaaa

SEQ ID NO: 801601 - DNA, 120 bp, Artificial Sequence
  ENSG00000271789_8 (sequence is synthesized)
aatggttattgtgttgaaaatattgtgtcaagttactatgatgagaaagagatgatgtgtgtggaagtcctgacagcacagaacttgtaagtaacagaatttcatcaatctacacatata

SEQ ID NO: 801602 - DNA, 120 bp, Artificial Sequence
  ENSG00000271789_9 (sequence is synthesized)
aaagggggaaaaaaccccaatgctgaggactagccccagcctcccaaacaaaaaaaaatccccagaagtggaaattcattatgtcttaacaagacttgaaataaattatgttcagacaca

SEQ ID NO: 801603 - DNA, 120 bp, Artificial Sequence
  ENSG00000271788_0 (sequence is synthesized)
cagaattgatctcggtggcagcacctctggtgggtcaagcctgcagcttctcctgagcagtttcgttagtttttgggtcctagaaccgctagtggtaccatagcggctcttcatgggttg

SEQ ID NO: 801604 - DNA, 120 bp, Artificial Sequence
  ENSG00000271788_1 (sequence is synthesized)
caggacgtttgccaactccaccccacgctgcctgcctaggttcggctacggggcaaaaagaacagactcctgcaaaggaagaaccccgagggttggatatttaggaaagacgtcctttgc

SEQ ID NO: 801605 - DNA, 120 bp, Artificial Sequence
  ENSG00000271788_2 (sequence is synthesized)
agtgccacgtccgcggatgctgcacttggctttctcctccctcctggggaagaattgatgtttacttctccccactctccgggccgcattatccagggatttcggggactagattacctg

SEQ ID NO: 801606 - DNA, 79 bp, Artificial Sequence
  ENSG00000271788_3 (sequence is synthesized)
gggcgtggtggcgcgcgcctgtagtccgagctacttgggaggttaaggcaggagaatagcttgaaccgggaggaaacag

SEQ ID NO: 801607 - DNA, 120 bp, Artificial Sequence
  ENSG00000271788_4 (sequence is synthesized)
tccgtctcaataataataataataataatgtctatccatgttctttaaaaaagtttgccttcactattctttatcaacgtttggttgtctttctcaataaaataatagagaaacatcaaa

SEQ ID NO: 801608 - DNA, 120 bp, Artificial Sequence
  ENSG00000274363_0 (sequence is synthesized)
ctaataacacccagtatgcaaggcaggcggtggaaccgaatcccagccatgcaacttgtgtgctgtgcaacgatggcaagttaacctgagcctgtttcctcatgagaaatgattaccttg

SEQ ID NO: 801609 - DNA, 120 bp, Artificial Sequence
  ENSG00000274363_1 (sequence is synthesized)
gaagctgcttctaacaatgtgactagaacctttaggaaaaacacatagcacaagcttgccacagaagagaggctcaacaaatagaaaaacttgatttccagcgctcttgttgggaataaa

SEQ ID NO: 801610 - DNA, 120 bp, Artificial Sequence
  ENSG00000274363_2 (sequence is synthesized)
tggaagtcactgtgaatattgcatactgccgagaagaggaaaaaaatcaagtttcttgcctaggactttctgtgcagctcctatgtcttagaagatgtgtttggctcccttttgtgaaag

SEQ ID NO: 801611 - DNA, 120 bp, Artificial Sequence
  ENSG00000274363_3 (sequence is synthesized)
acctgtgtgaacagaattcaaaattctttcatcatttcgctaaagctcagtgaggagtgtcaactccacaagccaaaaagcctaatcctacgttggcagccagattacacacatctgaaa

SEQ ID NO: 801612 - DNA, 120 bp, Artificial Sequence
  ENSG00000274363_4 (sequence is synthesized)
ttgaaccaccagaaataccatacccagaaaatcatttgatctgtgaactgaatcctgtgagggttccgggcctcctcaaggcagaaagggttcaatttgaaaggcggttattagccctgt

SEQ ID NO: 801613 - DNA, 120 bp, Artificial Sequence
  ENSG00000274363_5 (sequence is synthesized)
cccatgagagggagcgggagatccacatctttcctgggagcctcgtgccttgcacacaccatcgaaaacctgttcatctgcactggaagcagcatgcaaataaaacgttttggctctata

SEQ ID NO: 801614 - DNA, 74 bp, Artificial Sequence
  ENSG00000272789_0 (sequence is synthesized)
tgcgcctggctaatttctgtgtttttagtagagggggtcttgccaccttggccaggctggtctcaaactcctga

SEQ ID NO: 801615 - DNA, 120 bp, Artificial Sequence
  ENSG00000272789_1 (sequence is synthesized)
ggaggggtgtggggaccctttaggaggagggaggaaggccatcccgtcccctcattagcatctgtagggcggggctgcgctagctgtggaaggcgctgtctgtgtgccccagcccaggct

SEQ ID NO: 801616 - DNA, 120 bp, Artificial Sequence
  ENSG00000272789_2 (sequence is synthesized)
cgctcttgccagcctatgccttgcaggattgtgactcgttccgtgcaggagggcatcttgctccgagtctgtgtcccgggtgcctctcttctttcttctctggagctcttctgtgtctct

SEQ ID NO: 801617 - DNA, 120 bp, Artificial Sequence
  ENSG00000272789_3 (sequence is synthesized)
gggggcctctctcggggaccacctctagctccttgtcttccagtctccttccttcctctttcctaactccccaccttcacccgttcctctccccagcaccactgtgctgtgtccatcacc

SEQ ID NO: 801618 - DNA, 120 bp, Artificial Sequence
  ENSG00000272789_4 (sequence is synthesized)
gactataatatccaaccgaactctcttttcactgttgaatacagcgttatttcttagaaaagtggctgggtactattcatatactggctttgggaatgtaataaatgcatcaaatctgaa

SEQ ID NO: 801619 - DNA, 120 bp, Artificial Sequence
  ENSG00000272787_0 (sequence is synthesized)
gccctcagccaggctgtcccaagctgtggcgctcctcactgaaaactgctgtcacctctgagaggggcatgttggcttatggcacagacattagtggtgggggggccaccctgtgcccaa

SEQ ID NO: 801620 - DNA, 120 bp, Artificial Sequence
  ENSG00000272787_1 (sequence is synthesized)
cctttgagaaaacaggtgtctgaggtactgtgtccttagggagtctgcaattaggaggaggcagattgcccctcagcccacagactgacagagatgatggagtgtgcagcacacacgatg

SEQ ID NO: 801621 - DNA, 120 bp, Artificial Sequence
  ENSG00000272787_2 (sequence is synthesized)
tgatgtgcagccaccattccacacctgagtgtcccactgccctgctgggggttggggaatgctcattaccgggatgagcacttttgcaaaatgggctgaggtgggaggatcacttaagcc

SEQ ID NO: 801622 - DNA, 120 bp, Artificial Sequence
  ENSG00000272787_3 (sequence is synthesized)
aacaaagtgcgaccccatctctacaaagtcatacaattagcccagcatggtggcatgagcctgtgatccaaactacatgggaggctgaggcagaaggtttgtttaggcccaggaggtcga

SEQ ID NO: 801623 - DNA, 120 bp, Artificial Sequence
  ENSG00000272787_4 (sequence is synthesized)
ggctgcaataatctgagtttccaccactgcactcactccatgctggctgcctttggattgttcctaattggatggttttgctttcaacagacactccaataaagtacacgaaataaagaa

SEQ ID NO: 801624 - DNA, 120 bp, Artificial Sequence
  ENSG00000272784_0 (sequence is synthesized)
gagacagataaggtctggatcagaaataaggcaatgaaggatgaaaagaaatggtttggcaagaatttgcaactgattagattaagaagagagaggcaaataagctagaaggaggaatct

SEQ ID NO: 801625 - DNA, 120 bp, Artificial Sequence
  ENSG00000272784_1 (sequence is synthesized)
gaggtgaatccaagattttagactgtcaaagggctggaaaaaatgaggaagtccaaagggggatctgagatgcagttgactttagaaattagagatacccagcagaaagttaaaggtcag

SEQ ID NO: 801626 - DNA, 120 bp, Artificial Sequence
  ENSG00000272784_2 (sequence is synthesized)
tatatggctgaatgtctatcatctaaaagtctgtagagaactgagtatgcaggagtgaaccttgggagggaaacatcagtgcaagtcaaatagaattaagtaagccatctataatcctat

SEQ ID NO: 801627 - DNA, 120 bp, Artificial Sequence
  ENSG00000272784_3 (sequence is synthesized)
ttttggccttccacaatttgatataattttatttctttgtacaatgtggtctacattttcagttatgtgtgtaagaattagttgttagtgtatgaaccgtcttcactatgctagtgagtc

SEQ ID NO: 801628 - DNA, 120 bp, Artificial Sequence
  ENSG00000272784_4 (sequence is synthesized)
agctctgtgtaggacaagatgaactggttttcaatattttaatatcccttgtttcttcaaggagatcagggattatacacttttcaaattctaaataaaagaatgtgctttgtttcttaa

SEQ ID NO: 801629 - DNA, 120 bp, Artificial Sequence
  ENSG00000272783_0 (sequence is synthesized)
gaaggggccggcggccacccctgggcccagccccggcctccccttgtatgcccccagccccccaccaatgccctcccctgcccctggtgggtcagagatctcctggaggctacagggagc

SEQ ID NO: 801630 - DNA, 120 bp, Artificial Sequence
  ENSG00000272783_1 (sequence is synthesized)
ggggccttgcagactcttcatttcttccttcccttatcaccgttagccattttcatgggatagagatacagaggagctcccattacaaagcgccattaaactgtcgtctgtgcaactgtg

SEQ ID NO: 801631 - DNA, 120 bp, Artificial Sequence
  ENSG00000237138_0 (sequence is synthesized)
agcggcctgcctgttcccggctacagattatgatgtctgtgcagctgcctttcattcacagcttccctgaatggtgccaaagttaattcctccaggaatagccccaccagtcacaaggaa

SEQ ID NO: 801632 - DNA, 120 bp, Artificial Sequence
  ENSG00000237138_1 (sequence is synthesized)
ggggggtaatgcccaggatgcccccttcattctcactcctggtgcgggcttgctgccatcaacagccaaagggagaagtcaggcagcagaaaagcttgggaggccctggaaaccccctaa

SEQ ID NO: 801633 - DNA, 120 bp, Artificial Sequence
  ENSG00000237138_2 (sequence is synthesized)
gccggtcttatctgttgcagccacggcgagagtcccacatcatccatcctcaggtgggaaccctgcaagcctgtattccaccatgggaagaccagcatgctgtgcattggctccagggag

SEQ ID NO: 801634 - DNA, 120 bp, Artificial Sequence
  ENSG00000237138_3 (sequence is synthesized)
caccacgcagtccccggcacttccaactctatgtcctttgcaggtgaagcagctctattagcaggtgtctgaagaaggttgcaggtgcgagcaggtagaaggaaagcacacagaagctgc

SEQ ID NO: 801635 - DNA, 120 bp, Artificial Sequence
  ENSG00000237138_4 (sequence is synthesized)
gggatgcacacacaaaatgggtaaaagggatccctggaggtctgggcagagcaccaggagtgtcctggggtgctcttaccctcctattggacagatgagtaaagtgaggtacagggacat

SEQ ID NO: 801636 - DNA, 120 bp, Artificial Sequence
  ENSG00000277550_0 (sequence is synthesized)
agttatagcccaataactggctcatcacttcacaggtagtcaaatgttcattacacttcggaaacttgcagcatgatttgcaaatattctgggtggggcgggggctgtctttcctttttt

SEQ ID NO: 801637 - DNA, 120 bp, Artificial Sequence
  ENSG00000277550_1 (sequence is synthesized)
atagggtccaaatgaagaatttctagtttttaattctgagaaagcccaatttatgtacttttttgttgcttgtgcttttggtgttatatttaagaaggctttgccgaaaccaaggtcatg

SEQ ID NO: 801638 - DNA, 120 bp, Artificial Sequence
  ENSG00000277550_2 (sequence is synthesized)
aagatttactcatattttcttcaaagaggtttatagttgtacttcttacttctaggtctatgatccattctgaattgatttttacatgtggtgtgaagaagaggtcaaacttcattcttt

SEQ ID NO: 801639 - DNA, 120 bp, Artificial Sequence
  ENSG00000277550_3 (sequence is synthesized)
tacatgtgaatattcagtcgttccagcactgtttgttgaagaggctattctttccccattgaagagtcctggcactgttgaaaatcaattggccataatgtgaggattagtgtctagaca

SEQ ID NO: 801640 - DNA, 120 bp, Artificial Sequence
  ENSG00000277550_4 (sequence is synthesized)
ctaaattccattcagttgatttatgtctgtccttatgacagtactacacaatcttgattgttgtagctctgtagtaagttctgaaattgggactcacagtgtgagtcctccaactttgct

SEQ ID NO: 801641 - DNA, 85 bp, Artificial Sequence
  ENSG00000277550_5 (sequence is synthesized)
tgtattggcatcttaataatactgttttccaatccacaaacatgggatatctttctctttatttaggccttcttttctttcaaca

SEQ ID NO: 801642 - DNA, 120 bp, Artificial Sequence
  ENSG00000277550_6 (sequence is synthesized)
gatatctttctctttatttaggccttcttttctttcaacaatatttgttattttcaagtatgacttttgcacatctattgttgaatttgttcataattatttattgtttatgatgctgtt

SEQ ID NO: 801643 - DNA, 120 bp, Artificial Sequence
  ENSG00000277550_7 (sequence is synthesized)
gaaaatgaaatcattttcttaattctattttttctattttttcctctttgtttttggattgttcattgctagtgtttagaaacataattaattttttttgtatattggtcttttatcctg

SEQ ID NO: 801644 - DNA, 120 bp, Artificial Sequence
  ENSG00000277550_8 (sequence is synthesized)
ccaccttgctgaacttgcttattagttctagaaattttttagtggattatttaggatttgctgtatacaagatcatgtcacctgtaaatatcaataaaatatcaatagttttacatcttc

SEQ ID NO: 801645 - DNA, 120 bp, Artificial Sequence
  ENSG00000277559_0 (sequence is synthesized)
ctgtgactgtgtccctttcccccatctgcagttgccgtttttgattttctttctttcctccccacttccatccggatcctctcctatttcctccttggatttctgtctctcaggttctgt

SEQ ID NO: 801646 - DNA, 120 bp, Artificial Sequence
  ENSG00000277559_1 (sequence is synthesized)
ctctcaggttctcctctccgtaaatattctctcctctccctctccgggatccgtcccctcccccacgtggatctgcctccccggcgccccctcctcattcatcctgggagatgaatttgt

SEQ ID NO: 801647 - DNA, 120 bp, Artificial Sequence
  ENSG00000277559_2 (sequence is synthesized)
cgccttattggacgccgaggccagagccgtgtgagggggctcggccagcgctgtgcattttcttcatgcatattgaggagatggtaatgagcgcgtttgcattgttgcttggaaatgttg

SEQ ID NO: 801648 - DNA, 120 bp, Artificial Sequence
  ENSG00000277559_3 (sequence is synthesized)
tgtttcctgccgcagttcgcagttcggagtgggcgagggtggtgtgggcccaggacagcccctcagtaggcacccggcctggcggccgccgctgaccctctccggattcccgggctctgg

SEQ ID NO: 801649 - DNA, 120 bp, Artificial Sequence
  ENSG00000277559_4 (sequence is synthesized)
gggccgggggaggaagcgaccttgccgagctcctgacccggccgccgcctcctcctccggtttgtccacaaaggccgtcgcgctcccctcattaaagcctcgttacaggaacccccggct

SEQ ID NO: 801650 - DNA, 120 bp, Artificial Sequence
  ENSG00000277559_5 (sequence is synthesized)
ggctcgcgacggctcctccgagcccccctgcccaccggcctctgagcccctcccctgatttgagaggcctgtgatggagcgccaccagaaaattagtgcctgacaacgtcgtctattggc

SEQ ID NO: 801651 - DNA, 120 bp, Artificial Sequence
  ENSG00000277559_6 (sequence is synthesized)
gtgacacgtcgcgggatcaaacacagccacattgttgtgtaccctgctccgctcgctcctcgttaatcttggagggcgccttggcatcgcttggccaggggaggttgtaggcaggccttt

SEQ ID NO: 801652 - DNA, 120 bp, Artificial Sequence
  ENSG00000277559_7 (sequence is synthesized)
cggctgtcaggactcggatcctgcctctgccctggctgagcccacttcagtcattcaggagggactgactgcccctccctgataaggtccaaggcgctcaggaggcgtgacccaggaacg

SEQ ID NO: 801653 - DNA, 120 bp, Artificial Sequence
  ENSG00000277559_8 (sequence is synthesized)
cctttcaataagctgaaggtttattaaagtcaggagcttcgaggggcaaactctgagttaagcttgtggggaatcgacgtgagccttgctgggaattcagaacatcaaggtctggccttg

SEQ ID NO: 801654 - DNA, 120 bp, Artificial Sequence
  ENSG00000277559_9 (sequence is synthesized)
tctggaattgtctggtgtcgagtttcccaaacttcaagcttcccgctactacctttattatttacttaacatttttccttaaattgactcatttttaaaatcaaagtacatatttttgga

SEQ ID NO: 801655 - DNA, 120 bp, Artificial Sequence
  ENSG00000277559_10 (sequence is synthesized)
aagaaaatctgatactaccactgtaaattgaaaagtagctgttactcaccagaaaaggaagtggtaaaagataaacacagctaaaaccaagcaatgttaatacatgttagccgttttgct

SEQ ID NO: 801656 - DNA, 120 bp, Artificial Sequence
  ENSG00000277559_11 (sequence is synthesized)
ggcttggaaagactcctagaggctcaggtgtgtgtgtgtcattagcaagtgttggaagtgttaaatactgaatctttctcggaagaaatgagacaattgaaaagagaatgtttctcacta

SEQ ID NO: 801657 - DNA, 120 bp, Artificial Sequence
  ENSG00000223761_0 (sequence is synthesized)
agctgctgccagctcctaccaccagagagggactgactccctttcccaaggagttctgatctgtgtgctttgggtcaggcaccaaggtccagaccagccaatagtgaacaggaaatcaag

SEQ ID NO: 801658 - DNA, 120 bp, Artificial Sequence
  ENSG00000223764_0 (sequence is synthesized)
ccgagtgcagagccagggcccagcacgaaggccttgggctccagtccgtgtgccccacatccctacatgagtgagggtggagggatggtgcctctgccacggccacggtgccgccgtcca

SEQ ID NO: 801659 - DNA, 120 bp, Artificial Sequence
  ENSG00000223764_1 (sequence is synthesized)
cgtcagctcactctcagcacaggtgctgtgtgacggcctcgggccacaccgcttgttctgaggcccctagcaggtcgggcttgtgctggctgcacattggctggtgagcttggcgggtct

SEQ ID NO: 801660 - DNA, 120 bp, Artificial Sequence
  ENSG00000223764_2 (sequence is synthesized)
gtgggcacggagagaccagaacgtgcgtaacaggcccgatgagggtgccaggctgtggcgacccccgagcttcagaggagaggggcaccagccgggggccctgcacaggcagcctcagag

SEQ ID NO: 801661 - DNA, 120 bp, Artificial Sequence
  ENSG00000223764_3 (sequence is synthesized)
agaggaaagctcacgatctgggagaactccaggcctggcccagtgaagacgtccttatcttcagcagacattgcccagtgcaaggggagccccagactgactttctgaggtcacagacgg

SEQ ID NO: 801662 - DNA, 120 bp, Artificial Sequence
  ENSG00000223764_4 (sequence is synthesized)
agcctcaccccatccaaggcggtgtcctggactcccactgtgctccccagagggcagggtacctggggcccagcccgggcggcaggagggactcagcccctcgcccaggcaggaagggtc

SEQ ID NO: 801663 - DNA, 120 bp, Artificial Sequence
  ENSG00000223764_5 (sequence is synthesized)
acaccagcctcacggaagacagctttatcttgttgatcggaagtctgccagcccaatttatgatggaacataagatctctaaatctgaatttacgctctgtagcgtaacgagaggtcaat

SEQ ID NO: 801664 - DNA, 120 bp, Artificial Sequence
  ENSG00000223764_6 (sequence is synthesized)
aagattaaacgggggctcaggagaggaccagcgtcaggctcactgcgaggtgctgcacagaaaacccacagccagagcccctgggcccagcccaggcaagaccagaaaaggagggggcag

SEQ ID NO: 801665 - DNA, 120 bp, Artificial Sequence
  ENSG00000223764_7 (sequence is synthesized)
gtgggagaccagcctggggctcccgggaagcccacgggatggaggcgggagagccaggaggcctggggcaaccctgggacggttcctggatcgaggagagcaggggggtgatgagggttc

SEQ ID NO: 801666 - DNA, 120 bp, Artificial Sequence
  ENSG00000223764_8 (sequence is synthesized)
cctcagggctggggagccttctcctggtctcagacccaccccccttcagctcccaagccctgggtgcccctggctctgaggacagttgggaatcttccctgaggcaggttcaaggacaga

SEQ ID NO: 801667 - DNA, 120 bp, Artificial Sequence
  ENSG00000223764_9 (sequence is synthesized)
gctctgaccctggcccagggctgctttgggtgcctatgaactcggcttctggctcagagcagttccctgcaccccttcctgagccctctgtcctctggaacccgtgggcagggtgaggga

SEQ ID NO: 801668 - DNA, 120 bp, Artificial Sequence
  ENSG00000223764_10 (sequence is synthesized)
cgggtgttccttctgggtgggggcctgggcgcccagccagcacgacgctggcttgctgagcttagggcagaccccgacttcagaatttatacaaataaatgcaatgaaaagtgctggcaa

SEQ ID NO: 801669 - DNA, 120 bp, Artificial Sequence
  ENSG00000223764_11 (sequence is synthesized)
atcaatcaaccatttattgagcccagatgtggtacagccccagccggagatgacccagaggtggggtggggaggagagagatggggaagctgagtccggggccacaggtgcagccaggag

SEQ ID NO: 801670 - DNA, 120 bp, Artificial Sequence
  ENSG00000223764_12 (sequence is synthesized)
gtgcaggtgagcagcgctcagaccagcctgtcagcctcagtcctgagcttacttctggtgatggagggagatatacagaaaagatcctgcagcctgcaggtgtggcacagctgatcttgg

SEQ ID NO: 801671 - DNA, 120 bp, Artificial Sequence
  ENSG00000223764_13 (sequence is synthesized)
gccaaggatgcacagctgtgtgtgtgcctggccaccggcaagggcacgtgggctcagaagcacaggtgtgcccacaccctgcgtgcctgtgtgtggcgcagcagctcccgacgcgcgcag

SEQ ID NO: 801672 - DNA, 120 bp, Artificial Sequence
  ENSG00000223764_14 (sequence is synthesized)
gacacacacacagcacagacagaccctcccatggccacacggacaaagatggcttcactatagacaccggtgcagacaggatgtgcactgctttccaaggcctgtgcgcaacacagactc

SEQ ID NO: 801673 - DNA, 120 bp, Artificial Sequence
  ENSG00000223764_15 (sequence is synthesized)
agggcctgtgggcatcagcaccgcccagacccaggcacacgtgatcctcagccaaggtggcctgtccagtcctggtgctgttggatggaaaggctaacctgggaggtcaggggctgtggt

SEQ ID NO: 801674 - DNA, 120 bp, Artificial Sequence
  ENSG00000223764_16 (sequence is synthesized)
atatcagctgggctccctcggacgctcctgcagaagtggccaggacctcaggaacgcacctgctcctggtcagacaggaggggctgccgtgatgcaacttgcccgtgcctttgggtgctg

SEQ ID NO: 801675 - DNA, 120 bp, Artificial Sequence
  ENSG00000223764_17 (sequence is synthesized)
tgagctggctgcgtgccacgtcgtttcgaggacgcaagaaggtgtttccaagtccagtctgtccaccgacctgaacctttaccattgaaagaacaaaggggtggggcccgagggaccctt

SEQ ID NO: 801676 - DNA, 120 bp, Artificial Sequence
  ENSG00000223764_18 (sequence is synthesized)
ccctgccgtcccgtggtgtgtagtcagggatgctcctgcagacacacaggtgggctctgactgccagatcgcaggggcggtgccgtggtcctcacctgccatgtcactagcgtgctgacg

SEQ ID NO: 801677 - DNA, 120 bp, Artificial Sequence
  ENSG00000223764_19 (sequence is synthesized)
cagacaccggcgagagctacagtgctcggcccggcacatcccagacaattcctctgtaaatgctgcagcagccagaggccccagcaccttgaggttaagcaaagagaaggaatagagttc

SEQ ID NO: 801678 - DNA, 120 bp, Artificial Sequence
  ENSG00000223764_20 (sequence is synthesized)
tccagagccccaaggagcgggagggtctgtcccaatggatgggctcagccaatttcaccctctcctccccctgccaacactgcggcctgcagcctggacctggcccgggttgtggagggg

SEQ ID NO: 801679 - DNA, 120 bp, Artificial Sequence
  ENSG00000223764_21 (sequence is synthesized)
accggggatgcagctgccacctgctgggcggacgtgggcctaggtggtcctcagccctcatgacaggagcccccgaagcactgttgcggcaccctctctgacattgggtgggagactctg

SEQ ID NO: 801680 - DNA, 120 bp, Artificial Sequence
  ENSG00000223764_22 (sequence is synthesized)
aggtgcgaggagctggagcccaggccagctggggaggggtggggtgccgtggctggaagttgctgttctcagacctggttctgagaccctctccaactgcatgggggggtccaggctgga

SEQ ID NO: 801681 - DNA, 120 bp, Artificial Sequence
  ENSG00000223764_23 (sequence is synthesized)
ccccagatgtgacggtgtatgtgctgggatgggagccccctgagagcagggcttttgttaattcaccggcaatcccacatgtctggcacgagataggtgctcagtcagtgaaaaccacac

SEQ ID NO: 801682 - DNA, 120 bp, Artificial Sequence
  ENSG00000223764_24 (sequence is synthesized)
acggggtcctccattgtgtccaggggagggtgggccctgctcacagccagactcctagccctgggcagccctgctgcctgcctgctccttccactcctaccacctgcccaggtgggactc

SEQ ID NO: 801683 - DNA, 120 bp, Artificial Sequence
  ENSG00000223764_25 (sequence is synthesized)
ctcacgatctgggagaactccaggcctggcccagtgaagacgtccttatcttcagcagacattgcccagtgcaaggggaggtcagtctcaggagacagtctcctggacagtggcgtggca

SEQ ID NO: 801684 - DNA, 120 bp, Artificial Sequence
  ENSG00000223764_26 (sequence is synthesized)
tctgtcctaaggccttgcctgcagcacagggtgccacagaggtcccctgtgacagagcctcatggctggggcaggcgggggtcgcacctgctcctgcatgaagaggcagataaagaccca

SEQ ID NO: 801685 - DNA, 120 bp, Artificial Sequence
  ENSG00000223764_27 (sequence is synthesized)
cagcatggtctctggggtcccacatcccaggtagagaatgacccaggtcgctggcgtctgtgccatctctgctccactgaccactcatgggggtcctggagatcctgacaccggtggccg

SEQ ID NO: 801686 - DNA, 120 bp, Artificial Sequence
  ENSG00000223764_28 (sequence is synthesized)
gggagcagcagcccaggcacaggccccagtgcacatgcagatcccaccgtgtctgcacaaggccttgccccaacgaggcctgggtgccgtgtgagggccgggacgctaacacagcggagg

SEQ ID NO: 801687 - DNA, 120 bp, Artificial Sequence
  ENSG00000223764_29 (sequence is synthesized)
gtacccacgcgtgagctgctctggggtccctccccgtgtttcttcctgtaatgaaacttgtacccaaatgggatatgcagggttgcactgtgcagtcgctgtgtgttttagggtctcata

SEQ ID NO: 801688 - DNA, 120 bp, Artificial Sequence
  ENSG00000223764_30 (sequence is synthesized)
cccgtgtgcgccagcaggaccacagctgtgaccggctgctccagaagaagtgggtgggttgagaccccaccggcagggtcactgggggtagcaggccctctgtcagcactgacttctgta

SEQ ID NO: 801689 - DNA, 120 bp, Artificial Sequence
  ENSG00000223764_31 (sequence is synthesized)
tcatgtcagggatttttagggcggcaagctcaggtggacaggcagttttattctgtttcccatgtcaagtccagccccagactgactttctgaggtcacagacggagcctcaccccatcc

SEQ ID NO: 801690 - DNA, 120 bp, Artificial Sequence
  ENSG00000223764_32 (sequence is synthesized)
aaggcggtgtcctggactcccactgtgctccccagagggcagggtgagtgcgtggcatccttttggcgggcgtgggtgcctctgtggacctggcgtgaggcttctctgtttctgagtctc

SEQ ID NO: 801691 - DNA, 120 bp, Artificial Sequence
  ENSG00000223764_33 (sequence is synthesized)
ctatggaccatctgtcttctgtgtggctgctgaggaatcacactggggtggccgtgccggtggctgaatgagaacaggacccccatgctgcacagccctgcttaacgcgggggtggcccc

SEQ ID NO: 801692 - DNA, 120 bp, Artificial Sequence
  ENSG00000223764_34 (sequence is synthesized)
agaagcgggtgggcgaggctgggcagcagggattggctgaaatcatatgcagagcccaagaggcaggggaaaggcggcaatttcagggtccctttgttcgccaggtacctggggcccagc

SEQ ID NO: 801693 - DNA, 120 bp, Artificial Sequence
  ENSG00000223764_35 (sequence is synthesized)
aggcgtaacgagaggtcaataagattaaacgggggctcaggagaggaccagcgtcaggctcactgcgaggtgctgcacagaaaacccacagccagagcccctgggcccagcccaggcaag

SEQ ID NO: 801694 - DNA, 120 bp, Artificial Sequence
  ENSG00000223765_0 (sequence is synthesized)
actccactctgaaggattcccttgtcttcatggcccagtttctctgacaccgtgtttattcttatgatgaccatggtggtaagcggggacttgacaagatcccttttgcccttttattgt

SEQ ID NO: 801695 - DNA, 120 bp, Artificial Sequence
  ENSG00000223765_1 (sequence is synthesized)
caacggaatttaatagaacaacttctttgaggctcttcaaacatgaactctccatttcaaactgcttccaaggctgagtctggagcattatccttcatttgaattacacatattgagtac

SEQ ID NO: 801696 - DNA, 120 bp, Artificial Sequence
  ENSG00000223765_2 (sequence is synthesized)
ggaacataatcaaccaggtgtcccagctgctgttcttctgggtccgccactgtgttcatgttaaggccacatttcccacaggctactcaagcagcaactgagcataacaggacaactaat

SEQ ID NO: 801697 - DNA, 120 bp, Artificial Sequence
  ENSG00000223765_3 (sequence is synthesized)
gcaggtccatttctggaacacatggaactccacaaccaggtgaccttgacctaaggactcccaattagagtgtcaaaaatgccttgaaactggatcgtggtttaagagtcttcctattca

SEQ ID NO: 801698 - DNA, 120 bp, Artificial Sequence
  ENSG00000223765_4 (sequence is synthesized)
atcctacattccctctccctttcacaggggtcagaccttcatgacaggctgaagagttccttctcctcttctcccttttactttacaaacatttctccaataaatttcttacacatctaa

SEQ ID NO: 801699 - DNA, 120 bp, Artificial Sequence
  ENSG00000223765_5 (sequence is synthesized)
aaggagttattatttattgtcacaaaagcaactaaacaagtttcatgtgagagcattatttgtcttaaaataaggtgctaggaatcactccactctgaaggattcccttgtcttcatggc

SEQ ID NO: 801700 - DNA, 120 bp, Artificial Sequence
  ENSG00000223765_6 (sequence is synthesized)
ggaacacatggaactccacaaccaggggtcagaccttcatgacaggctgaagagttccttctcctcttctcccttttactttacaaacatttctccaataaatttcttacacatctaatt

SEQ ID NO: 801701 - DNA, 120 bp, Artificial Sequence
  ENSG00000223765_7 (sequence is synthesized)
ccaagtatgtcactactaaacagaaatttctagtgaaagaaataaaccatatgctgcttttcccttcagcttattttaaccatatggtactagaaatcggaatgttacagtgctattaat

SEQ ID NO: 801702 - DNA, 120 bp, Artificial Sequence
  ENSG00000223765_8 (sequence is synthesized)
ttaaactccccgtgtttccagcactactgttccccagttaatttaaagaaatctttactactggcctggaaaaactgtctttgccaaataattaagaagcaacatgaggagagaacatgt

SEQ ID NO: 801703 - DNA, 120 bp, Artificial Sequence
  ENSG00000223765_9 (sequence is synthesized)
accactctaaacccagagttcacagaacacatactgaactattacaagagttctgtgtttgcacttaattctggcttggaacagagctcacaggttgtcactgatatcctactcactgtt

SEQ ID NO: 801704 - DNA, 120 bp, Artificial Sequence
  ENSG00000236423_0 (sequence is synthesized)
gaagtcggcctgtggccggccatgttcatgagggcgcgtcccttggcacccctgtagccgctatgtttcccacgcccgtggcaggcctgagagattatgtttgcggggggtgcttttttt

SEQ ID NO: 801705 - DNA, 120 bp, Artificial Sequence
  ENSG00000236423_1 (sequence is synthesized)
gtagcttctgtgttcgccatatttgaaaggggcagacggccatgttcgtgaacggcgcttcccttggtgcacctgtggccgccatgtttgagcgaggaccccgtggcaggccaggaccgt

SEQ ID NO: 801706 - DNA, 120 bp, Artificial Sequence
  ENSG00000236423_2 (sequence is synthesized)
ttctccggtgctatcccagagcatggcgcatccactcattcactcaagggaaaggcctgaaagtaaaattgtatcaacattaggtttggctaatgttgccattaggcaaacctaatttta

SEQ ID NO: 801707 - DNA, 120 bp, Artificial Sequence
  ENSG00000236423_3 (sequence is synthesized)
atgaagccaggaggttctcgttttgggccttgactggacaggtttgagctagaaaccacttgaagtattgatcatccatctgatcatcaagtttttttttttttttgagttggagtctca

SEQ ID NO: 801708 - DNA, 83 bp, Artificial Sequence
  ENSG00000236423_4 (sequence is synthesized)
tccctgcaacctccacctcccgggagcgtgtgccaccatgcctggctacttttttatattttcggttgagatggggtttcacc

SEQ ID NO: 801709 - DNA, 81 bp, Artificial Sequence
  ENSG00000236423_5 (sequence is synthesized)
ttccaagtagctgggattataagcgtgtgccaccatgcctggctacttttttatattttcggttgagatggggtttcaccg

SEQ ID NO: 801710 - DNA, 120 bp, Artificial Sequence
  ENSG00000236423_6 (sequence is synthesized)
tgagccgccactcccagcttgttcatccagtttttattgagcatctattatgtgccgatattgaggtagactctgggagtcacagcagtgaatgcagctgcctggatgcctcgtgagggc

SEQ ID NO: 801711 - DNA, 120 bp, Artificial Sequence
  ENSG00000236423_7 (sequence is synthesized)
cggagcctcactggggagatggacatgaacagcaaatgcacagcgaggaaagccaggggtctgtgcggggatgctgcaggacacgagaaccagccaagacctatggcccctgcagccacc

SEQ ID NO: 801712 - DNA, 120 bp, Artificial Sequence
  ENSG00000236423_8 (sequence is synthesized)
gtggacttggctgggcccttcatggtgacatccaggaatgcggctgagcgcgggtgttgacctcgctgtttgctggaatgtttgggttcttggaccatgtcagtgacggctgtgtcacca

SEQ ID NO: 801713 - DNA, 120 bp, Artificial Sequence
  ENSG00000236423_9 (sequence is synthesized)
tggccttgctatccccaggaaaacctaacatgcaccccgcgcctgtcctctgggactcccatcctcctcctttgtctgacccctgagaggcttaccgtttccccagggcagccccggctg

SEQ ID NO: 801714 - DNA, 120 bp, Artificial Sequence
  ENSG00000236423_10 (sequence is synthesized)
tggccctcggccctgctccaggcggccatgtcagtgtcctccctcggcgctcccaacaccctacctggctctgcgatggccaccctggactcctaaacaccccagaaagggaagagattt

SEQ ID NO: 801715 - DNA, 120 bp, Artificial Sequence
  ENSG00000236423_11 (sequence is synthesized)
aagaggaaccttgattcctgccattctgcgcagtcgtgggtccctcctccacctggggccctcaaggggatttctgtccgcactcccagccagcgacccctcccagttcctgcagctgga

SEQ ID NO: 801716 - DNA, 120 bp, Artificial Sequence
  ENSG00000236423_12 (sequence is synthesized)
gcggccctctctcctgaacattcgggcacctgcgtctgtcactgcagccagagggctggagtgtcttcggtcaactcgccatccctgccacggctggaggccacatgtcccagaacctac

SEQ ID NO: 801717 - DNA, 120 bp, Artificial Sequence
  ENSG00000236423_13 (sequence is synthesized)
cttgctgggatgggggttggggtggcagaggctgaacgcgtgtgaggtttgggggaggacaagcggagcggggatgtgtgggaggtcctggtgtccaccgtgaggatggtcacaccccat

SEQ ID NO: 801718 - DNA, 120 bp, Artificial Sequence
  ENSG00000236423_14 (sequence is synthesized)
agctttgttgatgctgtggctgtagcaggcccagtggctccgctgagcctccctagcaccagtgcccagtgaagtgtggggggctggacataggtggcctcagttcctgggactccccca

SEQ ID NO: 801719 - DNA, 120 bp, Artificial Sequence
  ENSG00000236423_15 (sequence is synthesized)
aagctctggtttcccccctgctcccaggcttcaggtggacgagttagtgaccacccccactccagacctccctcccctagccacccccacagttataaaaaccttcattctcatatggaa

SEQ ID NO: 801720 - DNA, 120 bp, Artificial Sequence
  ENSG00000236423_16 (sequence is synthesized)
gacagccgtctgctgttggaaagtatcgcagctcctcccgtgtctgccccgtgcacatgtgccaaggtcctgccttgaatgaaggacacagcggagaaggatgtaggctctgagcctgct

SEQ ID NO: 801721 - DNA, 120 bp, Artificial Sequence
  ENSG00000236423_17 (sequence is synthesized)
agggtgcctgagagactcacaggactacccctggggcagttggaagatgcccagaaacttcagggagccaccagcatggggcagagggtctcttctggagttggtggcatcagaatcagg

SEQ ID NO: 801722 - DNA, 120 bp, Artificial Sequence
  ENSG00000236423_18 (sequence is synthesized)
ttgagtgaatctggactgggccacatgatgatcgctgtacagagcagctgagctcctctgtctcagcctccctgagttcacagcaggctctgggcatcatctccgtgtcatcctaaggcc

SEQ ID NO: 801723 - DNA, 120 bp, Artificial Sequence
  ENSG00000236423_19 (sequence is synthesized)
ccctagaaccaagaggaaccgtgtggggttgggtggggtgtttactgtgcactcctgatgttccctcccagtgaaggacacccacctgggacactgtggcccctggccctccctccctcc

SEQ ID NO: 801724 - DNA, 120 bp, Artificial Sequence
  ENSG00000236423_20 (sequence is synthesized)
cctcggtggcagagagaacttcctggtgggtgacagcccatggtccacccttgccaggtggattcaggcaaaatacgccaggctgtgtgctgaaggcatcccatctcttcctcgtcccct

SEQ ID NO: 801725 - DNA, 120 bp, Artificial Sequence
  ENSG00000236423_21 (sequence is synthesized)
ctcggctggatcggggtggggcagcgggtggtgagtgtgtctgtcctgccagttcagcctccaactggtctgctgtggggcaggagcccacctggctctcctgcagagctgcatggcctg

SEQ ID NO: 801726 - DNA, 120 bp, Artificial Sequence
  ENSG00000236423_22 (sequence is synthesized)
ccttgcctcacccgtgacaacagagactttggttctccatctgcagacgcatttgtcttgtttcttattcggtccagaactcgggtgggaagaagggtgatgttatttgggtcccctcaa

SEQ ID NO: 801727 - DNA, 120 bp, Artificial Sequence
  ENSG00000236423_23 (sequence is synthesized)
gaccttgacaacagatagtttttaatatcacattttaaagccgccaactttctctcctccactttggtatttccctgatttttaaacagaatgtcggctctggaggcagaaagcttgggc

SEQ ID NO: 801728 - DNA, 120 bp, Artificial Sequence
  ENSG00000236423_24 (sequence is synthesized)
ttggatctgggccctgccacgcagtagctatgtggccagggaatacatagcttccggatctccgatccctacagtaaagtacagataaaaatacttttcattgatgtgtttgaaatcgaa

SEQ ID NO: 801729 - DNA, 120 bp, Artificial Sequence
  ENSG00000236423_25 (sequence is synthesized)
tgagatagttaatgaatgagtaagtgctctgcaaactccagagcggggtgcgcgttctgatctgtttcatagaatctgacacgtaccctttcccaccccagcgtctctgaattgggatgc

SEQ ID NO: 801730 - DNA, 120 bp, Artificial Sequence
  ENSG00000236423_26 (sequence is synthesized)
atctgacagcaagtgtggcatccgggctgcagttgccgttgtctgctcacatgtgaattaaaaaaacaatctcagcatatgaaatctctaatcgcgtatgaacttggtggttattcctgg

SEQ ID NO: 801731 - DNA, 120 bp, Artificial Sequence
  ENSG00000236423_27 (sequence is synthesized)
tgccgtgtggataactgcagcctcaacaccccagtccacaaaccacgtacggaccaactgaggaaggagtaggggttcttgttgttgcagaaaaccctccctcaacttgctctagaagat

SEQ ID NO: 801732 - DNA, 120 bp, Artificial Sequence
  ENSG00000236423_28 (sequence is synthesized)
accagcattcatacttggagtgggcatcagcagcttggaagacacagcagtgggcccctcttagcaggagtgccccatctcatggctcccgacgacgacccagagggtgatgctgcgtag

SEQ ID NO: 801733 - DNA, 120 bp, Artificial Sequence
  ENSG00000236423_29 (sequence is synthesized)
ctgcgtaggggctcacggacattggcactctaagtcagagatgctcaggtgaagggggctctgatggtgaggacattcagaaataacagagattggctgggtacggtggctcacacctgt

SEQ ID NO: 801734 - DNA, 120 bp, Artificial Sequence
  ENSG00000223768_0 (sequence is synthesized)
ccgccctcctgaccgcagcggctagaggttccattgcagacccggaggccgtggctgtggttcgcggcggtgctgtcgcgggcgccctggcgcagcccacgcaggggctcctgaggggag

SEQ ID NO: 801735 - DNA, 120 bp, Artificial Sequence
  ENSG00000223768_1 (sequence is synthesized)
acataagacatcagtcagtacatgtgaggtgtgcattggattgatccagaaagtcaggacgactccaagtggaaaggcctccagagacaggagacagtaaaagaaatggcctctctcctc

SEQ ID NO: 801736 - DNA, 120 bp, Artificial Sequence
  ENSG00000223768_2 (sequence is synthesized)
tgtcagagtggagtcccgagctcccagaaatgccacatgatggacaaacgcttgggggaaaaaaaaaaaaaaggagacctcagtcggacacaaaagcaggagctttaaaagaaaaaataa

SEQ ID NO: 801737 - DNA, 120 bp, Artificial Sequence
  ENSG00000223768_3 (sequence is synthesized)
gagataagttgaacttcaccaaaaaataagcgtttctggtctttgaaagacacttaaaatgaaaaggcaagccatcgatggggaaaatactcagaataatggatctgacagagggctgta

SEQ ID NO: 801738 - DNA, 120 bp, Artificial Sequence
  ENSG00000223768_4 (sequence is synthesized)
tctagaatatatgaagatattttaaaatccagtaatttgacataaagatggtagccagcctgacacacaaaggaacccgaatggccaatggacaggaagggaacccgtatggccgatgga

SEQ ID NO: 801739 - DNA, 120 bp, Artificial Sequence
  ENSG00000223768_5 (sequence is synthesized)
cagaaagggaagtgaacgtgaacatctcattggggatgccgttatcaccactggaatagtcaaaaacatggacaccaagtattggtgggtgagtggaatggcgggaacccacatacacgg

SEQ ID NO: 801740 - DNA, 120 bp, Artificial Sequence
  ENSG00000223768_6 (sequence is synthesized)
tcgatgggagctgcaccctttggaaatcatttcacagtttgtgctccatcctggccaaacccacagctggagtctttccaaaaacagtgacgggagtttccaccagggagtgcctcaaac

SEQ ID NO: 801741 - DNA, 120 bp, Artificial Sequence
  ENSG00000223768_7 (sequence is synthesized)
catcccgagatggggctggttgggattccagggagaggcactcgttgccagggtgatccgtccagagcacttcctaggggatctggcataaggagggctgcagtgtatcctcaggacaga

SEQ ID NO: 801742 - DNA, 120 bp, Artificial Sequence
  ENSG00000223768_8 (sequence is synthesized)
taggacagatagtgtatctttgggacagacggcaagatggggattccacccaggtctgtctgcagcgagttgatatgagagtttaaggaatttggaccagggctgctttgtttcagggtt

SEQ ID NO: 801743 - DNA, 120 bp, Artificial Sequence
  ENSG00000223768_9 (sequence is synthesized)
ttgggcaatgacctaaacacctttatcagtgcctgggaatgctcaaggcccagcttgagttcaggcctgcagggaaaacctgcaactggccgggctgcagagtggtcagggcacggaaag

SEQ ID NO: 801744 - DNA, 120 bp, Artificial Sequence
  ENSG00000223768_10 (sequence is synthesized)
ccagaagctggggacacacctgctgtatgatccagccgttcgtctttacctgggagaaatggcaccacctggctgaacataacttcttacactcccatgagtcctcctggacaggtgctg

SEQ ID NO: 801745 - DNA, 120 bp, Artificial Sequence
  ENSG00000223768_11 (sequence is synthesized)
tgacctcgtgcagccttggggaccctgacactcccacggacaggccaaggggtttgcctgggccctgtgggcacagagccccttgagatgggtttccctatgcagccccccaccccccac

SEQ ID NO: 801746 - DNA, 120 bp, Artificial Sequence
  ENSG00000223768_12 (sequence is synthesized)
cggggacccatggcactgcagccctcaccccccctctagggacccacaacactgcagccctcgcccccctccggggtcccacagcactgcagccctcgccccccatcggggacccacagc

SEQ ID NO: 801747 - DNA, 120 bp, Artificial Sequence
  ENSG00000223768_13 (sequence is synthesized)
actgcagccacgcccaggccaccgcctccaaacacagggccgctgctgtttctgtgaacagatacttcttgcagatgtcaatggttaatggatggggaggtgaccgcccaagcagaagcc

SEQ ID NO: 801748 - DNA, 120 bp, Artificial Sequence
  ENSG00000223768_14 (sequence is synthesized)
gaccctcttcatgaaggggccacaggtcaccccgaagcagaaatccatagaacagccaaggccacagcggaaccgagcaggccacgcctctgcctctgggccgctcagggccaggcctcc

SEQ ID NO: 801749 - DNA, 120 bp, Artificial Sequence
  ENSG00000223768_15 (sequence is synthesized)
ctgaccccactggctctattgtgaggactcagggtggagctctgctgggctcagtggccttcacagccggggtccacagacccgggtcctacgggcagtactgtgctcacctagaggcca

SEQ ID NO: 801750 - DNA, 120 bp, Artificial Sequence
  ENSG00000223768_16 (sequence is synthesized)
cggtccatgccctgtctccagcaggcccaagtcacttgtccatggcgaaggcccggccttgcttcaggccccgggcgcgctccccctgctccccctgcccaccgtttcttcccaggtgac

SEQ ID NO: 801751 - DNA, 120 bp, Artificial Sequence
  ENSG00000223768_17 (sequence is synthesized)
agaggcgggagagcaggcgagccacgtgccgggcgccgcagcagggggcactccaggctggcgcccctctgcctctccgtgggctctgacctttcttctccctgcctgggcagcctcctt

SEQ ID NO: 801752 - DNA, 120 bp, Artificial Sequence
  ENSG00000223768_18 (sequence is synthesized)
caggttggggagtcttttgttgacccctggattaaagtcctaatcaggaatgacccggaagaggtcttatgaggctttcctcaagagaagaaaatctgtccctgagtatcaggaagtggc

SEQ ID NO: 801753 - DNA, 120 bp, Artificial Sequence
  ENSG00000223768_19 (sequence is synthesized)
ccctttccctgcaccgcagtcttctgtgaccagcggctcacacagcgaaggaggggctggcggcccccacaggccactgccccgaggccgccacgagagggcaggagagcccttcctggg

SEQ ID NO: 801754 - DNA, 120 bp, Artificial Sequence
  ENSG00000223768_20 (sequence is synthesized)
agctctgtgccacggggaaacgcagccccgccaagcacagcatggatgtttccagcagggaatgaagagagaggccccagcacatgagagaagagcacactgggcggcccctgtcggagc

SEQ ID NO: 801755 - DNA, 120 bp, Artificial Sequence
  ENSG00000223768_21 (sequence is synthesized)
ctctcctgtccccagcgacccctgagagcaggccctgggcctctgcggcccctcccggagccactcttcaactgctgacctgctcccagctcttctgtgccccgcccagctccctgcaaa

SEQ ID NO: 801756 - DNA, 120 bp, Artificial Sequence
  ENSG00000223768_22 (sequence is synthesized)
acctcacctgaggggaaggaggccctgtttgggctcagacgcagcaggtgcagcttgtggtcctggggccacacctgttagagcccatccttctacccctgctgggccctgagtgtcgtc

SEQ ID NO: 801757 - DNA, 120 bp, Artificial Sequence
  ENSG00000223768_23 (sequence is synthesized)
cgtccccacagaactcagcagggtcaggtctgggcactccaggccgccagccccctgagtgagccctgggccggaggtagttgtgggtcacaggcaccccagccagaacacccacagtgg

SEQ ID NO: 801758 - DNA, 120 bp, Artificial Sequence
  ENSG00000223768_24 (sequence is synthesized)
gtagatgtgtggggaccggatgtgggtcctctcctgagagacgtgcagatggggagaggctgggcagttctcagcacagctggagcatctacctgtcaccacctcggagcctcctggccc

SEQ ID NO: 801759 - DNA, 120 bp, Artificial Sequence
  ENSG00000223768_25 (sequence is synthesized)
cgtgggggcggccctgggagcagggtcggcagtgaagagcagagaaaggcagttggggatgttgccactgtcccccgagaccaccctgccatggagacgagggagctgtcccttcgcgga

SEQ ID NO: 801760 - DNA, 120 bp, Artificial Sequence
  ENSG00000223768_26 (sequence is synthesized)
agggggctggccagcaagaaggacagagagtggactggccgaggaccgctgagctcaggacccaaggaggactcttctaggagacgagagagcgaacgccagggaccctgtgcaggcctg

SEQ ID NO: 801761 - DNA, 120 bp, Artificial Sequence
  ENSG00000223768_27 (sequence is synthesized)
ctcctccgtttgcaaggtgagttaccaggttcacgtgtttggagtttctggactcattgcggagttccacccctgcacgttgcggttccccagtaatcaaatcctggcttttgtgcctgg

SEQ ID NO: 801762 - DNA, 120 bp, Artificial Sequence
  ENSG00000223768_28 (sequence is synthesized)
aagtgcacagggaggggacaactttgtgagtcagtggcagggcagggagttctggttctccagagccagaggccgtgctcagaaggatttcttagcaggagccttggggcccccagtcaa

SEQ ID NO: 801763 - DNA, 120 bp, Artificial Sequence
  ENSG00000223768_29 (sequence is synthesized)
cacttccctacggacagcctggccagctctgtgcacggagcaggcgcccgagggtcccaggtcaccaagtgaccaagtcgtgaaggcgcccagggtttcctgggggtgcgctgatcccaa

SEQ ID NO: 801764 - DNA, 120 bp, Artificial Sequence
  ENSG00000223768_30 (sequence is synthesized)
ggaagccacgtgtggtcagcatgggggaggggaccagcgccccggggggcctgcagcacagcagggcctgccctcctgggtgagactggccggtgcctgtggggatctggggggctacag

SEQ ID NO: 801765 - DNA, 120 bp, Artificial Sequence
  ENSG00000223768_31 (sequence is synthesized)
tgccctggacacatcccagcggctgcacataggggaggcacagcctgggctcagggccagggtccactctgtggggatactagacccgggggtgacaatgccagctcagaacttcccccc

SEQ ID NO: 801766 - DNA, 120 bp, Artificial Sequence
  ENSG00000223768_32 (sequence is synthesized)
acacctgggctcctccagcctggcctttcctggggaagggagggcctgtccttcctcagcactgtgggagggaggcaaggcctgcggttgaagcgtccccaacacggggctccaggagag

SEQ ID NO: 801767 - DNA, 120 bp, Artificial Sequence
  ENSG00000223768_33 (sequence is synthesized)
aaagcaccacatctcagggaatgaaaacagagacggggccgcccagtgcactcggtggctcggaaatcattaaagaatgttctgagcccccgattttggctgtaaaagggactggccggc

SEQ ID NO: 801768 - DNA, 120 bp, Artificial Sequence
  ENSG00000223768_34 (sequence is synthesized)
ttgtgaccgctcccctgtctgtgccttgagacgggagtgttcagcgttgggggcagctttccctccaagaggagcttcacaaacatccgctctctgcggggccgcctctccgtggcctgg

SEQ ID NO: 801769 - DNA, 120 bp, Artificial Sequence
  ENSG00000223768_35 (sequence is synthesized)
ggccgctgtcggaggaaggctctccagctgccgtcatctgggaaacgtggggggcgagcaggggtcatggatggggctcactggggactgtgagaatctgtcccgcaggactttctggga

SEQ ID NO: 801770 - DNA, 120 bp, Artificial Sequence
  ENSG00000223768_36 (sequence is synthesized)
tggaaacgctggcagaggtgaagcctgcgtcatgtgcttcactgaacccggctgcttatttatgttcggagggctggtttcaaggactcctcgtctccctctccagtgatagcgtcagcg

SEQ ID NO: 801771 - DNA, 120 bp, Artificial Sequence
  ENSG00000223768_37 (sequence is synthesized)
gaaatgcagacggggacggggctgctgggtttcctccctggaatgaagcacagccggaggttttgctgattcaccagcaggccctgaccgctgagttcagggtaacaaatccacatggat

SEQ ID NO: 801772 - DNA, 120 bp, Artificial Sequence
  ENSG00000223768_38 (sequence is synthesized)
cctgagcccgcatagctccctgggcctcagcataaacatcgtaaacctccgggccctggcagtgtctgtttcatcccctccagagcaagtgcaagtgtgagatttagagattctaagagg

SEQ ID NO: 801773 - DNA, 120 bp, Artificial Sequence
  ENSG00000223768_39 (sequence is synthesized)
ggaagggccagaggtcttgaaaacgaccttcattcgttcattcattcgagaagtttgcgagggcctccgtgtcctgcgtttagtggggcctaggacgcagatgtgaagggcgctgctctc

SEQ ID NO: 801774 - DNA, 120 bp, Artificial Sequence
  ENSG00000223768_40 (sequence is synthesized)
aggagcagacagaggtggggatgaatcagtacacgcccacctcgggcccacaggggaggatgcgcggagctgtgggtgtggggaggagacccctctgcgtcatgctgacggtgtcggcag

SEQ ID NO: 801775 - DNA, 120 bp, Artificial Sequence
  ENSG00000223768_41 (sequence is synthesized)
agtcgccagcttctgcaggagcggtacctgtgggttcttctgtgacttgtttaaccgcatcttttgcccagtagttagtcttttcctgttgggacaccatgttggtagtttggaaatggt

SEQ ID NO: 801776 - DNA, 120 bp, Artificial Sequence
  ENSG00000223768_42 (sequence is synthesized)
ttcttccatccattgcctgccttttagctttgtcgatggtgttctgttgtaaattttggtgcacgtttaatgtgaacaatggttatgagacgagtgccatgagttcctgtgtgcctgtca

SEQ ID NO: 801777 - DNA, 120 bp, Artificial Sequence
  ENSG00000223768_43 (sequence is synthesized)
cccagcccggccacaagaggtgctgggggcagtgtccacacccccctttcttaggacgcctgagtctcagatgtgacttatagggtatttcttatggcaagacggttaaaacaaacttca

SEQ ID NO: 801778 - DNA, 120 bp, Artificial Sequence
  ENSG00000223768_44 (sequence is synthesized)
gcgtctcgtctgtccttctatggctgtggcttctgatgttctaatggcgttctcgtcagccggggctgagaacaaaataacatagactgtggggcttaaacagcagaaacttacttccca

SEQ ID NO: 801779 - DNA, 120 bp, Artificial Sequence
  ENSG00000223768_45 (sequence is synthesized)
cggttctggaggttgggagtcttggatcaccgtgtagcatggtcaggttcctggtgagggtgggattcctggctaacgtaacgaaggctccctctcctgataccgtgtcactgggggtga

SEQ ID NO: 801780 - DNA, 120 bp, Artificial Sequence
  ENSG00000223768_46 (sequence is synthesized)
ggcttcaacacaggaattttggggggacacatcagcattcactccatcacaggtggttagccctttaatccgcgggaattttgtttggggttgtgtgagatacgggtctaacgttttctt

SEQ ID NO: 801781 - DNA, 120 bp, Artificial Sequence
  ENSG00000223768_47 (sequence is synthesized)
tttcaaatacgtagccagttgtcacatcatttattgaaaaaggaatcttttctccaccgactgacatgaaatgctaccatcatcgtaaataaaattcccgtaaatacttgctgtctctgc

SEQ ID NO: 801782 - DNA, 120 bp, Artificial Sequence
  ENSG00000223768_48 (sequence is synthesized)
tgtctcagtcctgactcacgggctgagttctctttctgcacagtagcactggcattaactgtgacagctttacagcaggctccctccccgaggccgttcagaagcattcctcagcgggtc

SEQ ID NO: 801783 - DNA, 120 bp, Artificial Sequence
  ENSG00000223768_49 (sequence is synthesized)
ctacacgtttcctctcccatgtcaagtttagaagcagtgtcaagacccacagcagtcctgcgggagttttaagggatgcacggagtttatggggacagtttggaaaattgacattcatgt

SEQ ID NO: 801784 - DNA, 120 bp, Artificial Sequence
  ENSG00000223768_50 (sequence is synthesized)
gacttagagtcctactacttgaaaatggattccagctctcaacgaatttagagctttggcaaaatttttaagatttctttgatgtccgatgtgctcatttcttggtttgttcttgagtat

SEQ ID NO: 801785 - DNA, 120 bp, Artificial Sequence
  ENSG00000223768_51 (sequence is synthesized)
tttgtggatttttatgaaatccacaaagtttttgttataatgaatgggacactttcccataaaatgttgtaattctgtattgctgttttagtaaacactgttgattgatgtatattgatg

SEQ ID NO: 801786 - DNA, 120 bp, Artificial Sequence
  ENSG00000223768_52 (sequence is synthesized)
ttacacttggtcacttgtaatagtttgtccgttcattattttgaactttttaggtaaacagtcatataattatgcaaataattatagttgtgtctctgcctttctaatatttatactttg

SEQ ID NO: 801787 - DNA, 120 bp, Artificial Sequence
  ENSG00000223768_53 (sequence is synthesized)
tgtatattatcatgttggccaggactcaagcgtctttctcttgtttctgactaatgcgaatgattctaatgcaggggtttccaaactggtggccggggggccaaatccagccaatggtct

SEQ ID NO: 801788 - DNA, 120 bp, Artificial Sequence
  ENSG00000223768_54 (sequence is synthesized)
cttcttgtaaataaagttttattggaacacagttacacacatttttctacatattgtctgatggctactgtcacgccacagcaatgctgttaaatagtccagacagaggcggtattgccc

SEQ ID NO: 801789 - DNA, 120 bp, Artificial Sequence
  ENSG00000223768_55 (sequence is synthesized)
gaaaaacctagaatattcaccatctgagcttttacgggaaaatttgctaatatctgttctcatgcattaaatacaatgtttgttacaggttaaggaagtttctgactatttttagctttc

SEQ ID NO: 801790 - DNA, 120 bp, Artificial Sequence
  ENSG00000223768_56 (sequence is synthesized)
tgaatatcttgtggttgtgtgtgctttaaaattaggactaaatattaaatttaccagttgcttgttaggggcctatcttttgagatgcccaaagtttcccttttttagtctcttcatgta

SEQ ID NO: 801791 - DNA, 120 bp, Artificial Sequence
  ENSG00000223768_57 (sequence is synthesized)
gtgagttgtactaacagattctctaatgttgaaccgtctttgctttccggagatagactttacttgctcctggtggattggattctgtttgttaatacttttatttttgggtaattacat

SEQ ID NO: 801792 - DNA, 120 bp, Artificial Sequence
  ENSG00000223768_58 (sequence is synthesized)
acatccctattataaataatatgtcagcatcattgtgtgtagatgtgtgtgtgttattcttgccattagtttctcaggtttttggttaactattgatatggtttggatctgtgtccccac

SEQ ID NO: 801793 - DNA, 120 bp, Artificial Sequence
  ENSG00000223768_59 (sequence is synthesized)
ttgaattgtaatccccagtgttggaggtgtggcctggtgggaggtggttggatcatgggagtgaatttctcatgaatggtttagtaccttcctcttggtactgttctcgcaatagtgagt

SEQ ID NO: 801794 - DNA, 120 bp, Artificial Sequence
  ENSG00000223768_60 (sequence is synthesized)
tagtgagttctcgcgagatctggtcgtttaaatgtgtgtggcacctccctgaccctcctgcttttgctctggccatgtaagacgcaccagctcccctttcaccttctgccacgattgaag

SEQ ID NO: 801795 - DNA, 120 bp, Artificial Sequence
  ENSG00000223768_61 (sequence is synthesized)
caccagctcccctttcaccttctgccacgattgaaggtttcctgaggccgccccgaaggttcccatacagcctgcagaaccatgagccaatttaacctcttttccttataaattacccag

SEQ ID NO: 801796 - DNA, 120 bp, Artificial Sequence
  ENSG00000223768_62 (sequence is synthesized)
gccctcctgaccgcagcggctagaggttccattgcagacccggaggccgtggctgtggttcgcggcggtgctgtcgcgggcgccctggcgcagcccacgcaggggctcctgagggtccgc

SEQ ID NO: 801797 - DNA, 120 bp, Artificial Sequence
  ENSG00000274093_0 (sequence is synthesized)
tgaattaaaatcacagaaatttctaaaccatctataataatacactgtacaaaaactgaggtgaagaaaatatgttactcctcctgtaggagacagcttttaaaaaatgaaaatatatta

SEQ ID NO: 801798 - DNA, 120 bp, Artificial Sequence
  ENSG00000274093_1 (sequence is synthesized)
ctagccataaagtatctctcttttttcttttacctagttcttactccttgtcattgtgcttgagggaatttggcattgtgtgctatcacttcgattagggaaacgcaagatccttaacta

SEQ ID NO: 801799 - DNA, 120 bp, Artificial Sequence
  ENSG00000274093_2 (sequence is synthesized)
ggcaatgtatagaatattgagttgaaaagccatacctcttctctacaagtgtcaggatcttcgaatgggaatttgatttctataataataatttaataaaagtgatttctagcaacaaaa

SEQ ID NO: 801800 - DNA, 120 bp, Artificial Sequence
  ENSG00000236427_0 (sequence is synthesized)
agctgcagttcctgatactggtttttctacatgcttcagccaaagacatatactctttgatccctgagaacactatttcctcagtgtctttgcacatggagttcacttctctgcttgtga

SEQ ID NO: 801801 - DNA, 120 bp, Artificial Sequence
  ENSG00000236427_1 (sequence is synthesized)
taagtcttcaacatctggagtgttctggcaagaatttgtaggaaaaatttttgaatcatcagattaccatagcacaaccttggagaataaaactcttttgctctgaagctcatctaataa

SEQ ID NO: 801802 - DNA, 120 bp, Artificial Sequence
  ENSG00000236427_2 (sequence is synthesized)
cctgatatctctcaaatgaatctatccaatgacagggaataccccatgttaaacagctgattcttgttctgaatacgtttattatcttgtagttagtaaataaatcaattggacccttaa

SEQ ID NO: 801803 - DNA, 120 bp, Artificial Sequence
  ENSG00000236426_0 (sequence is synthesized)
tgcaacactctgctggccttcccagaggctctaccagttggtctcccatgctccttggtggatgagctccaggagatcagcgatccgctcagctcccccgtggacagcatgttttcagtg

SEQ ID NO: 801804 - DNA, 120 bp, Artificial Sequence
  ENSG00000236426_1 (sequence is synthesized)
ctcactaaacatgcattgaataagcagaggaactcgctgcacacacttacaagatacaagagagacagaaacgtccacccctttgagcacctaagtagtctccctgccttgagtactggc

SEQ ID NO: 801805 - DNA, 120 bp, Artificial Sequence
  ENSG00000236426_2 (sequence is synthesized)
cctgggcgggtcactctccccttgaagcctgtttactccaccaccaatgggtggtggacaagatgctctccagtcccctgagctaaggattctgtgaaaacctgacatcactgtgatcat

SEQ ID NO: 801806 - DNA, 120 bp, Artificial Sequence
  ENSG00000236426_3 (sequence is synthesized)
gactccgactacagcttcagaggaaaccaacctgccccaggagccaccagcttcccctccccacttagtggctgtgagactgtggctgagtcatgtaccatgctgagctgcctcatccag

SEQ ID NO: 801807 - DNA, 120 bp, Artificial Sequence
  ENSG00000236426_4 (sequence is synthesized)
atggatacaagaagacagccaactgtaaaccaggaaaaactgatgaggacatcagatctgctggcattttcatcttggacttccccacctccagaacaatgagagataaatgtctgttgt

SEQ ID NO: 801808 - DNA, 120 bp, Artificial Sequence
  ENSG00000236426_5 (sequence is synthesized)
aggaagaggaggattccgatgactccaaggcaacagtctctgggacactgaacccacttcacctcagcacaaaaacagctggcctcatccatcatgtgtagccgattcagcttctctggg

SEQ ID NO: 801809 - DNA, 120 bp, Artificial Sequence
  ENSG00000236426_6 (sequence is synthesized)
aaactccaaaaccctctcaaagggtcctcaacctctgccctcaaaccactatcgccgtgaggatgacgatgacaatgacgatgctgatgacaatgatggcctgtgtgcaacactctgctg

SEQ ID NO: 801810 - DNA, 120 bp, Artificial Sequence
  ENSG00000236426_7 (sequence is synthesized)
gccttcccagaggctctaccaggaatcccccacagcctgggacttctgctcctggaaacagttaaggctttggcaagaggctctcccacaaggcaattcgatctcccctgtctgtctgtg

SEQ ID NO: 801811 - DNA, 120 bp, Artificial Sequence
  ENSG00000236426_8 (sequence is synthesized)
actttctgtgaacagcctcctcataaatgtcagtcctgttggggggtggggagggggccttgatttattatatagcttttggacagttcctacagaaatattgccaaacagtggaataat

SEQ ID NO: 801812 - DNA, 120 bp, Artificial Sequence
  ENSG00000236426_9 (sequence is synthesized)
caactctttcactcaagccccctcagactttttttaatgaaagaataaagtacgcaatgagcctgagctaaataaataaaaatgccacacttttgcccaacagacctttctgcgtcactg

SEQ ID NO: 801813 - DNA, 120 bp, Artificial Sequence
  ENSG00000236426_10 (sequence is synthesized)
agaaatatttgcagacctcaacaatcttttatcttcgtgatgacattccagccttccaagtttcggacatcctaagaaattctttgatttgggctctctaatgatctcccatgaacaatt

SEQ ID NO: 801814 - DNA, 120 bp, Artificial Sequence
  ENSG00000236426_11 (sequence is synthesized)
ggtgaggatggtgggcagggggaggggtgggttacagcagatgctacctacagtgcctcctaaggccagactttaattactttaagtgtaaactactggctaaggttaaatgggtacagc

SEQ ID NO: 801815 - DNA, 120 bp, Artificial Sequence
  ENSG00000279064_0 (sequence is synthesized)
gtgtgaccctgcgaagtgcacctcccttgctcaaatcggaggggtctggtcctcactgaacagcccgctgaacatctcggtgtcctctcacatacacacccgcggggggtttccagagca

SEQ ID NO: 801816 - DNA, 120 bp, Artificial Sequence
  ENSG00000279064_1 (sequence is synthesized)
agctttcagggggtgatgcgggctgtggctccttcgtgaaaatgtcaccgtctgcagcgcctttcttgtgatatagaacttgacgggttcctgcgaattaagttgcaaatattgatgaag

SEQ ID NO: 801817 - DNA, 120 bp, Artificial Sequence
  ENSG00000279064_2 (sequence is synthesized)
ataatactactgccttgctgtcaaacagtaacagtcacctttttttgtatctccaattataaatgcaatgcgtactgtaaaaagaaaagaaaacatcataaatatctttataaagtaaaa

SEQ ID NO: 801818 - DNA, 120 bp, Artificial Sequence
  ENSG00000232500_0 (sequence is synthesized)
ggaagcggccgtaagaacagatgaagcttcactagctccccagccgctcgtctcctgctgtgtggcctgagatcaatactggccaacacatgatgggacatttttcttgaccctctccaa

SEQ ID NO: 801819 - DNA, 120 bp, Artificial Sequence
  ENSG00000232500_1 (sequence is synthesized)
tgtgaattacttccttttatatggaagattgtgagccctttgaagacctgatggaagctattggacagtagaagacacagagtgtacatgcagaataactgttgattgtgctgggagtgc

SEQ ID NO: 801820 - DNA, 120 bp, Artificial Sequence
  ENSG00000232500_2 (sequence is synthesized)
ctgtccctcctagaacaagatgtcctgcaacacttgtgctcagtgagtcaacttcccctaggtataaaacctagagtggagcatcttttggcgtcccttggctgtggtgctgcctagggc

SEQ ID NO: 801821 - DNA, 120 bp, Artificial Sequence
  ENSG00000232500_3 (sequence is synthesized)
atgtgcagatggactctacccaccctggccagcttgcctgagccttgtcggggagcagggaccctaggctcctgctgtcccctgatgccgatccgcgaataataaagttgcttttcttaa

SEQ ID NO: 801822 - DNA, 120 bp, Artificial Sequence
  ENSG00000232504_0 (sequence is synthesized)
aggaaggaaacaaagcttaaggcagtgattgataggttatttcttggacacagctgaacgtatactgtgcgcctgcaactttccggtggtttcggaccggacttcagtgaagccagtgaa

SEQ ID NO: 801823 - DNA, 120 bp, Artificial Sequence
  ENSG00000232504_1 (sequence is synthesized)
gtcggtcgacttgcagaacttcctttcagaggggcgtacacagcaccgcggccgtgtgcctgtgatctccttctgagtttgaaaaagaagatcctagacaccgagccaaatatgtttgca

SEQ ID NO: 801824 - DNA, 120 bp, Artificial Sequence
  ENSG00000232504_2 (sequence is synthesized)
taaaccgggagacttgtggctctattttgtaacagcttggcgcagggcagctggtttggagatgtctctgttcttcccttggtgggggtgccggaaaaaatgtgctgcctgggcgatcga

SEQ ID NO: 801825 - DNA, 120 bp, Artificial Sequence
  ENSG00000232504_3 (sequence is synthesized)
agttttaccataagactatttctggattgttctaacgtgaggatattgggagcattttgaaaatactggaggaaaagctgtcactgggcgatttaaatccgattccccttgtcggcaaag

SEQ ID NO: 801826 - DNA, 120 bp, Artificial Sequence
  ENSG00000232504_4 (sequence is synthesized)
ccaggcgctgatagcgttatggctgccatgagagtcagcagtatcccagcttccaaggatgggtgtaaggtgggggtgaggaagaaaaggaacttgaagctgcctcctgtcccagaatca

SEQ ID NO: 801827 - DNA, 120 bp, Artificial Sequence
  ENSG00000232504_5 (sequence is synthesized)
caagacatctgttaagcccttactacctcattcactccactcacattaggttgacccacttgggcagcaagacaagcaggcctgcaaacttccttttcttcatcagccacagagacatcc

SEQ ID NO: 801828 - DNA, 120 bp, Artificial Sequence
  ENSG00000232504_6 (sequence is synthesized)
agagcagggcgccccctgcagggacgcacccggggcgggggccaggctggggcgagccccccttggttctggagaggaaatgacatacagtttgtgaaagcataaatattcgtgaaaata

SEQ ID NO: 801829 - DNA, 120 bp, Artificial Sequence
  ENSG00000232504_7 (sequence is synthesized)
acagcagactaagatcagcctctagatctcaaagccttactgttatctctccaagtcagtggctgatctcagagaagcttctgaatagtgactagcaaagagtcactcaggctacttaca

SEQ ID NO: 801830 - DNA, 120 bp, Artificial Sequence
  ENSG00000249087_0 (sequence is synthesized)
gcggcctcccgcaccgaagggaccctgggcgtctgaggccctgatccgggcgggccttcaggatgttagcagtccctgtccggttgaaggtaggaagccgaaaacccgagtgggggacga

SEQ ID NO: 801831 - DNA, 120 bp, Artificial Sequence
  ENSG00000249087_1 (sequence is synthesized)
acagacttacctcctgtcccgcaaaagatccactagatcgtcgtctccaaaacctgagagaccgcgaacgggttccagagccgcagcgttctctcagacctggcgttcaggaagattcta

SEQ ID NO: 801832 - DNA, 120 bp, Artificial Sequence
  ENSG00000249087_2 (sequence is synthesized)
gagagcacgggcaggtcccggaggtctcagacccgcaggtagatctcgaattcgtagacttgcaggcgaagcccagatatcgtaggctgatcctaaagactcagattcccgaggcctcag

SEQ ID NO: 801833 - DNA, 120 bp, Artificial Sequence
  ENSG00000249087_3 (sequence is synthesized)
actcgcaggcagctcagaaaccacaggctcataggcagatccctgagaccacagaggctggccgagaaaccaccagcaactaagctgcattcagctggagttcctcggaacgggaggact

SEQ ID NO: 801834 - DNA, 120 bp, Artificial Sequence
  ENSG00000249087_4 (sequence is synthesized)
cgcagctctccctttccccagccaggatgagggaattagacaatggaagtcgagcactggggaaagcaggcattctgcgtggggaagagctcccagctcgctgtagccttggagagggaa

SEQ ID NO: 801835 - DNA, 120 bp, Artificial Sequence
  ENSG00000249087_5 (sequence is synthesized)
gtgatggaaaaagaatatagcagcttattagggactcccaccctcttcaagttataaatatccccagaaccttggctacgtgcccggaagcctgttgtctctaactgtacaggagacttc

SEQ ID NO: 801836 - DNA, 120 bp, Artificial Sequence
  ENSG00000249087_6 (sequence is synthesized)
tctgcctgggctgggaaaggggcctttcttttgttttgcagatagatccacccactgaggaacttgaaaatttttttcaaacataactccaggccttgcttttattagtgagtgtcctgt

SEQ ID NO: 801837 - DNA, 120 bp, Artificial Sequence
  ENSG00000249087_7 (sequence is synthesized)
tcccagtgcccggttatttatgattaaattactgaagtgtctaaaaagaacagaaggacccaccccagccataatgcagactttcccattccttctctttccacccgcaactgtggggct

SEQ ID NO: 801838 - DNA, 120 bp, Artificial Sequence
  ENSG00000249087_8 (sequence is synthesized)
aagaattcttaagatgtcacagaattataccatcctacctcatctaaagtcgatccgaggctggtccgatggtagtgggttaccagaacttaataacattaataactctaaagttagtat

SEQ ID NO: 801839 - DNA, 120 bp, Artificial Sequence
  ENSG00000249087_9 (sequence is synthesized)
acaaccccccactgctaaatttggctataaaaataaaattgatctgagcaccatataaaatggaatcctggagggtcccctagaggcagtatccccagtggaaagagcgtgggcctcaag

SEQ ID NO: 801840 - DNA, 120 bp, Artificial Sequence
  ENSG00000249087_10 (sequence is synthesized)
gctgtgtatcctttggaaagtcattgaatccaggcccatttccttttctctaaaatgagggtcatcatacctaaggatgttgtgaggcgtgagtgagatgattaaagcgttccagagagt

SEQ ID NO: 801841 - DNA, 120 bp, Artificial Sequence
  ENSG00000249087_11 (sequence is synthesized)
gcgctcttggatgatagccgttactttttattaaccctggctttggtggtaagggaaacttccagaaatgcttgtgggtatattggatagctcagaaaatctgggaaatcaaagtggctc

SEQ ID NO: 801842 - DNA, 120 bp, Artificial Sequence
  ENSG00000249087_12 (sequence is synthesized)
aatagctgtgaggaactgtgggtgactttatcctcacatcgtgtttcttccagaaattcagacgcaacagaggttaggccagtttggtgggttccagtgagcggtgtgttgagcctagta

SEQ ID NO: 801843 - DNA, 120 bp, Artificial Sequence
  ENSG00000249087_13 (sequence is synthesized)
gagcataggtacttggggttgccaaaaccccagcaagttgaggcttcacgctcagggaaacttctgggtcagaggttaataaccacgctccttggagcaaggaggaggggagcctttctg

SEQ ID NO: 801844 - DNA, 120 bp, Artificial Sequence
  ENSG00000249087_14 (sequence is synthesized)
actagctgaagtaattgcaggtttctaactgggcctaaggtgagctgagggcttgagcccctcagcccagcgggggtcccttttcatcccttctctgacagattgctttgtaaactttct

SEQ ID NO: 801845 - DNA, 120 bp, Artificial Sequence
  ENSG00000249087_15 (sequence is synthesized)
taggccttccccccacccctttgccccagtgctttaagcccttctttgtcttcttgctgtttcttttattcctcaggcctgcggggcgggggcggggtggcgcccaggacgactccccgg

SEQ ID NO: 801846 - DNA, 120 bp, Artificial Sequence
  ENSG00000249087_16 (sequence is synthesized)
gctcagcttggctgcctgcctccttctgtaagtgctttttttttcttcacctgggaccctctagaggttggaaagagaagagaggctgggagcggatggaaagcatgactgcatctggag

SEQ ID NO: 801847 - DNA, 120 bp, Artificial Sequence
  ENSG00000249087_17 (sequence is synthesized)
cccctggggggagtggggaagagggagtggaaggacagtggctgaggggcttcctgttgcagccttcagctggactcagggttggggtcactggaggaggaggtggcttcctgccccatt

SEQ ID NO: 801848 - DNA, 120 bp, Artificial Sequence
  ENSG00000249087_18 (sequence is synthesized)
gttctggactgcagtgtttcttgggaatacttactgtatgtggattttcagtaaccaacttggaaagctgtatttgttcccatgattcagcaaacaatgagtacctactgtgtgtagaag

SEQ ID NO: 801849 - DNA, 120 bp, Artificial Sequence
  ENSG00000249087_19 (sequence is synthesized)
cagcaggacagcctgtcatcactgggaaagaggccagaagagccgtttggccagggtctccaatttaggctttcaacattatctctaaagaaggttatacattatgtcggctccactggc

SEQ ID NO: 801850 - DNA, 120 bp, Artificial Sequence
  ENSG00000249087_20 (sequence is synthesized)
tgatgggatcaaagaccctccttgtatatccttaaacctgtactctattaccaggccactgtgcctgtggagcactgtaagttcctaccttttaataaattttataattatcttgtgagc

SEQ ID NO: 801851 - DNA, 120 bp, Artificial Sequence
  ENSG00000249087_21 (sequence is synthesized)
ggcctcccgcaccgaagggaccctgggcgtctgaggccctgatccgggcgggccttcaggatgttagcagtccctgtccggttgaaggcctgcggggcgggggcggggtggcgcccagga

SEQ ID NO: 801852 - DNA, 120 bp, Artificial Sequence
  ENSG00000249087_22 (sequence is synthesized)
ctggcggtgtcttggcttcggcgctttaaccctgcctgcggggcgggggcggggtggcgcccaggacgactccccgggctcagcttggctgcctgcctccttctcaaacaatgagtacct

SEQ ID NO: 801853 - DNA, 120 bp, Artificial Sequence
  ENSG00000249082_0 (sequence is synthesized)
agctggatccggggccccagccggagccgaaacctgagccagagtccgcggcgggcgagcccggagcccacgagccgcagacgcagcgctgcccaggagaagtgggcaggagagagggcc

SEQ ID NO: 801854 - DNA, 120 bp, Artificial Sequence
  ENSG00000249082_1 (sequence is synthesized)
aaacgaaaccgcttcgttcgttcgttcgttcgttcgttcgggcagcaatgccgcagaaaagcagcagacgtcggtccgcgccctggctctcttcgccccggaccccgacgtcccgccgca

SEQ ID NO: 801855 - DNA, 120 bp, Artificial Sequence
  ENSG00000249082_2 (sequence is synthesized)
gcgctcggaggtgcccccagcccaaggcagcctgctctcgccggcacaggtcgggctttttcttcccaggagagaaaccccaattcccttcgtaacgtccaataaagacattcccgcggc

SEQ ID NO: 801856 - DNA, 80 bp, Artificial Sequence
  ENSG00000249082_3 (sequence is synthesized)
cccgctctggcttcgtccgcatgcggcagggcccctccacggaggtcccagggcgcgctccccggcctcgaggcccggcc

SEQ ID NO: 801857 - DNA, 120 bp, Artificial Sequence
  ENSG00000249082_4 (sequence is synthesized)
ggccaggacccctagccggcgggactgcgcgccgcccctctccccgcaggtcccggcgaacacctagcttcccctccccccacccttcccgcctcccggccagtgtccccgccttccccg

SEQ ID NO: 801858 - DNA, 120 bp, Artificial Sequence
  ENSG00000249082_5 (sequence is synthesized)
cgacgggcggcggcggcgggaggagcgggccgagccgaggaagccccggcctcgcgcgctgggatgtagcgaaccagcaggggccgaagaaccgtgcagtgccagagccagagctggatc

SEQ ID NO: 801859 - DNA, 120 bp, Artificial Sequence
  ENSG00000249082_6 (sequence is synthesized)
ggccccagccggagccgaaacctgagccagagtccgcggcgggcgagcccggagcccacgagccgcagacgcagcgctgcccaggtggggagaagtgggcaggagagagggccgcccgct

SEQ ID NO: 801860 - DNA, 120 bp, Artificial Sequence
  ENSG00000271259_0 (sequence is synthesized)
cacttcagtttgtaccgcatctcacaccctgaagctagcagggtaaagagctctcaggagaatgaagaggcctctggcccattctagtatggtctctcccatcaggaggggaaaggcaaa

SEQ ID NO: 801861 - DNA, 120 bp, Artificial Sequence
  ENSG00000271259_1 (sequence is synthesized)
tattgcatgggacctggcaataagattgaatgagacataagcaaagtctgatcgcatccttatccccaccccttaacagccactatatcccttgaggcaagtgaagggccccagaagtga

SEQ ID NO: 801862 - DNA, 120 bp, Artificial Sequence
  ENSG00000271259_2 (sequence is synthesized)
ttgtctcatctgtaaaatgggtgttaaaatagcactcatatcttgggttatgaagatgaaagaagataatctatgtaaaggactgagcacagggcctgggacagttagtgatagatacat

SEQ ID NO: 801863 - DNA, 120 bp, Artificial Sequence
  ENSG00000271259_3 (sequence is synthesized)
gttagctactgttgctattttgtattccatgttcaatctatgatattgattaacctgtttattgattgctggattttcatttagtaaattaattttcaataaatgattttcacttaagca

SEQ ID NO: 801864 - DNA, 69 bp, Artificial Sequence
  ENSG00000271254_0 (sequence is synthesized)
tgggtccagcgagaaggcagagacgaacattttagaaatcaacgagaaattgcgcccccagctggcaga

SEQ ID NO: 801865 - DNA, 84 bp, Artificial Sequence
  ENSG00000271254_1 (sequence is synthesized)
tcagccggcccttggtccagcgagaaggcagagacgaacattttagaaatcaacgagaaattgcgcccccagctggcagagaac

SEQ ID NO: 801866 - DNA, 60 bp, Artificial Sequence
  ENSG00000271254_2 (sequence is synthesized)
agcatctccaggccctcctcactccagatgagccagacaagtcccaggggcaggacctcc

SEQ ID NO: 801867 - DNA, 62 bp, Artificial Sequence
  ENSG00000271254_3 (sequence is synthesized)
aacgaagaaaagaagggcatgctgatggaagtggaagagcctgaagtcttgcaggactcact

SEQ ID NO: 801868 - DNA, 120 bp, Artificial Sequence
  ENSG00000271254_4 (sequence is synthesized)
cagcttcgcccttgacgtggacaataggtttcttactttgatgggaacaagtctccacctggtcttccagatgggagtcatattcccacagtaagcagcccttactaagccgagagatgt

SEQ ID NO: 801869 - DNA, 120 bp, Artificial Sequence
  ENSG00000271254_5 (sequence is synthesized)
gttcaaatagccacggcccttgtgactccaaccagcctcacaagaacatcaacatcacatttgaggaagacaaagtcaactcaactctggttgtagacagagaatcctctcatgatgaat

SEQ ID NO: 801870 - DNA, 73 bp, Artificial Sequence
  ENSG00000271254_6 (sequence is synthesized)
gacaaagtcaactcaactctggttgtagacagagaatcctctcatgatgaatgtcaggatgctgtaaacattc

SEQ ID NO: 801871 - DNA, 76 bp, Artificial Sequence
  ENSG00000271254_7 (sequence is synthesized)
taactcaactggcctgcttcctggccaaccagcagaacaaatacaaatatgaagagtgcaaagacctcataaaatc

SEQ ID NO: 801872 - DNA, 81 bp, Artificial Sequence
  ENSG00000271254_8 (sequence is synthesized)
tttgtaactcaactggcctgcttcctggccaaccagcagaacaaatacaaatatgaagagtgcaaagacctcataaaatct

SEQ ID NO: 801873 - DNA, 72 bp, Artificial Sequence
  ENSG00000271254_9 (sequence is synthesized)
tggctgaggggtgtagactggcacagcaacttttccaaaagctcagcccagaaaatgacaatgattctgccc

SEQ ID NO: 801874 - DNA, 65 bp, Artificial Sequence
  ENSG00000271254_10 (sequence is synthesized)
tcgactctctcaattcctcctgaaatgttggcctcgtaccagtcttacagcgacatcggtgggat

SEQ ID NO: 801875 - DNA, 74 bp, Artificial Sequence
  ENSG00000271254_11 (sequence is synthesized)
gtgggcatggctctattcctattctcagaccatgccagtggcaacctgtgctcagtctgaagacaatggaccca

SEQ ID NO: 801876 - DNA, 120 bp, Artificial Sequence
  ENSG00000271254_12 (sequence is synthesized)
cagcacatgccgggagtgatcagtcagacattttaatttgaaccacttatctctgggtagctacaaagttcctcagggatttcattttgcagtcatgtctctgagcttctatacctgctc

SEQ ID NO: 801877 - DNA, 67 bp, Artificial Sequence
  ENSG00000271254_13 (sequence is synthesized)
ctacaaagttcctcagggatttcattttgcagtcatgtctctgagcttctatacctgctcaaggtca

SEQ ID NO: 801878 - DNA, 71 bp, Artificial Sequence
  ENSG00000271254_14 (sequence is synthesized)
gatggtggtgacatggacttgtttatagaggacaggtcagctctctggctcaatgatctacattctgaagt

SEQ ID NO: 801879 - DNA, 120 bp, Artificial Sequence
  ENSG00000271254_15 (sequence is synthesized)
aaaattagaaatgtcctgtattccaatgatcatcctgtaaacattttatcatttattaatcatccctgcctgtgtctattattatattcatatctctacgctggaaactttctgcctcaa

SEQ ID NO: 801880 - DNA, 87 bp, Artificial Sequence
  ENSG00000271254_16 (sequence is synthesized)
attatattcatatctctacgctggaaactttctgcctcaatgtttactgtgcctttgtttttgctagtgtgtgttgttgaaaaaaaa

SEQ ID NO: 801881 - DNA, 120 bp, Artificial Sequence
  ENSG00000271252_0 (sequence is synthesized)
accacaagcctcctcgctgagaaagcaagcggactcacagtttttcagggagcctgcagccgtgatccagttctttcaaagggtctgtgagtctttcagctttcctgccagactaacgaa

SEQ ID NO: 801882 - DNA, 90 bp, Artificial Sequence
  ENSG00000271252_1 (sequence is synthesized)
agaagacccaagtaaataaaatcagagaagaaaaagaaaacgttacgattgatattgcagaaatccaaaggatcattattggctactgtc

SEQ ID NO: 801883 - DNA, 120 bp, Artificial Sequence
  ENSG00000270124_0 (sequence is synthesized)
tgagttcctgcgtgtgtgacttcaggcgtgtgtgtgtgtgtgtttgtgtgtgtgttggaatgggggtggggggcggtcctggaaaggccgagagccttggaatctgaggagtctgcagcc

SEQ ID NO: 801884 - DNA, 120 bp, Artificial Sequence
  ENSG00000270124_1 (sequence is synthesized)
cattcttgatactgctttactttccaaaaagttatgacaacaaaaccaccctggggcccagacctggaagccgtcagctatggaggaccctggaagcaggcagagaaaggtttggagttt

SEQ ID NO: 801885 - DNA, 120 bp, Artificial Sequence
  ENSG00000270124_2 (sequence is synthesized)
cagtgcgatgacaccagcgtgcctgcggaagtggctgtgtctcctcttgcctccttccccacccaattccgccccaggagcccagggatggaggcccaggagacggatcccacaagagcc

SEQ ID NO: 801886 - DNA, 120 bp, Artificial Sequence
  ENSG00000270124_3 (sequence is synthesized)
agcacccactccaccccaggagctcagcaaacatccacagagtgaacattccaagcaacatagtccaggagccacgttccagccatggggcctctgcactgctgttctcttcacatggcc

SEQ ID NO: 801887 - DNA, 120 bp, Artificial Sequence
  ENSG00000270124_4 (sequence is synthesized)
tgcccttcccccagaaagagagaagaggccctctctggttgtcccatcaaaactccacccttctctcaccctcctcccagctgtatcccttctctgcagccctaacatgcattccacttt

SEQ ID NO: 801888 - DNA, 69 bp, Artificial Sequence
  ENSG00000270127_0 (sequence is synthesized)
acggttgggagttcgagaccagcctggcccgcatggcgaaacccccatctctactaaaactacaaaaat

SEQ ID NO: 801889 - DNA, 80 bp, Artificial Sequence
  ENSG00000270127_1 (sequence is synthesized)
ctggtgggtgcctgtggcttcgggaggcggaggctgcaatgagccaggattgtgcctctgcactctagcctgggtgacag

SEQ ID NO: 801890 - DNA, 87 bp, Artificial Sequence
  ENSG00000270127_2 (sequence is synthesized)
gtagtttatctgggtgggcattccaaaatttccgcatagatgatcacgtgaaacaatcactgtgctaaatgtggaggaaaattcatc

SEQ ID NO: 801891 - DNA, 120 bp, Artificial Sequence
  ENSG00000270127_3 (sequence is synthesized)
gtgaaacaatcactgtgctaaatgtggaggaaaattcatcacgataatcacaaaatttgtatcagaaaaaaattacaaatgtactttgtttcatgtaattttatgagttggaagtatttt

SEQ ID NO: 801892 - DNA, 120 bp, Artificial Sequence
  ENSG00000270127_4 (sequence is synthesized)
cttaaattggaacactataagataatatctttaggaaatggatatgccacaataggaagtatagtggggcaagtcttgtttttctcaagggaaaagccaccagcctgctttcataggcat

SEQ ID NO: 801893 - DNA, 120 bp, Artificial Sequence
  ENSG00000270127_5 (sequence is synthesized)
tgataaaaccaggaagaaaataaagtcacaaccaaatagtatacactgtctctactgaattcttctaattccttcccaacagaagtctaaatcctgcttagcctaaacatatctatagcc

SEQ ID NO: 801894 - DNA, 120 bp, Artificial Sequence
  ENSG00000270127_6 (sequence is synthesized)
agcgatgggcaaattatatttgctgtcagcatgatagaataagaatcagaaaccccccagcagtggggtaagatcgtgcacttcatcccctcaaaatgctgtcaaccccattccctctcc

SEQ ID NO: 801895 - DNA, 120 bp, Artificial Sequence
  ENSG00000270127_7 (sequence is synthesized)
atgccctcaaacaactgcacagtcacttgttagtgaatttctcgttcagcgttttgtttttttctctccatacttaaagaccaaatcatttgtttgctctgaagaaaaagaaaaaacaaa

SEQ ID NO: 801896 - DNA, 120 bp, Artificial Sequence
  ENSG00000270127_8 (sequence is synthesized)
acaaaacaaaaaaccacccaccaaatcatttgaaatcactacccgttaaaaaaaatcaccagtggaactaaacagttgagtggtttgggatgtgttcgccatttctgtgtttgacctaca

SEQ ID NO: 801897 - DNA, 120 bp, Artificial Sequence
  ENSG00000270127_9 (sequence is synthesized)
cacaccagaatgtcacaatcattcattgctccagctactgagtgaacagggtgcaagacagcactggcttgggttgtatttttgcagccagttaactttgcatcaggtctacacagtcct

SEQ ID NO: 801898 - DNA, 120 bp, Artificial Sequence
  ENSG00000270127_10 (sequence is synthesized)
tgcagcctttgatttctccagttgtagagatttgaaatggggtgcccgggttcctctcgtttttccttcaacctacctagcatgcattttacacacattggaggagtcttatgcactgtt

SEQ ID NO: 801899 - DNA, 120 bp, Artificial Sequence
  ENSG00000270127_11 (sequence is synthesized)
tttctctgttgctgatggaggcaagaaggccttctaattagtctaacttaaacggacgggattcacctaacaaaagcaagaagaaaagcacaagaacaggtgtcttaatgcatttggata

SEQ ID NO: 801900 - DNA, 120 bp, Artificial Sequence
  ENSG00000270127_12 (sequence is synthesized)
atttatttggggtgtgtgcgtgtgtgtgtgtgtcttggtggaggtgggggccgtgttctcaccaagccttttcataatcaagtttgctttgcaaactttatggccttacacccagcagaa

SEQ ID NO: 801901 - DNA, 120 bp, Artificial Sequence
  ENSG00000270127_13 (sequence is synthesized)
cagtccttgctaataaaaggaggatgccctgtcacagttctctgtaaattatcatgtgttgggaagttctgttgatgcttagtttgatcttccatggtggacacatctgttctgtatgta

SEQ ID NO: 801902 - DNA, 120 bp, Artificial Sequence
  ENSG00000270127_14 (sequence is synthesized)
caaggcattacatgtgtgttttagcggatgggaattgaagcctttccacagtccttgtgctctgagatggctgttgagctctgctcagctgtcgtagctgaattctttttttgtgctgaa

SEQ ID NO: 801903 - DNA, 120 bp, Artificial Sequence
  ENSG00000270127_15 (sequence is synthesized)
cactgggcagcctcaccatgttgtcaatgtgcttctggggcccctgtgactgctgccagatgccatgcacacaagcagagtgcctttgcaggtttgtgcaccccttggcgagctggaact

SEQ ID NO: 801904 - DNA, 120 bp, Artificial Sequence
  ENSG00000270127_16 (sequence is synthesized)
gggagccctgtggggtgatctcgccttctcatggggggtcggggaggggagtgcctatttttaatcttgtctgtttgttgcaccatggaaatcactgtgatttgtatatatgccctagga

SEQ ID NO: 801905 - DNA, 120 bp, Artificial Sequence
  ENSG00000270127_17 (sequence is synthesized)
aatttttactgcagtctaatttatgtaataatgttgattccaggtttgtttaataaagctttgtatcttttaagaaaaaaaaaactgtagcatgtagaggaaagtgcactgggataatcc

SEQ ID NO: 801906 - DNA, 120 bp, Artificial Sequence
  ENSG00000270127_18 (sequence is synthesized)
aaggccaggctttgaggttccaccgctacattatgtgactcttagtctaaaccttttggtgtaatttctttggtctgattatttataagtagcagataataaatgaattttatactacaa

SEQ ID NO: 801907 - DNA, 120 bp, Artificial Sequence
  ENSG00000270120_0 (sequence is synthesized)
cgtatcaggaacaacaccaaatcagaggtgacttgtgccccatcagagactttaacaccccaaccagatgggaatttcaggacccaagaaatagaaagtggctgcagggttacaactact

SEQ ID NO: 801908 - DNA, 120 bp, Artificial Sequence
  ENSG00000270120_1 (sequence is synthesized)
gttggattcctgaggtagcacagtgtccaaacaggatttcagcactacccgtattgcttagagccccagccaaagatgtgaggttttgccctttggagaatctgtgcccctgaactcggg

SEQ ID NO: 801909 - DNA, 120 bp, Artificial Sequence
  ENSG00000270120_2 (sequence is synthesized)
ggcctctttccacatcttgggggcaggcaagggcagagggtgtgcctaggcctgcggatcagcatgcgacagattccccaacatccttccagcttgaaaggggattgccctgcttctatt

SEQ ID NO: 801910 - DNA, 120 bp, Artificial Sequence
  ENSG00000270120_3 (sequence is synthesized)
tagattgaagttaaaattgattcccagcctccaggggctttgggctacacctggatgaccttaattgaccctaagcatgggacaaaccacttcctgagagtattaggatggtatacatct

SEQ ID NO: 801911 - DNA, 120 bp, Artificial Sequence
  ENSG00000270120_4 (sequence is synthesized)
tctctgggggcaaagcaacaagatttatttttcatcatggaccaaacacatggatacccactagaaactgtgtagtgaattttgttaaccctgacatagggaccatggtctttaggttaa

SEQ ID NO: 801912 - DNA, 120 bp, Artificial Sequence
  ENSG00000270120_5 (sequence is synthesized)
agcataataacaacataatacataacatatatagcgaatatatatatgtattatatgcaatgaatgtaaatatgattatacccatcatggtcttggaggaaacagatgacacacttaaaa

SEQ ID NO: 801913 - DNA, 120 bp, Artificial Sequence
  ENSG00000224231_0 (sequence is synthesized)
agacacacatttggcaggctaccccagacccatgtggagcagagaaacactggtggcatggagggagtgcaagaccctgaagagaatatgctgaggtcctgaagtgtgcagctggggctt

SEQ ID NO: 801914 - DNA, 120 bp, Artificial Sequence
  ENSG00000224231_1 (sequence is synthesized)
aatgagctagataaaactgacattccataaaagaaatgagtagttcagcctgaaactcaaataattgcacaagtatttttcttcaagataatcatcatactttgttacagagcagaaata

SEQ ID NO: 801915 - DNA, 120 bp, Artificial Sequence
  ENSG00000224231_2 (sequence is synthesized)
cagctcttcctgcttccttctcatcttatcacccagaatatttgtcatagttaattatatgtgtctacttgaagggtgtttttggatgactccactctccctcatctcttctggaaaata

SEQ ID NO: 801916 - DNA, 120 bp, Artificial Sequence
  ENSG00000224231_3 (sequence is synthesized)
aaaggaatcagaaatttctagaagccaagaaccaaatgaacgaagtcaaaattatgccctaaggcaagccttcccctccatgcttagagctagctcaaggggtgtgaatgcctctacaga

SEQ ID NO: 801917 - DNA, 120 bp, Artificial Sequence
  ENSG00000224231_4 (sequence is synthesized)
tccagtttcttggtgccacagaagggtcagcattgactcttaccctgctcaatttgcttcaacccagtggggccttgttaaaaaagagcaagtatgtctacaattccagatctcatttca

SEQ ID NO: 801918 - DNA, 120 bp, Artificial Sequence
  ENSG00000224231_5 (sequence is synthesized)
tgcatagttggcagtgcataagaaactttatcagattccaaaatatatttttaaaaagtccaagaggctggggtcctttgtgattgttgtggatccacatcaggaagagaaaccctttaa

SEQ ID NO: 801919 - DNA, 120 bp, Artificial Sequence
  ENSG00000224231_6 (sequence is synthesized)
ggagaagaatatgatattttcatttgcataaaaacaataaaactctttcagcagcaatttcccctatataaaaagtgagaacacagcaccttggtgacacagacatctgttacttaaaca

SEQ ID NO: 801920 - DNA, 120 bp, Artificial Sequence
  ENSG00000224231_7 (sequence is synthesized)
tctgctcaaccagagacccctaaaccaaaattcaatgcgtggatagaacaatatgtgcaaagggtgctttcagtaatgatgggttttacctcccagcatcattatgaatttgcttgactt

SEQ ID NO: 801921 - DNA, 120 bp, Artificial Sequence
  ENSG00000224231_8 (sequence is synthesized)
ttttgtgttgttactttagcaaaatctcctccatcatttctctcagtaatgtcttttttctaacttaacctccacaatctgcaaaatcaaatggttccttctaagattcattgctgatta

SEQ ID NO: 801922 - DNA, 120 bp, Artificial Sequence
  ENSG00000224231_9 (sequence is synthesized)
gcactagcccttcaaaggctaaaccatggcttttgtttgtttctttctttttgcagatgcactttaatgacttcacaggacaaggctctaacactatctaggagagaaatgaaagttagt

SEQ ID NO: 801923 - DNA, 120 bp, Artificial Sequence
  ENSG00000224231_10 (sequence is synthesized)
tccttttttttcttttccagtagcacaaagggtccctgctgatgttttccagtgaagcaatactcccctagcctgagactgataagtgccttcagaagttaggcttacacttctaaatca

SEQ ID NO: 801924 - DNA, 120 bp, Artificial Sequence
  ENSG00000224231_11 (sequence is synthesized)
gcagttcatgaaaggcattacgaaaaactattatactgctataatgctataatggatgacagcacagttgtatatgttacaccttgaagtaagcagtaggattttccatcacttgataac

SEQ ID NO: 801925 - DNA, 120 bp, Artificial Sequence
  ENSG00000224231_12 (sequence is synthesized)
cttgaaactgctaaggtatcaaattgctatcatgaatattgtgcaggagaagaaataactcaggaagctgcctttgtgaataataatcagaaaactgcaacatttttactgagaaaatgg

SEQ ID NO: 801926 - DNA, 120 bp, Artificial Sequence
  ENSG00000224231_13 (sequence is synthesized)
atttgaggcactggtgtattgacaagctttctaacaggaaactaaggtagacattacaagtacatttacattgagctatgcatcaatccatcattcagcattcgatttgtaagttctaat

SEQ ID NO: 801927 - DNA, 120 bp, Artificial Sequence
  ENSG00000224231_14 (sequence is synthesized)
cagttaaaaatattattagcaaagaattatgtggtatgttaaaatttccaggataaagggtaaggagagcccacatgctattttgtagctgaaaacaataaataaaaatgtttgtttgat

SEQ ID NO: 801928 - DNA, 120 bp, Artificial Sequence
  ENSG00000278338_0 (sequence is synthesized)
tgagtcttagccaatctgagcagctgagcttgggtcaaccacaggctgccaactgatgagaccgtgttcaatggagcctaagcttcagaaggatggtctggctgagcactatatccaaag

SEQ ID NO: 801929 - DNA, 120 bp, Artificial Sequence
  ENSG00000278338_1 (sequence is synthesized)
tatcaccctgaactgaattggccctcatcctgtccagccaatctggaaatgtctggtttgtctcctgggagcactccccaaagaaccttctacacacagttctccaactcaaagtctgtt

SEQ ID NO: 801930 - DNA, 120 bp, Artificial Sequence
  ENSG00000278338_2 (sequence is synthesized)
ttcagggaatccaattcaagacagggatagttggaagtcacaaccgttccatggactttgatgttcttgatattcattcttggtattggcattatgagttgtgacactaggaggagtctc

SEQ ID NO: 801931 - DNA, 120 bp, Artificial Sequence
  ENSG00000278338_3 (sequence is synthesized)
agactcagcccggccctacccggccctgcatggcccagacgggcggaaagagcctgcggagctccagcccaaagagccggcaccgtcccgggactgcccgcaccgcgggggtgctccgag

SEQ ID NO: 801932 - DNA, 120 bp, Artificial Sequence
  ENSG00000278338_4 (sequence is synthesized)
ctgcggcgctgggctctggcaagcgcctcgcagtccgtgagactgtctgttcacctggatgcaccaggccttcacccgccgtttccctgcgatcccacagaatctcaggagttcagtaaa

SEQ ID NO: 801933 - DNA, 120 bp, Artificial Sequence
  ENSG00000278338_5 (sequence is synthesized)
tgccaagggttttaggagcatttgtcggtgtgactcttcagatgcttgccccaagtcttcgtttcttagttaaaggcccagtaagtatagggagctttccctgtattcggcttcagattt

SEQ ID NO: 801934 - DNA, 120 bp, Artificial Sequence
  ENSG00000278338_6 (sequence is synthesized)
cggaaatggagaaaacatgcacaagatgatgggaactttcacaactgtcttgattcattgtaaccacactagtgtttccaaaccgtacgtgaaagctttaccctttgtccttttggtggt

SEQ ID NO: 801935 - DNA, 120 bp, Artificial Sequence
  ENSG00000278338_7 (sequence is synthesized)
ggttgtttgtttctgtgttttattaccgcttcctaaattctaaggaaaaaattcacatcttagtgatagatggaaattgcttaaatatcagaaaggatccagatcaagcacttttctagt

SEQ ID NO: 801936 - DNA, 120 bp, Artificial Sequence
  ENSG00000278338_8 (sequence is synthesized)
catgctgtaatacaaaagttatataaagatgatttatgtctttagtaaaggaaaaagtaggacactggctaaggctgcctccctcttgtacattccaacatcggaaatggtcctaccaca

SEQ ID NO: 801937 - DNA, 120 bp, Artificial Sequence
  ENSG00000278338_9 (sequence is synthesized)
aagcaaactaagcctaatgtaattagactgcatccccaaaatgtcacagtgaattgactaaggcaaaatatttgagacaagttatacaagcaaacatcaaaaagaaggcagaagacctca

SEQ ID NO: 801938 - DNA, 120 bp, Artificial Sequence
  ENSG00000278338_10 (sequence is synthesized)
ctttcagctaaagaccttgctaattctagagctgccactgtctaaatacatagcacctaccctgcgcctgaccctgtgatgagtgctgagaagagagtgttagagtggagactgtaaaag

SEQ ID NO: 801939 - DNA, 120 bp, Artificial Sequence
  ENSG00000278338_11 (sequence is synthesized)
ggaagaacttgaggaatgaaggctgaaccaggcttctaacctagatgaggagacagtgaaaataaagtggagcctaagcttcagaaggatggtctggctgagcactatatccaaagtgcc

SEQ ID NO: 801940 - DNA, 120 bp, Artificial Sequence
  ENSG00000278338_12 (sequence is synthesized)
tcacacactgcctggcagaagaaacttctctatacatacaggaatttgacaacagtttgtgccacttatggatttaaagaactggcaccttgaatgggattctgaatagaattcgtacag

SEQ ID NO: 801941 - DNA, 120 bp, Artificial Sequence
  ENSG00000278338_13 (sequence is synthesized)
gcagcagggttaagagaaaaatgtgtagttattaatgttaatgagacatcctttgctacaagatgatggtgaggtctcaaggagatctaggttatatttacaagggatcactccaattac

SEQ ID NO: 801942 - DNA, 120 bp, Artificial Sequence
  ENSG00000278338_14 (sequence is synthesized)
tacatgtccgtcttttctaaaattagactttattgtgctctattaaaatagctttatctttagaagagagtttctcaaaatgtgatttggggaccacctgcatcaggaacacctgagaat

SEQ ID NO: 801943 - DNA, 120 bp, Artificial Sequence
  ENSG00000278338_15 (sequence is synthesized)
ttgttaaagttgcagattctagagccccatctcatgcttactgaaccagaatctctgggaatctgcatgtttatttaacaagtttttcaaagcttgcatgtttagccagcttttaaagta

SEQ ID NO: 801944 - DNA, 120 bp, Artificial Sequence
  ENSG00000278338_16 (sequence is synthesized)
aaagttttcaactgctttagttggtaaagggtttcttttgcagatgatgaaaatcttctggaattggatagaggtgatggcttcacaacattgtgaatatattaaaaaccactgaaatga

SEQ ID NO: 801945 - DNA, 120 bp, Artificial Sequence
  ENSG00000264659_0 (sequence is synthesized)
ttatacagggagcagctagcttttcttggctttcttgtttgttcctgagctgacaatagaaatctttgagaattggaactagtgcgctttgaaaacaaaactctcttcacttacagggca

SEQ ID NO: 801946 - DNA, 120 bp, Artificial Sequence
  ENSG00000264659_1 (sequence is synthesized)
tggatttttctgctaatttggattcttttgaggacaaatttgcataccattatcattatcattgtttcatcgaaaaaaaaataaaagaagcacctgtgggatagagaatgagagaggaac

SEQ ID NO: 801947 - DNA, 120 bp, Artificial Sequence
  ENSG00000264659_2 (sequence is synthesized)
ggactgtcagatctagagacctgcttccttcaatagctgattttctttcatttgtgtcagaaacaggcagcatggcacagagccatgcacctaaaactttattgtgcatatttattccta

SEQ ID NO: 801948 - DNA, 120 bp, Artificial Sequence
  ENSG00000264659_3 (sequence is synthesized)
gagatcttgttaaaatgcagattcagattcagccaatctagggtcagggctttctattgtaataagttccaaggtaatgccaatgctgctggtccatggactgcacactttgatgagaag

SEQ ID NO: 801949 - DNA, 120 bp, Artificial Sequence
  ENSG00000264659_4 (sequence is synthesized)
tggatgaatggatgagcagctcacgtttttctgccccccacccccagtctttctgagactgactttgtcctaggaattgttcgtccctctggaagctagtctggaattcagagacctgga

SEQ ID NO: 801950 - DNA, 120 bp, Artificial Sequence
  ENSG00000264659_5 (sequence is synthesized)
tcctctctggattttagtttcctcaaatataagctgggtgatagaggaggaggttgggttaggttatttcaaagcttgcattcatagactcttcaaagtgatgttttgattaaaaaactc

SEQ ID NO: 801951 - DNA, 120 bp, Artificial Sequence
  ENSG00000264659_6 (sequence is synthesized)
cacctataggatcacgtacagcttttcaaaggactagcaggtgaactggcattatcaaagcagaaaatataggggctggagcaggaaggcatggcaaagtcagagaaaaggaaggtgagc

SEQ ID NO: 801952 - DNA, 120 bp, Artificial Sequence
  ENSG00000264659_7 (sequence is synthesized)
cataataacttcttatggcaaatataacactttgattatttcagagtgatggattttgaattaaaactgttatcctgagagaggctactatttttcccaacaactatcttagggggagac

SEQ ID NO: 801953 - DNA, 120 bp, Artificial Sequence
  ENSG00000264659_8 (sequence is synthesized)
ctgcattactgaaaactgagttgcataagaaacttgagtgaaggaagcaatggatatgttagtgctttgaaataagcaaatgcttacaggggctgtgagggaatcatggctggagggaag

SEQ ID NO: 801954 - DNA, 120 bp, Artificial Sequence
  ENSG00000264659_9 (sequence is synthesized)
ctttctggagccatgagggagtctgatttgaaaacagcagttcatctctgctgcagaccatttatctaatttcagacaaattggccagaaattcaggtatttggccactgctagcagatg

SEQ ID NO: 801955 - DNA, 120 bp, Artificial Sequence
  ENSG00000264659_10 (sequence is synthesized)
taacagggagaaatgcagtctcctacaagggttaggagagcaaggtgccaggggtcacccaggggcataaataggcaaggagaaggagggggtgaaaaaggaacacagatgatgtaagtg

SEQ ID NO: 801956 - DNA, 120 bp, Artificial Sequence
  ENSG00000264659_11 (sequence is synthesized)
aatgaatgaagcttctgaccatctgagcctctggcggcagcccttccccaagagctcacgcatctctgttttgagcaggaaacaggatcagacagaaagggctccccagactcacagata

SEQ ID NO: 801957 - DNA, 120 bp, Artificial Sequence
  ENSG00000264659_12 (sequence is synthesized)
ttctcattaagtcccaaagcaaagtcaggggagtggagaaaactcctggtgctggcgcctcttccaacgttaggttgaggaatacaggagatgtttaccttatgcaggacgtggtcgttg

SEQ ID NO: 801958 - DNA, 120 bp, Artificial Sequence
  ENSG00000264659_13 (sequence is synthesized)
aagtcagggccagctcctccctggtaggaatcgggtctctgcaggtccatgccaggcttggagctcgccgctccggctctccctgcgctctgcgtcagcgcttccaggagctcggttcga

SEQ ID NO: 801959 - DNA, 120 bp, Artificial Sequence
  ENSG00000264659_14 (sequence is synthesized)
gctccgctgggtgcggcaggcttgggtctgagctctgcgggccgggccgcatccgttttcagcactggacagttccccgcagcggccgcggcgcggtaccaggcgggcaggcggccacgt

SEQ ID NO: 801960 - DNA, 120 bp, Artificial Sequence
  ENSG00000264659_15 (sequence is synthesized)
tcttccaggactgagcgtttcagcaccaggaacagcgactccgccgttgtgcgcccgggaccagagttctgagatcctgtccgctccaatccctgcctcttaggactccaggatgctggc

SEQ ID NO: 801961 - DNA, 120 bp, Artificial Sequence
  ENSG00000264659_16 (sequence is synthesized)
agggacgcaagatttgggtccggctggtgatccctgcgtatttcattcagctaccggactccggaggctcagcacccggctgcgttctcagggcattgcggtcccaggagctcaccgttc

SEQ ID NO: 801962 - DNA, 120 bp, Artificial Sequence
  ENSG00000264659_17 (sequence is synthesized)
ctgatcccgagcgaacgggcatctccgtcaccacgcagctcagcgcagcgcagctctcctcacacgtttgcagaggcgaagtcctgcggcgctggcggcgcttctgtttttgtccctgga

SEQ ID NO: 801963 - DNA, 120 bp, Artificial Sequence
  ENSG00000264659_18 (sequence is synthesized)
caattctctccaggatgtatgagataaatagagcttctaagtctgaggtcgacagtagatgggtcttaggtgtccccaaagtccctgaaatatgcaaaattctgtttacctgcgttttcc

SEQ ID NO: 801964 - DNA, 120 bp, Artificial Sequence
  ENSG00000264659_19 (sequence is synthesized)
tagggagaaggtccagggctttgatcacattctctccagcacacatgaccgcaagaagttaaggacaatgggctcaggagaggcagatggtggtttggttaggagcacaggctccaggat

SEQ ID NO: 801965 - DNA, 120 bp, Artificial Sequence
  ENSG00000264659_20 (sequence is synthesized)
tcaaatctcgattctgaaaattattagtcgtgcaaactcgggcaaattaatctttcctaagtgtccacaaaatggagataatattataatagtacctgcctcatggttttgttctgagta

SEQ ID NO: 801966 - DNA, 120 bp, Artificial Sequence
  ENSG00000264659_21 (sequence is synthesized)
tttaatgagttaattcatgtaaaaagcctagaacagtgcccagcgtgtactaagaactcaataaatgtgagctactatgctctcctggcaggggatgaagagctctggctacttctccta

SEQ ID NO: 801967 - DNA, 120 bp, Artificial Sequence
  ENSG00000264659_22 (sequence is synthesized)
tacgtcaggggagtcctgctgctgcgacctttgattggcaaaattgcatcatcacatggaatatgagagcgtgaggctgaccaccatgggaactggaggctgagactgtggcccctggga

SEQ ID NO: 801968 - DNA, 120 bp, Artificial Sequence
  ENSG00000264659_23 (sequence is synthesized)
ttattatcagattactaaggacaagtcctagtaccagccacgggcccttggagtcaatatcaacatggaaggaaagagccaggcttagggttaaaagagtgcgttttactgctgggtttc

SEQ ID NO: 801969 - DNA, 120 bp, Artificial Sequence
  ENSG00000264659_24 (sequence is synthesized)
actcctttttggctgagttgtgtgaaccagatcactcgtgttccctgggattacttatgttttctcatctgcaaaataggtagagtaatctatgcccactttattgggtttgggggaaga

SEQ ID NO: 801970 - DNA, 120 bp, Artificial Sequence
  ENSG00000264659_25 (sequence is synthesized)
gtgagacaatgtacatgaaaagtctttattttcttttaaattgtaaagtaaatttcatttataaggtgttattattgctggaatcactatactgtagatactcaatgaacattgattaaa

SEQ ID NO: 801971 - DNA, 120 bp, Artificial Sequence
  ENSG00000224239_0 (sequence is synthesized)
agaggctgccctcatcatagcagtggaacaggaccagctgggacagggtccttctgtgacacctgctgtgtcaccaggctgtgcgaatggactcagctgcccgaactcacagaatatcag

SEQ ID NO: 801972 - DNA, 120 bp, Artificial Sequence
  ENSG00000224239_1 (sequence is synthesized)
taacagcaccgaaacttcacaggaaaaatgctccacgaacttcagacttaaaaagcatcactggctcctgaccaggattccagctccatgaacctcaaactagaacaccagcccggcttc

SEQ ID NO: 801973 - DNA, 120 bp, Artificial Sequence
  ENSG00000224239_2 (sequence is synthesized)
ccaaaacctaagacatcagtggcagtacaaactcatcccaggggctccagctccaggaccctcagacttgaaccgcagcaccaactcttccctggatctccatctccatgaccctcagac

SEQ ID NO: 801974 - DNA, 120 bp, Artificial Sequence
  ENSG00000224239_3 (sequence is synthesized)
ttaaacagcagcagcaccagttcatctgtgaatctccagctccacaaccctccaactagaaacacaccagctcctccctgggtctccagctgcacgaccctcaaactacaacatcagctc

SEQ ID NO: 801975 - DNA, 120 bp, Artificial Sequence
  ENSG00000278330_0 (sequence is synthesized)
acccacaagctcgaggctgctgccacatggaaggccgggagagagacgggcggccaggacaggggccggctgtttgcaggggaggcatgtgtgtggagaacgcctaggagcacgtgggtg

SEQ ID NO: 801976 - DNA, 120 bp, Artificial Sequence
  ENSG00000278330_1 (sequence is synthesized)
gccacgaaccctgaccgtgcaggtcgagaaactcttccaggatagtatgtggtggatcgtgtctgcctaaaagtgagtcaattctgcccatgagcaagtcttccagactgttgggcccta

SEQ ID NO: 801977 - DNA, 120 bp, Artificial Sequence
  ENSG00000278330_2 (sequence is synthesized)
gacgaagaacgacctgcaagccgggaattctctgcaaaggacaatgtcaaaactcatctgaggcatccatgtctgtcctacagcaagcttccccgtgacactggagggacctaggctccc

SEQ ID NO: 801978 - DNA, 120 bp, Artificial Sequence
  ENSG00000278330_3 (sequence is synthesized)
agtagcgtctctatttcctgggatggggatttttgctctggggtatcagataatattatttgtaagctagtcatcaccatccttcgttttcttctgccttagcagattcaggtagattta

SEQ ID NO: 801979 - DNA, 120 bp, Artificial Sequence
  ENSG00000278330_4 (sequence is synthesized)
tggcactgactatcactgctttaaagttatcaaaaatcactttaaaagaaaatgacgagattgcagaaaagtggagtttattgaaaatctgactgtggtcccttgaagttactgcttaca

SEQ ID NO: 801980 - DNA, 120 bp, Artificial Sequence
  ENSG00000278330_5 (sequence is synthesized)
ggatcagctgactttggagagaaagccattatcagaatcaagcagcaaattactggccccagagttcctagcttgctacaatatcagctgtctaaaccaaaacaaagcattttgttgaag

SEQ ID NO: 801981 - DNA, 120 bp, Artificial Sequence
  ENSG00000278330_6 (sequence is synthesized)
aggatagtatgtggtggatcgtgtctgcctaaaaggtatgtccaagtcctgaccccaggacctgtgaaggtggcctgatttggaaggaaggttttgtagatgtcctcaagttaagatgag

SEQ ID NO: 801982 - DNA, 120 bp, Artificial Sequence
  ENSG00000278330_7 (sequence is synthesized)
tttgtagatgtcctcaagttaagatgaggtcatcctggattacagtgggctctaaatgcaatgactgatgttcttacaagagaaaggagagggatttttttttttgagacagagtttcac

SEQ ID NO: 801983 - DNA, 79 bp, Artificial Sequence
  ENSG00000278330_8 (sequence is synthesized)
cgaactcctgaccttgaggcatgcagcactgtgcctggtcaaggagagggaattttggacatagatacacggcatttca

SEQ ID NO: 801984 - DNA, 120 bp, Artificial Sequence
  ENSG00000278330_9 (sequence is synthesized)
caaggagagggaattttggacatagatacacggcatttcacacagggagaaacaccacatgacaatggaggcagagatttggaatgacatggctacaaggccagggacaccagggattgc

SEQ ID NO: 801985 - DNA, 120 bp, Artificial Sequence
  ENSG00000278330_10 (sequence is synthesized)
cgcagccaccagaagctggaagaggtgaagacagagcctcctgcagagctcccactctgccaacgccttgactttgcacttctggcctccaggactgtgtgtgtgtggggggctgcttct

SEQ ID NO: 801986 - DNA, 120 bp, Artificial Sequence
  ENSG00000278330_11 (sequence is synthesized)
gctgtttcaggacgcccacctgtggtgccgccttgcagcagccctacagggtaacatgcagggaagtgggaagtaagtggagacttgcaggatgcagaaggtgcaggtgaaggtgctgag

SEQ ID NO: 801987 - DNA, 120 bp, Artificial Sequence
  ENSG00000278330_12 (sequence is synthesized)
gagggaaacagcgttctgggcagagggcacggctgtgcaaaggccctgttgcacagacactgtgagtggagtttgagtgtggcatgaagtgacctaatagaacagaatctgcgaatgcac

SEQ ID NO: 801988 - DNA, 120 bp, Artificial Sequence
  ENSG00000278330_13 (sequence is synthesized)
ggggtgcactcatggggggattgggggagtgacttagaccacgcacacagacaatgttcttcacccgttttgaacagtgagtcaattctgcccatgagcaagtcttccagactgttgggc

SEQ ID NO: 801989 - DNA, 120 bp, Artificial Sequence
  ENSG00000278330_14 (sequence is synthesized)
ggcatggtgttcagctttagcagcattatggggagttacgaaattctctgtgtaaaaatagcgaggtcatgaggaaaccactcttgctgtgtaagtcctgacaagccatgccaacaccgt

SEQ ID NO: 801990 - DNA, 120 bp, Artificial Sequence
  ENSG00000278330_15 (sequence is synthesized)
cacgctgggactggccttcggatggcacggggagggcagagtcacgcaggcacacgtgacacgcccttgctctgcggccggtgggatccctggtagcttcgcagtcatgtggggcttagt

SEQ ID NO: 801991 - DNA, 120 bp, Artificial Sequence
  ENSG00000278330_16 (sequence is synthesized)
cacaggagcataggtcaggtcctgctgagccccctttccaagtgtgcggtgcgcaagccgcccaacccaggggccggcagctgggacagggcgagcagtgggctgcagggaggaagtggg

SEQ ID NO: 801992 - DNA, 120 bp, Artificial Sequence
  ENSG00000278330_17 (sequence is synthesized)
gaaggcctgggggcagacgtgcctgggcgagggccttcctattcctgctctccctgtctgctctgaggatgtgggccctgacctccttatctgtaaagccctgatggtggatgcagcttc

SEQ ID NO: 801993 - DNA, 120 bp, Artificial Sequence
  ENSG00000278330_18 (sequence is synthesized)
ctggagctgctgtggaaaccactggttaatattttacaggtcgctgggttacaaactgtcaagtcagaggaacactacacgctggcaccagctgctcctctgtagccacccgtatgtccc

SEQ ID NO: 801994 - DNA, 120 bp, Artificial Sequence
  ENSG00000278330_19 (sequence is synthesized)
tcctgagccgtggcagggagtgacacctttgccaataccaccatccacagggtcaacatgaccccgggccctggtcttagtaactagaggaaacacaccgacttcaggcattgctcacag

SEQ ID NO: 801995 - DNA, 120 bp, Artificial Sequence
  ENSG00000278330_20 (sequence is synthesized)
ccagagctggtgttaactgaagaatgttttaattcacctgccgaggaactcacacattccttgccagcaggcacaatggctcttgatagcctgtgtgcagggaacaaatgtgttggcccc

SEQ ID NO: 801996 - DNA, 120 bp, Artificial Sequence
  ENSG00000278330_21 (sequence is synthesized)
atgctcaggccatgcgtacacataagagctgtcgtctgggtcttggctaaaataaactgaatcttcccgaaaacacaggttcctattacggagtccatgataggaaagatgttcagctct

SEQ ID NO: 801997 - DNA, 120 bp, Artificial Sequence
  ENSG00000278330_22 (sequence is synthesized)
gctgctatcatggggaagtagagtggttgatctgaaatctccagattctaatcaaggagaagaatgctgtgctgtggccacagaccccaccgtggtctcaaagaaaacctggatcagagc

SEQ ID NO: 801998 - DNA, 120 bp, Artificial Sequence
  ENSG00000278330_23 (sequence is synthesized)
ccatcttctgatcagtgccacaccttcacatgggtgtgcagcattttactgggtgactgcctttcagaaccttctggaattttccagatccttccagattgcaataaagaaaaagaatgc

SEQ ID NO: 801999 - DNA, 120 bp, Artificial Sequence
  ENSG00000275576_0 (sequence is synthesized)
cacatatgcagctgttagcactatccgtctccagaactttttcatcatctcatttttgaaacaaggatgatattctcaagggattgttgtgatgattaaatgaaatatgagatgaaagtg

SEQ ID NO: 802000 - DNA, 120 bp, Artificial Sequence
  ENSG00000275576_1 (sequence is synthesized)
tataaatacccaaggtggagacaggagagcagtacgtttctgcacttggtggtgtcagggttgaagtctggttgcctgttgcttcgtgagggtggttattagtttcacctggacttccgc

SEQ ID NO: 802001 - DNA, 120 bp, Artificial Sequence
  ENSG00000275576_2 (sequence is synthesized)
agtgcagcctgctgtgcgtttttccctacccccaaattacagctttgagtctttcatgtgtctctgttcaacagctactctgtgtctgtgggctctgaaataaaggctacattttcagtt

SEQ ID NO: 802002 - DNA, 120 bp, Artificial Sequence
  ENSG00000231856_0 (sequence is synthesized)
tctcggtcgcgggcattgagcggctggagtctggcgactgccccacgcccagccgtgggtcgctagacggcgggcgcacccgtcgttctggacacgcttagtcggcccagcgagagggcg

SEQ ID NO: 802003 - DNA, 120 bp, Artificial Sequence
  ENSG00000231856_1 (sequence is synthesized)
gtccccgccaaccctgctcgcccgcgccgaggcgggccacgtgacagcccggggccccgcgccccgccgcgccgccttacttggtgtactcgcgcagccccttggcgaaccacacgacgc

SEQ ID NO: 802004 - DNA, 120 bp, Artificial Sequence
  ENSG00000231856_2 (sequence is synthesized)
gcgaaccacacgacgctgcggtacagggacatgccgggagcgccccacgcctagccccaccgcgctcccggcgcggcctccgccctggtcccgccccccgggagtcgcccgccctgacat

SEQ ID NO: 802005 - DNA, 120 bp, Artificial Sequence
  ENSG00000231856_3 (sequence is synthesized)
catcccggttatgtaagagccgcggcttccggttccttgctccaccggtaaggcaaggggtctcggggccggccggtcgactccgccccagcctcagagggtggagtgagggcggaccgg

SEQ ID NO: 802006 - DNA, 120 bp, Artificial Sequence
  ENSG00000231856_4 (sequence is synthesized)
ccctggtgggggccgcagtcgaggtccgcagtctcctcggggtcgaaatcgggcatcagcgccgtttagagaacaccgtcctgctgggcatggccgggatgcgaagatggccctgcaacg

SEQ ID NO: 802007 - DNA, 120 bp, Artificial Sequence
  ENSG00000231856_5 (sequence is synthesized)
cacctcctagaatttggttacctagaaaaccatgtggaataaaacgacgaggcttatgatatttaaaagacttctgcatcgaattggtgttatcataagggttattttaataactggcat

SEQ ID NO: 802008 - DNA, 120 bp, Artificial Sequence
  ENSG00000231856_6 (sequence is synthesized)
tctctaagtttctacacgtgttgggggatgcagtgccgtgccacatttcccgtctccagcaagcgcagtcagattggcgacatcgcaggcaagaggcagggctggggctcccacccgaga

SEQ ID NO: 802009 - DNA, 120 bp, Artificial Sequence
  ENSG00000231856_7 (sequence is synthesized)
agatgaacagtgtgagtaaaaaagagtgtggttgctgcgtgaacccagatctcagactagtcatccagccccattatgtaggactcagacacccctgtccacatctaacctccagcccta

SEQ ID NO: 802010 - DNA, 120 bp, Artificial Sequence
  ENSG00000231856_8 (sequence is synthesized)
acgccacattagaaatgggggtcttactgctgctgtcactcctagtcaccctgttaaattctataccggtttacccaagtcgcccagagactgggccccacttacataagctgaagagac

SEQ ID NO: 802011 - DNA, 120 bp, Artificial Sequence
  ENSG00000231856_9 (sequence is synthesized)
cagctgctttaatagcctcattacctaggatataggatcactgtccaacctcactccacagtgggcaagtttttacttcagaataacttttgaaataaatttccccggaacagctcgccc

SEQ ID NO: 802012 - DNA, 120 bp, Artificial Sequence
  ENSG00000231856_10 (sequence is synthesized)
ctctcaacaggactctgaggctccactacgttgctgttattcctgacagagtgatgaaaggaaatttaaacaagtggcattttgtaaaaccaccccagcctgtgtgactttcaatgcctg

SEQ ID NO: 802013 - DNA, 120 bp, Artificial Sequence
  ENSG00000231856_11 (sequence is synthesized)
tccgatttggctgggaaaatattttagatccccagggctacatactgttttttataccctcctctttgtgtcagtgatggaaaaggtgtcaatctgctctgaatctctctgaacacctca

SEQ ID NO: 802014 - DNA, 120 bp, Artificial Sequence
  ENSG00000231856_12 (sequence is synthesized)
ggaaataggcttttggctcgcagagaggggatgagaaatagttttgaaccaccaagtctcttggagggtgtcagcagccccttgaagtaaaagtgtggctgcaaacccagctctctgcat

SEQ ID NO: 802015 - DNA, 120 bp, Artificial Sequence
  ENSG00000231856_13 (sequence is synthesized)
tagccaggtgaacctgagcatgctgcatacaccctcagtcttggtttcttaatatgtaaaatgggaatgaatatgcgcacctcgtggggtggttgtgattaaaggcattcattataaaga

SEQ ID NO: 802016 - DNA, 120 bp, Artificial Sequence
  ENSG00000231856_14 (sequence is synthesized)
tctgtggacacagtcttctaccctcagaaatcccattggaagaaagaacaaatgaagcatcccaaggactggaggattctcttcccccagggtattcaaggaagacactggggaacaaat

SEQ ID NO: 802017 - DNA, 120 bp, Artificial Sequence
  ENSG00000231856_15 (sequence is synthesized)
tgaacaaagtttatttcatcaacaatgaaaaatgcccagaaggaaatgaagcacaagattcagttacacaaagatgaaagctattgaccacttggccacttctcatactaaaagagaagg

SEQ ID NO: 802018 - DNA, 120 bp, Artificial Sequence
  ENSG00000231856_16 (sequence is synthesized)
aaataacacgaagtactggaagtgacattatattgtcctcatggtgacaaccaggatgggcctgacataagccagtccaggctgtatgtgtggcccgagtgcacacatgcggtttctctg

SEQ ID NO: 802019 - DNA, 120 bp, Artificial Sequence
  ENSG00000231856_17 (sequence is synthesized)
gccaccgaatcagaaccagctgggccccacaagtcagtctctgggggctgtgattctgcattgcaaacaagtccttgggtagctctcagggttcaccaagatttgagaaccactagtgtg

SEQ ID NO: 802020 - DNA, 120 bp, Artificial Sequence
  ENSG00000231856_18 (sequence is synthesized)
gctgactccagtgaaacagtcccacttttactgctttcaactgtcatttatatagattcaggcaaagaatggtttttagaatgatgcccgatgtagcaaataaaatgatctcaacatata

SEQ ID NO: 802021 - DNA, 120 bp, Artificial Sequence
  ENSG00000231851_0 (sequence is synthesized)
atgtacaatagctgcctggcaggtctcttccttctagcaactccctgctcctgcagtccctccgtgaccttcctgatggggagatcctcaagacttttcccatgagctcggggttcctga

SEQ ID NO: 802022 - DNA, 120 bp, Artificial Sequence
  ENSG00000231851_1 (sequence is synthesized)
ggcccagaagaagaggacagagttttaatggagacaagaggcagagaagaaaaacttactgtaaaggacatgcatggaataaaacagcagtatttgacaaaatacagaaaagacctaagt

SEQ ID NO: 802023 - DNA, 120 bp, Artificial Sequence
  ENSG00000231851_2 (sequence is synthesized)
tctagcttcaacttgcgaagatggtcttcagctcaaacttccccaatttattccaacttctaaagcagtagtctaaggcactaggacaagaagcagatgaacatgtatagccagtattgg

SEQ ID NO: 802024 - DNA, 120 bp, Artificial Sequence
  ENSG00000231851_3 (sequence is synthesized)
gccaccatgcccgtcccacctagactcataccttgtctcatccactcgacctcgtcctcggtgacaaagctgcacaaggcttttgccattgccagtcgtattgctccagcctgcgctgac

SEQ ID NO: 802025 - DNA, 120 bp, Artificial Sequence
  ENSG00000231851_4 (sequence is synthesized)
ccccctgagactgtgcaggtcacgtcgtgctttcccagccggtcaacaaagtggaaagggaacatcagctgttctctaaagcacagcacaaggtcctgctaccttcctggggccaggtga

SEQ ID NO: 802026 - DNA, 120 bp, Artificial Sequence
  ENSG00000231851_5 (sequence is synthesized)
cattctacacaacccctgtcaggcctgctctttcagggtcggtcagggcctacaagatcctggggcaggcaccacagacaaaacacggccctggactttctcctgctcaactgaacaagt

SEQ ID NO: 802027 - DNA, 120 bp, Artificial Sequence
  ENSG00000231851_6 (sequence is synthesized)
atttgttgaatatcattttcacgccagaatgtcattaccttcacttttgctaaaggccattccttgctcatcatactgtacaggttcaatcagctgtttttttgattcaagagttacact

SEQ ID NO: 802028 - DNA, 120 bp, Artificial Sequence
  ENSG00000231851_7 (sequence is synthesized)
tcttcgaaacctctgcacaaattcttcctcagcagcaccacactgcgatgtcaataacttttctagcagccgaatgaactgcatatactgcagacaataaaaattcattagaaggtgcaa

SEQ ID NO: 802029 - DNA, 120 bp, Artificial Sequence
  ENSG00000231851_8 (sequence is synthesized)
ataaagatacataattatgtaaacaactgaaattctgaatattcataaaaacaatattctgcatgccactgttatacttttcatacttctcaatcaatccattttaccaagatatagaaa

SEQ ID NO: 802030 - DNA, 120 bp, Artificial Sequence
  ENSG00000236641_0 (sequence is synthesized)
gagtaaaaccaaggacgtgcaatatgagtgttcatcatcctcttctcttgatcattttttgacaagaaggagggcaacagacaggcttccagagctccgttccagacacaggatgctgaa

SEQ ID NO: 802031 - DNA, 120 bp, Artificial Sequence
  ENSG00000236641_1 (sequence is synthesized)
gacatgctccgtagttgtatggagcagagagactttgcagttcctcaataatgggggtttattctaaagacatctgtagaaacagggaaattagaaaactaggctacatggccacactca

SEQ ID NO: 802032 - DNA, 120 bp, Artificial Sequence
  ENSG00000236641_2 (sequence is synthesized)
gagagtccaagtgaaagccctacaaagaggttcatggcaggggcagggggccaggacccagacagtgaacaggcatcatggagagagaaactggagcctgagagctcctgggagctggag

SEQ ID NO: 802033 - DNA, 120 bp, Artificial Sequence
  ENSG00000236641_3 (sequence is synthesized)
agctggctctgtggtcactgcccccaggaatccaccattagggggcctcagcaaatgcatccccaagtcttggctctcttgggaggaccttctggccatttcctgttgctagcttcctct

SEQ ID NO: 802034 - DNA, 120 bp, Artificial Sequence
  ENSG00000236641_4 (sequence is synthesized)
ttcccttgcctttccgtcggacatctttgatctgctgtctggattgtaaaagatgctggctgtgcttttcctactctgtagacgttacaatgttgctgtgtgagggccacttccaccagc

SEQ ID NO: 802035 - DNA, 120 bp, Artificial Sequence
  ENSG00000236641_5 (sequence is synthesized)
aatacctactaggagcaaccttcatccaatgactaacaggagctggggtatcaattccccagctcccagtgctcaggggaacaccaagacctattctcctcgtgggagcaagaagatgaa

SEQ ID NO: 802036 - DNA, 120 bp, Artificial Sequence
  ENSG00000236641_6 (sequence is synthesized)
gtggagaggaaggtttgagtcctttctctctatgtatctgtcaggctatgctgcagtaacaaacagcccccaattcttggtggttgaaaacaacgaaacttatttctcactcatgaaaga

SEQ ID NO: 802037 - DNA, 120 bp, Artificial Sequence
  ENSG00000236641_7 (sequence is synthesized)
tgtctagtgctggtcagcggggggcttttctctacagagtcactcagggacccaggctggtgtgggctctgccattttgcaatgttgccatctcaggacagcagaagagaagagagcact

SEQ ID NO: 802038 - DNA, 120 bp, Artificial Sequence
  ENSG00000236641_8 (sequence is synthesized)
agaaagtgtggctcctgtaataagatgatttcacctggaaattacaccagtcatgtttgttcagaatccactgaccagaatgagtcacatgacaccccctaattttaagaagacccagtg

SEQ ID NO: 802039 - DNA, 120 bp, Artificial Sequence
  ENSG00000236641_9 (sequence is synthesized)
ataacccgctcactaatataccctgaattgcctgccttcctttctctggctcgcttccccactccctacttcctgatgccctctgggatcactttccaaataaattatatgcacctgaac

SEQ ID NO: 802040 - DNA, 120 bp, Artificial Sequence
  ENSG00000248842_0 (sequence is synthesized)
cattttagtttcctgctgtgagaaagctccaaatgctttggaggctgaagaagctgccctgacaaagacaggaaagcgcgggcggggctgatgggtctttttcatctcccccctttgctg

SEQ ID NO: 802041 - DNA, 120 bp, Artificial Sequence
  ENSG00000248842_1 (sequence is synthesized)
caactgagaagctagaatctaatatcattgttttgctttatttatgacaagcaatattggttttccatttatggtagagatattaagtttccctttgaaataaatgtatttttgaagtta

SEQ ID NO: 802042 - DNA, 120 bp, Artificial Sequence
  ENSG00000248844_0 (sequence is synthesized)
aggtaaaaaagaaagaggaatcaaagaaaacaaaggaagggcagaaaataaaagaaagaaaagtgagaacaaggaaaagagagagcaagattcagaggcagggaagacctgagtctggga

SEQ ID NO: 802043 - DNA, 120 bp, Artificial Sequence
  ENSG00000248844_1 (sequence is synthesized)
agagggcaggaatgtaccctgtggggctgaggcgtgtcccttcatgtcacatcctggtgctggtggtgacctgattttgactcatccaaaaaatgatcaaaagagagggaaacaaagact

SEQ ID NO: 802044 - DNA, 120 bp, Artificial Sequence
  ENSG00000248844_2 (sequence is synthesized)
aaaattggtgaaaacaaaaaaaagggaaaaatgacaaaacagccagaggaaaaagacatctattttcaaaagattaataataaggcaaatggctgacttttcaacagaagcaatagaaac

SEQ ID NO: 802045 - DNA, 120 bp, Artificial Sequence
  ENSG00000248844_3 (sequence is synthesized)
caaagacaatagagtgacatattgaaattgctgaaagaaaattactgccaatctagggttctgtatctagagaaaatatctttcaaaaatgaaaacaaaataaatatgtttttggatgaa

SEQ ID NO: 802046 - DNA, 120 bp, Artificial Sequence
  ENSG00000248844_4 (sequence is synthesized)
agtcaaggcccccaggtatctggcacaaccccggcaatatgcaaagcctcctctaatgatggttgaatccaggagaccccaaccgctgtgatggaaacctcgccacctccagaggcagcc

SEQ ID NO: 802047 - DNA, 120 bp, Artificial Sequence
  ENSG00000248844_5 (sequence is synthesized)
gatgactcctggggcagccccacccggctcaaaggcaacctgctccacagagccagccccatccctaggcttggagccaaacaggattgctccttcataagaaaaaaaaatcagagctac

SEQ ID NO: 802048 - DNA, 120 bp, Artificial Sequence
  ENSG00000248844_6 (sequence is synthesized)
agagtcagccgtcttaaaaagctccctgcattcttgccttgcccagccaagcagcctcaggtccccctgctccctgtacctggctgggctcagagccactctcaaccacatattttttaa

SEQ ID NO: 802049 - DNA, 120 bp, Artificial Sequence
  ENSG00000248844_7 (sequence is synthesized)
gtcctttgtcccagactatgaacggcatggaaaccaattgaggactgggggtggcagcttgtgtgtgtgactgcttgagctctggagggtccttctactgtcagcgcctccccatccccc

SEQ ID NO: 802050 - DNA, 120 bp, Artificial Sequence
  ENSG00000248844_8 (sequence is synthesized)
acccccattcttctgtgatggccccgagtgtctgtaatgcatccctcaacttttcatctgccagtgagactcacagagcaaatagcccaaggaaagacaaactatggatcaaactcatac

SEQ ID NO: 802051 - DNA, 120 bp, Artificial Sequence
  ENSG00000248844_9 (sequence is synthesized)
taaagtataaatgactttcttctcccagatcattttgatagtgaacaggacaatcagcatcaggcccacagacggcgagggatggaaggagtggaggaagagaacttcccacggcaaggg

SEQ ID NO: 802052 - DNA, 120 bp, Artificial Sequence
  ENSG00000248844_10 (sequence is synthesized)
gaaagggaagaaggaagaggcttggaggaagggggacaaggaaaacttttatttccttctcatctggcctggactgagccagctcttccttacctgctgccccaaacagggaggccagca

SEQ ID NO: 802053 - DNA, 120 bp, Artificial Sequence
  ENSG00000248844_11 (sequence is synthesized)
tgaaaaatcagggcaaaaacaggactaagaacaaaggagaaaaaggctaagagcaagggaccacacaggaactgagaaatgatttctcagctaagcgtctggcctttggagatgcctccc

SEQ ID NO: 802054 - DNA, 120 bp, Artificial Sequence
  ENSG00000248844_12 (sequence is synthesized)
tgcccatctgtgtggctggggtcagagaacccccaccaggagggtgagggggagtgaagaagggtgaagaagagacctggggctcttcccggagagtgtgcgtgagagccaggggctggc

SEQ ID NO: 802055 - DNA, 120 bp, Artificial Sequence
  ENSG00000248844_13 (sequence is synthesized)
tgagaggccactggcttccagatgtcccagcctccatcaggccagacctactcctgcaggccagggttgcaaccccatcaacatgatatagggagcccgagggaagcaggacaaactctg

SEQ ID NO: 802056 - DNA, 120 bp, Artificial Sequence
  ENSG00000248844_14 (sequence is synthesized)
cctgatgttccttccctccatcagccatcaatcccccagtacaatgagacggtcctctcagctgtgcccagccacagaaacagcctctgtgccttgggaaaaaatgatgttggcgggcta

SEQ ID NO: 802057 - DNA, 120 bp, Artificial Sequence
  ENSG00000248844_15 (sequence is synthesized)
caccccattcacactcatgaatccactccagaagtctgaagactttttccccaggacatctagcacaatgttgaaaagtatggcccagaccctatcagaataatcccagcccatcatagc

SEQ ID NO: 802058 - DNA, 120 bp, Artificial Sequence
  ENSG00000248846_0 (sequence is synthesized)
gaagagacaggaacacaggttgaagcaactgatggggcctgaattaggactctttcaacctgtgctcaccaacaggtgtcagcctcactctccccagctgcaggccaacttcctccaggt

SEQ ID NO: 802059 - DNA, 120 bp, Artificial Sequence
  ENSG00000248846_1 (sequence is synthesized)
agcccagtaggtctggggtggctggaaggccttagtcatcgcccctggcatgtcacaccccagctgggattttgccctgagggcactgggaagccactgaaaaattttcttcaggggagt

SEQ ID NO: 802060 - DNA, 120 bp, Artificial Sequence
  ENSG00000248846_2 (sequence is synthesized)
ggcatgagaagcctgcagttttgaaagaccattgtgtacaatggttagacatagggagggagaaaggaggctccaggaagaatcggaatgagaactgatgaggacctgaactgcagcagg

SEQ ID NO: 802061 - DNA, 120 bp, Artificial Sequence
  ENSG00000248846_3 (sequence is synthesized)
aggagagagagtggcgaggacgtctcacgtgtgaggacgtctcacgtgctgtcatgtcatttattggcaccaccttcaacacaactactcaagcccagttgctgagcatcatctggaatc

SEQ ID NO: 802062 - DNA, 120 bp, Artificial Sequence
  ENSG00000248846_4 (sequence is synthesized)
ctttcaccttcccatgcacaatccttgagatccggagatgctacctccaaaaggcaaccaaaaaatctaacgacgactcactatcttcccatctactgtccagttgtgtatatatgcgtc

SEQ ID NO: 802063 - DNA, 120 bp, Artificial Sequence
  ENSG00000248846_5 (sequence is synthesized)
tatggaccaggtagtgtgtcaaaggtatttcttagctgtagggttgcagcaaaaaagtttggaagctattcattgcccattaggcaattaaagagtaaagatgtggcccctgcctacatc

SEQ ID NO: 802064 - DNA, 120 bp, Artificial Sequence
  ENSG00000248846_6 (sequence is synthesized)
tttaatctcatcttctgtcatctccccctctttgctcctttagtccctggaaagtggtaagctctttcctgccttggggccttagtatttgctgttaactctacctggaacattctcctt

SEQ ID NO: 802065 - DNA, 120 bp, Artificial Sequence
  ENSG00000248846_7 (sequence is synthesized)
atctttcccatggctgattcactgccatccttcaagtctcagtttaatgtcatatcctcagagaggccccccatccatattatgtaaaccatgtcttcttcccatcactacacgctatgg

SEQ ID NO: 802066 - DNA, 120 bp, Artificial Sequence
  ENSG00000248846_8 (sequence is synthesized)
aaaattcatatattgaaacctaatccccaatgcaataggattaagaggcgggacctttaggaaataattaggtcttgagggtaaagccctcatgaatgggattagtgcttttatataata

SEQ ID NO: 802067 - DNA, 120 bp, Artificial Sequence
  ENSG00000248846_9 (sequence is synthesized)
aaagaggcctgaagaagcttattagccccttctgccatgtgaagactcatagaaagtgccatctatgaggaagcaggccctcaccagacatcaatgctgctgccttgatcttgggcttcc

SEQ ID NO: 802068 - DNA, 120 bp, Artificial Sequence
  ENSG00000248846_10 (sequence is synthesized)
cagcctccagaactgtgaacaatgaatttctgttgtttataagttacctatctaaggtattttgttataacagtccaaatggactaagccctaaaggactttttctaatgaatagctaca

SEQ ID NO: 802069 - DNA, 120 bp, Artificial Sequence
  ENSG00000248846_11 (sequence is synthesized)
ggttgatttacgatcagtttttttatgagactgtaagccttctgaggtcagtaatggtgtgtgtatgtgactgtaccctgcatctgcatcctacttttacctaacaaaaagagcctcaca

SEQ ID NO: 802070 - DNA, 120 bp, Artificial Sequence
  ENSG00000248846_12 (sequence is synthesized)
gaaagctttggcaattaatgacagcctgtagagttctgtattcatagaagcagtaggggtacatgctgcagtgggtagaattgtgttccccaaaaagagatgctcaagccctaaccctgg

SEQ ID NO: 802071 - DNA, 120 bp, Artificial Sequence
  ENSG00000248846_13 (sequence is synthesized)
tatctacgaatgtgatcttatttggaaatagggtctttgcagatataattagttaagatcaggtcatactagagtaggatgggcccttaatccaatatgactggtgtcattataagaaga

SEQ ID NO: 802072 - DNA, 120 bp, Artificial Sequence
  ENSG00000248846_14 (sequence is synthesized)
ggaagagatacacaagggcacacaccaggagaatgtcatgtgacaatggaagcagagattggagagctgtgtctataagccaagtaacatcaaggattgctggcaacaccaaaagctaag

SEQ ID NO: 802073 - DNA, 120 bp, Artificial Sequence
  ENSG00000248846_15 (sequence is synthesized)
agaaaggcgtggaacggactcccaccttgagccttcagagacagcgtggacctactgacaccttgacttcagacttctagccagaactttgagagaataaatttctgttttttaagaccc

SEQ ID NO: 802074 - DNA, 120 bp, Artificial Sequence
  ENSG00000287526_0 (sequence is synthesized)
gagtagaggtggcatgtaaagccacaggtccggatgaaatccgccaggtattgggggatgacaagaggtcttcagactgagccctgggggagctccaacagttagaagccgcgaagggga

SEQ ID NO: 802075 - DNA, 120 bp, Artificial Sequence
  ENSG00000287526_1 (sequence is synthesized)
agaggattcagcaaggaaaacagagaggtagaggtccttgaaaacggaaataaaaccagataaataatttgcaacttccttgtctgccaagactactgtgaacatatactctggtgaccc

SEQ ID NO: 802076 - DNA, 120 bp, Artificial Sequence
  ENSG00000287526_2 (sequence is synthesized)
ggacattgttacaagcctcagagcatggatccttctggcagagaaaagattgtcataagcatagacctttagcttgatgccttcatgagataaaggggaaactggagcttggaacttgat

SEQ ID NO: 802077 - DNA, 120 bp, Artificial Sequence
  ENSG00000287526_3 (sequence is synthesized)
ttcatccacaggaacggctggaaaatcatcttcaatcatttcacctggaagtctcccaagaggacatgagtatcctgttaagacatccttttatgttttcagtagctttgcagttttgtc

SEQ ID NO: 802078 - DNA, 120 bp, Artificial Sequence
  ENSG00000287526_4 (sequence is synthesized)
tttgagttgctcaaggcaagaagacccggtgccagcaagactgaaacaaaaaagcaaaagagcttttaaaagcaagccttcttctgactcagaacctgctcccggacctccccgtggtct

SEQ ID NO: 802079 - DNA, 120 bp, Artificial Sequence
  ENSG00000287526_5 (sequence is synthesized)
ccctggactggtgctgtgactctgggggaacgccagggaaggaagagaggaaaaccttgttattgatgctaaatgataccctctcaaacaagagagttcttctcatcttctgttttctat

SEQ ID NO: 802080 - DNA, 120 bp, Artificial Sequence
  ENSG00000287526_6 (sequence is synthesized)
gaagcaaggataataagaagcttcaaattggaacatgttttatttttcaaaacttaaagagcttaaagtaatttatacacacgcttttaaaaattttaagaagtactgaaaggcttgcag

SEQ ID NO: 802081 - DNA, 120 bp, Artificial Sequence
  ENSG00000287526_7 (sequence is synthesized)
agctcgtcttctgctcctcagagcgatcactttgtaaaatgaaatttttattgaggtaaaatttacatatggtgaaatacgtacacagactttaagtcttcaagccaagtggttttgata

SEQ ID NO: 802082 - DNA, 120 bp, Artificial Sequence
  ENSG00000287526_8 (sequence is synthesized)
aaaattggtgcagtggtgtaactaccgccacgttcaagacacacatcatttctatcacccctgaaaataccttcacgccccttggccatgctatacaggaaagcaaaagtaattcaccat

SEQ ID NO: 802083 - DNA, 120 bp, Artificial Sequence
  ENSG00000287526_9 (sequence is synthesized)
aatgaccatgaaaatgaccactgagtagaagaattgttatggaaatatcttttactattgtttttaaaagatgaaatagttataaatatggttatattttggatccactagagggagtaa

SEQ ID NO: 802084 - DNA, 120 bp, Artificial Sequence
  ENSG00000287526_10 (sequence is synthesized)
taaagtccaattgatcaattttttattttatctcgtgtttttgatatcattcttcaagaaacctaagatcactgatttactcatgctttcttctaagagtttcacagttttagctcttac

SEQ ID NO: 802085 - DNA, 120 bp, Artificial Sequence
  ENSG00000287526_11 (sequence is synthesized)
attatagtccatgatccatttcaagtttaattttgtgtatggtgtgagggaagggtccacacatacttttacatgtggctgtacaattgtcccagcaacattcgttgaaaagattattct

SEQ ID NO: 802086 - DNA, 120 bp, Artificial Sequence
  ENSG00000287526_12 (sequence is synthesized)
ttcccccattggattgtttgggtacccttgttgaaaagcaattgataatgactgtaaagggttatttctggactctgaattctcttccattgatctaaatgtctctccttatgtcagcac

SEQ ID NO: 802087 - DNA, 120 bp, Artificial Sequence
  ENSG00000287526_13 (sequence is synthesized)
cacactgtcttgagtataggagttttgtattaagctttgaaatcagggtgaataagtcctccaactttgtttttcatttccagattgtttttgctattctgtggattttgcatttctata

SEQ ID NO: 802088 - DNA, 120 bp, Artificial Sequence
  ENSG00000287526_14 (sequence is synthesized)
tgaactttagatcagtttgtcaatttctacaaaaatatccaactgaggttttaataaggattgcattgagtcttagatcaatttgtggagaattgtcatcctaataataccaagtcttcc

SEQ ID NO: 802089 - DNA, 120 bp, Artificial Sequence
  ENSG00000287527_0 (sequence is synthesized)
aaagactgagggtgcaaaacaaatgcggagccgagcagacatttctcagcctgttaatttcctacagttctgttttccagcctcagaaacaagctggtttctgccagtccacccccttcc

SEQ ID NO: 802090 - DNA, 120 bp, Artificial Sequence
  ENSG00000287527_1 (sequence is synthesized)
ctctgactgcattgtgcagctgctgagcagagagaagttgcagggaggagggggttccagaggagaagcgaagagactcaggttttcatacgatttatcaaagtacaggcaagatgcaga

SEQ ID NO: 802091 - DNA, 120 bp, Artificial Sequence
  ENSG00000287527_2 (sequence is synthesized)
gatgcttctgaagctgtgaccccaaaaagaagctcaactgggagatttgcagcctggaccagtctaaccctacaggaggctgtttcaacgggctcagcaactccctcggtttgacccctg

SEQ ID NO: 802092 - DNA, 120 bp, Artificial Sequence
  ENSG00000287527_3 (sequence is synthesized)
acacaagcatgcctgctgaatctacacctggacctaaagacttgtagagtcctttctggggctggatgttcccacaggacaattaccagtcatgcatacagagctttgctgcccaagggg

SEQ ID NO: 802093 - DNA, 120 bp, Artificial Sequence
  ENSG00000287527_4 (sequence is synthesized)
actttctgagggctgaatattatttacttcaactctcctttgacaaggcacctgaggcccagatggggaaagtcacacaggactgtgatggggcctgatcgagatctcctgaatcttccc

SEQ ID NO: 802094 - DNA, 120 bp, Artificial Sequence
  ENSG00000287527_5 (sequence is synthesized)
agtgctgcttgctgtgctttgtggcccttcctctggctgtaactgtaatcccacctataccttaggttgcacatgctcatacagcgcttaccatgagccaccctctgaggcaggtactgt

SEQ ID NO: 802095 - DNA, 120 bp, Artificial Sequence
  ENSG00000287527_6 (sequence is synthesized)
tatgattcccattttacagctggggaggctgaggctcagagaggttaaatacttccctaagctagtatgtggtcgagctagaatttgaaaccagaatgtcctgccccagaatctagactc

SEQ ID NO: 802096 - DNA, 120 bp, Artificial Sequence
  ENSG00000287527_7 (sequence is synthesized)
cacaatttctcatttcaggctaagccagataatcaccccagacacaagggcaggctcagcactgctatcaaaatcccttttccttttatcttctccatcaccatcttagccttatcgcgt

SEQ ID NO: 802097 - DNA, 120 bp, Artificial Sequence
  ENSG00000287527_8 (sequence is synthesized)
tcactatcatgatcaacttcaccatttataaagtctctaattgcaaatgactgtgtacctatagaccaatgcagatctaacccctgccttgggatgggaggatggggcttacagtcaaac

SEQ ID NO: 802098 - DNA, 120 bp, Artificial Sequence
  ENSG00000287527_9 (sequence is synthesized)
caaacagcagtttaagccacatatactcctccctttgtaagtaaaggtacgaaaccagaatgtggaaggcagtcttcttcttaagagatttttctgcaataagatggaggtggtgaagga

SEQ ID NO: 802099 - DNA, 120 bp, Artificial Sequence
  ENSG00000287527_10 (sequence is synthesized)
gaagtttcgaacagccaaagagtgcctgctgagggaaattaatcaatggccaagaagattgcttgtcatctttcaatatctataagaaataacgagcctccagagagggagctagagctc

SEQ ID NO: 802100 - DNA, 120 bp, Artificial Sequence
  ENSG00000287527_11 (sequence is synthesized)
caagggaaaagaagaccagtgggtactctgtccaactcatgcctctaaggagctacaggagaaagatggagccataggcagcttccacccctttggatggtggccaacacccatctcccc

SEQ ID NO: 802101 - DNA, 120 bp, Artificial Sequence
  ENSG00000287527_12 (sequence is synthesized)
agccacagtatctctcacagcccctggggaagccagaagcaagcaacactgcccaggagttttaaaactgattcttcccttaagctcaagtcccacccacctcccaacccagtgagcttg

SEQ ID NO: 802102 - DNA, 120 bp, Artificial Sequence
  ENSG00000287527_13 (sequence is synthesized)
ctggttggctgtccatgagtgttggctgccagatgtgccatcatccggcacaggatgtacaggaaagagggcaatggcttcccggaccagagtctccacccagaattccagccaaggccc

SEQ ID NO: 802103 - DNA, 120 bp, Artificial Sequence
  ENSG00000287527_14 (sequence is synthesized)
cagagctcccaggacctggagaatttgttccccctggttgtgtttggaattggctggttttctgggcaccaggcccagctcagtttaatttttgtttatttttatgtacagattctcttc

SEQ ID NO: 802104 - DNA, 120 bp, Artificial Sequence
  ENSG00000287527_15 (sequence is synthesized)
tgggagatttgcagcctggaccagtctaaccctacaggtctgggcttcaggaagaagggaacctgggggtgctgcagggaatactttggaggaggctgtttcaacgggctcagcaactcc

SEQ ID NO: 802105 - DNA, 120 bp, Artificial Sequence
  ENSG00000287524_0 (sequence is synthesized)
gagacaagcggctgaacatcgagaggagaagcaactgcgcatcagagactagaagcaactgcgcatcagagactaaggctagacgcggcttaatgtcagaccacacgacttcggagacga

SEQ ID NO: 802106 - DNA, 120 bp, Artificial Sequence
  ENSG00000287524_1 (sequence is synthesized)
cccggctggagtcagccaggcttcaaggaaagactactttcttcccgcaccatccccgctctagctccttttccactgacagccacctccatcagtcaataaaacctctgcattcaacat

SEQ ID NO: 802107 - DNA, 120 bp, Artificial Sequence
  ENSG00000287524_2 (sequence is synthesized)
ccttcaagtccgtgtgacctgattcttcctggatgccagacaagaacccgggtaccaagagggcagggtatatgtcaccctgactctccactgagctggttaaggcttagctctctgttg

SEQ ID NO: 802108 - DNA, 120 bp, Artificial Sequence
  ENSG00000287524_3 (sequence is synthesized)
aaggcaacaaccaaaagggcattgtttgtaatacacaacctctggggctccagaagttgcgggcaaccactgattgctaccacgggcccggttactgggtttggtcctgccagcacctaa

SEQ ID NO: 802109 - DNA, 120 bp, Artificial Sequence
  ENSG00000287524_4 (sequence is synthesized)
aggcacttgccccaggtcctgcacctgctcacctgcgtgctccccctcccacaagcggtttgagctcggctgcaaaggagccacccctcatcgcaagtcctgcgagggagtcagggactc

SEQ ID NO: 802110 - DNA, 120 bp, Artificial Sequence
  ENSG00000287524_5 (sequence is synthesized)
tcctgtctcaccagctatacttaacttgtgtacttttctgcacgtgtgatatacttccaaggtatttacataaaaatgaaaataatatctttgcttccaaaaatgtgactttttcaaact

SEQ ID NO: 802111 - DNA, 120 bp, Artificial Sequence
  ENSG00000287524_6 (sequence is synthesized)
aatcctaaaacaaaaggagtgtagaagtcccagaagatgggaaggccaggttatcctaccaatagaacatgtagctaactgactaccagttattcaacatttctaagaagcccaggagat

SEQ ID NO: 802112 - DNA, 120 bp, Artificial Sequence
  ENSG00000287524_7 (sequence is synthesized)
gcttagttgaccacaggctttaacaagtcaacagtgatgagtctgctaaaaatattattattaccatcttaggctatgataatacaaggactgtgtgagaacagaacaaggaatcgtttc

SEQ ID NO: 802113 - DNA, 120 bp, Artificial Sequence
  ENSG00000287524_8 (sequence is synthesized)
actctgtgccaaagtggtcccactacatttagagtattttgtcagatttgaagagaccatcattaactaactggagatgacccatgtgacagtaaccacaaaggttaaggagatggaaat

SEQ ID NO: 802114 - DNA, 120 bp, Artificial Sequence
  ENSG00000287524_9 (sequence is synthesized)
acatcttatgatgagtgagctgaattaattgaggcttgtctaaattggagaacaaaaaggaaaacactttgctatttcaaagacagaactacagtttacagggcactgagctcttaaagt

SEQ ID NO: 802115 - DNA, 120 bp, Artificial Sequence
  ENSG00000287524_10 (sequence is synthesized)
tatcaggcctgaagtcaggcgtggatcttactaggtgaacatcaagatgtgagtggacctgaattcctttctggaggctccaagggaggattcattaacttgctttttctaccttctgaa

SEQ ID NO: 802116 - DNA, 120 bp, Artificial Sequence
  ENSG00000287524_11 (sequence is synthesized)
gaggttgcccacattctttagctctttggtcccttccaacttcaaaaccataaatggccagtcaagtctgaccttctctcctgcttccctcttccacaaataaagacccctgtgattaca

SEQ ID NO: 802117 - DNA, 120 bp, Artificial Sequence
  ENSG00000287525_0 (sequence is synthesized)
tggttcattgtgaaatgggagtggaaagaaaatccacagagttcagactgttctcaaacagatggattttagaagactaattaggaaagctaaagacctgaaaattgattcccttaaaac

SEQ ID NO: 802118 - DNA, 120 bp, Artificial Sequence
  ENSG00000287525_1 (sequence is synthesized)
tatatgcatccgcatatcccttggaaagtcttcacgcaccaaggatacagataccacagtttgaagactattacactaaattatctcctgagctttagtagatcttttaaaaactaaaat

SEQ ID NO: 802119 - DNA, 120 bp, Artificial Sequence
  ENSG00000287525_2 (sequence is synthesized)
tgccaatttatattttaacaaaaaaaatctgatcttaattgactctccggtataaatgaatgataaaaacttacaaatggactgcattctggaagttctgtttcctaatagggatcgtct

SEQ ID NO: 802120 - DNA, 120 bp, Artificial Sequence
  ENSG00000287525_3 (sequence is synthesized)
aaggtaagcatgccaagccagggatcccagcacaacagctcagggggtcagaactgcctctcagggcctctgcctctctgggatagaccggctgctactggtagccaagactccatcagc

SEQ ID NO: 802121 - DNA, 120 bp, Artificial Sequence
  ENSG00000287525_4 (sequence is synthesized)
agttatgcagtgcctgttccatagcccagatactgcaccaagtcagctgtctctctcctcaccacattctcccaaattccaatccttcacttccacaaacaccatggcccatgtgaatgt

SEQ ID NO: 802122 - DNA, 120 bp, Artificial Sequence
  ENSG00000287525_5 (sequence is synthesized)
ggagaatactgagccatgtgaaaatctaggccaagccaaactgagaaagttagcctagcaaaaccctttattgctgtggtttaaagaaagaaaaaggcagtccttttaatcaatcattag

SEQ ID NO: 802123 - DNA, 120 bp, Artificial Sequence
  ENSG00000287525_6 (sequence is synthesized)
agaaaaaggcagtccttttaatcaatcattagaacgctttctcgtgattggctgctctggaaaaaagagttctaataattaaaaggaagagaagccaggcatgttggctcacgcctgtaa

SEQ ID NO: 802124 - DNA, 120 bp, Artificial Sequence
  ENSG00000287522_0 (sequence is synthesized)
ccctgtattaaaaaaaaagaaaagaaatagggtcattgtagatgcaagtagttaaggatcttgaaatcatcctggatttagggcaggccctaagtccaatgacagctgtccttatcacaa

SEQ ID NO: 802125 - DNA, 120 bp, Artificial Sequence
  ENSG00000287522_1 (sequence is synthesized)
gaggagaggactcagaaagaagacaatgtggagtcaggcggagaatggggtgaggcatgtaagagccaaggatcgcccaggattgccggcagcctccatgcgtcaggacagacacgcgga

SEQ ID NO: 802126 - DNA, 120 bp, Artificial Sequence
  ENSG00000287522_2 (sequence is synthesized)
acggattctccctcagagcctccagaaggacccagccatgctgctactttgattttggactcgtggcctccagaactgtgcgggaatgcaggttacccccaagaccctggggaggccaca

SEQ ID NO: 802127 - DNA, 120 bp, Artificial Sequence
  ENSG00000287522_3 (sequence is synthesized)
gggcagtgtctcttcctgaccagcctctcctccctgaatcctagcactgattgtagaatcccagcagaccgcaatcctcagcctcaactacacagagcaaccagagtgtgagatgagggg

SEQ ID NO: 802128 - DNA, 120 bp, Artificial Sequence
  ENSG00000287522_4 (sequence is synthesized)
tggggaggctaatgtacctttgtccccagggaaggattagccacttttgaacttgtcactgtctgacggcctttgggtctttcatttgatttctgtttctattttatttatttatttatc

SEQ ID NO: 802129 - DNA, 84 bp, Artificial Sequence
  ENSG00000287522_5 (sequence is synthesized)
ttcatttgatttctgtttctattttatttatttatttatcctattttatttaaactacatcttggccaggtgcagtggctcact

SEQ ID NO: 802130 - DNA, 120 bp, Artificial Sequence
  ENSG00000287523_0 (sequence is synthesized)
agacactgcagagtgagaaacagatgatggttctgtggcaaacgtccttttgctgaatattctacctacgtggcaacaaaaactttggccccagcagtttctcactctccagctactcca

SEQ ID NO: 802131 - DNA, 120 bp, Artificial Sequence
  ENSG00000287523_1 (sequence is synthesized)
ctggcaacttccaacaatttgtcaaagtgaccacttgcatgctcttgccagtctatggctccagttgcttctgttccaggtaagcagacctctgctatattctctgtctctccagatttt

SEQ ID NO: 802132 - DNA, 120 bp, Artificial Sequence
  ENSG00000287523_2 (sequence is synthesized)
ggggtgatcatttgtcctgtacaagtacaagtcattgattttcagtttgtccagctttttcttgttgttaggataaaagtggtgacttccaagttcttatgtgttggaactgaaaccaga

SEQ ID NO: 802133 - DNA, 120 bp, Artificial Sequence
  ENSG00000287523_3 (sequence is synthesized)
agtctacatacttgtttctaaaaccgggtttcttaaaaactctctgaacctcagtttcaacatttgtgactggatgtaacaatatctaccttctatggtgattgtggggaataaaggaga

SEQ ID NO: 802134 - DNA, 120 bp, Artificial Sequence
  ENSG00000287523_4 (sequence is synthesized)
aaatgtgaagtgcctagcacataatacccagcaatgattggataatggtacccatcccctcctctcccctgcaatgaaatcactagaagtgtgcaggccaaagtagaaagaaccccgggt

SEQ ID NO: 802135 - DNA, 120 bp, Artificial Sequence
  ENSG00000287523_5 (sequence is synthesized)
aagaacaaggtgaagatttagtatcagaagggggaaaaagttctttacaatctttcctgcctctgattttccatagtcttctcactcccattttctaaatgtggtcactcttaagagaaa

SEQ ID NO: 802136 - DNA, 120 bp, Artificial Sequence
  ENSG00000287523_6 (sequence is synthesized)
ttaaagagcagttataacactaattaacattttcataataatagctagtccagttctgtacatgtgtaaatcaagacatcagtgtctctgctgcctacagaacttcacactggaaaattg

SEQ ID NO: 802137 - DNA, 120 bp, Artificial Sequence
  ENSG00000287523_7 (sequence is synthesized)
caattactttgctatcaaagcagaactgagaagcgtggaaatggtggcttctaaaagcctcttcgtttaacacagtgtccgaataggtcgataccatgctctgatagatgagcaatgact

SEQ ID NO: 802138 - DNA, 120 bp, Artificial Sequence
  ENSG00000287523_8 (sequence is synthesized)
ttgagcttcattgtggcccatcctttggttggcaagcagtggatggaatgatgacacaatagcatcccctgcaggactgaggtaacaaccccagaacttgagcggcgacttctttacctc

SEQ ID NO: 802139 - DNA, 120 bp, Artificial Sequence
  ENSG00000287523_9 (sequence is synthesized)
ttccccctccctctttcagtcccaggaaactaaagctgtaccttttcaaaatgtgggcaagctggattttgctgtgctttgctggaagatagtcacaacttgttgaacaactcccctgag

SEQ ID NO: 802140 - DNA, 120 bp, Artificial Sequence
  ENSG00000287523_10 (sequence is synthesized)
gaagatagtcacaacttgttgaacaactcccctgaggacaaagcaattgggcggctccgaacgctcagggaaagaagttgtgttggtaaagaaattgctggccaggtgcggtggctcacg

SEQ ID NO: 802141 - DNA, 75 bp, Artificial Sequence
  ENSG00000287523_11 (sequence is synthesized)
gggcagatcacgaggtcaggagattgggaccatcctagccaacacggtgaaatcctgtcatagtcccagctactc

SEQ ID NO: 802142 - DNA, 120 bp, Artificial Sequence
  ENSG00000287520_0 (sequence is synthesized)
tgcatggggaatatagtgggtctctataagatttataataatattcttgttccacttgcacctgacccttcctgccacaaagttttggtgcaaatagggatcatgagaattaatcattgc

SEQ ID NO: 802143 - DNA, 120 bp, Artificial Sequence
  ENSG00000287520_1 (sequence is synthesized)
cattaatcatcatgtgtcattccaacaattacaacagtaaagtaattattagaatgacagtagagttgcaattattggaatgacacatgctgattaatggcagtgagagtgggaaactcc

SEQ ID NO: 802144 - DNA, 120 bp, Artificial Sequence
  ENSG00000287520_2 (sequence is synthesized)
agcactttaggtatgaacaacctagacaccagaaagcacaaagggagagatgagcatttatgatctctttcacaatagacccaggagccttcttcaagaaggaaaaagccctggcgagct

SEQ ID NO: 802145 - DNA, 120 bp, Artificial Sequence
  ENSG00000287520_3 (sequence is synthesized)
ctccaaaactatcataaaaatcttaaattgaactgactcttggacttgccatcaccccatccctaaacaacttcctctaaaaataaggactgagctcaattatttgaaatctctggtgag

SEQ ID NO: 802146 - DNA, 120 bp, Artificial Sequence
  ENSG00000287520_4 (sequence is synthesized)
cctaagacaccatatgcagtgtggtctgttacatgcagaccaacacatgaggaggcaagttgaacgtactaccaacccataaccccaactgttacggatcttttttaggtgaggggttca

SEQ ID NO: 802147 - DNA, 120 bp, Artificial Sequence
  ENSG00000287520_5 (sequence is synthesized)
caacaattgcaaagcacattttgtctccaggatcactgtgttctccaaaaatattgcacttcttgtgtggatgctgagtcttaatggacctttctcatgaaaacatgacaacttgcattt

SEQ ID NO: 802148 - DNA, 120 bp, Artificial Sequence
  ENSG00000287520_6 (sequence is synthesized)
tagggctgtcataaaagaccttaaagagtttaataaaatatcaccagtagatgtacagggatctatgtgtagcactctgatgactgtagaggtgtcttcaaattgaagttatccttagct

SEQ ID NO: 802149 - DNA, 120 bp, Artificial Sequence
  ENSG00000287520_7 (sequence is synthesized)
aacccaaggaattttctggagaaataaccaactatttatgcacactatgtgaaaagcattccctatgttgatagtcaaacaattagaaaagctgttgcaaaatttggttcttactttagt

SEQ ID NO: 802150 - DNA, 120 bp, Artificial Sequence
  ENSG00000287520_8 (sequence is synthesized)
tggagtgattaatgatgcaacttcaggcaagcctcaactctaatattgttgaactggccagtgttgttacaaataatggaattgtcctaaacttcctccatggaagctaagaatgggcca

SEQ ID NO: 802151 - DNA, 120 bp, Artificial Sequence
  ENSG00000287520_9 (sequence is synthesized)
gtgcaatgctgaatatatcttgttgtacctatgttaatgccacattccaagtgaaaaggccgatccaaacttaaggagaaagatacctggatttctaaggtgcatcctgatggtttataa

SEQ ID NO: 802152 - DNA, 120 bp, Artificial Sequence
  ENSG00000287520_10 (sequence is synthesized)
gacttgctaagttggctgggtccgggcacctgcctgtgtggttgaggtcaataatacacattggccctattctgcttattagagtcctgttgatagtaattttaattaaatattatggaa

SEQ ID NO: 802153 - DNA, 120 bp, Artificial Sequence
  ENSG00000287520_11 (sequence is synthesized)
gacaaactggacatattttgtccaaccaccattgatcagattcatcggtgaggctaaccaagttatataattatggaaaaaatcacaagaagccaagagtggtatcgaaactagcagcaa

SEQ ID NO: 802154 - DNA, 120 bp, Artificial Sequence
  ENSG00000287520_12 (sequence is synthesized)
acattgttgagagacaattctccaaatatctcacatttctgcatctattaccataaaaggcactaattgttttctgacaaacagccttggaagagattgtgtcttcctctgaataaaagg

SEQ ID NO: 802155 - DNA, 120 bp, Artificial Sequence
  ENSG00000287520_13 (sequence is synthesized)
gaaggtttgtttactgtgtagtttataaagagtaatgtctctcactaaagcaaaggtcagggaaacttagctctcattataaaaattcagattccctattctcgagattatttttctgta

SEQ ID NO: 802156 - DNA, 120 bp, Artificial Sequence
  ENSG00000287520_14 (sequence is synthesized)
acagaccccagtgcttgtgctggtattatctgcatctcttcactctgtgtgaattggagattggggtgccagtacatatgtggacactctagcaactattgttactgttagtaaaaaaaa

SEQ ID NO: 802157 - DNA, 120 bp, Artificial Sequence
  ENSG00000287520_15 (sequence is synthesized)
gctattccctatctctgatccatgagtcatgtgagttctattaccattacaactgtagtatcctaatattttagtttgagaagaggataaaaatttaagaccatatacagttcttgacaa

SEQ ID NO: 802158 - DNA, 120 bp, Artificial Sequence
  ENSG00000287520_16 (sequence is synthesized)
atcttatttgagactgtatcatataataagttttatagttgtctcaaggaaaagcactcatgcaattatttgtgttgtaaataaattagtcacattttcatgaaacacacatttttagtt

SEQ ID NO: 802159 - DNA, 120 bp, Artificial Sequence
  ENSG00000287520_17 (sequence is synthesized)
atatttagcattttcttaaaatgaattaagtgaaagataaaaactaatagtatacattctcatgataaaattatcctacttatggattcttttcaggatcaatctcctgtggttgccata

SEQ ID NO: 802160 - DNA, 120 bp, Artificial Sequence
  ENSG00000287520_18 (sequence is synthesized)
tctattccagtttttatagtttccagaagtcctagtaacagtgaaagttaagaacttgttggcacctctttactcaaaaagggaaaatagggacagaagtcatctttgtaatttgtatgt

SEQ ID NO: 802161 - DNA, 120 bp, Artificial Sequence
  ENSG00000287520_19 (sequence is synthesized)
gagttaaaaagcaaatttatggatatattttgaaaccatagagggataggatttggatcaaaggtgtaaatgtagttgaaatgtttaatagtaatagatatgaaacaacacttgcccttc

SEQ ID NO: 802162 - DNA, 120 bp, Artificial Sequence
  ENSG00000287520_20 (sequence is synthesized)
tctcttccagagtcaaaatctgaaaataaagtagctataatgttgaacagctctactctaagtctacagggagagagaaaacaaaacaaataatcagttcagctcacctagatagaggac

SEQ ID NO: 802163 - DNA, 120 bp, Artificial Sequence
  ENSG00000287520_21 (sequence is synthesized)
aagatttatatttcagggagaaacattcaaaggcctcaattgcttcaagaaggcagattaatgaataatattgaaaagtttgaaatagaagccattattctcaggtaactgaatatatat

SEQ ID NO: 802164 - DNA, 120 bp, Artificial Sequence
  ENSG00000287520_22 (sequence is synthesized)
gcagaaaattacatgtatattcagaatattctaaatatgtataaaggatgtatatatgtacagaaaaatttaacattaataagtgatttaaagtcacaggatacaaaagccattttattt

SEQ ID NO: 802165 - DNA, 120 bp, Artificial Sequence
  ENSG00000287520_23 (sequence is synthesized)
ctatatgtcagttttcctatatctattgctacacaaaactgagtagcttatagctataatcagttccttatatctcaatatattgtgagtcaggagtgcaggtagcgcttcgctaggaaa

SEQ ID NO: 802166 - DNA, 120 bp, Artificial Sequence
  ENSG00000287520_24 (sequence is synthesized)
ttcttctggtccacacagtatcaccacaagtctgtgtggtggtgctgtagaacattcatgactgcctcatttacatgtctgatgtcttggtggaaatgcctcgaatcctaggctcagcta

SEQ ID NO: 802167 - DNA, 120 bp, Artificial Sequence
  ENSG00000287520_25 (sequence is synthesized)
ggactgtgggctagaccgcacacacacggcctctccaacatcgtagtctcaagatagtgagaaaatgtacatgccaactcaaaactcccagacatagcatatcaagagacaagaagtgaa

SEQ ID NO: 802168 - DNA, 120 bp, Artificial Sequence
  ENSG00000287520_26 (sequence is synthesized)
aattgcctgggctgggaaattggtagagggtattttttttattagcaaaagacattatagaacccatcaatattcaaggagacatgacaaggacctcaggtctccatgaggtaactgccc

SEQ ID NO: 802169 - DNA, 120 bp, Artificial Sequence
  ENSG00000287520_27 (sequence is synthesized)
caagaggaaagcttaagttctgtgccgagtactatatatagattttctcattcaatttactcatatagtccatttcatagataagaaaatcaaggcacacaaagtttaagtaaattggac

SEQ ID NO: 802170 - DNA, 120 bp, Artificial Sequence
  ENSG00000287520_28 (sequence is synthesized)
aaggttttaaaaactgactcttcatgaaaaacaaaaaacaaggaacttgaaggtgcccctttagagaagaaatgatttgatgattccacatatataaaggcaataccaatttcaaaaaca

SEQ ID NO: 802171 - DNA, 120 bp, Artificial Sequence
  ENSG00000287520_29 (sequence is synthesized)
tgtattgataacagtattaatctgtcacacagcatagagaacaaacttcagtggcaaaatgacaactcggaaatagccacgtgtggcaaaaaatcagtttatgtacagtattaatgaagc

SEQ ID NO: 802172 - DNA, 120 bp, Artificial Sequence
  ENSG00000287520_30 (sequence is synthesized)
aatgacttgaggatgtagacaggaaaaataatcatgccacaaaatgtcataatatgaagcaccattgtgtgtcggggcggggtggggggctgggtggtgttttcttgatacaaagaaagg

SEQ ID NO: 802173 - DNA, 120 bp, Artificial Sequence
  ENSG00000287520_31 (sequence is synthesized)
aagaacaaagaatgcatgaagctttcaagctgggaaaactaataaatgtacatgactgtatacagctttctaaaagcaggtacattgtgttaaacatgatttatatgtttagctcctggc

SEQ ID NO: 802174 - DNA, 120 bp, Artificial Sequence
  ENSG00000287520_32 (sequence is synthesized)
ttgaaaatgaaaatcagcactggattagcaagagctgttgaattttcctgaggtccaacactacaagaaactgttcaatgaaaactttattcccaagaagccatccaactggtttataaa

SEQ ID NO: 802175 - DNA, 120 bp, Artificial Sequence
  ENSG00000287520_33 (sequence is synthesized)
ctttatgcaactttagtacctggtaaattgagtgtgggggaaagggagcagagaagaaagaaggttcaatttactgggatgtataattcttgtttgtaaattgtaacaaacactagtaag

SEQ ID NO: 802176 - DNA, 120 bp, Artificial Sequence
  ENSG00000287520_34 (sequence is synthesized)
taaagaaataatagcttaaggtgaacagaactttttcccattaaatgtgtttaattagcacagatccttctctaggggccaggaaataatgacatcatgacggtccgtgacagtccttga

SEQ ID NO: 802177 - DNA, 120 bp, Artificial Sequence
  ENSG00000287521_0 (sequence is synthesized)
ggaggaccggaacaacggacctgatggacgtgctcccacttccgccggggtggtagactaggggtcagcctgtgtctccacatagctggtggggcctacacgcgccaactgtgctgtgca

SEQ ID NO: 802178 - DNA, 120 bp, Artificial Sequence
  ENSG00000287521_1 (sequence is synthesized)
gcccccgggccttcaggacaacacagccacgcagggcatcctcaagaacatcagtgatttgtccaagatcctagagctgagagagaatcgttgggccccaaatcccgtgcttttaccttt

SEQ ID NO: 802179 - DNA, 120 bp, Artificial Sequence
  ENSG00000287521_2 (sequence is synthesized)
gcatagcgtttatgatcgaaaagccctttttatgagccaggtggtagatgtggggcccagtttcgaacaacagatagtgagaatgcatgagttaagacgtgtaaagccctcagtggactg

SEQ ID NO: 802180 - DNA, 120 bp, Artificial Sequence
  ENSG00000287521_3 (sequence is synthesized)
gtggaacttaattgggagataaatgcaatacacacttagtgggaattaaagaccggaagatcatcttatagtgtcacctaaattcagcaaaacatacaaaaccatctatcctgtgtggga

SEQ ID NO: 802181 - DNA, 120 bp, Artificial Sequence
  ENSG00000287521_4 (sequence is synthesized)
gaccagaatataccttctcaaatatgaaggattgctgccctgaagacaagaaccagcagatgcaggagagctgtccacctgccctctttttacccagaagcaagacatagattagaaaga

SEQ ID NO: 802182 - DNA, 120 bp, Artificial Sequence
  ENSG00000287521_5 (sequence is synthesized)
gaaaaggtatcctgccccactcctttaccagggagaacaaaggttaaccactgaagacagcgtcagaccctcattagccttgaaatgatatcagaggaattaatattagctttttttaaa

SEQ ID NO: 802183 - DNA, 120 bp, Artificial Sequence
  ENSG00000287528_0 (sequence is synthesized)
gcacaccgagcggcagggcggcagcggcttcttgtagtcctctaggcagatgggcgtgtacatgctgcacaggaagaacttgagatcgggcgagcactggatctccaccagcggccagaa

SEQ ID NO: 802184 - DNA, 120 bp, Artificial Sequence
  ENSG00000287528_1 (sequence is synthesized)
ctggtgcacctccaggcccgcctcgtcttgcgtgtcgtggttgaactgattgggcatgtaggtgtagttgtagccgatgcccttacacagcggcacggtgatctcttggcatgccagctc

SEQ ID NO: 802185 - DNA, 120 bp, Artificial Sequence
  ENSG00000287528_2 (sequence is synthesized)
cttggccgaggcggccgcagcgccgctagagcgctgcagcagcgccaaggcggccagcagcgaggtcacttccaacagaaattcactatctctgcggttggcaccttgtttccagagggc

SEQ ID NO: 802186 - DNA, 120 bp, Artificial Sequence
  ENSG00000287528_3 (sequence is synthesized)
gagtctccagaacgcatcagctgcagatgaaaagtttgatgatgtggaatgtggaaattttgggaaagagatcctgttggaaggaagtactctttgctgtgtctgctgtcaccaggccaa

SEQ ID NO: 802187 - DNA, 120 bp, Artificial Sequence
  ENSG00000287528_4 (sequence is synthesized)
ggtgcacatggatggagataacaggcccacctgtgccactggctggcaggcccatgctcactttacatgcagctgctgctttggaatacggcgaccgcactgccattatttaagttgata

SEQ ID NO: 802188 - DNA, 120 bp, Artificial Sequence
  ENSG00000287528_5 (sequence is synthesized)
aattgattttttttctcatccacatgggaatatttgccagatattgaagctcttattatggcatgcattgtgcattagtttggtagatttcaggtccagtaaagacctcccgggtaaaag

SEQ ID NO: 802189 - DNA, 120 bp, Artificial Sequence
  ENSG00000287528_6 (sequence is synthesized)
tggcttagccaagaaggacatctcaacatatcaataagtctagaagcagacatttcaccgtcagttctttctgcagctccaggaggttagggctgcaggttggcttctagactgttggtt

SEQ ID NO: 802190 - DNA, 120 bp, Artificial Sequence
  ENSG00000287528_7 (sequence is synthesized)
tcccctttggttacagggggcctcccaccactgaattgtcacattggactgtggccagggctggaggactgctatgatatttttcttcccttaggaatgacagcctttccctgaaggccc

SEQ ID NO: 802191 - DNA, 120 bp, Artificial Sequence
  ENSG00000287528_8 (sequence is synthesized)
ttggctaacttcccctttgggcaacctggtctgaatctgtcacttggccactcttagctgcaagagaggctgtgaaagtgaggatctggagagtggctgttgatggggacactggtagcc

SEQ ID NO: 802192 - DNA, 120 bp, Artificial Sequence
  ENSG00000287528_9 (sequence is synthesized)
aggaaggggaggagggacaacccacagtgtcagatgcacattactgtgtgaaagcagtgaacttccaagcaataccattgagtcaacttccctggtcttacagcggaatttatgcagggt

SEQ ID NO: 802193 - DNA, 120 bp, Artificial Sequence
  ENSG00000287528_10 (sequence is synthesized)
tataaattaagcatgatctagatccaagaaaaccttgagatctacattttttttttgaagttcacacaatacagttctttgtacatttagtatgaaataaacgtcaagcagtttacagcg

SEQ ID NO: 802194 - DNA, 120 bp, Artificial Sequence
  ENSG00000287529_0 (sequence is synthesized)
tacaggcatgagccaccgcgcctggccacaatctgctaaataccaactggagttgtcaggtcttagatgcagcaactagttcaaagtgagaaggaccgaatacagtggctttccaagttt

SEQ ID NO: 802195 - DNA, 120 bp, Artificial Sequence
  ENSG00000287529_1 (sequence is synthesized)
ttcagctttgacctacgtaaaacaataaggagaacagaagcgaaaacaatacatgaagatatgacaaaaacattttgggagctaaacatctgatggaagaaggaaaactgactagggtcc

SEQ ID NO: 802196 - DNA, 120 bp, Artificial Sequence
  ENSG00000287529_2 (sequence is synthesized)
gaggaagttgaaacggtgggaacaacaagcggcaggccagtgttgacttcgttgccgctgaaaggcttgggactgggagcatcaagctttccaaaggtaggggtggaaggagggggctgg

SEQ ID NO: 802197 - DNA, 120 bp, Artificial Sequence
  ENSG00000287529_3 (sequence is synthesized)
aaatgaagggtgagtttaaactcgacataaggagcagttagaccctcatgttccctcctccagcctgggcagctgggtgactgcccctctcccactgcccccccagaaaaggcaggaggt

SEQ ID NO: 802198 - DNA, 120 bp, Artificial Sequence
  ENSG00000287529_4 (sequence is synthesized)
tgggtccctgggcttcaggttgtcagccagctgagggtgaagagggagagaaactgcagctattttctcctgactctagagcactagcagccaggttcatggtccccaggccagaggctg

SEQ ID NO: 802199 - DNA, 120 bp, Artificial Sequence
  ENSG00000287529_5 (sequence is synthesized)
cagggttcttctctggaagaaccgagcagcctaaaaattctctgggcattgagggatctcaacacaatggttgtctctgccacctcaccctgcagggaagatgcaaatcttcgaatttta

SEQ ID NO: 802200 - DNA, 120 bp, Artificial Sequence
  ENSG00000287529_6 (sequence is synthesized)
gagagcattcagttggcctttaagtgcctctgctcagatatgaaggagcaaaccagggtttgagggaagtctcttccatgaaagacagaagccaaaataaagacataaatggtggtgagg

SEQ ID NO: 802201 - DNA, 120 bp, Artificial Sequence
  ENSG00000287529_7 (sequence is synthesized)
aggaaaacaagtacaatgcagggaatgtaaaaatataatttatataactagactactaataatataataatataacttattaagaatgctcagggctgggggcagtggctcacgcctgta

SEQ ID NO: 802202 - DNA, 120 bp, Artificial Sequence
  ENSG00000230815_0 (sequence is synthesized)
ttcttgcttcttctgtaacatcatggcccctgcctctttggatactctaagatgtcaaatcgactgaggatgactcctgaggaccctttgagatgattaccatcgttgtaggtggaacca

SEQ ID NO: 802203 - DNA, 120 bp, Artificial Sequence
  ENSG00000230815_1 (sequence is synthesized)
acagaacatttttcctggttgctgcatagctcagttaatctgtatatcatgggagtgtgttattgagagcatttgcagaagggtggaaccaggagctcatggctcaagcaggaaaatgtt

SEQ ID NO: 802204 - DNA, 120 bp, Artificial Sequence
  ENSG00000230815_2 (sequence is synthesized)
tcattatttgcagagcaagagaatgaaactcctgagacctgaatttcagggctccttgaaatgatggatgcattcttttaacttggtggagaaaaagaacataataaattcgagaaaata

SEQ ID NO: 802205 - DNA, 120 bp, Artificial Sequence
  ENSG00000230817_0 (sequence is synthesized)
gcatttgagaatttaagtcacttgaccaaagtcagacaacagtgattatattactacagtgattctggagtgttctcaacaaataataacctcagaaacaagtaggcacttggagacatt

SEQ ID NO: 802206 - DNA, 120 bp, Artificial Sequence
  ENSG00000230817_1 (sequence is synthesized)
gggctgtggattcaggttgcctaggtttgaatcctagtcccaacatttactaaggctctctgatagtgggcacattatttaacttcctcagacctgtttccccatctacaaaattggatt

SEQ ID NO: 802207 - DNA, 120 bp, Artificial Sequence
  ENSG00000230817_2 (sequence is synthesized)
acctatgctccaagagagaggccatgtgggtacaccatgagaagtctgtcatctacaggaaaggaagagagccctcccaggaaactgactttgccagactttgacctggaacgtctattc

SEQ ID NO: 802208 - DNA, 120 bp, Artificial Sequence
  ENSG00000230817_3 (sequence is synthesized)
tccagaactgtcacaaatgaagattctgaaagagaagacagaatcactgagagaaactgggaagagcctcaacatgaagatgatgaaaatggagaccttcatcgtgatccacttctaatt

SEQ ID NO: 802209 - DNA, 120 bp, Artificial Sequence
  ENSG00000230817_4 (sequence is synthesized)
gagcaagagagagattacacagaggaggaacaaggtgtgcagcggacagccagtgccaagacctcagacacatgacaagcaatagtagccagaatcctggagtgaatagacatggagaag

SEQ ID NO: 802210 - DNA, 120 bp, Artificial Sequence
  ENSG00000230817_5 (sequence is synthesized)
agctgccttttcttctcaactgacaagtcacgtggaggaaataaatcccttgaggacagtgaagaaataactttgagatcaccttcccatccttccgatttcttcaatgagagcttaaat

SEQ ID NO: 802211 - DNA, 120 bp, Artificial Sequence
  ENSG00000230817_6 (sequence is synthesized)
ggattttcaaaaaatcagagagcttggacaaaaagttgaaacaagttcatatcctaagcatgatgaataagccatggcagcttacacagacttgaaggccaaccacctatgggctagcac

SEQ ID NO: 802212 - DNA, 120 bp, Artificial Sequence
  ENSG00000230817_7 (sequence is synthesized)
aaaggagttcagccttttttgaagtgggtggtttgacctctctttattgtggaagcaaagcaaatggccccaaaccatctggatctgctgttatcactagaggaattattgcccagaatg

SEQ ID NO: 802213 - DNA, 120 bp, Artificial Sequence
  ENSG00000230817_8 (sequence is synthesized)
tggaccaaaggttagaagactccacattggaatcctgggtccgccgttaaataatgaggaacaagcactacctcataagatcttaccctcatcatttataaagtgatgatttaaaaataa

SEQ ID NO: 802214 - DNA, 120 bp, Artificial Sequence
  ENSG00000230817_9 (sequence is synthesized)
gaacgtctattctccagaactgtcacaaatgaagattctgaaagagaagacagaatcactgagagaaactgggaagaggtaaatagtgttacagaggatactttactagaaaatggataa

SEQ ID NO: 802215 - DNA, 120 bp, Artificial Sequence
  ENSG00000230817_10 (sequence is synthesized)
ctcagacacgcctccctctttctctacctttctacctccctccctgccttccttctgttttcctttaattaagactggtgtctcagtgatgatctgaagagatgctcactgcgtgcttac

SEQ ID NO: 802216 - DNA, 120 bp, Artificial Sequence
  ENSG00000230817_11 (sequence is synthesized)
aagttcttccacacacgctgttctcagctgttctcatggtgtgcactctcctgctaagagctgcaaagtggggcctcttctgatttggtaaagaagaatctgactttgtgcaagaaataa

SEQ ID NO: 802217 - DNA, 120 bp, Artificial Sequence
  ENSG00000230817_12 (sequence is synthesized)
aaatggagtgtcttcttagcttttgtctcctgtcatttcagccctaagccgaaatccaaaaataatgggaaaattctatgccctgatataacacagaattataaaggaagctacaatatc

SEQ ID NO: 802218 - DNA, 120 bp, Artificial Sequence
  ENSG00000230817_13 (sequence is synthesized)
ccatactccttgcttcatactctagaatccatttaaatgaggtttaaaattgttccggttgagtcattccttccagtcaaggcatattctatctgaaggactcaaattaattagctacag

SEQ ID NO: 802219 - DNA, 120 bp, Artificial Sequence
  ENSG00000230817_14 (sequence is synthesized)
ttaacagattattaagtcaactggcttctacggagatggtgagagaggccatgtgggtacaccatgagaagtctgtcatctacaggaaaggaagagagccctcccaggaaactgactttg

SEQ ID NO: 802220 - DNA, 120 bp, Artificial Sequence
  ENSG00000230817_15 (sequence is synthesized)
ccagactttgacctggaacgtctattctccagaactggctccttcttcataggctgggggtgtatacaaagaggataatggcattaaaccagcaaggaagtgttgctctccaggatagaa

SEQ ID NO: 802221 - DNA, 85 bp, Artificial Sequence
  ENSG00000230817_16 (sequence is synthesized)
aactccaaaagattaagcaagaagcccataggaacacaattagtagagcactgaataatatttcactgtcctgatgtaccaagtt

SEQ ID NO: 802222 - DNA, 120 bp, Artificial Sequence
  ENSG00000283689_0 (sequence is synthesized)
actgcgcgccctgtacgcacatggagaaggaagggacacgcgcggagggagcgcgagtgtcagacctcgagcctcgacggccctgaagtcatagtgtttgtacaaagtggtggcaccaga

SEQ ID NO: 802223 - DNA, 120 bp, Artificial Sequence
  ENSG00000283689_1 (sequence is synthesized)
ccaggaggagctgagagcgagattccgaggtggggggaatggggctgcgctgtaagtgaccgagtgagactcccgatatttaatttagcttttttcagaaggaaaagaaaaaacaataat

SEQ ID NO: 802224 - DNA, 120 bp, Artificial Sequence
  ENSG00000283689_2 (sequence is synthesized)
gagcctcggagatgctccttctgcattaaccagctatcgacctgtctgcgtcggactgcgggcggcgagaaagaggacagggaagggccaggcggctcttagggactcagtcacgccggc

SEQ ID NO: 802225 - DNA, 120 bp, Artificial Sequence
  ENSG00000283689_3 (sequence is synthesized)
gggtggggggggggggcgcccacagcccaggggatgaacctccagaccgagacgtgcacccaagaacctcgcatattagatccctccaggctccccaggcctcgagcagaagcggcctcc

SEQ ID NO: 802226 - DNA, 120 bp, Artificial Sequence
  ENSG00000283689_4 (sequence is synthesized)
ggtcccccaactcgacaggtccagtggagcccggctgtgggctgaactcgagggtccgagggcagctgaaccttttccagggatttttaatccaacagattaaatgggtcagagtgacac

SEQ ID NO: 802227 - DNA, 120 bp, Artificial Sequence
  ENSG00000283689_5 (sequence is synthesized)
actcgcacagggaagaaaagcaggtgcacagaagtagatttgggaaagtcgcgcgcacgaacgcgcttcacgcagaagcttctccatcatcttgccttctttcaacattcccagcgcaca

SEQ ID NO: 802228 - DNA, 120 bp, Artificial Sequence
  ENSG00000283689_6 (sequence is synthesized)
aagcgctttggagactgactgcaggccctctcaatgcagcccagggagcggggagtgttcggagagggtgtctgtccatcgcacacgcttggcgcgcgtgcgccggatgcgcaccgggaa

SEQ ID NO: 802229 - DNA, 120 bp, Artificial Sequence
  ENSG00000283689_7 (sequence is synthesized)
cggctgcccgacgtgtgcccagggcccgcggcccgccaggttctgggggctgcgcctcgcacttcacaagaggggagtcaccaggcccgcttcctgccccctcctcgcccagcctcacgg

SEQ ID NO: 802230 - DNA, 120 bp, Artificial Sequence
  ENSG00000286063_0 (sequence is synthesized)
ggcagagctgggcagagcccgcctcggaggctcctggctgcccctctctgggtgtggggcctgtggggcgactctattcaggaaggatctgtctacttgatgcaggaacaagcccagtaa

SEQ ID NO: 802231 - DNA, 120 bp, Artificial Sequence
  ENSG00000286063_1 (sequence is synthesized)
agcctgcactgcagctgaaggaacgatctgtttgttctctaagaggcccctgcaggcgggagatgtcttaaataaccacccgcaggcagagagtaaaggactcagtgaagaaagaaactg

SEQ ID NO: 802232 - DNA, 120 bp, Artificial Sequence
  ENSG00000286063_2 (sequence is synthesized)
gagctcagtcctttgagggcagaaacgcatcccccacacccgtccgtgagctgagcacggccacgcctgggctttgtgggagcctggccaggcccagctcctgccctttgctgaacaggg

SEQ ID NO: 802233 - DNA, 120 bp, Artificial Sequence
  ENSG00000286063_3 (sequence is synthesized)
agtaaggggaagttagatagctgcagggacgtccttagcctgactggtccagccacctcactagcacgtggggcagatgaagctcagggaagccaagggacttttcccggatccccaggg

SEQ ID NO: 802234 - DNA, 120 bp, Artificial Sequence
  ENSG00000286063_4 (sequence is synthesized)
aataggacctgaggtcccagctcctgactccaaaatcagtgctctctctatggcctgaggttgctcagcacctgccaggcctgcgcggagcacttcagaatcattagcccatttaacccc

SEQ ID NO: 802235 - DNA, 120 bp, Artificial Sequence
  ENSG00000286063_5 (sequence is synthesized)
gactgccacaaacacatgagggatatgctgagtgttgcttttctactaacagaccccatatctctgcccacatgtatgccgaacatcaggccattcccattccagtgactcagcagtgaa

SEQ ID NO: 802236 - DNA, 120 bp, Artificial Sequence
  ENSG00000286063_6 (sequence is synthesized)
gaagtcacccatctcgggtttaaaattaactgcaatatgcgaaagagacaattccgcctggtggggaggtgtcacccactcagagaacacccctgaccttcccaaggaagccctctgcac

SEQ ID NO: 802237 - DNA, 120 bp, Artificial Sequence
  ENSG00000286063_7 (sequence is synthesized)
tccgacgccatgtccccgtgacctgcacaggactgtcaccatctggaattgatgccctctcttgcagttttgctattgtcatttgcacccacaggaatgtcacccacatgagtgtggaat

SEQ ID NO: 802238 - DNA, 120 bp, Artificial Sequence
  ENSG00000286063_8 (sequence is synthesized)
ttcatctgtctgttcgctgctggatccctgctctaagtaagaaaatggcctgtggcagagtgagctctgcatgaggatttgctgaagaattggatgagggaaagactcagagaatggaat

SEQ ID NO: 802239 - DNA, 120 bp, Artificial Sequence
  ENSG00000286063_9 (sequence is synthesized)
actgagaattctacaataaatatttgaatcctagaatgttggattcaggagaagcccttggaagccatttaggcaaacccattcatttgcaaaggggtaaactgaggctgaggagaaaaa

SEQ ID NO: 802240 - DNA, 120 bp, Artificial Sequence
  ENSG00000286063_10 (sequence is synthesized)
agtgacttgctccacatcccaaggcccaagggtcttctccctgctctgatgggagagggccccactttgtgctgttgtgtgtgtaagggtgatgtgtggctggagggtgaaggggcttct

SEQ ID NO: 802241 - DNA, 120 bp, Artificial Sequence
  ENSG00000286063_11 (sequence is synthesized)
tctgctctttgactcattgcctaggaaaatagggacaaaaggcacaaatttgttaaaatgcaaatgactgaaggcaacctcatttatgagagacagagctgttgtttggattaacagagg

SEQ ID NO: 802242 - DNA, 120 bp, Artificial Sequence
  ENSG00000286063_12 (sequence is synthesized)
aacagaaatgccgccctgaggatgaggagataagaaggggctgaaaggtgggtgagccccaaatgtgaccttcaactcttgggaggccataggcaaggactcagccaaggcaaaaccctc

SEQ ID NO: 802243 - DNA, 120 bp, Artificial Sequence
  ENSG00000286063_13 (sequence is synthesized)
aagaatttaatttaccgacagaaacattcacagaccgccctcggggcctgaggtctttccaaagacaagtccgagtgtgtgttcccggccgaggcccttcctccggcttctgtattagct

SEQ ID NO: 802244 - DNA, 120 bp, Artificial Sequence
  ENSG00000286063_14 (sequence is synthesized)
tcccgggtccgctctaacaaacaaccacaaactggtggctgaaaccatcagaacacttttccttacagttcaggaggccagaaagctggagtcggggtattggcaaggtcagtccttccg

SEQ ID NO: 802245 - DNA, 120 bp, Artificial Sequence
  ENSG00000286063_15 (sequence is synthesized)
gaggctccagggagaaactgttccccgcctcctcccaagctcccgcggtcccggtccctgcaaaccttgggatccttggctggcagatgcttggctctgatctctgcctctgtggtcaca

SEQ ID NO: 802246 - DNA, 120 bp, Artificial Sequence
  ENSG00000286063_16 (sequence is synthesized)
tgatgtcctccccatgtgtcctcacgcggcctgcttacaaggacacaaatcactgcacccaggacccactgtaatccagtgtggcttcagttttacctaactaagtacatttgcaaaggc

SEQ ID NO: 802247 - DNA, 120 bp, Artificial Sequence
  ENSG00000286063_17 (sequence is synthesized)
aggttctggatggacctgaacttgcaggggacactcttcaacccaggacagcttccccttaccccccgattagcatccaaacccctcccatgactgaggctacagggcggatgtgggtga

SEQ ID NO: 802248 - DNA, 120 bp, Artificial Sequence
  ENSG00000286063_18 (sequence is synthesized)
aggtgcagagcccgatgcccaggtgagggcccagctggtcaccaccccatctgcctgtgctcagcaggtcagggtcccagctgtccactccctgctataggttggcacacccccttctct

SEQ ID NO: 802249 - DNA, 120 bp, Artificial Sequence
  ENSG00000286063_19 (sequence is synthesized)
tgccctgtgctgtcccagggccccctccttgccctgtgcagtgaaagtgacctgctttggacatgcagcccctgtggttctgatgcaggcggggactggggatgcgcctggggctctggt

SEQ ID NO: 802250 - DNA, 120 bp, Artificial Sequence
  ENSG00000286063_20 (sequence is synthesized)
ttggttctgggcttctgtcattcactacaaaaggaccctgaggagccgccgccctgaggctgaggagagctccgcagggtggacgggaacctgatcccggggcccagcccccgtgcctct

SEQ ID NO: 802251 - DNA, 120 bp, Artificial Sequence
  ENSG00000286063_21 (sequence is synthesized)
cagcaggaagcagagtcccccgatggagcccaacaagcccaagggaccccagctcagatcagctgagccccgacgacctgcagccccaggagctgagacgtggcggcggttgtgcgtcac

SEQ ID NO: 802252 - DNA, 120 bp, Artificial Sequence
  ENSG00000286063_22 (sequence is synthesized)
tgagtttgggatggtttgtgatggggtattaccgtgacaacagctgagtagtacagaaatgtgatgctgggcacagactgacctctcagtctccccatctgtacaatgggctaataacag

SEQ ID NO: 802253 - DNA, 120 bp, Artificial Sequence
  ENSG00000286063_23 (sequence is synthesized)
attagcaggtggctgtgaagattaaaagagaacatacgtgtaaagtggcgcacggatcaatgcgcatcggctcccagcatcatcacacgggccacacgaccctgccgtctcatactgtcc

SEQ ID NO: 802254 - DNA, 120 bp, Artificial Sequence
  ENSG00000286063_24 (sequence is synthesized)
tcctcggtcaccctggctggaggcaaagccctcccccgtttccggaaatctccgactctttgcactcttcatcagtcttcacttgggtggattgttctgctgtctagagctcaactcgaa

SEQ ID NO: 802255 - DNA, 120 bp, Artificial Sequence
  ENSG00000286063_25 (sequence is synthesized)
cagcccctccgccaaagggcttccctgagagccgtgtctgcagccgaggctcctccccctcctgctggaggtccagggtccgtgggtgcacggggggcagcccaggatggcagggactct

SEQ ID NO: 802256 - DNA, 120 bp, Artificial Sequence
  ENSG00000286063_26 (sequence is synthesized)
ggctcttttgccctctggtgtgtccccaggacctagacccggcctgacactactcctggtggacttattgttagaaattggcaggtccttgctattcatgtctgtttcctccagtcttgc

SEQ ID NO: 802257 - DNA, 120 bp, Artificial Sequence
  ENSG00000286063_27 (sequence is synthesized)
tgctgagcacctgatgaacttcaaacaatagcaatgtctggagccaggtgctgatgacccccaggaggaaagttgcagaggatgacgggaacaagggggatgggcaggagtctaagcagg

SEQ ID NO: 802258 - DNA, 120 bp, Artificial Sequence
  ENSG00000286063_28 (sequence is synthesized)
cgctcagggaggcacctttgagaaggtgacatggggcaaggatgctgaaggaatggaggtctcatggattctaggggagatggtccaaggcagagggacagccagtgtgggcctggacag

SEQ ID NO: 802259 - DNA, 120 bp, Artificial Sequence
  ENSG00000286063_29 (sequence is synthesized)
gtgtgtgtagtgtgtctgaggggcagggggcaatgtgtctagaggaagatgtgcaaggaggacactgggggctgaggtcagaggggacacaactggatctgtgcgtgaccttgcatgccg

SEQ ID NO: 802260 - DNA, 120 bp, Artificial Sequence
  ENSG00000286063_30 (sequence is synthesized)
ctgaaagggcgctggctgtcactgtcatgaccagagcctctaagcaggtcttcacagaggtcaggctgactgcacttgtggatggattgaacagcagtagtaagaggacagcatgcatag

SEQ ID NO: 802261 - DNA, 120 bp, Artificial Sequence
  ENSG00000286063_31 (sequence is synthesized)
atgagggaggactcccaggatttgggctgcacagctggaagaagggaggagctcctgaatgaggagtgggaggtccgggaagggcagccttggtggagagagatgccgggacctgcagag

SEQ ID NO: 802262 - DNA, 120 bp, Artificial Sequence
  ENSG00000286063_32 (sequence is synthesized)
aaaccccctgaaaagaagggggctgagccagctctaccccaggctcagggccttccttcactgtaactgccaggacgatccaccatgctgtcactcagagagtgaaaccagcctgacttt

SEQ ID NO: 802263 - DNA, 120 bp, Artificial Sequence
  ENSG00000286063_33 (sequence is synthesized)
gcacttgtgtctctgagggataaaggtcaatgtcacagcagactccactctgatgctgtcttcaagccaaaaccttaatattcaatgagaaatctgcattgatgaaatgttcattaaata

SEQ ID NO: 802264 - DNA, 120 bp, Artificial Sequence
  ENSG00000262712_0 (sequence is synthesized)
aggaggtcgggcaggggaaagcctctcagaagctgagggccaggtggtgggggacagacaggagcgaggcttcagcacccaggagcacagctctccctgcatgacaggccaggtccccac

SEQ ID NO: 802265 - DNA, 120 bp, Artificial Sequence
  ENSG00000262712_1 (sequence is synthesized)
ccgggggctgggaggccagccatgaatgacctagcaccatccttgctcccggcgggctgggctggggctgcccgggcagtaggacattattgctatttcacagaagagtttccgttcgtc

SEQ ID NO: 802266 - DNA, 120 bp, Artificial Sequence
  ENSG00000262712_2 (sequence is synthesized)
gggggcagtgccgggagctgccgggggggcaccacaactgtccgcaggatgggctcagttcaccacagccggtttgagcagcaccgagcccggcgggatgaccacccagccaggggccaa

SEQ ID NO: 802267 - DNA, 120 bp, Artificial Sequence
  ENSG00000262712_3 (sequence is synthesized)
cgcctctgggctgctggcagctgagttgacgcccgtggacaggtccagcacggtgcctggcagcagggggagtccatcggggcttggccgggagcagctgctctccgtcctttcaagggg

SEQ ID NO: 802268 - DNA, 120 bp, Artificial Sequence
  ENSG00000262712_4 (sequence is synthesized)
cgtcttgtggccctccatgcccagggccctggtgggcaccgacccacgccccttctccccctcggccttgccaccagctgcgccagcaaggagggagaccacaggcaagcccagtccgcc

SEQ ID NO: 802269 - DNA, 120 bp, Artificial Sequence
  ENSG00000262712_5 (sequence is synthesized)
agccccaaagggcgagggcagcagcgggttcttggccagattgagaggcaggacggggcctggcagcccagggcccatgccccccccacccccactgcccccaccgttgccacaggccag

SEQ ID NO: 802270 - DNA, 120 bp, Artificial Sequence
  ENSG00000262712_6 (sequence is synthesized)
ggcactgaggtcaagggggccgggggccaggggtaggggtaagccgggcaggccagggcctccaaagagggcagctgggttggggatgatgatctgggccccactgacataggggccgcc

SEQ ID NO: 802271 - DNA, 120 bp, Artificial Sequence
  ENSG00000262712_7 (sequence is synthesized)
gtcgggggcgggcagtggcggcttggggggtgggcgcagctgcaggagctcttgctgctcgtgggacacaaagtggccatgggccttgatgtgcttgcgcagtgagctggggtccgtgta

SEQ ID NO: 802272 - DNA, 120 bp, Artificial Sequence
  ENSG00000262712_8 (sequence is synthesized)
agtagggcttgtccacatagtgggtgcgcgtgtgcttaaagcggtcactggagttggaatagcgcttgttgcagccctcgtaggggcagacgtagggcttctcacctgcagggtggtgca

SEQ ID NO: 802273 - DNA, 120 bp, Artificial Sequence
  ENSG00000262712_9 (sequence is synthesized)
gtgcagtgccgccatgaggggtctctccccttcctgggtctcaccccatgcactcaacatttccccgggccaagcactccctgggaacatagatgccccaattctgggggcagggggcat

SEQ ID NO: 802274 - DNA, 120 bp, Artificial Sequence
  ENSG00000262712_10 (sequence is synthesized)
ccccagcacatggcatgagatctgcccccaggcagggcacagaggctgaaaactcagcctggttgactccagctctgcctagcctcgccctgcaccctctgctacagaggatgtgccttt

SEQ ID NO: 802275 - DNA, 71 bp, Artificial Sequence
  ENSG00000262712_11 (sequence is synthesized)
agcctcgccctgcaccctctgctacagaggatgtgcctttcagcagcagaacatggccttggaggccgggc

SEQ ID NO: 802276 - DNA, 120 bp, Artificial Sequence
  ENSG00000262712_12 (sequence is synthesized)
tccagcctgggtgacagagtgagtctgtctcaagaaaaaaaagacaccatggccttggagatcacatcctggcacgaggcgcccagcgtgggcctggccacagggagtgctgcctgggcg

SEQ ID NO: 802277 - DNA, 120 bp, Artificial Sequence
  ENSG00000262712_13 (sequence is synthesized)
tgggcctggccacagggagtgctgcctgggcgctactgccctcactcaacaaatggctgaaggttcaccaggcatcttctgctgccctggccagagcagggggccacatgtagtgactga

SEQ ID NO: 802278 - DNA, 120 bp, Artificial Sequence
  ENSG00000262712_14 (sequence is synthesized)
cctcctgatacatggctctccacctggagatgtgctgccagggtgaaataaacaccaggaaaaaacatacacatcagctccttgaggctttgtcatgaaatgaagaacttcaatatctca

SEQ ID NO: 802279 - DNA, 120 bp, Artificial Sequence
  ENSG00000262714_0 (sequence is synthesized)
ccattgtttttattttttaaagtattttattttacttagcaatcagcagtacatagtagtttgacaaagcagaaagtgcatgcatttccctttcagtgttaactgtgaacacctggctgt

SEQ ID NO: 802280 - DNA, 120 bp, Artificial Sequence
  ENSG00000262714_1 (sequence is synthesized)
ctctcttcatgaatatttatggagataagtgttgggcattgtagtaaggcgaaaagagagatgaaaagatgaatggatgaagagacagaaagaaaactggcattgtttagtaataaatag

SEQ ID NO: 802281 - DNA, 120 bp, Artificial Sequence
  ENSG00000262714_2 (sequence is synthesized)
gtttaataacaaaaaaattaatgttactcaaatttaaaaagaaaaagtaactagagaactaaagaaattgctgttcttcaagagaactatattgaacaagaggaaatccttgttttgtaa

SEQ ID NO: 802282 - DNA, 120 bp, Artificial Sequence
  ENSG00000262714_3 (sequence is synthesized)
tatttctctatgagtgaaagaaagaaggtaagacagttatgagagactcagtatgtttgtgtccacatgattagacattcaaccttgcttacatttcttctccctctcttttgtcctcta

SEQ ID NO: 802283 - DNA, 120 bp, Artificial Sequence
  ENSG00000262714_4 (sequence is synthesized)
tggactgttttttaaattgttgtaaaattatttttactttgtcaagatttacttatttaaatttttgttccggacccatatttattcctgtaactgtttttctcaatttaacatttaaat

SEQ ID NO: 802284 - DNA, 120 bp, Artificial Sequence
  ENSG00000262714_5 (sequence is synthesized)
tctcattataccatgtgttctacattgatcaattaaatggttccaaccaccctcttacaaggacaaaaaagaaaaaaatatgtctggtcttaacaacaatgtagtaagccaagaaagaaa

SEQ ID NO: 802285 - DNA, 120 bp, Artificial Sequence
  ENSG00000262714_6 (sequence is synthesized)
aataaaatgtataaagattggggtaaaaaaacagccctcattaccattcattctgtagtaattttattccctagttcttcattgtgatcctcccttttttcttgggtaggggggtggatt

SEQ ID NO: 802286 - DNA, 120 bp, Artificial Sequence
  ENSG00000262714_7 (sequence is synthesized)
taagtatcaagtagttaaaatgttctcctctcaacctgtatcttgaataatgagaagaaaaatgttcttctctttgtctttgcacgtttgagaatccctactaaatttattagctccata

SEQ ID NO: 802287 - DNA, 120 bp, Artificial Sequence
  ENSG00000262714_8 (sequence is synthesized)
tactctatagcacaagcatttttagaagatttcttgtattccttggatcttagttttcccagaatgtgttcttccttggatgtttttcataccatgttctttctctcctgtattggtgtt

SEQ ID NO: 802288 - DNA, 120 bp, Artificial Sequence
  ENSG00000262714_9 (sequence is synthesized)
atttctgtgcataatgataatgacaggatcctttttaaaaaatattattgatcctaacgtggctggttttagccagacctctaattggctgtgattagtacagatgggttcttgtagaca

SEQ ID NO: 802289 - DNA, 120 bp, Artificial Sequence
  ENSG00000262714_10 (sequence is synthesized)
ctcctccaaaaatatttgtgacatctgtcttctaagctgcatctaatgcatttgatgttgcattctctgttcctttttaatagcagaggccttggggtaggggatgggagaacctgtcta

SEQ ID NO: 802290 - DNA, 120 bp, Artificial Sequence
  ENSG00000262714_11 (sequence is synthesized)
agaaaacctttagctctttgttgtaggcctgaagactgttctttcccctctcaactttgaataaatactcctggggtctcattctcccaactctacatattgcctcaaaaattggcaagc

SEQ ID NO: 802291 - DNA, 120 bp, Artificial Sequence
  ENSG00000262714_12 (sequence is synthesized)
ccctggcagcccctcccagtgtctgcagaagagtagtgtataagggcttctgctcttgatggtgtatttccttgatttttcctctcaagctgcctactctacctgcatctccccatcttt

SEQ ID NO: 802292 - DNA, 120 bp, Artificial Sequence
  ENSG00000262714_13 (sequence is synthesized)
taacagtgcctattaaatgatggcccatcaatattgttactgtaattcctaaactgattttcaaagcattcttatttttttctatcagagataaataaatcatttaggaagagattcatt

SEQ ID NO: 802293 - DNA, 120 bp, Artificial Sequence
  ENSG00000262714_14 (sequence is synthesized)
tgaacattcttgtttataagccaaagggtttccaaagaggaatagtttgaagattgacaaaaatggggataatttgtgagagtgaatgcctggagagtatcagggaacatctagaacata

SEQ ID NO: 802294 - DNA, 120 bp, Artificial Sequence
  ENSG00000262714_15 (sequence is synthesized)
caataagaggatacatggaagggcaacttttcctttgagacaggaagggaaagacatatggatgaaatgagtgaaattatacagagttgggatttcctcttgatggcttcttcttcaggt

SEQ ID NO: 802295 - DNA, 120 bp, Artificial Sequence
  ENSG00000262714_16 (sequence is synthesized)
agttgggatttcctcttgatggcttcttcttcaggtaaccacagagtctgagcactatcaaaaattcttcctgggccaggcatggactcctagtggattgcctgagctcaggagttcaag

SEQ ID NO: 802296 - DNA, 120 bp, Artificial Sequence
  ENSG00000286068_0 (sequence is synthesized)
agcctatcaaacgctcaagataaataatgagaaggtctctctctcctgcctccaggaaaaaactgcacagaggaaaaatgtttgctaaaccattaatatgttcatcccaggatgggaagc

SEQ ID NO: 802297 - DNA, 120 bp, Artificial Sequence
  ENSG00000286068_1 (sequence is synthesized)
agcttggtctaaaagaaacagagtggcacatgtgtttgtgtgtgaccagtggccccattcaacaggactcctggggcagcatccatggaggggcctcaggagacacacctaagcccttta

SEQ ID NO: 802298 - DNA, 120 bp, Artificial Sequence
  ENSG00000286068_2 (sequence is synthesized)
cccagtaacgtcggaaatgaatgtttctctggtggcagacagggtaccttctaaacctcttgactcatgagcaaattaactcaaggatggccaacaccctcttatcacttgagactcaga

SEQ ID NO: 802299 - DNA, 120 bp, Artificial Sequence
  ENSG00000286068_3 (sequence is synthesized)
agaagggaaatctcctctgaattcttttctgaccaggggccctgatgactgccccttgttgtcccttcatccctgtgtggaccattctcatggcatggtttctgtttcaggcatattaga

SEQ ID NO: 802300 - DNA, 120 bp, Artificial Sequence
  ENSG00000286068_4 (sequence is synthesized)
ggaagcttctggaaacagaatccgagatagaagtgatctcaagactttcaactcaaagctgctcgtcgatttccccagcaaatcttctgagttgactaaagatgagactgtaacatctca

SEQ ID NO: 802301 - DNA, 120 bp, Artificial Sequence
  ENSG00000286068_5 (sequence is synthesized)
acagattaggaagttacaagtgcatcagaaatttcactaaaaaggcatatcttccccaagacataaaacaatgtttccattgtttttgcttcagactctacagacacacaacactctgtt

SEQ ID NO: 802302 - DNA, 120 bp, Artificial Sequence
  ENSG00000286068_6 (sequence is synthesized)
ctaatcaagcatgtctggagttccgtaaacaatgtgaatctgtgaagcaggcacccagaaggaaggagggctgtccatgccctgaaaggcactcctcccttgacaggaagtacgggagga

SEQ ID NO: 802303 - DNA, 120 bp, Artificial Sequence
  ENSG00000286068_7 (sequence is synthesized)
cttccctgctgaggcggaacactggctccctcacaagatggcctcctgtgatggtgagcagagctagtgtcttcatattcttccctctctgctcacccacctgacatttctgccttgtct

SEQ ID NO: 802304 - DNA, 120 bp, Artificial Sequence
  ENSG00000286068_8 (sequence is synthesized)
cacttgcctgaacactcctcagttttcctgatctggaagctaactggatgacacttgtcctgttactacccatggtccctaatatgacacggagctatggaccagctcttagcaaaaccc

SEQ ID NO: 802305 - DNA, 120 bp, Artificial Sequence
  ENSG00000286068_9 (sequence is synthesized)
ctgagcagacaatcaatgaaggtatataaaatggcaaatgaagacttgagaattctactccatataatccttcctgacgaatctccaggaactgacagtttcctttgccatagcactatc

SEQ ID NO: 802306 - DNA, 120 bp, Artificial Sequence
  ENSG00000260620_0 (sequence is synthesized)
agcttaagaaggtactgtttgaaagagaaggagattccacgacaaaagcctcatctctcacctggacaagtgtgcagcctcctacctagcttctgcacctaatctctgcccctaccccta

SEQ ID NO: 802307 - DNA, 120 bp, Artificial Sequence
  ENSG00000260620_1 (sequence is synthesized)
cctaacacacacacagttcaccttgcgaaggacagtccatgataaggactctggaatgcccaagaggaaagggtgaagagacttgtagacccccgatatggtttggctgtgtccccaccc

SEQ ID NO: 802308 - DNA, 120 bp, Artificial Sequence
  ENSG00000260620_2 (sequence is synthesized)
atgtgtcatcggagggaccaggagggaggtaattgaatcatgggggcggctctttcctgtgctgttctcatgatagtgaataagcctcatgagatctgctggttttataagggggagttt

SEQ ID NO: 802309 - DNA, 81 bp, Artificial Sequence
  ENSG00000260620_3 (sequence is synthesized)
taagcctcatgagatctgctggttttataagggggagtttccctacaccagttctctcttgtctgctgccatgtaaaacac

SEQ ID NO: 802310 - DNA, 120 bp, Artificial Sequence
  ENSG00000260621_0 (sequence is synthesized)
gaagagctaccctgaccatgcctgctgtggctcattcacattacacaattcaaagttggcaaacgtggtgactaagcaagcaaaaagcttggctaaaaactcacatattcaaatcgatcc

SEQ ID NO: 802311 - DNA, 120 bp, Artificial Sequence
  ENSG00000260621_1 (sequence is synthesized)
ttgcagagctgaaccatcaggtgcagaaagacaagtccggcaaaccagaggcaccacatgaccacctcttccactgtctggacattcagcacaccaaagatgaaaatgaacttgtagaaa

SEQ ID NO: 802312 - DNA, 120 bp, Artificial Sequence
  ENSG00000260621_2 (sequence is synthesized)
ctgttgctaaggctggtcgcaaactcctgggctcaagtgatcccaccttggtctcccaaaagaatgcttttatatgtaatttggaaccatgtaaatgtttcacaaattcaaaaaataaac

SEQ ID NO: 802313 - DNA, 120 bp, Artificial Sequence
  ENSG00000260621_3 (sequence is synthesized)
acaaaaaagcaaaatatactacaaattaacaacgtgactccttaaagattttgagaacttaaacacactgtactctgaccagatatcttttgtagagaacaaaataaagtggaaaaaaat

SEQ ID NO: 802314 - DNA, 74 bp, Artificial Sequence
  ENSG00000260626_0 (sequence is synthesized)
acatgcttgtagtcctaaccggttgctaggttgctgtgagccaagttcgcaccattgcactccagcctgggtga

SEQ ID NO: 802315 - DNA, 70 bp, Artificial Sequence
  ENSG00000260626_1 (sequence is synthesized)
aaaaaaaaaaaaaaaaaccaccaaaaactgcttttgaatggagttgtacatacaatctttatgaaaaaaa

SEQ ID NO: 802316 - DNA, 120 bp, Artificial Sequence
  ENSG00000260625_0 (sequence is synthesized)
aagaacaggcgccggcctcggcgtccgccgcgcagttaggaaactgactgtcgctctctccggcctcggcgctgcttcggacgccccggcaccggcccccgttgctttgtagcattctgc

SEQ ID NO: 802317 - DNA, 120 bp, Artificial Sequence
  ENSG00000260625_1 (sequence is synthesized)
agctgggctgcaggcgccgtgggcctccgccagttgtgttcgagacgcggttcggccacagaagttttagcttgtgacttttggcaagtcagtggccctctctgggcctcaggtgccttt

SEQ ID NO: 802318 - DNA, 120 bp, Artificial Sequence
  ENSG00000260625_2 (sequence is synthesized)
ccaacacatagtaggtgctcaaaagatatttatgagtgaatgaatgcatcatgagaagaaattggaccagatgaggccctgtgaagctgcttgggtctttttttgttcttttttttttct

SEQ ID NO: 802319 - DNA, 120 bp, Artificial Sequence
  ENSG00000260625_3 (sequence is synthesized)
ctcttctgagtgtccctggcctggactagaaattctccatccttcggccttctgcgagactgcaggaacattacttttgaaggatgctaaggaatccgagggatgaaaaaaatcaagaga

SEQ ID NO: 802320 - DNA, 120 bp, Artificial Sequence
  ENSG00000260625_4 (sequence is synthesized)
ttgcaatgatgtcacaaaacaaggaaacaagtgcagcatcttcactccgaagcagaaatttgccaaaaaagcatcctctttttatcagaaaataaaatatcctggtttcttagcctggca

SEQ ID NO: 802321 - DNA, 120 bp, Artificial Sequence
  ENSG00000260625_5 (sequence is synthesized)
aaaaaagcatcctctttttatcagaaaataaaatatcctggtttcttagcctggcattcttggatccccacagtttgatcccaaccgacaactccttatttgaaacttcagattctccca

SEQ ID NO: 802322 - DNA, 120 bp, Artificial Sequence
  ENSG00000260625_6 (sequence is synthesized)
aaccgtcaccttcctcgtggacttaatcctggaaggcccttctaccccacttcgccttatctcacacaaacacagtctctctctgactgagataaacttgaacacttcttttcttttctt

SEQ ID NO: 802323 - DNA, 120 bp, Artificial Sequence
  ENSG00000260625_7 (sequence is synthesized)
tttttttttctttaaatttcgggtttcaaaatacaaatggcctaatcacaacatttctgtaatgttgtctaaattcaggtactggtttgaatagaggacaaaaataaaacaaggtttgaa

SEQ ID NO: 802324 - DNA, 120 bp, Artificial Sequence
  ENSG00000259837_0 (sequence is synthesized)
aacatgtgagctccttgagggtaatccctctctccctggtagccctagtactgccttcaggcagatatccacaaaagcaccttgcacagaaacatctttgagctattttaagaggcagca

SEQ ID NO: 802325 - DNA, 120 bp, Artificial Sequence
  ENSG00000259837_1 (sequence is synthesized)
ttattttactgacaaatgttcagaattgagctctctgacttgcccccagcccaacctctatggattgaccattctcctcagagagactgtgtatgcctgtgcaggcacacatgttgaggg

SEQ ID NO: 802326 - DNA, 120 bp, Artificial Sequence
  ENSG00000259837_2 (sequence is synthesized)
gaagacaggaagacctaccctcccccaggccctggcttctcttcagacagtgccattcacactgagcctcacaggcaagtactgcctggtgtaacttggggagtgatggggcctgctgac

SEQ ID NO: 802327 - DNA, 120 bp, Artificial Sequence
  ENSG00000259837_3 (sequence is synthesized)
ttcacacacaagcctgagtttccagtcatcaccagcagcaccttcagtctttgagagccttcttaatgaacacacatattttacctggatcaagacactgtgttatctggcaaaggttgc

SEQ ID NO: 802328 - DNA, 120 bp, Artificial Sequence
  ENSG00000259837_4 (sequence is synthesized)
ccatttaaaatgagtgactggaaaggttcgtttatctggtcaaccctctactgcccccctattgtcacccctttgggattagaatcctgaaagaatgatgagaagaaaggctacatatgg

SEQ ID NO: 802329 - DNA, 120 bp, Artificial Sequence
  ENSG00000259837_5 (sequence is synthesized)
agagacctgagaaaccccgaatctttcttgagaggaggaaatcagacacctgcacagtccagcagcctgatcccaggagccagggagcagggagcagaggagagttccagggaccagaag

SEQ ID NO: 802330 - DNA, 120 bp, Artificial Sequence
  ENSG00000259837_6 (sequence is synthesized)
ccaggaagtgggattaaaggctaacactggccacacaagacggaccgctgcacaggaatttacagttcacagagcactttttcatctccttaaaatctcataaaatcgcagtgaattgag

SEQ ID NO: 802331 - DNA, 120 bp, Artificial Sequence
  ENSG00000260629_0 (sequence is synthesized)
ttagcagtaactgctgaattcctggttggctgatggaaagatggggcagctgttcactggtacgcagggttttagatgtatgtacctaaggatatgaggtatggcaatgaacagaaattc

SEQ ID NO: 802332 - DNA, 120 bp, Artificial Sequence
  ENSG00000260629_1 (sequence is synthesized)
ttttgggaatgagttttagggccattaaaggacatgacctgaagtttcctctgaggccagtccccacaactcaatataaatgtgtttcctgcatatagtcaaagttgccacttctttttc

SEQ ID NO: 802333 - DNA, 120 bp, Artificial Sequence
  ENSG00000260629_2 (sequence is synthesized)
ttcatatcatcgatctctgctcttaaagataatcttggttttgcctcaaactgtttgtcactacaaactttccccatgttcctaagtaaaacaggtaactgcctctcaactatatcaagt

SEQ ID NO: 802334 - DNA, 120 bp, Artificial Sequence
  ENSG00000260629_3 (sequence is synthesized)
agactaaaatattgtgtctctaatatcagaaattcagctttaatatattgggtttaactctttgaaatttagagtctccttgaaatacacatgggggtgatttcctaaactttatttctt

SEQ ID NO: 802335 - DNA, 120 bp, Artificial Sequence
  ENSG00000260629_4 (sequence is synthesized)
agcatcctgaacctctaagtatgaggacagtaagccttaagaatataaaataaactgttcttctctctgccggtggaagtgtgccctgtctattcctgaaattgcttgtttgagacgcat

SEQ ID NO: 802336 - DNA, 120 bp, Artificial Sequence
  ENSG00000260629_5 (sequence is synthesized)
gagacgtgcagcacatgagacacgtgcagcagcctgtggaatattgtcagtgaagaatgtctttgcctgattagatataaagacaagttaaacacagcattagactatagatcaagcctg

SEQ ID NO: 802337 - DNA, 120 bp, Artificial Sequence
  ENSG00000260629_6 (sequence is synthesized)
tgccagacacaaatgacctaatgcccagcacgggccacggaatctcctatcctcttgcttgaacagagcagcacacttctcccccaacactattagatgttctggcataattttgtagat

SEQ ID NO: 802338 - DNA, 120 bp, Artificial Sequence
  ENSG00000260629_7 (sequence is synthesized)
atgtaggatttgacatggactattgttcaatgattcagaggaaatctcctttgttcagataagtacactgactactaaatggattaaaaaacacagtaataaaacccagttttcccctta

SEQ ID NO: 802339 - DNA, 120 bp, Artificial Sequence
  ENSG00000131007_0 (sequence is synthesized)
atctagtctttcccagagacagattgaacttcaaggtaaaagtgaattttcagatgcggacaagctaacttctaaggattatgagtaattcgactcatcttttaaatatccagaaaacct

SEQ ID NO: 802340 - DNA, 120 bp, Artificial Sequence
  ENSG00000131007_1 (sequence is synthesized)
catttttagtgaaagagtggagataaaagaatattaagagtccagaaactggtgttctggctgtggccctgccttagactgtctcactttgtagtcactttatgcaggaaacgtgcccgg

SEQ ID NO: 802341 - DNA, 120 bp, Artificial Sequence
  ENSG00000131007_2 (sequence is synthesized)
gcatcttgaaatggatgagttctcttctggagatatgtctcatgtgtacgcatatctggagatatgcctcttgtgggtgctgctgcagctgctgtgcccatctcatatcaatacccaagc

SEQ ID NO: 802342 - DNA, 120 bp, Artificial Sequence
  ENSG00000131007_3 (sequence is synthesized)
ttttctcatgacgaaccagatgactcttggtaaccaggtttgctccccagcttctaatttcaatatgatgagaagttacataacatttactcctttgtaaaggtttctctgtcatcagac

SEQ ID NO: 802343 - DNA, 120 bp, Artificial Sequence
  ENSG00000131007_4 (sequence is synthesized)
aaaactctgaatagaaaccggtgggtaatccagtgtactggtttttcctaatgtatttggtactatagtgtatgaaccgagaataatcgagtcaagtgaaacccccttttccagtcataa

SEQ ID NO: 802344 - DNA, 120 bp, Artificial Sequence
  ENSG00000131007_5 (sequence is synthesized)
aatgtctcattcattatactaaaaggagctgttcttttaaaaaagccttcttatttttctactaaatttttagataagtataacctactatattcctcaaatctaggcttacatttgaga

SEQ ID NO: 802345 - DNA, 120 bp, Artificial Sequence
  ENSG00000131007_6 (sequence is synthesized)
ttttcccagcatatttctgttttctacctaaacattaagatacacatttttctaggcattagaaatagtacaatattgcctgtggtctttccatttgacacctgtggctggaatatatgt

SEQ ID NO: 802346 - DNA, 120 bp, Artificial Sequence
  ENSG00000131007_7 (sequence is synthesized)
gtcgctccagaatttatatgttggaatttaaatgcccctgtgtgatagaattaaaaagtggggactttgggaggaggttaagagtgcaattagagaccttataaaagaactcaatggaag

SEQ ID NO: 802347 - DNA, 120 bp, Artificial Sequence
  ENSG00000131007_8 (sequence is synthesized)
tagctaggctttttagcccttccaccattagaggacactgtatttgtcctctctggagaacacagcaacaaggtgccatcttggaagaagagacccaccttcaccagacattggacctat

SEQ ID NO: 802348 - DNA, 120 bp, Artificial Sequence
  ENSG00000131007_9 (sequence is synthesized)
tagtgccttgatcttggacttcccagtgtctaaaactgtaagaaatttatttctttccagtttcataagttacccagtccaaggtactgtgttatagcatcaggaacatactgagatggc

SEQ ID NO: 802349 - DNA, 120 bp, Artificial Sequence
  ENSG00000131007_10 (sequence is synthesized)
atatttattgtggaaattttggtcctcatacttaatgaatgggcttcaagtatttcgttagtttttaaaaacagggctcctcctttacaattgatctcatttttattttttaaaagttag

SEQ ID NO: 802350 - DNA, 120 bp, Artificial Sequence
  ENSG00000131007_11 (sequence is synthesized)
cttttacaacatagaactggaaaaaatctctactcagacctctagagtgtcctagattttgtggcagaatcactatggataatttataggtgcttgtgatctcatctgtgtattatttac

SEQ ID NO: 802351 - DNA, 120 bp, Artificial Sequence
  ENSG00000131007_12 (sequence is synthesized)
aacaacagccctgctctggtccctccaaaagccgacgaatccacacaagactaaagatgaagaagaggacaacaagcccagctctaatcacactccagaagataactagtctacgcacag

SEQ ID NO: 802352 - DNA, 120 bp, Artificial Sequence
  ENSG00000257023_0 (sequence is synthesized)
gggaactgctagtctggaaagcggggctgcttctccgggatgagcccgagccctgccaagcccctcaaggcattgaagctttagctcaccttatccgaatggtcattgggcatctggact

SEQ ID NO: 802353 - DNA, 120 bp, Artificial Sequence
  ENSG00000257023_1 (sequence is synthesized)
tgagttaacgactgaatttttctgggaagcaagggacacgttctaaaataaccccaggatcactctccgaacttggcctgagtctaggcaagcagtgttactcggtcgccttgatcttgg

SEQ ID NO: 802354 - DNA, 120 bp, Artificial Sequence
  ENSG00000257023_2 (sequence is synthesized)
agctgctgtgtactggggacctcatactagttgggttaactatattcccattagcagtacgcgggatcgcagtactcgggacaagctgagttcagctgctatgagtaacacgatctggaa

SEQ ID NO: 802355 - DNA, 120 bp, Artificial Sequence
  ENSG00000257023_3 (sequence is synthesized)
ggagtgatacagtgactggaggctaagagataatgtctgcaagtcacctaaaaccattgcagacacagggagattgatggatttggaggacttctggttgtgaagactctgacgattgct

SEQ ID NO: 802356 - DNA, 89 bp, Artificial Sequence
  ENSG00000257023_4 (sequence is synthesized)
ataaaaacaggcagaatgtagccctattaattgtaaactggcaagataaaccaggatgccagtaaccactagacgacagattgtcaaga

SEQ ID NO: 802357 - DNA, 120 bp, Artificial Sequence
  ENSG00000257023_5 (sequence is synthesized)
accaggatgccagtaaccactagacgacagattgtcaagaaatccagtaataaccatccacaagagtttaaagtacagtgaggcaaaatcctgatggctttaaaagaataaagcctactg

SEQ ID NO: 802358 - DNA, 120 bp, Artificial Sequence
  ENSG00000257023_6 (sequence is synthesized)
taccaattagtaaacttttatgatagtgttagaccattagtgataatgaggaaacattggatttaatatatttgaactgtggtaagatgtgattctttctttttgtcaacacattaaaac

SEQ ID NO: 802359 - DNA, 120 bp, Artificial Sequence
  ENSG00000250033_0 (sequence is synthesized)
tgctcttccgccatgattgtgaggtctctccagccacgtggaactttttcatcagcttttcatgtttcactggggagtgcatcctgagaggtcgtcacactatcatcttggaagtgaatc

SEQ ID NO: 802360 - DNA, 120 bp, Artificial Sequence
  ENSG00000250033_1 (sequence is synthesized)
tcttacatttcagttttaaagggaaaaacaacatgaactgttcgtctatctatatcgtcattattttttacctcatggattgaaacaaattttaaaggaaaaaagaatgttaagaaagag

SEQ ID NO: 802361 - DNA, 120 bp, Artificial Sequence
  ENSG00000250033_2 (sequence is synthesized)
cagcacttactatcagggaggcacctcacgagcattgtaaacactcagaatcttccaggtgcgtttttataatgacactctatcaagccactgagatcaactgccagagctcaatctgct

SEQ ID NO: 802362 - DNA, 120 bp, Artificial Sequence
  ENSG00000250033_3 (sequence is synthesized)
aacacactggaggaagattgtgctatatttcatgcatgctctgcgccaccaccaagggacagtcccatctgttatttgctctcagctttgcttactgataaaacaggaaggacagcttgc

SEQ ID NO: 802363 - DNA, 120 bp, Artificial Sequence
  ENSG00000250033_4 (sequence is synthesized)
tgatgggctctttgaagcaaatggatcctctctttcctggaattaatgtttataaattatttctacagtagacagcatgtatggtaccatgatttcaaaattagtttcaataaattaagg

SEQ ID NO: 802364 - DNA, 120 bp, Artificial Sequence
  ENSG00000250033_5 (sequence is synthesized)
gcctgcattcattacaagaggagcttgattacaatgcaactcatggagtttactgttgtgctctaccttttgtgaaaattgctgcatgaaattaaacactctcattaattctgttgatta

SEQ ID NO: 802365 - DNA, 87 bp, Artificial Sequence
  ENSG00000250033_6 (sequence is synthesized)
gaagaaagagacacagattagcatttgaatgggtggactgagtaaagcagatggccctcgtcagtgttggtgggaattgtcctatcc

SEQ ID NO: 802366 - DNA, 120 bp, Artificial Sequence
  ENSG00000250033_7 (sequence is synthesized)
cagatggccctcgtcagtgttggtgggaattgtcctatccattgagggcttaaatgaaacaaagactgaggaaggctgaattcaatctctgctgactgctggggctgagacatcaatctt

SEQ ID NO: 802367 - DNA, 120 bp, Artificial Sequence
  ENSG00000250033_8 (sequence is synthesized)
cctgggtctccagcttgcagatggcagatcgtgggacttcatgggacttctcagactccataaccaagcaagccattttacttactttggactcattttcttaatccaaaaatggaagta

SEQ ID NO: 802368 - DNA, 120 bp, Artificial Sequence
  ENSG00000250033_9 (sequence is synthesized)
aggcttgtcatctgtcttattcatagtcacagggctgaggagctacagtctaaatgcatacgcatgttgggaaccgaagtcagccatcttccctaggacaaatctttactcttctaaaga

SEQ ID NO: 802369 - DNA, 120 bp, Artificial Sequence
  ENSG00000250033_10 (sequence is synthesized)
aggacaagaataaggatttgaatgactttcatcgtaatgaaggcttctgcagagtaattgattttgaccatgagtacctgttgaagtcacagcaacttctccttctagattatcttacag

SEQ ID NO: 802370 - DNA, 68 bp, Artificial Sequence
  ENSG00000250033_11 (sequence is synthesized)
tctgtctggcaagcgccgcgcgcatcctcggttcccgccgcgccgttgccgccgctcctctccctcct

SEQ ID NO: 802371 - DNA, 82 bp, Artificial Sequence
  ENSG00000250033_12 (sequence is synthesized)
agagccagcgagggctgccagcaagctgtcacctctcaataggaactggtaccaacctacttacgaagaagtatttgtttta

SEQ ID NO: 802372 - DNA, 120 bp, Artificial Sequence
  ENSG00000250033_13 (sequence is synthesized)
cttactagaaactgcaagactgcacaacatgatggtatttattccaggaacaggagccagtcctgggcacacacataaagggacttccttcactccccagaagaagagaaagcatgctga

SEQ ID NO: 802373 - DNA, 120 bp, Artificial Sequence
  ENSG00000250033_14 (sequence is synthesized)
cacacatctgcccaagcaatcagaaggcagctaaagccgccacagtcttcactcaccaacagttagaccttttcaattgattttattgaagaaagtgagtgctgagcaccatgagttctc

SEQ ID NO: 802374 - DNA, 120 bp, Artificial Sequence
  ENSG00000250033_15 (sequence is synthesized)
ataaacaatccattttggcaaatgctttaagaatgttggttaattgcagttaggcagcatcgacgtattttattttttggaaagcaagaagctggcttaccaacattaagttaaacaaca

SEQ ID NO: 802375 - DNA, 120 bp, Artificial Sequence
  ENSG00000250033_16 (sequence is synthesized)
tgtaagggttagaaatatgaatcaacaaactattagggtggtaccatctctttataataaaacaatgtagattgattaagtatagcctaaaagtttaccacaaatcataactacatttaa

SEQ ID NO: 802376 - DNA, 120 bp, Artificial Sequence
  ENSG00000250033_17 (sequence is synthesized)
gctttgaatttcatgactagtgattaattttgcatgtcaacttgactgagcttatagaatgcccaggtatctgattaaacgttatttctggaggtgtctgtgagggtgtttctgtaagag

SEQ ID NO: 802377 - DNA, 77 bp, Artificial Sequence
  ENSG00000250033_18 (sequence is synthesized)
tgagaatttcctgagcctgcgaggcggaggttgtggtaagccaagattgtactccagcctgggtgataaagtgagac

SEQ ID NO: 802378 - DNA, 120 bp, Artificial Sequence
  ENSG00000250033_19 (sequence is synthesized)
ggcagatcgtgggacttcatgggacttctcagactccataaccaaggctgaggagctacagtctaaatgcatacgcatgttgggaaccgaagtcagccatcttccctaggacaaatcttt

SEQ ID NO: 802379 - DNA, 120 bp, Artificial Sequence
  ENSG00000250033_20 (sequence is synthesized)
actcttctaaagaaggacaagaataagaattgaaaacacttttcacagtatagacatctatagtgtgtaaaaccatctttacaaaacccatatatacagaaaaatctcagtcttcaattt

SEQ ID NO: 802380 - DNA, 120 bp, Artificial Sequence
  ENSG00000250033_21 (sequence is synthesized)
gaaggttctttgccgtgctaacatatgttgtagagaatgaccacatagtaattgtctagtcttttctcctaaccccaataggatttgaatgactttcatcgtaatgaaggcttctgcaga

SEQ ID NO: 802381 - DNA, 120 bp, Artificial Sequence
  ENSG00000250033_22 (sequence is synthesized)
gtaattgattttgaccatgagtacctgttgaagtcacagcaacttctccttctagattatcttacagcagtggaccagacagcagtgctcaagagagaaatgctatcaaacaaaaagtgg

SEQ ID NO: 802382 - DNA, 120 bp, Artificial Sequence
  ENSG00000250033_23 (sequence is synthesized)
ttcaatactggcatcctgtggctggagagatttatcaaatctctgaaaatctcagctccttggattctgaacattccctggctgtcagttctcagcagcctttcaccattttccgagtgc

SEQ ID NO: 802383 - DNA, 120 bp, Artificial Sequence
  ENSG00000250033_24 (sequence is synthesized)
tcagggtaaaaataaatgataatataaaggttttggaattttacctaatgaaagaacatgatattaaatcattgaacaaactgctccaagcaaaggctcttggtctctaagttcacattg

SEQ ID NO: 802384 - DNA, 120 bp, Artificial Sequence
  ENSG00000250033_25 (sequence is synthesized)
agtttctctctaacaaaatgatcatagagtagttgggagaagggacagggcgctgcttcaggattttgttgtttgtgcgtctgtgtgtgagtgttttgttttggccaaaggctaagaaaa

SEQ ID NO: 802385 - DNA, 120 bp, Artificial Sequence
  ENSG00000250033_26 (sequence is synthesized)
tacttcctattgcagcaataaatattatgaattttctttattttactacaagaatgctgcctcagagaaaaatcaaacaaaattacggaggactgttgctttttgctactcactttcaag

SEQ ID NO: 802386 - DNA, 120 bp, Artificial Sequence
  ENSG00000250033_27 (sequence is synthesized)
gcagctataaagataaagagttacaatgatcgcagtttaaaagcagaattgccatgctccctggtaagacttaatggcatttttgagaaccaaataaccattatgggactactccattgc

SEQ ID NO: 802387 - DNA, 120 bp, Artificial Sequence
  ENSG00000250033_28 (sequence is synthesized)
tgctagtttcacaaatggctaacactaaatttggaggccttggaaatgttcaaaacatcattagagatagaaaaatagcaacaaactttaaaattacatgaacaccaaaagacatcaatg

SEQ ID NO: 802388 - DNA, 120 bp, Artificial Sequence
  ENSG00000250033_29 (sequence is synthesized)
aaggatcaagcatgaaaaccgcttgttgagatgaactgacaaagaaataatacaaagtacacacgtgcttgttagcaagaggaaagaactattagagttggctgactccaaacaggagga

SEQ ID NO: 802389 - DNA, 120 bp, Artificial Sequence
  ENSG00000250033_30 (sequence is synthesized)
acaaaatgcctgctaaagtgggatcgaacaatggctttgctctttcatcatgctccctttcttctagtctaactctaggaccaccagctctttcttcctcaattctcttaattttctgtg

SEQ ID NO: 802390 - DNA, 120 bp, Artificial Sequence
  ENSG00000250033_31 (sequence is synthesized)
ctgctcaggggttttaactgtcttggttagtatgggagacagacagatttcacagcgatgagtgctaatctatcctaaatgttagcaatgaataaagcaaccctaatggtaaatggtatt

SEQ ID NO: 802391 - DNA, 120 bp, Artificial Sequence
  ENSG00000250033_32 (sequence is synthesized)
taataagatcccttttccctcagaacaggctctatatttagtgtctagaacacagaaaacttaaaaatattccacagaaagctagtgtgatctgagaagaaatagagattaaatactcag

SEQ ID NO: 802392 - DNA, 120 bp, Artificial Sequence
  ENSG00000250033_33 (sequence is synthesized)
ttaaggcaatcagtgtgcctgtgtcagccataaagcacctcatttgtatagtaacatttctttggggaaacaaaatccagatataaatattagtataagatctaaagatgcaaaattcca

SEQ ID NO: 802393 - DNA, 120 bp, Artificial Sequence
  ENSG00000250033_34 (sequence is synthesized)
attgaatgctaataaaaggtattaataaaactctgctttaaaggactgacttctcaatgagtctgcacagcacactagagattcaatatgcatatcaaggtttttggttgtttgtttttt

SEQ ID NO: 802394 - DNA, 120 bp, Artificial Sequence
  ENSG00000250033_35 (sequence is synthesized)
tagtaacactggcattatttattaataatttaaccagaaatctccccaaacttttaactggaatttaaaaaattaattatggtaaagtaagtaaattaaaacaaagaaaaagtatgaaag

SEQ ID NO: 802395 - DNA, 120 bp, Artificial Sequence
  ENSG00000250033_36 (sequence is synthesized)
acaaagaaaaagtatgaaagctatgttctaaactcaccacattcaccagcgagaatagatctgcccttctggctatatttgttacctacctatctctctctctctctctgtctctctctc

SEQ ID NO: 802396 - DNA, 120 bp, Artificial Sequence
  ENSG00000250033_37 (sequence is synthesized)
tctctttccctctctctctctctctctccgccccccccacttccacaagggatccagtctagaaagagcatgaacttagaagtccagcagatgtgggttcaattcctagttctatggttt

SEQ ID NO: 802397 - DNA, 120 bp, Artificial Sequence
  ENSG00000250033_38 (sequence is synthesized)
aaaatacatacactcaaaaataaattctccattttcctgagctctggtgttctcatctggacttgggaataatagcacctcacacatcaaccttgttgaggattgcttgagatgatcatg

SEQ ID NO: 802398 - DNA, 120 bp, Artificial Sequence
  ENSG00000250033_39 (sequence is synthesized)
taggggagaggactcaggagagcctctgacagagagatatgctttcaacacaggctattcataagcacccttcctacctagtcatctactatgttttctcctcccccagtttaactggtc

SEQ ID NO: 802399 - DNA, 120 bp, Artificial Sequence
  ENSG00000250033_40 (sequence is synthesized)
accaagtcttgctgatttttccttttagtatgtttcactttctctcagaccctgctgatactgcctgtcttcagaatccccctcaattctcatcaggattgctgcagtaaccaccaaagt

SEQ ID NO: 802400 - DNA, 120 bp, Artificial Sequence
  ENSG00000250033_41 (sequence is synthesized)
caatattctgtcttcagccccaacctatcttaatccatcctcataacccccagggtgattctcctaaaatataaaactgcctgagtttgactttcagctattctactttatatctgtatg

SEQ ID NO: 802401 - DNA, 120 bp, Artificial Sequence
  ENSG00000250033_42 (sequence is synthesized)
acttggaacaagtgacctgaattctctcatgctataattcaaagcctattaactggggataataattttcctacctcagtaggatattatatgaattaaataaagtcttgttcctctccc

SEQ ID NO: 802402 - DNA, 120 bp, Artificial Sequence
  ENSG00000250033_43 (sequence is synthesized)
tgcagagtatgtggcattcaactgtcatgtctacatccatgttgaaaaagtctttcggctttaaggataatcaacccgcggtactctttctttaaataaaggtgtgttaatgagtctgca

SEQ ID NO: 802403 - DNA, 120 bp, Artificial Sequence
  ENSG00000250033_44 (sequence is synthesized)
ctttttaaatggggtcaaaacagtattataaggaaaatatttactgcaaatatttataattgtgtaaggagaatcattctttttaaaatcaagttgtgttttagctttagaatcttttaa

SEQ ID NO: 802404 - DNA, 120 bp, Artificial Sequence
  ENSG00000250033_45 (sequence is synthesized)
agttattttaaacagtattcattacttttactgtttatgttataataaacttatgtatataaacatttgaatatgcatggtacaaagtacaagtacagaacatgtagtaagtagtatgtg

SEQ ID NO: 802405 - DNA, 120 bp, Artificial Sequence
  ENSG00000250033_46 (sequence is synthesized)
agtatgtgcatgtatgtgtgtgtgtgcatatcgtataaaaatatgagaaaaattttacttatataaaaacatatatataaataagtgttcaggagagtttttgagaatctgctttacata

SEQ ID NO: 802406 - DNA, 120 bp, Artificial Sequence
  ENSG00000250033_47 (sequence is synthesized)
ctgcaattttgagtgaaaattatggatattaatttcctgattaaaggaactgtgtcttctcatgatgagtcctaaaaataagccaaaatactacttaatctccatcactttttttcttaa

SEQ ID NO: 802407 - DNA, 120 bp, Artificial Sequence
  ENSG00000263443_0 (sequence is synthesized)
agggatgttaaggcactgagggccagagcacttgttctcatcagcatcatcatcagcctcagcatcattgtcaccgtaatcagcatcattggcatcagcatcatcagcatcaccaccctc

SEQ ID NO: 802408 - DNA, 120 bp, Artificial Sequence
  ENSG00000263443_1 (sequence is synthesized)
atcatcatcagtagcatcaatatcactatcatcagcattagcatcagcatcatcagcagcatcagcaccatcagcatcatcgtcatcaggatcatcagcatcatcagcagcatcaccacc

SEQ ID NO: 802409 - DNA, 120 bp, Artificial Sequence
  ENSG00000263443_2 (sequence is synthesized)
atctaacattttttgagggcttcaaatgcacaaggcactgggctgatttctttacatgcattgtctcacttgtttccaacaatgacagcccccaaagaacctcaccagcaccacaggacc

SEQ ID NO: 802410 - DNA, 120 bp, Artificial Sequence
  ENSG00000263443_3 (sequence is synthesized)
caccaccaccatcacaagccttatcatcacccctgccttctctatccctgcagcagtccggggatagacacagggagaggacagccatcttaccagccgaggaaggaagcctcagagaaa

SEQ ID NO: 802411 - DNA, 120 bp, Artificial Sequence
  ENSG00000259767_0 (sequence is synthesized)
tatcatctctatataatgtgatcttttgaatctacattaaaaagacaaacacatctgtagagaaaaatgagaaaagaacatgagttgggtatttcattagagagaaaatccagtgggcag

SEQ ID NO: 802412 - DNA, 120 bp, Artificial Sequence
  ENSG00000259767_1 (sequence is synthesized)
cacctcagcctcccaaagtgctgggttacagtcatgaggcactgtgcctgccctacttttttataataaaaaattataaataacatattttagagccaggagtggtagctcatgggtata

SEQ ID NO: 802413 - DNA, 120 bp, Artificial Sequence
  ENSG00000259767_2 (sequence is synthesized)
tttagagccaggagtggtagctcatgggtataatcccagcaactcaggacaatgagttgggagtatcatctgagaccagttctagaccagcctgggcaacttagttagactccatctgta

SEQ ID NO: 802414 - DNA, 120 bp, Artificial Sequence
  ENSG00000259763_0 (sequence is synthesized)
tctcgagcctgggagtataagactgcagtgagctactatcacatagttgcacgccagcctgggtgacagggtgaaaccctatccaaataataataataataatttgacaaataaagtctc

SEQ ID NO: 802415 - DNA, 120 bp, Artificial Sequence
  ENSG00000259763_1 (sequence is synthesized)
ttttaatgtagctggaattgtgtaagaaagtctttcctcagcaaataagaaatggactatgaaatctcccagaatcttttttagcccctaattagctataaatctcctgacagtttagcc

SEQ ID NO: 802416 - DNA, 120 bp, Artificial Sequence
  ENSG00000259763_2 (sequence is synthesized)
ataaagttatctaaatacatcttgagagagtccacgctttctccattcttttgaagtacatttccatgggtagcagacagatgaacaaaatgctggttctaggacctcagatatactgta

SEQ ID NO: 802417 - DNA, 120 bp, Artificial Sequence
  ENSG00000259763_3 (sequence is synthesized)
cctgtttcaatcagatgcataactgtggtagggctgttattgtttacttttcatactatcactagcaactttaatttttggttaagttctcgaaatctctttctggaaaagcaaatgata

SEQ ID NO: 802418 - DNA, 120 bp, Artificial Sequence
  ENSG00000259763_4 (sequence is synthesized)
tcacattctccattctcctggttaacagtgtcattatcacactgcagattctcaaacaaacagctaagttccactgtcattccgaatcctttctctttcttttgtaatgcattcacaaac

SEQ ID NO: 802419 - DNA, 66 bp, Artificial Sequence
  ENSG00000259763_5 (sequence is synthesized)
tggcatgatctcggctcaccgcaacctctcccgagctactatcacatagttgcacgccagcctggg

SEQ ID NO: 802420 - DNA, 120 bp, Artificial Sequence
  ENSG00000259762_0 (sequence is synthesized)
ggatttcctctctgccttttggggtgagatacggctgatgccttgatgtggaggaggaagcagcggcatcgagcccatgcccacagttggcctgaggcccactcagcacctggtgccaac

SEQ ID NO: 802421 - DNA, 120 bp, Artificial Sequence
  ENSG00000259762_1 (sequence is synthesized)
ccagggcagtgagaggagacagagcctgtccctggctcagaaccagttgcggtggagagcggaggagggaggccatgggaaccactcctcttgccctgctgagggtgtctgggtggatga

SEQ ID NO: 802422 - DNA, 120 bp, Artificial Sequence
  ENSG00000259762_2 (sequence is synthesized)
ccaggccaggatggctgctgtgggggaggagaccgccagggcagcagtgacagccaagagcagtgagcgagagaaaaaagaccagtgttttactggcttatggggaggcagctatcacca

SEQ ID NO: 802423 - DNA, 120 bp, Artificial Sequence
  ENSG00000259762_3 (sequence is synthesized)
gaggcagctatcaccagggctacaagactctgcaaagaaacccgtgcacttccaagttcgtggtgaaaggaaagacacttggcagctgggcaggattttattttttgagacagagtctcg

SEQ ID NO: 802424 - DNA, 70 bp, Artificial Sequence
  ENSG00000259761_0 (sequence is synthesized)
gcactgtcttttcctgctgccttgtaaagaaggtgtctgcttcctgaaactgaccccactgaaaatcgga

SEQ ID NO: 802425 - DNA, 88 bp, Artificial Sequence
  ENSG00000259761_1 (sequence is synthesized)
actctggcccaaggctctctgactgacaccttcccagatcttctatgcctcggaagcctgcaggaccatcacagatgctctgggtaac

SEQ ID NO: 802426 - DNA, 120 bp, Artificial Sequence
  ENSG00000259761_2 (sequence is synthesized)
ctcggaagcctgcaggaccatcacagatgctctgggtaactctcacagtggagggacctggactagagtgagaccacgtaggtgcctatggcacagaatataagtgagatccatgtacac

SEQ ID NO: 802427 - DNA, 120 bp, Artificial Sequence
  ENSG00000259761_3 (sequence is synthesized)
gcctgcgatttgttttaacaaatagaatgtgttggaagtgacgctgtgctagttctgggtctaagtcttatgaatgcctggaagccactattttgtgctcttgggaatcttcagtcttct

SEQ ID NO: 802428 - DNA, 120 bp, Artificial Sequence
  ENSG00000259761_4 (sequence is synthesized)
aagaagtccagtcatactactgttgagagcacatggagatacagagtggacacttcatgtggaatgggagaagctctgagactacaggagcagaggaagatgcccagccttactggcatc

SEQ ID NO: 802429 - DNA, 120 bp, Artificial Sequence
  ENSG00000259761_5 (sequence is synthesized)
ccagcgcccagacgacctgccagctgaatgcagtcataggagtgatcactggcaagaccagctgagcccagctcacaaactagaatcgtgggcaaattaaatggttgttgtttaaagcca

SEQ ID NO: 802430 - DNA, 120 bp, Artificial Sequence
  ENSG00000259760_0 (sequence is synthesized)
cttgaggagcgctcactaggatggtaattgtttgatcgatagattaagtgagttggaagactctccaagtgaaaatttaaaattactgcagttttggcctgatgatgttaaccagcaaga

SEQ ID NO: 802431 - DNA, 120 bp, Artificial Sequence
  ENSG00000259768_0 (sequence is synthesized)
aaactccctgctagagagactaggagatttggggctgcggccgtttcctccggagcacccacgggactgtgtgctggggtccctccaccggctgtgtcctttattcttctttctcaccca

SEQ ID NO: 802432 - DNA, 120 bp, Artificial Sequence
  ENSG00000259768_1 (sequence is synthesized)
acgatttacctgaacggttataaagtgcacgttatttccctaaggtccttcttactgatgtgttgctcttcttcatggctcgtgaaaactattagagtcatccaaggtttggagacagaa

SEQ ID NO: 802433 - DNA, 120 bp, Artificial Sequence
  ENSG00000259768_2 (sequence is synthesized)
aggagcaccgccaagtgaggcagagcagtctcagaaacataggaaaatggtgggaagagagatcagcaacgttaactgggtgtcaagaaaacataccgagattgaagccatccacttctg

SEQ ID NO: 802434 - DNA, 120 bp, Artificial Sequence
  ENSG00000259768_3 (sequence is synthesized)
caggaacaccgaaaagaaagcttacaatctgaaggtgtccgttcctacactggtcagaccactgtccttggggcagctggggtctttgggaccctccaccgggctcgccggtccgtcgga

SEQ ID NO: 802435 - DNA, 120 bp, Artificial Sequence
  ENSG00000259768_4 (sequence is synthesized)
cttttggctgagatccgtgtcagactcctccgaatagtcgtctgttggcatcgagggctgaacccctgaggtgctgcatgaacttgaggtaaccgttgaagatgaggagagaggaggaaa

SEQ ID NO: 802436 - DNA, 120 bp, Artificial Sequence
  ENSG00000259768_5 (sequence is synthesized)
agaagggggcttcgctgccgaagcccgggagaccacttgcggccaagacttcctggaggcgtggggggaagcggaggagggggcggcggccgacgggggaggggggctgtcgtttgagtg

SEQ ID NO: 802437 - DNA, 120 bp, Artificial Sequence
  ENSG00000259768_6 (sequence is synthesized)
agcggcagactgcgaggtagatgcggtgctaggatcggggaagcaggcagagtgaggtaataaactagggtgctctttggcgtttcttgctgctctcgtgattgttctgtgtttgtgcaa

SEQ ID NO: 802438 - DNA, 120 bp, Artificial Sequence
  ENSG00000259768_7 (sequence is synthesized)
ggccgactcgagatgttgactcagagcttcctccccacagagcgcgctctcgcacgccaggcagtggtacgagccgccgccgccgccgccgccgccaccgccgccgccgccgccactgcc

SEQ ID NO: 802439 - DNA, 120 bp, Artificial Sequence
  ENSG00000259768_8 (sequence is synthesized)
accgccgccgccgccggtggggacgtgaagcaccatctcttgcaggttcaccacagactggccgaagaagcagagggacttcaggtggctcctcgctgcctcctcgtcgctgaagcccgc

SEQ ID NO: 802440 - DNA, 120 bp, Artificial Sequence
  ENSG00000259768_9 (sequence is synthesized)
ctggcacttgcggcagaccaacttgtactgcacctttggaacaatgaaggggtcgtagagggagtccgcacttttgctttctgcttctggctcttcagggagtttcggcaggagggggga

SEQ ID NO: 802441 - DNA, 120 bp, Artificial Sequence
  ENSG00000259768_10 (sequence is synthesized)
cacctcacggggggtgtttttctgttcttctggtttgggggattctttggcagggtctttgtctggggaaggagccccgggggggactggggtttggcttgctttgggctgctgctgctg

SEQ ID NO: 802442 - DNA, 120 bp, Artificial Sequence
  ENSG00000259768_11 (sequence is synthesized)
cactttttgctgctgctgctgctgtagttgccgctgctgctgctgctgaattgcctcctgcagactctgctggtattgctggtactgctgcagtagggagcctggggacagccccatcag

SEQ ID NO: 802443 - DNA, 120 bp, Artificial Sequence
  ENSG00000259768_12 (sequence is synthesized)
ggcctgcgacagtgcagggctgtaggggaacaggccttccatgccatacataggctgcaggtacccgctctgcagggcgccagggatctggggagcataataaggagaaaagcctggtac

SEQ ID NO: 802444 - DNA, 120 bp, Artificial Sequence
  ENSG00000259768_13 (sequence is synthesized)
aaagtaaggaaggaactggcttgtgagcaatgctgtggggtccgaagtcaacgcggcctgcagggcctgcagctgtgcagggtctaccgcatactccatggtgggcagcggggctgagat

SEQ ID NO: 802445 - DNA, 120 bp, Artificial Sequence
  ENSG00000259768_14 (sequence is synthesized)
cgtggctgcagttgccgtgggggcctctcctttctccttcttggggacaggcaggggttcccctttccctttgtgtgccttttccttctcctttactttctcactgtctttgtccttgcg

SEQ ID NO: 802446 - DNA, 120 bp, Artificial Sequence
  ENSG00000259768_15 (sequence is synthesized)
ttgctgctgctgttgcagtgggagctgtggtgtgggtggcggctgggctgctggcggcgggggaggctgctgcacctgtggttgctgctgctgctgctgctgctgggggggttgctgagg

SEQ ID NO: 802447 - DNA, 120 bp, Artificial Sequence
  ENSG00000259768_16 (sequence is synthesized)
gcccatcgccatcgtggcttgtgctggggttggggagctcagcgacgctgaggacggtttatttggtaatccagaagtggggaggccaggggaaggaacagttgtgctgggcagacccat

SEQ ID NO: 802448 - DNA, 120 bp, Artificial Sequence
  ENSG00000259768_17 (sequence is synthesized)
caagttcggcttaggagacgttaaagctgaaaggaatggagacagaaatcaccggtcagtctgggcaggggtagggctgaagctcaagacgttttaccggtgtcactggcacacagtttg

SEQ ID NO: 802449 - DNA, 120 bp, Artificial Sequence
  ENSG00000259768_18 (sequence is synthesized)
agatgtcaaggcttgaaggatcctctcaaaacgaacatttccaacagaagtatcccaccaggctcagggctggacaaccttgtattctaatgaggactcagtcctaggtcagctcccata

SEQ ID NO: 802450 - DNA, 120 bp, Artificial Sequence
  ENSG00000259768_19 (sequence is synthesized)
cttcccctttcagccaaacaacttccagaagtatcccaccaggctcagagctggacaaccttgtattctaatgaggactcagtcctaggtcagctcccatacttcccctttcagccaaac

SEQ ID NO: 802451 - DNA, 120 bp, Artificial Sequence
  ENSG00000259768_20 (sequence is synthesized)
tgtattctaatgaagattcagtcctggctagctcccatacttccccttccagccaaacaacttccaacaccttcctgcccaatgtgccacacccgctagttcacattttctttgccaagt

SEQ ID NO: 802452 - DNA, 120 bp, Artificial Sequence
  ENSG00000259768_21 (sequence is synthesized)
actcccagctaccattcactctgcccaactgcaattagtctagaggccccaaagctagctgtttctagctggggcccatttgcaccaaaggccttcatcacaaaaatagtatggccacga

SEQ ID NO: 802453 - DNA, 120 bp, Artificial Sequence
  ENSG00000259768_22 (sequence is synthesized)
ggtccccagagaagttatctggaggagagcggcaacaggagaagagagaacgaaggcaagaaagctagcacggccacatgaacaaaaacaaaacaggctctacaggtgttcctcctctct

SEQ ID NO: 802454 - DNA, 120 bp, Artificial Sequence
  ENSG00000259768_23 (sequence is synthesized)
gacctctgttgctgcagctgactggatgctttcggagggtagagagaagatgatgaataggaaagtgtggaggaagggcctgggaagaaataagaacaatccattcagggaaaattgctt

SEQ ID NO: 802455 - DNA, 120 bp, Artificial Sequence
  ENSG00000259768_24 (sequence is synthesized)
ccatgccttggcccagctgacctgcttcaacaagtctactcaacagtataaccgcctaggaataggaatctggaatctgcgggagaaacgaccatcttcttttcctgcccctgtttgaat

SEQ ID NO: 802456 - DNA, 120 bp, Artificial Sequence
  ENSG00000259768_25 (sequence is synthesized)
gatacacaggagggccagtgggactgtagatggttgagaaacaaccgcaggaaaagcagaaaagccatgtcagaagtggaatagcccaagatactgacaccaattcccaagacatcacaa

SEQ ID NO: 802457 - DNA, 120 bp, Artificial Sequence
  ENSG00000259768_26 (sequence is synthesized)
cctacccgaagcaccactgcctatggatagcaaaggtctgaccatatcaccaggccctcatgggctagaatcccatccttgatcatacccctaatctaccaccactccctgcaacgcctt

SEQ ID NO: 802458 - DNA, 120 bp, Artificial Sequence
  ENSG00000259768_27 (sequence is synthesized)
caccaacccgagagcctaataccctccctgacccatagctatctcctggtttgagtcaccaggtccaaggtaatgcaagagggtgttgctacggatggtactccaagcttcaggtgtgtt

SEQ ID NO: 802459 - DNA, 120 bp, Artificial Sequence
  ENSG00000259768_28 (sequence is synthesized)
gagactagcaagatagtaggtaaggacagcatgggggtggggtgcagtgtgtgctggacgatgaaaagctgagaaaacaaagaggaggatcccacaggcaacagctctcagaacacctct

SEQ ID NO: 802460 - DNA, 120 bp, Artificial Sequence
  ENSG00000259768_29 (sequence is synthesized)
atattcaccatatccaagaaacttgatggtatatacatctcttcagaggacaccaaaatgcaaaatcaaaatcttacttcatctggacctcacctgctggaaagctggggaaggagttcc

SEQ ID NO: 802461 - DNA, 120 bp, Artificial Sequence
  ENSG00000259768_30 (sequence is synthesized)
ataacatgacactgaggaaaaaaaagcaagaaaaagcactctgaagcccagacttgggggaagactgcagatttctggctatcatggtagtgttcaccatcaaaaccctcagatttcaga

SEQ ID NO: 802462 - DNA, 120 bp, Artificial Sequence
  ENSG00000259768_31 (sequence is synthesized)
cgaaaagaacaagactgcttcaaattgccaatcccagacaaacagctgttaatactggatagccaaggagaaaggttccttcagcatctcatcatgcagtgtcctcagtgcacataagac

SEQ ID NO: 802463 - DNA, 120 bp, Artificial Sequence
  ENSG00000259768_32 (sequence is synthesized)
accagagaagatatgtgtgactctactcagaaaagcttagtaaagacttgttggttaaattggcacaaacaagacagagtagattatgagttctaaacttgggacatggctctgtctcca

SEQ ID NO: 802464 - DNA, 120 bp, Artificial Sequence
  ENSG00000259768_33 (sequence is synthesized)
ctaggcaatgggtctgctctcagtggggcaaggaaggaatatttagagatttccccatccccatggctccagacttctaggagaaagattcaggtcaaaaagccttaaactgtgtgtctt

SEQ ID NO: 802465 - DNA, 120 bp, Artificial Sequence
  ENSG00000259768_34 (sequence is synthesized)
caactgatggtctatataagaggttcaaattttaagaaacgtttacgaatctctactatttaccaagccttgcactagccatgctagacacagtagctcaacacactcacaactctgtga

SEQ ID NO: 802466 - DNA, 120 bp, Artificial Sequence
  ENSG00000259768_35 (sequence is synthesized)
catcctttttctgatctgtaagatcagaatcaggcaaggtacttcatcccccctagacttactcctacaaatctggagtcacactgaccctgtgggattatggtcacacacatcagacgt

SEQ ID NO: 802467 - DNA, 120 bp, Artificial Sequence
  ENSG00000259768_36 (sequence is synthesized)
gtgaccctgggactttcggttgaactcttggaacctcagctttccataacagatggttatgaggattaaatgaaagaccacattgatagaaaaagcttagcattgggcctgacatataat

SEQ ID NO: 802468 - DNA, 120 bp, Artificial Sequence
  ENSG00000259768_37 (sequence is synthesized)
agatgtttaataaacacaagtttgttccttccctcccattccagatccggtgtttttgagaactgtgttacggtcaggtgatgataactggggcatgtctgctgccctgaataaataaga

SEQ ID NO: 802469 - DNA, 120 bp, Artificial Sequence
  ENSG00000259768_38 (sequence is synthesized)
gcttatctttctatctcgagtccactctaagtggtcagaacttgagtagcactaaacatatacctgttgactgactggctcatattgggtgttgtggaaggagcacatagcacctgggag

SEQ ID NO: 802470 - DNA, 120 bp, Artificial Sequence
  ENSG00000259768_39 (sequence is synthesized)
cccagaggcctgggtggaagctctggctcctaccctagcttgttgaatggtcttgacctctctggccctcagatttctcatctgtaaaacaagcggaataaatcatacattctgattcta

SEQ ID NO: 802471 - DNA, 120 bp, Artificial Sequence
  ENSG00000259768_40 (sequence is synthesized)
ctgatgcgaaatatgctgatacttttgttgaagaaatctggtccttcttactgatgtgttgctcttcttcatggctcgtgaaaactattagagtcatccaagggtgggaagagagatcag

SEQ ID NO: 802472 - DNA, 120 bp, Artificial Sequence
  ENSG00000259768_41 (sequence is synthesized)
caacgttaactgggtgtcaagaaaacataccgagattgaagccatccacttctgcaggaacaccgaaaagaaaggactgtgaagacaaccagagtgggaaggaacctcagaaacctttgg

SEQ ID NO: 802473 - DNA, 120 bp, Artificial Sequence
  ENSG00000259768_42 (sequence is synthesized)
accaacagaggaaaaagcccagaggtgcaggacatagatcaaaaccagtcgcatgcgagtcattctaggatccggccaaagttaattaacagagggccattcagtctccaccgagtcaaa

SEQ ID NO: 802474 - DNA, 120 bp, Artificial Sequence
  ENSG00000259768_43 (sequence is synthesized)
caataattaggttagttagggtctttgagccccaacacagtctagactctgagacactgcaatataacaatattcttctggtttcttctccattccaaatctatcttcctaaaatactaa

SEQ ID NO: 802475 - DNA, 120 bp, Artificial Sequence
  ENSG00000259768_44 (sequence is synthesized)
attttaagagtgaaagtgaacttgtgaacataaacaggtaaaatgtgggtgtgtgtccagaatggtgacagacagggagaactgctgaatataacttatcagaaccttacaaactggcct

SEQ ID NO: 802476 - DNA, 120 bp, Artificial Sequence
  ENSG00000259768_45 (sequence is synthesized)
tccctcatgatccacctagggtttctttttactagtcaggttccacaggaaaatgtgagaacttatacttagggaagaaagacattactcaggtccctgcaaggctggaaaatgggaatg

SEQ ID NO: 802477 - DNA, 120 bp, Artificial Sequence
  ENSG00000259768_46 (sequence is synthesized)
attctccactttcccctccagatttaagcactacaaagactgtcaacatctcttggcattttgtacagtacagagagatagacaccctacattgtgtaatgtttatatttaatatcagtg

SEQ ID NO: 802478 - DNA, 120 bp, Artificial Sequence
  ENSG00000259768_47 (sequence is synthesized)
ctgctttccgtctccattgagttcccacattcagctcactcacagcgctccaaaggcctaggataagtgacctgtgtgaagacatggggaggcggttctggagcaccttcaggtactcct

SEQ ID NO: 802479 - DNA, 120 bp, Artificial Sequence
  ENSG00000259768_48 (sequence is synthesized)
aggaactgatgttttttcacttgttgtttgcctaaggccaagttctctttacccgaaggcatcattcagccccccttgctaggtaataaagcacaatattttgtagcgctggtcacagtt

SEQ ID NO: 802480 - DNA, 120 bp, Artificial Sequence
  ENSG00000259768_49 (sequence is synthesized)
ggttcacatcctggctgtgtgacctcgagcatcctatctgactacactgagctttctgtttcctcatctgtcaatgggataacactgtctacacatggtttctgtgccgctagccagaga

SEQ ID NO: 802481 - DNA, 120 bp, Artificial Sequence
  ENSG00000259768_50 (sequence is synthesized)
tcaggcatatgatgcctaccacagagtctggcacatagtgaaagcgcaaacatttgttgctatggtttcttttttagaaggattgggaaataatactgctggggctataaaaccatagaa

SEQ ID NO: 802482 - DNA, 120 bp, Artificial Sequence
  ENSG00000259768_51 (sequence is synthesized)
cgaggggagaaacttgtttatttttttgtttttatgggctttccaatgaagagcggaaagcctgctagacaaattctaaaagctgtaacactgaaacttggtttttaagacaagcaaaga

SEQ ID NO: 802483 - DNA, 120 bp, Artificial Sequence
  ENSG00000259768_52 (sequence is synthesized)
caccttaaatttgtcttttctctataccaggatgaaacaatcctattaacccatggatttaatgtctacaaagcagaaagtagaataacttggacttaaaggtacttatgtcatgctatt

SEQ ID NO: 802484 - DNA, 120 bp, Artificial Sequence
  ENSG00000259768_53 (sequence is synthesized)
ttaccaattgattgttaacgaaacatctaaacagtattaagcacttgctaggtgctggggattacaaaaatcaatggttgccacatagctcctaaccataaacagctgacaaactctatc

SEQ ID NO: 802485 - DNA, 120 bp, Artificial Sequence
  ENSG00000259768_54 (sequence is synthesized)
tgacaacaagagaagcatagaatttaagttctcctcctccaaccttcctaaaagtagagaaagtgataatgttacatgttctttggctttataatgtagaaaatatatctgactcagaag

SEQ ID NO: 802486 - DNA, 120 bp, Artificial Sequence
  ENSG00000259768_55 (sequence is synthesized)
gcaaattgggatttgactgcaactctgacacccgagttcccaatctgtgaggcttagttctcgaggctgcaaaacgaaggtagcattggacccaagaagaatatgagaacctaatgaacg

SEQ ID NO: 802487 - DNA, 120 bp, Artificial Sequence
  ENSG00000259768_56 (sequence is synthesized)
tgctctaatatcccccatggaaaggcacaatggtattttttttaaataatcatgattataataacagaggtactttacaattggcacaaaagttaaagctggaacaaagcaggcaagatt

SEQ ID NO: 802488 - DNA, 120 bp, Artificial Sequence
  ENSG00000259768_57 (sequence is synthesized)
aacatggccactctgtaagaataatatgcaaatctataaggtattttctatagtgatgaacaatgatttgctccttaatctacattttcactgccctttatctataccttgatgatagtt

SEQ ID NO: 802489 - DNA, 120 bp, Artificial Sequence
  ENSG00000259768_58 (sequence is synthesized)
tggacttcaaaatttctgatgcgaaatatgctgatacttttgttgaagaaatctgggctttgagcatctgtaagatatttgttggaaggttttgtctggtccttcttactgatgtgttgc

SEQ ID NO: 802490 - DNA, 120 bp, Artificial Sequence
  ENSG00000261971_0 (sequence is synthesized)
agaccctgaggagactgagcccagcgccaggcgaccggtccccgccgccgccgcccctgcgcgggagatcccccctgcttagtccgcgcccgagcccccgtccgtgggaacagacaaggg

SEQ ID NO: 802491 - DNA, 120 bp, Artificial Sequence
  ENSG00000261971_1 (sequence is synthesized)
gcctccgcagcgcctcacaacccccgaccaggtccagcggcgggggactcggccgtggagggcgctgttcggtctggatggctccccccatcagcgggaggctacaccccccaccagcag

SEQ ID NO: 802492 - DNA, 120 bp, Artificial Sequence
  ENSG00000261971_2 (sequence is synthesized)
aacccgcaggtcaccgcgctccccacctgcgttgctgacggtgacatcgtcaggggaggggggcgcgccttcccagaggctcaggtcgcgagggtagccggggtccgggcgcgccgccgc

SEQ ID NO: 802493 - DNA, 120 bp, Artificial Sequence
  ENSG00000261971_3 (sequence is synthesized)
ctcgtcgtagcgccagtactgccggccgcggaccaggtaggtcttcccgttctgtggccacgagaacacggcgtccacctcctctcccgggggcagccccagctccgtgagcggccgcgc

SEQ ID NO: 802494 - DNA, 120 bp, Artificial Sequence
  ENSG00000261971_4 (sequence is synthesized)
gcaggcactctcagaacacagcctgccggccccagcacccggccttgctcccagcctcttccctctgtattcagctcaggcgctcaggactgccaggacccagaggattcacacgccagc

SEQ ID NO: 802495 - DNA, 120 bp, Artificial Sequence
  ENSG00000261971_5 (sequence is synthesized)
gctgagaggcctgaagagaccaagacagagacacagccccgcagcaccacagggaggccccagttaccccatgcggatgagtttcatggccatctctaactaaggacaggacatcgatgt

SEQ ID NO: 802496 - DNA, 120 bp, Artificial Sequence
  ENSG00000261971_6 (sequence is synthesized)
catctgtaacttccggtgcactggggcacacagctgcatctccccatgctcacctcctgcctcttgctctgcccagtaagctcgccaacccccgtggactgctggctctcaaggcggccg

SEQ ID NO: 802497 - DNA, 120 bp, Artificial Sequence
  ENSG00000261971_7 (sequence is synthesized)
ctgccggtcctggaacacccagaactggggccctgcagggtggaggccgggaggtcaggggtgggctccccgcgccggccccagcgcgccccgccgccggccccactcaccgctaaagag

SEQ ID NO: 802498 - DNA, 120 bp, Artificial Sequence
  ENSG00000261971_8 (sequence is synthesized)
agaggaggattcggccgtctcggtgccgagcataggcggcctgcaccaccctcacctgggcgggcagcccctcccagaagcggtgcagccgtgcgggtcgcggggacaccagctgtccgg

SEQ ID NO: 802499 - DNA, 120 bp, Artificial Sequence
  ENSG00000261971_9 (sequence is synthesized)
agggctggaggcgccagaaccaggggcctgcaggggacaaaggggttcgcaggaaggcatgagacagcaggaggtctcctcccccagggtgtgtggctgggtggggaggggtcccatctg

SEQ ID NO: 802500 - DNA, 120 bp, Artificial Sequence
  ENSG00000261971_10 (sequence is synthesized)
gaaatcaagggcgcaatggatctagggtgaccagcccatcctggcccgcctgagacttttccctttttagcgctaaaagtgccagggccttgcctggtggctcagacctgtaatgccagc

SEQ ID NO: 802501 - DNA, 80 bp, Artificial Sequence
  ENSG00000261971_11 (sequence is synthesized)
agaatcacctgagccaggagattgagtaataaaataaattactagcaaggcgtggtggcatgtgcctgtggtcccagcta

SEQ ID NO: 802502 - DNA, 120 bp, Artificial Sequence
  ENSG00000261971_12 (sequence is synthesized)
gtgagccatgatcacaccactgcactgcggcccaggcaacaaagcaagaccctgtctcaaagaagaaaaaagttccgcttccagggtaagcccacagccccagtgggtcactggaagtgg

SEQ ID NO: 802503 - DNA, 120 bp, Artificial Sequence
  ENSG00000261971_13 (sequence is synthesized)
agcccacagccccagtgggtcactggaagtgggcaggaaaccaacatatatgaggccaagtgaaatgactcacctttgaagaagaaagtttcccctcggatgttggcgatggcgtcaaaa

SEQ ID NO: 802504 - DNA, 120 bp, Artificial Sequence
  ENSG00000261971_14 (sequence is synthesized)
ttgccctcacatcgatcagggatggggaaggatgggctggggaggaaaggagagagttgctgcaggccatcgcggtcatcctgagacaggcggtacttgtcagggtcgcccaccggaccc

SEQ ID NO: 802505 - DNA, 120 bp, Artificial Sequence
  ENSG00000261971_15 (sequence is synthesized)
catctgctggggatgtaggtccatgtccttgacccaagaccttccctcattcctgcccccatccctcctcaagccatatcccttacatcccttgagtcctccatcccccctcccccatct

SEQ ID NO: 802506 - DNA, 120 bp, Artificial Sequence
  ENSG00000261971_16 (sequence is synthesized)
agcctggatcacctcctccaggacaagaacaacctaccatcatctgtccgtccaatctacccacccatccatctctgcctctggccatgcatccgtccgtccatccatccccgcctctgt

SEQ ID NO: 802507 - DNA, 120 bp, Artificial Sequence
  ENSG00000261971_17 (sequence is synthesized)
gcatgcatctgtccatccatccccgcctctgtgcatgcatctgtgcatccatccatccctgcctctgtgcatgcatctgtccatccatccccgcctctgtgcatgcatctgtccatccat

SEQ ID NO: 802508 - DNA, 120 bp, Artificial Sequence
  ENSG00000261971_18 (sequence is synthesized)
ccccacctctgtgcatgcatctgtccgtacatccatccctgcctctgtgcatgcatctgtccattcatccctgcctctgtgcatgcatctgtccatccatccatccccgcctctgtgcat

SEQ ID NO: 802509 - DNA, 120 bp, Artificial Sequence
  ENSG00000261971_19 (sequence is synthesized)
gcatctgtccatccatccctgcctctgtgcatgcatctgtccattcatccctgcctctgtgcatgcatctgtccatccatccatccctgcctctgtgcatgcatctgtccattcatccct

SEQ ID NO: 802510 - DNA, 120 bp, Artificial Sequence
  ENSG00000261971_20 (sequence is synthesized)
gcctctgtgcatgcatctgtccatccatccatccctgcctctgtgcatgcatctgtccattcatccctgcctctgtgtatgcatctgtccatccatccatccccacctctgtgcatgcat

SEQ ID NO: 802511 - DNA, 120 bp, Artificial Sequence
  ENSG00000261971_21 (sequence is synthesized)
ctgtccatccatccccgcctctgtgcatgcatctgtccgtccatccatccctgcctctgtgcatgcatctgtccgtccattcatccctgcctctgtgcatgcatctgtccattcatccat

SEQ ID NO: 802512 - DNA, 120 bp, Artificial Sequence
  ENSG00000261971_22 (sequence is synthesized)
ccctgactctgtgcatgcatctgtccatccatccatccttgcctctatgcatgcatttgtccgtccatccatccctgcctctgtgcatgcatccatacctgcctctgtgcatgcatctgt

SEQ ID NO: 802513 - DNA, 120 bp, Artificial Sequence
  ENSG00000261971_23 (sequence is synthesized)
cagtctatcaatccccgatcccttctttgtaatggtgttgagcgctcacaactccctcatcctaagacgctcgttggatccattccctcccctcaccccatgctgctctctgccctccct

SEQ ID NO: 802514 - DNA, 120 bp, Artificial Sequence
  ENSG00000261971_24 (sequence is synthesized)
tcccggtcaagttctccagccagtggtctcaactcaatcttcacttcccccgctcctctcacacctatccccactgcattctaaattcttccccaacgcgctgggcctacaggcactaaa

SEQ ID NO: 802515 - DNA, 120 bp, Artificial Sequence
  ENSG00000261971_25 (sequence is synthesized)
aaggtcactttgtccctggatgaccaaacacaggccaatgtaacttactgggcttgttttgccccagccacagctgaccacttcctccttcactcttgttgttgatcacctttgggctta

SEQ ID NO: 802516 - DNA, 120 bp, Artificial Sequence
  ENSG00000261971_26 (sequence is synthesized)
gtctttctccatctctgttgagtccttctcccctgccacctactccttcatgctggggttctctgtagctctgtacctgacagtcacgttccaccctttcctcccagaagctcgccaacc

SEQ ID NO: 802517 - DNA, 120 bp, Artificial Sequence
  ENSG00000261971_27 (sequence is synthesized)
cccgtggactgctggctctcaaggcggccgctagcccagctccgacagcagctgacaatgcacagtatgcggcccagggcaggccctgtgctgagaggcatgggtgaatggctcatttca

SEQ ID NO: 802518 - DNA, 120 bp, Artificial Sequence
  ENSG00000261971_28 (sequence is synthesized)
tcggcaagcccacgccaccagcaggcgccgttctcctcgcatttctcaggcgaggaacctgagacaatgaggttaaggaagttgttcattacaagtggaagaaccctgacttacttgaat

SEQ ID NO: 802519 - DNA, 120 bp, Artificial Sequence
  ENSG00000261971_29 (sequence is synthesized)
tgggactacaagcatgtgccaccacgcccagccgaagcccatatgtgaatgttgaggcacacagcctccccagcctctgccttaccaagccctccacagggcctaggcaccctccctggc

SEQ ID NO: 802520 - DNA, 120 bp, Artificial Sequence
  ENSG00000261971_30 (sequence is synthesized)
ccaagccctccacagggcctaggcaccctccctggctgcccccttcccccgtcactcaggctccccagcagccaatgtagttaatatggggctgcaaagagctgggcctggcctcaggcg

SEQ ID NO: 802521 - DNA, 120 bp, Artificial Sequence
  ENSG00000261971_31 (sequence is synthesized)
ggaccgcctccccggcattgccatccctgctgcagagctcccatgcgatcagcctcctctccagctgagaccacatcctcactcagcttctaggctgttcctgctccccattcccctcag

SEQ ID NO: 802522 - DNA, 120 bp, Artificial Sequence
  ENSG00000261971_32 (sequence is synthesized)
cacatggcccctgagaaactgcttgcacaagaatttccctctggagccccacctctggggaacctgacctcagacagaggagaccaagctctagggcaggatcctccacctcccttgccc

SEQ ID NO: 802523 - DNA, 120 bp, Artificial Sequence
  ENSG00000261971_33 (sequence is synthesized)
caccggtgtggccagcccagagcgctgcagactcccgcccagacctgcacttgtgcctgccttctgccagcctgctcctcctcctcccactctcacacctgcattaacagcaccaggacg

SEQ ID NO: 802524 - DNA, 120 bp, Artificial Sequence
  ENSG00000261971_34 (sequence is synthesized)
ccatcctccaagggccccagcctcatctcccctgtcaccaggatccagccagatctcaatccttgcccatcctaactgaacctccctcagatccgtccactgcccccttccccaggacca

SEQ ID NO: 802525 - DNA, 120 bp, Artificial Sequence
  ENSG00000261971_35 (sequence is synthesized)
cactccaccatctcttgcctggaccctgcgagaacttcctgcctccctgcctctatcctaccccctgccccccgctgaagctgatgatagttccggaatgcaaaaccccttaatgattcc

SEQ ID NO: 802526 - DNA, 120 bp, Artificial Sequence
  ENSG00000261971_36 (sequence is synthesized)
cccattgatcaaagtcttccacatgctttcaaggtccttggtgatccaggacctgccgccttctgcagtctccctactgatgccatagttttggcttctggcctcatatgtcccgggtca

SEQ ID NO: 802527 - DNA, 120 bp, Artificial Sequence
  ENSG00000261971_37 (sequence is synthesized)
tttctctggtcactggctcctcttacccctgactcagctggctcactgctttcccattggatctcaaccctgtgtacctggggagagcggaactctgtatgtcttgtcttgtgctagtag

SEQ ID NO: 802528 - DNA, 83 bp, Artificial Sequence
  ENSG00000261971_38 (sequence is synthesized)
gggagagcggaactctgtatgtcttgtcttgtgctagtagtcactcagtgtgtatgtgtggatattcatatatatatatatat

SEQ ID NO: 802529 - DNA, 120 bp, Artificial Sequence
  ENSG00000261971_39 (sequence is synthesized)
ctcctgacctcaggtgatccacccacctgtgcttcccgaagtgctaggattacagatgaaagcaatcacgcccggcctatattcatatatatattgagggaacgaagtcacctcttctag

SEQ ID NO: 802530 - DNA, 120 bp, Artificial Sequence
  ENSG00000261971_40 (sequence is synthesized)
aagtcacctcttctaggaagcctccccttgcccaagagctttgggccaacatctctgagcccctgcaggcttgaggacttcctctgctgggattctgtggagctgtgtcaccgtgggtgt

SEQ ID NO: 802531 - DNA, 120 bp, Artificial Sequence
  ENSG00000261971_41 (sequence is synthesized)
tgtcattgccagtcactcttctgactcagctgccaggtaaagatttgttttcgtctccgcaagcccccagctctggcttggagctaggcacctgctaggcctctgtgatggttcattgtg

SEQ ID NO: 802532 - DNA, 120 bp, Artificial Sequence
  ENSG00000261971_42 (sequence is synthesized)
tgtgtcagtttggcccggctgtcgtgcccagctggttggtgaaacaccagtctagatgccatggtgaaggtctttgtagatgcaattaacatctacaatcagttgaccttaagtcaagta

SEQ ID NO: 802533 - DNA, 120 bp, Artificial Sequence
  ENSG00000261971_43 (sequence is synthesized)
gatcatgctccatagtgtggctgggggtggggtgggggcagagccaatcagttcaaggccttgagagctaaagctaaggtttcctggagaggaaggaattctgcctccagactgtcactg

SEQ ID NO: 802534 - DNA, 120 bp, Artificial Sequence
  ENSG00000261971_44 (sequence is synthesized)
aaatcctgagttgccagcctgccgtacaaattttggacttgctatcccctacaatcccgtgagccaattccttaaaataaatctctttacacacacgcacacacacaccccccccacaca

SEQ ID NO: 802535 - DNA, 120 bp, Artificial Sequence
  ENSG00000261971_45 (sequence is synthesized)
catacacacacacacacatcccacacacacgtgcacacacacacacatcctgttggttttgtttctctggagacctcccagctgataaagcctccatcagtaaatataatttaaacctaa

SEQ ID NO: 802536 - DNA, 120 bp, Artificial Sequence
  ENSG00000261971_46 (sequence is synthesized)
ggtggactgtgaaccttctgggagtagggctgtaatcacttcatcctgggatgagctcagcctggcaggaggcgctcaagatgtgctacgtgtgggtaacccaagtaagtagcccccagt

SEQ ID NO: 802537 - DNA, 120 bp, Artificial Sequence
  ENSG00000261971_47 (sequence is synthesized)
cccccaagactcaggagtcctgatccccagccagaggtgcacggacccagctgacaccagccagccagagctgatgtgcacagccccttctacctctgcactccgtgacgccagttctga

SEQ ID NO: 802538 - DNA, 120 bp, Artificial Sequence
  ENSG00000261971_48 (sequence is synthesized)
ccaggggaccccaaacaaggtggaggacccccctccgcctccgagcctcagcttcctcatctgtaagatggggatgacagcagttcctcgtcatcaggtcatcatgaaagtcaacaagtt

SEQ ID NO: 802539 - DNA, 86 bp, Artificial Sequence
  ENSG00000261971_49 (sequence is synthesized)
ctactaaaaatacaaaattagctggatgtagtggtgcatgcctatagtacccgctactcacccggaggctgctgtgagctgagatg

SEQ ID NO: 802540 - DNA, 120 bp, Artificial Sequence
  ENSG00000261971_50 (sequence is synthesized)
gtactccagcctgggcaagaagagtaaaattccatctcaaaaaaaaaaaaaaaggtcaacaagttatgcctataaaagagtttacttgaccagaagcagaggctcatgcctgtaatccca

SEQ ID NO: 802541 - DNA, 120 bp, Artificial Sequence
  ENSG00000261971_51 (sequence is synthesized)
gcaggccatcgcggtcatcctgagacaggcggtacttgtcagggtcgcccaccggaccctggtagaagggcctcataatggagttgggggctgaggagtggcccaggcccagggcgtggc

SEQ ID NO: 802542 - DNA, 120 bp, Artificial Sequence
  ENSG00000261971_52 (sequence is synthesized)
gcctgcggaccccgcgctcaccacgcccaggctcacgtcctgcgccgagggcttcggggcgcgcgcgggcggtgccagcagcagaagcagcagcgccagaagccggagccgcagccgcat

SEQ ID NO: 802543 - DNA, 76 bp, Artificial Sequence
  ENSG00000261971_53 (sequence is synthesized)
cagccgggactgcaggtctacgctccctcccatggcccaggtggactgtgaaccttctgggagtagggctgtaatc

SEQ ID NO: 802544 - DNA, 120 bp, Artificial Sequence
  ENSG00000261976_0 (sequence is synthesized)
aggcaagccgaccaccacccaaaggcacccgtttcagcagcttccattcagggcaagtcatatgctgggctggactctgccgccagcttgctattgcccatgcccctaactccgagtggc

SEQ ID NO: 802545 - DNA, 120 bp, Artificial Sequence
  ENSG00000261976_1 (sequence is synthesized)
gtcctcactgtctgggggcttcaggcactcggccgccgggaaagccgtgccattggggctgctctctgaggtggctgcagcctgatgacccctgaccaccgacagcgggaaatcagccct

SEQ ID NO: 802546 - DNA, 120 bp, Artificial Sequence
  ENSG00000261976_2 (sequence is synthesized)
caggaccccagccacgttccgggccgtgcaggtgtagatcccagcatcctgcagctgggcgttatagatgaccagctgggcaatgttggtgaccaccacgttgccacgcacatggttggg

SEQ ID NO: 802547 - DNA, 120 bp, Artificial Sequence
  ENSG00000261978_0 (sequence is synthesized)
tgtcagaagagcgggaggaaagagctccggcggacagggctcccaggcccctccaggacgaggttggaggaccaagcgcagaagcaggaacagaggtacagagaatggcgtccaggcctc

SEQ ID NO: 802548 - DNA, 120 bp, Artificial Sequence
  ENSG00000261978_1 (sequence is synthesized)
agacaggaagccccacagggaagcagtggccccccgccccctatctcctcacatacagcactctgtaccttctgctcatttttctgtaaacctaaaactgctctaaacaatgaagtccgc

SEQ ID NO: 802549 - DNA, 120 bp, Artificial Sequence
  ENSG00000261978_2 (sequence is synthesized)
cacgcagaaactgcacacggatgttgagagcagctttactcataactgccaacactcagaagcaaccgagatgttctccaacagctgaataaataaataaactgtgatacacctaaataa

SEQ ID NO: 802550 - DNA, 120 bp, Artificial Sequence
  ENSG00000261978_3 (sequence is synthesized)
ccagccagagaagagaaatctgagtttaacccgatcctgtcagaagagcgggaggaaagagctccggcggacagggctcccaggcccctccaggacgaggttggaggaccaagcgcagaa

SEQ ID NO: 802551 - DNA, 120 bp, Artificial Sequence
  ENSG00000227258_0 (sequence is synthesized)
ttgtgacccggaatcatggtgatctaaaagagccctgtgactctgggaaatttgttatcaaaggatgttagccacaagtcctgttggcaaatggaccccaggtggcctgcagtgccaagc

SEQ ID NO: 802552 - DNA, 120 bp, Artificial Sequence
  ENSG00000227258_1 (sequence is synthesized)
tgtttccctgccagcctcccagtctggccctgactctccaattcaatgaagagccattggaggattttaaataaggaaccgaaaaatggagtctgaaaatagaggcgcagagaccggaca

SEQ ID NO: 802553 - DNA, 120 bp, Artificial Sequence
  ENSG00000227258_2 (sequence is synthesized)
gcactgagttcaatgtctcacaattgctgtactctcctctccccgtgaccagagacactctctgaaccgtgctgcagctgccagaaggatgggagtgggatggtgtcaggattcaaggct

SEQ ID NO: 802554 - DNA, 120 bp, Artificial Sequence
  ENSG00000227258_3 (sequence is synthesized)
atgttttctacctcttcagtgcctctttcagtgatacgaagttaaaaccaggttcttccccaaaccatcatggaccagttggactctgagaagaaaagtttctgatctttagttcattct

SEQ ID NO: 802555 - DNA, 120 bp, Artificial Sequence
  ENSG00000227258_4 (sequence is synthesized)
tccaactctctagaaagcaggaaaactgagaatgaaaaattctaaattactcaggactcatgggttgccaatagaagaaatacatcttaaactagcttaagcctgaaagggaaatgtatt

SEQ ID NO: 802556 - DNA, 120 bp, Artificial Sequence
  ENSG00000227258_5 (sequence is synthesized)
tgttcatgtaactgaaccataacgaaggatggtggactgagggacctgaaaacaccctcaggactccctccctctcctttgtgctcctgtctgatgccgtcttcccagacctgctcactc

SEQ ID NO: 802557 - DNA, 120 bp, Artificial Sequence
  ENSG00000227258_6 (sequence is synthesized)
tccataaggtggggatgtggccatcagcaacgtgtacttccccgaagcttgtgacctgagtagataggcatctcccaacccacaaggattgaaaagttcctctaggaattatgtggattg

SEQ ID NO: 802558 - DNA, 120 bp, Artificial Sequence
  ENSG00000227258_7 (sequence is synthesized)
gcccattcactatgacatgttccccctaagcagctaaaggaactgggtctgttaccagaagaggtgggagaggggtgctaggcagattgaacaacagccactacaacatctgaggaggag

SEQ ID NO: 802559 - DNA, 120 bp, Artificial Sequence
  ENSG00000227258_8 (sequence is synthesized)
tcctcacagtctcataagtgaggattaaatactacatgtggcctaggagatcttagaccctccacacgaagatatagtaacaatcaacatcctagtgttctggcagagaaaaaatcagaa

SEQ ID NO: 802560 - DNA, 120 bp, Artificial Sequence
  ENSG00000227258_9 (sequence is synthesized)
agaatcgtttgcctgatttttccatcaataccaataattaattagagatgaaatttgtgatggactcagagaattagagaagatctaagggaatctagatgatttcctacccctaaccag

SEQ ID NO: 802561 - DNA, 120 bp, Artificial Sequence
  ENSG00000227258_10 (sequence is synthesized)
agcctcacaaaaaagggtgaagatctatggccgtcttgcgtttggtgtgaggctggacaaggaagttcctaaggtcctttagactctgtgagatcatgagtccgtaaaacccttccaact

SEQ ID NO: 802562 - DNA, 120 bp, Artificial Sequence
  ENSG00000227258_11 (sequence is synthesized)
tgaaattagttgattccttccttaaattttctgggacattcccccactccctccactcttattagctgattttactgaccaataggccttgaagttgggcgttccatctagatgtctcac

SEQ ID NO: 802563 - DNA, 120 bp, Artificial Sequence
  ENSG00000227258_12 (sequence is synthesized)
gttccatctagatgtctcacatcaactcaccttttgcaaattaagcccatacccttaaagaggggaattctcaagccattagaaactagagagtcagctgggcatggtggctcacgcctg

SEQ ID NO: 802564 - DNA, 120 bp, Artificial Sequence
  ENSG00000227258_13 (sequence is synthesized)
aaacaaaagaacaaacaaacaaaaactagagggtctcctcttagttcttaaaccctcttagtcaacatttgtgagcctcttttctgtatgttttggcatctttattcctttccttcgtgt

SEQ ID NO: 802565 - DNA, 120 bp, Artificial Sequence
  ENSG00000227258_14 (sequence is synthesized)
cttgaccaaattcaccagatcatgactcagaacaaaatcctgaggttgaatatagaggtctagaacatcttcaaattaactgtttctcctcatagagaattaaagaaattgagaaagcaa

SEQ ID NO: 802566 - DNA, 120 bp, Artificial Sequence
  ENSG00000227258_15 (sequence is synthesized)
tgctcctagcattaactacgtcgttaaacccttctgaatttatttcgtctgtgaaatggggaaaagatagccaccttgcataactggtgaagaattcgtaaactgacagcagaatctagt

SEQ ID NO: 802567 - DNA, 120 bp, Artificial Sequence
  ENSG00000227258_16 (sequence is synthesized)
aagaggactggcccgtggtcggctcttaatggtgtcacagaataaagaaaaagactgggagagagatgggagctgatagaccagaggagaccaaagactgaaactgaagactaaaccatg

SEQ ID NO: 802568 - DNA, 120 bp, Artificial Sequence
  ENSG00000227258_17 (sequence is synthesized)
agtctgaaaatagaggcgcagagaccggtcaaccacaatgaagaacaagccattttgacctccatcctggctcatctcctctgtgttctcatagcatcatattatagaatggatcacaaa

SEQ ID NO: 802569 - DNA, 120 bp, Artificial Sequence
  ENSG00000227258_18 (sequence is synthesized)
gaggtgggcaaggtagtgatattcctgtttgacgccgacagaaataagagagattgactctcagaaccatgtggcgggattttaaaggaggatcttaacagtggctcggacagacccgtg

SEQ ID NO: 802570 - DNA, 120 bp, Artificial Sequence
  ENSG00000227258_19 (sequence is synthesized)
tggtcggctcttaatggtgtgtatggggctatgaacattcccaggtcttctgacctctagtctgggactctttctgctaaactagggattcttagaggtccagagacttcgggagatcca

SEQ ID NO: 802571 - DNA, 120 bp, Artificial Sequence
  ENSG00000227258_20 (sequence is synthesized)
ggggcatcttcaagggggtccctgagttctaaactgcagaggaacactcttaagagagataataaatatttccaccacatctgttatggataatatatattttgtcatctatttgccaga

SEQ ID NO: 802572 - DNA, 120 bp, Artificial Sequence
  ENSG00000227258_21 (sequence is synthesized)
gactgttgtaagtgcttgtatacattaagtcacttaatctttacagtgaacactaaggtacatcctattataattcccattttacagagacgttaaatacctatctagctaaaaaatgtg

SEQ ID NO: 802573 - DNA, 120 bp, Artificial Sequence
  ENSG00000227258_22 (sequence is synthesized)
ggagctgttttacattcacgcaatctagctgataaagccacacaccttaatgtttgtactatatattattgtgcaagaggtgtatttgataatgattcttgtgtcaccatttacaagatg

SEQ ID NO: 802574 - DNA, 120 bp, Artificial Sequence
  ENSG00000227258_23 (sequence is synthesized)
cttctggcttttattaaactctcaaagggcaggaaaagaaaaaaaaatacagaggaacctaaaccctaaatcagagacagactacatgcagatatacaaatggatgataagaaaccaaag

SEQ ID NO: 802575 - DNA, 120 bp, Artificial Sequence
  ENSG00000227258_24 (sequence is synthesized)
ttgtgggtaccatgtttgcaattccgttttagctgagtgctttggactatcacgtccctcagtggctccctggaggaagaatgattgaatgacaggataggaatggaatgtagccatcat

SEQ ID NO: 802576 - DNA, 120 bp, Artificial Sequence
  ENSG00000227258_25 (sequence is synthesized)
cttatctgaccacacagacacctcccagcagatgaatgcatcacctcctcatgataattttgaagactttctgagaaagtgataatattagcctattacctcacaaccacaaggaacact

SEQ ID NO: 802577 - DNA, 120 bp, Artificial Sequence
  ENSG00000227258_26 (sequence is synthesized)
gaacaagcacttactcgcttagagggtgaaaaaagtgaatttgcctacagggccaatttggaagcacctctccctggaagccagtcaatgaagagccattggaggattttaaataaggaa

SEQ ID NO: 802578 - DNA, 120 bp, Artificial Sequence
  ENSG00000227258_27 (sequence is synthesized)
ccgaaaaatggagtctgaaaatagaggcgcagagaccggtaagttggtggttgccaatcagtggtccaaggaaaagataaatgagcagagccgtgatcaggaccagagaggaggcaacag

SEQ ID NO: 802579 - DNA, 120 bp, Artificial Sequence
  ENSG00000227258_28 (sequence is synthesized)
aaaagagatgctcaggatacaatcgatgcgcttcgagagtgactggaggtggggcactgtagaataagtgacatggagagatctagattgacctctgggcctacagctcaggaaaatggg

SEQ ID NO: 802580 - DNA, 120 bp, Artificial Sequence
  ENSG00000227258_29 (sequence is synthesized)
actggaatttttagaattttacattcttactgcccaagaaaaccccttgcaaagaaaaaaaacaacttaagaaaagtaaaagtatttaaaaggctccaacttctcccaaacacctcctct

SEQ ID NO: 802581 - DNA, 120 bp, Artificial Sequence
  ENSG00000227258_30 (sequence is synthesized)
tttctgactctcccaattgtatagtcacagcaataatagcagccacatattaagtcattaccatctatagccaaataactgcaaaaccacaagagggcaatgaaaatggccataaaggca

SEQ ID NO: 802582 - DNA, 120 bp, Artificial Sequence
  ENSG00000227258_31 (sequence is synthesized)
cagagtagtaattattttcccattagcaccagctacactaatatcaacatagaacaattaacattcctaacctcataattaggctataacctctgcatgtcttgccagagtagattgatg

SEQ ID NO: 802583 - DNA, 120 bp, Artificial Sequence
  ENSG00000227258_32 (sequence is synthesized)
aatggcacaggaggaataagcaacaataaggcagccgtgcagtgagaccactgcatcctcaccttgtctgcgggtgatccacagtgctgttggatagaaaggcagtgggagaacttggtt

SEQ ID NO: 802584 - DNA, 120 bp, Artificial Sequence
  ENSG00000227258_33 (sequence is synthesized)
gtgatttccactgatctagccagtccccagctaaaagccatcgaattcagctgcactttctttgagtcccaggaagtgagtgtttgagtgggagaaaagctacagcagtaataacacaga

SEQ ID NO: 802585 - DNA, 120 bp, Artificial Sequence
  ENSG00000227258_34 (sequence is synthesized)
aggcagagtccttttgcatttatatctctttattctgtccatcactaggcaaccattctttgtgcttaaaactacacatctttgtacatgtgacaccttctactctgaagtaaccacttt

SEQ ID NO: 802586 - DNA, 120 bp, Artificial Sequence
  ENSG00000227258_35 (sequence is synthesized)
ggtttgcagtgtgctaggggatatctattctgtttatttctgtttaggtcaaccacaatgaagaacaagccattttgacctccatcctggctcatctcctctgtgttctcatagcatcat

SEQ ID NO: 802587 - DNA, 120 bp, Artificial Sequence
  ENSG00000227258_36 (sequence is synthesized)
aaacataattgctttctatctactctgatttgagcttcatcaaatcctttggctcccaaggcattctgcagcagatgtgtgcacaatattccagcactaggacttgtgtctgcgggtact

SEQ ID NO: 802588 - DNA, 120 bp, Artificial Sequence
  ENSG00000227258_37 (sequence is synthesized)
gctcgaggcccaagagtctgagggtctgcaaagcctccaagcccttccccttcctcccaggcctcagggcctgtgctggccaccctcctatacagcccttacttggcattcttgctaagt

SEQ ID NO: 802589 - DNA, 120 bp, Artificial Sequence
  ENSG00000227258_38 (sequence is synthesized)
cctgtgggggctccatccttgactcttttcattccacgctgatgtcttctgggctctgcgcctcaggggagaacttgcaatgctagtaataaacaaagagtactcatgataaaaaatgaa

SEQ ID NO: 802590 - DNA, 120 bp, Artificial Sequence
  ENSG00000227256_0 (sequence is synthesized)
agtattacaccaaggaaaacgttccagaaacgtcgataagccggtggtgaattactgccatcggaacatttacggcattcaaagacagaaaaaacttcatcttgaaaaatcacaatccaa

SEQ ID NO: 802591 - DNA, 120 bp, Artificial Sequence
  ENSG00000227256_1 (sequence is synthesized)
aaacaacagccattcttacaccaattcataaaaaatatgtgaaccactttatccctaaatactgcaaaaacatcaaaatgagggaacagtggaacaacagagggtctttaaaagtgttat

SEQ ID NO: 802592 - DNA, 120 bp, Artificial Sequence
  ENSG00000227256_2 (sequence is synthesized)
tctttgtcgccctttgtttctgagtaatgctcacgatgatgctgattcaaccactgctcttctgggatcggggaccccagaaaagaacccaccgcccgagagccaaagtggaggggtgac

SEQ ID NO: 802593 - DNA, 120 bp, Artificial Sequence
  ENSG00000227256_3 (sequence is synthesized)
catgcctcaccatactttgccccttctacttttgtagagccaagcctgaccttcctggactgttgttttcaagcataatatctctggtacaacattgatacaatccacatgagttcttta

SEQ ID NO: 802594 - DNA, 120 bp, Artificial Sequence
  ENSG00000227256_4 (sequence is synthesized)
agtaagtggctagttacttggggattcaaaggatcatcttgtctcagactttgggttcctattgtcaatacttaaattctatgataggatgccccaggaaagaaggaatacaaggccgag

SEQ ID NO: 802595 - DNA, 120 bp, Artificial Sequence
  ENSG00000227256_5 (sequence is synthesized)
ctgcgtggtgactttcaggggccctatttttgccttagtaggcctttctctccataaaacagttaataaaaatttcattttatagtcacattgctatgaagatgattatattaaaatgat

SEQ ID NO: 802596 - DNA, 120 bp, Artificial Sequence
  ENSG00000227252_0 (sequence is synthesized)
atcgctgcggccgggatagggcgccgccgttctggccggctttctcggtgccctggaggacctggccggctccgcgggaagctgtactcagagcgcgcggccgccctctggcagggagga

SEQ ID NO: 802597 - DNA, 120 bp, Artificial Sequence
  ENSG00000227252_1 (sequence is synthesized)
gttcgttgcacttttgagggttcttcacgaagacatccaatacatagaaaacaagtaacagcaacagtaacgaatttttaaatattaaaattgctggggaacacgacggatcctgcagct

SEQ ID NO: 802598 - DNA, 120 bp, Artificial Sequence
  ENSG00000227252_2 (sequence is synthesized)
gctcggctgtcccggtcgtcagtgacgctagggctccgcaccgtaccctgcataccgtaggtgctcacgaaacgttcgtgagttccctgctctgaggaaacaagcttaaaaactcagaat

SEQ ID NO: 802599 - DNA, 120 bp, Artificial Sequence
  ENSG00000227252_3 (sequence is synthesized)
ctaaggtgtgagtctccgcaaacctgcttgttgggcagcgtcccccgcccgggctagccctgcacgccccaccccggagccacgcttctccagccgggacccctgcctccttccaggcta

SEQ ID NO: 802600 - DNA, 120 bp, Artificial Sequence
  ENSG00000227252_4 (sequence is synthesized)
ttctcggaaccgcagccagagggaatttttttttcctttcctgaaacgtagagcagatctggttactcttctgcacaacgccctaaaatctagggcccttcccatccctcagaatttaca

SEQ ID NO: 802601 - DNA, 120 bp, Artificial Sequence
  ENSG00000227252_5 (sequence is synthesized)
tctaattctcagctcccctccggcttgctgtagccatcctggcttttgtttagcacagcacttactgttagtgacattatattgtatattattaacatatttgtgttttacatccctcac

SEQ ID NO: 802602 - DNA, 120 bp, Artificial Sequence
  ENSG00000227252_6 (sequence is synthesized)
tagacccccaggaaagaggctttgatgtgttgcctgctgcaaggctggctgcataatttgtggagctcagagaaaagtgcggagcttccttgttcaaaaaacagaaagaaagtgcctctg

SEQ ID NO: 802603 - DNA, 120 bp, Artificial Sequence
  ENSG00000227252_7 (sequence is synthesized)
aggtcataaaatataaaactttctctttcctctcagtttctctcttttcatagtgtttttatgtgttatttaatatcattccaagaaaaatttagatttaaattgttagcatgaagttca

SEQ ID NO: 802604 - DNA, 120 bp, Artificial Sequence
  ENSG00000227252_8 (sequence is synthesized)
ccatccatctttacgttgtgcaatgccagttttaaatactaatataagtgcactgatctcatatgtggaatcacagaaattatgcaatttgtacttcatagcttatacatgcatatagat

SEQ ID NO: 802605 - DNA, 120 bp, Artificial Sequence
  ENSG00000227252_9 (sequence is synthesized)
tttgtttttaccagaaccacgctggtaaaaacagatgctgcacaaagtgaacttgcccgttttcatcgcactttacgtgcacgaattctacctctactctcgacctgggactcaccgatg

SEQ ID NO: 802606 - DNA, 120 bp, Artificial Sequence
  ENSG00000227252_10 (sequence is synthesized)
cgtaaggaaggactgaaaagcaaaagaactatggactggccttttggcatgatcaggtgtctaatataaagaagtgcatgaataagaaaatatatgatatgagtgatggttaatactgac

SEQ ID NO: 802607 - DNA, 120 bp, Artificial Sequence
  ENSG00000227252_11 (sequence is synthesized)
tagatggacaccatctaatcagatgccagtgcagctagaaatgtaaagcagacagaaaaatgcgaaaagagagactggcctagcctgccagcctacatctttctcccacgctggatgctt

SEQ ID NO: 802608 - DNA, 120 bp, Artificial Sequence
  ENSG00000227252_12 (sequence is synthesized)
agttcttcagtttgggacttggactggctctccttgttcctcagcttgaagactgcccattgtgggacttgtgatcataggtggagcacctatccagtgaggctgtgaggaaggccttat

SEQ ID NO: 802609 - DNA, 120 bp, Artificial Sequence
  ENSG00000227252_13 (sequence is synthesized)
accaagaataggagaaagctagaaggagcccatacctctgactgcccttgactgcccacgcaagaactcatgctggaaaaacaaagccctgtttaggtgccatgataaataagccagttt

SEQ ID NO: 802610 - DNA, 120 bp, Artificial Sequence
  ENSG00000227252_14 (sequence is synthesized)
gagtcacttggtctaatatcgagaccacgaacatattgatcacagaatgtgttaggtaagcatgttgttgactgaagtgtaagtaaggtgctcaccttaaatgcatgtgccaacatcagc

SEQ ID NO: 802611 - DNA, 120 bp, Artificial Sequence
  ENSG00000227252_15 (sequence is synthesized)
atcttcagaagagtctctttccctttgggacatcgaggtgactgacagttaaacaagccgtatttggagtaggtgtacaatcagcctccttccagttctccttggcactttccagttcac

SEQ ID NO: 802612 - DNA, 75 bp, Artificial Sequence
  ENSG00000227252_16 (sequence is synthesized)
tcagcctccttccagttctccttggcactttccagttcacaaaggacacttcactcctttttgggtggtgagatc

SEQ ID NO: 802613 - DNA, 89 bp, Artificial Sequence
  ENSG00000227252_17 (sequence is synthesized)
agtgtagaagggggtattgccctatcgcctaggctggaaggctgttaagaggagaactgagcaatgaggatcccatcctggacttcgca

SEQ ID NO: 802614 - DNA, 120 bp, Artificial Sequence
  ENSG00000227252_18 (sequence is synthesized)
aggagaactgagcaatgaggatcccatcctggacttcgcagacttgctgtgcttttgaatgcttctctcacggtcagagcctgcactggaaaagatggcatttgggacaacacacctggc

SEQ ID NO: 802615 - DNA, 120 bp, Artificial Sequence
  ENSG00000227252_19 (sequence is synthesized)
tgctgccccaggaagaaagtagtgaacactggaggactgtcagccctgtcagtttctggaaatgtgccctgagtttaagttctggtttcagattatgaggagcaaaattactgagtaggc

SEQ ID NO: 802616 - DNA, 120 bp, Artificial Sequence
  ENSG00000227252_20 (sequence is synthesized)
ctcctcctagaacaggaagctcttcccgctgtgggccagtggctctgacatatcacagagcctgctctgatgaaggcagcaggaatgatttcaaaacaagcaaaaccaaagaaaactgtt

SEQ ID NO: 802617 - DNA, 120 bp, Artificial Sequence
  ENSG00000227252_21 (sequence is synthesized)
tgacaatggaagtaatagaggctcattttagaaaacatagacataaagaaaaaaagaagaatcttccataacccacagattataactacttacataccttccaggctttatttctctttt

SEQ ID NO: 802618 - DNA, 120 bp, Artificial Sequence
  ENSG00000227252_22 (sequence is synthesized)
ttaaaaaacaaatgttaaagtggaatttacctataaaaaagatacaggtcctaagagcacagcttggcttgatcaattttctcaagttgaatgcacctgtgcaatcagtgccaggctgaa

SEQ ID NO: 802619 - DNA, 120 bp, Artificial Sequence
  ENSG00000227252_23 (sequence is synthesized)
cacacagcctcagcagcgcctggaagcttttccaagcctccttattgtcatccctccctccccaggggtagctgcgatcactgtagctttggtctgaactatatataaatgcaatcatgc

SEQ ID NO: 802620 - DNA, 120 bp, Artificial Sequence
  ENSG00000227252_24 (sequence is synthesized)
cacgttatgtttctgagactcacccacaccctggcaagccattgcagtttgtttattctcaatgttctacaagcagcagtccccaagctttttggcaccggggaccagtctcatggagga

SEQ ID NO: 802621 - DNA, 120 bp, Artificial Sequence
  ENSG00000227252_25 (sequence is synthesized)
atggaggacgatttttccgcagaccaggtggggatggttttggaatgattcaagcacattccatttattgtgcactttatttctattactgttgcattgtaatatataatgaaataatta

SEQ ID NO: 802622 - DNA, 120 bp, Artificial Sequence
  ENSG00000227252_26 (sequence is synthesized)
tccgtgaacaactcaggaggaccagctatgatttcactctcattcaaaaaagagaaataatatttctttcagctgctacccataaaatatttttgaatgtgtgtacaatgttcatgctgt

SEQ ID NO: 802623 - DNA, 120 bp, Artificial Sequence
  ENSG00000227252_27 (sequence is synthesized)
aatggctgctctatcatgaaggatgtgttgacacctcgtgggtggcttttcacaatccccttggacacagattgggggattgacggccccatcccctcattttccacaccgaggggcagt

SEQ ID NO: 802624 - DNA, 120 bp, Artificial Sequence
  ENSG00000227252_28 (sequence is synthesized)
tgggatatgcataaaatcttgttctctagttaggacctgttgctataaatctagcatcaagagtatcactattttctaaacactttgccagacagccttcggagtataattttctgaagt

SEQ ID NO: 802625 - DNA, 120 bp, Artificial Sequence
  ENSG00000227252_29 (sequence is synthesized)
ttataaagcataactcatacacacacctagtgaccatgttctgaaggtatatttaactcctgcatgagggaacaggcaggatgaaagtgggttctaaggaagagactagcatatatgatc

SEQ ID NO: 802626 - DNA, 120 bp, Artificial Sequence
  ENSG00000227252_30 (sequence is synthesized)
aacggggaaaaatgaagagtaagcttgaaaccgcctttgcaaaaattataaccgaggagattatgacagtgaaggagatcagacctaaccgaccccatcttgcttctaacctttaagctg

SEQ ID NO: 802627 - DNA, 120 bp, Artificial Sequence
  ENSG00000227252_31 (sequence is synthesized)
tccttgttcattcctgggtgtaggccgaactaactttgggaaggaatttgttcgtggtttgactctgaaacaaaaaaattgataatagccctttcccgaaaagaccgccttcttgcctgg

SEQ ID NO: 802628 - DNA, 120 bp, Artificial Sequence
  ENSG00000227252_32 (sequence is synthesized)
ggaccagtctgcctttgcaggaccaacaaattaactacgagattagaaattacagtttaggggtcctgcagcctctgactccaagagtctgaccctccccacattgcttctggggataac

SEQ ID NO: 802629 - DNA, 60 bp, Artificial Sequence
  ENSG00000227252_33 (sequence is synthesized)
atcactattacaccacccagacccgtaatctggatcaaccagttctgccatcccacccag

SEQ ID NO: 802630 - DNA, 120 bp, Artificial Sequence
  ENSG00000227252_34 (sequence is synthesized)
ccatccaggtccactcaagttgtgacactgcttggcttactgtgccatgataaataagccagtttgagtcacttggtctaatatcgagaccacgaacatattgatcacagaatgtgttag

SEQ ID NO: 802631 - DNA, 120 bp, Artificial Sequence
  ENSG00000227252_35 (sequence is synthesized)
atgcaagaaaaactcactttgaccctctatgattccatctccaacctgaccaatcagtactccccacttcccaagcccctgcctgccaaattatctttaaaaactctgatccccgaatgc

SEQ ID NO: 802632 - DNA, 120 bp, Artificial Sequence
  ENSG00000227252_36 (sequence is synthesized)
ttggagaggctgatttgagtaacaacacaactctggtctcctgcacagccagttctgtgtgaactacccttcgcccattgcaattcccctgtcttgataaattggctctgtcgaggcagt

SEQ ID NO: 802633 - DNA, 120 bp, Artificial Sequence
  ENSG00000227252_37 (sequence is synthesized)
gggcaaggtgaacccactgggcagttacaagactgcaaagttagaaacaaaactggcaatgccccatgggtcaaaaataatcaattaattcataacatttgacttgattaagttttctac

SEQ ID NO: 802634 - DNA, 120 bp, Artificial Sequence
  ENSG00000227252_38 (sequence is synthesized)
tggacagaaacaatttgcaacttatccttcctctacattgtttgactgccatgtcaattgtaagtattagatcaaattttaaaataattattttagagcttcagatgcaccttacatggg

SEQ ID NO: 802635 - DNA, 120 bp, Artificial Sequence
  ENSG00000227252_39 (sequence is synthesized)
cttgttagattgttagacactgcttagtgacattgaaagagggcacaatactttttttgccttatttctaagttgtgggtatccttttcttaacacttcttttctgtgattctatgcaag

SEQ ID NO: 802636 - DNA, 120 bp, Artificial Sequence
  ENSG00000227252_40 (sequence is synthesized)
acaatcgttgatgaaatgggattttctggatggaaagtccgtgtactttactgaaacctctttctacagttctgtctttcaagtgggattctgtgagctgactcatgacagctgagcatc

SEQ ID NO: 802637 - DNA, 120 bp, Artificial Sequence
  ENSG00000227252_41 (sequence is synthesized)
atcggagattggcttcaatggtcctcaatgtgcagaacataaatagcaatttctaccatcattcaatagcatttgtgggtccttttatatggagtatataaaagtatttgcaggtcttgg

SEQ ID NO: 802638 - DNA, 120 bp, Artificial Sequence
  ENSG00000227252_42 (sequence is synthesized)
tttatctgtccccacgtgacatacctatagaacaggtattttcatcccagctacttattataaatatttaataagtaggctaatggtttggaattctatttctctatttgcatgagtcaa

SEQ ID NO: 802639 - DNA, 120 bp, Artificial Sequence
  ENSG00000227252_43 (sequence is synthesized)
ataatagaccaaattctttcaaaaagaggagatgttaacataccaaaagaaactgaaacaagagcattgaacccacggtgcccttcagaaacacctgccaacaatggggcagagtgtcca

SEQ ID NO: 802640 - DNA, 120 bp, Artificial Sequence
  ENSG00000227252_44 (sequence is synthesized)
gctgcctggacagtgtgtgcaggggcggggcccttcctgttcacaatggctttgcctggcagttaaaatgcaaatggagggcagactgagagtgcatcaccctctcacatctcagagtct

SEQ ID NO: 802641 - DNA, 120 bp, Artificial Sequence
  ENSG00000227252_45 (sequence is synthesized)
aaaaggcggcctttcagtgccttctgttcaaattgcaaatgctcttcctttatcccccaaggcctgggagacagttctgaataattcttccccaacaaattggctttcctcttcccagca

SEQ ID NO: 802642 - DNA, 120 bp, Artificial Sequence
  ENSG00000227252_46 (sequence is synthesized)
acaaaagcccttattggttttaaaagtgcaaagaacaaattttattcaagggtcttaaggcagatgaaggttcacagaaactacaagggcagttccagggcctccacgtacgaccgtgtc

SEQ ID NO: 802643 - DNA, 120 bp, Artificial Sequence
  ENSG00000227252_47 (sequence is synthesized)
cctataacgactggtccttataagaggccagcaacagtatcttattttcctgtacaggcctgggattcccagtaatttctttgcattggctttgtaagcacaattacccagagtttccga

SEQ ID NO: 802644 - DNA, 120 bp, Artificial Sequence
  ENSG00000227252_48 (sequence is synthesized)
gaattgggacatttccaagaaattgcccaatgggtcagtggagtgctgtcaaatgagatggaccatcttaaaatcaaaacgtgggtggtttctgctcattgctgagcatttcacttccat

SEQ ID NO: 802645 - DNA, 120 bp, Artificial Sequence
  ENSG00000227252_49 (sequence is synthesized)
tctgaaaagtctaagaacgtcactccaggagatacaatgtcaagggctcccgccactcttcatcattgcccaagtcataagaatcatcccccaaattccttctatttctccaaggtaggg

SEQ ID NO: 802646 - DNA, 120 bp, Artificial Sequence
  ENSG00000227252_50 (sequence is synthesized)
taacccagggctgggtaagcctgttagggcaggtcaggttggcacataccgaggaggaactcagacagacagacagcgccaggggaccagcggcactgtgtgctcatcaccaccctcagg

SEQ ID NO: 802647 - DNA, 120 bp, Artificial Sequence
  ENSG00000227252_51 (sequence is synthesized)
cagcaaatcaccaggacacccatcttggagactgttgtgacactcagaacaggggctgttgagctgctgataccggaaagcaaatcgtgccttatcatagagcagacctgctggacagag

SEQ ID NO: 802648 - DNA, 120 bp, Artificial Sequence
  ENSG00000227252_52 (sequence is synthesized)
agtgcagacgccgaagcccagcatgctgaggtcatacaggtatctggtactgaaaccggaattggaacaatgtcctgccctgcgtttgtcacttcaatgccccccagttttcctggacaa

SEQ ID NO: 802649 - DNA, 120 bp, Artificial Sequence
  ENSG00000227252_53 (sequence is synthesized)
aggtttgcatgaataggagctgagggaggtaaggaggaaggcagagaagctgctgcactgaacagaagtcagggtgctgtgcctctgcgtgtgttcctgcagcaggacccagcaaccgag

SEQ ID NO: 802650 - DNA, 120 bp, Artificial Sequence
  ENSG00000227252_54 (sequence is synthesized)
gccaaggaggctcccaaacttctccagtgtctttcccaagcttctgctcttctttctcttttcagctaacctccaggctctctatctttttgtccttaggctatagtctctgattaagat

SEQ ID NO: 802651 - DNA, 120 bp, Artificial Sequence
  ENSG00000227252_55 (sequence is synthesized)
atactcgcttcccgcttaatggaactcatcacatcaggtcctacctgtccccagaactcccttttcaattacagaaaacggcccgctgatcttggaaagggctggcaggcgagggaccct

SEQ ID NO: 802652 - DNA, 120 bp, Artificial Sequence
  ENSG00000227252_56 (sequence is synthesized)
cctcagactcattgattcttttggtcctgcttttccaaaactgctcccatttctgtctctgccttctgtctctgtcaaacaaccactgtcaacagttctttaaaccaaaaatcattgctc

SEQ ID NO: 802653 - DNA, 120 bp, Artificial Sequence
  ENSG00000227252_57 (sequence is synthesized)
aggaagcaaatttgtttgcgggaagaatgacagtctgtcgccgtgcagagggtggcgttcatgacggtgcttgaaggagttcacaggttaggccagacaaagcccagcgcgttcatcagg

SEQ ID NO: 802654 - DNA, 120 bp, Artificial Sequence
  ENSG00000227252_58 (sequence is synthesized)
cagcttgagcacgggttgtctttcgccttcttgctggtttgacatcgtgggtaaaacctggtcatttttccagaaggattctgaagagattgtgtaaattgaagaaatggcttgctcttg

SEQ ID NO: 802655 - DNA, 120 bp, Artificial Sequence
  ENSG00000227252_59 (sequence is synthesized)
ttaggaaagcaaagccaacttttgagatattcagggaatgtgaggtctagtggactcttttactgccaagtttcttatcatgagaaaccgctctcagctccttagtggaaggaaatgaaa

SEQ ID NO: 802656 - DNA, 120 bp, Artificial Sequence
  ENSG00000227252_60 (sequence is synthesized)
tgtatgcaaagcattatcggcttactcagataactgcaccagcgtaaaccaggttgtgactaatttgcaaacttagtgcagggaaggtccttagacgtgattctggaattgccaacccta

SEQ ID NO: 802657 - DNA, 120 bp, Artificial Sequence
  ENSG00000227252_61 (sequence is synthesized)
tgagcttccacagatgctatgggccacttttagagcccacggattcagcatgtggctgttgggaacaggctttgctatgaaaatcagtgatggcttataatgcctctaactgccatatat

SEQ ID NO: 802658 - DNA, 120 bp, Artificial Sequence
  ENSG00000227252_62 (sequence is synthesized)
gttttcacaggattattatttatgatctcaattaatatttccatctgattagcagtgaaacaaaccaggatgtgaggaaatgggaacttaattaaaggttgctgcccagtcagggtggca

SEQ ID NO: 802659 - DNA, 120 bp, Artificial Sequence
  ENSG00000227252_63 (sequence is synthesized)
ttccagatcatggatcctgttatgtaggagggacgcccaaattcgccctgagcatgcctcccttcctcttctcatgcagcctctaactcggggtgtctcttgcaatgccacttagaatag

SEQ ID NO: 802660 - DNA, 120 bp, Artificial Sequence
  ENSG00000227252_64 (sequence is synthesized)
tttcgccgaagatgtaggtgattaatcaaggccccgggtgtcacaatggcccattgtcccagaaggcattcctttggccggcttctgaccttttctcttggggcaagtgtgcattttccc

SEQ ID NO: 802661 - DNA, 120 bp, Artificial Sequence
  ENSG00000227252_65 (sequence is synthesized)
aaactcttaatggacaagaactcacagacaatggccctgcatgtaactttcatttgcaggatggaacagagaatgttcgggttgctggaaggagggaaaagggcatgcattaactcaatc

SEQ ID NO: 802662 - DNA, 120 bp, Artificial Sequence
  ENSG00000227252_66 (sequence is synthesized)
tttgtattctcatcaaaaaacagacacgtattttgaagaggacagctttccactcggttttttatatttaaaagaatcaattgttcataagcccatcgtgataatattaaaggaaattaa

SEQ ID NO: 802663 - DNA, 120 bp, Artificial Sequence
  ENSG00000227252_67 (sequence is synthesized)
aataaaagactcactcacagtcctatcactctgacactctggaaatctaattatttccgtttaccgtgtttccctctaatcttgtccatatacaaagtttttactcagttgtcatcaaag

SEQ ID NO: 802664 - DNA, 120 bp, Artificial Sequence
  ENSG00000227252_68 (sequence is synthesized)
gaatgctggggcctccaaaatctgcgattacatttctcgtaaatggcaactcattgtcatcctgcagacatggattaaaccacaggatggggtctgaaccgggaacacttgcaggttaac

SEQ ID NO: 802665 - DNA, 120 bp, Artificial Sequence
  ENSG00000227252_69 (sequence is synthesized)
agcaacaacatccactccaacagaatcacccccgtcacagtgagcaatgagcaaaaacatggctcagaaacagtttccccagatgttcaataaaggacatttaaatgagacatttaccat

SEQ ID NO: 802666 - DNA, 120 bp, Artificial Sequence
  ENSG00000227252_70 (sequence is synthesized)
ctggttaataacatagcattgagtgggacttggtaacaatatcccaatacgtaagcttttaaaatcagttcttttccctgagcataaaactgcttctccatctgccctatgaaaacaggc

SEQ ID NO: 802667 - DNA, 120 bp, Artificial Sequence
  ENSG00000227252_71 (sequence is synthesized)
ttccaggaaattcagaaggaggttggcttcagtgggaaagtagtctgtgacccagaaggtgtttattcaacaaggtgcaagctgacaacatgtttctttgctctggacactggaattaaa

SEQ ID NO: 802668 - DNA, 120 bp, Artificial Sequence
  ENSG00000227252_72 (sequence is synthesized)
tcccccatctagatggtttcatctaggggtggggggatgaaagacagtgacagattatcaggtattagattctcataagaagcttgcaacctggattcttcgcatgcttagttcacagta

SEQ ID NO: 802669 - DNA, 120 bp, Artificial Sequence
  ENSG00000227252_73 (sequence is synthesized)
gggttcacgctcctatgagaatctaatgctgccacagaactgacaggaggcagagctcagatggtaatgctcacttgcccactgctcacctcctgctgtgcagccctgttccttacaggc

SEQ ID NO: 802670 - DNA, 120 bp, Artificial Sequence
  ENSG00000227252_74 (sequence is synthesized)
catggactggtaccacacaactatttggccatagctacaaaagctgattacaggtgtaattacagattacatcactattacatagcctacaaagaggtttaattggacttataagtccac

SEQ ID NO: 802671 - DNA, 74 bp, Artificial Sequence
  ENSG00000227252_75 (sequence is synthesized)
aggaggagcaagtcacatcttacatggagggcagcaggcaaagagagagcttgtgcagggagactcattttttg

SEQ ID NO: 802672 - DNA, 120 bp, Artificial Sequence
  ENSG00000227252_76 (sequence is synthesized)
agacttattcactatcataagaacagtgtgggaattacaaattacatagctatgtagttacaaattacatagctaattacacctgtaatcaacttttgtagctatggccaaatagttttc

SEQ ID NO: 802673 - DNA, 120 bp, Artificial Sequence
  ENSG00000227252_77 (sequence is synthesized)
tagttttcccaagtggttgcaccaatttacactcccaccaacagtacatgatcctgctggcagctcaatctacattcttattaactgcattagtccattttcacgttgctgataaagaca

SEQ ID NO: 802674 - DNA, 87 bp, Artificial Sequence
  ENSG00000227252_78 (sequence is synthesized)
ttttctcatggaacagcatgggaaagacctgcccccacaattcaattacctcgcaccaggtacctcccacaacacatgggaattcaa

SEQ ID NO: 802675 - DNA, 81 bp, Artificial Sequence
  ENSG00000227252_79 (sequence is synthesized)
gaccctttgtttttccccatctttttcattttagccattcttttcatgtgtattagacatttggatagcctcatttgtgaa

SEQ ID NO: 802676 - DNA, 120 bp, Artificial Sequence
  ENSG00000227252_80 (sequence is synthesized)
tttcatgtgtattagacatttggatagcctcatttgtgaaatgtctcattttttctactaggcttttcatctctttattgatctaaaacatttttaatatattagacatatgtattgcaa

SEQ ID NO: 802677 - DNA, 120 bp, Artificial Sequence
  ENSG00000227252_81 (sequence is synthesized)
atctcttcttctactgtggaagtggctttcatttctattcatttcagactgttttaatgctatcttatttctttctttatgattcagcactctttgtgtcctgcttaagaactctttgtc

SEQ ID NO: 802678 - DNA, 120 bp, Artificial Sequence
  ENSG00000227252_82 (sequence is synthesized)
tcctcagcttgaagactgcccattgtgggacttgtgatcatgctgattcaagggggccctgccccgcatccttcctgctctaccggccatcgcgacgccaccttccatgagctccatttc

SEQ ID NO: 802679 - DNA, 120 bp, Artificial Sequence
  ENSG00000227252_83 (sequence is synthesized)
caggactggcccatctgggcatcacagtcccaaccacaatgcgtgtttggtccttggggcttcctggataacttggagctttgtgagaactccaaaaggatttcttctgaagaaccaaac

SEQ ID NO: 802680 - DNA, 120 bp, Artificial Sequence
  ENSG00000227252_84 (sequence is synthesized)
ccatgtttcataggcgacacgcagtttgctcctttcaacatgcacacaaaacacacatgcatgaaacagcaaatgagagcagcctcggcatgatctgagagtctgccagtcccttcctca

SEQ ID NO: 802681 - DNA, 120 bp, Artificial Sequence
  ENSG00000227252_85 (sequence is synthesized)
ccagagcagggctcagaaccatactcctcacatcctcggattctggggtgcagccctcagggacagcttggggctgaggccagaacacagttggcagggcccagagcttctcccctgacc

SEQ ID NO: 802682 - DNA, 120 bp, Artificial Sequence
  ENSG00000227252_86 (sequence is synthesized)
ccacctagcacgtggctcagagccagtggggctggccaagggttgcttttccagtatggtttgctcattttcttttgctgctcttgttctcgctctcacctgtactctctgctctgtccc

SEQ ID NO: 802683 - DNA, 120 bp, Artificial Sequence
  ENSG00000227252_87 (sequence is synthesized)
tgctcctcaagggtttcaagatcaagatgcttattgtcgagaactgtcttcctttcaaaaatggcttacagttctggcctccaaatgcaggattttagctacactgccacatcattcaac

SEQ ID NO: 802684 - DNA, 120 bp, Artificial Sequence
  ENSG00000227252_88 (sequence is synthesized)
tcagcttgaagactgcccattgtgggacttgtgatcatgtggatttagagtttcctacggctgttgcttcacatgtcatctggagaaggccccctgtgcagtctttgcaactttccacag

SEQ ID NO: 802685 - DNA, 120 bp, Artificial Sequence
  ENSG00000227252_89 (sequence is synthesized)
ataaaggtgaaaataatgcaagaggaaaacagatgacggcctttccctaaggcagaaactgggaagaagggaagcctgagaggagcaaaaggacctgatgccatgagtggcctcagtgtg

SEQ ID NO: 802686 - DNA, 120 bp, Artificial Sequence
  ENSG00000227252_90 (sequence is synthesized)
aaatgcggagggcctcagtttgtgtcccagcacagagactctctacacaaggttttgttcttgtttgtgtttttaacttttctcccatcccctgacggagacacctgtgcctgagctcca

SEQ ID NO: 802687 - DNA, 120 bp, Artificial Sequence
  ENSG00000227252_91 (sequence is synthesized)
ggggaactcggcagcgcccatgctccattccttggatgcttctgtgagttgagcagaaagactttcttctcatttctatcaatcacctttctttgctctcagcccactcacttccccatc

SEQ ID NO: 802688 - DNA, 120 bp, Artificial Sequence
  ENSG00000227252_92 (sequence is synthesized)
ttctacacctcacggaagcaggaaggaggggctgccgaggaccccaggaatgcggccccaggagtcaccatgcagatgaagaagggaggcgccctcatattcgggcagcctgggaactgg

SEQ ID NO: 802689 - DNA, 120 bp, Artificial Sequence
  ENSG00000227252_93 (sequence is synthesized)
gatgtgttccatgcagtgacagctcccagcgctctgaagccatgacagcggaggaggcaaggcaagacccctcctgcagaacagccacctgcaggggagatctggcgaggagtaagaatc

SEQ ID NO: 802690 - DNA, 120 bp, Artificial Sequence
  ENSG00000227252_94 (sequence is synthesized)
gatcaaataggcaagcatttcatcagggaaaatgcctaagagaaatgcggggggaagctgggtgcaactggaatagccttcagactgtggtgtgagtctgaccccagtgaaggaaagagg

SEQ ID NO: 802691 - DNA, 120 bp, Artificial Sequence
  ENSG00000227252_95 (sequence is synthesized)
agggatggctgcgaggaggtggccccaggaaagttctgcaaagccaccgggcatcctcaaccctgaaccagaggactcagcccaacctctccccagagtggacctgcactgccttgctca

SEQ ID NO: 802692 - DNA, 120 bp, Artificial Sequence
  ENSG00000227252_96 (sequence is synthesized)
gacactggctgggagcagcctgtgagaaatgtggctgcatgcaaatatttaaccgtcaacaagccacagctgaggaaacatggccacacaaccgtattagtccattctcgcactgttaca

SEQ ID NO: 802693 - DNA, 85 bp, Artificial Sequence
  ENSG00000227252_97 (sequence is synthesized)
tggtggcaacatctacttctggggtgacctgtgggagtttttactcatggtgggggcaatgagggagcaggcatttcacctggca

SEQ ID NO: 802694 - DNA, 120 bp, Artificial Sequence
  ENSG00000227252_98 (sequence is synthesized)
catggtgggggcaatgagggagcaggcatttcacctggcaggagcaggaggaagagagaggggggaggtaccacacttttttttttttttgaaaagaagacttgctctttcgcccaggct

SEQ ID NO: 802695 - DNA, 120 bp, Artificial Sequence
  ENSG00000227252_99 (sequence is synthesized)
caggcacgtgccactaagcccggctaattcttttatttttaatagagatggggtttcatcatgttggctaggctggtttcaaactcctgaccacaagtgatccacccacctcggcctccc

SEQ ID NO: 802696 - DNA, 120 bp, Artificial Sequence
  ENSG00000227252_100 (sequence is synthesized)
ctgctcccagcctgcacacttttatacaaccagatcttgtgaaaactcttgtcactatacagtaccaaggggagatggtggtaaaccattcatgagaactctgcctccatgatccagtca

SEQ ID NO: 802697 - DNA, 120 bp, Artificial Sequence
  ENSG00000227252_101 (sequence is synthesized)
gattacaattcaacatgagatttgggaagggacacgaggcaaatcatatcaacaaccatttggaaagtcatatgcaatgggagagagaaatcatgggaaataatataaaatgaattcttt

SEQ ID NO: 802698 - DNA, 120 bp, Artificial Sequence
  ENSG00000227252_102 (sequence is synthesized)
atgggaaataatataaaatgaattcttttcagcaacgaaatctgctgacatcaagataaatacatatatacatgcatatatacacacacgcatatatttaatatgaagtctgcttcaaac

SEQ ID NO: 802699 - DNA, 120 bp, Artificial Sequence
  ENSG00000227252_103 (sequence is synthesized)
tcaaacaatagagagatggatttatgcatatctgaaaatgagcactatacctctattaaataggtaatattgaaaaatacccgatggcatagaataatgttctgaaatgaaaataacggg

SEQ ID NO: 802700 - DNA, 120 bp, Artificial Sequence
  ENSG00000227253_0 (sequence is synthesized)
cagttagtctggtcgaataagaggataaatgctacatggaagtgcttgtcacttatgaaccccaacgcaagtctcatttcattgttccgcaagccatttatgaacgtgcctgtgggcagc

SEQ ID NO: 802701 - DNA, 120 bp, Artificial Sequence
  ENSG00000227253_1 (sequence is synthesized)
agtaagaaaagaaaaattgaagcatgagagatgagcattgctgtcaagtccccacagctgccacagaaacgcatgtgctgctttccatcatcccttgcattcaaaatgctactgatgcat

SEQ ID NO: 802702 - DNA, 120 bp, Artificial Sequence
  ENSG00000227253_2 (sequence is synthesized)
ttttctgattcatgattttccctgttgaaataaagttcaatcaattacttatctacaacataaatattcagcaaatgaacattatcttcccaacaaaaagtttatttttattaacaggaa

SEQ ID NO: 802703 - DNA, 120 bp, Artificial Sequence
  ENSG00000227253_3 (sequence is synthesized)
gaaattggactctttgggaacaagctagcaagtagaggaatacgaatctttatagtttattatcagaaatcaggctaatgttgactataaataaattccacagtcaactacattaccatc

SEQ ID NO: 802704 - DNA, 120 bp, Artificial Sequence
  ENSG00000227253_4 (sequence is synthesized)
aaaattatagtagtactcaagcaacctagatgttaaaaacaaagaattcccatgttttagtaattgttgtttcaagttccttctctattaaacctttcaaaagagtttttaaaaaggaaa

SEQ ID NO: 802705 - DNA, 120 bp, Artificial Sequence
  ENSG00000227253_5 (sequence is synthesized)
gtgcttgtcacttatgaaccccaacgcaagtctcatttcattgttccgcaagccatttatgaacgtgcctgtgggcagcagctgttttacagatttgattctactcttggtgatcgcatc

SEQ ID NO: 802706 - DNA, 120 bp, Artificial Sequence
  ENSG00000227253_6 (sequence is synthesized)
caaattcatggctttgaacttcaatgatgaagatgactctcaagttttggtctccagctgaaacctctcctccaaactccatacttttatatatgcaaccacctacttgaaatctctatt

SEQ ID NO: 802707 - DNA, 120 bp, Artificial Sequence
  ENSG00000227253_7 (sequence is synthesized)
tgtggtcagttgctcaggccaaataccctgaagtcatcctaactcttctctttctcaagccccttacatctaaattcaaaaactcaaggacccagaggggaaccaagttatgttatacca

SEQ ID NO: 802708 - DNA, 120 bp, Artificial Sequence
  ENSG00000267734_0 (sequence is synthesized)
ccggccgaaaatcagttaactcttcttagacccaatagagaattgaggttcagggcaaactgctgctcccaaaactggagagagatgtgactacagaaaaccacagctacgggtatcaca

SEQ ID NO: 802709 - DNA, 120 bp, Artificial Sequence
  ENSG00000267734_1 (sequence is synthesized)
ggagccagtatccataggaacactgtaatgtaaattgctggaggttcaacgtggactagcttgagaattaaaagctcaggggatgggcagtctggctgctgttgctttgcctataaaata

SEQ ID NO: 802710 - DNA, 120 bp, Artificial Sequence
  ENSG00000267734_2 (sequence is synthesized)
agagggtatattacatgaattatatgaaatggtacatggtatatcatgaacaaccaggagaattataacattaaatttattccgtctgtctgcatgtttgtaccctttaacccacttctc

SEQ ID NO: 802711 - DNA, 120 bp, Artificial Sequence
  ENSG00000267734_3 (sequence is synthesized)
ttcattctccccaacactcacctttcccagtctcttatctttttactctctactctcatgtgatcaaatttttttagctctcacatatgtgagaacatgtgatatcgccccaaatttgtc

SEQ ID NO: 802712 - DNA, 120 bp, Artificial Sequence
  ENSG00000267638_0 (sequence is synthesized)
ggacacgtccagctcctccaacactcttgtcagctcccacagaggtagctgcaagggaaacttggaccgccagcatctggaaagacccctaccccactccgggatccaaaaccacctccc

SEQ ID NO: 802713 - DNA, 120 bp, Artificial Sequence
  ENSG00000267632_0 (sequence is synthesized)
aggttggacatccaacaagatagactctaattcagcctccccagtctctggccacccagctcactcagggattcagctacccttggctacccaagtagtctaaacattttatctttatca

SEQ ID NO: 802714 - DNA, 120 bp, Artificial Sequence
  ENSG00000267632_1 (sequence is synthesized)
ggcacatatacagtctggttctctgtagccaaatttagatacccatgacatttatctaatgatttcaaaccaaacaggttcctaaaaaaacattcagcctacttctagaacttccccatt

SEQ ID NO: 802715 - DNA, 120 bp, Artificial Sequence
  ENSG00000267632_2 (sequence is synthesized)
ttgcttggctgtgaaaatgtatttgtcccatgcaggcccttgctccagcccagtggaagcattagtacctcttcctagcgggaactcagtccagctacacaccagagccaggccagtggt

SEQ ID NO: 802716 - DNA, 120 bp, Artificial Sequence
  ENSG00000267632_3 (sequence is synthesized)
tgtctgggaaatcttcaaaggccgtgaccactcagcaagggtcagtggcacctctccccactgtctcctcaccaggtgcattcatcccatccatccatgcattcactcaccctccgtgtt

SEQ ID NO: 802717 - DNA, 120 bp, Artificial Sequence
  ENSG00000267632_4 (sequence is synthesized)
gtccagcactatgtatagtgctgcagaaacaagaagaatatagtgcttgccttcaaagacctcccaaagtggggagatagtctggatgacaggtgctgtaatagaagtgtgccccggatg

SEQ ID NO: 802718 - DNA, 120 bp, Artificial Sequence
  ENSG00000267632_5 (sequence is synthesized)
ctataggagcacagaaagagggcaactgatgaacactggggtgagagtggaagaggagaccctggaagactccctaaggaagttgtcttactctggtcaagcaggaggccctgtagaggg

SEQ ID NO: 802719 - DNA, 120 bp, Artificial Sequence
  ENSG00000267632_6 (sequence is synthesized)
agtggtgcagacccaccagcatatgcagcttcacaggggcaaaacacctgtaggtccatcacgtgttggggactagcaagtattcagcttggctggagcagaggcaggagtggggaactg

SEQ ID NO: 802720 - DNA, 120 bp, Artificial Sequence
  ENSG00000267632_7 (sequence is synthesized)
tggacaacaaggagccatccaagagagagcggtgaagctgatggtgacacagccatggcgcattgaaatacccccagtggctgtgttgtagggtatattgggttggggagggacaaggtc

SEQ ID NO: 802721 - DNA, 120 bp, Artificial Sequence
  ENSG00000267632_8 (sequence is synthesized)
aggaggcatagactcgacatcatctgatgtgattcaggacagaatggcgagcctgaagtgaagtgtctgtaggataagttggaaaggaaggaaccaatatgagatattaaagaagtgaaa

SEQ ID NO: 802722 - DNA, 120 bp, Artificial Sequence
  ENSG00000267632_9 (sequence is synthesized)
gctataggtcccagtgccttaataaaggtaaggagtaagagaagattcgagattgactcccagactctccagtctgctggacatgggagatggaatagaagttgatctcggtgtggtcag

SEQ ID NO: 802723 - DNA, 120 bp, Artificial Sequence
  ENSG00000267632_10 (sequence is synthesized)
aggagagcagttactgtgttgagcatggagagcctgtcgttccccaggagaaggagtacagctggctggaaataggcaaggcagagatggagagatccaccttggagtcactcctagggg

SEQ ID NO: 802724 - DNA, 120 bp, Artificial Sequence
  ENSG00000267632_11 (sequence is synthesized)
ggggcgacccttgaagccctgagtagcaatcccaccagaaagatgcaagggctgaagctgaaacttcagagagcatcggcatttaaggaagaaccttggctgggcgtggtggctcacgcc

SEQ ID NO: 802725 - DNA, 66 bp, Artificial Sequence
  ENSG00000267632_12 (sequence is synthesized)
tactaaaaatacataaattagctgggcgacttgattctcctgggaggcagaggttgtggtgagctg

SEQ ID NO: 802726 - DNA, 87 bp, Artificial Sequence
  ENSG00000267633_0 (sequence is synthesized)
ttaaagagatggggtctcactctgttgcttagggtgaagtgcagtagtgcaatcaaagcacactgcatttcagcctgagtagctggg

SEQ ID NO: 802727 - DNA, 120 bp, Artificial Sequence
  ENSG00000267633_1 (sequence is synthesized)
gctagaggtgtgagttccatgcccagctcattgtttttaaatttttgtttgtagagacaagctcttcctatgttacccaaactggtctcaaacacctgggctcaagggatcctcccaaag

SEQ ID NO: 802728 - DNA, 120 bp, Artificial Sequence
  ENSG00000267633_2 (sequence is synthesized)
cagcactttgggaggctgaggcaggctagggagagctgagttggttacatctggggtccatctagggttccatccctggaagagatggtggtggttagggctgtccggagctcctcaggg

SEQ ID NO: 802729 - DNA, 120 bp, Artificial Sequence
  ENSG00000267633_3 (sequence is synthesized)
tggtggttagggctgtccggagctcctcaggggcaaagacccccagttctgtgatgatgccaccagtgatgaggtcgtggggggtgacatcgaaggcaggattccaaactccaatccctg

SEQ ID NO: 802730 - DNA, 71 bp, Artificial Sequence
  ENSG00000267633_4 (sequence is synthesized)
ctggcctcatcatggatttttgcattaattttgatttttaaaaaatactgctgtaaggtcaggatttgaat

SEQ ID NO: 802731 - DNA, 120 bp, Artificial Sequence
  ENSG00000267633_5 (sequence is synthesized)
ttcaagacttaaaaaatattttaatatccaaaataatcaaattgttaaactacatcctgcagaccggcagcataattttgtaaataaagttttagtggaaccagggtgttgaggtcagta

SEQ ID NO: 802732 - DNA, 120 bp, Artificial Sequence
  ENSG00000267633_6 (sequence is synthesized)
cagcactttcggaggccgcggggcgcggatcacccgaggtcaggagttggagaccagccacgactaacatggtgtctccaataaaaatacaaaaattagccaggatggtctcaatctcct

SEQ ID NO: 802733 - DNA, 70 bp, Artificial Sequence
  ENSG00000267633_7 (sequence is synthesized)
atccacattttataaatgaggaaaccaaggcacagagaggtgaagtgacttgcccaagatcatacagtgg

SEQ ID NO: 802734 - DNA, 120 bp, Artificial Sequence
  ENSG00000267636_0 (sequence is synthesized)
ctgcaagagaggggacggcggctgggctggatggctgcctttgagtccgtcctgcggtgaggctggggaaggcccattccacgcgagccttggcttcagccctgaggtgcctgccagccc

SEQ ID NO: 802735 - DNA, 120 bp, Artificial Sequence
  ENSG00000267636_1 (sequence is synthesized)
acaagtttcatgttcaacattttaagtgtctatttatgagtcccagtaattagccctttgtctgcaattctggcgatgatgattagaattccatctcacgttatgaatgctgctccccaa

SEQ ID NO: 802736 - DNA, 120 bp, Artificial Sequence
  ENSG00000267636_2 (sequence is synthesized)
acttgtccttctcgcctggagaatcccaagcaggtgaacaagaataactgtttctccaattacgggacattataagttgtttccttcattctgattgaatgcacccacgtcgcttgccac

SEQ ID NO: 802737 - DNA, 120 bp, Artificial Sequence
  ENSG00000267637_0 (sequence is synthesized)
ttgagtaaaacaacttttgtaaaattatatactttagaaacaaatgaagattcttgtgacttgtttattctataagctgtataaccaaaaagaaaaattaaagatactttaggaataaaa

SEQ ID NO: 802738 - DNA, 120 bp, Artificial Sequence
  ENSG00000235943_0 (sequence is synthesized)
catcaagggagaacaggagaggagagaaaagggaaggaaggaagagaatgccttgcattaaggactcgcataggaaattacccaaaatcatttcaatcatcaaagtaggtcgttgaggac

SEQ ID NO: 802739 - DNA, 120 bp, Artificial Sequence
  ENSG00000235943_1 (sequence is synthesized)
ctataaaaaaatctggaattaggccctatcatatccataatctttggggaaaactaaggacattattataaattaacatttctttctatgaatttactggaattatgagcagtttttatt

SEQ ID NO: 802740 - DNA, 120 bp, Artificial Sequence
  ENSG00000235943_2 (sequence is synthesized)
ctcttagaaaaattcgacacacagctattcattaaactaaaatagaaaaatcaagattgttgcattcgatcaagcagtaattttattttaaaaacctaataaaaaacaatttgctctgaa

SEQ ID NO: 802741 - DNA, 120 bp, Artificial Sequence
  ENSG00000235947_0 (sequence is synthesized)
caacttctgggcaaggcagaggtgggtttggctttttaaaaattttttcagcctgtcctcatggaactacatattcttttctaagaacttttcatcctaacctccctactcacatcttct

SEQ ID NO: 802742 - DNA, 120 bp, Artificial Sequence
  ENSG00000235947_1 (sequence is synthesized)
aagtgtctctgctctggtgggaatgtgatggacaacacagagccatctcagaagcctctgtggccaccaccaggccggccagggtgcagggggccactccctgggcagccatagggttct

SEQ ID NO: 802743 - DNA, 120 bp, Artificial Sequence
  ENSG00000235947_2 (sequence is synthesized)
cagcaaggtgcattcgtcgtccctgctgagaatctgatggggcagcatttttttttttaattaaatgcaagctgagtcatttcaacctgcaaccttcaggtaacaggagttacccaagct

SEQ ID NO: 802744 - DNA, 120 bp, Artificial Sequence
  ENSG00000235947_3 (sequence is synthesized)
ccaggaattatgattgtggggtaaacccattctcttgttttcttgcggttctattttataacgcactagaggagacagagacgtcattgcttcacccagggcaagaggacaaaggaggat

SEQ ID NO: 802745 - DNA, 120 bp, Artificial Sequence
  ENSG00000235947_4 (sequence is synthesized)
gcatggaaatacaaacagcccttctcctccaggccataccgactgtccaactagcaacagacttcacctggttttggagcaatctgaatttggaatatgccagagaaaacttctatcagg

SEQ ID NO: 802746 - DNA, 120 bp, Artificial Sequence
  ENSG00000235947_5 (sequence is synthesized)
caagatggaagactcctaggataggtctctctcatggagggattggcacgatggtaagagtccagtggatggaaaaggcctcctccttaaagatggtgatggaaacgagcactgcacagg

SEQ ID NO: 802747 - DNA, 120 bp, Artificial Sequence
  ENSG00000235947_6 (sequence is synthesized)
atccagcccaacctggccagaccctccagtgcccatcagggcttatgaacagggtgcttcagtgtctttgttaggggtggttaaaaaggagcacgtgcttataggggatgctgctgagct

SEQ ID NO: 802748 - DNA, 120 bp, Artificial Sequence
  ENSG00000235947_7 (sequence is synthesized)
ccatgattttgacttcctgtctaacctgttgatgctacaaaactcttttaaaaacagttaccatgggaacttttccctagcaagcattcttcaagaaacgttacaggtgctggtgaattc

SEQ ID NO: 802749 - DNA, 120 bp, Artificial Sequence
  ENSG00000235947_8 (sequence is synthesized)
aatgcccttggtgtcaataagcttttgctgagtcttagaatgtgtggcttgaactgagaggactttcaaacagataatgcgaagtttccaatgcaaatgtcttcggggttaagtgtcagt

SEQ ID NO: 802750 - DNA, 120 bp, Artificial Sequence
  ENSG00000235947_9 (sequence is synthesized)
gaagtgcagtggaaggtagggggataaaatgatctcagtgtatatggaggccccacttaagcattcaaaaaattctatatacagtgttttcaatgtattatgtatcagcaaaacaaaata

SEQ ID NO: 802751 - DNA, 120 bp, Artificial Sequence
  ENSG00000235947_10 (sequence is synthesized)
ccccatagggctataatcagctcagggggtcacctcagcaagagatgctctggctatcactcctactacgggatttcctctctcatcagaaccagtaggtggtcaaaaccacaataatgc

SEQ ID NO: 802752 - DNA, 120 bp, Artificial Sequence
  ENSG00000235947_11 (sequence is synthesized)
ataaatgaaggcagggaattgggtatccaatgtgagcaactgaaaaggtgccatgtattagctatttgccattatggttctgcaagtgctcagatgactcataaaatgaccagaacaaaa

SEQ ID NO: 802753 - DNA, 120 bp, Artificial Sequence
  ENSG00000265908_0 (sequence is synthesized)
cgaggggaaggaatctagacgttgtcacctccagttcgtcagtgctaggcttctaagcacttacaatgtcaaaaacaacatgctgacaagataatgttaaagttaatatattttaatcta

SEQ ID NO: 802754 - DNA, 120 bp, Artificial Sequence
  ENSG00000265908_1 (sequence is synthesized)
tcacttgcctgatactattctaatgaggagctaaacacaacaaaatcagaaaaaccacctccttaaaagttcaaacaggttgggcatgacagctcactcctataatctcaacactttgtg

SEQ ID NO: 802755 - DNA, 120 bp, Artificial Sequence
  ENSG00000265908_2 (sequence is synthesized)
gaggcttaggtgggaggatcacttgagcccagagtttgaggctgcagggagctaggatcaagccttggagaccctgtatccaaaaacaaacaaacaaccccacttcaaacatcaaacatt

SEQ ID NO: 802756 - DNA, 120 bp, Artificial Sequence
  ENSG00000265908_3 (sequence is synthesized)
ttctgcaaggcagttttctattctatgtgtgaaacctttgttacgactcactgaaaatatgcaaaactccaagctgagcttagttttgcctgtgcacagagacctttttactctcattct

SEQ ID NO: 802757 - DNA, 120 bp, Artificial Sequence
  ENSG00000265907_0 (sequence is synthesized)
aaacacatcagtacacagtggatacagcctttcacaccatcaggaaaaacaaggatgaaaaacacttgaacatcactgttttccaggaagtagggtgtgacctcttttcgacagatgggg

SEQ ID NO: 802758 - DNA, 120 bp, Artificial Sequence
  ENSG00000265907_1 (sequence is synthesized)
tgaaaacacacaagtggaccagcagctcccgccacaaataaagagtctggaaatgcagggccactcatgggcagcagcttcttgtccagtcgtcaccaataaagagaatccccaccacgg

SEQ ID NO: 802759 - DNA, 120 bp, Artificial Sequence
  ENSG00000265907_2 (sequence is synthesized)
ctcccaactgctacctttcaaccccaagcggtgctgacatgaaaaatggcatataatgagctcttctacagagcagaacttggagtaaaaattgtctctgtttccaagacgtgtgagatg

SEQ ID NO: 802760 - DNA, 120 bp, Artificial Sequence
  ENSG00000265907_3 (sequence is synthesized)
tctgaactctgagatggtgtttcatctccacccgatttcaccaaaggggtgtcaatatctttaaagaactgatcttcagtaggaattggtgaggtggcaaggatgacttttcctctcctt

SEQ ID NO: 802761 - DNA, 120 bp, Artificial Sequence
  ENSG00000265907_4 (sequence is synthesized)
gaggacactcaccactttctctttggatctcaggactcccagctttccaaaccgaacgtgaaaaggtgaacactgatagctgccatcctgctgctgtaccacgatgacatcaatgcaccc

SEQ ID NO: 802762 - DNA, 120 bp, Artificial Sequence
  ENSG00000265907_5 (sequence is synthesized)
ccaataaaacaaaactcaactcctcaggaaaaacataccaagcctaaggccactgggtagggaaatcccagagatgacatggtgtccaactggatctgctcaccgaggggcaaatcacta

SEQ ID NO: 802763 - DNA, 120 bp, Artificial Sequence
  ENSG00000265907_6 (sequence is synthesized)
attcagatcttttgacttagaacttatttggctcctggaaacttctttatgaaaagaaacacaaccagtctgctacaaatgacatttcagtagcatatttatagaatagttgaaaggaac

SEQ ID NO: 802764 - DNA, 120 bp, Artificial Sequence
  ENSG00000265907_7 (sequence is synthesized)
aaagaaactgcctttgctgcttgattccacaataaactgtaaagggggaaaacaagcccaaacctcacactgtgtatccataaaaaaactggcagctcctggcttcacatgaactctagg

SEQ ID NO: 802765 - DNA, 120 bp, Artificial Sequence
  ENSG00000265907_8 (sequence is synthesized)
tacccgcacaagacccttcccaggctgagagtcctaccgtgctgcctgggcccccttgtcatcatcggagctcacgcctacatcacatgtgtcttctgcagcagcagatgcggcctgctc

SEQ ID NO: 802766 - DNA, 120 bp, Artificial Sequence
  ENSG00000265907_9 (sequence is synthesized)
aaagttatccatgacaaactcgacagtgaattaaagcagtaatattttgaatatataaattttcaccatggtaaaaaaaaaaaaaatacatattccctaaaggcaagaaagtcccactga

SEQ ID NO: 802767 - DNA, 120 bp, Artificial Sequence
  ENSG00000265907_10 (sequence is synthesized)
actaaggcactgcctactatactctgacgaggtctttcccctgtgaggcagctaagtaccagcccacttgggtacatgtaactgagtccatctgaaggaactgacatgccaagtcagcat

SEQ ID NO: 802768 - DNA, 120 bp, Artificial Sequence
  ENSG00000265907_11 (sequence is synthesized)
ggaacaccccaaagccataattaaagctaagcctattaaattcttcacaaagcaaagatcaaagcagcaacaaaaatctcaggaggtgttacaaaggactctctcaagaactcacacaga

SEQ ID NO: 802769 - DNA, 120 bp, Artificial Sequence
  ENSG00000265907_12 (sequence is synthesized)
acattcagaacaggaaaaagcagaaggcagagattaaggacactacatcagacaaagggcagcaggacaggtgagtgacgcgaggatgcagtgatacagagcggccaatgcttatgtttt

SEQ ID NO: 802770 - DNA, 120 bp, Artificial Sequence
  ENSG00000265907_13 (sequence is synthesized)
tttttaaaccataaagcatttatgtttaaaaataagaaatattccttcctgtaggaattcaaaagaagaaaataaggcccaatatttagaagcagtcaaactcctaatactaaataaacg

SEQ ID NO: 802771 - DNA, 120 bp, Artificial Sequence
  ENSG00000265907_14 (sequence is synthesized)
atcaagtctggtgttcagtaaattcatgtcttagccatttgtttcattcctttttgtatcatcagaggaaatggaaggtacataatagagataaaaattaacttcaggcagaacgtggtg

SEQ ID NO: 802772 - DNA, 120 bp, Artificial Sequence
  ENSG00000265907_15 (sequence is synthesized)
gagcgagactccatctcaaaacaaacaacaaaaaaattaacctcatataatttaaaatactcaagcttttaaacaatagttctgaaaatgtataggtttctgtaattatttttttattaa

SEQ ID NO: 802773 - DNA, 120 bp, Artificial Sequence
  ENSG00000265907_16 (sequence is synthesized)
tttattaagcttttgaacttagctttgataaacatattaccctgaagctaaagtttgatttagctaggagaaatctgtgttcaccagaaacacacacttacagagaaattgtaataagat

SEQ ID NO: 802774 - DNA, 120 bp, Artificial Sequence
  ENSG00000265907_17 (sequence is synthesized)
attctgaatgtccaaaagaaacccagatgagaggtcgtggtctctgactttgaggatttttaattcaatgatctttattttacttactgaaagctctttttgtttctggtggtatttctt

SEQ ID NO: 802775 - DNA, 120 bp, Artificial Sequence
  ENSG00000265907_18 (sequence is synthesized)
agttctattatagcaatgtttgtaggatgaagataacctgaacgcctaccagcaagaaaatggttaaacaaactatggtatgtccatactatggaatactgtgcagctattaaaagcaca

SEQ ID NO: 802776 - DNA, 120 bp, Artificial Sequence
  ENSG00000265907_19 (sequence is synthesized)
gagttaggtttagaactagacttgaaaagaatgttgatgacatataattaaatgagaaaaatctgagagaaaaaaatcaaataaatggcaacaaactgggtttttggtcatctttatcct

SEQ ID NO: 802777 - DNA, 120 bp, Artificial Sequence
  ENSG00000265907_20 (sequence is synthesized)
actctaaatgacgaacccctagaggaacagaggcatgttgtattcatagcatgtggcatagagtagtaattccaacatttgttggataaattaacaattttttattttaaggagaagcat

SEQ ID NO: 802778 - DNA, 120 bp, Artificial Sequence
  ENSG00000265907_21 (sequence is synthesized)
actacacaagataaactctggtcaatgtagtcatatgtggaatagggagaaaaaggctggaaagttgacattttccaagttgtccttgctgagcataatttttagcggaactgtcagaat

SEQ ID NO: 802779 - DNA, 120 bp, Artificial Sequence
  ENSG00000265907_22 (sequence is synthesized)
aagccatgaaaacgaggttaacatcaataacccagtcctctcgcttacggtgcctgctgatctagaagttcagtgttatgaattataaataattttaagaaacatacaaaaagtggtttt

SEQ ID NO: 802780 - DNA, 120 bp, Artificial Sequence
  ENSG00000265907_23 (sequence is synthesized)
tttttttgacagatgtcatttattatgtttcattctgctctttgcctctgtctctgataaggaaaaatgttgcttaggccaagtaaatgcaaacaaggtattacaaagataagtaatgaa

SEQ ID NO: 802781 - DNA, 120 bp, Artificial Sequence
  ENSG00000265907_24 (sequence is synthesized)
gaaactagaaaaagcaccagtctgatcaagcttccccttcataaatcatagtgtttcaatgctgctttacctactggtacctaagttgttggtttctcaatcaaaaaatgataaacaatc

SEQ ID NO: 802782 - DNA, 120 bp, Artificial Sequence
  ENSG00000253140_0 (sequence is synthesized)
ctgaggcctccccagccatgtggaactttccagtgaaggtgctgcattgataacaactttagcctctccagtgttcacaatggaaggccaggagagagattatccacagccccgggggaa

SEQ ID NO: 802783 - DNA, 120 bp, Artificial Sequence
  ENSG00000253140_1 (sequence is synthesized)
cacagccccgggggaattctgaagatggtgggaatggggtggacccctggggccccagccgtcagtgagcagccctgcagcagatttaaccccaataatatttgaagtcctactgaagtg

SEQ ID NO: 802784 - DNA, 120 bp, Artificial Sequence
  ENSG00000253140_2 (sequence is synthesized)
caagaagcttctagctacacggtttttccttccaccccacagtgcagtggaaacaagacccaagctcttctcaaggagtaagcacaggacaagtttcctgctaagtggtcctaagtcaac

SEQ ID NO: 802785 - DNA, 120 bp, Artificial Sequence
  ENSG00000253140_3 (sequence is synthesized)
aaggccatctgataggaatttgaggagtagtgaattttataggaatagaggggaaaggactctttttccatgtaggcttctcttggagtggggagattaggaaatctccatgatataaaa

SEQ ID NO: 802786 - DNA, 120 bp, Artificial Sequence
  ENSG00000253140_4 (sequence is synthesized)
tgatgaaagttcgaatcattgtcaccctaccggaaagactccaatttgaccttagtgcttaatccctttagtttgaagtgtagcttaaaagtatttaaataaaatacagctgcccccaaa

SEQ ID NO: 802787 - DNA, 120 bp, Artificial Sequence
  ENSG00000260367_0 (sequence is synthesized)
aatgaataagtgaccttagatgggagtttatgtgtctaccaaaggcacctgaagctaaggacgggtacagtcacccaaggaaagtacgtaggtcctggggctgaggacagagttctgggg

SEQ ID NO: 802788 - DNA, 120 bp, Artificial Sequence
  ENSG00000260367_1 (sequence is synthesized)
tggagtgagaacagacagaggaggcttcaaaggaacaaagaagcaacagccagggaggcaggaggaaagccagaagagtgtggcatcgcaaaggtaggagagagtttcaggaaggaagag

SEQ ID NO: 802789 - DNA, 120 bp, Artificial Sequence
  ENSG00000260367_2 (sequence is synthesized)
tgggtcaacagtgccagaggctcctagcatgaacaggaccaggaagttggagctgtgtttagcaactaggaggccactgttaactttggcaagagcagggtccgtggagtggaggctgga

SEQ ID NO: 802790 - DNA, 120 bp, Artificial Sequence
  ENSG00000260367_3 (sequence is synthesized)
gaaaggaggatggaccgaacacaggcgagggaagtgcgcccggagacggggagcttgccctgaagcacagagcaccactgagaagggacccgggccctgtcacgcctccccgtctcagta

SEQ ID NO: 802791 - DNA, 120 bp, Artificial Sequence
  ENSG00000260367_4 (sequence is synthesized)
gacacacagcgcggaggggacgtgcggaatacacgtgatgtcggggacaggagcgggctgaagagggcacgatcccacgcggaggccacccctcacccggggtaggagcccgctgcactt

SEQ ID NO: 802792 - DNA, 120 bp, Artificial Sequence
  ENSG00000260367_5 (sequence is synthesized)
gctgtcgctcagcccgggcgctgcaccacggcagccgccatgttgcttaaagccggtcatgtgacgcgggagccagggtggaaggggtccccgcgggcaagccttcgacacgtgacctgc

SEQ ID NO: 802793 - DNA, 120 bp, Artificial Sequence
  ENSG00000260367_6 (sequence is synthesized)
ctcacatgtcatgtgacggccggccggtcgccggagtaaccaggaactttcccagaccctgcggtccctggagcgtcaaaaagagcgtccccgtgactaggtggagtcgcctgcccttcc

SEQ ID NO: 802794 - DNA, 120 bp, Artificial Sequence
  ENSG00000260367_7 (sequence is synthesized)
gaatctcagctgtcttatctggaacccccacgtggcagactccatcttcatcaaacgggataatggggtctcaaaaggttttggaagtagtagatacctctaaaagccaaggagcagccc

SEQ ID NO: 802795 - DNA, 120 bp, Artificial Sequence
  ENSG00000260367_8 (sequence is synthesized)
gatacctctaaaagccaaggagcagccctagttctcgggaaccatcctgtcttcctcccagggtctggttggcggctttttactctcaataaaggatggatggatggatggataaatgga

SEQ ID NO: 802796 - DNA, 120 bp, Artificial Sequence
  ENSG00000260367_9 (sequence is synthesized)
ggaggattggagggacggagggatggacggacggacggatggagcttgagcaacgccccgccctttgttgagattccccaaccctgctagccttgtaaactcctgagccttcaccgtgga

SEQ ID NO: 802797 - DNA, 120 bp, Artificial Sequence
  ENSG00000260367_10 (sequence is synthesized)
cacttaaatacctattaaaggaagcgtctccacccgccgctcctggagcatatttttcctcactccaatcgggattggagcccttgcgccctccggtgggcttttgtagggcaggcagga

SEQ ID NO: 802798 - DNA, 120 bp, Artificial Sequence
  ENSG00000260367_11 (sequence is synthesized)
gctcctagcctaaggagactcccagctgcaggactagggtcaaagggataacttgggagtggttctttagtggcaccctataatctccaagctacatctaataaagcactctaagtaaaa

SEQ ID NO: 802799 - DNA, 72 bp, Artificial Sequence
  ENSG00000260366_0 (sequence is synthesized)
aggatcgcttgggcctgggaagcggtgattgcaacgctgcacatcagcctgggtgaccaagcgggactctgt

SEQ ID NO: 802800 - DNA, 120 bp, Artificial Sequence
  ENSG00000260366_1 (sequence is synthesized)
ctctgtctcagaacaaaacaaaacaaaaatacatattcccagatcctggaatgtcctgggaagctatatgtgtgtcatgccctcccagctgcacctgaacaatgagcatagcaaacatca

SEQ ID NO: 802801 - DNA, 120 bp, Artificial Sequence
  ENSG00000260364_0 (sequence is synthesized)
gccaggcatgtggaaaatcaaccggaacttcagctggtggcttaatgagataattttgagacctgtttctcctagactgtaagaggtagatgaaatcctccaccacatcagaggacacct

SEQ ID NO: 802802 - DNA, 120 bp, Artificial Sequence
  ENSG00000260364_1 (sequence is synthesized)
ctcagagtatggaatatagtacatcctccagaatcagctgggaacaatgactgccaaaagtgtccagaggaagtctgcaggacctgggtctctcctaggtggaatattctttgaaatcag

SEQ ID NO: 802803 - DNA, 120 bp, Artificial Sequence
  ENSG00000260364_2 (sequence is synthesized)
tggtgttctgaagactggcaagtacctttcttgtttctctgctgctatcctgaaaatgtgacttgcgtgcatttgggagaaaggtttgctgcctgggacagtgcaacacaagtttagaag

SEQ ID NO: 802804 - DNA, 120 bp, Artificial Sequence
  ENSG00000260364_3 (sequence is synthesized)
gcagacttgaatctgtctgcacatttggtcaggtgctgatcttcatgctaccattgctccagccagtgggtcatgactctagtgaatgaagaatcccagacaatggaagctgcccatggc

SEQ ID NO: 802805 - DNA, 120 bp, Artificial Sequence
  ENSG00000260364_4 (sequence is synthesized)
ttggaacctgcttccatgaaagcctgtgccaccctagcccagttctggctgagctgtattattgggtcagccttctaagagcttccctgccttagttcttcccttttaggtcagccttaa

SEQ ID NO: 802806 - DNA, 75 bp, Artificial Sequence
  ENSG00000260362_0 (sequence is synthesized)
atggacacacatgaaatttggtgcggtgactcgttttgctccatgaggaagatccacctacgacctcaggtcctc

SEQ ID NO: 802807 - DNA, 120 bp, Artificial Sequence
  ENSG00000260362_1 (sequence is synthesized)
gaaacatctcaccaatttcaaatcctcatcaacatctccagtctcatcatgggagacactcatccagaagcaaatctcagccaacaggagcggagccaacgtgggtggctgcaactgcag

SEQ ID NO: 802808 - DNA, 120 bp, Artificial Sequence
  ENSG00000260362_2 (sequence is synthesized)
atgcctagtgctgctttggtggctatgatggaccatttcaacaggtgaccacatggagaattgagcaacatattcttatggaaacagcacctgtacagggaaaggcacagtatgtgggga

SEQ ID NO: 802809 - DNA, 120 bp, Artificial Sequence
  ENSG00000260362_3 (sequence is synthesized)
aacacaggaaacaacacagaggaagaagaagcacttgaggagacagtgttcctctgagctcggcgtgctgtgttgtctgctgggcggctggcggaggaccagggcacagagcagtattta

SEQ ID NO: 802810 - DNA, 120 bp, Artificial Sequence
  ENSG00000260362_4 (sequence is synthesized)
actgctcagctcttgctctgaacagctgagctataaatgctcatacctcagccgaagaataagcaacctaatcttaacttgtattccagtaaaaataaaaatacgttgggttggaagaaa

SEQ ID NO: 802811 - DNA, 120 bp, Artificial Sequence
  ENSG00000260361_0 (sequence is synthesized)
gagccaccaagcctcgcatatccagtggcttttgatggctgaagtgcaagtcacaccccctctctgaattgcaccaggcctacaattcaccagatttgccaggctgggtggaaggatatg

SEQ ID NO: 802812 - DNA, 120 bp, Artificial Sequence
  ENSG00000260361_1 (sequence is synthesized)
taaatctgactcaattcacagcctctcttaacacttcaatcaaaattgcatctaattgaggttcattcataaacctcattgacgtaaacaactgcaaacatggaggagccctccccaaag

SEQ ID NO: 802813 - DNA, 120 bp, Artificial Sequence
  ENSG00000260361_2 (sequence is synthesized)
cttgataattacttcacgatgaaaactcagctgtcagaacatcattgttgctatgacaactatgagagaagctggttgcccagggttacccatgttaccagatgtcactggtgcttgagt

SEQ ID NO: 802814 - DNA, 120 bp, Artificial Sequence
  ENSG00000260361_3 (sequence is synthesized)
gttagcttcaaatgagcctcaggagcataatgagaaaaggcaatgagaactatataaatgggtctgaataagagaacgtcttttttttttttttttttaatcttaaaccccaatagattc

SEQ ID NO: 802815 - DNA, 120 bp, Artificial Sequence
  ENSG00000260361_4 (sequence is synthesized)
aggaagtatctatctcattacaggacaattgagttatatcttggaaccagggagtcctaaaatgacctatcctctaaaaggcctttctttctctttttaaaattctttgttaaattttta

SEQ ID NO: 802816 - DNA, 66 bp, Artificial Sequence
  ENSG00000260361_5 (sequence is synthesized)
gagaccctgtctcttcaaaactaaaaataaagaaattactctctggtgcttcaagcaacatctctg

SEQ ID NO: 802817 - DNA, 120 bp, Artificial Sequence
  ENSG00000260361_6 (sequence is synthesized)
ataaagaaattactctctggtgcttcaagcaacatctctggagagtcgtgttgtgtgaattggtttgtatacattagtatgtgtatgtattcacacattcatatacactcaggatacagt

SEQ ID NO: 802818 - DNA, 120 bp, Artificial Sequence
  ENSG00000260361_7 (sequence is synthesized)
tggcctaattatcattggggccataggtaaaacttatgaagaatgttctcatgctgaattgtaattttcttttacctgtaaagtaaaatttagatcaatcccatgtctgtgtttattttg

SEQ ID NO: 802819 - DNA, 120 bp, Artificial Sequence
  ENSG00000260361_8 (sequence is synthesized)
aatatcatagatatgctgtacatttaaagaggcaatgctactgggattatgtaggttctaactcattttaacaagggcactgtcaggcctctaagcccaagctaagccatcataacccct

SEQ ID NO: 802820 - DNA, 89 bp, Artificial Sequence
  ENSG00000260361_9 (sequence is synthesized)
aagaaccacaaaagaagcaaaataggcttgtgatttgttcctgctccaccctaactgaacaactgacctcgtgacattccttctcctgg

SEQ ID NO: 802821 - DNA, 120 bp, Artificial Sequence
  ENSG00000260361_10 (sequence is synthesized)
cctaactgaacaactgacctcgtgacattccttctcctggactgagtctcaggagctccccaccaagcacctggtgacccctgcccctgcccacaagagaaaaaccccctttaactgtaa

SEQ ID NO: 802822 - DNA, 120 bp, Artificial Sequence
  ENSG00000260360_0 (sequence is synthesized)
gtctggaaacggcagcttctgagagtttacaatgtttcaccaactgtcgtccaaataagtcgtcacccctgtcagagtagttgcagctctgccgttacccactgctgtcactgtggccgt

SEQ ID NO: 802823 - DNA, 120 bp, Artificial Sequence
  ENSG00000260360_1 (sequence is synthesized)
tttattcgcgagggttacagttctgtttagcatgcatctaatgacttaagactccacgcaagtaaaacggagtttcctcccattaagtattggctttgctttaacagtgctttgagaggc

SEQ ID NO: 802824 - DNA, 120 bp, Artificial Sequence
  ENSG00000260360_2 (sequence is synthesized)
tctctgtggccaacatatcttctcatatctttgtcctcgtttcccaatctccgcgtggtgaaatcatctatcaagacttggcttaaaggacctctcttctgcaaataatgccatcttccg

SEQ ID NO: 802825 - DNA, 120 bp, Artificial Sequence
  ENSG00000260360_3 (sequence is synthesized)
ctaggtgctcactgcacacagactcgccgcccaccacttctgtccaccttctgaactccgatagttatttacccagagactgtttctcatctttaagtgtcgtgaagactttaagatctg

SEQ ID NO: 802826 - DNA, 120 bp, Artificial Sequence
  ENSG00000260360_4 (sequence is synthesized)
ttttatctctctataccccaaaatggcctagcacagtaactaggacattgtaggtgctcaataaatgtttgtcgaatatcaatgacagcaggaggcagtaaatggtccctctttgtaggg

SEQ ID NO: 802827 - DNA, 120 bp, Artificial Sequence
  ENSG00000260360_5 (sequence is synthesized)
caggaagctgcactggaggggacaggaaatgtgggtaatcgtatggtgcaagtggtagcaaaaaagacaacataaggaaaatgttatttaggttttgcccagtcttgctgtttaaagccc

SEQ ID NO: 802828 - DNA, 120 bp, Artificial Sequence
  ENSG00000260360_6 (sequence is synthesized)
tgtgttagatgcttttcatgcgctattttactgaatgtaaacaaccaccttattaaatatactcacttttttaaaacgaagaaacacgtactggccggtcacagtggctcacgcctgtaa

SEQ ID NO: 802829 - DNA, 80 bp, Artificial Sequence
  ENSG00000260360_7 (sequence is synthesized)
agactccatctcaagtactgaaaaagctaagtaatttgcccaattttataccatcaataaaagggagctgtaagctttgg

SEQ ID NO: 802830 - DNA, 120 bp, Artificial Sequence
  ENSG00000260369_0 (sequence is synthesized)
gacggggttaggcttccggcgtgggttgtgtggcctctcccagctccacgcgtttctgggcgccgggcactaggcgagccggccgggctggcgcgaggccgcaggcgggaagagtccccg

SEQ ID NO: 802831 - DNA, 120 bp, Artificial Sequence
  ENSG00000260369_1 (sequence is synthesized)
gggtcggccccgaagcggctctggaggcagtagccggggacgccgaggtcagggaggaggcggatccgagcgcggtcccgcagggccctgtccgttcttccgcctcggccggtcccgtca

SEQ ID NO: 802832 - DNA, 120 bp, Artificial Sequence
  ENSG00000260369_2 (sequence is synthesized)
ggccgcctttaaatgcccggcgcctcgcacctgctaacaaaacgagctcctgctgttccccagctccgtaaatggtgcccctggccctccccagttctcaggcagagccttggcggcctc

SEQ ID NO: 802833 - DNA, 120 bp, Artificial Sequence
  ENSG00000260369_3 (sequence is synthesized)
cctgacccctaacaccccgcatccagcccggcagtacatcctgttggctgtgccttcgaaatttccccagacctgacctcttctcccacctctgccaccaccctgctccgagccgtcttt

SEQ ID NO: 802834 - DNA, 120 bp, Artificial Sequence
  ENSG00000260369_4 (sequence is synthesized)
gtctccccgcttccaccttcccctcctgagtctcctcaacacaggagccagagcgatctcggaaagtacaggaggtcatgccccagtgtggttcccctttcctgggtttaagtcaaggtc

SEQ ID NO: 802835 - DNA, 120 bp, Artificial Sequence
  ENSG00000260369_5 (sequence is synthesized)
ctcaccgtgcctgccggcctcccgggtctctgcgcggtggactctggacctccctgccccgtcctgcctcagggcctttgcacctgctgttaccgcggcctggaacgctcctcccctgaa

SEQ ID NO: 802836 - DNA, 120 bp, Artificial Sequence
  ENSG00000260369_6 (sequence is synthesized)
accctgtgactcccacttagtgaggcgaccacctgttgaaaaccgtgcccccttcctatacagatgctcctgtcatatggggttagattccccatcaacccatcataggttaaagcattg

SEQ ID NO: 802837 - DNA, 120 bp, Artificial Sequence
  ENSG00000260369_7 (sequence is synthesized)
taaggcaatttacggtaggtttatccggatgtaaccccatctgtaagcggaggagtatactgaatgtgtatggcgtttgtaccatggcaaagccaaaatgtaagtcaaactcgaagtcca

SEQ ID NO: 802838 - DNA, 120 bp, Artificial Sequence
  ENSG00000260368_0 (sequence is synthesized)
aatgagagattttctttggagaaagctttcaagtgccaggcatttctccccatcatgtgcccccctagtggaggaggggagagagggtgctctactgggagcacttcacaaactcttctg

SEQ ID NO: 802839 - DNA, 120 bp, Artificial Sequence
  ENSG00000260368_1 (sequence is synthesized)
gaatgtaactcgtgtggcacagagggtgatgccaggctctggggaagtgtcaagtcaggagatgctagctagctggctgtgctgatggcagaatagggagaagtgactgctgtcagaaat

SEQ ID NO: 802840 - DNA, 120 bp, Artificial Sequence
  ENSG00000260368_2 (sequence is synthesized)
ggcctattccctcaaggtttgtggaggccaagaatgtggacgtgttcccagcaggccaggatcaagacagcctatagctatcttaagagcaactgggcttttgaagcagtctatgtggga

SEQ ID NO: 802841 - DNA, 120 bp, Artificial Sequence
  ENSG00000260368_3 (sequence is synthesized)
tggactaacagaaaccagagtcaaccaggagctggtggagatggctctcaagagagaatcagcgacaggtctccaaataatctgtaagggactaatttgaaaggtagcttaaatgtcagg

SEQ ID NO: 802842 - DNA, 120 bp, Artificial Sequence
  ENSG00000260368_4 (sequence is synthesized)
acctcactgcaaccccagtgaagccagtgcagccagggggtgaagaaggagtggactaggtaaagatgtagagatgaatctgaccacagatcctttataccctggaccacaaaagggagg

SEQ ID NO: 802843 - DNA, 120 bp, Artificial Sequence
  ENSG00000260368_5 (sequence is synthesized)
agaagaacttgaacagaaaatgcagttaggggtttggattactgccttgtgactaataaataggactagacactttcatccccacatataagacagtcagctcacagagaaaaatgacaa

SEQ ID NO: 802844 - DNA, 120 bp, Artificial Sequence
  ENSG00000260368_6 (sequence is synthesized)
ggtgggtctgcaaacaacggaagcactggcgcaccaaaacttgatctacagagccatctgaaactataaacaaatatgctgatgaatattaagaagatgaaagaaagaaaccaaaggttt

SEQ ID NO: 802845 - DNA, 120 bp, Artificial Sequence
  ENSG00000260368_7 (sequence is synthesized)
aaaaatatgatgctgaaaacaatgaaatgtctctaggtaattaaacagtatggcaggtaatctaatttaaaactaaaacccagctcaaactaagaaaacatattcccaccctctgcttga

SEQ ID NO: 802846 - DNA, 120 bp, Artificial Sequence
  ENSG00000260368_8 (sequence is synthesized)
tttgctttctttcaagggcctttaaagcaaaacactaaccatgaagagttttacttttcccaggaaatgaaatattttctaacacagaacagcaaataaaatactttttctaacacaaaa

SEQ ID NO: 802847 - DNA, 120 bp, Artificial Sequence
  ENSG00000273413_0 (sequence is synthesized)
gaatttgggaggctaggactccggctacggtggctctgctcttgggatgagaggactgggcccagcttgcgaggaatcatgaagtggacacagggaggccgacccaagtctccctgctgt

SEQ ID NO: 802848 - DNA, 120 bp, Artificial Sequence
  ENSG00000273413_1 (sequence is synthesized)
gctggggaagggcgggagagagggcaggtcaggcagggcccgggaaccacagtgcctgtaggcttagcctggcctgggtctcccgggggacctgcttggggcattgtggacagagggctc

SEQ ID NO: 802849 - DNA, 120 bp, Artificial Sequence
  ENSG00000273413_2 (sequence is synthesized)
tgcagaggagaggatgtgcctgggccccagccgggatggggcggggagtgggaggtgtgctggggttgcccgcctccctccagccccaccagacctttctgccccgcctctgtggcctgg

SEQ ID NO: 802850 - DNA, 120 bp, Artificial Sequence
  ENSG00000232353_0 (sequence is synthesized)
aaagaagcctcagcaatctccaaggaggtatgaagttggatcacctctgtccatttcactttgctgatatgaggatatattgagagagagagagtgcatgtgtgtgtgcatatgtgtgtg

SEQ ID NO: 802851 - DNA, 120 bp, Artificial Sequence
  ENSG00000232353_1 (sequence is synthesized)
tgtgtgtccagaccaacaccaggcataatactacaacaagatacgtcttgtgctgctgggagagcttacactatagtctgaacttctacagagccttttcctactgtaaacctcactcaa

SEQ ID NO: 802852 - DNA, 89 bp, Artificial Sequence
  ENSG00000232353_2 (sequence is synthesized)
gagccttttcctactgtaaacctcactcaaaaatgacagccttccatttcacaagaatcagagtcttgctatgttgcccacgtggtatc

SEQ ID NO: 802853 - DNA, 120 bp, Artificial Sequence
  ENSG00000232353_3 (sequence is synthesized)
gcccagtctgtgtgtgtttttataattggaagtacatgacatcttttacacaatatgcaaatgcatattgaggaaggagggagagcaactatgtctaaaagtaatcacaataagtcttga

SEQ ID NO: 802854 - DNA, 120 bp, Artificial Sequence
  ENSG00000232353_4 (sequence is synthesized)
agagaacactatgtctttttaaaaatctatttagaaactacttacagtattttttagaaaatgcacaggaacccctgttaagaaataaaatattccttgcaatagtttgctgagaatgat

SEQ ID NO: 802855 - DNA, 120 bp, Artificial Sequence
  ENSG00000232353_5 (sequence is synthesized)
acataaacctcaactccaccactaactagctgggttagctttgattttcttattggagcatgttctaaagatcatttgacatgtttttttcaccatagatacgtcttgtgctgctgggag

SEQ ID NO: 802856 - DNA, 120 bp, Artificial Sequence
  ENSG00000239462_0 (sequence is synthesized)
attctacaaggagttgttgagcacctgctgtctatctacagaaatcttgaaatgtggaacagagatggaaatatagcatgcaagtcagaatgaattgccaaacaatgacagaaggctgct

SEQ ID NO: 802857 - DNA, 120 bp, Artificial Sequence
  ENSG00000239462_1 (sequence is synthesized)
ccaaaggaatataataggcattcatttctaagacaatgcggcattctcataatcttaaactctggtgaaaacagaaaattattgtcagtgaacatctactaaatacagacaggtcctgga

SEQ ID NO: 802858 - DNA, 120 bp, Artificial Sequence
  ENSG00000239462_2 (sequence is synthesized)
ctttggtttctcttctggtaaagtgagaacagtgtctcccattagccaaaataagcagaggtcagtgaaataacaatgtaacaccaagacatggtgcacttctcaggtgaaaacttttat

SEQ ID NO: 802859 - DNA, 120 bp, Artificial Sequence
  ENSG00000239467_0 (sequence is synthesized)
gggcgcccgagtctgcggaccgctctaccgcacctggttctggctctgggccccgggccccgtggctgccaggggccgccgggaagggaggatgcgcgccactggggtgcgcctggcttg

SEQ ID NO: 802860 - DNA, 120 bp, Artificial Sequence
  ENSG00000239467_1 (sequence is synthesized)
cggcaccctcctcccgcagtggtcggaagagtcttggccctgaattttatattccagaaatccctcagtaggtttgggggtacgtgtgaaggttggttacataggtaaacgtgtcatgag

SEQ ID NO: 802861 - DNA, 120 bp, Artificial Sequence
  ENSG00000239467_2 (sequence is synthesized)
ggtttgttttacatattatttcatcacccaggacttctgtagacaagacagatactgtaaagacagcaaagaacaaacagaatggcagattgctaatgtttgatccaaacgaaaaagtga

SEQ ID NO: 802862 - DNA, 120 bp, Artificial Sequence
  ENSG00000239467_3 (sequence is synthesized)
tgattgaatcaaacgaagcaatgtcagagtaagaagatgtctttgattgtgcagctgatctctcccatgccttttaagcaattagaactagataatgcagccatttgtcacccaattaaa

SEQ ID NO: 802863 - DNA, 120 bp, Artificial Sequence
  ENSG00000239467_4 (sequence is synthesized)
tttgaaaggccagaaatgcatggattagcacttcagcttttgctgcagtcaaagcaattgttactatagatagaaggacagttaaaatgaaaaatgaattttgataaaaatgcagaagta

SEQ ID NO: 802864 - DNA, 120 bp, Artificial Sequence
  ENSG00000239467_5 (sequence is synthesized)
attctgtattttacttgtatcataattttcattgctcattcctatttccctttgatacttatttctttcacaatatttcttcaagtgaatatgtactttaaaattaacaaattatttact

SEQ ID NO: 802865 - DNA, 120 bp, Artificial Sequence
  ENSG00000239467_6 (sequence is synthesized)
ataacatgaattgttactactcaataaagaaagtaatcacctcaactagttgaagaaactggtgttaaaaaaattgtattctttccagccttttggctaagatcaagtgtaaaaaaatca

SEQ ID NO: 802866 - DNA, 120 bp, Artificial Sequence
  ENSG00000239467_7 (sequence is synthesized)
cagtacaatatcaatttagtagctaaattttaaatatcttctctgttcaaggctctgattctgataatctattaaagcccttcctgtagtcatctcctactttctgaaaaaaaaatctct

SEQ ID NO: 802867 - DNA, 120 bp, Artificial Sequence
  ENSG00000239467_8 (sequence is synthesized)
atttattctatgaaaaattacagcttgaaagttgatcataaacacatttgtggggattactgacaaattagtaggtactattctggtgggattcttctattcaaattcatactgtttttg

SEQ ID NO: 802868 - DNA, 120 bp, Artificial Sequence
  ENSG00000239467_9 (sequence is synthesized)
tttattctaaatattgactgggaaaaattctaccctagacaacatatatttaaattttcatattgtcaaaacgaaaaatgtccaccttggcttttgttgtaaattatatgtatattacat

SEQ ID NO: 802869 - DNA, 120 bp, Artificial Sequence
  ENSG00000239467_10 (sequence is synthesized)
attatataatacatgtttttatattaaagagaaagtaatgtatagcaaatcagtgacagaggaccttatttattttcatttaaagttacaatcaaccagaaaaaaagagccttgttacat

SEQ ID NO: 802870 - DNA, 120 bp, Artificial Sequence
  ENSG00000239467_11 (sequence is synthesized)
tacaggcttgagccaccgcgcccggccttaaaagctgttttttatttttgtgacaccaataaactggaatgtggcagataagttatgtaaaaccaaaaagataacagagaatttcttttt

SEQ ID NO: 802871 - DNA, 120 bp, Artificial Sequence
  ENSG00000239467_12 (sequence is synthesized)
ccaaaaagataacagagaatttctttttttttttttaactttcattttaggtttgggggtacgtgtgaaggttggttacataggtaaacgtgtcatgagggtttgttttacatattattt

SEQ ID NO: 802872 - DNA, 120 bp, Artificial Sequence
  ENSG00000239467_13 (sequence is synthesized)
catcacccaggtattaagctcagtaccccttagttatcgtttgtgcttctctccctccccaccccgtcccccagaaggcttaatttctctagatttttttaaaactaaatttcataatcc

SEQ ID NO: 802873 - DNA, 120 bp, Artificial Sequence
  ENSG00000239467_14 (sequence is synthesized)
tggcagagcagcagctctggcgctagagggaacctgggctgctctagctgggggagagccgggtctctggttctaatcacttgaatctgacttctgggaaaactggcgtccagggactcc

SEQ ID NO: 802874 - DNA, 120 bp, Artificial Sequence
  ENSG00000239467_15 (sequence is synthesized)
ccccggagacccataatcttcttggggcgacctcaggttgggggactaagtcctgcaggggacacttgttcatccactaccagggacacccatctctcccaactcaagacttctttttac

SEQ ID NO: 802875 - DNA, 120 bp, Artificial Sequence
  ENSG00000239467_16 (sequence is synthesized)
agaagaatgaggttttacagttagaatggaaataatgctactaaatacaaaaacaaaatacatacttaatacccaactgacagactgtgttctgtgttctatttgtattttaaatctata

SEQ ID NO: 802876 - DNA, 120 bp, Artificial Sequence
  ENSG00000239467_17 (sequence is synthesized)
taagtgtttagagacttatgaagtaaatattttggtttttgcaggacttctgtagacaagacagatactgtaaaggtgagagtatataatttttttaggatgttttgagtctattttagc

SEQ ID NO: 802877 - DNA, 120 bp, Artificial Sequence
  ENSG00000239467_18 (sequence is synthesized)
tttagcatcaatttatacagtttttaaataaccagctttagtataaaattgtatcttattctagctagtagaaatgtttacataaaggctattagtaaattatttcaaatatctcaaact

SEQ ID NO: 802878 - DNA, 120 bp, Artificial Sequence
  ENSG00000239467_19 (sequence is synthesized)
cccaccctcggctgctgcccgagcttcctccacgcgccgtgcagtctccacggcgacgctgcgttcccgactcggagcccccagctccgcgcgagcagctagccgggctggctctcggtg

SEQ ID NO: 802879 - DNA, 120 bp, Artificial Sequence
  ENSG00000205959_0 (sequence is synthesized)
gaccatcatcacccaatgaggatggagagaaactgaggctggcctgagatgtcctgaggaatgagctggcaccagagtcccacaggtgaagggctcagaggaaatggtcatggaggattc

SEQ ID NO: 802880 - DNA, 120 bp, Artificial Sequence
  ENSG00000205959_1 (sequence is synthesized)
gggctgaccactgggaactcacggtccagcgaagggcagcggtgaacagctgtcctggctttgcccctgcggcaggcccatagaatgacgagagcagttggcatccacagcatttcctga

SEQ ID NO: 802881 - DNA, 120 bp, Artificial Sequence
  ENSG00000205959_2 (sequence is synthesized)
gcagatgctgcccttgctcccaagctgctcccagcctaacagagacagaggaacagcaagtgtcaccaggggcagggccagggctgtgggagcccagaggagtgccttacccaacccgag

SEQ ID NO: 802882 - DNA, 120 bp, Artificial Sequence
  ENSG00000205959_3 (sequence is synthesized)
tcggtccaataagaagtgggaagtgcctgaaaatattggaagagctcgccaggctttccacgcctctctgtgacaccctcctttgagcgcctgcattcctgggagtgagatggttgtccg

SEQ ID NO: 802883 - DNA, 120 bp, Artificial Sequence
  ENSG00000205959_4 (sequence is synthesized)
tggtctctcccccacgacaagatggaagttctgcccagctgtacgctgggggtctgaaaccgtccctgtaaacttcataaaattaaccagggaagaatagaggggggaaaacaaaaatga

SEQ ID NO: 802884 - DNA, 120 bp, Artificial Sequence
  ENSG00000205959_5 (sequence is synthesized)
gggtggccacgctccaacccaccaccttgtgcccatctgctgctatggccccagagtcacgcaggcccggccacaagagcatcgccccctcgactgctctgcagacgacagcctgagcac

SEQ ID NO: 802885 - DNA, 120 bp, Artificial Sequence
  ENSG00000205959_6 (sequence is synthesized)
tgggaacgtgttttcccctgagataccccttcaggctctgcgtgccaaggacactcctgacaccagctgtcctgaggaccccagaggagctgactcgcccaagaacatggtcccagatac

SEQ ID NO: 802886 - DNA, 120 bp, Artificial Sequence
  ENSG00000205959_7 (sequence is synthesized)
tgatgactcatctcccttccctgacctgaccaatcaacaagcctaattctccagcccctcacccttcaccattccctgaaaaacctcaccccagcccaggctaggtgcagtggctcatgc

SEQ ID NO: 802887 - DNA, 69 bp, Artificial Sequence
  ENSG00000205959_8 (sequence is synthesized)
ttctaccaagaataaaaaaaattatctgggcttggtggtgtgtgcctgtggacccagctactcaggagg

SEQ ID NO: 802888 - DNA, 86 bp, Artificial Sequence
  ENSG00000205959_9 (sequence is synthesized)
tgagactccatttctaccaagaataaaaaaaattatctgggcttggtggtgtgtgcctgtggtgagtccaagagattgaagctgca

SEQ ID NO: 802889 - DNA, 120 bp, Artificial Sequence
  ENSG00000205959_10 (sequence is synthesized)
agccgtgttgagttttgcagcctcctcatcctgggcaaatcctttgaagtcctgggtgaactcttgcgtgtcctcctctggatgccactcacgcacaccttggcaggcacacctgggtca

SEQ ID NO: 802890 - DNA, 120 bp, Artificial Sequence
  ENSG00000205959_11 (sequence is synthesized)
tgaagagaccaccaaacaggctttgtatgctcacctgtgaagagggagaacgtcgctgtccgagcaaatgtctcttctgtgtccttggctgccttcctcctcctcctcccgccgcctact

SEQ ID NO: 802891 - DNA, 120 bp, Artificial Sequence
  ENSG00000205959_12 (sequence is synthesized)
gttgccctggagggctggcagctggcaggactcagagagggcccagccatcacccctctcttgagcagatgacagagtaacactgggagttactatggacactggaaaagagaacacaga

SEQ ID NO: 802892 - DNA, 120 bp, Artificial Sequence
  ENSG00000205959_13 (sequence is synthesized)
tgcgtcggagattttgtagttgcaactcttctctggtaaccaaaaaacatcaggacattcattgcaagtgcaacgctgaggctttgaaggaaccaaagagatcctttgcagccctgagga

SEQ ID NO: 802893 - DNA, 120 bp, Artificial Sequence
  ENSG00000205959_14 (sequence is synthesized)
aagtgagaaatgctgcttggtgagctgggctggctgggctgctggccctcggtcagccgcctgcaacaggcagggccacgggaacctcatcagcagagcttcctggaggcagcgtgggtg

SEQ ID NO: 802894 - DNA, 120 bp, Artificial Sequence
  ENSG00000205959_15 (sequence is synthesized)
gaattgtggaattgtcatcagacaggcctgggatggagcttccccactggaacgcagctggctgtggacagggagtcagctgctgcctgaagggacaaggaggcctgcgaccacagcagg

SEQ ID NO: 802895 - DNA, 120 bp, Artificial Sequence
  ENSG00000205959_16 (sequence is synthesized)
ttcccacctggcctgggcctggaggccagcaggcacctttcagggcttcccagctcagcccccacagctggatggagctgtgttccctgcagaagtgtggccggctccgagcaggcacag

SEQ ID NO: 802896 - DNA, 120 bp, Artificial Sequence
  ENSG00000205959_17 (sequence is synthesized)
ggggctctttccctccacctcagccctggcctatgtgggcacagcagaggacgtgctcacaccatgggggcccccgaccaggcgaggccagggcgtgtccacattggggaagtgaacgaa

SEQ ID NO: 802897 - DNA, 120 bp, Artificial Sequence
  ENSG00000205959_18 (sequence is synthesized)
gaaggacaagtctatttgaggggctggctgatagtttagaagcccagaatcgcctggcagtgaattattctgctgagtaacactgtacccagagggatgtggctgaaaaccccgggaggg

SEQ ID NO: 802898 - DNA, 120 bp, Artificial Sequence
  ENSG00000205959_19 (sequence is synthesized)
aaggctgcgtgcgggaagcactcccatcctcccccagcgcctgctctgggcgttccggagctcagcgtgcatccttgcctatgctcacctgtgaagagggagaacgtcgctgtccgagca

SEQ ID NO: 802899 - DNA, 120 bp, Artificial Sequence
  ENSG00000205959_20 (sequence is synthesized)
gagggagggagggaaaagggagtggggtgggagggagggagggagtccactgcagaaagtggcactgatccctctgagcctctccggcctcatgtgtaagatgccagctgccccggagtg

SEQ ID NO: 802900 - DNA, 120 bp, Artificial Sequence
  ENSG00000205959_21 (sequence is synthesized)
gcagtggcgagtgagtggctgtgtaaggtgcccaggcaggagcttgcgggcagccctgtgtgaagtgggcagccttgggccgggttccctagaagcagagctgagatggggattcttgtt

SEQ ID NO: 802901 - DNA, 120 bp, Artificial Sequence
  ENSG00000205959_22 (sequence is synthesized)
catgcgattggaggtgcttcctaagaagttgctccctgccccaactccgagccagggcagcactgaccatgggcaactttcccttgcagggggcactcccagctgccggggaggggcagt

SEQ ID NO: 802902 - DNA, 120 bp, Artificial Sequence
  ENSG00000205959_23 (sequence is synthesized)
ggccctgaaggggcctggtcaggaccaacagttttcttggcagtggtgtgtttgtccccatttcgcagatgaggaaactgaggcttggaaagacccaggtccttgcccaggccccacacc

SEQ ID NO: 802903 - DNA, 120 bp, Artificial Sequence
  ENSG00000205959_24 (sequence is synthesized)
cccatctccatgctgcaggcaggaggacacagccggggctcctggaagcctctcgcgttcctgggctagggaaccttcctccatctcagagccggccatggggtgtcccctgaccttccg

SEQ ID NO: 802904 - DNA, 120 bp, Artificial Sequence
  ENSG00000205959_25 (sequence is synthesized)
cagccatgtcccccttcgatggagctctgcttctggccctccctccacactgaaggcccctgtgatcacatggcccacccgccaatccaggtggcctccctccaaggtcagccggtgagc

SEQ ID NO: 802905 - DNA, 120 bp, Artificial Sequence
  ENSG00000205959_26 (sequence is synthesized)
tgccttcatgcctgcatggtgtctctgacccttggccacgcaacctaacatagtcacaggtcctggagatttgcactgggatatcttgggtgaggggaattattctgctgacccccgatg

SEQ ID NO: 802906 - DNA, 120 bp, Artificial Sequence
  ENSG00000205959_27 (sequence is synthesized)
gcaactgcagtggtgggaggggaagagaacaccaggatgtgttcagagagagaggcgtggacctcagggggtgtcaggggaagagggcccgggagggagaaagcatttggtttagacgtg

SEQ ID NO: 802907 - DNA, 120 bp, Artificial Sequence
  ENSG00000205959_28 (sequence is synthesized)
ttgggtgtgaggtgcccatggaatagcagggtggagctggtgggggaagctggggggctgccctggggctctagcacatggaggccaaggagggagtcgtggggtggagggggcacaggg

SEQ ID NO: 802908 - DNA, 120 bp, Artificial Sequence
  ENSG00000205959_29 (sequence is synthesized)
ctccccaaggtcctgggtctgcctcagggccgctgctactccacacccctcctcccatgcctgagcacccatggcagtgaccagcagtgaccatcatcacccaatgaggatggagagaaa

SEQ ID NO: 802909 - DNA, 120 bp, Artificial Sequence
  ENSG00000205959_30 (sequence is synthesized)
ctgaggctggcctgagatgtcctgaggaatgagctggcaccagagtcccacaggtgaaggctgatgaaattctaggagagtccatgtcctaaaggataagaagcaactattcgttgagat

SEQ ID NO: 802910 - DNA, 120 bp, Artificial Sequence
  ENSG00000205959_31 (sequence is synthesized)
gagagacttcaaagatagtcaatgatcgtgaaagtcggccagcctttctggaccatctcgtgcaattgctctaatctatccctgcaatagatccctttaatacactttgtcatatgttga

SEQ ID NO: 802911 - DNA, 120 bp, Artificial Sequence
  ENSG00000205959_32 (sequence is synthesized)
tacactttgtcatatgttgaattttctttttagtttttagttttcttttgttgttgttgttgttttcccattttttaaaattattattattgtggagacagagtctcactctgtcaccca

SEQ ID NO: 802912 - DNA, 120 bp, Artificial Sequence
  ENSG00000205959_33 (sequence is synthesized)
tgtttttaattatcaacgttatttttgttattctatgtatttcatctttgcatgatttccagtatgggaggtataaattgtgtaaagacgttgagagttctaatttgttgtatgcatttt

SEQ ID NO: 802913 - DNA, 120 bp, Artificial Sequence
  ENSG00000205959_34 (sequence is synthesized)
ttacaaatgtgactctgtgaaaatgattatcacaacattgactttatgtgtaagcgttgtgtgtgtgcgtacataaaatcgtcgaaacttcctcaataaatgaagagatgtcctttttgt

SEQ ID NO: 802914 - DNA, 120 bp, Artificial Sequence
  ENSG00000229565_0 (sequence is synthesized)
attctgaaagacagtaaatagaggtttacttcattcccttccttctttcagcaaaaacacagggtgtgatgaagagagaaagcaaagcagcttactcattggaattctaaggacagctcc

SEQ ID NO: 802915 - DNA, 120 bp, Artificial Sequence
  ENSG00000229565_1 (sequence is synthesized)
agttaacatgaaagtaaaaataaaaacccagaaaaccttttggacagattacaacaaagaagaattctgatacctcttgtagattcattttccaccccaaagattaggtaacaaaggaga

SEQ ID NO: 802916 - DNA, 120 bp, Artificial Sequence
  ENSG00000229565_2 (sequence is synthesized)
ctgaactcttaactgctcttgaaagttcactctgtcttcactccagctctattgactgattacctgtagcccacttgctattcaacagtctttatcaaagacagatcacttggatacttt

SEQ ID NO: 802917 - DNA, 120 bp, Artificial Sequence
  ENSG00000229565_3 (sequence is synthesized)
tgtatgagtggtgtcacaaaaagacatcttgagccaccaaataaggtgcaatatacaaaccagaagtcccattcagcccagtatttgttctcaaatgtcataaatgctgtggacaagaaa

SEQ ID NO: 802918 - DNA, 120 bp, Artificial Sequence
  ENSG00000229565_4 (sequence is synthesized)
acctatgcctccattttttcctgctgtggacaacctttgagttccctgggcctgtttatgccatggagtttttctttctagggccacagcctgaagcttggaatcgagtttgggactgaa

SEQ ID NO: 802919 - DNA, 120 bp, Artificial Sequence
  ENSG00000229565_5 (sequence is synthesized)
aagagtaccatcatcgacagaagcaaaagtccttatctgctgaaatctttattgacatacttaagtggcgaaataatatgtcagggttttactttaaaatacttcaggatcaaaaacaga

SEQ ID NO: 802920 - DNA, 120 bp, Artificial Sequence
  ENSG00000229565_6 (sequence is synthesized)
agaggtttacttcattcccttccttctttcagcaaaaacacagggtgtgatgaagagagaaagcaaagcagggccacagcctgaagcttggaatcgagtttgggactgaaaagcttactc

SEQ ID NO: 802921 - DNA, 120 bp, Artificial Sequence
  ENSG00000229563_0 (sequence is synthesized)
agcttgcttgttgctggggaaaagacttgctgctttgtgtttcatttgatgaagagcttcttttcatttagtcagtcacttatttccagagatttcctggtgatgttgcctcacatttat

SEQ ID NO: 802922 - DNA, 120 bp, Artificial Sequence
  ENSG00000229563_1 (sequence is synthesized)
ttgtggaaatgccagtatgttttaagcttgcagcttccataagtcaggattccagtcacagcttagctggatcctctcagaaggctacgatcaaggtgtcagccagactgagttctcatc

SEQ ID NO: 802923 - DNA, 120 bp, Artificial Sequence
  ENSG00000229563_2 (sequence is synthesized)
agaggctcgactaggagaggatctgcttccaagttccctcaggttgttggaaggattcattttcttgtggctaagctcacaggagctttcttcttcaagggcatcaggagagtggagagc

SEQ ID NO: 802924 - DNA, 120 bp, Artificial Sequence
  ENSG00000229563_3 (sequence is synthesized)
gagtctactcaaagacttctatacaaatcataagacatcaagtactcttcaactgcctattgggagacaatttccacagctctctcatgtttctgcacaacttgtaagcaagacaagact

SEQ ID NO: 802925 - DNA, 120 bp, Artificial Sequence
  ENSG00000229563_4 (sequence is synthesized)
ctcttatcttctggactctattttcaagaatactcatatagtgaacagtgtcttcttcctgagcgaagggcataaatgctactttccattttaaaagattcaagttccctaagctcggaa

SEQ ID NO: 802926 - DNA, 120 bp, Artificial Sequence
  ENSG00000229563_5 (sequence is synthesized)
ttcttctgtaatgcaacccattgtgtgtgcaggtatcacctggcattcttcccattaccctgtgggaattggagctcagggaaccttcatagaaattctgatagtctagctactgctatt

SEQ ID NO: 802927 - DNA, 120 bp, Artificial Sequence
  ENSG00000229563_6 (sequence is synthesized)
tctatgagtaataaattgtttctgacctagaagtcttgtgtcttctgctggcacccatgaaattatgaggctaaattgttagattacaagtgaggtaaaatcttggacgcttcccagttc

SEQ ID NO: 802928 - DNA, 120 bp, Artificial Sequence
  ENSG00000229563_7 (sequence is synthesized)
ttgacactgactaaaatacatgcatattcgttttatcaagtcagtttgaaaaaaaatctatgaattaaaataattacaaaattctaaggactgaatttgtaatatattggatgaacaaaa

SEQ ID NO: 802929 - DNA, 120 bp, Artificial Sequence
  ENSG00000229563_8 (sequence is synthesized)
ccctctaccttggttctgaaattcttgatagttgagatatgtgtaacatttgtaatttgaaatacacaagtaattctctatttaaaaggtcatatatccaaagtattgaaaaatctagaa

SEQ ID NO: 802930 - DNA, 120 bp, Artificial Sequence
  ENSG00000229563_9 (sequence is synthesized)
tacattaaactttagctatccatggtgaaaggcagtggcaaaacagctgcagaaaagctgaaactagattcaattaaatctttgtgccaaaaccaagtgcacaaaaatctcccaaagctg

SEQ ID NO: 802931 - DNA, 120 bp, Artificial Sequence
  ENSG00000229563_10 (sequence is synthesized)
ttaaaactatacagcttatttgctataaattttataaatggttaaataaaacaagttttgaagtaatttggtaaattgacaaatttttcactcattgatttgttgtagctaatgagggat

SEQ ID NO: 802932 - DNA, 120 bp, Artificial Sequence
  ENSG00000229563_11 (sequence is synthesized)
ggtggggagtggagaagggttcagagaacttgggaaggatataaaaatggaggtatgtggggcaaatgcccccaactacatgttttaatcaagaacaccagcctatgatcaagggaattt

SEQ ID NO: 802933 - DNA, 120 bp, Artificial Sequence
  ENSG00000229563_12 (sequence is synthesized)
gtctcacttgatctttctgcattaaaactgttacaaagcaacttctttatcaaatgaatacaatcacatttagtagaggctctagttaagacctgaggctatactgacctgggttagaga

SEQ ID NO: 802934 - DNA, 120 bp, Artificial Sequence
  ENSG00000229563_13 (sequence is synthesized)
cctggcttttacatttttacctaatctctctaagccttaatttctcagttttaaaagtgcaggtaatcatagcatgtgtttcccaaggatgttgtaaagattagtgtcaggatggctgag

SEQ ID NO: 802935 - DNA, 120 bp, Artificial Sequence
  ENSG00000229563_14 (sequence is synthesized)
tggtgtaaggcaccagacccaaggatgttgtaaggattaattgaaatatccacttgaattgcttagcatgatacctgctatgtagaaagtgcttgatagccttaacaatatatatcatta

SEQ ID NO: 802936 - DNA, 120 bp, Artificial Sequence
  ENSG00000229563_15 (sequence is synthesized)
agaaatttccttggaatgggaatttcaaaccactttatcaaatatacttacttcctcacttacttttgtggtttggtagctttttctttacacatttaggaggtggggaagcacagagat

SEQ ID NO: 802937 - DNA, 61 bp, Artificial Sequence
  ENSG00000229563_16 (sequence is synthesized)
tttttctttacacatttaggaggtggggaagcacagagatatagcactttctttttttttt

SEQ ID NO: 802938 - DNA, 120 bp, Artificial Sequence
  ENSG00000229563_17 (sequence is synthesized)
gccttggcctcccaaagtgctaggataaccggtgtaagccaccgcacctggccagatatagcactttctaaaaggtctataaatctttctaaagattaatattgagtgggatcaatgtgt

SEQ ID NO: 802939 - DNA, 120 bp, Artificial Sequence
  ENSG00000229563_18 (sequence is synthesized)
ggatcaatgtgttttagggaatccagatactgcacaccactttgcaaatgtttagattttagcagaacaacaaatggactttgcaaagactgtcttttaattattaaacctctatttatt

SEQ ID NO: 802940 - DNA, 120 bp, Artificial Sequence
  ENSG00000229563_19 (sequence is synthesized)
atacaaaaattagtcgggcatggtggcaggcacctgcaatctcagctacttgggaggctgaatgaatttacaggtaggaaggcacacattatataagttaaaattcagttcaactatgag

SEQ ID NO: 802941 - DNA, 120 bp, Artificial Sequence
  ENSG00000229563_20 (sequence is synthesized)
tcagttcaactatgagtgacagaaaaccctaatgagtggtagcttaaacatacaatgtttactccctcaaacaaaatgtctgcctgatatgtagctgatgtgaggctccatggtgtcagg

SEQ ID NO: 802942 - DNA, 120 bp, Artificial Sequence
  ENSG00000229563_21 (sequence is synthesized)
gtcccaggtttcttttatctatggctttgccatctttatcacatgaaccataatgactgcttgagtttcttatggtctaaaatggtttcttgagtttcctatccccatccagtcaggaag

SEQ ID NO: 802943 - DNA, 120 bp, Artificial Sequence
  ENSG00000229563_22 (sequence is synthesized)
agttccacctgcactcaaggggaggagattatacagggtgaacatgggggccatcctagaattctgcccactttacagttgaaacagtattttttaaaatgccaatgaaatccaagatag

SEQ ID NO: 802944 - DNA, 120 bp, Artificial Sequence
  ENSG00000229563_23 (sequence is synthesized)
acagtttatcttggataaacttttagcaccttttgattaacatacctgttggactttacaactgtaagattagtaagcacaagattccccagtatttcaaggatttaaagggaacatggt

SEQ ID NO: 802945 - DNA, 120 bp, Artificial Sequence
  ENSG00000229563_24 (sequence is synthesized)
aaaaaggtactctttgctatgcaaaatctagccatctagcattgctgtggccctggccagtttgcagctctggccaaaagagggctgctgagtccagccctgtccacagtgtatacgggc

SEQ ID NO: 802946 - DNA, 120 bp, Artificial Sequence
  ENSG00000229563_25 (sequence is synthesized)
acacctgactacatcatgcacagcaatcctgtttgtggcaccactgatgaattacccctattcaagtgaacaggcattgagaccctaaggggaccacagggtctggttcattcaccacaa

SEQ ID NO: 802947 - DNA, 120 bp, Artificial Sequence
  ENSG00000229563_26 (sequence is synthesized)
acacagtcttccttgaatgttagcaatgagtttagtcatctcattaggagacttgaacagaagtgaaggtaaacactattcatgtcagaaaaaaatataacgtggtaggtagtaagatat

SEQ ID NO: 802948 - DNA, 120 bp, Artificial Sequence
  ENSG00000229563_27 (sequence is synthesized)
ctgaagtaaaaaaaaaaaacaactgtgcattattctgtatgaagcatcttttgcatgtgttcatgtgtataaacaggattatgggttatgatgtaggaattgaggataaactacatttta

SEQ ID NO: 802949 - DNA, 120 bp, Artificial Sequence
  ENSG00000229563_28 (sequence is synthesized)
tattttttcatattgtggaaagaagaaataaactatactcctgtgttagctggattctctgagaagcagatgctgaaattgaattagaagggcaaaaggtatattgggaagtaacacctg

SEQ ID NO: 802950 - DNA, 120 bp, Artificial Sequence
  ENSG00000229563_29 (sequence is synthesized)
agaggatgcaggatttggcaaagaatgttgtgtctgcacaactctacgtgacccacaaaagtcatacatctggcctttaattttttaaaagaatcaagaagctctatggttttatagtat

SEQ ID NO: 802951 - DNA, 120 bp, Artificial Sequence
  ENSG00000229563_30 (sequence is synthesized)
ctggctcttgtttataatgattagaactatctcacagaacctcagggacttaggcaaattctcagaggttgtctatgccaacccttcattgttagacagggatgcatcaaatcaccctga

SEQ ID NO: 802952 - DNA, 120 bp, Artificial Sequence
  ENSG00000229563_31 (sequence is synthesized)
gtgtggggaacatttccacctttgcgatggcccaggtaactggttttacaaaatcctttgttcagctgtttcactaagaggttgtagacattggagtcttcctaactaaatcacgtctac

SEQ ID NO: 802953 - DNA, 120 bp, Artificial Sequence
  ENSG00000229563_32 (sequence is synthesized)
tccagattaagagtaggatagtattctctggtggctactttctttttgccagtccctcacatgttggggttcactaatatcttcttctcttctttcttatgagtcttcccaagaactcat

SEQ ID NO: 802954 - DNA, 120 bp, Artificial Sequence
  ENSG00000229563_33 (sequence is synthesized)
tcagcccataatgtcaatagtgccaaggttgagaaatcctgctgtatagagacaactcccatttcacatcctctgcccaggtttcactcccaggctccacatgccaagatgaggaatatt

SEQ ID NO: 802955 - DNA, 120 bp, Artificial Sequence
  ENSG00000229563_34 (sequence is synthesized)
taatctatattctaaatagagtaaaaagcaaggtcatcagatgaaaaggtgttgggagcaagactggcttattccattaagcatagtagtctaagtgcctgcttgggacccacaatattt

SEQ ID NO: 802956 - DNA, 120 bp, Artificial Sequence
  ENSG00000229563_35 (sequence is synthesized)
tcaagggcccatgaaaaatgttttaattttaatttcttttgaaatcaggaggaaaaaatgaatattgtaacaatgaatacataataataaatcacacttggattgtgtttgtctttataa

SEQ ID NO: 802957 - DNA, 120 bp, Artificial Sequence
  ENSG00000229563_36 (sequence is synthesized)
agtatcttggcaacaaaaagaagggaaaagatagggctagtgcaggaagataaaatatagtgttattggataatttagaggctacggaaattacctcaaagagaagagaagttgaaaata

SEQ ID NO: 802958 - DNA, 120 bp, Artificial Sequence
  ENSG00000229563_37 (sequence is synthesized)
taaaaaagagtgataaatgagtgggatgaggccttggatatgcaggagataagggaggatgtggaaggagtttccttgaataggagaaagaacagcctccagagcctactttcttcttct

SEQ ID NO: 802959 - DNA, 120 bp, Artificial Sequence
  ENSG00000229563_38 (sequence is synthesized)
ttagcataaatgaccaaacttgaaggtcaaactcccaagagtttgaggtcgaatttgatggaacacccagatgtcctcagctgccatggagaatacttaccatatttgcttgcatatttt

SEQ ID NO: 802960 - DNA, 120 bp, Artificial Sequence
  ENSG00000229563_39 (sequence is synthesized)
gtaacccaaggctttcggctttattatattttttttcagaaagaagccattgtttcacatgtggctaataaaataataataataaagatagtaataatagaagaaaaagagctgacactc

SEQ ID NO: 802961 - DNA, 120 bp, Artificial Sequence
  ENSG00000229563_40 (sequence is synthesized)
cacacacacacacacacacacacattttgcctcttgtctttatcgctgtcatcacctcatcacacacttattctcctctcttctggtaaaactagcaaaggtacctgttgaagcctacag

SEQ ID NO: 802962 - DNA, 120 bp, Artificial Sequence
  ENSG00000229563_41 (sequence is synthesized)
ttctggtaaaactagcaaaggtacctgttgaagcctacagaagtcttggagatgcattggtttgatgtgaaatgccttcacagtgtggaagtgtggctctaactaaagatttctcagcat

SEQ ID NO: 802963 - DNA, 86 bp, Artificial Sequence
  ENSG00000229563_42 (sequence is synthesized)
aacactcaccacggaggtctgcagcttcactcctgaagccagccagaccatgaacccactgggaggaagaaactccagacacgtcc

SEQ ID NO: 802964 - DNA, 120 bp, Artificial Sequence
  ENSG00000229563_43 (sequence is synthesized)
tggacacactagtacctgtggtatttaggttgtaacttcctcaagcagttctttccacatcatgtagctctggtccatgccatgtgtgccaatggtaaccaaacctttcatcctgaccat

SEQ ID NO: 802965 - DNA, 120 bp, Artificial Sequence
  ENSG00000229563_44 (sequence is synthesized)
cactaactggattggcgtcccagccaaaagcaaccaatctctgtggagaaaagagaagccaacgtcctctgagaagagctagctgaggttttattttggacaaaaaaaaaaaaaagcaaa

SEQ ID NO: 802966 - DNA, 120 bp, Artificial Sequence
  ENSG00000229563_45 (sequence is synthesized)
tttcatttttcagagcttcttttcatttagtcagtcacttatttccagagatttcctggtgatgttgcctcacatttatttgtggaaatgccagtatgttttaagcttgcaggtcaaact

SEQ ID NO: 802967 - DNA, 120 bp, Artificial Sequence
  ENSG00000229563_46 (sequence is synthesized)
ggagaaaagagaagccaacgtcctctgagaagtcttttgcaggttttttgtatcatggttatattcatatcataaaatgaattgggaacctctggtttcagctccaacatagagctgaag

SEQ ID NO: 802968 - DNA, 120 bp, Artificial Sequence
  ENSG00000229563_47 (sequence is synthesized)
ttgcaaggtagaccaccactctgaaattgggagagacaggcaaatccagagaagtacagctaatatttgcatatctggagcagaagccacttggagccataaactgttaggaacacttaa

SEQ ID NO: 802969 - DNA, 120 bp, Artificial Sequence
  ENSG00000229563_48 (sequence is synthesized)
acattttagcttgcttgttgctggggaaaagacttgctgctttgtgtttcatttgatgaagatgtctcaatagaacctcttggaggaacagaccagcctcaaagatatatgggaaggcac

SEQ ID NO: 802970 - DNA, 120 bp, Artificial Sequence
  ENSG00000229563_49 (sequence is synthesized)
aacaccaaaatgatgctgcaggatgggtccagaaaggatgccaccattgtgaccactgggcacagacaccacaaattgtcccattgatcctggacatggatgctgaactgctgccatcac

SEQ ID NO: 802971 - DNA, 120 bp, Artificial Sequence
  ENSG00000229569_0 (sequence is synthesized)
atccactcagcacctggttaggaagctaggccaattttcctcccttttgatttcattctgctcctgtctggctgcccagccacatggagagtttgtcaaatggaatttctgtctcttgcg

SEQ ID NO: 802972 - DNA, 120 bp, Artificial Sequence
  ENSG00000229569_1 (sequence is synthesized)
gccgccctgccctctgcagagtgctgaacgggcaggcaggatcacccggctcagtgccgcagacatcactctcttgtgataagggccagtgcgcacccttgaaggaggagcctgtcattc

SEQ ID NO: 802973 - DNA, 120 bp, Artificial Sequence
  ENSG00000229569_2 (sequence is synthesized)
gcacccttgaaggaggagcctgtcattcttcacagtcaccaggcagctggcggggtctctgtcacccaggctgagtgcagtggtgttatcaaactcactgcagcctcaatctcccaggct

SEQ ID NO: 802974 - DNA, 74 bp, Artificial Sequence
  ENSG00000229569_3 (sequence is synthesized)
atttttttgactttttgtagagattctgatcctcccgcctcagccacccaaagtgctgaattacaggtgcaaag

SEQ ID NO: 802975 - DNA, 120 bp, Artificial Sequence
  ENSG00000229569_4 (sequence is synthesized)
ccgcctcagccacccaaagtgctgaattacaggtgcaaaggaaatctttaaagcaaaatgccaaggaaatactgtttgagtaggactgtaccatttataatcagtttccacagccatctt

SEQ ID NO: 802976 - DNA, 120 bp, Artificial Sequence
  ENSG00000229569_5 (sequence is synthesized)
agggaactctcacctctccctgggtatgccacccacccagtcccccagacaagattctggggatctgctggacacttcttgtctttcaggtgctctaattttaccagccaccatgcagtc

SEQ ID NO: 802977 - DNA, 120 bp, Artificial Sequence
  ENSG00000229569_6 (sequence is synthesized)
ctgcctcttgggtgccctaattcttctgggcagtcctgcctcctacccaccccttggttctggttctgcccacttccttcccactccactgctcccaccccaccgccagccactgccacc

SEQ ID NO: 802978 - DNA, 120 bp, Artificial Sequence
  ENSG00000229569_7 (sequence is synthesized)
tcctgcctgctggggacactgacatcacctcttggctgcttttctctacccagttgctcttccctctgaccacttcttccctgaagggaccttcctacatcacaattgaaacaattctcc

SEQ ID NO: 802979 - DNA, 120 bp, Artificial Sequence
  ENSG00000229569_8 (sequence is synthesized)
atcagagcaggcttcctggaggaagtgacaactaggctgaaggatgagtgagtgttcatgccacatgatgtgcaggaaaggcactctgggacagcagcagcagaggaccttcctggagat

SEQ ID NO: 802980 - DNA, 120 bp, Artificial Sequence
  ENSG00000229569_9 (sequence is synthesized)
gtctcccataccctcggtcccccatgcctgtgggattttcaagaggaagcagagctgtggggccatgcttcccattgtgcaatatggatgttctgggaaataccacaggagggtggaagg

SEQ ID NO: 802981 - DNA, 120 bp, Artificial Sequence
  ENSG00000229569_10 (sequence is synthesized)
gcaggcgatcgtccacacaggaagggggcatgcagggctggatttgctgagccgagataagcggccccagaggtgctccagagaggaagcccccgagctcgggagcctcatgcgtgcagg

SEQ ID NO: 802982 - DNA, 120 bp, Artificial Sequence
  ENSG00000229569_11 (sequence is synthesized)
cgatagcatgggtttggaatgcacaggtattgaccaaagccaccatgcacagactggacagaaaatggctggtgggggctggctcttggggagcaagacaacatcgtgcagaggagagaa

SEQ ID NO: 802983 - DNA, 120 bp, Artificial Sequence
  ENSG00000229569_12 (sequence is synthesized)
gggactctggttctctttctcagggggcccacagagaactcagtggactcatggctgaaaagaaggggtccacactctgtttttaacaccatctatttgtagttgggagactcaccgtgc

SEQ ID NO: 802984 - DNA, 120 bp, Artificial Sequence
  ENSG00000229569_13 (sequence is synthesized)
agccatgaggcagggctgggtgggggccatgccatgcccctggagctgggacacctaagctcagcatgtatctagaaaacaagactggtccagcgtaatggtgcgagatgaaccaattcc

SEQ ID NO: 802985 - DNA, 120 bp, Artificial Sequence
  ENSG00000229569_14 (sequence is synthesized)
tctacgtggcaatttgtcacaagcacagccctcaactcacggggtaccagggacccaggaagaagtggacttggcaccaatgaggatgcttctgctgcagatctctaggtgccagctgct

SEQ ID NO: 802986 - DNA, 120 bp, Artificial Sequence
  ENSG00000229569_15 (sequence is synthesized)
actgatatgtgatgttgggcagccgcttctccttttggggacctcagtctccccatctgtgatttttgaatcttaataataacccttctgcctcctaagacagttggaggatcaaatagg

SEQ ID NO: 802987 - DNA, 120 bp, Artificial Sequence
  ENSG00000261103_0 (sequence is synthesized)
gagtcccactcagttcactttaacttcattatttcatctcactctttctccttccctctttctcgctttctatttgttcactcaatgactttttattgaacggccaccagatcaatagca

SEQ ID NO: 802988 - DNA, 120 bp, Artificial Sequence
  ENSG00000261103_1 (sequence is synthesized)
cagtgcggcatgtcagggatatgatacacggggaatctaagagctgatctctgtcttataggaactcagccagaatagggaagagtagtagaacaggggatcagcaattattttaaacat

SEQ ID NO: 802989 - DNA, 120 bp, Artificial Sequence
  ENSG00000261103_2 (sequence is synthesized)
ttcaataatatttgttttaaagtgaatggtaaaaatatagctggcatatcacagatattattgctaagttaaaagaaagacaagtcaaattaaagtcaacttaaaagcattcagtgaatg

SEQ ID NO: 802990 - DNA, 120 bp, Artificial Sequence
  ENSG00000261103_3 (sequence is synthesized)
acagtacacagagagcagataggttacaggagatgaaggtgcctggtgtttggaaatgtttggataaagcaaaatggaaatggctaagacaaagaaggaggtaataatggcctaagaaag

SEQ ID NO: 802991 - DNA, 120 bp, Artificial Sequence
  ENSG00000261103_4 (sequence is synthesized)
ttataaaatagaatggaggaattcaaggagaaagagattacttcctactcaccgaaagtgttacggaccatgcagtatttgaaactgacctagaaagaccaacaggattgtgatgggtgg

SEQ ID NO: 802992 - DNA, 120 bp, Artificial Sequence
  ENSG00000261103_5 (sequence is synthesized)
aggcaggaagggaaatattttaggaagagtgactgacagtcaagttctggagcgtgaacatgcatggcatattgggaagcgggaacagtacacccatattctgctttccatcttgtatcc

SEQ ID NO: 802993 - DNA, 120 bp, Artificial Sequence
  ENSG00000261103_6 (sequence is synthesized)
ttcttagtcctgcaaatgtccagagtagatgtgctgtttatccatttctccttctttgtggggacacctgcattttcccatgagtttaccccattcttcatgtagccttgctgagacttt

SEQ ID NO: 802994 - DNA, 120 bp, Artificial Sequence
  ENSG00000261103_7 (sequence is synthesized)
ccattatggtgcctctctctcctatagtgaagggatgaagtgagtccgactcaagacaggccacccaggacttaatatgctgggagcgtacaatgttttcagagagacataaggatggaa

SEQ ID NO: 802995 - DNA, 120 bp, Artificial Sequence
  ENSG00000261103_8 (sequence is synthesized)
aatacttggagctgatttgtcctgatcgtgagagcctaaaaatatcatccattcatcccaggaacctagatcgctgaagcagctttttccggcattcctgaagcttgcttcatcctattt

SEQ ID NO: 802996 - DNA, 120 bp, Artificial Sequence
  ENSG00000261103_9 (sequence is synthesized)
ttctttgcttctctatgtcttgtgtgtgtgtgcacacacatgcctgcatatgtgttttcttctcttcataaggtttggtttccatggcttgcaaccaaagaaatgattgtatagcctgac

SEQ ID NO: 802997 - DNA, 120 bp, Artificial Sequence
  ENSG00000261103_10 (sequence is synthesized)
ataatcagtcagcaatcacagtcattttacaaataacacagcagtaaagggttcactgatttccccatgccacagagctaatgagcaatgaagctggaatctgaactcaggtacctctga

SEQ ID NO: 802998 - DNA, 120 bp, Artificial Sequence
  ENSG00000261103_11 (sequence is synthesized)
ttcccaatctgttctctcttcatgcagactttggctctatagcattttccaaaaatggccatgctaatatttctgacgctcctctcgttcacaggtggagtctagttcctgtcccctaga

SEQ ID NO: 802999 - DNA, 120 bp, Artificial Sequence
  ENSG00000261103_12 (sequence is synthesized)
gtgtgggttagcgtttatgacggccttcatgaatgagtgcaatagaagtgacactgtatgatttctgaggctggatcataaaaggcgaaagagaaaccactgcaagctggcttttgggat

SEQ ID NO: 803000 - DNA, 120 bp, Artificial Sequence
  ENSG00000261103_13 (sequence is synthesized)
gctcacctttggaacctggccgccatgttgtgagagagcccaggcctcgtggagaggccacaagtagatgttctggctgacagcaatcaacaattgccagataaacaactgaataagcat

SEQ ID NO: 803001 - DNA, 120 bp, Artificial Sequence
  ENSG00000261103_14 (sequence is synthesized)
tcagatgacatcagctcccaggccttggggattccagctaaggcctcagacattgaggcacagagataggctgctcccagtgtgccctgctcacattcctgagccattaaaaccacagag

SEQ ID NO: 803002 - DNA, 120 bp, Artificial Sequence
  ENSG00000261103_15 (sequence is synthesized)
actctcccacctaaacaaatcctttgttttataaaatttaagttaggatgggagacatagagattgttggtgcttgaaggaaccctggggatcacttgacccaacattccctcctcttct

SEQ ID NO: 803003 - DNA, 120 bp, Artificial Sequence
  ENSG00000261103_16 (sequence is synthesized)
cctgagagtcagatgtagaatgaatggtgaatgcttgacagtaaggtcagctttagggttgtttgaaggatgaaatgataaaatgcacagaaaaatgcctggcacttagtagttgctcaa

SEQ ID NO: 803004 - DNA, 120 bp, Artificial Sequence
  ENSG00000261103_17 (sequence is synthesized)
ggcacttagtagttgctcaataaagcttaattctctcttcctgctaatatcattctttttcttttcttttgagacggagtctccctctggcccccacgctggagtgcagtggcgtgatct

SEQ ID NO: 803005 - DNA, 72 bp, Artificial Sequence
  ENSG00000261103_18 (sequence is synthesized)
ggcttctttttctttttttaaaaaagtcaaaattctcaaaaagcttggttgtctactttgttttccaggtgg

SEQ ID NO: 803006 - DNA, 120 bp, Artificial Sequence
  ENSG00000261103_19 (sequence is synthesized)
ttctcaaaaagcttggttgtctactttgttttccaggtggatttctggagtcaggtttagtgattagagcatgacattttgtatgaaagcataaaagacagaaaaaactcaaaatcaggt

SEQ ID NO: 803007 - DNA, 120 bp, Artificial Sequence
  ENSG00000261103_20 (sequence is synthesized)
aaagcattgtcttggttcacttattaacctataagaatgattacctcaaatgaccttaaattcctttcccatactctatttaagaatcggggaaacctatgttttagaaatgaagtcaat

SEQ ID NO: 803008 - DNA, 120 bp, Artificial Sequence
  ENSG00000261103_21 (sequence is synthesized)
atatagaaagatatagcacttgaagtggtgagcttcagtttcacagaaaactcatctaagtgagataacttattcttggatgttgccagaaaaatctacaagtttctaaatgattggaaa

SEQ ID NO: 803009 - DNA, 120 bp, Artificial Sequence
  ENSG00000261103_22 (sequence is synthesized)
caaaagtttttaaatgattgttggagttcaactccagggagcactggcctctgccctgtgttggaggacagctttgatgctgcataacaaacagtgtgatttcactcatgctgaaactat

SEQ ID NO: 803010 - DNA, 120 bp, Artificial Sequence
  ENSG00000261103_23 (sequence is synthesized)
tttcctgaaattggagccttattattaagttactgggaaaaaattccaattgaactttggaaattttttttctattgtagtaccattatagagttcagtttggtgaaaaatgagcactga

SEQ ID NO: 803011 - DNA, 120 bp, Artificial Sequence
  ENSG00000261103_24 (sequence is synthesized)
aggctttcaacaattttctatcagagcttaaattcaattctaaggatagtgaccatgtaattggcaaggaaggagtacttaattcttagaattgcactgatggggagacacagctttccc

SEQ ID NO: 803012 - DNA, 120 bp, Artificial Sequence
  ENSG00000261103_25 (sequence is synthesized)
tggcattggagcctgtggcagcggggctgtgggcagactatatctcacaatggcttcctggtgggatatgggagtggtgcctgctctgagatacagatttggttaaatccactcactggg

SEQ ID NO: 803013 - DNA, 120 bp, Artificial Sequence
  ENSG00000261103_26 (sequence is synthesized)
tacactgcaaacatttccctaaacaccctaaactttcttttctaggacctgacccgagtctaagcttgtaaggggcttggtgcatgggagttggagaaccatctcggtgttcatattctg

SEQ ID NO: 803014 - DNA, 120 bp, Artificial Sequence
  ENSG00000261103_27 (sequence is synthesized)
gcatcgaaatgagaacatgagtgcattttattgtatctttgaggcaaccctggaggctacaccttgaagaggcagcctcatgaaatggaaggtgccaaggatctctgaacgttatggagc

SEQ ID NO: 803015 - DNA, 120 bp, Artificial Sequence
  ENSG00000261103_28 (sequence is synthesized)
agagccatcccaccccaccatctgcagttcgactgtaataggaaataggctcaatttggatcaaggcttcggaagaagggttggctgacggcaatggctcttcaatgtaactttcatgga

SEQ ID NO: 803016 - DNA, 120 bp, Artificial Sequence
  ENSG00000261103_29 (sequence is synthesized)
acaacaggagaggcaagcagagcacagtaggaactgaatggggtttgcgtgaaagaaaaatccagggaaaggtgtcctgcagaacgtgcacgagacggggcttcaccatgttggccagac

SEQ ID NO: 803017 - DNA, 79 bp, Artificial Sequence
  ENSG00000261103_30 (sequence is synthesized)
gcctcccttgaacacacctgaatttgccaacatccctcttaaaaagaggcaccaagaggaatgcagaaggccagcatgc

SEQ ID NO: 803018 - DNA, 120 bp, Artificial Sequence
  ENSG00000261103_31 (sequence is synthesized)
tcttagcttttctagcagtcataaggcacttttgcccaagaccaagcttgcagtcagggaaagcctccaggtttttcgaaatggccttgaacaggttttaagccagctctcttgctttta

SEQ ID NO: 803019 - DNA, 120 bp, Artificial Sequence
  ENSG00000261103_32 (sequence is synthesized)
atcagaggtcatttggccaagttgcagcctgttgttccagcccaggatttctccacctaagcagatacttctaattggggagagtggagaagcggcaacttcaattgtcccccctgacat

SEQ ID NO: 803020 - DNA, 120 bp, Artificial Sequence
  ENSG00000261104_0 (sequence is synthesized)
gggtggagggaggacacccttcaggatcacagtagctacttctcaccaggacactgctgccatccagcctttgttctgggcattttgcgttaaaaatctcatttaatcttcacaacaggc

SEQ ID NO: 803021 - DNA, 120 bp, Artificial Sequence
  ENSG00000261104_1 (sequence is synthesized)
ctgtgaggcagaatccaggaatggaaagaactcgggtttagaagccaaacattgctggatttagttctgtcctcagccacttactgagtgaacggggcaagctacttgcttactggagct

SEQ ID NO: 803022 - DNA, 120 bp, Artificial Sequence
  ENSG00000261104_2 (sequence is synthesized)
tcagttttcccgtctgttaaatggaaataatactggcttcagtgtgttgtgagaattccctatagtaatgactgtgaaacagctgaaaccctgcaggcaggtggtaaatgatagctctcg

SEQ ID NO: 803023 - DNA, 120 bp, Artificial Sequence
  ENSG00000261104_3 (sequence is synthesized)
tgttgccctttatggataaggatgcaagaagtttaggatggttggccaatgccacactgctggtcagcagcagagctaggtccgtctccctgccaaaggcaggcattttgctcagaggcc

SEQ ID NO: 803024 - DNA, 120 bp, Artificial Sequence
  ENSG00000261104_4 (sequence is synthesized)
accaaacccatacccttggtggccaacatggcagcggccggatcggagtctccccccagtactttgtaagcccattgagggtaagactatgcatcagatctcttggcatccttggtatcc

SEQ ID NO: 803025 - DNA, 120 bp, Artificial Sequence
  ENSG00000261104_5 (sequence is synthesized)
ttggcaggtctcttggtatccttggcatcctctctcacagtgccgtaaatgttccttaaatggatgaaagcattcaggagcacctagaatagattgagcagataaccgcataacaggtgt

SEQ ID NO: 803026 - DNA, 120 bp, Artificial Sequence
  ENSG00000261104_6 (sequence is synthesized)
ccactgtgtgcatataacttcagcctcttctgcgttgttgggacatgaagtcccttcgctttgcatggaaaatagtctaggcaccccctggctgacttgccacgatgcctgtcctcagga

SEQ ID NO: 803027 - DNA, 120 bp, Artificial Sequence
  ENSG00000261104_7 (sequence is synthesized)
caggaagaaggatgggcccaaggaggagaattgcgtcagaggtcaagaaatgaactccagcagaagtagcacaaacagggaacccataaggaagcttgtgatgaacaaacatagggcaga

SEQ ID NO: 803028 - DNA, 120 bp, Artificial Sequence
  ENSG00000261104_8 (sequence is synthesized)
tgaagtggaatattggatggaaacacaccttgaaaatgcacagacctgtggcaagggaagggatcactgcttagatcaatagcagggccttggaccatggttagggggatgcttgttagt

SEQ ID NO: 803029 - DNA, 120 bp, Artificial Sequence
  ENSG00000261104_9 (sequence is synthesized)
gcttccctgggctgcagggagccacggaaaacaggccagggcaggagaccggccagtgactcacacggcggaacacaggtttagaggagcaaaatctgaagggcccctctccttctcccc

SEQ ID NO: 803030 - DNA, 120 bp, Artificial Sequence
  ENSG00000261104_10 (sequence is synthesized)
acctgttttctgtcacgtgctctggacctgagcccacagtggggcagctccctcggcctccagtggaaggcggaagcacttgacaaaaagcctccagttaaccggggcaagcagcagggt

SEQ ID NO: 803031 - DNA, 120 bp, Artificial Sequence
  ENSG00000261104_11 (sequence is synthesized)
ggggctcaggccttctggccaagtccttgtctccctcgagtctccagctttctcctgagaggcaaagccctcgccaggcaggctttaataagcagtagtgccctgcacccctgcccaagt

SEQ ID NO: 803032 - DNA, 120 bp, Artificial Sequence
  ENSG00000261104_12 (sequence is synthesized)
ccccggaccccatgctggcaggctactgcagcccctatcttgcctggcacatggcacatggggtgtcttggcatgtggggtggtgctgtatgcctgtagtcacagactggcactcactgc

SEQ ID NO: 803033 - DNA, 120 bp, Artificial Sequence
  ENSG00000261104_13 (sequence is synthesized)
gttccttgctgcctgtgaagatggtgctgtgaccggagcaggcctcataatgagccggtgatttcatcccctccagacagaagacaaagtctgtgccttctgggcaaaacattagctgac

SEQ ID NO: 803034 - DNA, 120 bp, Artificial Sequence
  ENSG00000261104_14 (sequence is synthesized)
ccgtgacactgctcagaccccagaggcctggctcccggcctgccgggagcagtcactccaaacagctgcggctgtgaggccttcagagagtggctaattagggtctcacctggccagctc

SEQ ID NO: 803035 - DNA, 120 bp, Artificial Sequence
  ENSG00000261104_15 (sequence is synthesized)
caatctgcaaccacaagctcgaggcccagctgcctctccccagtgcctctggggctccgctgcctccctcacagatggcgagtgacttccttgatctgtataaacaagaattctgcctta

SEQ ID NO: 803036 - DNA, 120 bp, Artificial Sequence
  ENSG00000261104_16 (sequence is synthesized)
ttcaaacagcaatgatagattggaggatctactatgtacaacacactgtgcttgcatccaatggtagagttagaaaaaaaaatgtgatgtcctgtgatgttaagaagtgaagaaccccat

SEQ ID NO: 803037 - DNA, 120 bp, Artificial Sequence
  ENSG00000261104_17 (sequence is synthesized)
ggggaggtagcagaaaacatccaacagtgagtggcaacaggtgtgctggtcaccgagggcttcttgggcaaggtcattcatgaactgggtcttgcagcacagatgtgctgggagtggaag

SEQ ID NO: 803038 - DNA, 120 bp, Artificial Sequence
  ENSG00000261104_18 (sequence is synthesized)
aggacacagttagatgccactttatcctcactatagtggcacaaatggagaaggctgatgatgctgtgtgctggggaagaggtgggtgtgtaggttgtctacctgttggccgtgggagtg

SEQ ID NO: 803039 - DNA, 120 bp, Artificial Sequence
  ENSG00000261104_19 (sequence is synthesized)
taaatgagtcacccactcaggaaaatagctgaacaacccccaggggtacattcctgtacaccaccacccagcaattccactcgtaggtatacacttcagaaaactcttacacaaaaatat

SEQ ID NO: 803040 - DNA, 120 bp, Artificial Sequence
  ENSG00000261104_20 (sequence is synthesized)
tcacagcaggactgttcaaacgcccaccaacagaagaatggataaacaggtgtgttcacaccatggagtatcagacagcgtccaaagagaggaattacggccaccctagcaatatggaca

SEQ ID NO: 803041 - DNA, 120 bp, Artificial Sequence
  ENSG00000261104_21 (sequence is synthesized)
atgcttatcaacttactactaagtgagaaaagtaagtcccaaaagagtacaaacagcatgacaccctctcaaagaaggcaaagagatgtcaaatataatatacacattttaggactccaa

SEQ ID NO: 803042 - DNA, 120 bp, Artificial Sequence
  ENSG00000261104_22 (sequence is synthesized)
ggaataggtaagatgagaggacaggataggaaaataggccaggagctgtggctcatgcctggaatcccagcacttaggtaggccgaggcagttagatcacttgagcccaggagttcaaga

SEQ ID NO: 803043 - DNA, 85 bp, Artificial Sequence
  ENSG00000261104_23 (sequence is synthesized)
atacaaaaattagccaggtgtgctggcatgtgcctgaagtcccagctacttaggaggctgaagcgagaggattgcttgagcctgg

SEQ ID NO: 803044 - DNA, 120 bp, Artificial Sequence
  ENSG00000261104_24 (sequence is synthesized)
cgtgccactgcactccagcctgggtaatagagaaagatcctgtctcaaaaaaaaaaggaaaacacagaaaggaggcacacaggattcggggtgacagctatcttgggatagctccctgca

SEQ ID NO: 803045 - DNA, 120 bp, Artificial Sequence
  ENSG00000261104_25 (sequence is synthesized)
gggtgacagctatcttgggatagctccctgcagcccagggaagcactagggagggaatgggatggggtaggccacacagctgatgtcagctcttgctaaggcccagctttcaggctgggt

SEQ ID NO: 803046 - DNA, 120 bp, Artificial Sequence
  ENSG00000261104_26 (sequence is synthesized)
ggtggtttcacaggtgactattctgttactttaaaatgtgatctattagcacagctagggacgtaggactatgcctgtaatagcaaaagtaataaaatgcatcaaagcccaggattataa

SEQ ID NO: 803047 - DNA, 120 bp, Artificial Sequence
  ENSG00000225194_0 (sequence is synthesized)
gacctaggctctcgcagagaactgcatcgcgctcccagctctgctgcctcggtgcggggacggggctctgcatgaggactgggaattgatctcagaggcatggtcttaacaccgcgcaca

SEQ ID NO: 803048 - DNA, 120 bp, Artificial Sequence
  ENSG00000225194_1 (sequence is synthesized)
gttccttgcaagttgaagagtagacccaaatgatcagttctaaaattctattcttattgaagattactggtggaaatatcaatgcaaacaaaatgaaaaagttcaacaatgattaatact

SEQ ID NO: 803049 - DNA, 120 bp, Artificial Sequence
  ENSG00000225194_2 (sequence is synthesized)
gcatttcaacagaagaatcaaatcatcttgacaaaacttcaatgggcaaaatttgccttggggaattttatgcaggggaatccttgggtctgatgtgtggtgggctttggatgtgttgtg

SEQ ID NO: 803050 - DNA, 120 bp, Artificial Sequence
  ENSG00000225194_3 (sequence is synthesized)
tagctcagtgtcccttcctgctactcctagtcatctccagaaactcagaccacccatctactaaaggcaggtggatgagcaagggggcctcggaggcattccggatcacactgaacctga

SEQ ID NO: 803051 - DNA, 120 bp, Artificial Sequence
  ENSG00000225194_4 (sequence is synthesized)
gccccaccgcctgacccactcagtgtcactgttaacagaaactcgctgccatctggcctcaggcctgcctccttcctatagaacttgacactggaagcaccaggcgagctggaccttctg

SEQ ID NO: 803052 - DNA, 120 bp, Artificial Sequence
  ENSG00000225194_5 (sequence is synthesized)
ctgctactgcactcccatgatgcagcctgagaatgaagcccaccagagtgacagagagcagacctgagtggtgagctggtgacacagggtgtgggtggtgtcccttgagcttcgacacca

SEQ ID NO: 803053 - DNA, 120 bp, Artificial Sequence
  ENSG00000225194_6 (sequence is synthesized)
cgccacacctgaaaccagcctgacatccatgattttgcttttttgcttaaaccagtctgcgtcattttcaacaaaagagttctactagatatgacaaatttctctagaagacctaagaag

SEQ ID NO: 803054 - DNA, 120 bp, Artificial Sequence
  ENSG00000225194_7 (sequence is synthesized)
tgaaagacttgaagctattccagtggttcaggaactaggacactggtaggaaactggaaagaaggcatcagagttaaggaaatatttatgaggtcaactctggaagtcttggttactgag

SEQ ID NO: 803055 - DNA, 120 bp, Artificial Sequence
  ENSG00000225194_8 (sequence is synthesized)
tgaatacagtggctgagaggaatggaagcatccaaccaaataaaaaaagatggtgctgagatttgggttatgaggtcaatgactgaagcaatgcgattaactgagttaggagtctcaaat

SEQ ID NO: 803056 - DNA, 120 bp, Artificial Sequence
  ENSG00000225194_9 (sequence is synthesized)
ataggatgagtgcagagttgaggatgaagaattctgctttggacacaatgagtgtgaggtgcccaaggataacccaacgggaagcagtcacaccaaagcaacagggtgtgcacctgaaac

SEQ ID NO: 803057 - DNA, 120 bp, Artificial Sequence
  ENSG00000225194_10 (sequence is synthesized)
atggtgggtgcatgagactaaccctagattggggatagctccctgggaaatccaagggacaaggtgaggaggaggaggcggagcccaccaaggaaactagaaagagaccgctggagaggt

SEQ ID NO: 803058 - DNA, 120 bp, Artificial Sequence
  ENSG00000225194_11 (sequence is synthesized)
ccgaggacagcaaggagcacagccttcaagtctgggagccaactatccaagaagagagtggtttgctatggatgccgtgggccaccacgtcccatctaggaaagcaagttgaggtctctc

SEQ ID NO: 803059 - DNA, 120 bp, Artificial Sequence
  ENSG00000225194_12 (sequence is synthesized)
ttgaatacattgggattgattacccagactttaaagaatctatgtcccctacttcccttcattcactctgctctttaccttctcctcttccctggtcaccagcacctctgctaaagggtg

SEQ ID NO: 803060 - DNA, 120 bp, Artificial Sequence
  ENSG00000225194_13 (sequence is synthesized)
gagaaaggaacttctgatcagttacagaaaagctttggggttacgtggtgcaagctgctctgcctctgtttgtgaagaaattagactatggccagccatgtgagtggcatcactttggtt

SEQ ID NO: 803061 - DNA, 120 bp, Artificial Sequence
  ENSG00000225194_14 (sequence is synthesized)
tctggagcaatagttagtagcaacttttagaggtggtcatttcggttcccttctggaaagtgattcgtgtttaagaaaaatagatgcaacgttgctaagtacacctaacatttaaacagt

SEQ ID NO: 803062 - DNA, 120 bp, Artificial Sequence
  ENSG00000225194_15 (sequence is synthesized)
ctccagcagataaatgctgatactgacacttctcaccagaaaaagagaaatacccatcatgaggaagagaaatgacttttgttcagttatgctcccgggtcccctttcactggagggata

SEQ ID NO: 803063 - DNA, 120 bp, Artificial Sequence
  ENSG00000225194_16 (sequence is synthesized)
tctcagctttctgagcccctggttactgcaatcctcggttccagaacccagcaattcctatcatcacaattgtttcaagtcttatccaagccctgtatatttcagatcatccttaatttc

SEQ ID NO: 803064 - DNA, 120 bp, Artificial Sequence
  ENSG00000225194_17 (sequence is synthesized)
ttgttctgtacccagaggagatcaggaaaacctttaagtctctatgtgaggcaaatacatcctcctcactgccccagccccatgtgattgatgaagcaactgaggaagagaagtagggtg

SEQ ID NO: 803065 - DNA, 120 bp, Artificial Sequence
  ENSG00000225194_18 (sequence is synthesized)
cttctggcactggaggagcgcagtgctgagaaactccgggctccattcggaaatagcactgatttcttagtgtacttttttttggtgttaatatagaaaacatcaaaaacacagttaaaa

SEQ ID NO: 803066 - DNA, 120 bp, Artificial Sequence
  ENSG00000225194_19 (sequence is synthesized)
gaatgaagcatgtctacatacgtgtggccagaaagactgaccagaagctggtagcagtgagggatgacagtgcttgcccctgggttgaatagtggaagagttaggggggaaacagtctgc

SEQ ID NO: 803067 - DNA, 120 bp, Artificial Sequence
  ENSG00000225194_20 (sequence is synthesized)
agaaagcggagaatccagggcagagttagagtcagacctaggctctcgcagagaactgcatcgcgctcccagctctgctgcctcggtgcggggacggggctctgcatgaggactgggaat

SEQ ID NO: 803068 - DNA, 120 bp, Artificial Sequence
  ENSG00000225194_21 (sequence is synthesized)
gtaagtcccgggcctggacaggcgcccctgggagctagcctggaggagattcagtagaaggctgaggagtcggcttggagggtctcggcaaggcggcgcggatggagatgaagctgcgaa

SEQ ID NO: 803069 - DNA, 120 bp, Artificial Sequence
  ENSG00000225194_22 (sequence is synthesized)
gaatgctgagaaagagcggccgggggccttggagggaagctagggaaacgctgcgggggcagccgaggccgtcggcgccccgggagaagagaccttcactgcttctatcagtcaccatat

SEQ ID NO: 803070 - DNA, 120 bp, Artificial Sequence
  ENSG00000225194_23 (sequence is synthesized)
ctgaatcttggcttgccactcaatcctccaatatcgaccaacaacaggagattctctctatctgaggggggaggtgtgtttccctgactagactctaaatacaaatcctccacttctcca

SEQ ID NO: 803071 - DNA, 120 bp, Artificial Sequence
  ENSG00000225194_24 (sequence is synthesized)
atgaattaaacattatataaaaaaggaataaaaccactggtaggatctgtattccaggaagaaaaaagcatattacataataggtcaatgcacagaaataaaaaaaggaatttaactaga

SEQ ID NO: 803072 - DNA, 120 bp, Artificial Sequence
  ENSG00000225194_25 (sequence is synthesized)
agtcccgccgaccctgccggcgcctccgccctcccgccctcccgccctcggtttcccacgacctcggcgcgacgcgcgcgggatccagtggagactgctttcccataggccgccatccag

SEQ ID NO: 803073 - DNA, 120 bp, Artificial Sequence
  ENSG00000225194_26 (sequence is synthesized)
gggaagggagcggaccctcccggctccaggtgcctgggcccccggcggcctgcggaggcctcgccccacgccacccgcccactggcctcgtcttcgcgcggggagaaaagcagcctgatt

SEQ ID NO: 803074 - DNA, 120 bp, Artificial Sequence
  ENSG00000225194_27 (sequence is synthesized)
gattcggaggaacgggttgcttggggcggctcccagctcgagttgtgggccccgccgcgggtgcccttcggaaacgcgctgacaccaggcgaagccgcctctgcccggacgcagcccgac

SEQ ID NO: 803075 - DNA, 120 bp, Artificial Sequence
  ENSG00000225194_28 (sequence is synthesized)
acttggcccgcggggttccccgggacgcctgagagtaatgggcgcgagggggaaagccgaacggcctccctgtgcccggcgcaggcggtgccccctagctgggttcgccgcggcggcgct

SEQ ID NO: 803076 - DNA, 120 bp, Artificial Sequence
  ENSG00000225194_29 (sequence is synthesized)
gcgagcccccgacactgaggacttttggtccaacagtccgacggggcccggtgcgccgttccctccgccctctccccgctccccggcccgcgcgtcttggagggtgggtgaattgtcgga

SEQ ID NO: 803077 - DNA, 120 bp, Artificial Sequence
  ENSG00000225194_30 (sequence is synthesized)
agcactctacgcctggccaacccaaaccaggaacctccgcaccaaacagcccacgttgctgctgctctggggttttaacggccaagggagactggagaaggggtgttctgccttcccatt

SEQ ID NO: 803078 - DNA, 120 bp, Artificial Sequence
  ENSG00000225194_31 (sequence is synthesized)
ctcttaggcccgtccactccccatccccacagtttggaagtggccttttctgaggactccagcgcaaagcatgtttctccttttgagctgcggaagccttgcttgttcccgccattggga

SEQ ID NO: 803079 - DNA, 120 bp, Artificial Sequence
  ENSG00000225194_32 (sequence is synthesized)
gtctcagcatatggctgtgccctaaggggtctttgagggcattttaggaggtgagcggcgcccctacctgggctccgcggggccgattcggtttgccctttgctggcatgtcagtgaatt

SEQ ID NO: 803080 - DNA, 120 bp, Artificial Sequence
  ENSG00000225194_33 (sequence is synthesized)
aactgctgtccttgggatgacctgccctatgatttggcctctggagcatcccgggtgtgtatttcagaactcctcccatcttatccacctgctgaaggcctggccccctgatatggtttg

SEQ ID NO: 803081 - DNA, 120 bp, Artificial Sequence
  ENSG00000225194_34 (sequence is synthesized)
gctctgtttccccacccaaatctcaccttgaattttaataatccccacgtgtcatgggcgggaccaggtggaggtaattgaatcatggaggtggtttcctgaacgctgctctcgtgacag

SEQ ID NO: 803082 - DNA, 72 bp, Artificial Sequence
  ENSG00000225194_35 (sequence is synthesized)
aatcatggaggtggtttcctgaacgctgctctcgtgacagtgagttcacaagatttttttttttaacggagt

SEQ ID NO: 803083 - DNA, 120 bp, Artificial Sequence
  ENSG00000225194_36 (sequence is synthesized)
gggattacacgcgtgagccactgtgcccagccgatctgatgcttttataaagggctttccccgtcccccttcctctctctcaccaccctgtgagaaaggtgcctttcttcccccttcacg

SEQ ID NO: 803084 - DNA, 88 bp, Artificial Sequence
  ENSG00000225194_37 (sequence is synthesized)
ggctttccccgtcccccttcctctctctcaccaccctgtgagaaaggtgcctttcttcccccttcacgtgaactgcctctataaggaa

SEQ ID NO: 803085 - DNA, 120 bp, Artificial Sequence
  ENSG00000281655_0 (sequence is synthesized)
tgcaattgagcctgctgggtgctgctgcaagtttgggggtgaacaggagaatcaggttcttataggggtgaagtctgcaaagtaggatgttttcctaatttgaatgcaatgactgaagtg

SEQ ID NO: 803086 - DNA, 120 bp, Artificial Sequence
  ENSG00000281655_1 (sequence is synthesized)
gaaaatggtcaaaactgggcagagtggctcacacctacaatcccctaggagggaaggacaaaggcatccatatcacctcgccacagtggttgtggtggaagctgtagcactgaagagatg

SEQ ID NO: 803087 - DNA, 120 bp, Artificial Sequence
  ENSG00000281655_2 (sequence is synthesized)
cagccccatggaagatgctgccaagagagggagacagagctacgtctggtgtctcccttcctccttacctggtgcctccctcctcctgtcctcctgtctcccttcagatgaaggaactga

SEQ ID NO: 803088 - DNA, 120 bp, Artificial Sequence
  ENSG00000281655_3 (sequence is synthesized)
gctgagacttgcactctaccataggcggaagcacccaccaccctgttcccagccctggaagggcaaggaatgaatctgaggcaaatagggccagcactggcagtctgctcgattttccct

SEQ ID NO: 803089 - DNA, 120 bp, Artificial Sequence
  ENSG00000281655_4 (sequence is synthesized)
cagagcatttatcttccttgacatatttacaattttttgtctatttttggtttctctaacttgactagaatgtaagatccacaaggcttgggctttgctcttttgttcactatgtccata

SEQ ID NO: 803090 - DNA, 120 bp, Artificial Sequence
  ENSG00000281655_5 (sequence is synthesized)
gctcctgtaacagtgcctaaaacatagtaggcaatcaatagatattctttggataaacaaatatgcctcaacattgagtctaacttacagcagacattgaataaatatctattgaatgaa

SEQ ID NO: 803091 - DNA, 120 bp, Artificial Sequence
  ENSG00000220161_0 (sequence is synthesized)
aacgtcttcccacctttttctcccctctccgtcttctcccctccttcttccccactgcggtcttcccgcatcctcttctgccgtctccctactgtcttcttcccgcaccttcttctcccc

SEQ ID NO: 803092 - DNA, 120 bp, Artificial Sequence
  ENSG00000220161_1 (sequence is synthesized)
cgcagtttttttttccccttccccaccgttttcttcccctcagtctctcccattcctcgcagcacgggttcctgtggcggcagcttttccttccatctccttctctccacccgctggctt

SEQ ID NO: 803093 - DNA, 120 bp, Artificial Sequence
  ENSG00000220161_2 (sequence is synthesized)
ccagtctccaccttcccgcctattcccccagcagcgtcttcccgccgctccctcttctcccctccccctcctcaccgtcttctcccggcctattaccgccaaccgttttcttcctcatcc

SEQ ID NO: 803094 - DNA, 120 bp, Artificial Sequence
  ENSG00000220161_3 (sequence is synthesized)
cgcacccttttcttcccatgtctgccttagtcttcttcccaccctcttctcctctccccatcgccttcttcccaccctcttctcctctccccatcgccttcttcccaccctcttctcctc

SEQ ID NO: 803095 - DNA, 120 bp, Artificial Sequence
  ENSG00000220161_4 (sequence is synthesized)
tcccaatcgtcttctttcccagcctcttctccattttcttgccgcctccatatccccaccttcttctcgcagcagcgtcttcctgccgcgcttttctctcccctcaccatcttctcttcc

SEQ ID NO: 803096 - DNA, 120 bp, Artificial Sequence
  ENSG00000220161_5 (sequence is synthesized)
tcttccccaccgtcctctccccacgccctcttctcctcactgtcttctccccgcgccttccccacaaccgttttctcccccgttttcttcccctcacaccgttttcttcccatgtcctcc

SEQ ID NO: 803097 - DNA, 120 bp, Artificial Sequence
  ENSG00000220161_6 (sequence is synthesized)
caccgtctcgcagcagcgtctgtcagtcgcaatcttcttcccactttcttctctccccctcccatcgtcttttttccccagcctcttattctccgccatcttcttcccctccccaccttc

SEQ ID NO: 803098 - DNA, 120 bp, Artificial Sequence
  ENSG00000220161_7 (sequence is synthesized)
cttcgcccccgatcgtcttcttgcccacccccttctcgcgctctccaactgcctttcacctagaagcgctccacgcgtgcgcccgcctgtgtccctgcgcctggtgtgtctgtgcgccca

SEQ ID NO: 803099 - DNA, 120 bp, Artificial Sequence
  ENSG00000220161_8 (sequence is synthesized)
gccagccccatgagctgggcccctgagctccgccccaacagccaacaggagacccaggagagtcgctgccagggccatcacggctgccgccgcccccgcccccgccgctacctcagaact

SEQ ID NO: 803100 - DNA, 120 bp, Artificial Sequence
  ENSG00000220161_9 (sequence is synthesized)
gaacagtgttggctgcgggcgaaaggcagtggggcccggaagactgcggggagagggggaggaggggacggagagggtgggaaagaccttggaaagtgggatggggagaaaggtggggaa

SEQ ID NO: 803101 - DNA, 120 bp, Artificial Sequence
  ENSG00000220161_10 (sequence is synthesized)
gaagacagtggggagaaagtgcagggagaagacagtgtggtagagaagacagtggaggaaaacggtgaggagaaaggagggtggaaaagaagacgatgaggacaaggccgggcgcggtgg

SEQ ID NO: 803102 - DNA, 65 bp, Artificial Sequence
  ENSG00000220161_11 (sequence is synthesized)
tacaaaaattagctgggcgtgatggcgagcgcctgtaatccagctactccagcgactcaccattg

SEQ ID NO: 803103 - DNA, 120 bp, Artificial Sequence
  ENSG00000220161_12 (sequence is synthesized)
gatgacagagaaggtcatgggaacatacagagacctacagggaagacggccatgggacaagggaggcagagtctggagttacgctgcctacagtcacggaatgccaaggacagctggaaa

SEQ ID NO: 803104 - DNA, 120 bp, Artificial Sequence
  ENSG00000220161_13 (sequence is synthesized)
ccaccagaagctaagaaggagattttacctgaaagcctctcaaagaaatcaatcatactcacacctcctttttgaatttctggcctcgtgaatggtgaaaaaataaatttctgtcgtctt

SEQ ID NO: 803105 - DNA, 120 bp, Artificial Sequence
  ENSG00000286921_0 (sequence is synthesized)
gggtctccagcctgctggccggctctgaagatttaggacttgttactcctcccaatagtcctgcagatgcctccaaggagtccgaaaacaaatccgaagtcaacgacaagcaatgatggc

SEQ ID NO: 803106 - DNA, 120 bp, Artificial Sequence
  ENSG00000286921_1 (sequence is synthesized)
atgatggcgatggcgatcctagttaataaaaaggggggagatgtgggcggcaagccatccaggtgccaagccaagagaccgagggcatgagttgttccagtataataaaatatataaaac

SEQ ID NO: 803107 - DNA, 120 bp, Artificial Sequence
  ENSG00000286921_2 (sequence is synthesized)
tggtctagcagtaacgccagtgtctgggaagacgccccttgccgagcggacggtggtctagcggtagcctcagtgtcaaggaaaacacccgctacttagctgaccgggaaagggagtctc

SEQ ID NO: 803108 - DNA, 120 bp, Artificial Sequence
  ENSG00000286920_0 (sequence is synthesized)
caggatggcagaggaaggtgatgtggacgaggcggatgtgttcctggcatttgcccagggtccctcccctcccaggggtcccgtgcgacgtgccttggacaaggctttctttatcttcct

SEQ ID NO: 803109 - DNA, 120 bp, Artificial Sequence
  ENSG00000286920_1 (sequence is synthesized)
ggccctcttcctgacactgctgatgctggaggctgcttataagctgctgtggttactactatgggcaaagttaggggactggctcctggggacacctcagaaggaggaggagctggaatt

SEQ ID NO: 803110 - DNA, 120 bp, Artificial Sequence
  ENSG00000286920_2 (sequence is synthesized)
cagccctcgcagcggcaatttgcacaaactctcctccaagccccaccccatcatcgcccatccgcagaccctaggcctcccacgacaaagcacggccacctggtcagcacagacggccct

SEQ ID NO: 803111 - DNA, 120 bp, Artificial Sequence
  ENSG00000286920_3 (sequence is synthesized)
tcgaggaccccctctggagaagaaccattcaggtcccaacggtctggctggtcattagttctgtggtgaagcttgaaaagcaaatcagcaacaatagtaataacaataacacttttatgg

SEQ ID NO: 803112 - DNA, 120 bp, Artificial Sequence
  ENSG00000286922_0 (sequence is synthesized)
gtacaacgcctgcaaaaaagtaactttgaagaagacgacaagccctgttccagtcacacccagaagctaactggtccacgcatggccaaagcatgaggaaactcatcctggaactcattt

SEQ ID NO: 803113 - DNA, 120 bp, Artificial Sequence
  ENSG00000286922_1 (sequence is synthesized)
tccttaaattctggatttgtacagtaaggacttcaactgaccttcttcagactgaggactgttcccagtgtatgcatcaagttactgaggcaaacaaagactggacttactcattgagtg

SEQ ID NO: 803114 - DNA, 120 bp, Artificial Sequence
  ENSG00000286922_2 (sequence is synthesized)
caaaacacacaacaaaggctgaaggcacttcaagcactcgtggtccaaagatcgggcagaaaaattcagatgcatcctcacaaagcatctggagtcatttcctgtttgggctattatggc

SEQ ID NO: 803115 - DNA, 120 bp, Artificial Sequence
  ENSG00000286922_3 (sequence is synthesized)
agtcctgctgcaaacatgcttgtggctgtctttggaattatggcagcagcaagtaagaaggtaatgatcctgagaatcagcacccaagaccagtggtcagtccagcaggaaagagataaa

SEQ ID NO: 803116 - DNA, 120 bp, Artificial Sequence
  ENSG00000286922_4 (sequence is synthesized)
ggtggcatgggacaagcgccaccctcacctctggggaccatcccccagacaccaagcaggaagacgaagctcaggtcacattcatcatggctgaactccaggtcacctgtggtgcagaga

SEQ ID NO: 803117 - DNA, 120 bp, Artificial Sequence
  ENSG00000286922_5 (sequence is synthesized)
aagaagaaagggggagatgctatacagttttaaacaacctgatctgctgagaactctgtcataagaacagcatttcttcatttggttgagctgtggaaggctgccagctatgaagctcca

SEQ ID NO: 803118 - DNA, 120 bp, Artificial Sequence
  ENSG00000286922_6 (sequence is synthesized)
ccttttgggggtggggaagaaagaaaaatgaaaaccaattttctccatgaatttttttccagctttattgaaatatgatggacaaataaaaattgcattatttaaggtgtggttttaata

SEQ ID NO: 803119 - DNA, 120 bp, Artificial Sequence
  ENSG00000286922_7 (sequence is synthesized)
tatgtatgcattgtgaaattattaccaccaccaagctaattaacacatccatcatctcacacagttaccctttttattcagtggggagggaggtatagatgtgacatcacttaaaatcta

SEQ ID NO: 803120 - DNA, 120 bp, Artificial Sequence
  ENSG00000286922_8 (sequence is synthesized)
ctgttaccagaagctgaatcttaatatctactctcgccatcaactcatataggtaaacataatatgtagattcccattcatttgagctgctgtaacaaaatactgtgagctgggtggctg

SEQ ID NO: 803121 - DNA, 120 bp, Artificial Sequence
  ENSG00000286922_9 (sequence is synthesized)
agaaacaacagaaatcaattgcttctggttccggaggctgggaagtccaagaccaaggtgccagcagattcagtgtctcagcaaatttcaagcatacactatattattgttagctgtagt

SEQ ID NO: 803122 - DNA, 120 bp, Artificial Sequence
  ENSG00000286922_10 (sequence is synthesized)
caccttgctgcacagtgggtctccagaactgattcatcttttaactgaaaatttgtaccttttggccaaacacctcttatttccccacacccagcttctgataactaccatgctattccc

SEQ ID NO: 803123 - DNA, 120 bp, Artificial Sequence
  ENSG00000286924_0 (sequence is synthesized)
ctccacctatcccaactccactcatccgcagcccaaacactgatctgttttagtttgcattttctagagtcgtccataaatggaatcatcccatatgtacttgattttgtctggcttctt

SEQ ID NO: 803124 - DNA, 120 bp, Artificial Sequence
  ENSG00000286924_1 (sequence is synthesized)
tcactcaacatagttactttgacatgcctgcgtgtttttgcatggaacaatcattcattgcttcctgagcagtattccatttatggatataccaccgtgtgtttagtcagcacttgattt

SEQ ID NO: 803125 - DNA, 120 bp, Artificial Sequence
  ENSG00000286924_2 (sequence is synthesized)
agcctgctttcaatttttcctgattagaactacagctgctaggaacatccctgtgcaaatctttgtacagacatatacggtttttcctctctggggtaaatacctggaagtggaatgccc

SEQ ID NO: 803126 - DNA, 120 bp, Artificial Sequence
  ENSG00000286924_3 (sequence is synthesized)
aggtcgtaagcctaacctgaacttaagccggcagatgaggataaggctccccagcctcccggaacaagcagacagttattaatggaaatgttccaccagttcagcttttggttatagaaa

SEQ ID NO: 803127 - DNA, 120 bp, Artificial Sequence
  ENSG00000286924_4 (sequence is synthesized)
aatatatcattactactttttagaaacctcagaaatagacgactactacttcttaaaaaaaagggagtttttggaaaactaaaggagttcgcagggtcatacatcatctttttctttcat

SEQ ID NO: 803128 - DNA, 120 bp, Artificial Sequence
  ENSG00000286924_5 (sequence is synthesized)
cttgaaaactaagaaacgaagaaaaattggatcatggaaatacaggaatttacatcaggtctgtgctgggagccttcctgggtgatcctgtgtttccatcattaatcactttgaacactg

SEQ ID NO: 803129 - DNA, 120 bp, Artificial Sequence
  ENSG00000286924_6 (sequence is synthesized)
cattctcatttggcagaatgctgaagccttactggtctgaggtgtcagaggtcagagcctgagactgacagaggagccacaggtgaccagcaaactgcagaagctctggggagaactcca

SEQ ID NO: 803130 - DNA, 120 bp, Artificial Sequence
  ENSG00000286924_7 (sequence is synthesized)
tggagtcaggctaaaaacagcagcaaccagaaactgtaagaactgagcagagataccagctgcaccactagagagacaaagtgtgtagctcactgcctagtacagcaaaatagccacaat

SEQ ID NO: 803131 - DNA, 120 bp, Artificial Sequence
  ENSG00000286924_8 (sequence is synthesized)
ttcttaaccatgcaaagaagaaacaggaaagtgtgattcaaagtcagaaaaaagtcagtcaatagaaatctactctgttagggacaggtgttggtgaattaagtaattagagactctaaa

SEQ ID NO: 803132 - DNA, 120 bp, Artificial Sequence
  ENSG00000286924_9 (sequence is synthesized)
gcagctatgataaatatgttcacagaggaaagctcaatagagaaatgaaacttcaaacatggaaatttaagacttgaaaagtacaaaaactagaaagaaaaatttactaggtggaccaaa

SEQ ID NO: 803133 - DNA, 120 bp, Artificial Sequence
  ENSG00000286924_10 (sequence is synthesized)
cggcagattagagatgccaaaattgcataaattgaacagagatcaaaagacgttatttaatctaaaaaattgaagaaaaatgagcagagccttagagtcctgtaaaatatcaagcaagat

SEQ ID NO: 803134 - DNA, 120 bp, Artificial Sequence
  ENSG00000286924_11 (sequence is synthesized)
aacatatatgtaattgggttccggagggagagaaggaatggaaaaaaatatttgcataaataatgactgaaaaattccatgattggcagaaaacactaatttacagatctaagaaggtca

SEQ ID NO: 803135 - DNA, 120 bp, Artificial Sequence
  ENSG00000286924_12 (sequence is synthesized)
agcaccccaagcaggatatataattatatcacttccatgcagaagagaaatgcagaaagccaaagataaagagcaaagtgttgaaagcagccaaagaaaagtgacacatcacgtacagga

SEQ ID NO: 803136 - DNA, 120 bp, Artificial Sequence
  ENSG00000286924_13 (sequence is synthesized)
aaatagttcagctcaatggctgaattttcatcagaaatactggcattcagaagaaatttaaaaatgctgaaaacaaaactagcagccaagaattttgtatcaagcaaaaatgtcttttca

SEQ ID NO: 803137 - DNA, 120 bp, Artificial Sequence
  ENSG00000286924_14 (sequence is synthesized)
aaattaaaggcaaaaggaagcaacttccagataaatttaaaagacagaatttatgccattatatttacactgtaagaaatgctaaatgaggttcttcaggttgaagggaaatgaccctga

SEQ ID NO: 803138 - DNA, 120 bp, Artificial Sequence
  ENSG00000286924_15 (sequence is synthesized)
tgacaacatggatctacaggaaaaaatgaaaagcatcagaaatcatacatatgtgagtaaatataaaatactaaatattgatagatgaatatatggataggtactacacaaacacatatg

SEQ ID NO: 803139 - DNA, 120 bp, Artificial Sequence
  ENSG00000286924_16 (sequence is synthesized)
aggcctggtcctggaggctcttgactccaggcttccctaaggttcctggaaggccttcatgtgttattactggttggacagagaagagcactgccagccccagatgggagtgagaaggcc

SEQ ID NO: 803140 - DNA, 120 bp, Artificial Sequence
  ENSG00000286924_17 (sequence is synthesized)
ttaacacatgatataggactcttcaaaacaaaaaattattacattgtattgttgggtttgtaatggacacagatataaaatatgtaacaatattaagagtaggaaaagtagagatacatt

SEQ ID NO: 803141 - DNA, 120 bp, Artificial Sequence
  ENSG00000286924_18 (sequence is synthesized)
ctttctctgttgcccaggctggtttcacacttctgacctcaagcaatctgccctcctcagcctgtaacccttaaagcactggaatcacaggcatgagccaccccaactggccttagctca

SEQ ID NO: 803142 - DNA, 120 bp, Artificial Sequence
  ENSG00000286927_0 (sequence is synthesized)
atgtgtatatacatatgagcgtatatgtacacatgcacatatatacatatgttgtttaggacaaactttggcacatgggaaatgctgttcactagatatttccatctctccccccttcag

SEQ ID NO: 803143 - DNA, 120 bp, Artificial Sequence
  ENSG00000286927_1 (sequence is synthesized)
acacatggaagaactacacttctctgcacttccatttagaggtgatcatgggacagccttcagtgaataaaatattaaccaaatatatggactgctagccagactaataataaagaagaa

SEQ ID NO: 803144 - DNA, 65 bp, Artificial Sequence
  ENSG00000286927_2 (sequence is synthesized)
aaatatatggactgctagccagactaataataaagaagaaaggagagaagaatcaaatagacgca

SEQ ID NO: 803145 - DNA, 89 bp, Artificial Sequence
  ENSG00000286927_3 (sequence is synthesized)
acatatctgaattcagcagcacatcaaaaagcttatctaccgtgatcaagtaggcttcatcactgggatgcaaggctggttcaacatat

SEQ ID NO: 803146 - DNA, 120 bp, Artificial Sequence
  ENSG00000286927_4 (sequence is synthesized)
aaaagctatttatgacaaacccacagccgatatcacacggaatgggcaaaagctggaagcagtccctttgaaaaccggcacaagacaaggctgtgccctctctcatcgctcctattcagc

SEQ ID NO: 803147 - DNA, 120 bp, Artificial Sequence
  ENSG00000286927_5 (sequence is synthesized)
tcaaataggaaaagaggaagtcaaattgtttctgtttgcagatgaaatgatcgtgtatttagaaaaccccatcgtctcagcccataatatctttaagctgataagcaacttcagcaaagt

SEQ ID NO: 803148 - DNA, 90 bp, Artificial Sequence
  ENSG00000286927_6 (sequence is synthesized)
gctcaaggaaataagagaggacataaaccaatggaaaaacattccatgcttataggcactgtccaaagtaatttatagattcggtgctat

SEQ ID NO: 803149 - DNA, 120 bp, Artificial Sequence
  ENSG00000286927_7 (sequence is synthesized)
ctgtccaaagtaatttatagattcggtgctatccccatcaatctaccattgactttcctcatggaattagaaaaaactactttaaattccatagggaaccaaaaaagagcccatatagcc

SEQ ID NO: 803150 - DNA, 60 bp, Artificial Sequence
  ENSG00000286927_8 (sequence is synthesized)
ctaacgctatcgtaaccagaacagcatggtactgttaccaaaaccgacatatagaccaat

SEQ ID NO: 803151 - DNA, 120 bp, Artificial Sequence
  ENSG00000286929_0 (sequence is synthesized)
atgcggtcgttggagtgagagttcgctgcctactttttggtagctcttcgcttctaattgagagaatgactgacaaaccatgagtgacctgaacaccttcctggtttgagaagattagaa

SEQ ID NO: 803152 - DNA, 120 bp, Artificial Sequence
  ENSG00000286929_1 (sequence is synthesized)
ataggggttctgcttctcggcttctataaacaaccagacaaatagtgacggccaaagaaactgtagggaattcatagaatttgtaaaaacttgaaaaattaaatcctacatttagaccca

SEQ ID NO: 803153 - DNA, 120 bp, Artificial Sequence
  ENSG00000286928_0 (sequence is synthesized)
aatctccacacatcttgcgcctgggcagaggccacgcagagcagaggaggcagctgtcaagagagcgagacctcactggaggccatcccatcaccaaaggcagccaccagccaggcggat

SEQ ID NO: 803154 - DNA, 120 bp, Artificial Sequence
  ENSG00000286928_1 (sequence is synthesized)
gtggccctcatccagacctcccgccagatggccacccactggtcattccaagacctcatcaggagcaaaggcctctctgcctctgcctaccacacggctgtgccctgcccttcagctctc

SEQ ID NO: 803155 - DNA, 120 bp, Artificial Sequence
  ENSG00000286928_2 (sequence is synthesized)
ttctgaaggagagaggagacccgtggcaggaccagggtggggcatgaagctggctctgggagcagaacgggccctctgggggtgtgtgaacccttccagtcacagacggatttgctttca

SEQ ID NO: 803156 - DNA, 120 bp, Artificial Sequence
  ENSG00000286928_3 (sequence is synthesized)
tcaacctggtgccaatttccacttaaaaaatgatatccaggaaagaccaagaacctagaaaggaaaaatgaatctcggctccgacagatagacgggagccagagcttccctaccatggag

SEQ ID NO: 803157 - DNA, 120 bp, Artificial Sequence
  ENSG00000286928_4 (sequence is synthesized)
ctgacgctgtaaccacctgtctttgtggcaaagatgcaaggtgatggggaatatttggataggcatgtggggcttgtgctgaggccaatggtcagtggaagtgaaaaggatgaggggtga

SEQ ID NO: 803158 - DNA, 120 bp, Artificial Sequence
  ENSG00000286928_5 (sequence is synthesized)
ggcgtttgcagcctagaacagacagacactgggaccggcaagcatgcagatgataggagcaaaagtgagcgacaagagagcagcgacagctcaagcacatgaacaagcacagggcactga

SEQ ID NO: 803159 - DNA, 120 bp, Artificial Sequence
  ENSG00000286928_6 (sequence is synthesized)
ctttgatcagcccagggttggtaccacctctgaactgtgagagaacagggtggggagggagagtttgatggttttccagaaagttattgtggcagcttcaaccctcatcaggaagctgct

SEQ ID NO: 803160 - DNA, 120 bp, Artificial Sequence
  ENSG00000286928_7 (sequence is synthesized)
ttcaaccctcatcaggaagctgcttctgcccctttgtgacagggagaagaacgaggtaacctggcaaacccagagcattaaaatgagggaatcagggccaggcatggtggctcatgccta

SEQ ID NO: 803161 - DNA, 120 bp, Artificial Sequence
  ENSG00000286928_8 (sequence is synthesized)
caacctggccaacatggtgaaaccccttctcagggctgggaggggaggaactgttctgggcctctctccttggcttacagagggacatctactccctgtgtctcctcacatcatctccca

SEQ ID NO: 803162 - DNA, 120 bp, Artificial Sequence
  ENSG00000286928_9 (sequence is synthesized)
tccctgtgtctcctcacatcatctcccactatacctgtctgtctctgtgtccaaattgcccctttttataaggacaccagttggattggattagggcccaccctaatgacctcattttaa

SEQ ID NO: 803163 - DNA, 120 bp, Artificial Sequence
  ENSG00000286928_10 (sequence is synthesized)
attgattacctctgcaaaaactcaatctccaaataaaatcatattctggggtgctgtgggttaggactccaacctatctttttgggggtggtggggattgcctcataatttagtgcaaaa

SEQ ID NO: 803164 - DNA, 120 bp, Artificial Sequence
  ENSG00000286928_11 (sequence is synthesized)
cacctccagaccagatcaccttaataacagaactgacgaagcccctgggattgagtttagcacttgcagttcatgacccagcaggagtcacagagacagaccctggctgagctcggtggc

SEQ ID NO: 803165 - DNA, 120 bp, Artificial Sequence
  ENSG00000286928_12 (sequence is synthesized)
aactccatctcaaaaaaaaaaagaaagaaagacccccaattacagagggtagacttagcaccatcctgactacctctaacaggttttccaaaaaaatcaaggctctgtgtagtgttttaa

SEQ ID NO: 803166 - DNA, 120 bp, Artificial Sequence
  ENSG00000286928_13 (sequence is synthesized)
ctgtgtagtgttttaaggttttttgtttatttgagtcacttatttatttttcttgcaaaataatcattctacagggataaatgcctttatttgtattcctaactgagaatgagcacagtc

SEQ ID NO: 803167 - DNA, 120 bp, Artificial Sequence
  ENSG00000286928_14 (sequence is synthesized)
ttttgtgttggctgggctcattagaaacaagtccctgaggtctacaatgggctcattttcacagttactaagtaaagtcaacctcttatgaaaatcgtagtttacaactttaagtaaata

SEQ ID NO: 803168 - DNA, 120 bp, Artificial Sequence
  ENSG00000266341_0 (sequence is synthesized)
gagcactgccatcaccctaccccagcttacagaagagctcaggggtggctggagcacggagggagatggagtggcaaggcagtgaatgacatgcgtgatgttggggctgttgcaacatgg

SEQ ID NO: 803169 - DNA, 120 bp, Artificial Sequence
  ENSG00000262456_0 (sequence is synthesized)
ccgatgctgggggacagggacggggaggggcagcgggtggatgatgaggtatctgtgcaggcccgggggccactggcctcaggatgcagggagaggtgggcaggctgaggggaggggcga

SEQ ID NO: 803170 - DNA, 120 bp, Artificial Sequence
  ENSG00000262456_1 (sequence is synthesized)
gctccacgaggctgctctaactgccccgtgggtcaggcctgccatcgctgtcacaatgggaatagcaaagctggctctcccagagccacggggtctggcggaggtggctgtgctggggtg

SEQ ID NO: 803171 - DNA, 120 bp, Artificial Sequence
  ENSG00000262456_2 (sequence is synthesized)
ggtacagggctcagcctctgaggatggtgacctggtttgtaactgtccctttacccacaccaggagagagaaataaggaacagtcccctgggaggtgtccaggaccaggagggaacagga

SEQ ID NO: 803172 - DNA, 120 bp, Artificial Sequence
  ENSG00000262456_3 (sequence is synthesized)
agggaatttttaggcatctaaggattctttatttccagagaaaatctattcaagacctttgctgacctcctctgtgcctgcagggcactccaggaaatcctcagctctgtcccctccccc

SEQ ID NO: 803173 - DNA, 120 bp, Artificial Sequence
  ENSG00000262456_4 (sequence is synthesized)
cagggattggggtgagggcacaggaagcttggcagtggctgggtttggtttattgttggtagagaatcattttaagtagtatctacggtaacgaatcacagtgactgcaaccgggtcaga

SEQ ID NO: 803174 - DNA, 120 bp, Artificial Sequence
  ENSG00000262456_5 (sequence is synthesized)
gagccccaggctgaggccccacctgtccgggtgggactccagaccagccacttcctatgatctgtcacctgtgctcagagcaaggccccttatcaccccaatccgcagctttctgggcca

SEQ ID NO: 803175 - DNA, 120 bp, Artificial Sequence
  ENSG00000262456_6 (sequence is synthesized)
agtggcttcagttctgctttccccatttcccctccaaaggcctgggaagagaacatgaggctccggaggaaagccgggggcctgggccacctcaccagacagcaatagcagcagcagcac

SEQ ID NO: 803176 - DNA, 120 bp, Artificial Sequence
  ENSG00000262456_7 (sequence is synthesized)
acgaaggcggggcagggcgggggagaagtcagggagcgtgacgtccacatcgcactgatttccgagggtagggaggggaagcaggagcggcactggagctggcactgggccggacaggtg

SEQ ID NO: 803177 - DNA, 120 bp, Artificial Sequence
  ENSG00000262454_0 (sequence is synthesized)
gcctccaggcgggcacgcatctttgttgtgttctctgctgactatatcctcagcacctagaactgtgtctgtcacctaatagatgctcaataaacctgccagtaatttcagcaaatgaaa

SEQ ID NO: 803178 - DNA, 120 bp, Artificial Sequence
  ENSG00000262454_1 (sequence is synthesized)
tggaacacgtcaaggccagaggatggaaaaggctccagttttgataaaaggaggcctgcttggcttggaatcctctctcctgctggttgggagatgcaaagatgtttccagagaggggct

SEQ ID NO: 803179 - DNA, 120 bp, Artificial Sequence
  ENSG00000262454_2 (sequence is synthesized)
gatgaattgaggggaaagaaatgagcccagtatgagtcccctttcagggctgagcgtgtataaaaccaaacaacttggaaccgctccaagagaggggattaaagcaacatgttattctga

SEQ ID NO: 803180 - DNA, 120 bp, Artificial Sequence
  ENSG00000262454_3 (sequence is synthesized)
gcggttctctcgggactcggcgcgagacgcttgtctgggctgcgattgccgccgctgccgccaccccggctccccctcggacccctcccccgctccccagaggggcgtgtgaagccggga

SEQ ID NO: 803181 - DNA, 120 bp, Artificial Sequence
  ENSG00000262454_4 (sequence is synthesized)
tctgagtttctctggaacggctctgaatttttagcctctgtggtagggtgcttctgaacatttgttttccaggcaattttttttgagtattaggctgatgttaataaataagcagcattt

SEQ ID NO: 803182 - DNA, 120 bp, Artificial Sequence
  ENSG00000262454_5 (sequence is synthesized)
agggaaggcatcgagcttgaggaagaggccccattcatctccgtaccccaggccctggtacacagcagcaagaatgcggtgtgtcaggagaagcaaatcccaaatgagataaacctgcca

SEQ ID NO: 803183 - DNA, 120 bp, Artificial Sequence
  ENSG00000262454_6 (sequence is synthesized)
gcgcgctctctgcagaaaaggattttctacgctccccgcccatcacttggatctcgtctggggaggggcggattttttttctggaagtacccttcttctccacggtggaggatttaaggc

SEQ ID NO: 803184 - DNA, 120 bp, Artificial Sequence
  ENSG00000262454_7 (sequence is synthesized)
ttcttctccacggtggaggatttaaggctgggctccaatcgaggcggaggctgcagggcccgcggggcgccccccgcccggcgcacgcctgcccggagcccgggaaggcgcagccctggg

SEQ ID NO: 803185 - DNA, 120 bp, Artificial Sequence
  ENSG00000262454_8 (sequence is synthesized)
tatacattgtttctaatcctgacactaatcctgtcaatatccagtgaaataacccctattattccctattttacagatgtgaagccacgagacgttaggtcattttctagagtggtgctg

SEQ ID NO: 803186 - DNA, 120 bp, Artificial Sequence
  ENSG00000262454_9 (sequence is synthesized)
tccaagacagtagctgtgatggctccttgtggctattgatgtgtaaattagttaaaattaaataaattttaacatttacaccctaggttgcactaacaatgagttcaagtgcccagcagc

SEQ ID NO: 803187 - DNA, 120 bp, Artificial Sequence
  ENSG00000262454_10 (sequence is synthesized)
cccgtgtactgtggctgatggctaccacattggacagtgcagatatagaccatttgaaggttgcacaagtgctattggtcagcactgacttagatttcctttttttttttttttttgaga

SEQ ID NO: 803188 - DNA, 120 bp, Artificial Sequence
  ENSG00000262454_11 (sequence is synthesized)
caggtgtgagccaccacgcccagccaggttcagatttcatagctagaacctggcagtgccagaattcaagccgaagctaatgggctttgaaggcagagttcatctgccagccttgttgct

SEQ ID NO: 803189 - DNA, 120 bp, Artificial Sequence
  ENSG00000262454_12 (sequence is synthesized)
agccttgttgcttctttttcttccctctgctgagaagcaaggaacagagcagtgactgtatcccctggctacacattagaattacctgcaattctttttttttttgagacggagtctcac

SEQ ID NO: 803190 - DNA, 120 bp, Artificial Sequence
  ENSG00000262454_13 (sequence is synthesized)
gtctcaatctcctgacctcctgatcctaccacctcggcttcccaaagtgctggaagctgtgagctttttcccaaagtgctagaagctctgagccgccacgcctggcccctgcaattcttt

SEQ ID NO: 803191 - DNA, 120 bp, Artificial Sequence
  ENSG00000262454_14 (sequence is synthesized)
aaaaaaaatgatggtagggtcccaggcccagataatctgacttcactgtgattaagccgggtggggacaggcatcagaggtttttctacttccccatgtgatgccactgtgcagccagca

SEQ ID NO: 803192 - DNA, 120 bp, Artificial Sequence
  ENSG00000262454_15 (sequence is synthesized)
cgtagagcagctaggcgtgaggacccacacagaggatgctggaagcagctggttcatctgccaggagaatgcagtatcttgtgaccaagaagtgggcttctcccagggccacttctaaac

SEQ ID NO: 803193 - DNA, 120 bp, Artificial Sequence
  ENSG00000262454_16 (sequence is synthesized)
cacctcatcagagagctcaggttcatatccgagggaagaaactgaagtgctttctcacacgcttccagcttgatgagaatcacagtagggagctttgcttttccaaacaggctttgtcac

SEQ ID NO: 803194 - DNA, 120 bp, Artificial Sequence
  ENSG00000262454_17 (sequence is synthesized)
cagtatgaattcatgctatatttttgtcttacaaagtaaagcaggtgtttgctagctctgtcaaccataaagtttagaaataatgagccatccaatagcagtgaacaccccagcacccag

SEQ ID NO: 803195 - DNA, 120 bp, Artificial Sequence
  ENSG00000262454_18 (sequence is synthesized)
gttatggtgtctaaacgccacttccgactagaaatgagggcatgaagaaataaccaattccaggtctgaggcaagaaaaaaaattcaagatgagcctggaacatctggtcattccttgct

SEQ ID NO: 803196 - DNA, 120 bp, Artificial Sequence
  ENSG00000262454_19 (sequence is synthesized)
tccttgatagcaaggaaggtgagggtcacattgaaaaggatgcaggagacaacatggagtggctcccaatggggagagtttgagcatcattaacaataatgggccgagcgcggtggctca

SEQ ID NO: 803197 - DNA, 61 bp, Artificial Sequence
  ENSG00000262454_20 (sequence is synthesized)
ggccactgcattccagcctgggcaacagatcgagactctgtctcagaaaaataaataataa

SEQ ID NO: 803198 - DNA, 74 bp, Artificial Sequence
  ENSG00000262454_21 (sequence is synthesized)
ttgcagtaagccgagatcaggccactgcattccagcctgggcaacagatcgagactctgtctcagtataggcca

SEQ ID NO: 803199 - DNA, 90 bp, Artificial Sequence
  ENSG00000262454_22 (sequence is synthesized)
agagcaagacgcactttaatggattgaaacatgtcatatatgtccaaatctatgagttgacaatacttaaaaaaaaaaaaaaaaagaaaa

SEQ ID NO: 803200 - DNA, 120 bp, Artificial Sequence
  ENSG00000262454_23 (sequence is synthesized)
ggatattggaaaacccaactcattttgaaaactgtcaaagaaagggaaagaagcatttatcctttttggtacaaaccatactttttggtagccaaatagttgataaattgatacctttta

SEQ ID NO: 803201 - DNA, 120 bp, Artificial Sequence
  ENSG00000262454_24 (sequence is synthesized)
tagacatatgtccactaccaaagacagaatcatagaattagtatgccaccatgttgtaatatctaatgaaataatgggccaggtgtagtggctcatccctgtaatcccaacactttcgga

SEQ ID NO: 803202 - DNA, 120 bp, Artificial Sequence
  ENSG00000262454_25 (sequence is synthesized)
ggccgagatgggaagattgtttgaggccagaagttcaagaccaccctgggcaacacagacctgtctatgcaacaagatcctgtctctacaaaaaaaaaagaaaaaaaaaaaattagccag

SEQ ID NO: 803203 - DNA, 80 bp, Artificial Sequence
  ENSG00000262454_26 (sequence is synthesized)
tgtctctacaaaaaaaaaagaaaaaaaaaaaattagccaggtttgggcatgtgcctgtagtcccagctgtttggaaggct

SEQ ID NO: 803204 - DNA, 120 bp, Artificial Sequence
  ENSG00000262454_27 (sequence is synthesized)
aaaaaaaaaaaaaagaagaagaaattgtggatctagacaatgatcatcaacaacagctgctaacattgcaaagaggaacaaccagatagtgtgtgcctttgaatggaagtacaaaaccac

SEQ ID NO: 803205 - DNA, 120 bp, Artificial Sequence
  ENSG00000262454_28 (sequence is synthesized)
gaatggaagtacaaaaccaccaataggaagtactcatacaaaaaaaaaaaaatcaaacatcaatctaagttatctcctaggcctaactaccaatttctaagaaatatagcgggaagagga

SEQ ID NO: 803206 - DNA, 120 bp, Artificial Sequence
  ENSG00000262454_29 (sequence is synthesized)
gcacatgacacttctatggagatgctataaccaaaattcagaccacaggaaactacagaacaaacaagccagtttcttcaacaaataaattgcaaaggaagaaaaagacaagggaagaga

SEQ ID NO: 803207 - DNA, 120 bp, Artificial Sequence
  ENSG00000262454_30 (sequence is synthesized)
acctacaggttaggagagatacaaaagcaatcccaaccgatggcaacattcgaactttatttggatcctgattttaactagctaaagaaaccctttagctgggcgcggtggctcacacct

SEQ ID NO: 803208 - DNA, 73 bp, Artificial Sequence
  ENSG00000262454_31 (sequence is synthesized)
cgtgaaacccaggagtcagaggttgcagcgagctgatatcatgccaccgcactctagcctgggcaacagagca

SEQ ID NO: 803209 - DNA, 120 bp, Artificial Sequence
  ENSG00000262454_32 (sequence is synthesized)
tccgtctcaaaaaaaaaaaaaagaaacgctttatgagataaccagagaaatctgaatactaactgggtatttgctgatagtaaaagcattactgttattaaatagttttaggaggagtga

SEQ ID NO: 803210 - DNA, 120 bp, Artificial Sequence
  ENSG00000262454_33 (sequence is synthesized)
aggagtgaaggtggccaaaaaaaattttttggagttatacattgaaatgtttgtaaaagaaatgactgacgtctgaaatttgcttcagagtaatctgggatgagggaaggggaagagggc

SEQ ID NO: 803211 - DNA, 120 bp, Artificial Sequence
  ENSG00000262454_34 (sequence is synthesized)
gtggatggaataaggttggctgagacttgactgctgaagccaggcttattgtaccacacgctccgttcctatgtgtgcttgaagcttttcacaataaaaagaaaaaagaggtaaagacca

SEQ ID NO: 803212 - DNA, 120 bp, Artificial Sequence
  ENSG00000262454_35 (sequence is synthesized)
gacattggactggggaggaggaagcacaactttattttctggcccgaagctgggttggtatttgggggagttcttgggaacacagtgtgtctgtgcaatttcaaccctgggggatccagg

SEQ ID NO: 803213 - DNA, 120 bp, Artificial Sequence
  ENSG00000262454_36 (sequence is synthesized)
agggaaggcatcgagcttgaggaagaggccccattcatctccgtaccccaggccctggtacacagcaggcagaatgcggtgtgtcaggagaagcaaatcccaaatgagataaacctgcca

SEQ ID NO: 803214 - DNA, 120 bp, Artificial Sequence
  ENSG00000262454_37 (sequence is synthesized)
atactagggaaggcatcgagcttgaggaagaggccccattcatctccgtaccccaggccctggtacacagcaggcagcaccttctaccaccatccaccctcctccgtgttttatttattt

SEQ ID NO: 803215 - DNA, 89 bp, Artificial Sequence
  ENSG00000262454_38 (sequence is synthesized)
agggaaggcatcgagcttgaggaagaggccccattcatctccgtaccccaggccctggtacacagcagagatgggtttcaccatggtga

SEQ ID NO: 803216 - DNA, 120 bp, Artificial Sequence
  ENSG00000241073_0 (sequence is synthesized)
caaaacaaataactgttagaaggtacaattttcttctcttccctgtaactgaaagttttaagaattgttccttggggaaaaatttttttaaaattcacctagaatcatagggcctcattt

SEQ ID NO: 803217 - DNA, 120 bp, Artificial Sequence
  ENSG00000241073_1 (sequence is synthesized)
ctggtagcattctctaaagagtcttctagatcaatttttataaagtactaatgctcatgtgataatttaaaattattttcaactactttattacacagatgaagaaacatttcaagatat

SEQ ID NO: 803218 - DNA, 120 bp, Artificial Sequence
  ENSG00000241073_2 (sequence is synthesized)
tgatgtaataacattactgagtcccatgtgggcagcaagagaaccgctggaatgcatcaaatgaaaaggcaattccaggcaactggaaaaataaacagcagctaccatttttacagccta

SEQ ID NO: 803219 - DNA, 72 bp, Artificial Sequence
  ENSG00000268416_0 (sequence is synthesized)
cggccaaatgactcgtcctgctacatttcttggttccctggccaggaagcaaggtaattgaaggacagtcga

SEQ ID NO: 803220 - DNA, 84 bp, Artificial Sequence
  ENSG00000268416_1 (sequence is synthesized)
tgaggagttttgtctgtgactcgtcctgctacatttcttggttccctggccaggaagcaaggtaattgaaggacagtcgaggca

SEQ ID NO: 803221 - DNA, 120 bp, Artificial Sequence
  ENSG00000268416_2 (sequence is synthesized)
tgagagcgctcccaggtaggcaattaccccggtggaaagcctcgtcagagcagtgcgtggcaggcccctgtggaggatcaatgcagtggctgaacactgggaaggaacaggcacttggag

SEQ ID NO: 803222 - DNA, 76 bp, Artificial Sequence
  ENSG00000268416_3 (sequence is synthesized)
atgcagtggctgaacactgggaaggaacaggcacttggagtccagacatttgaaacttggtaagactggtcttcca

SEQ ID NO: 803223 - DNA, 120 bp, Artificial Sequence
  ENSG00000268416_4 (sequence is synthesized)
cccattctttgttttgtggtgtgcatgtggtgtgagcttggtgttttgtcttgaggaaacatggatcagacacaaaataagcctactcctctaggaactatgttgaaaaattttaagaag

SEQ ID NO: 803224 - DNA, 79 bp, Artificial Sequence
  ENSG00000268416_5 (sequence is synthesized)
gcctactcctctaggaactatgttgaaaaattttaagaagggatttaatggagactatggggttactatgacaccaggg

SEQ ID NO: 803225 - DNA, 120 bp, Artificial Sequence
  ENSG00000268416_6 (sequence is synthesized)
gtttctaaggtatggcacaaggtaactagtaagtcaggacactcagaccagtttccatacatagacacttggttacagctggtgctagaccccccacagtggctaagagggcaggcagca

SEQ ID NO: 803226 - DNA, 120 bp, Artificial Sequence
  ENSG00000268416_7 (sequence is synthesized)
agcagcagtgctagtagcaaagggacagatagtcaaggaaggattctgctccacccgctgagggaaatcaactcctgaagttctgttcgaccaaacatcagaagatccattgcaggagat

SEQ ID NO: 803227 - DNA, 120 bp, Artificial Sequence
  ENSG00000268416_8 (sequence is synthesized)
ccagtgatcccagtgttgccctccccttatcagggagagaggctccccacttttgagtccacagtgcttgcgcctctgccagacaaatgtatccctaggccactcagagtagacaagaga

SEQ ID NO: 803228 - DNA, 120 bp, Artificial Sequence
  ENSG00000268416_9 (sequence is synthesized)
ggaggtgaagcctcgggagaaacccctcccttggcagctcatttaagacccaaaacagggatacaaatgcccctgagagagcagcagtatactggaatagatgaggatgggcacatggtg

SEQ ID NO: 803229 - DNA, 120 bp, Artificial Sequence
  ENSG00000268416_10 (sequence is synthesized)
gagagtcgtgtttttgtgtaccagcccttcacctctgccgaccttctcaactggaaaaacaataccccgtcctatactgaaaagccgcaagctctaattgatttgctccaaactattatc

SEQ ID NO: 803230 - DNA, 120 bp, Artificial Sequence
  ENSG00000268416_11 (sequence is synthesized)
cagacccataaccccacttgggctgattgccaccagttgctcatgttcctctttaaaacagatgaaaggtgaagggtgcttcaagcagcaactaagtggctagaggaacatgcactggct

SEQ ID NO: 803231 - DNA, 120 bp, Artificial Sequence
  ENSG00000268416_12 (sequence is synthesized)
gattaccaaaacccccaagagtatgtaaggacacagttaccaggaaccgacccccagtgggacccaaattaaagagaggatatgcaaaggctaaaccgatacaggaaagctctcttagaa

SEQ ID NO: 803232 - DNA, 73 bp, Artificial Sequence
  ENSG00000268416_13 (sequence is synthesized)
tatgcaaaggctaaaccgatacaggaaagctctcttagaaggattaaagaggagagcccagaaggccacaaac

SEQ ID NO: 803233 - DNA, 120 bp, Artificial Sequence
  ENSG00000268416_14 (sequence is synthesized)
cctttgatcccgatagccctgaaaatcaacgcatgattaacatggctttagttagtcaaagcacagaagacattagaagaaaactgcagaaaaaggctgggtttgcagggatgaacacat

SEQ ID NO: 803234 - DNA, 120 bp, Artificial Sequence
  ENSG00000268416_15 (sequence is synthesized)
acatcacagttattagaaatagccaaccaggtgtttgtaaacagggatgcagcaagccgtaaggaaaaccacatagagaatgaacgtcaggcccggcgaaacgccgacctgttagctgca

SEQ ID NO: 803235 - DNA, 120 bp, Artificial Sequence
  ENSG00000268416_16 (sequence is synthesized)
gcaattagaggggtccccccaaagaggcaagggaaaaggggggccctgggaaagaaactcagcctggctgtcagagcttgcagtgtaatcagtgtgcttatcgtaaagaaataggatatt

SEQ ID NO: 803236 - DNA, 120 bp, Artificial Sequence
  ENSG00000268416_17 (sequence is synthesized)
gtaatcagtgtgcttatcgtaaagaaataggatattggaagaacaaatgccctcagctaaaaggaaaacaaggtgactcggagcaggaggctccagacaaggaggaaggggccctgctca

SEQ ID NO: 803237 - DNA, 120 bp, Artificial Sequence
  ENSG00000268416_18 (sequence is synthesized)
gctcaaggacctccaaagagcctatggtcaggatgacagttgggggtaaagacattgattttcttgtagataccagtgctgaacattcggtagtaactgcctcagtcgcccccttatcca

SEQ ID NO: 803238 - DNA, 120 bp, Artificial Sequence
  ENSG00000268416_19 (sequence is synthesized)
aaaagactattgacatcatcggagccatgggagtttcagcaaaacaagctttctgcttgccccagacttgtactataggaggacataaagtgattcatcagtttttgtacatgcctgatt

SEQ ID NO: 803239 - DNA, 120 bp, Artificial Sequence
  ENSG00000268416_20 (sequence is synthesized)
gtcccttgcccttgttgggaagagacttgcttagcaaactgagagccactatctcttttacagagcacggctctttgctgctaaagttacccggaacaggagtcattatgacccttatgc

SEQ ID NO: 803240 - DNA, 120 bp, Artificial Sequence
  ENSG00000268416_21 (sequence is synthesized)
tcccccgagaggaggaatggagacttttcttaactgagccgggccaagagataagaccagctctggctaagcggtggccaagagtgtgggcggaagacaaccctccagggttggcagtca

SEQ ID NO: 803241 - DNA, 120 bp, Artificial Sequence
  ENSG00000268416_22 (sequence is synthesized)
accaagcccccgtgcttatagaagttaagcctggggtccagccggttaggcaaaaacagtacccggtcctcagagaagctcttgaaggtatccaggtccatctcaagtgcctaagaacct

SEQ ID NO: 803242 - DNA, 120 bp, Artificial Sequence
  ENSG00000268416_23 (sequence is synthesized)
ctcccctcctgcctgttcccaagcctgggaccaaggactacaggccggtacaggatttgcgcttggttaatcaggctacagtgactttacatccaacagtacctaacctgtacacattgc

SEQ ID NO: 803243 - DNA, 75 bp, Artificial Sequence
  ENSG00000268416_24 (sequence is synthesized)
ccggtacaggatttgcgcttggttaatcaggctacagtgactttacatccaacagtacctaacctgtacacattg

SEQ ID NO: 803244 - DNA, 120 bp, Artificial Sequence
  ENSG00000268416_25 (sequence is synthesized)
gacagaagctgtttgcctttcagtgggaagatccagagtcaggtgtcactactcaatacacttggacccagcttccccaaaggttcaagaactcccccaccatctttggggaggcgttgg

SEQ ID NO: 803245 - DNA, 120 bp, Artificial Sequence
  ENSG00000268416_26 (sequence is synthesized)
gtttcccaccagagacctaggctgcgtgttgctccagtacgttgatgaccttttgctgggacaccccacggcagtcgggtgcgccaagggaacagatgctctactccggcacctggagga

SEQ ID NO: 803246 - DNA, 120 bp, Artificial Sequence
  ENSG00000268416_27 (sequence is synthesized)
ctgtgggtataaggtgtccaagaaaaaaagctcagatctgccgacagcaggtatgttacttgggatttactatccaacagggggagcacagcctgggatcagaaagaaagcaggtcattt

SEQ ID NO: 803247 - DNA, 120 bp, Artificial Sequence
  ENSG00000268416_28 (sequence is synthesized)
ctgggatcagaaagaaagcaggtcatttgtaatctaccggagcctaagaccagaaggcaggtgagagaattcttaggggctgtgggtttttgcagactgtggatcccaaactttgcagta

SEQ ID NO: 803248 - DNA, 120 bp, Artificial Sequence
  ENSG00000268416_29 (sequence is synthesized)
ttgtatgaggtcacaaaggcgggggaccaggaaccttttgaatggggatcccagcaacagcaagcctttcatgagttaaaggaaagacttatgtcagtcccagccctggggctacctgat

SEQ ID NO: 803249 - DNA, 120 bp, Artificial Sequence
  ENSG00000268416_30 (sequence is synthesized)
ggaaagacttatgtcagtcccagccctggggctacctgatctgacaaagccttttacattgtatgtgtcagagagtgaaaagatggcagttggagttttaacccaaactgtggggccctg

SEQ ID NO: 803250 - DNA, 89 bp, Artificial Sequence
  ENSG00000268416_31 (sequence is synthesized)
caactgccctgctagtacaagaagcagataagctgattcttgggcaaaacctgaacataaaggacgaggacatcattggctaacgaatg

SEQ ID NO: 803251 - DNA, 120 bp, Artificial Sequence
  ENSG00000268416_32 (sequence is synthesized)
actttaatgaatactagaggacatcattggctaacgaatgctagacttactaagtaccaaagtttgctttgtgaaaatccccatataaccattgaagtttgtaacaccctgaaccccgct

SEQ ID NO: 803252 - DNA, 120 bp, Artificial Sequence
  ENSG00000268416_33 (sequence is synthesized)
gggaactatacgtggatgggagcagctttgtcaacccacaagaagagagatgtgcagggtatgcggtggtaactctggacactgttgctgaagccagatcgtttccccagggcacttcaa

SEQ ID NO: 803253 - DNA, 120 bp, Artificial Sequence
  ENSG00000268416_34 (sequence is synthesized)
ttgctgaagccagatcgtttccccagggcacttcaactcagaaagctgaactcattgctttaattcgggccttagaactcagtgaaggtaagactgtaaacatttacactgactcttgat

SEQ ID NO: 803254 - DNA, 85 bp, Artificial Sequence
  ENSG00000268416_35 (sequence is synthesized)
taaaatatcaacaagaaatcttgcaattattagaagcagtatggaaaccccacaaggtggctgttatacattgcggaggacacca

SEQ ID NO: 803255 - DNA, 120 bp, Artificial Sequence
  ENSG00000268416_36 (sequence is synthesized)
aaccccacaaggtggctgttatacattgcggaggacaccagtgagcttccaccttggtgggtttggggaattcctgcactgacttagaggctcaaaaagcagcatctgcccccttccggg

SEQ ID NO: 803256 - DNA, 120 bp, Artificial Sequence
  ENSG00000268416_37 (sequence is synthesized)
catcagtgacagcccccctgctccctcaagcacctgatcttgtacctacttattctaaagaagaaaaggactttctccaggcagagggaggacaagtgatggaggaaggatggatttggt

SEQ ID NO: 803257 - DNA, 120 bp, Artificial Sequence
  ENSG00000268416_38 (sequence is synthesized)
gagctgcagttgtactggctgtgcataaaaccacccatctaggtcaggaatcacttgaaaagttgttaggctggtatttctacatctcgcatttgtcagcccttgccaaaacagtgacgc

SEQ ID NO: 803258 - DNA, 120 bp, Artificial Sequence
  ENSG00000268416_39 (sequence is synthesized)
tctcgcatttgtcagcccttgccaaaacagtgacgcagcggtgtgttacctgccgacagcataatgcgagacaaggtccagctgttccccctggcatacaagcttatggagcagccccct

SEQ ID NO: 803259 - DNA, 90 bp, Artificial Sequence
  ENSG00000268416_40 (sequence is synthesized)
gtgtacctactctgggcaggtggaggcttatccaacacgaactgagaaagctcatgaagtaactcgtgtgcttcttcgagatcttattcc

SEQ ID NO: 803260 - DNA, 120 bp, Artificial Sequence
  ENSG00000268416_41 (sequence is synthesized)
ctcatgaagtaactcgtgtgcttcttcgagatcttattcctagatttggactgcccttacggattggctcagataatgggctggtgtttgtggctgacttggtacagaagacggcaaagg

SEQ ID NO: 803261 - DNA, 120 bp, Artificial Sequence
  ENSG00000268416_42 (sequence is synthesized)
tattggggatcacatggaaactgcatgctgcctaccagcctcagagttccggaaaggtagagcggatgaatcggactatcaaaaatagtttagggaaagtatgtcaagaaacaggattaa

SEQ ID NO: 803262 - DNA, 73 bp, Artificial Sequence
  ENSG00000268416_43 (sequence is synthesized)
atgtacccccccctcctatattgcggggacttccaggcactccccgagagttaggtgaaattgagttacagcg

SEQ ID NO: 803263 - DNA, 120 bp, Artificial Sequence
  ENSG00000268416_44 (sequence is synthesized)
caggcactccccgagagttaggtgaaattgagttacagcgatagctacaggcttcaggaaaaattacacaaacaatctcggcctgggtaaatgagagatgccctgttaacttattctccc

SEQ ID NO: 803264 - DNA, 120 bp, Artificial Sequence
  ENSG00000268416_45 (sequence is synthesized)
cagttcaccctttctccccaggtgatctagtgtggatcaaggactgaaacgtagcctgtttgtgtccacggtggaaaggaccccagactgtcatcctgagcactcccaccgctgtgaagg

SEQ ID NO: 803265 - DNA, 120 bp, Artificial Sequence
  ENSG00000268416_46 (sequence is synthesized)
tagagggaatcccaacctggatccaccacagccgtgtaaaacctgcagtgcctgaaacctgggaggcaagaccaagcccagaaaacccctgcagagtgaccccgaagaagacaacaagcc

SEQ ID NO: 803266 - DNA, 71 bp, Artificial Sequence
  ENSG00000268416_47 (sequence is synthesized)
cacccggaagctgactggtccacgcacggccgaagcatgcagaagctcatcatgatcttactcaaactggg

SEQ ID NO: 803267 - DNA, 120 bp, Artificial Sequence
  ENSG00000268416_48 (sequence is synthesized)
actcaaactggggactgttcccagtgtattcatcaggtcaccgaggtaggacagcaaattaaaacaatgtttctgttctatagttattataaatgtataggaacattaaaagaaacttgt

SEQ ID NO: 803268 - DNA, 120 bp, Artificial Sequence
  ENSG00000268416_49 (sequence is synthesized)
ttgtataatgctactcagtacaatgtatgtagcccaggaaatgaccgacctgatgtgtgttataacccatctgagcctcctgcaaccaccatttttgaaataagaataagaactggcctt

SEQ ID NO: 803269 - DNA, 120 bp, Artificial Sequence
  ENSG00000268416_50 (sequence is synthesized)
ttcctaggtgatacaagtaaaataataactagaacagaagaaaaagaaatccccaaacaaataactttaagatttgatgcttgtgcagccattaatagtaaaaagctaggaataggatgt

SEQ ID NO: 803270 - DNA, 120 bp, Artificial Sequence
  ENSG00000268416_51 (sequence is synthesized)
gattctcttaactgggaaaggagctacagaataaaaaataaatatgtttgtcatgagtcaggggtttgtgaaaattgtgcctattggccatgtgttatttgggctacttggaaaaagaac

SEQ ID NO: 803271 - DNA, 120 bp, Artificial Sequence
  ENSG00000268416_52 (sequence is synthesized)
ctattggccatgtgttatttgggctacttggaaaaagaacaaaaaggacccggtttatcttcagaagggggaagccaacccctcctgtgctgctggtcactgtaacccactagaactaat

SEQ ID NO: 803272 - DNA, 120 bp, Artificial Sequence
  ENSG00000268416_53 (sequence is synthesized)
cgtgtaaccctggggattgatgggacagggttaaacccccaagttgccattttaattagaggggaggtccacaagtgctctcccaaaccagtatttcaaaccttttataaggagctgaat

SEQ ID NO: 803273 - DNA, 120 bp, Artificial Sequence
  ENSG00000268416_54 (sequence is synthesized)
ttgtttctccaattagcagaaaatgtagctcattcccttaatgttacttcttgttatgtatgcgggggaaccactatcggagaccgatggccttgggaagcccgagagttggtgcctact

SEQ ID NO: 803274 - DNA, 120 bp, Artificial Sequence
  ENSG00000268416_55 (sequence is synthesized)
cgatggccttgggaagcccgagagttggtgcctactgatccagctcctgatataattccagttcagaaaacccaagctagcaacttctgggtcctaaaaacctcaattattggacaatac

SEQ ID NO: 803275 - DNA, 120 bp, Artificial Sequence
  ENSG00000268416_56 (sequence is synthesized)
tgtatagctagagaagggaaagactttatcatccctgtaggaaagcttaattgtataggacagaagttgtataacagtacaacaaagacaattacttggtggggcataaaccacactgaa

SEQ ID NO: 803276 - DNA, 120 bp, Artificial Sequence
  ENSG00000268416_57 (sequence is synthesized)
aagaatccatttagtaaattttcaaaattaaaaactgcttgggctcatccagaatctcatcaggactggatggctcccgctggactatactggatatgtgggcacagagcctacattcgg

SEQ ID NO: 803277 - DNA, 120 bp, Artificial Sequence
  ENSG00000268416_58 (sequence is synthesized)
ttacctaataaataggcaggcagttgtgttattggcactattaagtcgtcctttttcttattacccataaaaacaggtgagaccctaggtttccctgtctatgcctcccgagaaaagaga

SEQ ID NO: 803278 - DNA, 120 bp, Artificial Sequence
  ENSG00000268416_59 (sequence is synthesized)
ggcatagttataggaaactggaaagataatgagtggcgccctgaaaggatcatacagtattatgggcctgccacatgggcacaagacggctcatggggataccgaacccccatttacatg

SEQ ID NO: 803279 - DNA, 120 bp, Artificial Sequence
  ENSG00000268416_60 (sequence is synthesized)
ctcaatcggatcatacggttgcaggccatcttagaaataattactaatgaaactggcagagctttgactgttttagctcggcaggaaacccaaacgaggaatgctatctatcagaataga

SEQ ID NO: 803280 - DNA, 120 bp, Artificial Sequence
  ENSG00000268416_61 (sequence is synthesized)
ctggccttggactacttgctagcagctgaaggaggagtttgtggaaaatttaacttaaccaattactgcctacaaatagatgatcaaggacaggtggttgaaaacatagtcagggacatg

SEQ ID NO: 803281 - DNA, 120 bp, Artificial Sequence
  ENSG00000268416_62 (sequence is synthesized)
acaaaggtggcacatgtgcctgtacaggtttggcacaagtttaatcctgagtctttatttggaaaatggtttccagctataggaggatttaaaaccctcattgtaggtgtattgctagtg

SEQ ID NO: 803282 - DNA, 120 bp, Artificial Sequence
  ENSG00000268416_63 (sequence is synthesized)
ataggaacttgcttgctgctcccctgtgtattacccttgctttttcaaatgataaaatattttgttgttactttagttcatcagaaaacttcagcacatgtgtattatacaaatcactat

SEQ ID NO: 803283 - DNA, 120 bp, Artificial Sequence
  ENSG00000268416_64 (sequence is synthesized)
cgctctatctcacaaagagactaaaaaagtgaggacgagagtaagaactcccactaaaagtgaaaattctcaaagggggggaaatatggtatgaggtcgccacttctcctgttgtccttc

SEQ ID NO: 803284 - DNA, 120 bp, Artificial Sequence
  ENSG00000268416_65 (sequence is synthesized)
tggccctggtggctaaaataataataatattattaacccctgaccaaaactattggtgttatctgtaaattccagacactgtatgagaaaatactgtaaaactttttgttctgttagctg

SEQ ID NO: 803285 - DNA, 86 bp, Artificial Sequence
  ENSG00000268416_66 (sequence is synthesized)
gttagctgatgtatgtagcccccagtcatgtttctcacgcttacttgatctattatgactttttcatgtaagaatttctttttcgg

SEQ ID NO: 803286 - DNA, 120 bp, Artificial Sequence
  ENSG00000204709_0 (sequence is synthesized)
tcagctcccagatggatcctggacaggatgctgcaggtggtgcaggaggggaatcctgccccatttatcatcaacacagtaaaaaggggtcgaagagaccgagagcgccagaggacgcca

SEQ ID NO: 803287 - DNA, 120 bp, Artificial Sequence
  ENSG00000204709_1 (sequence is synthesized)
ccagggccccgtacaggaaggcctttcgcaaagtccagactcaattgccttcgcagcccttaaagtttccttaggaaggtctgtgggagaacgaggttggtttaggaattggcccctgcc

SEQ ID NO: 803288 - DNA, 120 bp, Artificial Sequence
  ENSG00000204709_2 (sequence is synthesized)
ttgtactacgtagttttgtcatccaaagtgttttagaagtgaattgaatcatagttacgccttattttgaaacactgtaattcagagaacgtaaaaccttattaaaatgcctcataatca

SEQ ID NO: 803289 - DNA, 120 bp, Artificial Sequence
  ENSG00000204706_0 (sequence is synthesized)
aaagtacctggacctctatgcccatgcttctagcagccagcctcctaaaatacctctagttgaagccaaagttagaatccttctacgaaactacaggattaaaatggaatggttacatga

SEQ ID NO: 803290 - DNA, 120 bp, Artificial Sequence
  ENSG00000204706_1 (sequence is synthesized)
cagggatacatgcatgagccagctcaggcctaagccacactcatcttgtggatgacactggagctgtgacagtctgttctgtccaggcagggtgtcttttatttttattggaaataagat

SEQ ID NO: 803291 - DNA, 120 bp, Artificial Sequence
  ENSG00000204706_2 (sequence is synthesized)
tatcacagtacgcaaggcccaaacaattggtgataatgaagaaactctactaccagacgttgcgggatgcctcaatgacctaatccagtaaatcacagctccagctgtccatgagctctg

SEQ ID NO: 803292 - DNA, 120 bp, Artificial Sequence
  ENSG00000204706_3 (sequence is synthesized)
ggcttgaccaatcagatcatccaaaccctttgccacagtgattggtccagggatacatgcatgagccagctcagccagacccagagctccaaccctggtgatccagttaagaaggccaca

SEQ ID NO: 803293 - DNA, 120 bp, Artificial Sequence
  ENSG00000204706_4 (sequence is synthesized)
tttacaggaaagaagaaaaactgttgtgcccagttcctggctgttacaccactgagggcttttcttgtctctaacttgcagaagtgcaagtccatttcacttacagattccctcatctgg

SEQ ID NO: 803294 - DNA, 120 bp, Artificial Sequence
  ENSG00000204706_5 (sequence is synthesized)
gactcactggagagagacttctactagaaaaattgccttgatgttaggaattaaaaaaacaaaacaaaacaaaaaacatggagccgtattctccagaagcttacatctgatttaacgaga

SEQ ID NO: 803295 - DNA, 120 bp, Artificial Sequence
  ENSG00000204706_6 (sequence is synthesized)
tgattacctgctctctatttcataaagaggaaaaacagatccagaggaccatttcatgattcatcctttttcaaaacgtttcttaaaacattaaataaagttttattattgtaaactgtt

SEQ ID NO: 803296 - DNA, 120 bp, Artificial Sequence
  ENSG00000204706_7 (sequence is synthesized)
atatcgggggtgcactggcacagaggaaaggccatgtgaagcaagaaggcagccatctgcaagccaaggagagaaatttcagaaggaaccaaccctaccgacatcttgatcttggacttt

SEQ ID NO: 803297 - DNA, 120 bp, Artificial Sequence
  ENSG00000204706_8 (sequence is synthesized)
aagctgccagacctatagcttcacacataaggaaccaccttagcatccttcactcaatgctgaaagtgagcatctggtctgcctttgggccaatgctaaatctcttcaacagcatccttt

SEQ ID NO: 803298 - DNA, 120 bp, Artificial Sequence
  ENSG00000204706_9 (sequence is synthesized)
accgaagcaacattgtcccagaatctgctgaagcagcaagaaaagaggtcagcagtaggaccaagctgcatatcttcttaggcaggagtgcatcactattgaggccaaatggacactcac

SEQ ID NO: 803299 - DNA, 120 bp, Artificial Sequence
  ENSG00000204706_10 (sequence is synthesized)
tagcaaggtggctggaaacaactgttccagaaagaacccaaggaaaaatttccaggaggaacccaaacagaaaaatctattttatacattttctacagaaaatgcaccccatcattgctt

SEQ ID NO: 803300 - DNA, 120 bp, Artificial Sequence
  ENSG00000204706_11 (sequence is synthesized)
atagcccacccacgtggactgctcattctgtgaatcatgttttacaggtgcgttttggctactgaaagcttggagtcaaacctgtatgcctcttcctttgtctgccaatatattttgtat

SEQ ID NO: 803301 - DNA, 120 bp, Artificial Sequence
  ENSG00000204706_12 (sequence is synthesized)
attaggcctcggccctggctccaatttagattaccattttttcccctactttgtccctctctttgaccttttaacttacttctattctttgtgtgcagaactttgtaagccctgttagat

SEQ ID NO: 803302 - DNA, 120 bp, Artificial Sequence
  ENSG00000204706_13 (sequence is synthesized)
ccttgctgcagcaatgtacataagcaatgtaataaacagaaaggatgagatattcaatgcccatatcaaatcatcctgtgtgtgtagaatcacaagtgcatttcattatagacacaagac

SEQ ID NO: 803303 - DNA, 120 bp, Artificial Sequence
  ENSG00000204706_14 (sequence is synthesized)
ataattttgcacatttcaaaatgcagtaaacgattcctagaatgctattttagaagctttccttaggaaacagcaccacgtggcataactcacctaccccagtagtgtgatctccctttg

SEQ ID NO: 803304 - DNA, 120 bp, Artificial Sequence
  ENSG00000204706_15 (sequence is synthesized)
ctgtgtaggaagtgggagtttctcccctcctcctgtgccagctgctccggtttcttttctcctgagtaaatgtacattcatcttgctcgaaagtacactctccaggtggaggtggaagtt

SEQ ID NO: 803305 - DNA, 120 bp, Artificial Sequence
  ENSG00000204706_16 (sequence is synthesized)
tctctgcaagaaaatagcagatgttgcaatcactgagactctttcaatgactctgtgttgctagcagcccactctgcatgtatgaatgttgtctggccatatgccatgcgatggagaggc

SEQ ID NO: 803306 - DNA, 120 bp, Artificial Sequence
  ENSG00000204706_17 (sequence is synthesized)
agcccccactggtggcccacctacacggagccactgcttccagctagaggctgcattccactgcgggtcctgccacagacatagagaacaatcagatatacagatctaaaatactgggct

SEQ ID NO: 803307 - DNA, 120 bp, Artificial Sequence
  ENSG00000204706_18 (sequence is synthesized)
actttgagaaaaaaactttctctgacttgtgaatttttgtgaatttctttttataaagctctggaaattataggtatattgcctttatgaaaatatggaaaataataaaatttcataatg

SEQ ID NO: 803308 - DNA, 120 bp, Artificial Sequence
  ENSG00000204706_19 (sequence is synthesized)
caggcactttcttcagaaatcctggatgagtgaagggtatcctcataacaactccacagttgctttgtaggtaggggagaatgtgagagtgctaaatggactcctggaggcatagctgtg

SEQ ID NO: 803309 - DNA, 120 bp, Artificial Sequence
  ENSG00000204706_20 (sequence is synthesized)
tggaacaaatgacttcacttctctgtgccttagagttcttatctctaatgtgggaatattgatggtagtcacttcatgggtctgtgaggattaaatgagatggtatatgtaaagtgatca

SEQ ID NO: 803310 - DNA, 120 bp, Artificial Sequence
  ENSG00000204706_21 (sequence is synthesized)
tttttaatgtgaagttctcaataattaaattttagaacttattttgccacccagaggtttattttccttttcccaaatccaatgtttatgtctttgaatgctatcttcaataacattcat

SEQ ID NO: 803311 - DNA, 120 bp, Artificial Sequence
  ENSG00000204706_22 (sequence is synthesized)
aattattagaatggtgcttcttcccaatttattggggacttttcctttgactaaacttggttgtacctccctatatccagattcttagccaaatttttctaataaatagcttgtttcata

SEQ ID NO: 803312 - DNA, 120 bp, Artificial Sequence
  ENSG00000204706_23 (sequence is synthesized)
atcagataataatttctgggatagaagcaaagtattggtatttctttaagtctcttgaaggtgattctactgagctgggattaagaacacactgccttaatcctttcatcatcaacaaaa

SEQ ID NO: 803313 - DNA, 120 bp, Artificial Sequence
  ENSG00000204706_24 (sequence is synthesized)
aacatcagaaaatcatcctagatccatacttgtacacaacagtctgtgccagtgagattcattcttttgggagctctgctaataatgcacgaattgctggctgttgatactctttctcat

SEQ ID NO: 803314 - DNA, 120 bp, Artificial Sequence
  ENSG00000204706_25 (sequence is synthesized)
agcccacccacgtggactgctcattctgtgaatcatgttttacagatttgtttatgtggcattcctcgtttgaataaagcagaaccaaatgtcttggtttgaagattgagatgaaatggg

SEQ ID NO: 803315 - DNA, 120 bp, Artificial Sequence
  ENSG00000204706_26 (sequence is synthesized)
agggccacaaatagtaatttatctttgagcatcgtatagataaacatgtaacctgatactaaacaaaagtaaatgctcatggactgtcagtgatgtggtgggatatgccagagggaagtg

SEQ ID NO: 803316 - DNA, 120 bp, Artificial Sequence
  ENSG00000204706_27 (sequence is synthesized)
ctttaacaaggttaaactggattctttaacgtcaaccttactgagagtttctaatatgtcactgtgctttgtgaatcttcatgtgtgtggagtagagatccagtctgccaagttctgcaa

SEQ ID NO: 803317 - DNA, 120 bp, Artificial Sequence
  ENSG00000204706_28 (sequence is synthesized)
taagatgagaagggctgacacaagattctcacctagtgaaaaaaaaatatgtatttatatttttaaaaactggttggatgggggctttctcccaaatacataaatgactttgaagttttt

SEQ ID NO: 803318 - DNA, 120 bp, Artificial Sequence
  ENSG00000204706_29 (sequence is synthesized)
tttttcagtcctatgacagagtaaagatgcagacttaaaaggatttaccatgaagattttaatgactgctgggctgattattaagcctgatcccagtgaaatggaatgcctttagtcatt

SEQ ID NO: 803319 - DNA, 120 bp, Artificial Sequence
  ENSG00000204706_30 (sequence is synthesized)
ttcatttatggactgtttaacgatttttctccaaaagaaatatttaatgaacacaatatcgagttcctcccagtgcttctaattaacagaccactgaacgatctttgttaaaggaaaggc

SEQ ID NO: 803320 - DNA, 120 bp, Artificial Sequence
  ENSG00000204706_31 (sequence is synthesized)
tagcttcaggccagaaggcgttgcaggatctaatatgtatgctaccatgggtgaccaagcataaagataaactaaggatttgaatatataagggctaatgtttgtgtccattgttatgga

SEQ ID NO: 803321 - DNA, 120 bp, Artificial Sequence
  ENSG00000204706_32 (sequence is synthesized)
atttctgacaatcactctctagtctttcctaatatttggcctttaggaaaagtgttttggactgaattgttctctctcctcattatcctccttaatgtgtgaaagtctcaatgtaactgt

SEQ ID NO: 803322 - DNA, 120 bp, Artificial Sequence
  ENSG00000204706_33 (sequence is synthesized)
gccagctgccagaagcttctcactccgtggagaccttggagtcgaggatgaaatgtcttacaactgtggggagaccttggcttttccaaagcctaccagggtccaggacttggaagctaa

SEQ ID NO: 803323 - DNA, 120 bp, Artificial Sequence
  ENSG00000204706_34 (sequence is synthesized)
atgagccagctcaggtaaatgagactcaattataagaattttgttagcgcaattgggaaaaagaagttttctttccatgagaactatcagctataagaatgttggatgcttccatctgct

SEQ ID NO: 803324 - DNA, 120 bp, Artificial Sequence
  ENSG00000204706_35 (sequence is synthesized)
ggagtccatgaagaaggtccatgaaaatgaagccagcacaacaacacagagctaagacatacaaagagatggagattaaattgaatggaacttttaagcccctacatgcccttgaagcca

SEQ ID NO: 803325 - DNA, 120 bp, Artificial Sequence
  ENSG00000204706_36 (sequence is synthesized)
gatatccctgaacttttaatttatattagttgataaagtccttctttagcttaagccaatttgaattagagtatttttcacttggggtccaaaagagctctcaatacaaaagtctgactg

SEQ ID NO: 803326 - DNA, 120 bp, Artificial Sequence
  ENSG00000204706_37 (sequence is synthesized)
agtgcatgatgtgctggtttcaacctcaagggaacagggaaagggaaagaaagaggcagaggttgtgaacaggacagtagaaggtggtcaggagacaaatatctggactcaactttgtcc

SEQ ID NO: 803327 - DNA, 120 bp, Artificial Sequence
  ENSG00000204706_38 (sequence is synthesized)
ctactgtgtggccttgaatagtgagttaaccactccgagcctcagtttccccatctggaaaaaaaagttagtggacagtcactagttctcagacagaactctgtagcagcgagagggtaa

SEQ ID NO: 803328 - DNA, 120 bp, Artificial Sequence
  ENSG00000204706_39 (sequence is synthesized)
tcatataccaggttttcttgtaaggttttgttagaatgggtctcactgttaaaatggattagctgatcatttcagttctatttatattaaagtctaaattgaatcaaggctcagctgggg

SEQ ID NO: 803329 - DNA, 120 bp, Artificial Sequence
  ENSG00000204706_40 (sequence is synthesized)
cccagtaagaatgtagtgcctggttaataatattttctactctatgataggagttggccagaagccaaggtcaaaaactcaatccctggagggtttatttgctttctgcagacataaaaa

SEQ ID NO: 803330 - DNA, 120 bp, Artificial Sequence
  ENSG00000204706_41 (sequence is synthesized)
attgttaataacaatgatctgcatccccaatcttgagagctgtcttagagatgtgggtcattgatcacagaaggggctgggaaaaggaatgtggatgattccaaatagtcattagctctg

SEQ ID NO: 803331 - DNA, 120 bp, Artificial Sequence
  ENSG00000204706_42 (sequence is synthesized)
ccttaaatgccaatacaaacactactgccaatgctcaaggcaagcaacctcttcatagctagaacacagagggtggtgtgcttgaaggcttttgtttctcctcaagacagtgtagaaaaa

SEQ ID NO: 803332 - DNA, 120 bp, Artificial Sequence
  ENSG00000204706_43 (sequence is synthesized)
gctgagaaaacaaagagcacttgtttcacaattaactgcacaacacctgatgtatatccacagtcctctaaattaatatggattcgcttttctttataaagacaacatacacattgtagt

SEQ ID NO: 803333 - DNA, 120 bp, Artificial Sequence
  ENSG00000204706_44 (sequence is synthesized)
ggaaatcggatgggaggataatttttatgaaagcatataacagtatttttataaaatataaattatcattacagtaaaatatattaacttcaaggcaagttttgacactgtatgcaagtt

SEQ ID NO: 803334 - DNA, 120 bp, Artificial Sequence
  ENSG00000204706_45 (sequence is synthesized)
taaagtatttcaaatttttaaaaagtgtatcttaacaaataaattttagcaccaattgccagaattgttgtccaccactatagtcaaaacaattttcttttctttatttcaactaaaaat

SEQ ID NO: 803335 - DNA, 120 bp, Artificial Sequence
  ENSG00000204706_46 (sequence is synthesized)
tgtgaatgggactaaagtctttatgcaaatatatactccaataataatattaatcttgccaacagtagctgaatatttaattaactttaacaaacatgttgaaagataataaactaaaaa

SEQ ID NO: 803336 - DNA, 120 bp, Artificial Sequence
  ENSG00000204706_47 (sequence is synthesized)
aacatgttgaaagataataaactaaaaaaactatttttccttatagtctctgtataactaggtgctttctcattagaaagcttattttttcaaaagtatatataacataggtaatttata

SEQ ID NO: 803337 - DNA, 120 bp, Artificial Sequence
  ENSG00000204706_48 (sequence is synthesized)
cccaggatttggagtcagaagatgctgtcctggtttactctctctgttaaccatgagtcctggggtaatagtgtagctgacagaaagagcctggattttagaatcaggtagctcttactt

SEQ ID NO: 803338 - DNA, 120 bp, Artificial Sequence
  ENSG00000204706_49 (sequence is synthesized)
agaataacaactcagccaatcagtgcatgatttcaggaaatgtaatcaacctcctccaagccttagtttctcaggcgtaaaatggagataataatatgaacctcacagagacgtttgtgt

SEQ ID NO: 803339 - DNA, 120 bp, Artificial Sequence
  ENSG00000204706_50 (sequence is synthesized)
aaatttaataacatcatgcatggaaagtgcccagcacaattcctggtgtagtgtacattctcagtaaagcatggtctcagattttacgtctgtcaaatcattgtaatactatactatcaa

SEQ ID NO: 803340 - DNA, 120 bp, Artificial Sequence
  ENSG00000204706_51 (sequence is synthesized)
aatattttatatttaagtcgtaaatagcagtctcctcaaattctatcattcatgtaccacttttggggttttgccatatctgtgcaccaatggtactaatattacttaatatttttcttt

SEQ ID NO: 803341 - DNA, 120 bp, Artificial Sequence
  ENSG00000204706_52 (sequence is synthesized)
aaaattagcatattatccatgaacttgggagtagttgtactggtgaatctagtatgtttaaaaatcaatacataattattaaaatagaaaactatggccacatgccccctgaaataatct

SEQ ID NO: 803342 - DNA, 120 bp, Artificial Sequence
  ENSG00000204706_53 (sequence is synthesized)
catgaaccaccattgtatgcctactacactttggaaaacactcatttacgtgaaagtttgttattattatattttcaacctttccttttcaggacttggaagctaaggcccagagaggag

SEQ ID NO: 803343 - DNA, 120 bp, Artificial Sequence
  ENSG00000204706_54 (sequence is synthesized)
caaatggaaatgctttcaaccactgcagaagtaaaaaattacccaaaggctgtatgatgcaaactctttctttggctttatcttactgataagaataaaaataacacctcacgtatgtat

SEQ ID NO: 803344 - DNA, 72 bp, Artificial Sequence
  ENSG00000204706_55 (sequence is synthesized)
tctcagtctcccaagtagccgggactacaggtgcctgccatcacgcctggctgctttttgtatgtatagtac

SEQ ID NO: 803345 - DNA, 120 bp, Artificial Sequence
  ENSG00000204706_56 (sequence is synthesized)
acgcctagtcatttattttaagttcccctcaccataaccgatgctccatgtgagacagatgttattattttgctctctgttgagttcccatcacctggcatctgaagatgctcagtagat

SEQ ID NO: 803346 - DNA, 120 bp, Artificial Sequence
  ENSG00000204706_57 (sequence is synthesized)
taagggatttgccaaggcatggggaaaagaggatctttatgtttgaagaatgatagaaaaaataaagctgttcattattacattctaccatgtttagccaattaaacaggttttactgga

SEQ ID NO: 803347 - DNA, 120 bp, Artificial Sequence
  ENSG00000204706_58 (sequence is synthesized)
agcaacagaaaaccaagtgatgaacccacaatgaaaggtcacataatatttggaaagggagcttcactttatatggtatttaacaaaggatgaaaatataagaaaaggctgcattacccg

SEQ ID NO: 803348 - DNA, 120 bp, Artificial Sequence
  ENSG00000204706_59 (sequence is synthesized)
aaaaaacaaaacaaaacaaaaaacatggagccgtattctccagaagcttacatctgatttaacgagacagcaataggaagccaaagggtccctgcagaggagggttgcagcacgataact

SEQ ID NO: 803349 - DNA, 120 bp, Artificial Sequence
  ENSG00000204706_60 (sequence is synthesized)
ctacagctggacagagacagattgcaggggagcaagaatgaatggcaggccagctgccagaagcttctcactccgtggagaccttggagtcgaggatgaaatgtcttacaactgtgggga

SEQ ID NO: 803350 - DNA, 120 bp, Artificial Sequence
  ENSG00000204706_61 (sequence is synthesized)
agaagttgttaaagagagaactcagagcccccatgctccatcctcaaccactggctgacagggaaggactccaagcagacagtgggtgatactgttgctactggtctttgagaactgctg

SEQ ID NO: 803351 - DNA, 120 bp, Artificial Sequence
  ENSG00000204706_62 (sequence is synthesized)
acttacaatgtatggacaggtaaatagggttcattctccagccacctctcatctaccaaagaaagtgcaggctcctgtagcatgtaaaggaggacttggaagctaaggcccagagaggag

SEQ ID NO: 803352 - DNA, 120 bp, Artificial Sequence
  ENSG00000204706_63 (sequence is synthesized)
agggaatggaatgcagtgcctgacctggagctctctggcttctttcagtgagaagtgccatccttctcttcagttacaactcccttctgacatgtgacttattgcttttatacagaatag

SEQ ID NO: 803353 - DNA, 120 bp, Artificial Sequence
  ENSG00000204706_64 (sequence is synthesized)
attgtcataagtggtggattggacaggacttgctttggcttaggagacatattatatccatgcaaaaaaaattttcactgaactatggatcccttaattgctttagctatagaatgagca

SEQ ID NO: 803354 - DNA, 120 bp, Artificial Sequence
  ENSG00000204706_65 (sequence is synthesized)
gcaggtctgaaagaacaaggaattgcctctcttcaaaggcaagtaacttccatgattgacacttttctctcatcagccctccaacagtaattatgccagaaacagacccaaacctgggct

SEQ ID NO: 803355 - DNA, 120 bp, Artificial Sequence
  ENSG00000204706_66 (sequence is synthesized)
agtcacttgtagcaggctttctggacataaggctgtaatcacacctgactttcctttcagataagaagtccagccacttctttaatttatcggattataaggtagaggatatatatattt

SEQ ID NO: 803356 - DNA, 120 bp, Artificial Sequence
  ENSG00000204706_67 (sequence is synthesized)
taagaacatctggcataggcacagtaggtgacgggtaagaattaggtgatttgattgtaattggttagcttccttagatattcccaggaggaagtaatggcctcagggggcctccagaaa

SEQ ID NO: 803357 - DNA, 120 bp, Artificial Sequence
  ENSG00000204706_68 (sequence is synthesized)
aaaaaagatctcatgaaatttctttcgcttagtggattgagcctggggctagctcatatgatgactatgggaccttcaatttgctgaatctatccacaagcttctacactctttgggaga

SEQ ID NO: 803358 - DNA, 120 bp, Artificial Sequence
  ENSG00000204706_69 (sequence is synthesized)
ttggttaaaagtctctcgaagacaccaagacttcaagagaagtcttgagttcttcagagaagtctggagaagactgagaatttgtaaggcagtttcattgtttttgaagggttttttaat

SEQ ID NO: 803359 - DNA, 120 bp, Artificial Sequence
  ENSG00000204706_70 (sequence is synthesized)
atcccctaattttacttgtgttggtctatctgtggaaatgtgtggtatgtacacacacacaaaccatactacagacaaactcataatacgaaacattaaagttttgtttctgctgttctg

SEQ ID NO: 803360 - DNA, 120 bp, Artificial Sequence
  ENSG00000204706_71 (sequence is synthesized)
tcaccaggtaggcagaatagtcttatatagccatttgttgtccagggcaattttgcctattaagtctgtttcctcccagttaaccttccttccatgagcctctgaagcttgatgtctgaa

SEQ ID NO: 803361 - DNA, 120 bp, Artificial Sequence
  ENSG00000204706_72 (sequence is synthesized)
ctcagggatggtttggaaacccctacttaggcagtcttgggtcttctcaaatactgcagtctaataccatgtcctgcctgctctaaaactgactcctgctccttccgtctgtttttccca

SEQ ID NO: 803362 - DNA, 120 bp, Artificial Sequence
  ENSG00000204706_73 (sequence is synthesized)
gtttacagatctggcttgtgtattcactctctacatgtctatgtaagtaaccacattcgcattggctgagaagtcatcacttgcaaaatagtctttattgagttcaagagccaacatgct

SEQ ID NO: 803363 - DNA, 120 bp, Artificial Sequence
  ENSG00000204706_74 (sequence is synthesized)
ctctggtccttctaatccagctgttctcaaccttggctgcacatggaatcactgagggaggccttggtctgcagtaaagcctacacacctccccaggactaagtacggatttctgagtat

SEQ ID NO: 803364 - DNA, 120 bp, Artificial Sequence
  ENSG00000204706_75 (sequence is synthesized)
aatgttcccacactttcattcctgaagttgtgccaatttatgttggtagaaacaatgtattagagcactttccccatcatcataaatacagtgacttggaagctaaggcccagagaggag

SEQ ID NO: 803365 - DNA, 120 bp, Artificial Sequence
  ENSG00000228778_0 (sequence is synthesized)
gtggggaggagtggaaacagtaagaaaggaagctgaggagatgggggaggaggtgaggaagaaaggaagtgggggaagggcagaagggaaaaggggtggcagagtaaaatgggctccgtc

SEQ ID NO: 803366 - DNA, 120 bp, Artificial Sequence
  ENSG00000228778_1 (sequence is synthesized)
agagaggaaggggctacgaggggaaaaaggctagcagtgagggagaggaggaggactgcaggcggaagagcgcgcgcgttttaggatccccgactcagaagctctgcctggcctcaggat

SEQ ID NO: 803367 - DNA, 120 bp, Artificial Sequence
  ENSG00000228778_2 (sequence is synthesized)
gtggcgagcctcaagagacggtttgaaggtgtttgtgccaacgtgacccccggggagatttggaggaagctttctacgtcctaggaggctgagatcccacggagccggtttacggttgag

SEQ ID NO: 803368 - DNA, 120 bp, Artificial Sequence
  ENSG00000228778_3 (sequence is synthesized)
tcgagtagatagcgctggaagagacacgaagaatctctcttgcttcttggaacgcgataaccacatttctttctctgttaccccactactaaaaatcagcaatccgcacagagcaggcag

SEQ ID NO: 803369 - DNA, 120 bp, Artificial Sequence
  ENSG00000228778_4 (sequence is synthesized)
ccgctttggttcgaatgaattaatttgcccaagacagcagccgctcttctgaagtcagattacatttttaaaagtttatacacattgaaatttcgctacagaaagttaaaagcacgctag

SEQ ID NO: 803370 - DNA, 120 bp, Artificial Sequence
  ENSG00000228778_5 (sequence is synthesized)
caacaacaaaaaaagttaaggaatgcattcagaattccaatttaatcctcaagttaaaactgctcactgcacgcccaaatagcacacgcaaacagtacaaataaatgtctgtatacagga

SEQ ID NO: 803371 - DNA, 120 bp, Artificial Sequence
  ENSG00000228779_0 (sequence is synthesized)
ggcagagggaagtgcccaagcctggggacaaaaatgcctacctgctttcttgtgtgtcaacctcagctacagaaaggagagggcatctttctaacacatcagtgtagggctctaaaaaca

SEQ ID NO: 803372 - DNA, 120 bp, Artificial Sequence
  ENSG00000228779_1 (sequence is synthesized)
caagctaatagaggcaaacctaacaagagaggccctggcagagcctcatgtgtgcctggtgggaggacctgtatgttgtgagctagagagtgcctgcctggccaaggaccccatctggcc

SEQ ID NO: 803373 - DNA, 120 bp, Artificial Sequence
  ENSG00000228779_2 (sequence is synthesized)
taggcccaagtgcagccacaagttgggtacactgctacaaaagtggccaagcctgaggacagtagcagtgccacctgattccccaagatgtcacctgagaattaaaggcagagctggtag

SEQ ID NO: 803374 - DNA, 83 bp, Artificial Sequence
  ENSG00000228779_3 (sequence is synthesized)
gtgggaggatcacttaagcccaggagttcaatcacctgaggtcagggttctccatgttgaccaagctctgttaaaaaaaaaaa

SEQ ID NO: 803375 - DNA, 76 bp, Artificial Sequence
  ENSG00000228779_4 (sequence is synthesized)
acttcgtcatattacccatgctggtctcgaactccggagctcaagcgatctgcctacctcagtctcccaaagtgct

SEQ ID NO: 803376 - DNA, 78 bp, Artificial Sequence
  ENSG00000228779_5 (sequence is synthesized)
gagctcaagcgatctgccatgcgcccagccctgaaccatatcttgatgatgcacctcaaaaaactagccccctctcta

SEQ ID NO: 803377 - DNA, 120 bp, Artificial Sequence
  ENSG00000228775_0 (sequence is synthesized)
actctgaagttccgcgatcttctctttgtgcgcgggcggatggatcaacgccgccaagtgggtaaggtctgaggattgcgtcattaggcgattttgttgctgtacgaacaccacagaatg

SEQ ID NO: 803378 - DNA, 120 bp, Artificial Sequence
  ENSG00000228775_1 (sequence is synthesized)
tactttgacgacctagatggtggagcctggacacacctcggctctgtggtgtggcctgctgcttccaggctgcaaacctgacagcatggggctgtactgaataccgcagaccattgtaat

SEQ ID NO: 803379 - DNA, 120 bp, Artificial Sequence
  ENSG00000228775_2 (sequence is synthesized)
tcatggggaaagcgcgaatgcagtcccccactacaacaaattatgcagtcgagttttccacatttgggaatatcacaggggtcagcacatccggagtgcaatcgatgagccccacgctgg

SEQ ID NO: 803380 - DNA, 120 bp, Artificial Sequence
  ENSG00000228775_3 (sequence is synthesized)
gaaaaaccaccttcgtgatcatggtatcttccctgccagcaacctaatcacagagcctcccagcccgatgctacaaagagccgcatgctgccagtttccttgtgggcagggacctatgta

SEQ ID NO: 803381 - DNA, 120 bp, Artificial Sequence
  ENSG00000228775_4 (sequence is synthesized)
ttataatggtgaatatatttatacttgaatccacagagaagacacagtagactagtcataccattgtgagtagtgctcagattctttcttgaccccccatcatccaaaaatatacctttc

SEQ ID NO: 803382 - DNA, 120 bp, Artificial Sequence
  ENSG00000228775_5 (sequence is synthesized)
cagtgtggcagtcttgaacttttccaaattcagctgctgttggagctcttctgtttttcccagggaaggccggagaactgtatttctggccagagctgctgcagaaggtctctgttcggc

SEQ ID NO: 803383 - DNA, 120 bp, Artificial Sequence
  ENSG00000228775_6 (sequence is synthesized)
atcaggttggatcatgttctgatgatataggaccaagaggaaagaaacagaagcttcactattgggaaaaatcttcccattcaagccaactccaacccagcttctcctggtggattttag

SEQ ID NO: 803384 - DNA, 120 bp, Artificial Sequence
  ENSG00000228775_7 (sequence is synthesized)
agaaaccaatcagcttcattttcaacttcttctatgactccagaggattcactttgcatcttgtgacaaatgaatatattacctgaaaaaaaaatgacaggatagatattgaagaaataa

SEQ ID NO: 803385 - DNA, 120 bp, Artificial Sequence
  ENSG00000228775_8 (sequence is synthesized)
ttttttataggactctggagtgaagggattaatattgaccagagccaatgaggtcatctcatccttgaggggagcaggtgtgagcttcaaatgcttagggcctctggaaggaagcttccc

SEQ ID NO: 803386 - DNA, 120 bp, Artificial Sequence
  ENSG00000228775_9 (sequence is synthesized)
caagaagcgggcagccttgcatctcagggctgagttccctcaactgtgtgcttgagggaagttctccccttgcagacacactgctgagtgataaggaagcacctagactccactctgacc

SEQ ID NO: 803387 - DNA, 120 bp, Artificial Sequence
  ENSG00000228775_10 (sequence is synthesized)
agacttggttctgaggcctatgaaatgttgatgggaagaacagaagcaggaaaatctatctattcaaatttgcaagacgtggaaacttttattcaccttcctggttagactgttcctttg

SEQ ID NO: 803388 - DNA, 120 bp, Artificial Sequence
  ENSG00000228775_11 (sequence is synthesized)
tcaaagtaaagctaaggccatggaaaatgagctatttgagagtttgtcgctccaaggaagaacatgctggcctaattgtcccccaagtcaggagagagaattgtaaaaaacacttaaaca

SEQ ID NO: 803389 - DNA, 120 bp, Artificial Sequence
  ENSG00000228775_12 (sequence is synthesized)
ggcctaagtaaaggtccagcacattatttatttaagactgaattagaactgagtcattccgactctgaaaaaagagtgttgttggattcttatgtatttaatgggtctgccctattgaaa

SEQ ID NO: 803390 - DNA, 120 bp, Artificial Sequence
  ENSG00000228775_13 (sequence is synthesized)
accattgtgaagtatggtttcccaagcaagaaatgacactttcactgtcagtctttctaggagtctggcagaatccaggaccgggattacccttatttatgaagcgaccttagactaaca

SEQ ID NO: 803391 - DNA, 120 bp, Artificial Sequence
  ENSG00000228775_14 (sequence is synthesized)
gtggctctctgggtctccagacaattggccagggactctaaaaaccagaaacaaagttgagagaactccatgctggtggagaaaaacagctggcctttatcaccagaatgtgccccatag

SEQ ID NO: 803392 - DNA, 120 bp, Artificial Sequence
  ENSG00000228775_15 (sequence is synthesized)
aagcagcaaagcagcaagcgacgttcttaaacaagggcctgtgggcctcgtcaagatctggaggaatcatctacgactcactgctgagtgagagggctaggcagtgtctttaaggtcctg

SEQ ID NO: 803393 - DNA, 120 bp, Artificial Sequence
  ENSG00000228775_16 (sequence is synthesized)
ccagctttaacattgtatgctttttcttttgttcaatctctcaccacaactggaagtgttgcctcaactacacaggagaaagtttgcagtaacttagagaaaacattattttaatcacca

SEQ ID NO: 803394 - DNA, 120 bp, Artificial Sequence
  ENSG00000228775_17 (sequence is synthesized)
gtgtatgttctcctgctccctggacaaatccatcagcagcggcaacactgaccaggtccagattggggccgctgcggtggatgtgaatccattgaaactaggggtctccagtgctcctga

SEQ ID NO: 803395 - DNA, 120 bp, Artificial Sequence
  ENSG00000228775_18 (sequence is synthesized)
ggaaaagctttctgagagctcctgaggaacgtccggaaagttacccttgcggatatggtgccatgcagcaccattggtgggcaatgactctgctcctgcagccactgcaattgttaatcc

SEQ ID NO: 803396 - DNA, 120 bp, Artificial Sequence
  ENSG00000228775_19 (sequence is synthesized)
agtgaaactataatgatatttctcagttatcaatgtgatttgcaaaatgaacctagcattttgtagtaagtcattctgagaattcgttttttgtaatgctgattatcatatggaaagtaa

SEQ ID NO: 803397 - DNA, 120 bp, Artificial Sequence
  ENSG00000228775_20 (sequence is synthesized)
aacacatctattacatatgaaacagtgggtagccacacctggaatgcagcacatagttctagttgtcacatctcaaagaaagtataaggggcctagaaaatattcagataaaaattattc

SEQ ID NO: 803398 - DNA, 120 bp, Artificial Sequence
  ENSG00000228775_21 (sequence is synthesized)
atatcagggaagacaatattagaatttctagtcaggaaatatgagggccaagagaatttgtgagcaccacttatgatgtagggaagaatattatgttaatatagtcgttattgctggaat

SEQ ID NO: 803399 - DNA, 120 bp, Artificial Sequence
  ENSG00000228775_22 (sequence is synthesized)
aatagaattatgagtaaccctttcaaaatctcaaataacatagtttgagataagacatatgaaaagaacttctgcttggaagcagaggaatttgaaaatttattgaaagatgacacaggt

SEQ ID NO: 803400 - DNA, 120 bp, Artificial Sequence
  ENSG00000228775_23 (sequence is synthesized)
tgagagtataaatgtgctctagagagggcaaataattccataaggaatagctgtagcacagatgattgagggagataagggaaatttgggggatagctacttgacttatgaagatggtga

SEQ ID NO: 803401 - DNA, 120 bp, Artificial Sequence
  ENSG00000228775_24 (sequence is synthesized)
gaagagaaggcaacctctcacaaaaacacaaacatagtatcttgggacagagaaggattttaaaggcccagtcaacatgattagtcccttgatgcttgaatcctgatattattgggatgt

SEQ ID NO: 803402 - DNA, 120 bp, Artificial Sequence
  ENSG00000228775_25 (sequence is synthesized)
ttggatgttttaaaggcccagtcaatatgatgagtcccctgatgcttgaatcctggtattattgggatgtttggatgttttaaaggcccagtcaatatgatgagtcccctgatgcttgaa

SEQ ID NO: 803403 - DNA, 120 bp, Artificial Sequence
  ENSG00000228775_26 (sequence is synthesized)
tcctggtatcatttggatatcatgttgaaatataatccccagtgctggaggtagggcctggtgggtggcatttggattacagaggtagattccttggtgccatcctcatggtaatgaacc

SEQ ID NO: 803404 - DNA, 120 bp, Artificial Sequence
  ENSG00000228775_27 (sequence is synthesized)
agttctcactttgttagttcacaccagatctggttgtttaaaatgagcctgacacttccttcctgtcttgcttccactgtctcactttttctctcaccatgtaacaagctgccttgtttc

SEQ ID NO: 803405 - DNA, 120 bp, Artificial Sequence
  ENSG00000228775_28 (sequence is synthesized)
tgtccaccttctgccatgactgtcaacttcctgaggccctcaccagaagcagatacaggcaatatgcttactgtacagcctgcagaactgtaagccaaataaacctcttttctttataat

SEQ ID NO: 803406 - DNA, 120 bp, Artificial Sequence
  ENSG00000228775_29 (sequence is synthesized)
gtctgaatgaggatgacaaaagaagcagatacaggcaatatgcttactgtacagcctgcagaactgagttgctgcacagggggaaagcgaagttcccaggagtaagatgtgcaagaagcg

SEQ ID NO: 803407 - DNA, 120 bp, Artificial Sequence
  ENSG00000228775_30 (sequence is synthesized)
gagaagcccctatgagaaggatggaaaactctttgaagaaaaaaacaactattatacaatcaagctgtccctcttctcttccagttatatagccaaaggaaataaaatcactatctcaaa

SEQ ID NO: 803408 - DNA, 120 bp, Artificial Sequence
  ENSG00000228775_31 (sequence is synthesized)
agaaaaataatccttcctccaaatgtgtaccaggacagtatgtctacctgcctgcccctgaaatttatgggtttctaaaataggtcttacccatcttacctgtggttatcttatattagg

SEQ ID NO: 803409 - DNA, 120 bp, Artificial Sequence
  ENSG00000228775_32 (sequence is synthesized)
tgatcaccaaccagttactaagatacctgctgtcacttagaatcctaagttttctttactggtatttccttatattcctcactcttgcttcctttgtttgcgttaactggaattttctct

SEQ ID NO: 803410 - DNA, 120 bp, Artificial Sequence
  ENSG00000228775_33 (sequence is synthesized)
cctgcctgctgagagagtgtacagaagcagccacttgtcagctgcgatgaatccaatgataattacataaatcattaacaatacttgatatttgcccatcacatttctcatttcaaagtg

SEQ ID NO: 803411 - DNA, 120 bp, Artificial Sequence
  ENSG00000228775_34 (sequence is synthesized)
gaaaaagaacgtcccaggtctgttgaagcactaagaaaagcagaaaaagaaaggggagccagggaagggctggcaggctgtgcaatttaagggagcaccagaaaaactggcaatcaaata

SEQ ID NO: 803412 - DNA, 120 bp, Artificial Sequence
  ENSG00000228775_35 (sequence is synthesized)
atatattaatgtaatattttaaaaagtaaaaattaatgcaggaaatccgggaggaacaaaataagagtcatgtgtaccttaacaacagggtaaggtctgaggattgcgtcattaggcgat

SEQ ID NO: 803413 - DNA, 120 bp, Artificial Sequence
  ENSG00000228775_36 (sequence is synthesized)
gatcatgtggtcatcttctgcccatgaggaatagtaacgtaccacatgggggtgatgcccaagcactgcgtgagcataaacttcatgcaaagccgaattcctatgagacagaaaagcatt

SEQ ID NO: 803414 - DNA, 120 bp, Artificial Sequence
  ENSG00000228775_37 (sequence is synthesized)
gaggaataaaaacatcaatcaagataatgcacacaaaaatgtttcttaaaaatatgaggctttactagcaatggcagaatatttattgagagctcactgcttgcttactattttatctca

SEQ ID NO: 803415 - DNA, 120 bp, Artificial Sequence
  ENSG00000228775_38 (sequence is synthesized)
tgcagaggaaagaaatgaaaactgagctccacctggggcaggaggattgtccatgtctggtagcaccagttgtccacacctttgatttgtttttaatcatattttggagctggctggcta

SEQ ID NO: 803416 - DNA, 120 bp, Artificial Sequence
  ENSG00000228775_39 (sequence is synthesized)
ctagtctattgccttagttttaaagcagaaaaaactaagactctcgataaaaattatccaaattactggaatggacaagaccaaaacccagtttgcccaactcttactccagtttacttt

SEQ ID NO: 803417 - DNA, 120 bp, Artificial Sequence
  ENSG00000228775_40 (sequence is synthesized)
ctaccacatcatgttgctttttcacttagtattaataacccaacatgacagtattcctgaagcatttattttaaggtagacgatgtaacctatcatgatttgaatatagtagaaaatacc

SEQ ID NO: 803418 - DNA, 120 bp, Artificial Sequence
  ENSG00000228775_41 (sequence is synthesized)
taattatatacagcaactgaaactgtcatataatgaagaaaacactgaaccaaattcagaccaaattcagagccaactccaccatttgttgtataaactttgctgaagctccatttccct

SEQ ID NO: 803419 - DNA, 120 bp, Artificial Sequence
  ENSG00000228775_42 (sequence is synthesized)
tacctgaaatttgggataattatattcactttcttgaactatttttagaatttaacaaaattaatatatgtcttatctagtacagggccagcatttaggtactgaaatatcaactaaatg

SEQ ID NO: 803420 - DNA, 120 bp, Artificial Sequence
  ENSG00000228775_43 (sequence is synthesized)
caaaagtggtttacatatggaaataggtgattagactgaacaaaaggaaggaggaagagtttgcctcctttcaggaaagcaaaagaagtcaggaagaaggacagatttgtaaatacattt

SEQ ID NO: 803421 - DNA, 85 bp, Artificial Sequence
  ENSG00000228775_44 (sequence is synthesized)
aaaagaagtcaggaagaaggacagatttgtaaatacatttgaagtttgcaggtaaactgtgaaactaatctcccacacctgcagt

SEQ ID NO: 803422 - DNA, 84 bp, Artificial Sequence
  ENSG00000228775_45 (sequence is synthesized)
cctaatctccaaggaagtagatatttctaaggctgttttgggaatcctagccaatcctgttccttaagacatgatttaaagtca

SEQ ID NO: 803423 - DNA, 120 bp, Artificial Sequence
  ENSG00000228775_46 (sequence is synthesized)
tcctagccaatcctgttccttaagacatgatttaaagtcatatatacacttttcttgacatgattaagcttcttgacagtataagctttttgtttctatttcaacatagtatcttccttt

SEQ ID NO: 803424 - DNA, 120 bp, Artificial Sequence
  ENSG00000228775_47 (sequence is synthesized)
tcttgtccccacactactcagatgtcattaagaacaagtaaaacatagatttttgaattgacattatgccttttttctaatagctcaaataattggtattatcaattatcaataaagtag

SEQ ID NO: 803425 - DNA, 120 bp, Artificial Sequence
  ENSG00000228775_48 (sequence is synthesized)
agctcgccagaggaaaaaggaaacagaaactccgcaacttgcgccttggaaatactgccggctagcgctgcgggaaacggctccccttaactctgaagttccgcgatcttctctttgtgc

SEQ ID NO: 803426 - DNA, 120 bp, Artificial Sequence
  ENSG00000228775_49 (sequence is synthesized)
gtaaataaagcctggaggctgctttaaagcctaggagtctgttattaaccctttcctcctttttgtttaactttttctcatggaaatgttcaaacataccaaaaatagagaaaatactat

SEQ ID NO: 803427 - DNA, 120 bp, Artificial Sequence
  ENSG00000228775_50 (sequence is synthesized)
aatgagtccttatgtatccataacctagcttcaaaaattatgtatggctttacagtcttgtttagttcataactgcaacttcattgagggtgagtgctggggtattgtgaagcaaatcag

SEQ ID NO: 803428 - DNA, 120 bp, Artificial Sequence
  ENSG00000228775_51 (sequence is synthesized)
tgacaacatattttacccatggatactttagtgccattaataaaaacccctaggttattctattaatttgaaatctactataaatctatctgatgaataaatcaaacagattttaacaaa

SEQ ID NO: 803429 - DNA, 120 bp, Artificial Sequence
  ENSG00000228777_0 (sequence is synthesized)
catggccagttgaaaggagagcaggagaagttcagagggagagagagattgactctgtttactataacaagggctttgggaattatgagccaggaactgtagaccaaaacctactataaa

SEQ ID NO: 803430 - DNA, 120 bp, Artificial Sequence
  ENSG00000228777_1 (sequence is synthesized)
ctccaagagggagaggaccacagaaatggagcatacttttgcattttaacacaggtcttcaataccttagcccagtggggtttgtaataagataagaatgaccagaccatgcaggccctt

SEQ ID NO: 803431 - DNA, 120 bp, Artificial Sequence
  ENSG00000228777_2 (sequence is synthesized)
tgttggggtttatttctgctgccaaggtctaaaacagctatgaagttgtgtcttactatttcttccagtggcctgcaatccactggaaaccatttcctctgttgtccagcaagcagttta

SEQ ID NO: 803432 - DNA, 120 bp, Artificial Sequence
  ENSG00000228777_3 (sequence is synthesized)
attgagtactgcagtactcttcttgaggcagtacaagttggggaataaactcaagtaaggggtcatgtcctgtttagaagaaacaatcattttaagagtaaagaatttgttttgactact

SEQ ID NO: 803433 - DNA, 120 bp, Artificial Sequence
  ENSG00000228777_4 (sequence is synthesized)
agagggagagagagattgactctgtttactataacaagggctttgggaattatgagccaggaactgtagaccaaaaccttacaaatattgagtggaaatactggtttgcatgactataaa

SEQ ID NO: 803434 - DNA, 120 bp, Artificial Sequence
  ENSG00000228772_0 (sequence is synthesized)
gtttcacaaatgagcagatcaagggttctccaggaagacctgccatgcatagacacctctacattagtgcagtcaaggatcaggaaacccctttctaatttgagcaacacacatatgaag

SEQ ID NO: 803435 - DNA, 120 bp, Artificial Sequence
  ENSG00000228772_1 (sequence is synthesized)
gaataatccgatgtactgctgcaaagtgtcttcagccaatttagacaagaacaactcttaaattatttttggtgaagaaagttaatcactgaacaatttgaggtgaatggaagttcgcta

SEQ ID NO: 803436 - DNA, 120 bp, Artificial Sequence
  ENSG00000228772_2 (sequence is synthesized)
ttcctctacaaccttttaccaggttataatgaaattgagtccactgaggaaggaaaaagttagtttcacttgactaagttcccacatggattaagcagcagacccaagaccaagaccaga

SEQ ID NO: 803437 - DNA, 120 bp, Artificial Sequence
  ENSG00000228772_3 (sequence is synthesized)
acatacttggatatgacctatgctattttgaatgaaatttagcaaggaagaactgtccatcaatcattttaaccaagttcaccttttgttgccatttaagtttaattttgtcccaggaaa

SEQ ID NO: 803438 - DNA, 120 bp, Artificial Sequence
  ENSG00000228772_4 (sequence is synthesized)
ttcatagtgagtgattgtgattacattttcctcattttcatgcctctgacattcttgttgaagatgctaatcttgtataaagctgtctttggagttgatgatgctgacacttctcactcc

SEQ ID NO: 803439 - DNA, 120 bp, Artificial Sequence
  ENSG00000228772_5 (sequence is synthesized)
tatgggaaatggagagatgtggtgcataaaatagaataaaatgtattagagcaaaataaaactgctaataagagtaatcactgtaatagattttaaaatcattttaaatctagttttaat

SEQ ID NO: 803440 - DNA, 120 bp, Artificial Sequence
  ENSG00000279261_0 (sequence is synthesized)
ggcgtctggacacccttcatcttttagccgttgccctgttcttggtgaactgcttgttaggaccaaaagtggcccacccctttctctgggacagtgcagagcaccggggccagaggctca

SEQ ID NO: 803441 - DNA, 120 bp, Artificial Sequence
  ENSG00000279261_1 (sequence is synthesized)
aagcacctccaagctgagatcagagactttggatatcgttgatccagaggcttccaaacttttcctggtgattgaattcttaccatgaaatccagtgaggagctccaatgcctcaagcag

SEQ ID NO: 803442 - DNA, 120 bp, Artificial Sequence
  ENSG00000279261_2 (sequence is synthesized)
atggaagaggaactgctcttcttgaaggcagggcagggctctcagagggcaagactcaccccacccctgccacgggctctccagggtaactttggagccccagcactctgtggaatatgg

SEQ ID NO: 803443 - DNA, 120 bp, Artificial Sequence
  ENSG00000279261_3 (sequence is synthesized)
ttcgcagaacacttgcatcctgctgttgggatgcccccaaactataatagcagcatgctcagtctttcaccagaaagaaccatcttatctggaggatggtcaggaaaacaaactcaacag

SEQ ID NO: 803444 - DNA, 120 bp, Artificial Sequence
  ENSG00000279261_4 (sequence is synthesized)
ccagtgcctcccctcagaactctgctcctgaggtctcctttcagtctgcataagtcctcccaacctgggagccccaaagcttctcagcggatccatcccctcttccattctatcccaagg

SEQ ID NO: 803445 - DNA, 120 bp, Artificial Sequence
  ENSG00000279261_5 (sequence is synthesized)
tctcagctgcattctgttctgcttggtcttcctctcctcttcatacagactagaccttcaccccctgcccagtatggcgcgcaaatgccattgagatacatttgttttggtcccaatatc

SEQ ID NO: 803446 - DNA, 120 bp, Artificial Sequence
  ENSG00000279261_6 (sequence is synthesized)
ttttggggctccaaaaagccccagaaagagtaatgccttcagccatggcccatgtgatgacttttcccagagacagccccatgggtcagtgatcgccggtgggaggtctccccagcctcc

SEQ ID NO: 803447 - DNA, 120 bp, Artificial Sequence
  ENSG00000279261_7 (sequence is synthesized)
cttcaagccttcaagtctgtgtagaggcgccttctcttctctgggcattccccgctttgttgcagagaaattattttctactcagcggctttcaggtagagagagaaagtgcatgcggta

SEQ ID NO: 803448 - DNA, 120 bp, Artificial Sequence
  ENSG00000279261_8 (sequence is synthesized)
tgaaggatgtgaagatggagggcttgacgtcgtgggtcatgttttgtggttaattcccccacataacaaaacagtgagcaaatgtttataaacaggaactcagtgtttcagtgatgaaag

SEQ ID NO: 803449 - DNA, 120 bp, Artificial Sequence
  ENSG00000279261_9 (sequence is synthesized)
cctctggcctcgccacactgattgctggtgtgcgcgcacacacacactcacacaccctgtttttcttacacacacacagcttcatggagcagagagctggaaagggtgtccagaatggtg

SEQ ID NO: 803450 - DNA, 120 bp, Artificial Sequence
  ENSG00000279261_10 (sequence is synthesized)
caaactctctccttaagccccagcagcccaacccccccccgcaccagacagcatatcgaaggagtaagctgcaggtcagcctatattttaggcagaaaattaggcaaccttgggagagac

SEQ ID NO: 803451 - DNA, 120 bp, Artificial Sequence
  ENSG00000279261_11 (sequence is synthesized)
cggtttccagcagacacgcacggacgcgatggtgaggttgggctgagacggtccttcctggatgcagtcaccctccccatcccgagttttactccctggggggattgtggtgggtgcctg

SEQ ID NO: 803452 - DNA, 120 bp, Artificial Sequence
  ENSG00000279261_12 (sequence is synthesized)
gcctcctctcccaccagcgcactgccccaagcttgcctaggtagtatcagcactggggtgagggatgcaatgcgggtttatagttggctgtggggacttctgatttctccaccccataga

SEQ ID NO: 803453 - DNA, 120 bp, Artificial Sequence
  ENSG00000279261_13 (sequence is synthesized)
tgataaacgaccgcggggcttcctctcccaggtctttcctcactctccttcgtctttccctctttctccatgggaaaggtagaatgagacttgccaccagggacatccaggcacattcct

SEQ ID NO: 803454 - DNA, 120 bp, Artificial Sequence
  ENSG00000279261_14 (sequence is synthesized)
cttcccaatcagcctctacccattctctttctgtctcgtgtgtatcagtggcattttcttgtgtagcttcccagatttgcaaacccgctccacatcctggacgcagacccccttcgctgg

SEQ ID NO: 803455 - DNA, 120 bp, Artificial Sequence
  ENSG00000279261_15 (sequence is synthesized)
ctctatgaaggcttcacgttcctggggcattcgagacttgactttccagagcaactttggatccaccctgttacccttttttttgttttgttttgttttgagagggagtctcgctgtgtt

SEQ ID NO: 803456 - DNA, 65 bp, Artificial Sequence
  ENSG00000279261_16 (sequence is synthesized)
ttgcctcaatctccccagtacctgggattacaggtagacaccatcacgcctggctaatttttgta

SEQ ID NO: 803457 - DNA, 120 bp, Artificial Sequence
  ENSG00000279261_17 (sequence is synthesized)
tgtgaaccaccgtgcccaacctcccctcgtttttgacctttgtccccaaatgtctttcatccagttactaggacttgtagcctttttgcaaataggtatctgtaagcatagaagaatagg

SEQ ID NO: 803458 - DNA, 120 bp, Artificial Sequence
  ENSG00000279261_18 (sequence is synthesized)
gtgatttgtgaagtgacccttagtggcatctgtggcggtcctactaatcagatttgcagaagaaacacggaaacaaggaaactcctctcttatattaaaataaataaggtttttaatttc

SEQ ID NO: 803459 - DNA, 120 bp, Artificial Sequence
  ENSG00000226647_0 (sequence is synthesized)
caagacaataccaatctcttgacactgaaaaatactgttaagttttagactcaaatctcattcatatgtttaaagttagaaatctaaacattatgaactgtttgacatttaatgaaactg

SEQ ID NO: 803460 - DNA, 120 bp, Artificial Sequence
  ENSG00000226647_1 (sequence is synthesized)
gcttttaatatacatatcttataaaactaatgaaacctcacttcatcttgtaaaagaagatttttttttaagattctttttgctttacggacttacctttggctggatcacccagagtgg

SEQ ID NO: 803461 - DNA, 120 bp, Artificial Sequence
  ENSG00000226647_2 (sequence is synthesized)
taacagcactgctgccaacacggagtccacactgacataccaattttgcctttaaacaaaagattactttgcttcagtctttgaagcaatgaaaaaatgctataatctgtaaggtttttt

SEQ ID NO: 803462 - DNA, 120 bp, Artificial Sequence
  ENSG00000226647_3 (sequence is synthesized)
aaaatgctgagattacaggcatgaggcacaactgcatctggcctaatccataagctttaaaataaatagtctgctcactgtaggtattcggggcacaaagaaaacttatgcaaagcaatc

SEQ ID NO: 803463 - DNA, 120 bp, Artificial Sequence
  ENSG00000226647_4 (sequence is synthesized)
tgtattttgattaatggcccaaacttttcatagaattttaccatttcaatcaacaaaaatgtcaggaaaaccaaactaagcagggtcacagaataattaccttccaagtgactatttcca

SEQ ID NO: 803464 - DNA, 120 bp, Artificial Sequence
  ENSG00000226647_5 (sequence is synthesized)
aggatctgctgcgtctgaaaaattatagctaaaaagtgctaggcttatataccaaaaatgatgggtttacctcttttaaaactaaaacaaaaccatcatagtgtgtaccaagcacctcac

SEQ ID NO: 803465 - DNA, 120 bp, Artificial Sequence
  ENSG00000226647_6 (sequence is synthesized)
ctcatttaagaaaatgtcatttttcaccaaagtcacttgactgtactgaaaaccatgctcagatgaagagtccaagtaagaagtatggaggagtgaaactgccctctggaagagagagtc

SEQ ID NO: 803466 - DNA, 120 bp, Artificial Sequence
  ENSG00000226647_7 (sequence is synthesized)
aaagtgtaatgcttctaaaataaagtctgacaattcagaaagagtgctcaactcaacacatgactagcagcaacatgcttttggtttctagtgcctatcatgctagaatcctcttcttca

SEQ ID NO: 803467 - DNA, 120 bp, Artificial Sequence
  ENSG00000226647_8 (sequence is synthesized)
cattccagtgtgccaactggtggagggagtgcgatagcacacgtgtgcctttcaagtacaggcacagcattcaacaagatgacaaaaaaacaaaagcctacaataattaccttccaagtg

SEQ ID NO: 803468 - DNA, 120 bp, Artificial Sequence
  ENSG00000226647_9 (sequence is synthesized)
caaggacactgtctcaaaaactgtaaaacacaaacaaaaataacgcagctatttaagattccaaaggatggggttaagggagacacactgaatatcactcaaaacatcacctattccttt

SEQ ID NO: 803469 - DNA, 120 bp, Artificial Sequence
  ENSG00000226647_10 (sequence is synthesized)
cctatataactaagaaatatttgtactgtcttaacaaaatttaaaagacctctgatgtaaagaaaataacctaaataaattagaactgaagctgaattacttttagtacaggagctaaaa

SEQ ID NO: 803470 - DNA, 120 bp, Artificial Sequence
  ENSG00000226644_0 (sequence is synthesized)
gggagagtctctgcgtcctccagcccccgcttcccttcatgtcggaggtcctaagcccgcagcgaagtccgcaaagagctttccccgacgcctacgagaccggaagtgcctgggcccagg

SEQ ID NO: 803471 - DNA, 120 bp, Artificial Sequence
  ENSG00000226644_1 (sequence is synthesized)
tggaggaaggacccgcgtggccgcctccgcgctctccctggggtccgtgccccttccggcgtttctcccgcgtccttcaccatggcaactcgggcgtcgggagcgtgggctgcgagccga

SEQ ID NO: 803472 - DNA, 120 bp, Artificial Sequence
  ENSG00000226644_2 (sequence is synthesized)
caccattgaaggagaattagacaaactggagtctactgagatgaggctgttgggaatggccctggtaccacatcctgagcagggatggccgatggaatggggagaagactcaggtggggc

SEQ ID NO: 803473 - DNA, 120 bp, Artificial Sequence
  ENSG00000226644_3 (sequence is synthesized)
ttgagtgtgtcctctgatgactgaagagccttgggagcaagcatccttcctgctactgtgtgtttgctggttccaatgatacataatttgtgcttttcgtaattaaagtattatcctgta

SEQ ID NO: 803474 - DNA, 120 bp, Artificial Sequence
  ENSG00000226645_0 (sequence is synthesized)
ctcgggcaagttatcacaaaacagggagaatcccggcacctaactcggaacggtcacaggctgagatgatattactgtgtgaagtgcgcagagcggtgttgggcacatggtcatcggaac

SEQ ID NO: 803475 - DNA, 120 bp, Artificial Sequence
  ENSG00000226645_1 (sequence is synthesized)
catgactctagggagtagaggctagcgaagtggggtgcaagaggtcatccaaatttcttgaaataccagatctttttacctcatcatatatgttagattgtcagttttatcgttttcttc

SEQ ID NO: 803476 - DNA, 120 bp, Artificial Sequence
  ENSG00000226645_2 (sequence is synthesized)
ccagctttattatttgacaaaaaattatatatattcaaggtgtacaatgtgatgactggatataattatacattgtgtaatgattaccaaaatcaaattaagtaaaacatccttcactaa

SEQ ID NO: 803477 - DNA, 120 bp, Artificial Sequence
  ENSG00000226643_0 (sequence is synthesized)
agtcacagggctcaccagtccctttggcggagtctctgcctcaattcttgacttgtaataatgtaatgatggctatcagggttggaacagcaagcacgataccagcactttaggaagatt

SEQ ID NO: 803478 - DNA, 120 bp, Artificial Sequence
  ENSG00000226643_1 (sequence is synthesized)
aagttaatgaataatgtgaagaaatgtcacacatgtccagtgagaagaaatgatgtgtgctacaggacttcaactgaggaagggatgcctgcgtggtcagaggaggctcatggaaaaggt

SEQ ID NO: 803479 - DNA, 120 bp, Artificial Sequence
  ENSG00000226640_0 (sequence is synthesized)
tcatgtgacatgcctgcttcccctttgccttccaccgcaattgtaaggttcccgaggcccttgccagaaaccaagcaggtgttggcgccatgcttgtacagcctgcagaaccgctcccac

SEQ ID NO: 803480 - DNA, 120 bp, Artificial Sequence
  ENSG00000226640_1 (sequence is synthesized)
tgcacttgactggtcatttgtcatccttataatgtgcagagtgccttggactgacaaactgaaatacattttgattaggcaacatgagcagaaggagtgtggggagaggactgtataaat

SEQ ID NO: 803481 - DNA, 120 bp, Artificial Sequence
  ENSG00000226640_2 (sequence is synthesized)
ctgttttactcaaccttgaagaaatgttaagtgttaattccctgcgtcaaataaagtacaccaagtatatatgcagcgttcctgagagcttcctaatgaactgaaaaaacaaacaatctg

SEQ ID NO: 803482 - DNA, 120 bp, Artificial Sequence
  ENSG00000275710_0 (sequence is synthesized)
agtcaatttggaacaatggaaaatgccatgttttattagaatcatagtgttaaaattagtcctctgacagtttaagtgatgaaagaaaggaatttacattaataaagtaatcttttaatg

SEQ ID NO: 803483 - DNA, 120 bp, Artificial Sequence
  ENSG00000226648_0 (sequence is synthesized)
acgtgaggggatggcgcgtcctccgggaatgcccggccaaactcagttacctgggcgggcttcccggacaagggagccaggacgggccgcctcacaccggcggcggcgggtcctccgcgc

SEQ ID NO: 803484 - DNA, 120 bp, Artificial Sequence
  ENSG00000226648_1 (sequence is synthesized)
gccctctcccgggaggggcgggggcggggctgcctgcggattggtcgcgggcactgatggacagccgacatgtcccgcccccccggcagcgcggggctggtccgcaggcagttctggcga

SEQ ID NO: 803485 - DNA, 120 bp, Artificial Sequence
  ENSG00000226648_2 (sequence is synthesized)
cggccagacccacgtctgtctgttccgcccctgctgccagggtggctttcagtggtcctctctttcggagagttccccccaagcgtgagcaccccttacaggggcgttaggtccgcggcc

SEQ ID NO: 803486 - DNA, 120 bp, Artificial Sequence
  ENSG00000226648_3 (sequence is synthesized)
gcgctgtccagtggtctgacctgcagctcccagggcctttgtgtctgtccctcgcatgggcctctgcacgctccgtccccacgcgacaggactcgagtccgattcggggctccgactcag

SEQ ID NO: 803487 - DNA, 120 bp, Artificial Sequence
  ENSG00000226648_4 (sequence is synthesized)
accctaccccgcagcgccctcctgcaaatgctctcctgaactttggttttccccgccttgctttcttcctcctcctgtagccgctgcctctcgatctcagaagcttctcttcctctgcac

SEQ ID NO: 803488 - DNA, 120 bp, Artificial Sequence
  ENSG00000226648_5 (sequence is synthesized)
tcagtgctaggccagatcccaaggcgacctgacctttcccctggctttgcccaacaacacaggcaccggtgactccaaacctgcatctcccctacgttccaggccccagcatcccactgc

SEQ ID NO: 803489 - DNA, 120 bp, Artificial Sequence
  ENSG00000226648_6 (sequence is synthesized)
atgttccacatcccccccccttagacagctcgccttccctccccaaacgattccttccacagtcttcactttctcagaacgcggcgctaaacttctctaagttggaaggtcaaaaacctt

SEQ ID NO: 803490 - DNA, 120 bp, Artificial Sequence
  ENSG00000226648_7 (sequence is synthesized)
gcagctaactttgattcctccctttgcctcacctccaatccatcaagaccttgtcactcagcccacaagctgaaggccccatctcctgtcacccagactactcaccttgtttggttttgc

SEQ ID NO: 803491 - DNA, 120 bp, Artificial Sequence
  ENSG00000226648_8 (sequence is synthesized)
ctggatctatcagtttggttttgcctggatttatcatgctttaaatctttaaaatgaaattaaatcatgatcccctacatccaggctaaaaccctccgtgaattcccattgcacctaaaa

SEQ ID NO: 803492 - DNA, 120 bp, Artificial Sequence
  ENSG00000226648_9 (sequence is synthesized)
tccacactccctgcttggcctagcaggttctatatgacctgcccatctcaccagtttcatctctcacaagtgatccttcactctccattctccagccacaaggcctttttctggttatgg

SEQ ID NO: 803493 - DNA, 120 bp, Artificial Sequence
  ENSG00000226648_10 (sequence is synthesized)
aatataattcatactctttgtctttctgaagccattcttgaaactcacccctgcaatctatctacccttgtcagcaccgccaaaattgaggacacccacggtcgcggtggagcctgtctg

SEQ ID NO: 803494 - DNA, 120 bp, Artificial Sequence
  ENSG00000226648_11 (sequence is synthesized)
acatgttgagccaggcagtgggtcggctgccaggcacagcaggacaacttactgcatttcagaggaatgatggtccacaatttactgatgaggaaacagagattcagagaagttctacaa

SEQ ID NO: 803495 - DNA, 120 bp, Artificial Sequence
  ENSG00000226648_12 (sequence is synthesized)
tttgccccaaagccacataacatgactaggtgggaactagaacccaagtcggcctgactccatgagttttctgcctcacaggagatccactggcttagagtttctctctcgtcgcccagg

SEQ ID NO: 803496 - DNA, 120 bp, Artificial Sequence
  ENSG00000226648_13 (sequence is synthesized)
cttggctcactgcaatctccgcctcccgagttcaagcagtcctgcctcagcctcctgagtctcttttgatttggtgctgtcacaggttgggttctttggatgtggactctgtgacaggtt

SEQ ID NO: 803497 - DNA, 120 bp, Artificial Sequence
  ENSG00000226648_14 (sequence is synthesized)
tgtggactctgtgacaggttagtgtgcagtatgtttattggggagtggccctgggatcaacactctgggaggtactggaaagaaacaggagtgggcacagggaaaactaaactgagatgc

SEQ ID NO: 803498 - DNA, 120 bp, Artificial Sequence
  ENSG00000226648_15 (sequence is synthesized)
aggcctgatgacagtctcagccaactcccaggatctctgttgtctggcactagcctggaaaggagttgtaatgtcctgggaagagcctagcctgggccagatggcactctgcagccaaga

SEQ ID NO: 803499 - DNA, 120 bp, Artificial Sequence
  ENSG00000226648_16 (sequence is synthesized)
tgatcttcgaggggctgacagctgaagattttctgctgacagctctcccaatagttgggtcaacaagtccttctttgaaggggatctgggtggcacgttgctatgtctaccacaagtgta

SEQ ID NO: 803500 - DNA, 120 bp, Artificial Sequence
  ENSG00000226648_17 (sequence is synthesized)
ttctttttcagccctttaaaaatgttttgagtacttaaaaatagagaataaaatatagaaataggagatgagattataaggaggaggacgataatatggtttatgggttaatgtagctga

SEQ ID NO: 803501 - DNA, 120 bp, Artificial Sequence
  ENSG00000226648_18 (sequence is synthesized)
tgtgattgagaattaaacatggctgagcttcctgatagccaaaacaataacactttctattctgttaactggttctttggagtaaaaaaaatttctggggttaaattataaaagaagttt

SEQ ID NO: 803502 - DNA, 120 bp, Artificial Sequence
  ENSG00000226648_19 (sequence is synthesized)
ctcacctggatacttatttagttgaaatagtggagaatgttctcaactggttaatagcaaatgctgatgccgttttcatttgttccttgtaatggccttgagtgaatatcgagggcataa

SEQ ID NO: 803503 - DNA, 120 bp, Artificial Sequence
  ENSG00000226648_20 (sequence is synthesized)
tatacaagtatagctcagtgaagcccttttcacattagaagggtgcagatttatagtcttgcagtgtctaatttgatccatgtgtaaaacattgtcctttttctttaaaccatttttttt

SEQ ID NO: 803504 - DNA, 120 bp, Artificial Sequence
  ENSG00000226648_21 (sequence is synthesized)
agccactgcacctggcctaaaccattctttaatttttactcagtttctcgtgttagacatctgaacagcccctcctctgggtttgtgagccagcctgcacctcagcacacagccagtact

SEQ ID NO: 803505 - DNA, 120 bp, Artificial Sequence
  ENSG00000226648_22 (sequence is synthesized)
acttgctaagaactaacctcagtgcaccttgaactccacccacaacctgctgtttaggctcctgacccctggcccccaaatctatctgtggctccaacttagtcatcaggcctcacactt

SEQ ID NO: 803506 - DNA, 120 bp, Artificial Sequence
  ENSG00000226648_23 (sequence is synthesized)
cttaggtcatgtccacctgctttcctcctcacctgggttgtgttatctgtccctcaagagcctcgtgttctctctcaaggcaaaatcacacctggctcggctgctcccagggactgctgt

SEQ ID NO: 803507 - DNA, 120 bp, Artificial Sequence
  ENSG00000226648_24 (sequence is synthesized)
ctccattgaccttggtgtatctctgctgattggcccccatagtgggacccagatgttgaggttctccagctgggctgcagatgtatcttcttctgaaaggtggcagggacactgtgactg

SEQ ID NO: 803508 - DNA, 120 bp, Artificial Sequence
  ENSG00000226648_25 (sequence is synthesized)
catcactgaggcaacatatggcaataaaggaagagaaggggaaagcccaggccagggcagacctgcacttttctgtttttctctctcctccttgcaacacgcttcacggatgcatcctct

SEQ ID NO: 803509 - DNA, 120 bp, Artificial Sequence
  ENSG00000226648_26 (sequence is synthesized)
agagcactaagacagcacagctgagtcagaacaagttcccactccagcagtgggtacagaaatgccaacagaccatgacaattcagtgtgatgggggccattggagcactgagaagggac

SEQ ID NO: 803510 - DNA, 120 bp, Artificial Sequence
  ENSG00000226648_27 (sequence is synthesized)
acttggctttactgaaacctgttagtgtctgtggagatagagcaaagtgagagactgtatatgcctgaaagagatggccactccagatacaaggcaaacactcattttcatcatagggtc

SEQ ID NO: 803511 - DNA, 120 bp, Artificial Sequence
  ENSG00000226648_28 (sequence is synthesized)
actccaagttgttttgtgggttgttttttttttgcaactaaaatataaactttttagagatgcaaatgtccacatataatagtttatttagctacaggtacatactttaaatcacatatt

SEQ ID NO: 803512 - DNA, 120 bp, Artificial Sequence
  ENSG00000226648_29 (sequence is synthesized)
taaaacaatatattgattcacgaacattgattttccccacactcacattttcagtaaactatattcaactcttcacatgaatcttggatttctgtattttcaccatgagtcgctttttga

SEQ ID NO: 803513 - DNA, 120 bp, Artificial Sequence
  ENSG00000226648_30 (sequence is synthesized)
ttttcaccatgagtcgctttttgagtcatctaatagaatctctcaaagcatatcatcactttccctcccttctaagttgagagagagagcaaacaacttttttttttttttgagacggag

SEQ ID NO: 803514 - DNA, 120 bp, Artificial Sequence
  ENSG00000226648_31 (sequence is synthesized)
gcccggccaactttttttacttagattttttttttacttaaaaaataatttttgttgaggaataatttacatataaaatacatccatttttaagtgtaaaatttgtgctttgacaaatgt

SEQ ID NO: 803515 - DNA, 120 bp, Artificial Sequence
  ENSG00000226648_32 (sequence is synthesized)
ataccctcatgtaacctccacccaatcaagatagagaatatttccaccaccccaaaatgtttcctggtgcgccttcgcagtcagtctcctctgtccccatccagcaaccactgattgact

SEQ ID NO: 803516 - DNA, 120 bp, Artificial Sequence
  ENSG00000226648_33 (sequence is synthesized)
ttctgtcactacggattagtgttgcctattctggaatttcacataaatggaatcatacagtatgtactcttgtgtctgcgttcagcataatgttatttagattcatccatgttgctgcaa

SEQ ID NO: 803517 - DNA, 120 bp, Artificial Sequence
  ENSG00000226648_34 (sequence is synthesized)
agggaatactttctgaattagtatgtgatgttatcactgaaaattgtaacctaagcataattaccttttagtataacattaagatgttgcttttcccccctcaattcctctatggatata

SEQ ID NO: 803518 - DNA, 120 bp, Artificial Sequence
  ENSG00000226648_35 (sequence is synthesized)
tactaataatcttcaaaataaccagttactgtattgctttaaacatgttatgaaaaatctctgctgggcatggtagctcacacctataatatcagtatctggggaggctgagacaggaag

SEQ ID NO: 803519 - DNA, 120 bp, Artificial Sequence
  ENSG00000226648_36 (sequence is synthesized)
ggagaccagcctgggcaacatagtgaggccttgtctctaaaaatataaaaataaaaaaattagccaggcatggtagcatgcacctgtagtctcagctcttcaggaagttgaagtcggagg

SEQ ID NO: 803520 - DNA, 120 bp, Artificial Sequence
  ENSG00000226648_37 (sequence is synthesized)
attgtttgagcccaggagttcaaggctatagtgagctatgatcacaccagtgtactccagcctgggcaacagaggtgagaccctgtgtctaaataaaaaagacatttttaaagaaaaatc

SEQ ID NO: 803521 - DNA, 80 bp, Artificial Sequence
  ENSG00000226648_38 (sequence is synthesized)
cctgggcaacagaggtgagaccctgtgtctaaataaaaaagacatttttaaagaaaaatcttggccaggtacggtggctg

SEQ ID NO: 803522 - DNA, 120 bp, Artificial Sequence
  ENSG00000226648_39 (sequence is synthesized)
gaggatagtgaaataagatgccccaaagtgtgaaagtggtgatgttggcaatttggatatgccatacagaagctgcacagagtgctttaaatgaaaaggtggaaattatcgacttaataa

SEQ ID NO: 803523 - DNA, 120 bp, Artificial Sequence
  ENSG00000226648_40 (sequence is synthesized)
aaaaaactgtatggtgaagttgctaagatctaaggcagcctgtagaagaaaaatgacatcccagctggataccagaaagatccttcagtaatgaggatggccaaggctggaagatggaga

SEQ ID NO: 803524 - DNA, 120 bp, Artificial Sequence
  ENSG00000226648_41 (sequence is synthesized)
tggatgagcatcacaagattccagagtaaaatagatcaaagagcagggaggtacatggccaatatgatttcatctgtcttaaatccttaatatccagtagccactgtgggacaggtctgc

SEQ ID NO: 803525 - DNA, 120 bp, Artificial Sequence
  ENSG00000226648_42 (sequence is synthesized)
ccatccttaattactatattattggctggagttactgactggtttttaggtcactgaagcaccaagattcctgtacagagctactgagcaaagtacttgttcacaattttcagtctaact

SEQ ID NO: 803526 - DNA, 120 bp, Artificial Sequence
  ENSG00000226648_43 (sequence is synthesized)
aaaacctttaagaaaatttagactttgagaactctaagtctttagcatagaatgatgtgaaattactgatgttaatgttgtgtcataagaaccaagaagaaagttaaatgaaccaatcac

SEQ ID NO: 803527 - DNA, 120 bp, Artificial Sequence
  ENSG00000226648_44 (sequence is synthesized)
aattccagaattctccagaggtttaataaattctgtagtaccagtttctcttccttgctcatctgtttccgagcttccgtctgggctttgaaatactggctcatctgggtaaaatcacat

SEQ ID NO: 803528 - DNA, 120 bp, Artificial Sequence
  ENSG00000226648_45 (sequence is synthesized)
ttgcttaggttggtgataatattcttctcttcattagtcatttcctagtcaaaagaaaatggggagatgaaagaaaaacaacgaaaatacactaataagtccttgggtttctttgcaaat

SEQ ID NO: 803529 - DNA, 120 bp, Artificial Sequence
  ENSG00000226648_46 (sequence is synthesized)
acacccaagcaccattttttcagtcaaaggtttctggaagtagccaatctcaattaatgaattttgaaaaaacaaaaaaatacagttgtattactttattataaaatatgtacttactaa

SEQ ID NO: 803530 - DNA, 120 bp, Artificial Sequence
  ENSG00000226648_47 (sequence is synthesized)
ggagggagtctgggagggcccgaaagtttgcccaagtcgctggggcggccggccggggtgcaagcagtcgggccgggctcccacgacccccgcgcggggcgggcccaggcaggaagtggg

SEQ ID NO: 803531 - DNA, 120 bp, Artificial Sequence
  ENSG00000226648_48 (sequence is synthesized)
ccaggcaggaagtgggcgcacttactggccccctcgatcttgtcggcgccccggctccacgtgatctggcgcgtctccagcttgacctggaaggtcttccgctcgggtcgctgcgacttc

SEQ ID NO: 803532 - DNA, 120 bp, Artificial Sequence
  ENSG00000226648_49 (sequence is synthesized)
tctggaaataacagagcacgaggatagtgaaataagatgtgaggaataatttcacctttcatgaccccaagtggacctatctgctgagcataattttccaagtttccttcttaacagtca

SEQ ID NO: 803533 - DNA, 120 bp, Artificial Sequence
  ENSG00000226648_50 (sequence is synthesized)
atacagtagtcccaccttatgcatggttttacttaccctcagccaactgtcatccgaaaatattcaatacaaaattccagaaataaacattttgtaagttttaaattgcacatcattctg

SEQ ID NO: 803534 - DNA, 120 bp, Artificial Sequence
  ENSG00000226648_51 (sequence is synthesized)
aggagcatgatgaaatctcttgtagtcccacctgggatgcgtgaaccatatatacaacataccatgctgtatatgtcacttgcccatgggtaacctagtagctgccttatttatcaggtt

SEQ ID NO: 803535 - DNA, 120 bp, Artificial Sequence
  ENSG00000226648_52 (sequence is synthesized)
aggattctctcaaataagctgagatggaggtggaggcagaagccaccccgcttagatccagcaggagatggctggcctccaagaagtatgcttgtccctgcagtgttcaatgccctgaac

SEQ ID NO: 803536 - DNA, 120 bp, Artificial Sequence
  ENSG00000226648_53 (sequence is synthesized)
aagctttcttgactacttttagaaaataaactatccacctaggtcttccaggcaaggtctcacaaaaccatctcaagaagacaaggaatccactggagaaggctgcctttgaccacctct

SEQ ID NO: 803537 - DNA, 120 bp, Artificial Sequence
  ENSG00000226648_54 (sequence is synthesized)
cctctttccctaattcaatcacacttcagtaatgggtaaaaatctaatttaactgattgtagatgacattctttggatgactttttaaaactagtaggcccactatattgtctctctaat

SEQ ID NO: 803538 - DNA, 120 bp, Artificial Sequence
  ENSG00000226648_55 (sequence is synthesized)
agcagagtggttgggtggaatcaggatctggattcaagattacaaagttgggggtgagaaggcaaattggattctgttttctagtaactttctcagacgtttgtaatggggaagaggaca

SEQ ID NO: 803539 - DNA, 120 bp, Artificial Sequence
  ENSG00000226648_56 (sequence is synthesized)
tttgccagtattcttacatgactatttcccttctcagtcaatttccaccaagcaaccactgatccttcaatctgattactatcatcatggataaattttgcctagtctagattatataaa

SEQ ID NO: 803540 - DNA, 120 bp, Artificial Sequence
  ENSG00000226648_57 (sequence is synthesized)
tagaatcatacaatatagactcctctgtctgcctttttaacttttttttttccctctgagacagcgtctcgctctgtcaccaggctggagtacagtgatgcaatctcggctcagtgcaac

SEQ ID NO: 803541 - DNA, 88 bp, Artificial Sequence
  ENSG00000226648_58 (sequence is synthesized)
caggctggagtacagtgatgcaatctcggctcagtgcaacctctacccctcaggttcaagcgattcccatgttgcgccaccctcggct

SEQ ID NO: 803542 - DNA, 120 bp, Artificial Sequence
  ENSG00000226648_59 (sequence is synthesized)
tgaagtgatccacccgccttggcctcccagagtgcttggattacaggcatgcaccaaccgcacctggcccttaaccatgtttttaagattcatccatgttgttgaatacataagtagttc

SEQ ID NO: 803543 - DNA, 120 bp, Artificial Sequence
  ENSG00000226648_60 (sequence is synthesized)
tccatgttgttgaatacataagtagttcccttcttaactgctgataaatatagtatattctatgactataccataatgtgttatctattctgggatgtttccagttttgcactcttatga

SEQ ID NO: 803544 - DNA, 120 bp, Artificial Sequence
  ENSG00000226648_61 (sequence is synthesized)
atagagcactgctatgaacattcttgtacaagttttttcatggataaatgtttttatttcacttgaggtaaaaatacctagaactggaattcgtatctccctgtggttaaatcttcactc

SEQ ID NO: 803545 - DNA, 120 bp, Artificial Sequence
  ENSG00000226648_62 (sequence is synthesized)
cactgataattagtgatgtcgagcactctttcatttgcttatttattgaccattcctgtatcttcttttgtatagtatatgttcaagtcttttgctctttttattatgcggatgggatgt

SEQ ID NO: 803546 - DNA, 120 bp, Artificial Sequence
  ENSG00000226648_63 (sequence is synthesized)
ctgtttttttattatggagctacaggaattctttgtatagtctggatataagccctttcagataaacatgttgcaaatattttcttttagtctgtaaattctgtatttattttagcagtg

SEQ ID NO: 803547 - DNA, 120 bp, Artificial Sequence
  ENSG00000226649_0 (sequence is synthesized)
cctggatctactctagatgtacagccctttcagaatctttgaagaagagtgatttgggccagtcagtgggcactggcgccgtcagattgcaggggacctgaggagggagaggaaataaac

SEQ ID NO: 803548 - DNA, 120 bp, Artificial Sequence
  ENSG00000226649_1 (sequence is synthesized)
tgggctaaggggctgttcaggaagaggtgggcgaggaggatccgtggctcgcctggtcacaagcatgttgagatgaatccagcctggtgccacctacagccgtgaaggcccgcggtctga

SEQ ID NO: 803549 - DNA, 120 bp, Artificial Sequence
  ENSG00000226649_2 (sequence is synthesized)
ccctataatgtgctgccttcctgagacggctgcacttctgcaaagccctcgtgccctcatgtcctagccatgaaatcatgcagactttcgatcacaggccttagcagtgagaaacagaaa

SEQ ID NO: 803550 - DNA, 120 bp, Artificial Sequence
  ENSG00000183242_0 (sequence is synthesized)
accctccccccacctccccttcttggccttcgccagtgtgggagcctcgtctcactggagagtccgttcaggcaaggagaagaaccgggggccggagcggagcgtgtttcagaggtgcgt

SEQ ID NO: 803551 - DNA, 120 bp, Artificial Sequence
  ENSG00000183242_1 (sequence is synthesized)
cggcctcctgtacctggctggcccgggctggggctgcaagctttccagccaaacttatgtgaagcaaagtagttgcagtttgacaaagaatggcgtttcaataaatgacatagtaatttt

SEQ ID NO: 803552 - DNA, 120 bp, Artificial Sequence
  ENSG00000183242_2 (sequence is synthesized)
gaactccttaccccagctgcctggctgccctcagcttcccaaagctcaaataagaggggccggcggcgcggggaagaggaggagccaggaggctcggccgctccattcactcagcagccc

SEQ ID NO: 803553 - DNA, 120 bp, Artificial Sequence
  ENSG00000183242_3 (sequence is synthesized)
aagcccggccaggcagcgcgcgctgctccttgggggcgccctcgcagctggggtgagggcgggtccgagggagcgtccctctcggagacaccctcctcttcaacccaacacgcgctctca

SEQ ID NO: 803554 - DNA, 120 bp, Artificial Sequence
  ENSG00000183242_4 (sequence is synthesized)
gctggccggtgtggcacaaccctccccccacctccccttcttggccttcgccagtgtgggagcctcgtctcactggagagtccgttcagcttgcattgcataaacgttgtcgccattaaa

SEQ ID NO: 803555 - DNA, 120 bp, Artificial Sequence
  ENSG00000183242_5 (sequence is synthesized)
ttctggctgcggacccgaagtgtgtgcgggcccaggacttactcgaagggcgcacttcttgggaatgcgcatcccgtaggcgcaggagaccctgaggaatccttgtgggggcggggaggg

SEQ ID NO: 803556 - DNA, 120 bp, Artificial Sequence
  ENSG00000183242_6 (sequence is synthesized)
gaagagcaccggtgcgaaccccggggtgccccctcgcccgacttggacttctccgactaaagaggtgggaggagttccctgcagcctgcggggccaagaagaaagtgctaagctgaggag

SEQ ID NO: 803557 - DNA, 120 bp, Artificial Sequence
  ENSG00000183242_7 (sequence is synthesized)
ccgcagtcggaggaccccagggacccgacaggaagtctccgtacgaccccaacggatccacatgcccggaagcccaggcgacactaagccagcgctggggaactgacgtactcctgcagt

SEQ ID NO: 803558 - DNA, 120 bp, Artificial Sequence
  ENSG00000183242_8 (sequence is synthesized)
cgcagggcgctccatgcctctctgtcctcttctttgttgtgggtaacgttctctgcgggagacctgaggttttccaagggggacatgccagctacactggccttggcgccctgagctaag

SEQ ID NO: 803559 - DNA, 120 bp, Artificial Sequence
  ENSG00000183242_9 (sequence is synthesized)
caccaggactcacagcctagcacgaaggcaggtagcaccttcacccgccgcggacgataggcgctctcctgtacctcctttagctcgcgaggcccgcccttcgcgaggtcccagagaaaa

SEQ ID NO: 803560 - DNA, 120 bp, Artificial Sequence
  ENSG00000183242_10 (sequence is synthesized)
gcaggctgtggaaaactgggcgcccccttctttcacccaccttcttacccctgtcagcgccgagatctgtagcagaggttcctggtctgaaccaccgattggcaaagaaagctgcagatt

SEQ ID NO: 803561 - DNA, 120 bp, Artificial Sequence
  ENSG00000183242_11 (sequence is synthesized)
aaacttctcgttttacagagaaggaaactgaggcccagacagccgaaggagaggcagtctatggagcgcagcggtaaagagcaaggggttggtggccccagaatggaacctcagctctgc

SEQ ID NO: 803562 - DNA, 120 bp, Artificial Sequence
  ENSG00000183242_12 (sequence is synthesized)
caggtaaccaacagctgtgtgaccctagacgagttccgcagtctctctgagcctcagtttccttactggtcaaacgggataatgggatactagcgcccacctcatagagttgttctgagg

SEQ ID NO: 803563 - DNA, 120 bp, Artificial Sequence
  ENSG00000183242_13 (sequence is synthesized)
aggacaggaaacaagttagtggcaacgccgagctgaaacccgggtctctcaacgtccagttggaggttttacccaccacccctctacctcttcagagctaatgggatgcagaggcgagga

SEQ ID NO: 803564 - DNA, 120 bp, Artificial Sequence
  ENSG00000183242_14 (sequence is synthesized)
cagcccctggaaaaccatgtggcgttgatacactggcaaagcgcaggcatcccggcctcgaaggtgcataattattgcaatatgaaaaaatcgaggctgggtaggagcagggcagtgagg

SEQ ID NO: 803565 - DNA, 120 bp, Artificial Sequence
  ENSG00000183242_15 (sequence is synthesized)
atttctcaacccttactttcaccccggcgctgtccactgcatctgacagagcgcggagctgggctgctacagccgcaaccccagggaccagtgcgcacgcctgggccgccctccgggagt

SEQ ID NO: 803566 - DNA, 120 bp, Artificial Sequence
  ENSG00000183242_16 (sequence is synthesized)
cacccagcggccgcggacaactgaataaacaccccaaagcgctgcggtcggtcaagggcggggacagccacactgcgcgcggggcccgcaggccgtaataaagagtggctcgacctcgct

SEQ ID NO: 803567 - DNA, 120 bp, Artificial Sequence
  ENSG00000183242_17 (sequence is synthesized)
gctgcctgtcgcgggagaggaacaagctttcgactagcgcctctccccggggcccgcgccccgagccccacgcgcaagacagcccaacagctgttcctcccctccccgccgactccaact

SEQ ID NO: 803568 - DNA, 120 bp, Artificial Sequence
  ENSG00000183242_18 (sequence is synthesized)
gggcaagggaggggctttgtgataactactcccagcttcttctgatcatttcaaaattaagtcgattttttttaaccagtccccacttactgtcctaactctcctcgctgaccctatctg

SEQ ID NO: 803569 - DNA, 120 bp, Artificial Sequence
  ENSG00000183242_19 (sequence is synthesized)
ggagcccggaaccgttaggtactgccgaatgcggtgcaaaatttccccctctcccccagttcgcagtgcctggagccgctggggttactcgtctgttctgatgccaccgcgagatggtcc

SEQ ID NO: 803570 - DNA, 120 bp, Artificial Sequence
  ENSG00000183242_20 (sequence is synthesized)
ccgagctccccgagagtcctcagtgaaaggattccgcggcactgcctctattattataccgtaaatctttttaaattctggaactaattatatagaggatatgtctcaatttgttctgca

SEQ ID NO: 803571 - DNA, 120 bp, Artificial Sequence
  ENSG00000183242_21 (sequence is synthesized)
ttaatgccacagtggggatggaggccaggccgtggccagagcagatacgtaggcccatgaaattgatgaactgagagttgcttccagtcctgagcgcaccatctggaattccagtctgag

SEQ ID NO: 803572 - DNA, 120 bp, Artificial Sequence
  ENSG00000183242_22 (sequence is synthesized)
gttacaattagaactcctgaccccagattcaactttgcaaacaacaggggaaaaaaatggggaaaagaaaaaccacgagagagggaaaaaaaattattctgcacctgtaaaaaaaaaaaa

SEQ ID NO: 803573 - DNA, 120 bp, Artificial Sequence
  ENSG00000183242_23 (sequence is synthesized)
aaaaaaaaaaaaaaaaagtcacacaatcttaaaatctttccgtcttagacaattctttccaagtatttcttttgtgttttttaacctataaaagataatggaatgttttatagactggat

SEQ ID NO: 803574 - DNA, 120 bp, Artificial Sequence
  ENSG00000183242_24 (sequence is synthesized)
ggattttatctcatcccctttccctctcccaactgccctcagtttaatagttgtcagttttacctcagtgttgaatttaattatataggaacaaaatattcctcagtaaatttgcttgct

SEQ ID NO: 803575 - DNA, 120 bp, Artificial Sequence
  ENSG00000183242_25 (sequence is synthesized)
aaatattctgtcacatttacttcccctttgagaaatggcttaattatagaaatctacctgcatctaggaattttttttcccttttcttttttgaccgccattccagcttaatcgtaagca

SEQ ID NO: 803576 - DNA, 120 bp, Artificial Sequence
  ENSG00000183242_26 (sequence is synthesized)
gagattttatttgtgcagtaattttatttgtgttctaaattcgtttagccaatttcttccttctttctttagtaacaccctgctttattttcctctcactttgaccccctgaagaaaacg

SEQ ID NO: 803577 - DNA, 120 bp, Artificial Sequence
  ENSG00000183242_27 (sequence is synthesized)
aaggaccaagcagtactggagaatctgttaaatttattagcataaatgcttagacaaaacgagatataaatcattcagatgtattaagccataaagtatcccaatgaagtcagtcccttg

SEQ ID NO: 803578 - DNA, 120 bp, Artificial Sequence
  ENSG00000183242_28 (sequence is synthesized)
ccagggtcctggtgtataaatgttcatataaaacaaggtatcagtattatctttcaaactgaatatatgttgtaaaaatatccaaggttgagttaggaatatggggggagggtgcagcag

SEQ ID NO: 803579 - DNA, 120 bp, Artificial Sequence
  ENSG00000183242_29 (sequence is synthesized)
ggcaggaaggggatattctttagaccagtttgttaacatagtggtggctcagaaagtatggtggaaaggaaaaatttcaaccgtttacatttggagtcttcttagataatatgtttttaa

SEQ ID NO: 803580 - DNA, 120 bp, Artificial Sequence
  ENSG00000183242_30 (sequence is synthesized)
ataacggtatgcaggatatatttgagagcaaaggaataagagaaaaaaaagatgactagagggagaaaggcattgatttctgtagaatgcatttgtcccccaaagatcagtttagcttca

SEQ ID NO: 803581 - DNA, 120 bp, Artificial Sequence
  ENSG00000183242_31 (sequence is synthesized)
caaaaatccacccagaggaggcactggctcttcacacagataacggattatccagtagagaagagctacctgggccttcgtctggcaactgggatatgcagccgctggtcagcagaggga

SEQ ID NO: 803582 - DNA, 120 bp, Artificial Sequence
  ENSG00000183242_32 (sequence is synthesized)
tgtgtattcattagcggtggaagacgaggaaagcgcccgggagtgaggaagaggaatggacagaattcctggcagaagcttaccaagacaaaaatcagacacaatgtttaagcagcaatt

SEQ ID NO: 803583 - DNA, 120 bp, Artificial Sequence
  ENSG00000183242_33 (sequence is synthesized)
gctcgtgaagttcataaccatggctctctgtaaatcttggcaaattgggacattctttgctttttggaaatgattgttttcaagactttttttaaaaaatcaagttgtccaccagaaaaa

SEQ ID NO: 803584 - DNA, 120 bp, Artificial Sequence
  ENSG00000183242_34 (sequence is synthesized)
gccttcgccagtgtgggagcctcgtctcactggagagtccgttcaggctctgtcactatttcccattggccaaacgctactggaagtggaaggctaagaagcccgatggtgcaatccata

SEQ ID NO: 803585 - DNA, 120 bp, Artificial Sequence
  ENSG00000183242_35 (sequence is synthesized)
cacgtcagcctctggggccagagtgggatgaaaaaaggctcatgatggagcccgagttatatggcaggagatgatttccacggtctgtgaacactgaagatgagactggcttggggccac

SEQ ID NO: 803586 - DNA, 120 bp, Artificial Sequence
  ENSG00000183242_36 (sequence is synthesized)
gtgccaaactgcacagccagtaagacctgcttccatcgacccacagcagctctgactttttttttttaacaatagagaagaaactaccacagggaagagagagaacaatggcattttgac

SEQ ID NO: 803587 - DNA, 120 bp, Artificial Sequence
  ENSG00000183242_37 (sequence is synthesized)
aaatggaacaaagatagagtgtgactgacaattcaggtcagaaggaaaattaaagcacaggaagactgatgttggtcggcctccttgccaagaagcaaaaactcagggggaggcatccag

SEQ ID NO: 803588 - DNA, 120 bp, Artificial Sequence
  ENSG00000183242_38 (sequence is synthesized)
ccacatgcgaactggctcaacactggccattttgtttgagcaattttgttggatgttttctacaaaagagcactttttctcggacttcaaacattcttatatgcaggatcgacaccacac

SEQ ID NO: 803589 - DNA, 120 bp, Artificial Sequence
  ENSG00000183242_39 (sequence is synthesized)
agggacgttgtgggactccattgagaaatgtggtcctttgtctccctggagatctttgaggacggttcagataaagttgctgccagtggaagcagctaggctcagaaacctccagttgcc

SEQ ID NO: 803590 - DNA, 120 bp, Artificial Sequence
  ENSG00000183242_40 (sequence is synthesized)
ctttctagacttgtaatcctctgaaaaatggaaattaggaagcgttcatttatgaccttgaaaaaaatcgtttacaaaagtatattatatcactaaaatgagctggaaaaagggtttatg

SEQ ID NO: 803591 - DNA, 120 bp, Artificial Sequence
  ENSG00000183242_41 (sequence is synthesized)
tgaaagttcatgtgagaaacacagctattagcacgcatgccattccccaccttgacctcagcaggaatgtgtaaattgtaacatatggaatgtaagccctgtcgagatgtttcataaatc

SEQ ID NO: 803592 - DNA, 120 bp, Artificial Sequence
  ENSG00000183242_42 (sequence is synthesized)
tgcctggcaatgagcatcacaaggccctgcatgagaacaggccccagaaatggagagacaaataaagaaacatcagaaatattaaaatgaggaccaaaaggagtcccagagatggggttt

SEQ ID NO: 803593 - DNA, 120 bp, Artificial Sequence
  ENSG00000239922_0 (sequence is synthesized)
cttctattccacggaggcagacagcgaaaaccatttcataaccatggcaaggcatgagagaagcacagctgcaaagttttggaaaagacctctgcaacaactggaagcacagtgtaccca

SEQ ID NO: 803594 - DNA, 120 bp, Artificial Sequence
  ENSG00000239922_1 (sequence is synthesized)
agtgaatctatgtgcctaacatggcttgcatgctcccagcttctgcacgtgatgcatctgctattaacattcagagattcaccctgaaaatgaaggcaactgtttggagaacaatgtaaa

SEQ ID NO: 803595 - DNA, 120 bp, Artificial Sequence
  ENSG00000239922_2 (sequence is synthesized)
atgatgagaatagaccatcctatgaccccctttttacattaatatttcttaaaatggtaaatcttattgattgcatctatttccaaggaagtagggtttcttaaatgctttatatacaca

SEQ ID NO: 803596 - DNA, 120 bp, Artificial Sequence
  ENSG00000239922_3 (sequence is synthesized)
ggagccagtttttatgaggttatagaggagcagtaaatacagtaagattaataaaacttcgttgttttcacaattgacagaatgatattattgcctatagggtaataacagcttatggga

SEQ ID NO: 803597 - DNA, 120 bp, Artificial Sequence
  ENSG00000239922_4 (sequence is synthesized)
tctagccaaaatggtgttggatttgaattactgggacatagatagctgtttctttatgcatcaatgcattctagcctccacttgcgaaaactccaaaagtatgttgggtaatttaaaaaa

SEQ ID NO: 803598 - DNA, 120 bp, Artificial Sequence
  ENSG00000239922_5 (sequence is synthesized)
ataaggatagtactctacttgcttaatgatttagaatttctttataaaaagtgaactctgaagtcaatatttcactggagagggaaagaataatgattttaattctatgtaattttttta

SEQ ID NO: 803599 - DNA, 120 bp, Artificial Sequence
  ENSG00000239922_6 (sequence is synthesized)
aagcttaaaaacaagttttgaaatgttttatgtactaaatttaatctatgtacatatttacacacacatatatatacatgtgtatatgtgtgcctgcatatatgtgtgtgtatgtgtgat

SEQ ID NO: 803600 - DNA, 120 bp, Artificial Sequence
  ENSG00000239922_7 (sequence is synthesized)
gtgtgtgtgtatataaatgtggcctaaatgttgccaaccaaattttatgagcaataactacatttggaattgtgaaaatatgagccataggattttattcaaaaacagagcagtgagtct

SEQ ID NO: 803601 - DNA, 120 bp, Artificial Sequence
  ENSG00000239922_8 (sequence is synthesized)
ttttaatgtacatctatgaaaagcataccagtagcagtatacaggcatcattagatgacaggtataaaatcctttgggcaagcactgatgcacattaaattcaagtacataatatgtcaa

SEQ ID NO: 803602 - DNA, 120 bp, Artificial Sequence
  ENSG00000239922_9 (sequence is synthesized)
gctctctgttcagccccagtgcagagtgacacagacaggcgacagcgtcgctgagcaccaacttctattccacggaggcagacagcgaaaaccatttcataaccatggcaaggcatgaga

SEQ ID NO: 803603 - DNA, 120 bp, Artificial Sequence
  ENSG00000239922_10 (sequence is synthesized)
gaagcacagggtagctgcaaagttttggaaaagacctctgcaacaactggaagcacagtgtacccaagtggtgggtctcgtctgtggcaatataattttctatctgtccaattgaatatg

SEQ ID NO: 803604 - DNA, 120 bp, Artificial Sequence
  ENSG00000239922_11 (sequence is synthesized)
gctgtaaagggaataaaaccccatgtaatctccagcagtgacaatttaatcagttgtataagggggaaaaaagcagagtcccctcattttcatatttgcatatttgatttttgcattggg

SEQ ID NO: 803605 - DNA, 120 bp, Artificial Sequence
  ENSG00000239922_12 (sequence is synthesized)
gaatagaggttttgtttttctattactttgcattcaattttaatatttaatctttttatgagcaaatttttatagtggtatgtaatactgagtcagacaggtctaaaatagaaaggaaag

SEQ ID NO: 803606 - DNA, 120 bp, Artificial Sequence
  ENSG00000239922_13 (sequence is synthesized)
atgatgatcttttcaaagagattgcatatatatgaatatgtgatctagtgtttacatattcaaattaacctgtttctttgaatatggtctaatgattgaatgatctcccaaacatggcaa

SEQ ID NO: 803607 - DNA, 120 bp, Artificial Sequence
  ENSG00000239922_14 (sequence is synthesized)
ctcctcagggaaatatattgatgcctcagcatatttcctcaaggcctggagagtactagatatgacaaggagtgccttcaagcatggaagccctgctctacctaaacgaaagtcctaggc

SEQ ID NO: 803608 - DNA, 120 bp, Artificial Sequence
  ENSG00000239922_15 (sequence is synthesized)
tttaatcacaaaggctaggttcacactaatgcaattaaccatatgattgctttcgaaggagcctaacctcatcagcatctttcctttaggcaaactgacaatgctggatctagtcaatga

SEQ ID NO: 803609 - DNA, 120 bp, Artificial Sequence
  ENSG00000239922_16 (sequence is synthesized)
ctcaagagaatttgattagctaagaggtacaaggctctgcatatgcagtcacaaatgcacagtaggaatgttcatctccaacctatcatttcacaatcaactataaatttaagcaattaa

SEQ ID NO: 803610 - DNA, 120 bp, Artificial Sequence
  ENSG00000239922_17 (sequence is synthesized)
ggtaaaataattgttccatgaaataattaagagttgacaattatcaggatgaaggtgaagactacatccaaatgaaaatgatctgttttatagtttgtttgtttgtttgtttatttattg

SEQ ID NO: 803611 - DNA, 120 bp, Artificial Sequence
  ENSG00000239922_18 (sequence is synthesized)
ggttgtgtgcttgttttgttttgtttgagggaggatgggagagggccatgatagttaaaactaaaaataagatttacttggagaactgatgaggcacagtggctcactcctgtaatccct

SEQ ID NO: 803612 - DNA, 120 bp, Artificial Sequence
  ENSG00000239922_19 (sequence is synthesized)
aagaacgaagataaaagaagcctttttcctcaagaagattgtaatctagtggtggagctggaaaataaaggaaagcagtggccatgtatgtcatgaggacattccagtaaccccatgtgg

SEQ ID NO: 803613 - DNA, 120 bp, Artificial Sequence
  ENSG00000239922_20 (sequence is synthesized)
accaagtcagcctgccaacaaccactgaaaaactgagccctcctgctgacagccatgtgagaggaacacctgggaagtggatcctccaggcctggtcatacttcagatgactgcagccca

SEQ ID NO: 803614 - DNA, 120 bp, Artificial Sequence
  ENSG00000239922_21 (sequence is synthesized)
agccaacatcttgcttgagtggagcctcatgagtgactcagtcaaaaccacacagctgagatatttccaacccacagatactgagataataaatgtttattgctactaggtttccttcct

SEQ ID NO: 803615 - DNA, 120 bp, Artificial Sequence
  ENSG00000239922_22 (sequence is synthesized)
tccttccttccttcctttttctcttctcttctccttccttccttcctccctccctctcctcctcctccgtcttcttcctcttcctcttcttcctcttccccttccccttcctcttcctcc

SEQ ID NO: 803616 - DNA, 90 bp, Artificial Sequence
  ENSG00000239922_23 (sequence is synthesized)
ctccttctttctttcttaatgaaaatatcaggtgtactatattttacctgccttcatgtatatttgaataattccataataaaacttttt

SEQ ID NO: 803617 - DNA, 120 bp, Artificial Sequence
  ENSG00000239922_24 (sequence is synthesized)
aagacctctgcaacaactggaagcacagtgtacccaagtggggtaaagttagtgagaaggagcacaaagtacatacagtcttattgtctacctggcattttttttcagtgaggaatttta

SEQ ID NO: 803618 - DNA, 120 bp, Artificial Sequence
  ENSG00000239922_25 (sequence is synthesized)
agaagaatataaaagctgaagagtcataatatgctattctttgtatatgaaaatggcagtcctgacctgccattagtcggggcacttatggctgtgatagatttttttgggtccatctgc

SEQ ID NO: 803619 - DNA, 120 bp, Artificial Sequence
  ENSG00000239922_26 (sequence is synthesized)
tcggtgacctcagaacagagcaacgctaatgaggatgaccctgacctcgggagaatagtgttctgaccctctgacccaaacaaaaattagaaaagcttgggcagtacatttaagagtaac

SEQ ID NO: 803620 - DNA, 120 bp, Artificial Sequence
  ENSG00000239922_27 (sequence is synthesized)
tttgggattagttctatgagtataaagataaatgagaaaataaattctactcacaagtagaaagacttaggtaattgtgtaatatttgaaacacaaaacttaaactgaaaactattacac

SEQ ID NO: 803621 - DNA, 120 bp, Artificial Sequence
  ENSG00000239922_28 (sequence is synthesized)
tagtaaattgaattacattatcattccttttaactaacatcagaattacctctcctttgatgtttccttagttaataagaaccaaatcttattataataattaaagctactagaaaatgc

SEQ ID NO: 803622 - DNA, 120 bp, Artificial Sequence
  ENSG00000239922_29 (sequence is synthesized)
tttaagcctttttctttttcaaagatgcatttattaggtctatttgaagaatatactgaaattgtactctctttagaaattttgaaatatcatttttatcaattgatgtatatttagatt

SEQ ID NO: 803623 - DNA, 120 bp, Artificial Sequence
  ENSG00000239921_0 (sequence is synthesized)
gggggacagagtgggtggggaggggagccgccatacagtggccaggaccagctttgcccaagtggtggcaaccgcatgaccacaggaacgatggcgtgagccccgtggcaacctggagga

SEQ ID NO: 803624 - DNA, 120 bp, Artificial Sequence
  ENSG00000239921_1 (sequence is synthesized)
agggccaagccactggtgaatatgctgcaaaaaatatgctggaacttctatgaataccacagggtgtgagaagaaaacattagaacttctattttgtacctgtgttactccacaacaaga

SEQ ID NO: 803625 - DNA, 120 bp, Artificial Sequence
  ENSG00000239921_2 (sequence is synthesized)
aagcaatcagcttgatcaatgcctactgtaaagacggcaccgccctccggaggtcctttctcagccctggtgttcggacagccacatcccctcgcagcagggggaggcctgaagcataga

SEQ ID NO: 803626 - DNA, 120 bp, Artificial Sequence
  ENSG00000239921_3 (sequence is synthesized)
ggggcccatgcaggtctattctgtttcagcgaattgcctgggaaataatccaggatccatttcgtgtggtcatcttgtctccctggtcccctccagcctttcctcatcttttgtgacctg

SEQ ID NO: 803627 - DNA, 120 bp, Artificial Sequence
  ENSG00000239921_4 (sequence is synthesized)
gtcactctggaagggcgctggccagttagtccacaggatgggcctcccctggggcttttctgatgcttccttatgatggcactggcatcctgagggggaggaccacagagaggaggtgct

SEQ ID NO: 803628 - DNA, 120 bp, Artificial Sequence
  ENSG00000239921_5 (sequence is synthesized)
cctcatcacaccacatgggggtccatgcaccagtgccactgctttccagggctcttcaccttcatcactggtggaggtggcgtctgccaagaagcagaaagttgaggcttagaaggtgca

SEQ ID NO: 803629 - DNA, 120 bp, Artificial Sequence
  ENSG00000239921_6 (sequence is synthesized)
agcagctgcataaggaaaagcaggagccagctcgtgcacagtggcctcaagtgtgcactgggcatgttctctgcctcaccatccctgtgtgacagatgaagtctgtctttcagacacttc

SEQ ID NO: 803630 - DNA, 120 bp, Artificial Sequence
  ENSG00000239921_7 (sequence is synthesized)
tgatgaaactgaaaatgccaccagggagaagcagctgaattcagagctgggttttgcactgtgtgcagcctgaaccttccaaagctggcctcagcaatgtctcccttcctgcatgctcct

SEQ ID NO: 803631 - DNA, 120 bp, Artificial Sequence
  ENSG00000239921_8 (sequence is synthesized)
ctgcaatgtgaccctgacactcctccatcaagaggtggggcccaacttccctcttcttgaagctaggttcatctgtgacttcttcaacccataaactttggcaaaagtgatatgctgtga

SEQ ID NO: 803632 - DNA, 120 bp, Artificial Sequence
  ENSG00000239921_9 (sequence is synthesized)
cttctggggtttggttgtgagtgaccaggcagctgctgccttgttcagataacacttgtgctgaggtcgctgagccactgtggaagacatccaagctccataaagacaggtcaagtgcac

SEQ ID NO: 803633 - DNA, 120 bp, Artificial Sequence
  ENSG00000239921_10 (sequence is synthesized)
atgctccagtcaacagcccagctgagccctcagcatacagccaacaccaactgcaagctgagggtgaaacaacttggatgtccatttggatgtcaagctggacttcagatgcctgtggtt

SEQ ID NO: 803634 - DNA, 120 bp, Artificial Sequence
  ENSG00000239921_11 (sequence is synthesized)
gcagctctgtctgcaactacatggaagacgccatgtgaaccacctagtagagcccttcctagaattgttggccctcagactctacatgcatatcaaaatgaatgttgtttgaagccataa

SEQ ID NO: 803635 - DNA, 120 bp, Artificial Sequence
  ENSG00000239921_12 (sequence is synthesized)
tttgtcactgcaaaggaaatcaccaaggccagcagcatgacagccctcaacagaagccaaggccaagtcctcgaacttcctagtctgcacaatgacaagtgagctcatggaaacctctcc

SEQ ID NO: 803636 - DNA, 120 bp, Artificial Sequence
  ENSG00000239921_13 (sequence is synthesized)
atcgttgaccaggatctataggaaaaccctcctcttcttctatatgcaaaggctgcacagctcctggttcacctgcacctctccagaccaccatggtgcctgcagctctgagggcatttt

SEQ ID NO: 803637 - DNA, 120 bp, Artificial Sequence
  ENSG00000239921_14 (sequence is synthesized)
aaatcatcacagaacaacaagcatataagcatcatgagcgcctctggacctctgacgtgccttgtggaggcctgccaggcccacgttttaatttacatgaactcgatgccctttttgaca

SEQ ID NO: 803638 - DNA, 120 bp, Artificial Sequence
  ENSG00000239921_15 (sequence is synthesized)
ccctaaagaagaggatgcagcagaaattaggaagagataaagaagagcaacattccttaagaaatgccctatggttgggaatggccatttcatgttagaaacaaaggtgataatattcaa

SEQ ID NO: 803639 - DNA, 120 bp, Artificial Sequence
  ENSG00000239921_16 (sequence is synthesized)
tcaaggaccacagagggccaagtgcaggagtaagaggctggcgtgctgacagtggccaagggcattggagggaaggacctgtcatcactgggccaaggaaggaactccagactgcctact

SEQ ID NO: 803640 - DNA, 120 bp, Artificial Sequence
  ENSG00000239921_17 (sequence is synthesized)
tccagagggcctgctgagaaccccaaagagctctctcaacaaacacacccacgagttccaggagtgaggctgcagggaacagcctcactctcagaggggatacagaattgttccactgga

SEQ ID NO: 803641 - DNA, 120 bp, Artificial Sequence
  ENSG00000239921_18 (sequence is synthesized)
caagggctgggatcgtcataggatgccgttggcctgtggtttccaacagaggtgcagttcattgaactgtggtctacagtccattctctaacttggggacccttgaagaagtgtggaatc

SEQ ID NO: 803642 - DNA, 120 bp, Artificial Sequence
  ENSG00000239921_19 (sequence is synthesized)
atgacaacaaccctgttgggagacactattattcccatcacatggatgagcacacggaggcaaaaggaagttatatgattgtctgagatcacccagtgaagactgtgtggctgggagttg

SEQ ID NO: 803643 - DNA, 120 bp, Artificial Sequence
  ENSG00000239921_20 (sequence is synthesized)
tccccagtgttatctgcacgctgcttccttttgatgcctggcccttctttatcaaaagaagcattggcagaatctgggtgtttatgggtcagctcaaaataaattactttatatgtcatt

SEQ ID NO: 803644 - DNA, 120 bp, Artificial Sequence
  ENSG00000239921_21 (sequence is synthesized)
gggagagatctgtttctttatttgttagcctttcccctggacctgctagatctggaccatccccaggaaaggaaggtcacaccacaaagataaatataaacaaaatgagttaattaagaa

SEQ ID NO: 803645 - DNA, 120 bp, Artificial Sequence
  ENSG00000239921_22 (sequence is synthesized)
aatcaccaaggccagcatgacagccctcaacagaagccaaggccaagtcctcgaacttcctagtctgcacaatgacacttctgatgaaactgaaaatgccaccagggagaagcagctgaa

SEQ ID NO: 803646 - DNA, 120 bp, Artificial Sequence
  ENSG00000239921_23 (sequence is synthesized)
tgcctgggtgcgcagccccacagcccagcctctgcagagtgggaggggagccaggccctgcttgggtagcattgccatggcaacctctccccacgctgctcctcgctgagacccgggcat

SEQ ID NO: 803647 - DNA, 120 bp, Artificial Sequence
  ENSG00000239921_24 (sequence is synthesized)
ctgtggccatggcgactgggcctgccactggcacatctgcatagcaaccagagagggtgccgagcgcagctgggccccgctcaggaaaacaggtacactcagagcttttatcagtcatta

SEQ ID NO: 803648 - DNA, 120 bp, Artificial Sequence
  ENSG00000239921_25 (sequence is synthesized)
aggagaagctgggagcctctatggggagaaaggacaaaggatgcagacaaaagacttggaaccgcaagtggctaataaatctatgacaagtgcccaacattaccagcgatcatagaaatg

SEQ ID NO: 803649 - DNA, 120 bp, Artificial Sequence
  ENSG00000239921_26 (sequence is synthesized)
caaatgcaaacaacaataagatacttaaagaaaaacaacaacaactagtgcaattggcaagagatgaggcacaaaagagataggacccagtgttggcggggggtgtagggaatggggact

SEQ ID NO: 803650 - DNA, 120 bp, Artificial Sequence
  ENSG00000239921_27 (sequence is synthesized)
cgaacaccctgctggtctgagtgcacattcatggaacatttctgagaaggcaatttgcaatctgtatcaaaagcctttaaaatgcacataccttttgaaccaacaattctagttgtagta

SEQ ID NO: 803651 - DNA, 120 bp, Artificial Sequence
  ENSG00000239921_28 (sequence is synthesized)
atttattccaaggtaataattaagtgagtaaagattcagctccaagtgtgttccctgtaggggcaattataatacaaaaactttgaaacaaccacaatctgaaaaaaaaaaaaaaaagaa

SEQ ID NO: 803652 - DNA, 120 bp, Artificial Sequence
  ENSG00000239921_29 (sequence is synthesized)
tggcacattgtccctgaggacggttcaagacaaggtcctccttcacagctccggggccccatctcaccctcctcttcactctgctcagtgtgctctggccacactgccctcttcaccgct

SEQ ID NO: 803653 - DNA, 120 bp, Artificial Sequence
  ENSG00000239921_30 (sequence is synthesized)
ttgaacttgcctgccttgactagggctttctgagcagcagatgattctgcaatggtgttagtccaggcctggttctgcatgacattgaccatactgtgcaccctggggtcattatgtctt

SEQ ID NO: 803654 - DNA, 120 bp, Artificial Sequence
  ENSG00000239921_31 (sequence is synthesized)
accaaagggaggaaggtggctgtgaccagagcgagggggggtcctgatgcagctggggagtcaggctcgagtgcatgctgtgcatgttctctgcctctcttcctggggggcaggcgagtc

SEQ ID NO: 803655 - DNA, 120 bp, Artificial Sequence
  ENSG00000239921_32 (sequence is synthesized)
ggacctgctgctggcttatacgaggaaaggccgtctcacctgggggctttggggaaaagtttgctttcagatggagaaagagatggagcctctcaaggagaaagcatttccctctggtgc

SEQ ID NO: 803656 - DNA, 120 bp, Artificial Sequence
  ENSG00000239921_33 (sequence is synthesized)
aggcagcacatgcctgatagcagctgcataaggaaaagcaggagccagctcgtgcacagtgccctcaacagaagccaaggccaagtcctcgaacttcctagtctgcacaatgtctgtctt

SEQ ID NO: 803657 - DNA, 120 bp, Artificial Sequence
  ENSG00000239921_34 (sequence is synthesized)
gggcagggtctggcggggctgtggtgggggaagctgaagcatgaaggctcgaggagcacacagacacctacacacagctccgcgggcatgtggggacccagacccacccccacagcagac

SEQ ID NO: 803658 - DNA, 120 bp, Artificial Sequence
  ENSG00000239921_35 (sequence is synthesized)
acccccacagagcactcatggcccccacagaaatacacccacactcatcacagcaaaccaaaacaatcacacgccggtacacaaacacacacacccccgcaccaatccaggcagacacaa

SEQ ID NO: 803659 - DNA, 120 bp, Artificial Sequence
  ENSG00000239921_36 (sequence is synthesized)
agctcacggcgacaggcagatctgattcacacagacacaggcacaggtgcttcctgatgccaccctctcttggtcacgtgccagcacttggagggaggaaagtgcctcaccaggctgaga

SEQ ID NO: 803660 - DNA, 120 bp, Artificial Sequence
  ENSG00000239921_37 (sequence is synthesized)
tgcccaagggaccccccagggagggaaagcaggacacactgggacagttgcttccagccctgtccacacccttgtgcccatcaggaaataatccaggatccatttcgtgtggtcatcttg

SEQ ID NO: 803661 - DNA, 120 bp, Artificial Sequence
  ENSG00000239921_38 (sequence is synthesized)
caactgttcacccagcatcttgtcatttatagccaaaagcaatcctacctaatacactagccaaacacccatgggctcacccaaacattcagcaaacactaaatcaatgttcgctgagta

SEQ ID NO: 803662 - DNA, 120 bp, Artificial Sequence
  ENSG00000239921_39 (sequence is synthesized)
gcccatcaggtatgccgctcacccccaccccacctggaccttggtgtcacctaggattgcagaggccgccttcagcccagagcctggggccttgcccactgcctcacctcccaggatagg

SEQ ID NO: 803663 - DNA, 120 bp, Artificial Sequence
  ENSG00000239921_40 (sequence is synthesized)
gcatgctgttcctttctccttccctttctttgctcttgtgtgcctgcctttagcaaacgcccactgggtgtgtgggtacactgcggcctttaaagagaagagaaacacatgaggcttaca

SEQ ID NO: 803664 - DNA, 120 bp, Artificial Sequence
  ENSG00000239921_41 (sequence is synthesized)
gcaggaggccctgcctaggttccaagggacatggagcagggtggctgtgtagagctggggagcatcccaagcctgtgccaaggttccaaggacaaaaagggcaaggaggcccagtgcggg

SEQ ID NO: 803665 - DNA, 120 bp, Artificial Sequence
  ENSG00000239921_42 (sequence is synthesized)
gtggtgggggagcagctagccagggccaacagtgagcctcgcgcctgggcaggtgtagcctttaaacgcggtgggggaaccatggacagcatctaagcagggacgtgccgtgagtcctgg

SEQ ID NO: 803666 - DNA, 120 bp, Artificial Sequence
  ENSG00000239921_43 (sequence is synthesized)
gggtgcaggggtgtctagaggggaagctgggaagcaggggtcacagctttccgactggtggctgagtgtggggaagacaggaggggcaggtgtgagatgtacagcagacacagctgtgtg

SEQ ID NO: 803667 - DNA, 120 bp, Artificial Sequence
  ENSG00000239921_44 (sequence is synthesized)
ctggggcatggtgggctgtggtgagagagaggagcaggtcttctccccgcgtgttcagagcagatccaaactcttctcccattccttcctccaccgtgcatcctcagcacccctcagcac

SEQ ID NO: 803668 - DNA, 120 bp, Artificial Sequence
  ENSG00000239921_45 (sequence is synthesized)
gagctgggaagacagtgaggtggaggaaaagagttttgtgtgtcttgtcttcctactcacatactcaatgtgttcacagattggagcataacttaaacagttatcagaaaagtaaagagt

SEQ ID NO: 803669 - DNA, 120 bp, Artificial Sequence
  ENSG00000239921_46 (sequence is synthesized)
gagaagccatgtagaaataatgagagtgagaaacctctcagagcattcactttatttgcctaaaagaactcaaatagaagacaaaccctgtggattttacagacagtgttcaatttggca

SEQ ID NO: 803670 - DNA, 120 bp, Artificial Sequence
  ENSG00000239921_47 (sequence is synthesized)
gccacagtacacatatgcatgagacagttcttagggagggaaaatattgcatgcagagtctgtgggcaagtgtggagctgtggtatacccctcagtggatgccagagaatttgtgtggaa

SEQ ID NO: 803671 - DNA, 120 bp, Artificial Sequence
  ENSG00000239921_48 (sequence is synthesized)
gaaagtctacgtgcatgatatgtgaagtcttttgtactacttttgtactactatcttcatgttgtctgtctttcagacacttctgatgaaactgaaaatgccaccagggagaagcagctg

SEQ ID NO: 803672 - DNA, 120 bp, Artificial Sequence
  ENSG00000233926_0 (sequence is synthesized)
ttttttttcattcccatgactgcaggaatattgatctcagcgttactttgaccattaatgaattatgatggcaataagcaaagattcgcacctctagcctccggggagcttaatcttctg

SEQ ID NO: 803673 - DNA, 120 bp, Artificial Sequence
  ENSG00000233926_1 (sequence is synthesized)
ctacaacatttgcatttgcagtgtttaaggaggatccaggaatactttaagtgacgccagcgttagtgttgcctcctcagaagactgctttcaggggaacagtatacatctgccctgtaa

SEQ ID NO: 803674 - DNA, 120 bp, Artificial Sequence
  ENSG00000233926_2 (sequence is synthesized)
cttctcaacatggctcaaccttgggcttcagtgtacattttgttgggcctgcattgctcagttttagcaagagtccagttaagtgaaagagaatctcacagctttgatatcagattcttc

SEQ ID NO: 803675 - DNA, 120 bp, Artificial Sequence
  ENSG00000233926_3 (sequence is synthesized)
catatctaaacaaattcctcatcccctaccttcaatatctgatcactctgccctgtttgcaccaagaatctaccctcacccttgatgtctcctcttaataattttccatccaccaatctc

SEQ ID NO: 803676 - DNA, 120 bp, Artificial Sequence
  ENSG00000233926_4 (sequence is synthesized)
gtggggcgctgacgcgctcctccccggagcgtatggcagcgcagcgccggacggggcgttctccctccccccctcctctcgcttccatctccgccgtctcctcggtctcccttcccatcc

SEQ ID NO: 803677 - DNA, 120 bp, Artificial Sequence
  ENSG00000233926_5 (sequence is synthesized)
cggcccctcctccgccagccgcgtcctcccgggcttggtgaggaactgttcctggaggagccgcgggacgccaaaaccagccaatgggaagcggcgattcgcggagattggcactgatga

SEQ ID NO: 803678 - DNA, 120 bp, Artificial Sequence
  ENSG00000233926_6 (sequence is synthesized)
tgggaaggaatattgatctcagcgttactttgaccattaatgaattatgatggcaataagcaaagattcgcacctctagcctccggggagcttaatcttctgctacaacatttgcatttg

SEQ ID NO: 803679 - DNA, 90 bp, Artificial Sequence
  ENSG00000233926_7 (sequence is synthesized)
cataggtgaccctctcgcctgaaaccatattccccctcaagtagctgagactacagagacaaggtctcactatgttgcctaggctggtct

SEQ ID NO: 803680 - DNA, 120 bp, Artificial Sequence
  ENSG00000233926_8 (sequence is synthesized)
ctacagagacaaggtctcactatgttgcctaggctggtcttcaactcctggcctgaagttatcctctcatcttggactgccaaagtgctgggatttggcaccactgagccaaatcccagg

SEQ ID NO: 803681 - DNA, 120 bp, Artificial Sequence
  ENSG00000233926_9 (sequence is synthesized)
cgtgagccactgagcctgggctgttcttccttctttataggcttaaaaaccttcaaaaattatctcaagattatccactccaggaagaacttgagcctcattgattgaattggtgtactt

SEQ ID NO: 803682 - DNA, 120 bp, Artificial Sequence
  ENSG00000233926_10 (sequence is synthesized)
tcctatagcattttctttatgtgtctatcctagcacttctcacacagtgttgaattcatctgtccacctggctcatcatacaaattgttccatgagttcaaggatcatgctgcatgctgg

SEQ ID NO: 803683 - DNA, 120 bp, Artificial Sequence
  ENSG00000233926_11 (sequence is synthesized)
attcccccggaagctgattctgagatggagtttagtgtactaaatatttatgtgggcctttggatcatcacctgtgaaaaggaagagaaggaagcaggagtggacctagggtgaagtgaa

SEQ ID NO: 803684 - DNA, 120 bp, Artificial Sequence
  ENSG00000233926_12 (sequence is synthesized)
gctctgatgcaaacctgacaactgcctcacctgacaccatgaagagctctggagctagaatggccttttgttgttctgaattggtgtgaggtagctaggtctttacacccctgccaccac

SEQ ID NO: 803685 - DNA, 120 bp, Artificial Sequence
  ENSG00000233926_13 (sequence is synthesized)
ccattattgggtatgggccaaccaggaaggggcatgaccatgagtgatgcagctctgcagctgaagcaataactgaagaggctgacagctgagggccatctgctgacagtactccctgca

SEQ ID NO: 803686 - DNA, 120 bp, Artificial Sequence
  ENSG00000233926_14 (sequence is synthesized)
gctgggcagcacatcctttctcaaaaggggatcaaggcagttgcatctccgtgtccaccatggactatatattttttctttgcattcctagggcctcccatagtatatggcacatagtag

SEQ ID NO: 803687 - DNA, 120 bp, Artificial Sequence
  ENSG00000233926_15 (sequence is synthesized)
gcaaaactggaggtctgtagggcaaattcagctagtagatgagtattgttttttcacccacaaagagatttttaaaaattagttgtcaacatttaaaaataaaaagatttcacattgaaa

SEQ ID NO: 803688 - DNA, 120 bp, Artificial Sequence
  ENSG00000233920_0 (sequence is synthesized)
taggtctttcagttaggatgatagaaagcttccttggcatggagattcaccgtgtacttctacaaatagaagtttaaaagacagaaagctgtatattatcgctgctgagagctttgcagt

SEQ ID NO: 803689 - DNA, 120 bp, Artificial Sequence
  ENSG00000233920_1 (sequence is synthesized)
cacgcctccctgtgatgagactgactgctgtgttactgtgggtaaattgctcagcttctctgaggcagtttctttttatgtaaaaatgggacagaagccagcctggcttctagagttgtt

SEQ ID NO: 803690 - DNA, 120 bp, Artificial Sequence
  ENSG00000233920_2 (sequence is synthesized)
ggaggagtcagcatgtggctgatagatgtagagctcttagccactgcggtatttaggaattggttaaaagaattcgaggcagcattcttcctgaaggccttttgttattagtttgcttct

SEQ ID NO: 803691 - DNA, 120 bp, Artificial Sequence
  ENSG00000233920_3 (sequence is synthesized)
gctctgagcccaggttgtctggcagcatttctgattgtaatcagttttgtgcagtgagatcaccttgctgaccacgagcggtggctcccagcactgcaaagatatgtgtggggccggcct

SEQ ID NO: 803692 - DNA, 120 bp, Artificial Sequence
  ENSG00000233920_4 (sequence is synthesized)
gcttttgtgactgcagcattcacccttcaggggacagacagcggctcttgctgtctcaatgccactggaagaactccaaagggtgcctggaggaccagcttggactttcagttctgttgc

SEQ ID NO: 803693 - DNA, 120 bp, Artificial Sequence
  ENSG00000233920_5 (sequence is synthesized)
ttacgagtgtgtgaccttggacatgttgtgcgtctctctgcctctcggttctgtgacctgggcatagttaacacctgcttttgaggtcttgtgaggaataaatgagacattttattgaaa

SEQ ID NO: 803694 - DNA, 120 bp, Artificial Sequence
  ENSG00000233920_6 (sequence is synthesized)
ggtgcatgccaccatgcctggctaggcttgtgaaatttctatacaacaacctcatttctctgtttcttacattctaaactcccacgaacatttcagaatggatgggtatatcatacctta

SEQ ID NO: 803695 - DNA, 120 bp, Artificial Sequence
  ENSG00000233920_7 (sequence is synthesized)
tttaaccagcatcctattgttggactgttaggtttttctatcaaaaataaccctgtgatgagcctcttgaaattgctgtctttgcatggatccactatatttcctttggataattccaaa

SEQ ID NO: 803696 - DNA, 120 bp, Artificial Sequence
  ENSG00000233920_8 (sequence is synthesized)
aacgaacaatggaattgcatattccaaatccagaacagtctcagcatggctgccgttttctcgtttctttgtgaagcatcccggtccaggctgccagcctcacgttatttgattgttttc

SEQ ID NO: 803697 - DNA, 120 bp, Artificial Sequence
  ENSG00000233922_0 (sequence is synthesized)
aggctgattccccttcagggttcccaccaacagctgaggggcttctcggggcccctttgtttcctttggccccatgagtgctgagagctgagtccggctcccatggctcagctcagcttt

SEQ ID NO: 803698 - DNA, 120 bp, Artificial Sequence
  ENSG00000233922_1 (sequence is synthesized)
tgcttccccagttattggtcagcccggatccacgccgccccaagcatcagcccatcatccttactttccccgtctttcagaccttggcccccaaaattgtcactgctttaggagttcttc

SEQ ID NO: 803699 - DNA, 120 bp, Artificial Sequence
  ENSG00000233922_2 (sequence is synthesized)
attgatttcgaacagacattttaagatagttttttctagcttgtgttgtgtttttaatgggagagttggtcagcgtctgctggaacagagctacgcctatggaaccgtagacttgttcgt

SEQ ID NO: 803700 - DNA, 120 bp, Artificial Sequence
  ENSG00000233922_3 (sequence is synthesized)
gctttattgcaatactttaaagacacaaagtctcaacaaccatcttccgcttgacgagacagatcattctaatttgagcagaagctactatgtcctgccctttgaacgcggcggcccgga

SEQ ID NO: 803701 - DNA, 120 bp, Artificial Sequence
  ENSG00000233922_4 (sequence is synthesized)
gaaggacccatgaaatattcaaaacataagtgaataaaatatctaggtgctagatatgggccaggaagagccctcggccctgcaaagtgtgtgtgatggtgagaagctaccggaagagat

SEQ ID NO: 803702 - DNA, 120 bp, Artificial Sequence
  ENSG00000233922_5 (sequence is synthesized)
ggtccctgtgcttggttcattccttggacatttatcaagctgacgaatgtagcagaggtgcttcagtcggctgtaattccacgggtggagtgctggctggagagttacctggggctgtca

SEQ ID NO: 803703 - DNA, 120 bp, Artificial Sequence
  ENSG00000233922_6 (sequence is synthesized)
cactgcatgggctccgggacactgtggctgcccttatgtggtgtccccggagggccctgcaggtgtcacaccgctgctccacactgccacctgctgtcagcatctgtgcaacgtatccag

SEQ ID NO: 803704 - DNA, 120 bp, Artificial Sequence
  ENSG00000233922_7 (sequence is synthesized)
gtctctgggggctagaatgaaaaacatgcatctcgtaaccaatgaaatcgggcttgtcctgaagacctcgtgcattcatccattctcacactgctataaagacatacctaagactgggca

SEQ ID NO: 803705 - DNA, 120 bp, Artificial Sequence
  ENSG00000233922_8 (sequence is synthesized)
tctcctctctgagcttgtggcagacacggcagatacctcaagcatggctgggcagcagatgctggctgagaggaagtggctgagcccaacttgtccctcctcagaccccagaattgccaa

SEQ ID NO: 803706 - DNA, 120 bp, Artificial Sequence
  ENSG00000233922_9 (sequence is synthesized)
gaccagagtcctccataaagacctcacaaacaggcaatcactgcatgcttttccacaattaaatatgtgcacatcttaaggaaaggacctaacatccttcagcagtatctctttccaggg

SEQ ID NO: 803707 - DNA, 120 bp, Artificial Sequence
  ENSG00000233922_10 (sequence is synthesized)
cagggagtgactgcgtcagcagcctcaagtacctggaaactgtccacatcaggcaaagtggtgggagagacacagatgtttccaccagcatttaaaagaaaggaaagaaaattattgaca

SEQ ID NO: 803708 - DNA, 120 bp, Artificial Sequence
  ENSG00000233922_11 (sequence is synthesized)
agaagcctccatggtggatcaggcttcaacgttttgatggacctggcctctcttggaagcaaatccctggatggagcccatgtctctttgggcccccaaaggcagcctgaccttgacacg

SEQ ID NO: 803709 - DNA, 120 bp, Artificial Sequence
  ENSG00000233922_12 (sequence is synthesized)
tgggcccccaaaggcagcctgaccttgacacggagtgcaaagcagactcagctgcttgtgtttaatggggattcgcatagttggtttttggttttgtttttgttttgttttgttttttgt

SEQ ID NO: 803710 - DNA, 68 bp, Artificial Sequence
  ENSG00000233922_13 (sequence is synthesized)
ttttgagatggagtcttgctgtgttgcctaggctggaatgcagtagcgtgatctctgctcactgccac

SEQ ID NO: 803711 - DNA, 120 bp, Artificial Sequence
  ENSG00000233922_14 (sequence is synthesized)
agaccagccccggcaccaaagcaaaactgtacctctacaagaattttttttttaattggctagatgtggtacacatgcctgtggtcacagctacttgggaggctgaggagggaggatcac

SEQ ID NO: 803712 - DNA, 120 bp, Artificial Sequence
  ENSG00000233922_15 (sequence is synthesized)
tgcactccagtctgggcaacagagtgggacctcatctcttaaaaataaagaaaaggaaaggagtggaaaggagaggagaggaagaaacttgatatttcaattattttaaatttgttgaga

SEQ ID NO: 803713 - DNA, 120 bp, Artificial Sequence
  ENSG00000233922_16 (sequence is synthesized)
tatttcaattattttaaatttgttgagacttgttttgtggcctaacatatggtctatcctggagaatgttccatgtgctgaggaaaagaatgtatattctgtacagctgttggatggaat

SEQ ID NO: 803714 - DNA, 120 bp, Artificial Sequence
  ENSG00000233922_17 (sequence is synthesized)
ggtctgtaaatgtctgttaggtccatttggtctaaaccatagtttaaatccaatgcttatttgttaattttctatctgatgatatgttgaaggctgacagtgtgatgttgaagaccccaa

SEQ ID NO: 803715 - DNA, 120 bp, Artificial Sequence
  ENSG00000233922_18 (sequence is synthesized)
ctgttactatattagagtctctctctttagatctaataatattcactttatatatctggatgatttggtgttgggtgcatatatatttacaattgttatatcttcttgctgagtcagtcc

SEQ ID NO: 803716 - DNA, 120 bp, Artificial Sequence
  ENSG00000233922_19 (sequence is synthesized)
ctttatcgttatataatgaccttcatctctttgtagtttttgacttaaagtctgttttatctgatagaaatatagctactatcgctcactttgggttgatgaaatatctttttacatccc

SEQ ID NO: 803717 - DNA, 120 bp, Artificial Sequence
  ENSG00000233922_20 (sequence is synthesized)
ttaattggctcacggttctgcaggctttacaggaagcatagcagcttccacttctagggaggcctcaggaaacttatagtcatggtggaaggtgaaggcgggacaaggcgtctcacatgg

SEQ ID NO: 803718 - DNA, 120 bp, Artificial Sequence
  ENSG00000233922_21 (sequence is synthesized)
cgtctcacatgggagcagtagagagagaaaaagagggggtgccgcacactttgaaacaaccagatctaacgataactcactatcatgagaacagcaccaagaagctggcgctaacccact

SEQ ID NO: 803719 - DNA, 120 bp, Artificial Sequence
  ENSG00000233922_22 (sequence is synthesized)
tgtgaaggaccaccaccatgatccaatcccttcccaccaggtcccacttccaacgttggggattacacttcacggtgagatttgtgcagagaggacacaggtccaaaccatatcacctgc

SEQ ID NO: 803720 - DNA, 75 bp, Artificial Sequence
  ENSG00000233922_23 (sequence is synthesized)
tttgtgcagagaggacacaggtccaaaccatatcacctgctggcttcgtcacccaggctggagtgcagtggcgtg

SEQ ID NO: 803721 - DNA, 60 bp, Artificial Sequence
  ENSG00000233922_24 (sequence is synthesized)
attgatttatttttgagatggggtttcgctcttgtggcccaggctggagtgcaatggcac

SEQ ID NO: 803722 - DNA, 120 bp, Artificial Sequence
  ENSG00000233922_25 (sequence is synthesized)
ctgcgccttgcccacctgctgtctttttgcatcttccaagtagacatcaaagattggtttgctatcagtgtcacttctataatccgtggttctatatgaagaaaacaaaatcccaattgg

SEQ ID NO: 803723 - DNA, 120 bp, Artificial Sequence
  ENSG00000233922_26 (sequence is synthesized)
ggaaaatgaacccatggcattttgtttcttactctggagccgtttctggcagtttgccagcaagcacacagacccacaggacaagcttggttcatggcctggagtgctggtcttgctcat

SEQ ID NO: 803724 - DNA, 120 bp, Artificial Sequence
  ENSG00000233922_27 (sequence is synthesized)
ggacacgcaatcagaagcagtattttgatacccctgtgctcatggcaaggagctgcgtgggctttcagggtggaaccagggcttcagggaaccccttcatcccgacaggcatcacccaga

SEQ ID NO: 803725 - DNA, 120 bp, Artificial Sequence
  ENSG00000233922_28 (sequence is synthesized)
gcacacccagagcagcctgcagcggcgtggaaggggcttgcactggccccaaggtgcaggggagccctgcctgcctgtctcctgctaggcttgcctgggctcccgcctacagaccatgag

SEQ ID NO: 803726 - DNA, 120 bp, Artificial Sequence
  ENSG00000233922_29 (sequence is synthesized)
aattcttctagcatgggaagagagtctgaccaaagtgacaacagccatcccctgactgcccagcactgttcacttcttcccagatactcctaccagaccaggtcagcccttcttttactg

SEQ ID NO: 803727 - DNA, 120 bp, Artificial Sequence
  ENSG00000233922_30 (sequence is synthesized)
gggggccagaaaggtccccccaatccagtccaggactccagatgatgcccatttctctgccagtcccagcaatctcccttctcagcatctggcatcctgggatgtaccctaaagttcact

SEQ ID NO: 803728 - DNA, 120 bp, Artificial Sequence
  ENSG00000233922_31 (sequence is synthesized)
ggctcagagcaccctaactatggctgcggcgaggggggagggcgggatcaggtcggcgtgctgcacatgggtcctggggcgggaacagtattctggctatgctcctgcagctgggccctc

SEQ ID NO: 803729 - DNA, 120 bp, Artificial Sequence
  ENSG00000233922_32 (sequence is synthesized)
acaaggggcagcgtctgcaccctctcaaggctttgcagataagggtttattgaagagggaggtgacccacaccatccccactgagggatctggttagggggctccccccagaatgtaggc

SEQ ID NO: 803730 - DNA, 120 bp, Artificial Sequence
  ENSG00000233922_33 (sequence is synthesized)
aagagggcagcatcttgatagtgagggttggtcacccgggaaccacagtaacgtctgcagggaccttcccccagtggcacgcacttcccagaatgctcacggtcaccctcagctttcaac

SEQ ID NO: 803731 - DNA, 120 bp, Artificial Sequence
  ENSG00000233922_34 (sequence is synthesized)
tgtggggacctaacgcgtctcctggtagagtcctcactcccttggctaaaacttctgaaagcagcgaggccgggctccctggctaggatggctctggccctgagcaggtcatttgcgtca

SEQ ID NO: 803732 - DNA, 120 bp, Artificial Sequence
  ENSG00000233922_35 (sequence is synthesized)
agtttcaccacccagcaccctgtgctttccccagctggctgcacgctgggcctccgggaagccggcaagcccacctgattctggatcctccctccgagcctgggtgacgctgtcatgaaa

SEQ ID NO: 803733 - DNA, 120 bp, Artificial Sequence
  ENSG00000233922_36 (sequence is synthesized)
gaagctgccagaagcccacagcagggcagttaggcagggaatgcgagtccgtgtccagagcaagggtgactccagtccctccaggacggagaagccagtgcgacccactgtcccaggccc

SEQ ID NO: 803734 - DNA, 120 bp, Artificial Sequence
  ENSG00000233922_37 (sequence is synthesized)
ccatggccctggctgctcctggcggacagaggggcatgttgcccacgctatgccttgttccctctgggctgccatggcccctggaacaattcctgggacagcctggggaggaggctgaca

SEQ ID NO: 803735 - DNA, 120 bp, Artificial Sequence
  ENSG00000233922_38 (sequence is synthesized)
atcatgcaaggtggatgcagcttggcccctcccagtcacctatgtgttccttcctcagactcccgtggggctggagtcatgattttgctccccatcccatctgtaggccgcccctgcctg

SEQ ID NO: 803736 - DNA, 120 bp, Artificial Sequence
  ENSG00000233922_39 (sequence is synthesized)
ctgcctggatgagaccacgctgacactcacacgcctccctccaggaggaccttgcctccactttctccagggccacctgtgatgcaccaggatccatcctgtaatcccagctacttggga

SEQ ID NO: 803737 - DNA, 120 bp, Artificial Sequence
  ENSG00000233922_40 (sequence is synthesized)
caggagaatcacttgaacctgggaggcgagaggcagaggttgcagtaataagccaagattggaccacagcactccagccttagcaatagagagagacttcgtttcaaaaaaaaaaaccta

SEQ ID NO: 803738 - DNA, 120 bp, Artificial Sequence
  ENSG00000233922_41 (sequence is synthesized)
tgcaaatcccaattacacacgctgagtggcatgttcagctgagccacctgcccaaggcgggaccctctcttcctccgtctgcaggtcacatggagatggcagagcacctgcacgtgcacc

SEQ ID NO: 803739 - DNA, 120 bp, Artificial Sequence
  ENSG00000233922_42 (sequence is synthesized)
tggagaccctctcaagcctcgtctcctggcactgcctcctcctgacattggaggctgctgggagtaccagcctgtaaccctcgttgtgatggcacctgcctggtgctataattcagacat

SEQ ID NO: 803740 - DNA, 120 bp, Artificial Sequence
  ENSG00000233922_43 (sequence is synthesized)
ttgtctccccaacctcatgttgaaatttgaaccccaatgttggaggtgggacctgacagaaggtgcctaggacatgagagcttggtgctgtcctcgcggtcatgaatgcattcatgcttt

SEQ ID NO: 803741 - DNA, 120 bp, Artificial Sequence
  ENSG00000233922_44 (sequence is synthesized)
attccttctcacaagaactgattgttaaaaacgcttggcacctcctctgcccactctctcttgctccctctctcaccatatggtctgcatgcacctgctcccatcgccttctgccatgag

SEQ ID NO: 803742 - DNA, 120 bp, Artificial Sequence
  ENSG00000233922_45 (sequence is synthesized)
ccatgcttcttgtacagcctgcagaactgtgtgccaaataaacctcttttctttataaatcacccaacctcccaacacaaatcgtccaagacacctggtgtcccccaaacagctccttgg

SEQ ID NO: 803743 - DNA, 120 bp, Artificial Sequence
  ENSG00000233922_46 (sequence is synthesized)
atcgtccaagacacctggtgtcccccaaacagctccttggtcaacctcagattcaggaccaatctgagagctgtttccgtgaagggaggagaggagagttgttagctgaagaggacatgg

SEQ ID NO: 803744 - DNA, 120 bp, Artificial Sequence
  ENSG00000233922_47 (sequence is synthesized)
gtgatcctcccaccgcagcctcgaacaatgctgggaaaacaggcgtgagccactgtacccagctgggatttgtgtagttttgtccgtgctgttatatggtgcactgggcagagccagcca

SEQ ID NO: 803745 - DNA, 120 bp, Artificial Sequence
  ENSG00000233922_48 (sequence is synthesized)
gtcccgcctcgagccccgttactttggtctctgatgcagatgttgtgtggcagtggaacggcctcatcagccccacctgggacctggcaggggatgggtctgagcagccctagaggaggg

SEQ ID NO: 803746 - DNA, 120 bp, Artificial Sequence
  ENSG00000233922_49 (sequence is synthesized)
tccccagggcccacagcaagggtgacatgacccacaccatccccactgatgggacccacacagtgaacctcctcccacaccccctccccagccggccacttggaccagagagacgttatc

SEQ ID NO: 803747 - DNA, 120 bp, Artificial Sequence
  ENSG00000233922_50 (sequence is synthesized)
aaagtgccctctcagaaacgtcgccttcatccaccatcctcttttaacccactgggcttggtcaggaagccgttggtcagcagggggcaggtggggttggggggcacccttatgtcctgt

SEQ ID NO: 803748 - DNA, 120 bp, Artificial Sequence
  ENSG00000233922_51 (sequence is synthesized)
gagaccctagcaggcactccagcttgggatttccagaggctctgaggtggctaagaacaggatgacaaatcgactccaaggttcaactcttcccctcatggacactcctccctatgctgt

SEQ ID NO: 803749 - DNA, 120 bp, Artificial Sequence
  ENSG00000233922_52 (sequence is synthesized)
tctcatctcaaattttacctgtttttctcaaagtagctcaccagaggttggaaatgagatcaaaggtcagcgtggatctcaacattattattcatcagggaaatgcaaatcacaccagag

SEQ ID NO: 803750 - DNA, 120 bp, Artificial Sequence
  ENSG00000233922_53 (sequence is synthesized)
aacattattattcatcagggaaatgcaaatcacaccagagatgagacgccatgacactcacactagcagggctaaaatttaaaagtctagctggggctgggcatggtggctcatgcctgt

SEQ ID NO: 803751 - DNA, 120 bp, Artificial Sequence
  ENSG00000245311_0 (sequence is synthesized)
catcatcttgatagagtcccatagtgtctcaaagtggggaggttaggatgctggttagtcatggagtattttcagagtggaagttgatcagtgacgttttgtcagggattgatccaattt

SEQ ID NO: 803752 - DNA, 120 bp, Artificial Sequence
  ENSG00000245311_1 (sequence is synthesized)
ataaactaggtaaaagagaaagattataatgtatattcattcatttaattcataatcgttcctgtggatttgagagtggttatatgggcagtcacccaggaacaaaggacaagaggattg

SEQ ID NO: 803753 - DNA, 120 bp, Artificial Sequence
  ENSG00000245311_2 (sequence is synthesized)
tcacttatgccttcaggaaatgtttattgaatgtctactatgggccagaaacaacagacagaaatgcagctctcattctcgtgtgggaggccccaaactacaatttcaataacaccatta

SEQ ID NO: 803754 - DNA, 120 bp, Artificial Sequence
  ENSG00000245311_3 (sequence is synthesized)
agaatacacacgtgtccttccagcgtggagattactgtgaacttgcaaaccagctttcgtgcagaagggggcgagagaataggtggaaaagaatattgtcaaataattttgaaatttatc

SEQ ID NO: 803755 - DNA, 120 bp, Artificial Sequence
  ENSG00000245311_4 (sequence is synthesized)
tcctaacattttctgaccatctattattgagaaaggaaacagttttttaaagcaatggcatgattgtacagtaaaccctgaagtgaaatatacccaaaaaatgtatttgtcaagcaatca

SEQ ID NO: 803756 - DNA, 120 bp, Artificial Sequence
  ENSG00000245311_5 (sequence is synthesized)
cattttgataacttacagacatttgcaatttatctttcttttttcctcaaatggggaagaacaaagttaatttaagtgaaatgaaataaaaattaaattaaaaaatgaaaaaaaccttaa

SEQ ID NO: 803757 - DNA, 120 bp, Artificial Sequence
  ENSG00000245317_0 (sequence is synthesized)
ggaaagagtcctgggtgcgggattcctggtagccgactcgtcgtctgaccagggccgtgcccgcatcttcctaaggcactggttccggccctggggagactggaattgagacgacagggc

SEQ ID NO: 803758 - DNA, 120 bp, Artificial Sequence
  ENSG00000245317_1 (sequence is synthesized)
ctccgctgaccagtccttggacacaacgcggagcggggctgaggggccgccctgccaggcctgcgctgccgtgcttttagtgttccctgaagaatactaggaagaaatggaaatcagtgt

SEQ ID NO: 803759 - DNA, 120 bp, Artificial Sequence
  ENSG00000245317_2 (sequence is synthesized)
tctgaagaacggcacggactcttaggcagttccatcagcaagaacctgagtttgaagtgacaacgtgctgtggagaggcaaggttacagaattacagtacatcgtttgacttctgtgaca

SEQ ID NO: 803760 - DNA, 120 bp, Artificial Sequence
  ENSG00000245317_3 (sequence is synthesized)
ccggcattattttctggcgtgtgtgtgtgtgtgtgtggctaaggtcgtaggtaatgctaatttttaaatttttccaacttttgtacagtaagtagttagaaaaaaaaattgagagacaat

SEQ ID NO: 803761 - DNA, 120 bp, Artificial Sequence
  ENSG00000245317_4 (sequence is synthesized)
atgccaatagacaatggtcagataacgaatgacaataaactgactgcagcctctgcagtaaccgggcagtcggctgcttgggaaggacgtggtcaggactgcttgctcctctattttttg

SEQ ID NO: 803762 - DNA, 120 bp, Artificial Sequence
  ENSG00000245317_5 (sequence is synthesized)
taccaccctccccatgtcagaaccaacccaagaaagcgctccccaaaccagtcacagaaaacatcctgcttcttgttagctcacctccagtttccaacagcctgcggtcagaaccacctg

SEQ ID NO: 803763 - DNA, 120 bp, Artificial Sequence
  ENSG00000245317_6 (sequence is synthesized)
ttccaccccctgcgtccttgcgcctacccacaccggggatgttgctgactcccttgctgtagcaagctctgaatactgtttctcatttgggtggttttccttcatttctacgtttgagct

SEQ ID NO: 803764 - DNA, 120 bp, Artificial Sequence
  ENSG00000245317_7 (sequence is synthesized)
actgtggctgagaacagaaagcatctgcaaaaaatgttttatgcttaatgaaaggagtagaataaaaatttcatatatgacatcagttaaactctgaaaaaaaatacagaataaacacca

SEQ ID NO: 803765 - DNA, 120 bp, Artificial Sequence
  ENSG00000245317_8 (sequence is synthesized)
aaatactgagtaatctgtagcactaggaaaaattgttctacttttctgtatatttttctccttttggcaatgaaccggtaatcctttaaaaattcatgtatatagttttttttcttggaa

SEQ ID NO: 803766 - DNA, 120 bp, Artificial Sequence
  ENSG00000245317_9 (sequence is synthesized)
tcttggaaattataagaatgatttgatgagtggtttgatgcaacttatattacttggtaagcagttttaaaatattcatgtttacttataaaatttaaattttttatttgtattatctat

SEQ ID NO: 803767 - DNA, 120 bp, Artificial Sequence
  ENSG00000245317_10 (sequence is synthesized)
taatgttactgttctggttgttaaacattttgagttatcttcccaggttgaatgatttatggattaaagtactattgtacattttcgtacattgtatcacgtgaataggccagattcctc

SEQ ID NO: 803768 - DNA, 120 bp, Artificial Sequence
  ENSG00000245317_11 (sequence is synthesized)
tttcctattctttggttaatttctttggtgtattcacaagcttatacttccatatattaaaaacatttatcttacctctgtaaagacaaaaaatgggaaataaaaagccatttatccaaa

SEQ ID NO: 803769 - DNA, 120 bp, Artificial Sequence
  ENSG00000257997_0 (sequence is synthesized)
aatgtgaaaacggactagtacatctctagaggcacatgccatgtggtccagccataattatttgttgtcacaactaagtttcctttctatatgaaaagattatattgatcagaattctaa

SEQ ID NO: 803770 - DNA, 120 bp, Artificial Sequence
  ENSG00000257997_1 (sequence is synthesized)
gattctcagcaaaaggactctaaggatgcagaggaagggaagtcacccaatctgggaaggaggtttttattaagtataaaaacaggtcatccacacatagcaatgtgcttttctagagaa

SEQ ID NO: 803771 - DNA, 120 bp, Artificial Sequence
  ENSG00000257997_2 (sequence is synthesized)
caggattgagatgatgccttaagaaacacccactccccgtgagggatgttaccaagaagtcaagaaccaccagtaactttgaaaagtccagattactcagtctcgggtatgtgtatcagc

SEQ ID NO: 803772 - DNA, 120 bp, Artificial Sequence
  ENSG00000257995_0 (sequence is synthesized)
atataccttttcaagacatttgatgatttcagatggtattagatttatccaggatgatcattaaattgagccaatggatgattgcctgacagaaagaagaatacacttttaggataacta

SEQ ID NO: 803773 - DNA, 120 bp, Artificial Sequence
  ENSG00000257995_1 (sequence is synthesized)
tttaagaatatgaaatgtacctgatggaatcttagatggctatttttcctctgacataactaaattgactcatgtgtggcaaaacttcttcaatataaaacaaatcactttctcaaacca

SEQ ID NO: 803774 - DNA, 120 bp, Artificial Sequence
  ENSG00000255843_0 (sequence is synthesized)
agcaaatcctatgtgaaacaaatcagtgaccctgctgcacacctgtgctcccaacgacaaatcccaaggctgctggaattatctgaggcccaaatgacaagaccccggcagtcatgctga

SEQ ID NO: 803775 - DNA, 120 bp, Artificial Sequence
  ENSG00000255843_1 (sequence is synthesized)
caagccctccaaaccatgcttcaatcaaggactgtcatcactcacctcgtgtcgctcctggaactcggacatgtccagcctgatgaagccctgtgtggaaacaaggaggcctctcctgtt

SEQ ID NO: 803776 - DNA, 120 bp, Artificial Sequence
  ENSG00000255843_2 (sequence is synthesized)
ttggtctctgtccttaagaagcaccccatcgaatggtgcagacatggacaaagtcagtcacgatcagtgtggactgtggtgcgagggaggagagaaacactcagatggctccagaatgcc

SEQ ID NO: 803777 - DNA, 120 bp, Artificial Sequence
  ENSG00000255843_3 (sequence is synthesized)
tctcaactctgcaagtctgtgtgatgcccgtgtccctttgatttacttttcttcaaaatgaatatattttaaaatgtatttacatttcttcatttcattaaaaaagatatccataacata

SEQ ID NO: 803778 - DNA, 120 bp, Artificial Sequence
  ENSG00000255847_0 (sequence is synthesized)
tgtagctggaggacaggaaatagatctttattatgtcagtttaagccctgcgccatcccacccttgtatcatatctgtgcagcaggctcccctgcacaccctgaggctgtggcgggtagg

SEQ ID NO: 803779 - DNA, 120 bp, Artificial Sequence
  ENSG00000255847_1 (sequence is synthesized)
ggtggggtgaggcccggctagcctcctctcacccctgctccagcccaccacagtcatgtcagcaatgcctggcgcagcatctgcttcttctggggtgtgaggcgggtggggaactggatg

SEQ ID NO: 803780 - DNA, 120 bp, Artificial Sequence
  ENSG00000255847_2 (sequence is synthesized)
tcgaagaagatgaagagatcccctttcttagtggggtcctccggcaatggcatcccctcccctggcaccttcttgaagtatttggggtggatgatgtcattgatggggatgttgagcaga

SEQ ID NO: 803781 - DNA, 120 bp, Artificial Sequence
  ENSG00000255847_3 (sequence is synthesized)
cggtcatctagggtcctcacctccacagtgcagcaggtgagagccttgccaagagggatggggttcacgaagaagaggttgtcattctccctgcggaagcgagggtgtagcttctccttt

SEQ ID NO: 803782 - DNA, 120 bp, Artificial Sequence
  ENSG00000255847_4 (sequence is synthesized)
acgatgaaaatgatgtctgctgggatgatgttggggccctggtccccttccttctcaaaggtgatgcgtgtgccctgcctccaaccgggcttcacatcaatggtcaggatcttgtccttg

SEQ ID NO: 803783 - DNA, 120 bp, Artificial Sequence
  ENSG00000255847_5 (sequence is synthesized)
gagatcccgttcgacttgggggtcctgcttcttgacccctcggccctggagccccccaaagttcaaatctacctcacttccttctgcatcaaaaaactctgcaggaggaaagggaggcac

SEQ ID NO: 803784 - DNA, 120 bp, Artificial Sequence
  ENSG00000255847_6 (sequence is synthesized)
tccctctggtggccgcgctcaggagtgccagaagagactgctggtagtcctcggcaggaagtgcaaagacagccccatcctggctctgcccctgatgtgctgtgtgatccgtgggcttca

SEQ ID NO: 803785 - DNA, 120 bp, Artificial Sequence
  ENSG00000255847_7 (sequence is synthesized)
gtgtcttggtctgtgggatggggtaataatgcctgacctgccttccaccattaagatgaagagctaaaacttgctgagagcttactatgcgtcaggtgctatttttggaaccttacatta

SEQ ID NO: 803786 - DNA, 120 bp, Artificial Sequence
  ENSG00000255847_8 (sequence is synthesized)
ttatttcattggtccagggagcccaaacaaaacgcttaaggtcccgtagctagtaagcagtagagttgggatctgaaccacaggacaatatgactacggaacctgtgtccttaaccactg

SEQ ID NO: 803787 - DNA, 120 bp, Artificial Sequence
  ENSG00000255847_9 (sequence is synthesized)
tgccacgccgcatcgctagatgtggaagcccctcataagctgtaaactcgaggggcgctatggttaagagttttcatattctgcctctcatggttaatgccatggaatgaacttcacagg

SEQ ID NO: 803788 - DNA, 120 bp, Artificial Sequence
  ENSG00000255847_10 (sequence is synthesized)
ctagaatggtgaaatgaccttaggcagggatggtgaggtgactacactatgtccctctaagatgcgatgggcaatcaagaggcctgaatcttctggtcctcctgttgcattgctgaattc

SEQ ID NO: 803789 - DNA, 120 bp, Artificial Sequence
  ENSG00000255845_0 (sequence is synthesized)
gtcccaggggcaccgcaggattgcagaaccctagaaagcttgggcttctctgacctgagagcagcactttgacctcaccctcaacactccacctctctgtcacccaagaggagtagcttc

SEQ ID NO: 803790 - DNA, 120 bp, Artificial Sequence
  ENSG00000255845_1 (sequence is synthesized)
tggtttcaaattttgtgctaattgaaactgcctcattgctctcattgattttctttgtaacagataaatgctattaaattgaattgcaaaatatataataaaataccaccattacttgca

SEQ ID NO: 803791 - DNA, 120 bp, Artificial Sequence
  ENSG00000254718_0 (sequence is synthesized)
acctgcctgcagatacaaaccccactccctgcgaagatggtgtacacgcagccccgagcacagacccgaagctgtccacccttcttgggcgccgtcgcggtctggccgctgcccttcgaa

SEQ ID NO: 803792 - DNA, 120 bp, Artificial Sequence
  ENSG00000254718_1 (sequence is synthesized)
cccatgccatgttggaactacatttggaaaggtggttgttaaacatttcccagcacacacctggatctgcatctgctgtgtcaattgaaccactcactggttctgtgacctcagttcttc

SEQ ID NO: 803793 - DNA, 120 bp, Artificial Sequence
  ENSG00000254718_2 (sequence is synthesized)
ttataagtgagagctgaacgagcagaacacatggacatatgaaggggaacaacacactctggggcctgtgaggtgcagggagagcatcaagaagaacagctaatgggtgctgggcttaat

SEQ ID NO: 803794 - DNA, 80 bp, Artificial Sequence
  ENSG00000254718_3 (sequence is synthesized)
agagcatcaagaagaacagctaatgggtgctgggcttaatacctgggtgatgggttgatctgtgcgtgacatcctgcaca

SEQ ID NO: 803795 - DNA, 120 bp, Artificial Sequence
  ENSG00000254718_4 (sequence is synthesized)
atagaaaggaaattgcatactgttatccatgctgtgaagaaaataaataaggaaacagatccgggagacgacttgaaacaggtgttcagtgcagacctctctaagaaggcagcatttgat

SEQ ID NO: 803796 - DNA, 120 bp, Artificial Sequence
  ENSG00000254718_5 (sequence is synthesized)
ttggttttatcctccacagaatacttcctcctaaaatgtgttgtgaaaattagaatagatgaaggcacccttgaaaagatgactgatgcggttggttgccccaccacttcctactacttg

SEQ ID NO: 803797 - DNA, 120 bp, Artificial Sequence
  ENSG00000254718_6 (sequence is synthesized)
gcagagcctcctcgttggcagatccttctctcactagagcatgtatatggatgcatgctctctcaccctcccttgtagcttagagcagagcataccaatctatgtgccagcataccctgg

SEQ ID NO: 803798 - DNA, 120 bp, Artificial Sequence
  ENSG00000254718_7 (sequence is synthesized)
tatgtctcagatgggtcatagatgtgataaggtatggatcccttaagcccttgggacattcaagtgaggctgagctgctgaagccctgggatggtatgactggccacaagcaacattacc

SEQ ID NO: 803799 - DNA, 120 bp, Artificial Sequence
  ENSG00000254718_8 (sequence is synthesized)
caggtacccctctgtgtcacaaaaacgttatctttgtatttgtgtcatggtgtgaaaaaattgagaagcactgcctggggacatagtgaggtagcccaattctggataaaggaaattgag

SEQ ID NO: 803800 - DNA, 120 bp, Artificial Sequence
  ENSG00000254718_9 (sequence is synthesized)
aagtcttgagggggtagagaggttttcttccctaataagaagaatcacaggagagaaaatgccttcctcagccatatgttgttatttctatatgtgagcctggaatttcaaggttatctt

SEQ ID NO: 803801 - DNA, 120 bp, Artificial Sequence
  ENSG00000254718_10 (sequence is synthesized)
gcaaagaaccaaggcaatgtagagaaaagaattgatagcaagtggctggatctttcacattgtaaagccattgagccatccgtgcaattgcccaccttgggaatttatttttaagagtga

SEQ ID NO: 803802 - DNA, 120 bp, Artificial Sequence
  ENSG00000254718_11 (sequence is synthesized)
taataaatgctcctcattgtttaaactactttgatttttgtatttggttattcataattaaaaacacccaaatacagtagaagaactggtacatccctgacacctaatgagtgctcaata

SEQ ID NO: 803803 - DNA, 120 bp, Artificial Sequence
  ENSG00000254718_12 (sequence is synthesized)
tggttagttaatcaccaaattagatcctttgcctttagaaaagctgccatggtcaaatgtgtgttgatcttatttttcgtaaatatttaagaaatttgttcagtaactagcttaactttt

SEQ ID NO: 803804 - DNA, 120 bp, Artificial Sequence
  ENSG00000254718_13 (sequence is synthesized)
aatatttatcttgagtctcttctaaatatgtttttactgtataataaaagcaataattgaaaaatgacatcattttaagcttgagagcaactagatacaaagatgttgatatgcattttc

SEQ ID NO: 803805 - DNA, 120 bp, Artificial Sequence
  ENSG00000254718_14 (sequence is synthesized)
acagagaagatcatattagttcaatataaaaagagggcctagaatgtgccaagctccatacaatgcccctcatgagtgttatttaattctcacaacaactttgcaaaaaagaaactattt

SEQ ID NO: 803806 - DNA, 120 bp, Artificial Sequence
  ENSG00000254718_15 (sequence is synthesized)
ttttttccattttacaaaggaggaagctaaggctgtgaaaaagagctcttttgcaagcctaggacctgattccaaaattcccactctttctgttgcaaattctggctaagctttccagag

SEQ ID NO: 803807 - DNA, 120 bp, Artificial Sequence
  ENSG00000254718_16 (sequence is synthesized)
atgacttgctttccccttgaggccctttcagtgcattgtgccatggaaaacaaaaagcccaacaatgacatctttaccaaagatgccttggggagatgggagaagagttacaatgcacat

SEQ ID NO: 803808 - DNA, 120 bp, Artificial Sequence
  ENSG00000254718_17 (sequence is synthesized)
tacacagcaaaatcttttttaagctccaagtaaaattggttttttcttagagttttgcttccagcagtcacttcctccattctcctgctctctccacgtgaggaaaacttctatcctgcc

SEQ ID NO: 803809 - DNA, 120 bp, Artificial Sequence
  ENSG00000254718_18 (sequence is synthesized)
ttctcctaatacactttcctgttttttttttcctgcacatttcttaaaaatcccacataaggcaaaagccaagacaatatccatcaacacctccacccccaccgcatgtccatggagagc

SEQ ID NO: 803810 - DNA, 120 bp, Artificial Sequence
  ENSG00000254718_19 (sequence is synthesized)
ttcaagtcatcctgccgctggtacaaacacggcagaggcctctttgtaaagaagtggtaggtagaattcaggttagcaccagaatctgaaaactccagctcctttgactgggaccaggct

SEQ ID NO: 803811 - DNA, 120 bp, Artificial Sequence
  ENSG00000254718_20 (sequence is synthesized)
ggtaatataaatgttagatcaggctgggtctgacacaatggggatcagtagagcatacttgtcacatttgaaggcattcagaaaaataataaccttaaaacattctaaacatgttgcaat

SEQ ID NO: 803812 - DNA, 120 bp, Artificial Sequence
  ENSG00000254718_21 (sequence is synthesized)
caaagaggataccccttgaccactgcacgaattggagttcaaagatcatctctcttttgcctaggctgtagactagttatttaacctctctcagacttggtttcctcttctggaacaggg

SEQ ID NO: 803813 - DNA, 120 bp, Artificial Sequence
  ENSG00000254718_22 (sequence is synthesized)
tatatcaactaccttgcagaaataaatgacatcctgtacacaatgcacctaccacgttgcctgacccaataatgtgtacatacataagaaaatgttcatgccctttgctcactttaaaat

SEQ ID NO: 803814 - DNA, 120 bp, Artificial Sequence
  ENSG00000254710_0 (sequence is synthesized)
atttttccagtatccagacatccagataaccagaacttgaaggggaggaagctatggtttgcattttttctttaggaaacaagtaagtcagaggtgctgaaaacaggactttaagcagaa

SEQ ID NO: 803815 - DNA, 120 bp, Artificial Sequence
  ENSG00000254710_1 (sequence is synthesized)
aaagcaacatatgagaccaatggactatgcattcatgccttcttcaaactcactttctgcgaaaccaggctccttccccgtgctggcagaagtttcaacagacctctctcctataggtca

SEQ ID NO: 803816 - DNA, 120 bp, Artificial Sequence
  ENSG00000254710_2 (sequence is synthesized)
cgctgacatcttacattccatgaagaggatggtgagatcgaagagccagccaggtgtggcagagggaagatttctccgactaagctaggagaactgactctccaaagagaatctataaga

SEQ ID NO: 803817 - DNA, 120 bp, Artificial Sequence
  ENSG00000254710_3 (sequence is synthesized)
tttcctgggtgctgtgaagcatacctaaacagatagctgcaaagaaggatcttttctctatttcaagacatgaacactgccccatccccactcctggtattttgtaccctaaacaaaatt

SEQ ID NO: 803818 - DNA, 120 bp, Artificial Sequence
  ENSG00000254710_4 (sequence is synthesized)
gggtatttgcctgatataacctgaaaaaggtggtgcattatactttacatagtgatttatagtttacaggctgcttttacgatggtctcatttagttttccaaaatcaagctgtgatata

SEQ ID NO: 803819 - DNA, 120 bp, Artificial Sequence
  ENSG00000254710_5 (sequence is synthesized)
gtgctattattcccctttttaaaaagaggaaatgggggacatgtgagggtaagtgagtggttcaaggtcacacgactagtcagcagcagaaccaggactagaattgcaagcccagtgttc

SEQ ID NO: 803820 - DNA, 120 bp, Artificial Sequence
  ENSG00000254710_6 (sequence is synthesized)
ttgagggttgagccccaggaaactctgtccagggctttgccatcatggggatttgcccgaccgcccttaggcagcggagggatggagtgcagagacaactggccttcatcctttgtccca

SEQ ID NO: 803821 - DNA, 120 bp, Artificial Sequence
  ENSG00000278133_0 (sequence is synthesized)
agaaaaatcagggtgttgcactttattaagtgtaggtattgttttgagaagcttttatttcacacccaataaaagtgtgcaggattcctcttgttccagccttaccttcccgatgatcct

SEQ ID NO: 803822 - DNA, 120 bp, Artificial Sequence
  ENSG00000278133_1 (sequence is synthesized)
agcacatacttgtgtgtatatacagacatgttacagtgccaagtgtacttcctactgtggtgtgatttaaaaaattgaaataccctaaactggaagaactcctcaaggtctaaactgccg

SEQ ID NO: 803823 - DNA, 120 bp, Artificial Sequence
  ENSG00000278133_2 (sequence is synthesized)
gtaccgtagccactagccacatgtagctgttgagcacttgaaatgtgtctagtgtgacgaagaattaagaattttagcgtgagccaccacgtttagctgagtataattttaaatagccct

SEQ ID NO: 803824 - DNA, 120 bp, Artificial Sequence
  ENSG00000278133_3 (sequence is synthesized)
atgtgacaagtggctactttattggacagtgtagatctaagattaattcctcaactgttttgcactcaacaaagacatacctctgagttggcaaccagcagggtggataacgggccagtg

SEQ ID NO: 803825 - DNA, 65 bp, Artificial Sequence
  ENSG00000278133_4 (sequence is synthesized)
tgttggccagactggtctggaactcctggcctcaagtgttagctgagtataattttaaatagccc

SEQ ID NO: 803826 - DNA, 120 bp, Artificial Sequence
  ENSG00000287255_0 (sequence is synthesized)
acagagtgaaataacactggtaagttctggaaggtgcttcatagtgttccaaagtgtgtcatccctgtgcttatgcatttgtatcaaggatttaaagaggaaaaactcaaagcaatgtat

SEQ ID NO: 803827 - DNA, 120 bp, Artificial Sequence
  ENSG00000287255_1 (sequence is synthesized)
tctgatcaagaaatggcaggaaatggcagctacctgatatggaacaatcaacaactgaaggtttattttgaatgagaggtgttgtccaactgcgagacggagtgattgaagctgagaata

SEQ ID NO: 803828 - DNA, 120 bp, Artificial Sequence
  ENSG00000287255_2 (sequence is synthesized)
aatggaaacacaatcaatagtcactccagtgaggtaggaaagaaagccattccgaagtggcagagaagctgctttttcctcctgcatgctgcctgctagtgtggatcttggcataacaga

SEQ ID NO: 803829 - DNA, 120 bp, Artificial Sequence
  ENSG00000287255_3 (sequence is synthesized)
tcacctggatttccttgccatttggctttcaaatgtgctcagccaatgacaggctggaaagaaattgacagctgggaaaagaggaagatttgtgtacaagatcccttccactcccatctc

SEQ ID NO: 803830 - DNA, 120 bp, Artificial Sequence
  ENSG00000287255_4 (sequence is synthesized)
attacctgccatggtcctagcagtggctgttcttattatggccacaactactcttggacaggccaacatccacaactccatccttcaactaggcttcattaacactgtccctcaccctta

SEQ ID NO: 803831 - DNA, 120 bp, Artificial Sequence
  ENSG00000287255_5 (sequence is synthesized)
tctctttctgggtaggggtgataaaggtttcctgacatcagagttcctgagtgcctcatatattcttgttggtccctgaaccttgccccaacatcaataaaaagttccttcattaaataa

SEQ ID NO: 803832 - DNA, 120 bp, Artificial Sequence
  ENSG00000240842_0 (sequence is synthesized)
gggttacctagaagacactgcttgcaaaattaacactcaagaaaaatgatcccaaagcagcatttcccaaacaaaagtgatgaatggtagatctcttcttgggaacttgatacctgatgg

SEQ ID NO: 803833 - DNA, 120 bp, Artificial Sequence
  ENSG00000240842_1 (sequence is synthesized)
agcaaattgaccctgcaattggcactgaagatcaggaattaaaaatcaaatatgctgatggaaagtgagtggaacacttctctctctctttcgatgaagcctccctaggacaacaggact

SEQ ID NO: 803834 - DNA, 120 bp, Artificial Sequence
  ENSG00000240842_2 (sequence is synthesized)
ctgaggccttctgcttgtaggtctaacctctgagtagacaggtttctaagaactaagaaagtattactgtggggaactcagcaggtggctgcctgcgaatgaagctcccagagaggaaaa

SEQ ID NO: 803835 - DNA, 120 bp, Artificial Sequence
  ENSG00000240842_3 (sequence is synthesized)
tgttctcgagagagggagagaagcagtttcctcatttaggtcaccagatctggctgtgcctaaagcaaggcctggatatttcaattacaacagccaaataaatttccctttttcgcttaa

SEQ ID NO: 803836 - DNA, 120 bp, Artificial Sequence
  ENSG00000287724_0 (sequence is synthesized)
gacttcctctccagagaggcaggatggcataatgaacggctaagggacctgggagcctgattactggggtatatagacccagactgaacaggtactgggaatgaagcacacctagaggag

SEQ ID NO: 803837 - DNA, 120 bp, Artificial Sequence
  ENSG00000287724_1 (sequence is synthesized)
ccacctccctgacctcaggatccttaatgcccagagcaggctggcatggacatctcccattgctgaactcaccggagtgcatcgcacaaagctgccatcagccaggaccagctcgagaaa

SEQ ID NO: 803838 - DNA, 120 bp, Artificial Sequence
  ENSG00000287724_2 (sequence is synthesized)
tgccatcagccaggaccagctcgagaaatactcattcacttagaagatacagcaaaagtgaagaagaaaacaaaaatcacccatcctggctggtcgtggtgactcatgtctgtaatccca

SEQ ID NO: 803839 - DNA, 120 bp, Artificial Sequence
  ENSG00000287724_3 (sequence is synthesized)
attttttaccagcacacttccttatcaggaaggggtaagtagattcctttttgcctctcatttttgctcacgaattccccattcctgacttcctgtggaaacgcaaagggttcccctgac

SEQ ID NO: 803840 - DNA, 120 bp, Artificial Sequence
  ENSG00000287724_4 (sequence is synthesized)
ctattatgacccatctctcccctggtggctgtgaggcttgaggacagcaatggcagggagtatcttctatgactgtgggcattggtcctgtccactctgcaatgcccttggctaaaatca

SEQ ID NO: 803841 - DNA, 120 bp, Artificial Sequence
  ENSG00000287724_5 (sequence is synthesized)
tctccctatgagtcacttgcaccaggggcagtgccccacctgctcccagagcccggaaaagtgctactctcacctgtttcttggtgtccacttccagaatgtccatcaggttgatcatga

SEQ ID NO: 803842 - DNA, 120 bp, Artificial Sequence
  ENSG00000287726_0 (sequence is synthesized)
ggaggggagacaggagcaggaaggagggaccaagccttagggacagcccccgatgaaaggaccgagagaaacggggagctgccccatgcaaactgagggtgggaccccgatttggggaac

SEQ ID NO: 803843 - DNA, 120 bp, Artificial Sequence
  ENSG00000287726_1 (sequence is synthesized)
caggcgggatggagcgtggagtggggggaagaggtagcaaaagcttggtagctggctttgctgcctcctgaggaaggggcacagaatctccccttccctgccacaggtagtgggggttcc

SEQ ID NO: 803844 - DNA, 120 bp, Artificial Sequence
  ENSG00000287726_2 (sequence is synthesized)
tccctccccacccccttaaaatccttctttaccaggaactgcctgatccagatgaatctcttctccggggcccactagtctctaagaaagggaccatggaattcctttcttccccgaaga

SEQ ID NO: 803845 - DNA, 120 bp, Artificial Sequence
  ENSG00000287726_3 (sequence is synthesized)
gctccccactctccctgaccagagtctccttgatctggaggctgggcagcccccggggacccggtggccgccgctgaccccgtggcatgcggctctcaaaggccccattcatctctgggg

SEQ ID NO: 803846 - DNA, 120 bp, Artificial Sequence
  ENSG00000287726_4 (sequence is synthesized)
gctgaaggcgccattgtccccagcggggggtggtgtggggagtgaaggggtctggactcagaaggaaggaatgcgtctggagaagttgcccccggggctccagtctcaaggtccccacca

SEQ ID NO: 803847 - DNA, 120 bp, Artificial Sequence
  ENSG00000287726_5 (sequence is synthesized)
gatctccatcgggaccctttcacgaccccgagccctttccccaggagctcccagcaaccttcgcgcttctccggagggtggggtctgccgcggcgcgggggcagcctcaccccacctcac

SEQ ID NO: 803848 - DNA, 120 bp, Artificial Sequence
  ENSG00000287726_6 (sequence is synthesized)
tgctggactccggagaaccatttctgggaccgggagctgtccagcgcctcgggtcctgacggaccgctgattcgcctaggtgccatcggacaagcgggtgctcagagccagctctggtgg

SEQ ID NO: 803849 - DNA, 120 bp, Artificial Sequence
  ENSG00000287726_7 (sequence is synthesized)
ctcgggagctttcccccaaccaggctaagaccactaaaccacgcctggcccggatgagcttggatgcagctccgaacgtggggatccatcggtgctgagaactgacctagggagcacctt

SEQ ID NO: 803850 - DNA, 78 bp, Artificial Sequence
  ENSG00000287726_8 (sequence is synthesized)
ccaccagcccactttcctggaaccctgtctcagacttgggcaggaagaagagccatgagaggaataatcaaatttctt

SEQ ID NO: 803851 - DNA, 120 bp, Artificial Sequence
  ENSG00000287726_9 (sequence is synthesized)
attacaatgaactctcatatttttaaccatggccagttttttttgttgttgttgttattcacagacagttgttttactattattcttgtccgaaagtatttgcaatcaactattgtccaa

SEQ ID NO: 803852 - DNA, 120 bp, Artificial Sequence
  ENSG00000287726_10 (sequence is synthesized)
aattgcttcttcttcaaggacattcatgaaaaagattttgacaagtaccctggaatagaatgcaggttcaggtttctgataacttaaaaatcataccactgcactgggtaagaattttca

SEQ ID NO: 803853 - DNA, 120 bp, Artificial Sequence
  ENSG00000287726_11 (sequence is synthesized)
aaactctaatgaagaaactgataaattcatgaaactgctaagcaagatcaaacagaacaagatttgattacatgggactgaataaactaatgaggatgattttgggggatgactttttgg

SEQ ID NO: 803854 - DNA, 120 bp, Artificial Sequence
  ENSG00000287726_12 (sequence is synthesized)
ctgaaacattgctggttctttaatgttttgttttccatatttaagaaaacttttttttttttcacttttaagctatctatagcttacagccacttggtaaagtatacttttataagtata

SEQ ID NO: 803855 - DNA, 120 bp, Artificial Sequence
  ENSG00000287726_13 (sequence is synthesized)
ctttattcaatttcaataagaattgaagtcatcactttttctccttacctgattcctccagaattcagaaactattagtgagtatccttatttttatggcaatatagttatctgcatacg

SEQ ID NO: 803856 - DNA, 120 bp, Artificial Sequence
  ENSG00000287726_14 (sequence is synthesized)
ttcaaaaagaatctgttccccttgtagcagaacacattggaattattggctatattaccaaggctttgactggaatgcctattttcagatataaccagaatactttaaagaactaaggct

SEQ ID NO: 803857 - DNA, 120 bp, Artificial Sequence
  ENSG00000287726_15 (sequence is synthesized)
tgggcaggaagaagagccatgagagctctcatcagaagcagaggctgggattatctgcctagggctgagtcccttcatattaacaacagactgaagatgtactgactgcaacgagacaaa

SEQ ID NO: 803858 - DNA, 120 bp, Artificial Sequence
  ENSG00000287726_16 (sequence is synthesized)
tagaaataatatggtcacattcacctccatttcataaagcaagtggaacctgggctcactgcgatgaatgagcttcaataattcatcccagctgctgccttcaatgcaatgagagagaat

SEQ ID NO: 803859 - DNA, 120 bp, Artificial Sequence
  ENSG00000287726_17 (sequence is synthesized)
aacattaaggaatagctttggaatgggaagaactctctgaaccctgaaggatgagaagtctggaaaagagagtgggaagagtagaccagaaggaggaaaagccacatatttaaggttttg

SEQ ID NO: 803860 - DNA, 120 bp, Artificial Sequence
  ENSG00000287726_18 (sequence is synthesized)
cttcttgctgcaagcagattccttggctttaccttcagagcttttgactcaatgcagaaatggaaaagccaatccttaaattcaaatggaattgcagcggaccccaaatagccaaagcaa

SEQ ID NO: 803861 - DNA, 120 bp, Artificial Sequence
  ENSG00000287726_19 (sequence is synthesized)
tcttgaaaaagaagaacaaagctggaagacttacacttcctgatttcaaaacgtattacaaagctacagtaatcaaaatagtgtgatagtagcataaaggatagagagatatatatcaac

SEQ ID NO: 803862 - DNA, 120 bp, Artificial Sequence
  ENSG00000287726_20 (sequence is synthesized)
gaaatagaattgagagtccaaaaatatactaatacagctatggggtcaattgatttttgacaagggtgccaagagcattcaatgggcaaaaaatagtgtcttcaacaaatagtgctggga

SEQ ID NO: 803863 - DNA, 120 bp, Artificial Sequence
  ENSG00000287726_21 (sequence is synthesized)
caactggatatccacatacaaaaaaggaagaagaaggagaaggaggagaagaagaagaggaaggaagaggaggaggaggaagagaaagaaggaggaagaagaaggaagaagaaggagaaa

SEQ ID NO: 803864 - DNA, 120 bp, Artificial Sequence
  ENSG00000287726_22 (sequence is synthesized)
gaaagaagaacaaagaagaaagttggaccccttacctcgtaccatatacaaatattaactcactaaggagcttctggatagctgaacacatgaagatacttggagggaaggtggcatgcc

SEQ ID NO: 803865 - DNA, 120 bp, Artificial Sequence
  ENSG00000287726_23 (sequence is synthesized)
tagagatgtatgaaagctctatgccccttcccacatggcttgacctatccatctctccatctggctgttcatctttaaaataccccttatgataaatgggtaaatgctacatgttcactt

SEQ ID NO: 803866 - DNA, 120 bp, Artificial Sequence
  ENSG00000287726_24 (sequence is synthesized)
ggcatcctaggtcaggcatttggtctccaccagagcccaggaacaagcccaggagctgtatattttattttttcaaagtgtgaatgagttatttgtgtaaaaagacatagctgcaataca

SEQ ID NO: 803867 - DNA, 120 bp, Artificial Sequence
  ENSG00000287726_25 (sequence is synthesized)
aaactctaggagtctacgtcatgattcctctatcagggattcccagatggttcaccagcattcctatctgcaatagacatttggagcactgttgaatctgctgggtcataaggcccaagc

SEQ ID NO: 803868 - DNA, 120 bp, Artificial Sequence
  ENSG00000287726_26 (sequence is synthesized)
aggaaagcagcttatatcatacctgcaatagcttcagaaacttttcttgctctggtcctgtattagctttctattgctatgtaacaaattaccacaaacttagtggcctaaaacaaaaac

SEQ ID NO: 803869 - DNA, 120 bp, Artificial Sequence
  ENSG00000287726_27 (sequence is synthesized)
aaaaaacaaacaaaaattttgaactcattatgtatcaaatacctaaatgtaagagcaaaaagtgtaaaacctttaggagaaaacataagggtaaatattcatgactttggatttggcaat

SEQ ID NO: 803870 - DNA, 85 bp, Artificial Sequence
  ENSG00000287726_28 (sequence is synthesized)
gggtaaatattcatgactttggatttggcgcggtcttgctttcatcccccaggcttgagtgcaatggctcaatctcggctcactg

SEQ ID NO: 803871 - DNA, 120 bp, Artificial Sequence
  ENSG00000287726_29 (sequence is synthesized)
ctgggattacaggcatgagacaccacgctcggcctggcaatggtttcttaaacatgatatcaaaaccacatgcaacaaaaagtaagtatggatacactggacttcagcaaaattaaaaac

SEQ ID NO: 803872 - DNA, 120 bp, Artificial Sequence
  ENSG00000287726_30 (sequence is synthesized)
agtatggatacactggacttcagcaaaattaaaaactttcatgcatcagagaacatcttcaagaaagtgaaaagacacttttcatttcatttgtcaatttgcaaatcacatatccaataa

SEQ ID NO: 803873 - DNA, 120 bp, Artificial Sequence
  ENSG00000287727_0 (sequence is synthesized)
gggaaggaacgtcacaacacggccgagtgaagctgaaggacttgctgcttgagagacttctgccctcagttctcacctgtgcctggagctctaagagcactgaggcagacggatctttca

SEQ ID NO: 803874 - DNA, 120 bp, Artificial Sequence
  ENSG00000287727_1 (sequence is synthesized)
cctcgaccccaaggagccgggcacttggagtcctggtcaggtgtctcttctgtctcccctcttctagccagctttgcttggcgctccagatacaaaacctgacatctagtgcaagtccat

SEQ ID NO: 803875 - DNA, 120 bp, Artificial Sequence
  ENSG00000287727_2 (sequence is synthesized)
tttcaggaggaaaaagtgaagacagagcaacctggccaccccgctctctcagagtccctgctcaggagggccttcatccatacccggaacatccctccctgcagccaaaatcctcaggca

SEQ ID NO: 803876 - DNA, 120 bp, Artificial Sequence
  ENSG00000287727_3 (sequence is synthesized)
gaacaagtgcagaacggggcccacggcccgaataccatattcaccactgatttctcagacaccatgaagcctcttgcaagaaagcagctgtgacttggctgaaagcttgaccagcacctg

SEQ ID NO: 803877 - DNA, 120 bp, Artificial Sequence
  ENSG00000287727_4 (sequence is synthesized)
gagtttgctggattcctctgctcacccgcaaacatcccgccatgagaaggacagccttctctggggccctctgggctgtcaaggctgagcagacgctggctgtgtgggttgaggaccagg

SEQ ID NO: 803878 - DNA, 120 bp, Artificial Sequence
  ENSG00000287727_5 (sequence is synthesized)
accctcccaatagctgcctcactttccagagttctgagctattccagccccaagaaacacctgtggtccctgcagcctcacccttcacccctcaccgctcctcattcctgccatgctcac

SEQ ID NO: 803879 - DNA, 120 bp, Artificial Sequence
  ENSG00000287727_6 (sequence is synthesized)
gttaagaacattttattgccccctggttttcattattaatgaaaagggaccagaatgatctttcctaaagttcagagagtctataaagacaagaagctgaaatgccattttactcgtttt

SEQ ID NO: 803880 - DNA, 120 bp, Artificial Sequence
  ENSG00000287727_7 (sequence is synthesized)
ggagatgtgtgatacaattctgtcttgtggcaaaatgaaaaaagagaaaaactcggatagagatgactcctacccgctgtgtggctctcagagggtaacagaccaggctactgcaaaaac

SEQ ID NO: 803881 - DNA, 120 bp, Artificial Sequence
  ENSG00000287727_8 (sequence is synthesized)
attagcacagtccacactagctcaaactcccagccacgaccacctcaagtcctgcccctccccaccctggggcctattttttccaagtctggtgcagaccccgcaagggaactgagagca

SEQ ID NO: 803882 - DNA, 120 bp, Artificial Sequence
  ENSG00000287727_9 (sequence is synthesized)
gggcgcctgggaacacacctccccgccaccaggctccctgaatgtccggaggtataaagacaagggcaggagatggggcagtcactcttctctagctgggaagaaaaggaagagaatgag

SEQ ID NO: 803883 - DNA, 120 bp, Artificial Sequence
  ENSG00000287727_10 (sequence is synthesized)
tgggctttttaaatgcttcgagtctccactctggaagcagggactggcctgccatgcagacaaggcagacaaggtagcaagtgggcaacaagcctggggtcagaaaccctcatgccacca

SEQ ID NO: 803884 - DNA, 120 bp, Artificial Sequence
  ENSG00000287727_11 (sequence is synthesized)
gagcccagctgtctaaggaccggcgccctagctgcgtggcaggggttcctcaccagtaccaaagccctggcatctctgtgaaggctgaagagacgggcatctgtggtggcaatcctcatc

SEQ ID NO: 803885 - DNA, 120 bp, Artificial Sequence
  ENSG00000287727_12 (sequence is synthesized)
ctgcacacctgggccttcctggactgcctctacgctgtggcgctgtgggctgcaatgaggtcaggggataaactgctatagagcaaagggcatggagctcttcaaaacccaaccttccaa

SEQ ID NO: 803886 - DNA, 120 bp, Artificial Sequence
  ENSG00000287727_13 (sequence is synthesized)
ggactccacgaactagcttaagctctgcccggctccatggaggtcagcctgcgcaaaggctccagtttgggtaaaaccatggtagagcgggggcaggagaggtgcatccccacagctcct

SEQ ID NO: 803887 - DNA, 120 bp, Artificial Sequence
  ENSG00000287727_14 (sequence is synthesized)
aactattcactgaacaccaacaaaaccaacatgactctgtttctttatacctccaccaaccaaattctcacctaacaggtgagaacaaacatcatcaactaagaacacatgcacaggact

SEQ ID NO: 803888 - DNA, 120 bp, Artificial Sequence
  ENSG00000287727_15 (sequence is synthesized)
aggacttgtgcatacaacacggcaatgttgagcctgaaaccttgctgagcaagtcacagaccgatccacaccatggaaatcctgcaatccagtaaaggttcatcggcaacacagagctga

SEQ ID NO: 803889 - DNA, 120 bp, Artificial Sequence
  ENSG00000287727_16 (sequence is synthesized)
gagctgtcacggaaccatcctgccgagacaacaggcactccagtgatgtgctggctgacaagagggagagaactctcacgtccttggggaggctggcagcccaagcatgggcaaggcagt

SEQ ID NO: 803890 - DNA, 120 bp, Artificial Sequence
  ENSG00000287727_17 (sequence is synthesized)
ggtagaaacggggccagcccattgaggtcgcctccaggctcatcagggttggagccatgtctctatacagcagtgtctctagcttctcacatcagcccatcagcttcgctcagaagccac

SEQ ID NO: 803891 - DNA, 120 bp, Artificial Sequence
  ENSG00000287727_18 (sequence is synthesized)
cctgaaaattaaatgacaagacaggctcactcccagtaaggtcctggaataaagccagcccaccaaatcagtgcttgctacagcacagaggtggagagcacaagtgcagagagacgggga

SEQ ID NO: 803892 - DNA, 120 bp, Artificial Sequence
  ENSG00000287727_19 (sequence is synthesized)
cctggctgggctgagaagggctggctatagcttgggggcggggtgggccctgaagcacatggctgtggatggctggcagtgggcagaaagacaggcccagagagcagcaacagaaacaga

SEQ ID NO: 803893 - DNA, 120 bp, Artificial Sequence
  ENSG00000287727_20 (sequence is synthesized)
tcgtctctgctctgaacagaaggacttggcagcctggatggcaaaaggcaccacagtagcccaacagtagtcctgttggaaaatgcaaagcctgtatttacacgtacatcccatgaaaga

SEQ ID NO: 803894 - DNA, 120 bp, Artificial Sequence
  ENSG00000287727_21 (sequence is synthesized)
caatcttttccacttttcatgggctacaatgccattagcagtgtcatctttaggcaggaaggacaccgagaggcatatctatatcccctgtccatagattaaaaaatatgagctctaatt

SEQ ID NO: 803895 - DNA, 120 bp, Artificial Sequence
  ENSG00000287727_22 (sequence is synthesized)
aagctgttaagaattcagaagagtccagaaatagacccatgcttacatggtcaactgatttttgatagaggccaaggtagctctatggggaaaggataatttttgcaacagccatgctga

SEQ ID NO: 803896 - DNA, 120 bp, Artificial Sequence
  ENSG00000287720_0 (sequence is synthesized)
gaacagaggccacaaaagagctgtaagagcagagtgaagcaggctcatcctggtaatttgtagttttgcagataaagaacactttcctcagcacatgtgcagtggatcctgacaccagag

SEQ ID NO: 803897 - DNA, 120 bp, Artificial Sequence
  ENSG00000287720_1 (sequence is synthesized)
cttcaaagaggtcccaattggagagaaaatgaggaaaaggaggaacagatgggactaaaagcagaaggcacctgatgaaagagaaaaagcaaggctgggggaagggtgtttagagaagga

SEQ ID NO: 803898 - DNA, 120 bp, Artificial Sequence
  ENSG00000287720_2 (sequence is synthesized)
ctgggagaacaaaagcaaagaatctgaaatattatatgaacctctggactctggagtaagcatggctctaatgctctggaggacacatccttattctccaagatctctatcaagtcattt

SEQ ID NO: 803899 - DNA, 120 bp, Artificial Sequence
  ENSG00000287720_3 (sequence is synthesized)
aggagggaaagactggcggaaagagaaatacacaaacctcagaagggagcagacaattcacacatttctacagtttaaccttcagtgccaagagaaacagaagtggctggttatgaaaac

SEQ ID NO: 803900 - DNA, 120 bp, Artificial Sequence
  ENSG00000287720_4 (sequence is synthesized)
cggcagcacagctttttccctccctgtggtgtcttcccagataagaaagcaggcctgaatcccgggtgctgttcttccagaccacatgaaagattctgcatatctgttacattctaaggc

SEQ ID NO: 803901 - DNA, 120 bp, Artificial Sequence
  ENSG00000287720_5 (sequence is synthesized)
cacttcacaacactaccaaacccagctttacagtttggaagactgagagaatcatacccaaagccacaaacatccaaatatggtgttcttcacaagaaactaataatgaacttgagacag

SEQ ID NO: 803902 - DNA, 120 bp, Artificial Sequence
  ENSG00000287720_6 (sequence is synthesized)
tctatgttcaaacaggagcctggacatgactgagataaagaatgattcccgagctgggcacactggcttatgcctataattccagtgactcagaaggctgaggcaagaggattgcttgag

SEQ ID NO: 803903 - DNA, 120 bp, Artificial Sequence
  ENSG00000287720_7 (sequence is synthesized)
tctattgagctatgattgcaccactactgtccaacctgggggacacagcaagagcttgtctcttaaaaaagaaaaaaaaagattgagtccagagttagagctacaggataaaaataagtt

SEQ ID NO: 803904 - DNA, 120 bp, Artificial Sequence
  ENSG00000287720_8 (sequence is synthesized)
aactgaactcagggggagaaaggaggggaacctactccaaattctagctcaggtcttacctaaatgtgggctggctcagctcccaagtggctgagtgaggtcatgactgagaagaaagga

SEQ ID NO: 803905 - DNA, 120 bp, Artificial Sequence
  ENSG00000287720_9 (sequence is synthesized)
cccctggcccaagtcgtgagttgaatgactcttaggttgagaagctttcgtacctaagaatcaagtggccagtggtgcaccatgggagagatgatcaccaaacttttcttctctttgagg

SEQ ID NO: 803906 - DNA, 120 bp, Artificial Sequence
  ENSG00000287720_10 (sequence is synthesized)
tcacacacctagattacctgccccagtctcccttgcagttagatctggctgtgaggttgagttttagccagtgggataaagatggaagtttccactggcctaacccataaattcctccac

SEQ ID NO: 803907 - DNA, 120 bp, Artificial Sequence
  ENSG00000287720_11 (sequence is synthesized)
aactcttcccacttttaatcttatgcccccatgtcgtctcttctcccagccttcttcgtctcaataaatgtcactagcacatatccagtcattcaaggaaaaacacaatggagaaaacca

SEQ ID NO: 803908 - DNA, 120 bp, Artificial Sequence
  ENSG00000287720_12 (sequence is synthesized)
tcctcaactacccattccctttacctcactctttcccagcatcctgcaaaatctcgctccaaatatagctccagtttgtccacttccctcccttttctccagtctataaccttggtttac

SEQ ID NO: 803909 - DNA, 120 bp, Artificial Sequence
  ENSG00000287720_13 (sequence is synthesized)
attctcctcattttttcctttaaaaaccatttctttcttttacctccctgagtactcatatgggcacagcagtctcattgcagtgtattctcatgcactattcccaaataaatatttttt

SEQ ID NO: 803910 - DNA, 120 bp, Artificial Sequence
  ENSG00000287720_14 (sequence is synthesized)
tcttttagaaagcctctctctgtttgttatttaggctgacaataacaaccccaggaaatgggtaagttattatccctatttattgatgggttgcgggggagaaacagaaaaggatcaggc

SEQ ID NO: 803911 - DNA, 120 bp, Artificial Sequence
  ENSG00000287720_15 (sequence is synthesized)
tatttgcttaaagtccctcagcaagttggctcccaaggcaagtccagtgcccttgcatcccatcacctcctagaccctccaccagtgctgcttattctctctgctgttttcccagaatca

SEQ ID NO: 803912 - DNA, 120 bp, Artificial Sequence
  ENSG00000287720_16 (sequence is synthesized)
ttcactgcccttctccacatcacaggagctcctgtctcctctgacttcaggttggactggctaatagaaagaccaaaaggtggcaggagagcagagttgagcattcgttccctggctctc

SEQ ID NO: 803913 - DNA, 120 bp, Artificial Sequence
  ENSG00000287722_0 (sequence is synthesized)
ggtacctacgtcatttgaaaatctctgagccaattcatttgtttctacctgtggaacatctgtttagccttgggcagttgttttccagaattacctcaaaggaaagcacaacagtcagac

SEQ ID NO: 803914 - DNA, 120 bp, Artificial Sequence
  ENSG00000287722_1 (sequence is synthesized)
gtgaaatggaaacagaaaaatcttctgaagcagaatagtaacgctgtgaatttaaaagtaatggatttacattgacaacatgcacaacaggctcatgtaaaaggattatctgatgtgtca

SEQ ID NO: 803915 - DNA, 120 bp, Artificial Sequence
  ENSG00000287722_2 (sequence is synthesized)
tcatgacttaatgaagaacgcaaatgcttctcgatgaaattgaagtaaaaagaggaaacagaagggaaaatgagagtctaaaaagaaacaaagagaagttaacttttaagagatgacaaa

SEQ ID NO: 803916 - DNA, 120 bp, Artificial Sequence
  ENSG00000287722_3 (sequence is synthesized)
ttctacctgccacgatgttttattttaatctgaaagaaattataaagctgatactttctgaaaatatatccttttacagtaaatattcttgtgaaatctgccaacctacttttgttttat

SEQ ID NO: 803917 - DNA, 120 bp, Artificial Sequence
  ENSG00000287722_4 (sequence is synthesized)
ttcaaaagcttttgtacctctccagactaaacaaaatacttaaaagatgatatggacatttaaaaatattgtacttaaaaatagagaagaataaaaatcaagaattcattcaaaagaata

SEQ ID NO: 803918 - DNA, 120 bp, Artificial Sequence
  ENSG00000287722_5 (sequence is synthesized)
catcgatcttcctactgaaaacaaaaatatctgttgctgacatctaccaaaaagtgaattttttccccaaattgagctgagtccacctgttttggtaatgagttagagaaatatattctg

SEQ ID NO: 803919 - DNA, 120 bp, Artificial Sequence
  ENSG00000287722_6 (sequence is synthesized)
ttcttttttagaagctccatcagagtggaagacatttatgaactatataaatgtctcattagactccgtctcaaaaaaaaaaaagaaatgtctcattaatttttagttattggtttctca

SEQ ID NO: 803920 - DNA, 120 bp, Artificial Sequence
  ENSG00000287722_7 (sequence is synthesized)
ttctatgacccagagtcatgaaaatttcagaaaaccacaggttatttgttgagtgttcaaattgcataattaaataactgtcattgttgggaaaggagaatgatatggaagacatagccc

SEQ ID NO: 803921 - DNA, 120 bp, Artificial Sequence
  ENSG00000287722_8 (sequence is synthesized)
acacttggctcttgaaaagtttaccactgaactgagctaacagataaaacttcatcaatttcttatcactgaacctgagggttacacacagctgcacacatccttgctctgtaactcttt

SEQ ID NO: 803922 - DNA, 120 bp, Artificial Sequence
  ENSG00000287722_9 (sequence is synthesized)
ctgtgagagaggacatgtgtaacttcctatctaaggtcaatccctttatccctcttctgagagctgcaatggagatccagaacacagtggaagaatatattgaaatatgtgtatctaagg

SEQ ID NO: 803923 - DNA, 120 bp, Artificial Sequence
  ENSG00000287722_10 (sequence is synthesized)
tgttctataaattctcatttcaatgggctgtcccttagataaccaacactcatatgttgtttcatttctcaatgcatcttactgtgttccatattactttgagtctaatggaatgtacca

SEQ ID NO: 803924 - DNA, 120 bp, Artificial Sequence
  ENSG00000287722_11 (sequence is synthesized)
agtgtcttatggcctcagccatctgggctagagttcctagcagaactccttcctagctatgaacaggatgctaggagaaaactgaggcataaaagcaaggattaaaggaagagttgggcc

SEQ ID NO: 803925 - DNA, 120 bp, Artificial Sequence
  ENSG00000287722_12 (sequence is synthesized)
ccaaatgtagtgacttaaaagctacttgagcagctgggcttcatctgggtccaaccagatccaggggcagcaaggctgggtgatgagatggaagcatctgattgtgtcttgttttctgta

SEQ ID NO: 803926 - DNA, 120 bp, Artificial Sequence
  ENSG00000287722_13 (sequence is synthesized)
agattggctcggactgtgggaagaattgagtcagcaaactgcaggatgttttgtgtctccaactagaagagcctgggggtcattaagatttgatgggcaggaactgtgctgcccaatact

SEQ ID NO: 803927 - DNA, 120 bp, Artificial Sequence
  ENSG00000287722_14 (sequence is synthesized)
tttaagtttaaatgaattacaactgaatacaatgaaaaatgcttcagtctcagacagagtcactataaaatgtttccatcatcacagaacgttctgatggacggcattggtctggaagaa

SEQ ID NO: 803928 - DNA, 120 bp, Artificial Sequence
  ENSG00000287722_15 (sequence is synthesized)
gggatgagccggaggtctaccttcacaggctgggaattgaaggtctgttatgcttctgttattggcaggacagccagaggaggcagacaggacctttgatgcctggcaagctgtaccact

SEQ ID NO: 803929 - DNA, 120 bp, Artificial Sequence
  ENSG00000287722_16 (sequence is synthesized)
ttgattatactatggtacttttactatatcttttctatgtttagatatgttaagatacacaaataccactgcattataattgcctatagtattcagtacagtaacatgctaaacaggtta

SEQ ID NO: 803930 - DNA, 120 bp, Artificial Sequence
  ENSG00000287722_17 (sequence is synthesized)
gtagcctaggagcaataagccacctaccatatagcttaggtgtgtagtagtctctttcatctaggtttgtgtaagtacactttatgatgctcatacaatgacaaaatcgcctaatggtac

SEQ ID NO: 803931 - DNA, 74 bp, Artificial Sequence
  ENSG00000287723_0 (sequence is synthesized)
ggaagacaaacaaagatgagataatttacgggcaaccgaagagcataaaccaaagtagatatctatctagatag

SEQ ID NO: 803932 - DNA, 120 bp, Artificial Sequence
  ENSG00000287723_1 (sequence is synthesized)
accgaagagcataaaccaaagtagatatctatctagatagatagatacatctccatatcattgacaggataccttctggccaagtgtgagtacaacctatgggtgtggctggagagaaca

SEQ ID NO: 803933 - DNA, 68 bp, Artificial Sequence
  ENSG00000287723_2 (sequence is synthesized)
gcattcattcagtcatacagaccagaaggaggaatgtcgcccagccctctacactgacacagaaccca

SEQ ID NO: 803934 - DNA, 71 bp, Artificial Sequence
  ENSG00000287723_3 (sequence is synthesized)
acagcaagaactgcattcattcagtcatacagaccagaaggaggaatgtcgcccagccctctacactgaca

SEQ ID NO: 803935 - DNA, 84 bp, Artificial Sequence
  ENSG00000287723_4 (sequence is synthesized)
tcatatacaaatagatgaagatgggagagtagacagtcgcccctagacttaaattaagagtgtgtacattagataatttaatcc

SEQ ID NO: 803936 - DNA, 120 bp, Artificial Sequence
  ENSG00000287723_5 (sequence is synthesized)
atccaatgtatcaggtaaaaacttgaaaaacccttttggcctcttccataaaattcagggaagcatgtcctccacaaaacataatcaaaatataaatgaaagactggcttaagatgaaag

SEQ ID NO: 803937 - DNA, 120 bp, Artificial Sequence
  ENSG00000287723_6 (sequence is synthesized)
gaaaccttataaatgaaaagaagccagaggagaggcacttaaccgagaatgaaaaaaactgaatggacaaaataattatgagaagatgaatcttcaagtcagaaagagggaaaaaagctc

SEQ ID NO: 803938 - DNA, 120 bp, Artificial Sequence
  ENSG00000287723_7 (sequence is synthesized)
gatgaatcttcaagtcagaaagagggaaaaaagctcatttgatactatgggaactcaaaagagtgaacacaaatgtgaaaattccaagagtacagaaaagtagcataactaaattaagag

SEQ ID NO: 803939 - DNA, 120 bp, Artificial Sequence
  ENSG00000287723_8 (sequence is synthesized)
tcggagtaataagaacagaaatcaaaagttagtattgtatgttatatttttgtagagcaacactgaataagaatgaaaacaagaagtaatactaaatatgaacatatggagaacagaata

SEQ ID NO: 803940 - DNA, 120 bp, Artificial Sequence
  ENSG00000287723_9 (sequence is synthesized)
tagtttctaagtttacctgaaattttaattttggtttcttatgtaataccagagtgattaggaaggtattagctaataacactattttcagtgatattttaagtatttgtcctagaaaaa

SEQ ID NO: 803941 - DNA, 120 bp, Artificial Sequence
  ENSG00000287723_10 (sequence is synthesized)
acttcctgcacctttgatgtcatatacatagcaggaaataacacatggtggctgggatgtagagagagccaccggatttgtgaataaaaaccacaggcaaggatgtggcgattccttttg

SEQ ID NO: 803942 - DNA, 79 bp, Artificial Sequence
  ENSG00000287723_11 (sequence is synthesized)
agagccaccggatttgtgaataaaaaccacaggcaaggatgtggcgattccttttgcagtattggagggaatgccaaac

SEQ ID NO: 803943 - DNA, 79 bp, Artificial Sequence
  ENSG00000287723_12 (sequence is synthesized)
atatttgcacatccatgtttgcagcagcgttattggcaatagctaaaacgtacaatattaaatatacacacaatggaat

SEQ ID NO: 803944 - DNA, 67 bp, Artificial Sequence
  ENSG00000287723_13 (sequence is synthesized)
gtgtccaacaacagatgaatggataagtacaatattaaatatacacacaacttggatgaaacttgag

SEQ ID NO: 803945 - DNA, 78 bp, Artificial Sequence
  ENSG00000287723_14 (sequence is synthesized)
tatttatattccaaattagaatataatggtcatcaaacatagtggctgtgtttcttgcttcatctagtccatctattt

SEQ ID NO: 803946 - DNA, 120 bp, Artificial Sequence
  ENSG00000287728_0 (sequence is synthesized)
gtatcccatcacccaattggtgagcttagtacatgagtcagaaataatagatcgtgtcctcaccctgcatctctctggccacctctgcttccagcttctacctttaaggacccttgtgat

SEQ ID NO: 803947 - DNA, 120 bp, Artificial Sequence
  ENSG00000287728_1 (sequence is synthesized)
gacattgggaccagcttcatttctccaaatgtcctcctctcatacctctccttgcacatcaagctgctcaccctttgtgcttttgcacatgctgtttgattatgaaactccatgaccctc

SEQ ID NO: 803948 - DNA, 120 bp, Artificial Sequence
  ENSG00000287728_2 (sequence is synthesized)
ctcctcatgattcacttgactgactattcaacgctcagttcaggtggctcttccttcagaaagcctttttccatctactgtcctactgcccctcccaagttaagagcaggtgctgcaaac

SEQ ID NO: 803949 - DNA, 120 bp, Artificial Sequence
  ENSG00000287728_3 (sequence is synthesized)
ggactgcatttgttggggttgctcagcaggaaattgggggggcagtgagtgactcaccaaaactgagggatacgaaaggacaatagaataacaacagagaaaaacatgaagacagaaagg

SEQ ID NO: 803950 - DNA, 120 bp, Artificial Sequence
  ENSG00000287728_4 (sequence is synthesized)
tgtgtggacttgtttttgcccactctttcattgatggtacagcactttaaaggccctcgctttaggcgatggctcctttcataacttcctaactttcaggacctgaaggactcatctcct

SEQ ID NO: 803951 - DNA, 120 bp, Artificial Sequence
  ENSG00000287728_5 (sequence is synthesized)
aataagcctgtcacagaaaaaaaaatacgaaagagagagagaagaaggaaggaaggaagggagggaagagagagaagaaggaaggaaggaaggaagagaaattggaatgactgacaatgt

SEQ ID NO: 803952 - DNA, 120 bp, Artificial Sequence
  ENSG00000287728_6 (sequence is synthesized)
attcttcagcacggccaggttccatgccaccactggactctgtacatggactcatgatctgttttaataatctgggatttaccttaattgttgagtattctgctatgccttcagactttt

SEQ ID NO: 803953 - DNA, 120 bp, Artificial Sequence
  ENSG00000287728_7 (sequence is synthesized)
ctccagagtgaaaaatgaattacgatgatccagacaagagctactgatatgctgactcggctccataaaaatcactcagtttagtaaaacaattatttcctagcccaatatagacaaaat

SEQ ID NO: 803954 - DNA, 120 bp, Artificial Sequence
  ENSG00000287728_8 (sequence is synthesized)
aatttccttgttagttgtctagagttgtattatttttttaaccagttgtgagcaacatccttttagacatattaccttatgtgattgacgtggaatttcaacaacacttttatgagtatg

SEQ ID NO: 803955 - DNA, 120 bp, Artificial Sequence
  ENSG00000287728_9 (sequence is synthesized)
ctgccaatttgcacctatttcaatagatttttccagcaacatgtaggcatgaatgtgctcatggcctttcttaaatgattaattgaaaggttctaaagtcttttttcaagactagccaac

SEQ ID NO: 803956 - DNA, 120 bp, Artificial Sequence
  ENSG00000287728_10 (sequence is synthesized)
gaagacagaacagctcagtgtggctggtgtatcgtgttccttttgaagattgataggagactgctgtaaacaggcaacaagagtgccagaagatgtggaatttgtataaccccaaactgt

SEQ ID NO: 803957 - DNA, 120 bp, Artificial Sequence
  ENSG00000287728_11 (sequence is synthesized)
gttttcctaactaatcttggcaagcttaaaaccctggaaagtcacaattcacttcccaggcgatcatcctggacagctcaacagcagaaaagcagaacaggatatccagctattgaaccg

SEQ ID NO: 803958 - DNA, 120 bp, Artificial Sequence
  ENSG00000287728_12 (sequence is synthesized)
ggctgccggcccaggtggccagccttgaagctgtggagagcgcctaccaggagggccgcatgggctgcaggaagacacgttcctttcctctgtctgttgtgagctggaaaggaaagtaca

SEQ ID NO: 803959 - DNA, 120 bp, Artificial Sequence
  ENSG00000287728_13 (sequence is synthesized)
gtctgcactcccgaaacactgcctgccaacacagcacttttcagcaaaggtgaaaagagagtatgtctctaacaataaatgtcacaagaggaacaaatcatttataagattcaggaggcc

SEQ ID NO: 803960 - DNA, 120 bp, Artificial Sequence
  ENSG00000287728_14 (sequence is synthesized)
ccaactcaagcagatagttggcagtggaaaaacagcttcaattttattactgtattgaatgagacatagcttcacagatgtgagaccatttaagaccaattgtttttgtacctaaagtta

SEQ ID NO: 803961 - DNA, 120 bp, Artificial Sequence
  ENSG00000287728_15 (sequence is synthesized)
cttaagtatataggatgaaagaaataatgagttagggggctagggttagattctctggtcttgtgctaagagttccatgacaggaatttttatcgttattaatgacaaggtcttcctcct

SEQ ID NO: 803962 - DNA, 120 bp, Artificial Sequence
  ENSG00000287728_16 (sequence is synthesized)
gatgccattcttctatttttgtattttcctttgtttgtttttttaagaatgaattattttcattcaagttatgaaatcctccctcagaagtctgtttatatttacaaaatatcctaattt

SEQ ID NO: 803963 - DNA, 120 bp, Artificial Sequence
  ENSG00000287728_17 (sequence is synthesized)
atatttatgaaataattctcaaataaataaataataaagagaagcaggaagaatgatagaaaatgtgtatttccaaaattgataaagcaatctatttgcttgtcattgtaaatcaataca

SEQ ID NO: 803964 - DNA, 120 bp, Artificial Sequence
  ENSG00000287728_18 (sequence is synthesized)
tacaaaacaaataaattttaaaaaaattactactaattacagattctttcgagaaaaaaattgcattctttaaatctaggaaacttttattctagttcataaaacaagatgtgaagaaat

SEQ ID NO: 803965 - DNA, 120 bp, Artificial Sequence
  ENSG00000287728_19 (sequence is synthesized)
ttttatacgtaattgtatatccaattggcaaggtagtatatgtgttcatttttcttctacaactgagtctcaataaatgcatatatatgataaaaatatgataatagacaagtagataat

SEQ ID NO: 803966 - DNA, 120 bp, Artificial Sequence
  ENSG00000287728_20 (sequence is synthesized)
aggtagatagcagatataacagataagtagatgctaagtctacacagctgaggaatcagacctaaaattataccatcagtttagttacaattttgtgcctatataattttttagaagcct

SEQ ID NO: 803967 - DNA, 120 bp, Artificial Sequence
  ENSG00000287728_21 (sequence is synthesized)
aaacattaaaatttaatactcttgttatcctacaagaatattggttaacatttgaattactgtaaaaaatattctaaaatagtcaaaccaatttacaattgcaatatacaatcaagatca

SEQ ID NO: 803968 - DNA, 120 bp, Artificial Sequence
  ENSG00000287728_22 (sequence is synthesized)
cctgcatgaagacaaaattaataaaagtgcatcagactttcattaacttaaataaccaatattattgttttcctaaagataaagtttcattttaagaataaatgtcaaattattttcaat

SEQ ID NO: 803969 - DNA, 120 bp, Artificial Sequence
  ENSG00000287728_23 (sequence is synthesized)
ttgctgtataagaattactagttggcgaaatgagtcaatcctctgttggggagcaatgttgttggtgaacagtggtcaaccagtctatactttggggaacaggagcaggattggtcatca

SEQ ID NO: 803970 - DNA, 120 bp, Artificial Sequence
  ENSG00000287728_24 (sequence is synthesized)
gagagaatctgacctactgtactattgtctatgagatgtctttcattttgatgtaggtttctcctttattagtaaacagatgactttttagtgaggaaaaaaccctgtttttttcatctc

SEQ ID NO: 803971 - DNA, 120 bp, Artificial Sequence
  ENSG00000287728_25 (sequence is synthesized)
aatagtcttcttataaattgatgaagaagctcatcaataaagaaaacttggtacacaccagctttcatgtaaattgtatcaattcttaactagattttgcctaggagctaatttttcaga

SEQ ID NO: 803972 - DNA, 120 bp, Artificial Sequence
  ENSG00000287728_26 (sequence is synthesized)
catgaaattgcttggaaatccagaaggattttctttttcatctgggggcaatctggtagcaatttcatatcccttactaaatttgagagtatgtctgtgtgtgcataagtgcatgtgtat

SEQ ID NO: 803973 - DNA, 120 bp, Artificial Sequence
  ENSG00000287728_27 (sequence is synthesized)
ttatgtaggtgtgtatactagacttttccttttttttagtttattttttaattaaagattctccactcaaaatattagaaatttagtgaagcataagaaaaccactactcaaaaaatcat

SEQ ID NO: 803974 - DNA, 120 bp, Artificial Sequence
  ENSG00000287728_28 (sequence is synthesized)
tgccaatatgttagtaagtatatattcagaattttctatgaacaagctcattttaacaaaaaccaaaaaaagaggcataggtgtacacactgagtatctttattgtcttgttcattacat

SEQ ID NO: 803975 - DNA, 120 bp, Artificial Sequence
  ENSG00000287728_29 (sequence is synthesized)
cgtgaccatgttttctatcaacccatatgcatttgaagtatggtaataaaatctgcatggcattccgttatataaacgcactctaaccgatttaactaatccctactctgagacatttac

SEQ ID NO: 803976 - DNA, 120 bp, Artificial Sequence
  ENSG00000287728_30 (sequence is synthesized)
tgtgcttctgactttctcccattctaaaagatgcctcaattaatattttatcaaatctgtgttaaaactgtgataaatttttactagtggaattgctaagccaaagtcattgtctacttt

SEQ ID NO: 803977 - DNA, 120 bp, Artificial Sequence
  ENSG00000287728_31 (sequence is synthesized)
taaagcttcttattaatatatccatattctgctctttaaaagtttggtcagtttactctcctatgagtagtatgtattaacacttgttttctcacatatccactgtcactgggaagacta

SEQ ID NO: 803978 - DNA, 120 bp, Artificial Sequence
  ENSG00000287728_32 (sequence is synthesized)
cttgtattttttcatattcagggtcactggatactattaaaaaataaaaaattggggtcaattattttgttcaaatatgttatctcattatttgtttttatttgtatttcttttaatttt

SEQ ID NO: 803979 - DNA, 120 bp, Artificial Sequence
  ENSG00000287728_33 (sequence is synthesized)
atcaatttctttattagccattttaattattttttgcttactttcctgttatatacattctgtacattttcttatcttctgtactttattagtgatatttggttttgatatatgaaaaca

SEQ ID NO: 803980 - DNA, 120 bp, Artificial Sequence
  ENSG00000287728_34 (sequence is synthesized)
accatttgttacaaatgaaacaaattttttttcagatggctgtctacaaaatagtctttcagtaagaggatgactctggagttaggcaaactggggtttcaaatctgaattatctcattt

SEQ ID NO: 803981 - DNA, 120 bp, Artificial Sequence
  ENSG00000287728_35 (sequence is synthesized)
acaagctatgtgactttagacaagctactagagctcactaaaactcagctttaacataatataaaatagggatggtaaacctgttttggacataaatactaaataggcctaggaaatagc

SEQ ID NO: 803982 - DNA, 120 bp, Artificial Sequence
  ENSG00000287728_36 (sequence is synthesized)
aagtacaaaattaatgatagttgttattattttaattgtttgtaatgttttagacatttgaacactgtttgaatgttacaaaaccaaatctctatgtttatagcttcttagagttaaagt

SEQ ID NO: 803983 - DNA, 120 bp, Artificial Sequence
  ENSG00000287728_37 (sequence is synthesized)
aggaaagttgttgaaaactcagactcgggaaacagtctgagttggaaacctggctccggtttttagtagttgtttgattttaggcaagttacttaacctttcttagcctcagttttctca

SEQ ID NO: 803984 - DNA, 120 bp, Artificial Sequence
  ENSG00000287728_38 (sequence is synthesized)
tctgaaaaataggtggatattaatacctgtgttataaaggcattgagacaataaaataaggtactgcttatcaaacatctaacacaatgcttggcatttgaaacattctcagtaaacacc

SEQ ID NO: 803985 - DNA, 66 bp, Artificial Sequence
  ENSG00000287729_0 (sequence is synthesized)
cgccctgccggaactcttaaattctggttcttaattcccactcttttaattaagcaacctggaaag

SEQ ID NO: 803986 - DNA, 120 bp, Artificial Sequence
  ENSG00000287729_1 (sequence is synthesized)
gttcttaattcccactcttttaattaagcaacctggaaagcatgctttgctggctcatctccccaaaaatgtccacaaattatccttgtactgtgtcccttggatagtttttttttgggg

SEQ ID NO: 803987 - DNA, 120 bp, Artificial Sequence
  ENSG00000287729_2 (sequence is synthesized)
ggggggaatgacattttaaaagtgaccagaaattcctgaacaaagtagtcagcaagagtaaactggtgcaagaaagtcagactggataaagaagagatctggcctagaactggaagaaag

SEQ ID NO: 803988 - DNA, 120 bp, Artificial Sequence
  ENSG00000287729_3 (sequence is synthesized)
atgatattttaaggcaagaagccagcccaacccaagatagcagagatcctggattattttgagacagacttagaaggatccatttcatgaaaaatgtcctagaaatatgacagtcagact

SEQ ID NO: 803989 - DNA, 120 bp, Artificial Sequence
  ENSG00000287729_4 (sequence is synthesized)
ctcgtgttaaaggccatgtagtccaaccatccacttgtgctgaaatcgctcacaacatccccaccaagtggtcgcccttgcctacattcttctattttccgttctccagtgttcttctat

SEQ ID NO: 803990 - DNA, 120 bp, Artificial Sequence
  ENSG00000287729_5 (sequence is synthesized)
atgaagcacaccatcagatgtttgaaggtggcacgtggggtgatggtgctaatatcgctatacaagccatgcagggccctttcttcattttgcccgtctttaaagggtggaagttctgga

SEQ ID NO: 803991 - DNA, 120 bp, Artificial Sequence
  ENSG00000287729_6 (sequence is synthesized)
gagagtcactacatagataatgtgaggaggatctctgattcccgccatgacagagtaactggaaatgaactttccttctcaccataaacagctataaaactgggagaaaatatccacgac

SEQ ID NO: 803992 - DNA, 120 bp, Artificial Sequence
  ENSG00000287729_7 (sequence is synthesized)
acatatgtctcacaagagacttgtatccagaattcttaaagaatgctttcaataataaaatgacaaaaattccaatttaaaaatgcataaaatacttgaaaagaatcatggttaccaggg

SEQ ID NO: 803993 - DNA, 120 bp, Artificial Sequence
  ENSG00000287729_8 (sequence is synthesized)
gctggggtggttgacagggggttggggaaatgttggtcaaaggacataaaatttggttgaataggagggataagttcaagagatctattttacaatctggtgactgtagttagcaatata

SEQ ID NO: 803994 - DNA, 120 bp, Artificial Sequence
  ENSG00000287729_9 (sequence is synthesized)
ttgtatttttgaaaaatgctaggagaatggatgtaaagtgttctcaccatacaaatgaaaacgatgtgaggtaatgcatgtgttaatttgctatatttagtcattccacaatgcatatat

SEQ ID NO: 803995 - DNA, 120 bp, Artificial Sequence
  ENSG00000285768_0 (sequence is synthesized)
ataaggggacatgtatgtggcaaagaaggtgaagattccactgggagtccaggattcctgatggaggccaggaagcaaaggtacttggaggtcagagtggccggagcctatcccagcagc

SEQ ID NO: 803996 - DNA, 120 bp, Artificial Sequence
  ENSG00000285768_1 (sequence is synthesized)
tcagcgagcaaggcagaaacccaccctggacaggatgccatcccatggaatatctagagagctggaaaagcatcacttctgggtgtgtctgtgagggggtttccagaggagattggcatg

SEQ ID NO: 803997 - DNA, 120 bp, Artificial Sequence
  ENSG00000285768_2 (sequence is synthesized)
agtcagtgaactgtgtggagcagatttgccctcaatgtcagcaggcatcatccaatcagctgggagcctggatagaacagaagacagagaaaaggttgacataaatgtgtccagaagcag

SEQ ID NO: 803998 - DNA, 120 bp, Artificial Sequence
  ENSG00000285768_3 (sequence is synthesized)
gacctgaagcaagagcacttttagaaggaatctgcgattcttggaactggtgtgcagtattcacttgagatctctgagctcgccacgtgcatgccttgtcttttctgacctggtgaatct

SEQ ID NO: 803999 - DNA, 120 bp, Artificial Sequence
  ENSG00000285768_4 (sequence is synthesized)
tctcttaggctgagtctctttttggtagaggctttttgactttcttcaggatttggtttggtactaaggcagccttaaataaaggaacttgcatccctcttaaaactatggaagttttgg

SEQ ID NO: 804000 - DNA, 120 bp, Artificial Sequence
  ENSG00000285768_5 (sequence is synthesized)
gggtttgtttgtttgttttgcaaacgctttctggtgtaaagataagagtactctagtttttacagaatttatattgtttctcaggcatgacttttctggtgaattcacattggttctgga

SEQ ID NO: 804001 - DNA, 120 bp, Artificial Sequence
  ENSG00000285768_6 (sequence is synthesized)
ttcttttctctagcttatttctgaaaagcttctgagagcgaaaatatacatcctaaatggcggacacagaatgactaatttaaaaagcgaatacctgaaacactagtccaaattcctgac

SEQ ID NO: 804002 - DNA, 120 bp, Artificial Sequence
  ENSG00000285768_7 (sequence is synthesized)
attctctgacaggatttatgggattttctttgctcttgagagattaataagaaagaaagtgagattctcaaacattaaggcatgccaggttttctgagactccagctggctacatatgat

SEQ ID NO: 804003 - DNA, 120 bp, Artificial Sequence
  ENSG00000285768_8 (sequence is synthesized)
ggcctgttctcatgcacatttttaaactaatgagcaaactttccttcatgtcaaggaaaattcagagctcaatggccattattcaaactctctaagcttgttaaaaatctacaaccaacc

SEQ ID NO: 804004 - DNA, 120 bp, Artificial Sequence
  ENSG00000285768_9 (sequence is synthesized)
atagagttaacatgcagagctttctaagttctcaatctctctatttttccttctggctattttgaatctgctaattttctactagtgttgagataaactcactgcttatggcacaccaga

SEQ ID NO: 804005 - DNA, 120 bp, Artificial Sequence
  ENSG00000285768_10 (sequence is synthesized)
caagatttaaaaaaaaaagtttcaaagatttttttttaaattaatggctgtacaaattacaacagctccatggcaacaaacaacctacacatcttttgggaattaggttttttgacttag

SEQ ID NO: 804006 - DNA, 120 bp, Artificial Sequence
  ENSG00000285768_11 (sequence is synthesized)
cttttgggaattaggttttttgacttagcaattgcttggagtaacagaatagttaaatgaatatttatattctaaaagaaaggaggctgggtgtggtgtctcacgcctataatcccagca

SEQ ID NO: 804007 - DNA, 120 bp, Artificial Sequence
  ENSG00000285769_0 (sequence is synthesized)
cactgtgacagcccctctctcatgggtcccatcatccctccctgcatctcatttctgttgggaattcccaaagcagaaggagtttctttgctgcttcccttttcagaaacttggagacca

SEQ ID NO: 804008 - DNA, 120 bp, Artificial Sequence
  ENSG00000285769_1 (sequence is synthesized)
tatatctttgcaaagtggatttttaaaaataaagaagaaaagattaaatcagagaagctcccaagttttctgccttctgcctggaccagcttcctgtgcttcttcctttccaaaattgat

SEQ ID NO: 804009 - DNA, 120 bp, Artificial Sequence
  ENSG00000285769_2 (sequence is synthesized)
gtggtaaatgttattgcagtagcactggctcagaaaagcccaggccttccaagaatgtaaccttcatggagaaattctgcgactctttctcctcttgggaggctagagaggtaagacgta

SEQ ID NO: 804010 - DNA, 120 bp, Artificial Sequence
  ENSG00000285769_3 (sequence is synthesized)
gaaggagagagagaaaaagagacacggagaaatttgccttgttagtggctttcaggagaacaaggccagaagacacagagtcccggaccttatccacggttcccacactggcatgatgaa

SEQ ID NO: 804011 - DNA, 120 bp, Artificial Sequence
  ENSG00000285769_4 (sequence is synthesized)
agcctggagctgtctacgagcatacagaccttggggaaagaggaggaagtcatagtgtagcgcaaagctgaacctcaagagggcaggaatgctgatgacatcatttgagtctctgggtcc

SEQ ID NO: 804012 - DNA, 120 bp, Artificial Sequence
  ENSG00000285769_5 (sequence is synthesized)
actccgccctgttcttcccagttatgtgaatcaaccaagtccctttattccttcacctaatgtgaactgacaaatctcattcaatttatggcaagggagtgagatttaataatctggttc

SEQ ID NO: 804013 - DNA, 120 bp, Artificial Sequence
  ENSG00000285769_6 (sequence is synthesized)
ttagattctggaaatgattcttatttagtgccaatactcctgtataggtgaatacatatctatttttgagaaatcaatacacatttgtatgccaaggccaaattttgaacttttctttta

SEQ ID NO: 804014 - DNA, 120 bp, Artificial Sequence
  ENSG00000285769_7 (sequence is synthesized)
acatcagatatggattttagccacactaagcaatgaaactaagatgtaatcacttgtatttactttcatttgtaccctaagtcattagatggatggcatgtgaatagagcaatctttctg

SEQ ID NO: 804015 - DNA, 120 bp, Artificial Sequence
  ENSG00000285769_8 (sequence is synthesized)
ggcctgctttttcatcacccttagatatgaccactgaactccctgtggtttgtgcttgttgctctcacatttctaccagattgggggacgtctgcccatcacagttcactgggcacaata

SEQ ID NO: 804016 - DNA, 120 bp, Artificial Sequence
  ENSG00000285769_9 (sequence is synthesized)
gaagtgaggtggggaaaatctccctgtacatgccaatgcagttagcttcctgacagtgccttcgcccatccattcaattaaatcatccatttattcatcagttgttttttgagttcagac

SEQ ID NO: 804017 - DNA, 120 bp, Artificial Sequence
  ENSG00000285769_10 (sequence is synthesized)
ccagagacagtacttggtgttggggacacaagtgagacacatgcctgtcctaactaagctcatggcccaatgcagaaagcagaccaggcaagtacactagagtggagtgttgctgggata

SEQ ID NO: 804018 - DNA, 120 bp, Artificial Sequence
  ENSG00000285769_11 (sequence is synthesized)
gaggaagtgctgggtgctaaggaaaacatagaggaggcacctagttcagctttgccaaggaagtgggacacatgaatggtgagtgggagctggctagacagagatggcagagtgaggagg

SEQ ID NO: 804019 - DNA, 120 bp, Artificial Sequence
  ENSG00000285769_12 (sequence is synthesized)
ccatggagccagtggaggaggaacagatcacagctagcagataagagctcttggtagagcaaacatcaggtgtaaagactgggagctgagacctttttttttttttttgagatggagtct

SEQ ID NO: 804020 - DNA, 120 bp, Artificial Sequence
  ENSG00000285769_13 (sequence is synthesized)
cgctctgtcacccaggctggagtactgtcgcctgatcttggctcactgcaaccactgcctcccgggtccaggcgattctcctgcctcagcctcccacgtaactgggattacaggtgcatg

SEQ ID NO: 804021 - DNA, 120 bp, Artificial Sequence
  ENSG00000285769_14 (sequence is synthesized)
caaagagaatctcagtccagctcaagttttcagcatgaagggacagagaaaaggctatcgtggctcatttttccctgttgaaatgagcagccatggcagctcttccctggcaccaagctt

SEQ ID NO: 804022 - DNA, 120 bp, Artificial Sequence
  ENSG00000285769_15 (sequence is synthesized)
gggaagtcggcaccttctccagtcttcatgtcagctgtggagatgcagggagtcctgcttgctagcagaataagaaaatggattccttcaattcaatgctatccagtctgtagcattaat

SEQ ID NO: 804023 - DNA, 120 bp, Artificial Sequence
  ENSG00000285769_16 (sequence is synthesized)
cctctcttcccctctcttcctgtggaaaagcttactggctcacctatttggaaggagtcctaaggacagggagggtaaaggaatgttagcaggaaagctgcaggaagttagagaaagtct

SEQ ID NO: 804024 - DNA, 120 bp, Artificial Sequence
  ENSG00000285769_17 (sequence is synthesized)
aaaaaaaatttcccccttcccccttgggcagtaaagaagaaaattaaatgagagtgtcaaaacggtttgctgatgtgcaaaccgcttactagaccttggtcaaggtctaatatcttttta

SEQ ID NO: 804025 - DNA, 120 bp, Artificial Sequence
  ENSG00000285769_18 (sequence is synthesized)
agaatgatggctttggaattagaccttttggggttcagatctcagctcttccttttgattggctgtggagctgtgggtaatttgcttaatctctttgagctttcagttcactatgaaaca

SEQ ID NO: 804026 - DNA, 120 bp, Artificial Sequence
  ENSG00000285769_19 (sequence is synthesized)
cgaccatgtggagattaaagaatcaaatgtactacccaatacacagtaggtattcaataaatgacagatattattacttttaggtgatatagatatcatatttttgtgaggattaaatat

SEQ ID NO: 804027 - DNA, 120 bp, Artificial Sequence
  ENSG00000285769_20 (sequence is synthesized)
tttaatccgtgtaaagtgattggcccatgagaagcacatgtgttaactgttactaccactgttagctattatcagagatagctgtgtatggagaattcctgaaacctccaatcctctgaa

SEQ ID NO: 804028 - DNA, 120 bp, Artificial Sequence
  ENSG00000285769_21 (sequence is synthesized)
actagagtcaggaaacagactttgacacatagaccaaaaacagaggtgacaggttcatcttatgtaccaactggccagttggcaatgagtgcctagaatgtgcctgaggcacaattctaa

SEQ ID NO: 804029 - DNA, 120 bp, Artificial Sequence
  ENSG00000285769_22 (sequence is synthesized)
gagctatctggctcagtagggaagagtatgctatgatctattagtgagatgtctgttctgggtggcagagagagtcatgtcagcatgtgtgctatagatttgccttctttagactgaagc

SEQ ID NO: 804030 - DNA, 120 bp, Artificial Sequence
  ENSG00000285769_23 (sequence is synthesized)
ttcattctagacagtttgggagccagtaacaaagggctggggctggccttgtccacttgtgctagtctccacttgctccatgttttactcctagcacaaagttgagacatggccagagcc

SEQ ID NO: 804031 - DNA, 120 bp, Artificial Sequence
  ENSG00000285769_24 (sequence is synthesized)
caaacccagctgccttttcctcaagaaacttttgctggcattaatcaagacctgtaaatccaccatgtggatgacacaggctgtgtgcccagcccagactctgcgagcgacagaagagga

SEQ ID NO: 804032 - DNA, 120 bp, Artificial Sequence
  ENSG00000285769_25 (sequence is synthesized)
gggagttgcttagtgacatgacacaaagggcgtctttgattcatcacccggccccagccccaagcccctggccagcagcgaggaacggctgcaaatgagcaataggactcctttacaaat

SEQ ID NO: 804033 - DNA, 120 bp, Artificial Sequence
  ENSG00000285769_26 (sequence is synthesized)
gtcactttgctgtaaaatgtaaatgtttaacatttagacacgaacgctgactcccaaaatgcctagtgctgggtggcttttattcattctcttagggattctttgtcctcccatggtgag

SEQ ID NO: 804034 - DNA, 120 bp, Artificial Sequence
  ENSG00000285769_27 (sequence is synthesized)
agatttcactgcatgatttacacccctgtgcttgttaaattgctggcatgtcttgccccagatagggcagcaaaagagcagagatttgcaggggactttatacctttcctgttaatgcag

SEQ ID NO: 804035 - DNA, 120 bp, Artificial Sequence
  ENSG00000285769_28 (sequence is synthesized)
agtattaaatatacagtgcaattccatcggcagccactgctcagaggtgctatgaactctgaacagaggagatttcattttatttccaattatcctggacttcaaaatataggattgtgt

SEQ ID NO: 804036 - DNA, 120 bp, Artificial Sequence
  ENSG00000285769_29 (sequence is synthesized)
cattgaaggtcgagaaagaccaaaaacagcaataaaatatattccctgggagttctgtcttctagacctgctcatcagctaattctgtcttagtggtctgggactaaggggcaggtacat

SEQ ID NO: 804037 - DNA, 120 bp, Artificial Sequence
  ENSG00000285769_30 (sequence is synthesized)
tgaggatatgggtgattgttcttggggctaaattccttttccccccaagacaattctaatgagggtaagccctgtagccactctcagcctcctgatgattggcctttggataaagatgga

SEQ ID NO: 804038 - DNA, 120 bp, Artificial Sequence
  ENSG00000285769_31 (sequence is synthesized)
cctagcataaaaagtaagtcaaagttcagacatctggcaagactcagagccaggcaaggaaagcaatagggtcacaggaatcactgggcgtaggggcaggaagatctagatggcagtttc

SEQ ID NO: 804039 - DNA, 120 bp, Artificial Sequence
  ENSG00000285769_32 (sequence is synthesized)
acccaactttcgtttcctctagaacatattgtttgttgaatttttctctgcacccaccccacacttgctgcctcccacagttttgatcacagtaggcacttaatgcctatttgtttaatt

SEQ ID NO: 804040 - DNA, 120 bp, Artificial Sequence
  ENSG00000285769_33 (sequence is synthesized)
aattaaataagtagtgagtcactggcaaacctagcgctggctgaagagattatgtctaaagttccaatggctgaattttacaacttcggacaagtctcttaacctctccgtatgagattt

SEQ ID NO: 804041 - DNA, 120 bp, Artificial Sequence
  ENSG00000285769_34 (sequence is synthesized)
tatgttattcctgtcacattctttggaagtaactgagatagaaagagattattattaatttaccaataagaaacagaggctcagacaggctacaggtttttcttgatatcatgttgagtt

SEQ ID NO: 804042 - DNA, 120 bp, Artificial Sequence
  ENSG00000285769_35 (sequence is synthesized)
gttctgaagctgtgtctgattcactgtgacagcccctctctcatgggtcccatcatccctccctgcatctcatttctgttgggaattcccaaagaacttccagaacaatgttgaatagaa

SEQ ID NO: 804043 - DNA, 120 bp, Artificial Sequence
  ENSG00000285769_36 (sequence is synthesized)
cgcttcgacggagctacaatggagatgatgtggtccacctttggggtaggctcgtaagaactgcagtggataaaaggacaactagaaaagggaggtggaggtggaagcaagctgccaccg

SEQ ID NO: 804044 - DNA, 120 bp, Artificial Sequence
  ENSG00000285769_37 (sequence is synthesized)
tattgccttgggacttgccagagacctgaagattcctgaactcaaggtggggcattgcctttgaggaactgaagccacgtaactgaataggctagtcttggttttcagaatgtgagccat

SEQ ID NO: 804045 - DNA, 120 bp, Artificial Sequence
  ENSG00000285769_38 (sequence is synthesized)
agaaccaggataatgcattagtcatggtccattgagctaatacaaaagtactcaagtatattccaaaatatatttttctatatctgaagataatttgagtctgtagacacccattaaacc

SEQ ID NO: 804046 - DNA, 120 bp, Artificial Sequence
  ENSG00000285769_39 (sequence is synthesized)
tataaagtatgcacccactgccaatgcgattgacctatcggaaagatgtgtacttgggagcgtaggcatgcatctttgcaagtgtggaggtgtgttggttatcatgagtgagaactggtg

SEQ ID NO: 804047 - DNA, 120 bp, Artificial Sequence
  ENSG00000285769_40 (sequence is synthesized)
agtgggattcagagcctgagtcctacctgagtaactgggagactgtggtactgtgcctccaaggtggcatccatcaatgcttccttccctgtgtgcacatccagagatgagattgacgcc

SEQ ID NO: 804048 - DNA, 120 bp, Artificial Sequence
  ENSG00000285769_41 (sequence is synthesized)
tcctctccccttagacatggctggacttaccaacatgcttggtaagtccagaatgcagctgtgtgactttggggatttggaggctcggtcacagaagtcgcagcttccccacgtgcctct

SEQ ID NO: 804049 - DNA, 120 bp, Artificial Sequence
  ENSG00000285769_42 (sequence is synthesized)
tcgtctgcttgcttttgaacatttcctcatgggcaccagccttgagggccatgctgtgagaagctgaagccgctggagaggtccctgtagaagtgcagagacagagaggagcagaggacc

SEQ ID NO: 804050 - DNA, 120 bp, Artificial Sequence
  ENSG00000285769_43 (sequence is synthesized)
caggaggcaccggaagcaggtgtgaggaaccatcttgtaagtggatcctgccccacatgacactgtgagattcagagatgaatggcccagccaatttcttcccaaattcctaaaccatac

SEQ ID NO: 804051 - DNA, 120 bp, Artificial Sequence
  ENSG00000285766_0 (sequence is synthesized)
gcaggcactgtcacttttcatcacagtcatttgaaacaaaggattttatagctaagcaggagaagattccttccaaagaagatggagacagaccagacagtgaacgctgtcactatgtca

SEQ ID NO: 804052 - DNA, 120 bp, Artificial Sequence
  ENSG00000285766_1 (sequence is synthesized)
ttggtggcaccttgggcctggtcagtcgccaaccctctgcttcttgggcgtccaggtcgagtgtactgacagacgacataatggacactgttgcttcccccagcagccactgccctcttc

SEQ ID NO: 804053 - DNA, 120 bp, Artificial Sequence
  ENSG00000285766_2 (sequence is synthesized)
gcagagcctacttcttgggccagttactggcccagccgtggcaaagttacctgagtgggaccaattcagctgaggaatgaggtgtcgcatgccatgttcctacccactggacagaaaaag

SEQ ID NO: 804054 - DNA, 120 bp, Artificial Sequence
  ENSG00000285766_3 (sequence is synthesized)
aaggtgttgtcctaaggctgctggctgccatctgctgaccatgcggaaaccagcttgaggcaaagacagtgcctaggacggcatggccaaagagatacagacgaccctggtgacatctcc

SEQ ID NO: 804055 - DNA, 120 bp, Artificial Sequence
  ENSG00000285766_4 (sequence is synthesized)
aagccccatctctggacatcctgctgtgagaaatggcatgcccccaactggacattctccatacaaccccaccaactaagaactactgtgctgaactacattaaagtgctgatatgacca

SEQ ID NO: 804056 - DNA, 87 bp, Artificial Sequence
  ENSG00000285763_0 (sequence is synthesized)
agactgcagaagaaaaagagaaagagaggggagaagaggtcaagtgtggaaacagcaagaaggctgctgtctgcaagccaagaagag

SEQ ID NO: 804057 - DNA, 120 bp, Artificial Sequence
  ENSG00000285763_1 (sequence is synthesized)
ggaaacagcaagaaggctgctgtctgcaagccaagaagagagccctcgccagaaaccaaattatccagaccctggatattggatttccagcctccagaatgacaatctgtcttttttcta

SEQ ID NO: 804058 - DNA, 120 bp, Artificial Sequence
  ENSG00000285763_2 (sequence is synthesized)
tttagatacggctaagaccgcaggcatggtggcatgcagccggtagtctcagctacttggaaggctggagcaggaggaccacttgaacccaggagatcaagactgcacccttccacatcc

SEQ ID NO: 804059 - DNA, 120 bp, Artificial Sequence
  ENSG00000285763_3 (sequence is synthesized)
agaattatattcttggggaaaaaagcaacactcagacaaatgcttgaagataggctggagtacaatggcacaatcatggctcattgcagcctcaaactcccggactcaagtgatcgtccc

SEQ ID NO: 804060 - DNA, 120 bp, Artificial Sequence
  ENSG00000285763_4 (sequence is synthesized)
cagtctcccaagtagctgggactacatgtgtgagccatcttgcccagaccataagtggacgattttttaaagaaaggtctccttatgcagaagcaagcaaacagcaaaccagactgactt

SEQ ID NO: 804061 - DNA, 120 bp, Artificial Sequence
  ENSG00000285763_5 (sequence is synthesized)
actttattttacacaaagaaaatcacaattatggctataaccaggtaagcattgaggctgcagttggaaagcaacgtggaagttgaacattgaggaggtgctaaggaggctgaggaagag

SEQ ID NO: 804062 - DNA, 120 bp, Artificial Sequence
  ENSG00000285763_6 (sequence is synthesized)
agaggtcaatgtaatcatgttgcaaccacctaggaagatggcagcagctgtggaacagaaggttgtaagcaagatcccagggtaaagatgggcacttaggccttggagatgacagtgaca

SEQ ID NO: 804063 - DNA, 120 bp, Artificial Sequence
  ENSG00000285763_7 (sequence is synthesized)
agggctcacaagcgctgttttgctcactaaaagccccaaatgcaaaccttctgtttcaactagattactcccatgaatcaggtgaagcaaatttctattggggcacactactggacaggt

SEQ ID NO: 804064 - DNA, 120 bp, Artificial Sequence
  ENSG00000285763_8 (sequence is synthesized)
tcagggcacgtacagcattatctccacttcccttcgtgctggaaatacaaaggagaccaaaacccccaggaatacattcacgtgcaacctccatagtccttgaatttaacagagttgctg

SEQ ID NO: 804065 - DNA, 120 bp, Artificial Sequence
  ENSG00000285763_9 (sequence is synthesized)
cctgtcacattgagaaagaggagaattcagcaggaatatgagactctcatatttctaacagggctgatttttctctactgtgtcctgcttgtaccccaggatatccactttaccaccctc

SEQ ID NO: 804066 - DNA, 120 bp, Artificial Sequence
  ENSG00000285763_10 (sequence is synthesized)
aaccacccaagaagaaaaactagcttttactttaacaaaccgaagctaagcactcaacaaatatttgttgaatgaatgaataaatcagagcatagctcaagagcaaaaaccttttcaatc

SEQ ID NO: 804067 - DNA, 120 bp, Artificial Sequence
  ENSG00000285763_11 (sequence is synthesized)
aataatttaaaagcaaagctacaaaacaatatcctctcgtgctttagtgtttaatgaactctcaacattggttgtttcttggcagctgcagatttcacaagaatgagattaaatggcttt

SEQ ID NO: 804068 - DNA, 120 bp, Artificial Sequence
  ENSG00000285763_12 (sequence is synthesized)
ttacatcctgtatttggaaagagaataggaggatttacaggaagttatgctcagttccaatccagttaaacaggtatataattctcttttgtctttcttcagacaatgaaaatccgcaat

SEQ ID NO: 804069 - DNA, 120 bp, Artificial Sequence
  ENSG00000285763_13 (sequence is synthesized)
ctaagacctgaaactactgccacagccatgcataaaatgaaatgctgctgctttcctctctgttaaagagaatgttcaaggccgaggacacataaaaaagagcagcattgctggctctgt

SEQ ID NO: 804070 - DNA, 120 bp, Artificial Sequence
  ENSG00000285763_14 (sequence is synthesized)
aatctttttgaaacagtacttaaattgtagcaggacaagccgcagacaaaacccctcagccagcgagtttaagaaagaagggctttattcggccgggatcttcggcaagactcacgtctc

SEQ ID NO: 804071 - DNA, 84 bp, Artificial Sequence
  ENSG00000285763_15 (sequence is synthesized)
tgagtaggtccgtgtgagagggtcgtgattgactgagcaagcgggggtacatgactggggggctgcatgcaccggtaattagaa

SEQ ID NO: 804072 - DNA, 60 bp, Artificial Sequence
  ENSG00000285763_16 (sequence is synthesized)
ctaatctacagataacccaggcccagagtgtggtgccgagctgtctgcttgtggatttca

SEQ ID NO: 804073 - DNA, 68 bp, Artificial Sequence
  ENSG00000285763_17 (sequence is synthesized)
aaccgattaggtcaggggtcgatctttaccaggcccagagtgtggtgccgggaggcagaaattgggca

SEQ ID NO: 804074 - DNA, 120 bp, Artificial Sequence
  ENSG00000285763_18 (sequence is synthesized)
aaaatcctaatgctctcctccaaaaatgtatatccacatatttgcatataatttcatgggattcaaaacccctgaaatttatccaggaacccccagattagtaacacctggactagatgt

SEQ ID NO: 804075 - DNA, 120 bp, Artificial Sequence
  ENSG00000285763_19 (sequence is synthesized)
tgtctaagtcctctgagctctgtaattggttccactgatttctaagttttggggtttttttttctttttaaagtaaaaccactttgagttatgttcatggtgcttacaccatggtttcca

SEQ ID NO: 804076 - DNA, 120 bp, Artificial Sequence
  ENSG00000285763_20 (sequence is synthesized)
ttctagaaccaactatattctaaaattcctggttggaacaaaagttacttaagcaagtaaaagtgtgacagtctggtaacagattctaaataatcacctttttatggtgataagctaaaa

SEQ ID NO: 804077 - DNA, 120 bp, Artificial Sequence
  ENSG00000285763_21 (sequence is synthesized)
tttattttaaaaagtgtattaaacaagtattaatacttctcaaacagcagttgagatgtccctggggtaaggagacagggcaccagggacattccagaagtaacagaatatacaaagcat

SEQ ID NO: 804078 - DNA, 120 bp, Artificial Sequence
  ENSG00000285763_22 (sequence is synthesized)
gattttgaaagttttagcggtttttaatttgtggatgagggtgtaacacttttgcattaaaataaacagatatgttgtggagtaaaatgcataaaggcacatttttaaagataaaatgtg

SEQ ID NO: 804079 - DNA, 120 bp, Artificial Sequence
  ENSG00000285763_23 (sequence is synthesized)
aaacttacaatgtcctgcttactaataccttgtctcacgtccagaggacacttacttcacactcctctaatcttagtggttctctggtggaaacttacacattacaaaaaaagtaatcta

SEQ ID NO: 804080 - DNA, 120 bp, Artificial Sequence
  ENSG00000285763_24 (sequence is synthesized)
ttctaaatcctaaaataatttgattttttgtaacacaatgaagataactagcacaaagtaaagaaagaatgactttttttttgagacagtctcactcttgcccacgctggagtgcagtgg

SEQ ID NO: 804081 - DNA, 72 bp, Artificial Sequence
  ENSG00000285763_25 (sequence is synthesized)
gacagtctcactcttgcccactaattcaagcgattctcccgcctcaccctcccgagtagctgggactatagg

SEQ ID NO: 804082 - DNA, 120 bp, Artificial Sequence
  ENSG00000285763_26 (sequence is synthesized)
caggatggtctcgatctcttgatctcgtcaaagtgctgggattacaggcatgcgtgagccactgcgtctggccattttattttattttttgagacagagtcctgacctcaagcaatccgc

SEQ ID NO: 804083 - DNA, 81 bp, Artificial Sequence
  ENSG00000285763_27 (sequence is synthesized)
cgtgagccactgcgtctggccattttattttattttttgagacagagtcctgacctcaagcaatccgcctgcctaggcctc

SEQ ID NO: 804084 - DNA, 120 bp, Artificial Sequence
  ENSG00000285761_0 (sequence is synthesized)
gggtccggaaaagaaagagaaaggacccagtgcggtcgcttacagaacccagggcggggttgggctgggcgcccgcgcgcgttttcaagcctgcggcccggagttcactgcgaggactga

SEQ ID NO: 804085 - DNA, 120 bp, Artificial Sequence
  ENSG00000285761_1 (sequence is synthesized)
gatcacccgttaccccgccctggtctacaagtgtttgctgatatagaaacggaataacggcgctgtgggctggggaggacggagttgccttcaggcttctggtctccagccgcggggcac

SEQ ID NO: 804086 - DNA, 120 bp, Artificial Sequence
  ENSG00000285761_2 (sequence is synthesized)
tcacagctgccgctatgaaaatgcagacctgtggggcaggaattccgagtccggggtggagcgcgatgtggaatctgactcgcttgaaacagcaccgcggtggattcggatccggaaaag

SEQ ID NO: 804087 - DNA, 120 bp, Artificial Sequence
  ENSG00000285761_3 (sequence is synthesized)
aaacaaattcctttccacccaaaatatgacagcgcctgtggtccagggctcgagcctatagtggatgcccagcagccaacttcctggaattgagacctccccagcaggcttgggggtgaa

SEQ ID NO: 804088 - DNA, 120 bp, Artificial Sequence
  ENSG00000285761_4 (sequence is synthesized)
aagagaaactagactccaaaagggacccagtgctctgttggggagagaggagcacaccactgcatcccaccctgaagaatgggagtgagaagagaggacaggtgaacccaccatggctcc

SEQ ID NO: 804089 - DNA, 120 bp, Artificial Sequence
  ENSG00000285761_5 (sequence is synthesized)
agtgagatgggagcggggaacgcccaagaaggaggacagccatggggtggcccgagccaaagccaccagacatcattacatgtctggggccctctcaggccgacatgagttttactgctc

SEQ ID NO: 804090 - DNA, 120 bp, Artificial Sequence
  ENSG00000285761_6 (sequence is synthesized)
cacacactcttttgttaagagctagctgtcagtagatcagtgagagagcaactttgatacagaggaaaccatgcctgaatgggtcagcccagaagaatttagtagtaggttctatgcttc

SEQ ID NO: 804091 - DNA, 120 bp, Artificial Sequence
  ENSG00000285761_7 (sequence is synthesized)
aactgtgtccttgctgggcacacaggcccctaccacatgtacatggcgtgggagtcatggctaaggcagggtgagactcctatttgaggccaggaaaagctaatgaccctacatttggtt

SEQ ID NO: 804092 - DNA, 120 bp, Artificial Sequence
  ENSG00000285761_8 (sequence is synthesized)
cagtccttgtggggtcctgactagggtgtgggccactgtgttcccacagatgctctgttagcccttaggctgtgagatacacaggcaaatgttatattgaagcctttgtttctcttacac

SEQ ID NO: 804093 - DNA, 120 bp, Artificial Sequence
  ENSG00000285761_9 (sequence is synthesized)
tgaggtaacactactgcagcagagcaaaccttattgtatcagtgcaccaaccccaagttcatgttcattacagcaggaaaaactaacatgtggtgaattctgcctccacaagggacaagg

SEQ ID NO: 804094 - DNA, 120 bp, Artificial Sequence
  ENSG00000285761_10 (sequence is synthesized)
acctgataagactacaatgaccaggatggccaatatccctgtcttcttgcaactcaagctttgcctggttaccccctacttgccccaactccttggactccagccctccgaggacagcca

SEQ ID NO: 804095 - DNA, 120 bp, Artificial Sequence
  ENSG00000285761_11 (sequence is synthesized)
gacatctgaaggaagtgccaggcacagatgccaggttgcataagtgctgacccctgagcaactggagaagctgttaggtcccagctggcctagagatccctggctcagggagtataactg

SEQ ID NO: 804096 - DNA, 120 bp, Artificial Sequence
  ENSG00000285761_12 (sequence is synthesized)
gatgccttgaacaaagatatggggtcactggaaagagaggaccggctgtccctccccactaagaaataattaactgttagatgagggggaattccttttcaagggctctgtggactgtgc

SEQ ID NO: 804097 - DNA, 120 bp, Artificial Sequence
  ENSG00000285761_13 (sequence is synthesized)
tgctctggagggggtggggagagggaggagccctgaggtctgggctggggtgtggttgggaaggagctgagagctgagagctgtaactacccaaggagctgcaggggtgaggttggtgca

SEQ ID NO: 804098 - DNA, 120 bp, Artificial Sequence
  ENSG00000285761_14 (sequence is synthesized)
gggtgggatttagaggatttcccccagactcctgtgctgatccccttcatctcctccacccccacccttggtgtccgtcaacatgcgggggtgccctcatcttcccactgcccctggagc

SEQ ID NO: 804099 - DNA, 120 bp, Artificial Sequence
  ENSG00000287898_0 (sequence is synthesized)
accccgccctgctccaccacctgcggggccggggggcggcgaggaacccgaccggccctgctacgcttgcgcccaccttccagatgtggaggcgcgtgctcccagatgttgccggggtgg

SEQ ID NO: 804100 - DNA, 120 bp, Artificial Sequence
  ENSG00000287898_1 (sequence is synthesized)
tgttcttcagtggtggggagaagtgttctgccaacggcctggaatttgagacattccgatgggagctgccttgccctctagagcatatggtggaaacgggtgtgcacagtctctgggacc

SEQ ID NO: 804101 - DNA, 120 bp, Artificial Sequence
  ENSG00000287898_2 (sequence is synthesized)
agagtgcctggctggagtcgcagctctactacttcctcaccgtgtgacctggggcaagtgacttcacctctttttatatcaactgtctcttaataaaatgaggttgttgataataatact

SEQ ID NO: 804102 - DNA, 120 bp, Artificial Sequence
  ENSG00000287898_3 (sequence is synthesized)
gtcccctcctccgcggctcgctgcgcgcactcaccaatgaagaggatggggaaggtgatgaagagtaggaagacgtgcggcaccacgttgagcgcgtccacaaagcagccgttgttgagg

SEQ ID NO: 804103 - DNA, 120 bp, Artificial Sequence
  ENSG00000287899_0 (sequence is synthesized)
gggctggggccagaatgatattctgtatttctaacgagctcccaggagatgccaatgttgccatccttggaccacgctgagtagcgagaatgcagaggacagcatgtctaccttttcctg

SEQ ID NO: 804104 - DNA, 120 bp, Artificial Sequence
  ENSG00000287899_1 (sequence is synthesized)
agcctcctttcaaaggatgagatacgggaatactggtatcacacagccccgagaatcctgaggtgggagcaggggaggctgaaccctctagatgtaccctgagtatgtttttacagtggg

SEQ ID NO: 804105 - DNA, 120 bp, Artificial Sequence
  ENSG00000287899_2 (sequence is synthesized)
ttcaagtattttaatctgctgttcaaaaaatacatgaattcgtcctcagttcaaagccataggctagctactgtatgatgtgacacaattctgtataacataaatacagtaatctcatta

SEQ ID NO: 804106 - DNA, 120 bp, Artificial Sequence
  ENSG00000287899_3 (sequence is synthesized)
aatttaacatctgtgccctaatcatcacctctttaaggactaaaatattctccagtgttgttgctttctccccactgtttgagggaaaaaaagtaaacctatagaaaagttgaaagaatt

SEQ ID NO: 804107 - DNA, 120 bp, Artificial Sequence
  ENSG00000287899_4 (sequence is synthesized)
acatgacaactttaaacccttccccagatttaccaattattaacatgctgctgtgctttctgtctctctccttacccatctatgtgtgtatatatatgtgtgtatgataaatatttattt

SEQ ID NO: 804108 - DNA, 120 bp, Artificial Sequence
  ENSG00000287899_5 (sequence is synthesized)
agtttattttcatgtttttatctgaataatttaaaaataaattgcagctctccattgctttttatcatgttatcatttgtttctgttaacaagttcggctgcaaactgaattgctgactg

SEQ ID NO: 804109 - DNA, 120 bp, Artificial Sequence
  ENSG00000287899_6 (sequence is synthesized)
agagtcatgtgtgtgtgcaggaaaccaaggtggcttggagtttcccagactttttaggttcacgtttacagaggagaaagcaaatggtggaaactcttgtttctctttaaaaatctttga

SEQ ID NO: 804110 - DNA, 120 bp, Artificial Sequence
  ENSG00000287899_7 (sequence is synthesized)
ctccacactgcctttatgatcccactagtgaccaccaaagagagggaatctaagagagaaagcagagaataacttattctgctaaacccaacacaaatgaaaggtaaatatctagaagat

SEQ ID NO: 804111 - DNA, 120 bp, Artificial Sequence
  ENSG00000287899_8 (sequence is synthesized)
aacctgctggatcatgagggggaatgaagaaagaaaaggaaaccaaggtattgacaggaaaaccagcttctactttctcctacgtctttgatgtcactgtggagcaaccatgagactttc

SEQ ID NO: 804112 - DNA, 120 bp, Artificial Sequence
  ENSG00000287899_9 (sequence is synthesized)
cctgttgtcatttgtcaattcgtccttccccaagccaaggcagtttactaacgtctagactcattaaagtggatgagattttgtttccaaatcctggacagtgctaatgtaaatgcttgt

SEQ ID NO: 804113 - DNA, 120 bp, Artificial Sequence
  ENSG00000287899_10 (sequence is synthesized)
ttatccatggtggtgcagaatgaaggaagtccatgctctgcacaagtaaagcgatgtgtcatgtcatattgccaaaaggttgcatcatttctaaactttccggaagactggatgggcaag

SEQ ID NO: 804114 - DNA, 120 bp, Artificial Sequence
  ENSG00000287899_11 (sequence is synthesized)
aggtcatctatgtttattttgtgaagtttgccctaccaggaaatgtgtgggtacaagagatattttgggcccatgagactctcactttagatgcttaatccagcagcatgtgctataagc

SEQ ID NO: 804115 - DNA, 120 bp, Artificial Sequence
  ENSG00000287899_12 (sequence is synthesized)
ttcagtctctaactacatctttaaaaagagtggcaagttgtgaagtatgcaaggttttttggctgcactgacagagccacgtataaaatcctgttgccaagcagagactagaaccagatg

SEQ ID NO: 804116 - DNA, 120 bp, Artificial Sequence
  ENSG00000287899_13 (sequence is synthesized)
acaaagactgaaaacacacgccatgtattgactttcctataaaatactcattacaacctaatccagtcatactcatttctagaagaattacataatcagtcagcaatccatattaattaa

SEQ ID NO: 804117 - DNA, 120 bp, Artificial Sequence
  ENSG00000287899_14 (sequence is synthesized)
aatactttgaaatattgagtgacttttttcctatctcaggacatctccaagaatagacttgtcccactaattagagttggattcctgacatgaaatctgttacctttgcttccttctatt

SEQ ID NO: 804118 - DNA, 120 bp, Artificial Sequence
  ENSG00000287899_15 (sequence is synthesized)
cagggttgtctactgcctctgacttgtcatctatagtcacacagagaaagacaactctgcttaataatttgagatctctctgtctcagtctttttccccacttaggtaaaatttacatac

SEQ ID NO: 804119 - DNA, 120 bp, Artificial Sequence
  ENSG00000287899_16 (sequence is synthesized)
agaaatgcacacatcctaagtatacaatttaatgaattttgatcaatgtacacacctaaatattcatcactccaatcatgatataaacttttttttttctcagatggagtctttctttgt

SEQ ID NO: 804120 - DNA, 77 bp, Artificial Sequence
  ENSG00000287899_17 (sequence is synthesized)
atataaacttttttttttctcagatggagtctttctttgtctcccagtctggggtgcagtggcacgatctagtggca

SEQ ID NO: 804121 - DNA, 120 bp, Artificial Sequence
  ENSG00000287899_18 (sequence is synthesized)
acaggtgtgagccactgcacccagccatgataaaaacattctatctatcaaccgagaaagttctctgtgccccttccagtcactttccacctctcacaggcaatcactgttctaaacctg

SEQ ID NO: 804122 - DNA, 120 bp, Artificial Sequence
  ENSG00000287899_19 (sequence is synthesized)
cactgttctaaacctgttctctgaattttgcctctggtttttctggctcaacatacagtttttgggatttagccatcttgttctttggatcaatggttcattcctttttattgctaaata

SEQ ID NO: 804123 - DNA, 120 bp, Artificial Sequence
  ENSG00000287899_20 (sequence is synthesized)
cttatccagtgtataacataccacaatttgcatatccattccattgttgatggatacctttccagcttagaagtagtatgaataatgctctgtaaacattcttatataaatctgtgtgtg

SEQ ID NO: 804124 - DNA, 120 bp, Artificial Sequence
  ENSG00000287899_21 (sequence is synthesized)
aacataagtttttatttcttttaggtaaatatctagaagataacctgctggatcatgaggagatagagattgcatctgactgggactaagcaaccctcggaagcaccaaacctcacctcc

SEQ ID NO: 804125 - DNA, 120 bp, Artificial Sequence
  ENSG00000287899_22 (sequence is synthesized)
cttctcaacacctgactccggcctagggccttcccactgaggtagaaattcttatggactggaatcttcctcaaggcttactttgttcctgggatgcagtggtgcatagaagatagggca

SEQ ID NO: 804126 - DNA, 120 bp, Artificial Sequence
  ENSG00000287899_23 (sequence is synthesized)
ttgactcactcagacctggcttgcccagcatgcattgcaacaatgatgtgcaagttattaaagacatgagtgaattcgtgacagattgtcagaaaagaaacaagagttttctacaacaaa

SEQ ID NO: 804127 - DNA, 120 bp, Artificial Sequence
  ENSG00000287899_24 (sequence is synthesized)
aaactggcttatggaacatatacttctgcttgagttgaatgtgttgggctgagtgtaagaaaatgcaagctgcaaatctgtcttacatgtggaaccaaagctggaaatgtgtgctttaga

SEQ ID NO: 804128 - DNA, 120 bp, Artificial Sequence
  ENSG00000287899_25 (sequence is synthesized)
ggcaactgtaaaattgtatttccttctggcatatgggccaatgattatgttgtgtgagtaatgcatagatgtaatccatgtggtaagctttgtggatgaagaaaatgtcagtgttattgg

SEQ ID NO: 804129 - DNA, 120 bp, Artificial Sequence
  ENSG00000287899_26 (sequence is synthesized)
tgtcagcttgtgaacatagcaaaaaaccacagcactcccatcagcacaaacactgagggagaaaatctctcttgctgttttccagtttatgtttataggaaaaggatgtttgccttacaa

SEQ ID NO: 804130 - DNA, 120 bp, Artificial Sequence
  ENSG00000287899_27 (sequence is synthesized)
caaggggatttatgcttaatggatactaacttttaccaaatcacaaaatctaaataggcatttgtagaatgagagatccaaaaactctggcaatatgatatactaaggggaaaatcagaa

SEQ ID NO: 804131 - DNA, 120 bp, Artificial Sequence
  ENSG00000287899_28 (sequence is synthesized)
atctttatagattttactattactgtgttcagatcaatttttaattgcttttagctatggcttcttgagcttcaaaataattgtggaatgtcttcactaagtacacagtagcataaattc

SEQ ID NO: 804132 - DNA, 120 bp, Artificial Sequence
  ENSG00000287899_29 (sequence is synthesized)
tacaggatgttgtacagctctgtagagggaaaaaccaccatgaagataaatgaccttggaggaccccattaatctttgtaaatagcaagatgttatttagccatctatttttttcttaaa

SEQ ID NO: 804133 - DNA, 120 bp, Artificial Sequence
  ENSG00000287899_30 (sequence is synthesized)
cccaaaagcatttaaaaaacagaatatttaagttataaaaggccttaaaagtgacccagagctggcagaggaagggagccttaacaattggtgggggaaactgggagtgagggtggatag

SEQ ID NO: 804134 - DNA, 120 bp, Artificial Sequence
  ENSG00000287899_31 (sequence is synthesized)
tactcaaaaggatgctgtctttgactttaatttcaaggtattacacaaattgccctcagatgtttcaatctcttctttcacagggcttcctctaatgttttttcatcagtcttatctgcc

SEQ ID NO: 804135 - DNA, 120 bp, Artificial Sequence
  ENSG00000287899_32 (sequence is synthesized)
atatcaatataatggcttttaaatttttgcaaagggaacttctgcatctacctgtgaaggataaactgatacaagaatcacttgcctaccataaacaactagaaaataaggcaaaatata

SEQ ID NO: 804136 - DNA, 120 bp, Artificial Sequence
  ENSG00000287899_33 (sequence is synthesized)
tgaaaggacaattttcagatattagatataaggcgatgcagaactgaattcctgaatctctatcattatcctagagtactgccttgaggaaaattccaagaaatagccaaaagaaaatga

SEQ ID NO: 804137 - DNA, 120 bp, Artificial Sequence
  ENSG00000287899_34 (sequence is synthesized)
agtcagagtcttgttcagttgaggaaacaaagatcagtatgagtaggccaaagtagctataacttaagggcagagttcaatagagagagagctaagcagcagaaggggtctagaaatctg

SEQ ID NO: 804138 - DNA, 120 bp, Artificial Sequence
  ENSG00000287899_35 (sequence is synthesized)
catgagagtccccttgaattttttgtgactatcaatttctgtatgtgtaatgtgaaactctttgttgggcaagaaaatcttctgagaaaagactaattactgagaaactgtaaaatgaac

SEQ ID NO: 804139 - DNA, 120 bp, Artificial Sequence
  ENSG00000287899_36 (sequence is synthesized)
aattcccagaaatcacacaggatcaaaaacctttgtggatggagtttccttcattcaaagtgaaaaaatcttgttgaatacttagccattcagtagagacttgaaaagtgttatgcctta

SEQ ID NO: 804140 - DNA, 120 bp, Artificial Sequence
  ENSG00000287899_37 (sequence is synthesized)
gaagtgggactaaattagctctagaatttaccattctaaaacctccctaaaagagtttagaaacaggcctcacaagagatcaaaagtaaccttcaaaagctaactgctcacgaaaaagtc

SEQ ID NO: 804141 - DNA, 120 bp, Artificial Sequence
  ENSG00000287899_38 (sequence is synthesized)
ttaacactcattaaaagagtacaacaaaatccagcactaaacaatgtaaaacacacaatcttaatccaatttttaaaaatcatcagacatgcagaaagtaggaaaatgtgacccataacc

SEQ ID NO: 804142 - DNA, 120 bp, Artificial Sequence
  ENSG00000287896_0 (sequence is synthesized)
gcctcttaggtccttgatcagaagaacaggactgcatgcctgggggtgggtgcagtctggcgtgccaggaggaggcctgcaccccctgctcgaaactgctgaggtcgactcccctcccac

SEQ ID NO: 804143 - DNA, 120 bp, Artificial Sequence
  ENSG00000287896_1 (sequence is synthesized)
cccaagagctggggatacctgcaggatgtgcacgcccttcagggagaccacggcaagctcctgcagcccatccccggtcaggtccacgtgagccatggccagcaggggactggagaagct

SEQ ID NO: 804144 - DNA, 120 bp, Artificial Sequence
  ENSG00000287896_2 (sequence is synthesized)
ccgctgccacagcagatggaacccgtgctgggcctcaggaagccccgactctgggccccggtacttataacacagcagttcctgcgggggtgaagaatcaggtcacacaggttgatgggg

SEQ ID NO: 804145 - DNA, 120 bp, Artificial Sequence
  ENSG00000287896_3 (sequence is synthesized)
ggacagtggagggaggccggtgggtgtggctccaactgtcaggtcccacctgtccataggtggccaccaggacttctggccgcccatccaaatccacatcggtgaccaggctgcagagga

SEQ ID NO: 804146 - DNA, 120 bp, Artificial Sequence
  ENSG00000287896_4 (sequence is synthesized)
cgctgtcaaactggtcactgccgggcaggagaagctggtcttcaagaccccggttcagcaggtccctgagggtcccaaatacagcatatagactggggtcagcttgcagtgcccagcacc

SEQ ID NO: 804147 - DNA, 120 bp, Artificial Sequence
  ENSG00000287896_5 (sequence is synthesized)
cttggcggatgctaagctgggtaccggtactgcttcccttctcaggcctagacacactggtcctccggaagcctagacatcatcatctcagatttggacatattcatagacccagcaagg

SEQ ID NO: 804148 - DNA, 120 bp, Artificial Sequence
  ENSG00000287896_6 (sequence is synthesized)
ggtcaacctgtgcactcaagcccttcatctcggagaccatctcactcccaaatggaaagccacagtgtcccatctgaggattcagatgcatgtgtcctcaatttagacacccacgctgcc

SEQ ID NO: 804149 - DNA, 120 bp, Artificial Sequence
  ENSG00000287896_7 (sequence is synthesized)
ttcgtggagcccgaagagggcttggccctggcctggacaccttcaccacccctagaggggtgccagagctggctatagttgcttccgagagctgactgggaaatgttcccatgtaatcat

SEQ ID NO: 804150 - DNA, 120 bp, Artificial Sequence
  ENSG00000287896_8 (sequence is synthesized)
tactacatctactccagggggcacaggcatctctgctcccaccccccagcctcaacatattccctacaagtctagacttcaatattcacagcccccacccctgggtcacgagtatctgta

SEQ ID NO: 804151 - DNA, 120 bp, Artificial Sequence
  ENSG00000287896_9 (sequence is synthesized)
cttgtccagctctgggtaatccacccagaggaacttactgtagagaatgacaaggttagaccacagtgcaaagaaagaaggttagaccacacccatgtgtctcaggccccctcaccgata

SEQ ID NO: 804152 - DNA, 120 bp, Artificial Sequence
  ENSG00000287896_10 (sequence is synthesized)
gatacaccactgctggctccaacatgctggccacgagcacgctgtactcatcttgtagtggcctgtccttggtctctggagaagaaacatgaatggtaatcccagcactttgggaggcca

SEQ ID NO: 804153 - DNA, 120 bp, Artificial Sequence
  ENSG00000287896_11 (sequence is synthesized)
aaaaaaaaaagaaacatgaatgaataggggaaaggttttgtggggacaggttccaggctcctcgtcataccccaggcccctttaatgagagacatgcaggttagatctcaggaaaaagtc

SEQ ID NO: 804154 - DNA, 120 bp, Artificial Sequence
  ENSG00000287896_12 (sequence is synthesized)
ttgaggctgtgctacacagggagggttagagattggcccatgagacaaattataagtcagacaccagaaggagaaataggtgttagatgatggcttaaaaagtctgaggttctgggtgtg

SEQ ID NO: 804155 - DNA, 120 bp, Artificial Sequence
  ENSG00000287897_0 (sequence is synthesized)
tttttatttgatcctcccaatgattttcagggaggcatgttgggcattctctctctttctctctcgatctctcaacagaagagcatgactcagagcttaagtggttttgtgcttcatcct

SEQ ID NO: 804156 - DNA, 120 bp, Artificial Sequence
  ENSG00000287897_1 (sequence is synthesized)
tgagggttttaagtgaggaagtgatctgatcagatcgtcctttagagagattgccctggtggtagtgtagaggatgttttaggggagtaggaggctaattaggacaccattgggaaaatc

SEQ ID NO: 804157 - DNA, 120 bp, Artificial Sequence
  ENSG00000287897_2 (sequence is synthesized)
agatgtggaaattgacacgttatcgagcatatgtaagtgccataccattccaactttacatacttctcaccacccctgctgcacctcacctccctaataacacttctgggaccgtggttg

SEQ ID NO: 804158 - DNA, 120 bp, Artificial Sequence
  ENSG00000287894_0 (sequence is synthesized)
ccttcactgtctactttccacctgcatagacattctgcttacctggctaacacaaagttcatccagcctcctgtggcccagcctttcaccaatgccaatagtgggaagcaacaattaaga

SEQ ID NO: 804159 - DNA, 120 bp, Artificial Sequence
  ENSG00000287894_1 (sequence is synthesized)
agaagtgattctgagaagataaatgcagtcatcttcttgccttactgttatgtggtcacatcccataggaaaccagacacctgtgcctgaagctgatccacacaacaccccccacctcct

SEQ ID NO: 804160 - DNA, 120 bp, Artificial Sequence
  ENSG00000287894_2 (sequence is synthesized)
tgtgaacgtgtgtgggccgggggaaaaagaagaacaaggaaggtctgtgactatatgtttggaccacatggctgtgatccctaccaccacttagtgacagcatacatgaattgcatgctt

SEQ ID NO: 804161 - DNA, 120 bp, Artificial Sequence
  ENSG00000287894_3 (sequence is synthesized)
aatgccgataccattcagcctagaggggctcctggaccaggccagatttcctacaaggtgttaccaagtggagttggaaacttgtcacctcctcacaccctaacttattttttaaaaata

SEQ ID NO: 804162 - DNA, 73 bp, Artificial Sequence
  ENSG00000287895_0 (sequence is synthesized)
tgctgtgattctgggggctgcccaattcacaaatcattcattgctcagttgtgtcagaagtgggattcgaggt

SEQ ID NO: 804163 - DNA, 120 bp, Artificial Sequence
  ENSG00000287895_1 (sequence is synthesized)
cttttatcaggttgtgtcagaagtgggattcgaggtagagcctctagcaacccccaggagtgctgagtgaatatgcatggtacctgcaggacccacttgtgtccactgatctcttggagc

SEQ ID NO: 804164 - DNA, 120 bp, Artificial Sequence
  ENSG00000287895_2 (sequence is synthesized)
agctgaggattgtgggactatggtgcagccagctgggtcattagggccactcagggaaagagaacccagaagcctggtatgccggcaaaagggtaagaatttcttaccagtcagacttct

SEQ ID NO: 804165 - DNA, 120 bp, Artificial Sequence
  ENSG00000287895_3 (sequence is synthesized)
gatctctctctctctctctgtgcaaactcattgaatgaatggtaaaaatcactgtttatctcctctgtaaattttgattaatggaagaaaggatttgtgaggctggtcttaaactgtagc

SEQ ID NO: 804166 - DNA, 120 bp, Artificial Sequence
  ENSG00000287895_4 (sequence is synthesized)
ggctcagcaaattggtcagttatgtccttgggagcttgaccttgtaattatgtggccatgctttctcttttcagaatggcggcccgggttcagggttcaatccctagattaagggatgaa

SEQ ID NO: 804167 - DNA, 120 bp, Artificial Sequence
  ENSG00000287895_5 (sequence is synthesized)
cctttctgattaatatttgggtgacctttgccatttttaaattctcttcccctccaccaactgtcttgaattttcccttctcagagcacctatgaggttacttttggtaaagtttaaaag

SEQ ID NO: 804168 - DNA, 120 bp, Artificial Sequence
  ENSG00000287895_6 (sequence is synthesized)
ccagaaatatcagccatttggcctggctaaagtcaggtaataagaaattttagaaagactttattaaagagttctatggttaaaagtcagcttaattaaaagcagatattcaggctctaa

SEQ ID NO: 804169 - DNA, 120 bp, Artificial Sequence
  ENSG00000287895_7 (sequence is synthesized)
cagcctggagctccttgggaaaaacaggaggcaccagagaccctttcctggccctgttcctccgaggactccgccctaaagtgaataatccaattaagaaacttaaaaactgggaaaaaa

SEQ ID NO: 804170 - DNA, 120 bp, Artificial Sequence
  ENSG00000287892_0 (sequence is synthesized)
ggtacgggcctggtcccaagctgcgtagcctcgctgtggggccatggtcataaatgactctaaggttcatttcatacctgttttttttttttttaaatgaaactgaagaagggtgaagag

SEQ ID NO: 804171 - DNA, 120 bp, Artificial Sequence
  ENSG00000287892_1 (sequence is synthesized)
aagagttcatgtattttgcgaccatccagaaatgggcaaactggaattggatgatgacagtcacattttaacaaagcaacaccagtaaaggcttcttgtgcatttagtgagggcgcctat

SEQ ID NO: 804172 - DNA, 120 bp, Artificial Sequence
  ENSG00000287892_2 (sequence is synthesized)
gcacagacaggcccctcagggtggatgaaaccagagctggctgagccgtgcctgaatcctgtgggcggaggagcccggaaaagccagggagctgccccccactgaggggcagcttctcaa

SEQ ID NO: 804173 - DNA, 120 bp, Artificial Sequence
  ENSG00000287892_3 (sequence is synthesized)
aggaggggacaaggccccgggtcttgagaactgaatcggaggccgtctgggaagagagtacatcccatcaggaaggcgtgctccatcgctgtgttttggaataacttctctttttttctg

SEQ ID NO: 804174 - DNA, 70 bp, Artificial Sequence
  ENSG00000287892_4 (sequence is synthesized)
aggctggagtgcagtggcacaatcaccacccactgcagtggcaaactcctgggttcgccaccattcccag

SEQ ID NO: 804175 - DNA, 120 bp, Artificial Sequence
  ENSG00000287892_5 (sequence is synthesized)
ccattcccagctaatttttgttatttatttatttttgtagagacaaagtttcaccatgtttcctagactggtctcaaactcctgaactcaaaagatccacctgcctcagcctcctaaagt

SEQ ID NO: 804176 - DNA, 120 bp, Artificial Sequence
  ENSG00000287892_6 (sequence is synthesized)
tgagccacaaggcctggtcagaaaaacttccttacagcatcatttcttagagtacgtctgtgtcacaaccctcagtccgagtggcataaaacctgacgcaaactcacaaagactgaccta

SEQ ID NO: 804177 - DNA, 120 bp, Artificial Sequence
  ENSG00000287892_7 (sequence is synthesized)
agagaaactgcgaagtctgttccgtttatcttattatgtctcaagctcattcctcactctaccccaggcatcctccccaaaggtcacactccagatgccgtctttactaccgactgtgcg

SEQ ID NO: 804178 - DNA, 120 bp, Artificial Sequence
  ENSG00000287892_8 (sequence is synthesized)
cctcccacccaccccacggcaagcacgtcttgtctggccaccgcctcctagtttttcggctcatcccacctgaaaccataactcttgagttttttttttaactctggcaatacctaggat

SEQ ID NO: 804179 - DNA, 120 bp, Artificial Sequence
  ENSG00000287892_9 (sequence is synthesized)
cctttagtactttgcattgtgctccctgaatttgtggcctcacttaggttccttggtccatctctgtatcactcccttgaaaacaccccaatgcctctgcccctctctccctttggcaaa

SEQ ID NO: 804180 - DNA, 120 bp, Artificial Sequence
  ENSG00000287891_0 (sequence is synthesized)
gacggcacgtctgcagcacctgccagcccacgcactggcctgcctggacatcacaagtgaccagggttactcggcactatcatatctctcaaagaagaaacaactcctccaacggcaaca

SEQ ID NO: 804181 - DNA, 120 bp, Artificial Sequence
  ENSG00000287891_1 (sequence is synthesized)
tctgtggggctgcttttgaactatcagcaattcatttgagcaagagctgggagcatttttcccctgggcctgatcatgaggaagtgtttgcccctctggaggacacagcaacaaggacca

SEQ ID NO: 804182 - DNA, 120 bp, Artificial Sequence
  ENSG00000287891_2 (sequence is synthesized)
tcttggaagcagagacctggccctcaccagacaccatacctgccggcaccttgatcttgaacttctcagcctccagaagtccagcagtgaaagtgcaacgactaaaagggaatggagtga

SEQ ID NO: 804183 - DNA, 120 bp, Artificial Sequence
  ENSG00000287891_3 (sequence is synthesized)
cacagacaagtgtctacaagagaccctggggctgctactccaaatgctgtcactttgcaaggttactgggtagaacttcaatcttactactcacctgctcaacaacctgcaatggctccc

SEQ ID NO: 804184 - DNA, 120 bp, Artificial Sequence
  ENSG00000287891_4 (sequence is synthesized)
ctaaaagagagtggagcctcttgctcagagtcaggctttggtctcaactgccttgtttcacattctcactatgccagtccccagctgggtgatgatgagtaagttacttagcctctctgg

SEQ ID NO: 804185 - DNA, 120 bp, Artificial Sequence
  ENSG00000287891_5 (sequence is synthesized)
gcactggcttccttacttattaaatgtagataatattaggttggtgcaaagtaactgcagcttttcccattaaaagtaataatatctcacttataaaattattttgagaatttaaaatca

SEQ ID NO: 804186 - DNA, 120 bp, Artificial Sequence
  ENSG00000287891_6 (sequence is synthesized)
tgcacggtccctgtgaatatgctacaaaccgctgatttatacaacttaaaatggtaattttatggtatgtgactaatatttcaaaaaaaaaaagtaagcatggtgtctggcccagatctt

SEQ ID NO: 804187 - DNA, 120 bp, Artificial Sequence
  ENSG00000287891_7 (sequence is synthesized)
tgaaaataaaacgatgctaattattgttatgaacaaggtttcccaaggccctgtcactgggccaggcacacagcagatgctcagtaaacactcctggaatgaatggagaacatattccac

SEQ ID NO: 804188 - DNA, 120 bp, Artificial Sequence
  ENSG00000256712_0 (sequence is synthesized)
ccaggtgtcgccgcccgcccagcgtctgtagcgagggttgccgcagggcccgcggacctcctagcgacggctgggaccggcaggacggggaagtccaggaaactcacttgctctgggctg

SEQ ID NO: 804189 - DNA, 120 bp, Artificial Sequence
  ENSG00000256712_1 (sequence is synthesized)
gccagtgaaggaaggcagaaaacccaccaatcctggactctgcatgaacaccaggaaaaacccatttgctgcaggaagggggcagttaacctgatgatatcaagaccctccactgataca

SEQ ID NO: 804190 - DNA, 120 bp, Artificial Sequence
  ENSG00000256712_2 (sequence is synthesized)
agacattgattgactgacactcaaggaggggcaggaagattgcctgacttggactcccatgctgacactgggtgaaagccatctgttgctactggaggagggggagaaaaccggctttca

SEQ ID NO: 804191 - DNA, 120 bp, Artificial Sequence
  ENSG00000256717_0 (sequence is synthesized)
gtgcaatcagctccaggtaacctgcggggacccgtaattgctctggagttgcctgcgagtttgcaaggtggacacggaattgtagtgctggtcctccctctgcactggactggattctgc

SEQ ID NO: 804192 - DNA, 120 bp, Artificial Sequence
  ENSG00000256717_1 (sequence is synthesized)
caaagtcaaccaagcgccttcagttgctgactctcgtctccaggtaatgcctcaactccttgggattctttctcggatgaggtggtgcatatgacccaagccttcatttctgagagaact

SEQ ID NO: 804193 - DNA, 120 bp, Artificial Sequence
  ENSG00000256717_2 (sequence is synthesized)
tttctcttcctggctcttcttttgcagcagcagccctctattccatctatcactacaaaataattttttgcatgttctcccaagagtatgagaaacccaaaacatccaggaggccattac

SEQ ID NO: 804194 - DNA, 120 bp, Artificial Sequence
  ENSG00000256717_3 (sequence is synthesized)
aacttccaattcagtggaataaactttgtgtttcctcatggaaacatacctccactgagaggtaatataggatagtagttaagaccagggacactgatcttaaactgtgttcaaattctg

SEQ ID NO: 804195 - DNA, 120 bp, Artificial Sequence
  ENSG00000256714_0 (sequence is synthesized)
aatgcttgtcagcagccactaactcagcagatgatctccatgaagactgaatgaaaacactacaagaacaagaatcatcaaaagagcctatcaagattctagtttgtaaccaacagatgt

SEQ ID NO: 804196 - DNA, 120 bp, Artificial Sequence
  ENSG00000256714_1 (sequence is synthesized)
gctgagccttgaggataaggtgttaaaaactattggaaatgcaaggacacaagcagcagagtaaaaaagcaacctacagaatgggaaagaacatttgcaaatcatatatgtgatagggag

SEQ ID NO: 804197 - DNA, 120 bp, Artificial Sequence
  ENSG00000256714_2 (sequence is synthesized)
ttagtatctagaatatataaaattctgcaactcaacaaaaacaaagttctggagattggttgtgcaatattgtgaatacagtttacactactggactgtaaaatggttaagatattaaac

SEQ ID NO: 804198 - DNA, 120 bp, Artificial Sequence
  ENSG00000243004_0 (sequence is synthesized)
gcaagatgcatattggatatctaaatagagatatcaagaaatgaagatatgcatttccagttccagagagaaattcacactggaaatataaatttaggaattttaaagttagtggtcaca

SEQ ID NO: 804199 - DNA, 120 bp, Artificial Sequence
  ENSG00000243004_1 (sequence is synthesized)
aaggagcagccagtgagataagcaaaaagaaaagcaagagatatggaactgaacttccctttggcaaaaaatttagaaaatgataatgaggccttggagatacaacaatggtacaagaga

SEQ ID NO: 804200 - DNA, 120 bp, Artificial Sequence
  ENSG00000243004_2 (sequence is synthesized)
acatattcacgaccacaagaagctgacagactaggtatactgaggaaataaaattaagacagactgaagccaaatcaggggaatcttcaggcttgctccaggaaatcataggatcaatta

SEQ ID NO: 804201 - DNA, 120 bp, Artificial Sequence
  ENSG00000243004_3 (sequence is synthesized)
ttggaccatctactactctgcctttccatccccatgaaacactgagatgatttatatgaatgaaattgctggtgattttccaggtccaacatgagttagttagtaaatcttacgcaccat

SEQ ID NO: 804202 - DNA, 120 bp, Artificial Sequence
  ENSG00000243004_4 (sequence is synthesized)
acacctgacctcttcagttcatcagtggggttcaccagcatcacccccatttttcatggggagaaactcagaagtggagagaacgtctgaggctacatagccagtacaaaatcgcttctt

SEQ ID NO: 804203 - DNA, 120 bp, Artificial Sequence
  ENSG00000243004_5 (sequence is synthesized)
gtggccagtcacggctgcccgctttccacacctgacctcttcagttcatcagtggggttcaccagcatcacccccatttttcatggggagaaactcagaagtggagagaacgtctgaggc

SEQ ID NO: 804204 - DNA, 120 bp, Artificial Sequence
  ENSG00000243004_6 (sequence is synthesized)
ccaatgtgaccttacaaatcttacatagatttctctgtggtcaactctaatcagcaacactcagagacactcagtgaagaaagccctgggaaacactatttagtttagcccaggggaaat

SEQ ID NO: 804205 - DNA, 120 bp, Artificial Sequence
  ENSG00000243004_7 (sequence is synthesized)
tacaaggccatgtcaccttgaaactggaacatgaggagaggtgaggatggagctgctgcagccatgttgttaccataaagggaaagcccagagctgctgggcagctttgtggagcccagg

SEQ ID NO: 804206 - DNA, 120 bp, Artificial Sequence
  ENSG00000243004_8 (sequence is synthesized)
ggtgtgtagaaaaacaagataagcaaaaagaaaagcaagagatatggaactgaacttccctttggcaaaaaatttagaaaatgataatgagactccgctttctgtctctctgaagataac

SEQ ID NO: 804207 - DNA, 120 bp, Artificial Sequence
  ENSG00000243004_9 (sequence is synthesized)
gttaagctgcagctccgtatctgtgaaaacccatttcacagcatctgcatccctggattgctaaatacccttgtctagttacccaaatattaatggatcccatggaataaggtggcatga

SEQ ID NO: 804208 - DNA, 120 bp, Artificial Sequence
  ENSG00000243004_10 (sequence is synthesized)
tttaggcacaagcaattaccaaaggattttgaaaagcagtaactccaaattatcttgtaaagttgagaataatctgagaagagctattgtaagactgggaatcaagtaacaaaataaaga

SEQ ID NO: 804209 - DNA, 120 bp, Artificial Sequence
  ENSG00000243004_11 (sequence is synthesized)
tttagccaatgtctgtatctattgctctcaacagaaccataactctcataaaaatgtaactttttataaaatttttataaagaaaactttatatagaaatacagtatcattacttatgag

SEQ ID NO: 804210 - DNA, 120 bp, Artificial Sequence
  ENSG00000243004_12 (sequence is synthesized)
ttgttaaattcttccaacttagaccagaaaccagaattggttgatttttaaaacaattgcattgttgttacatggagtggaaaaagaattattaattgggagtctatgaacaggctaaaa

SEQ ID NO: 804211 - DNA, 120 bp, Artificial Sequence
  ENSG00000243004_13 (sequence is synthesized)
atatatctgccacagtgaacatcaataatcagttaacaattaaagggcaatttaaaacccaagcagagaatgctagtgaataacttaaatattgaacaaaatccagaattataaaaagaa

SEQ ID NO: 804212 - DNA, 77 bp, Artificial Sequence
  ENSG00000243004_14 (sequence is synthesized)
atcgcttcttgacctgcacaactttctgatttgatgagttcaacagaaaccaactcaagggagaagaataaagacat

SEQ ID NO: 804213 - DNA, 120 bp, Artificial Sequence
  ENSG00000243004_15 (sequence is synthesized)
aatgataatgaggaacatcgatttcagcataccttaaaccttttgaacagacttgtcgatactctcttggaaaagtatttttaaaaatagaattgaatatttttaaactttcatcccaat

SEQ ID NO: 804214 - DNA, 120 bp, Artificial Sequence
  ENSG00000243004_16 (sequence is synthesized)
agaaagctaaagttaatgaggaaacttggattcatttcacaaaacgttgcttgtaagctattttgcttggctacatgttccctggacaaacccaaaagactggtataaattccaatactg

SEQ ID NO: 804215 - DNA, 120 bp, Artificial Sequence
  ENSG00000243004_17 (sequence is synthesized)
catcatgtaggcattgtatcatctcacattgtcacaagaaggaaaatcctcaatgcctgagaaatgagggacattccaaagccacggattgatctgaaatacaggtctttggaaatcctc

SEQ ID NO: 804216 - DNA, 120 bp, Artificial Sequence
  ENSG00000243004_18 (sequence is synthesized)
ctccagattccccagagcatgacagtgacttcacgtggatacagattttgcagttatcaactaacccatcaattagcatttatggagcactaattggtgtcaacccaggtaccataagta

SEQ ID NO: 804217 - DNA, 120 bp, Artificial Sequence
  ENSG00000243004_19 (sequence is synthesized)
aacaatcttggaatatgctgaagatggcagactacaaagtagaaggagacaaagtttgtgaaagaccaggtggaggaaagtcatccactaatcaggagcccttttatggaatctacgtaa

SEQ ID NO: 804218 - DNA, 120 bp, Artificial Sequence
  ENSG00000243004_20 (sequence is synthesized)
acaagaaataaacaaaggtttagtccattatacctttcaagtcaacagcaaagcagacagcctactctaattaatgtatccattctaagggaaaattatattaaatgttatattttgaaa

SEQ ID NO: 804219 - DNA, 120 bp, Artificial Sequence
  ENSG00000285492_0 (sequence is synthesized)
agttggcagagagagagcacaccaatgagtgagcacaggcacatgtgtcttctgcttggaatagcccttctcagggcacctctgtctggaatggcccacgtgtgttctgcctgctccggt

SEQ ID NO: 804220 - DNA, 120 bp, Artificial Sequence
  ENSG00000285492_1 (sequence is synthesized)
ccactgtgatcctgagactctaagctcagctcctggccctcttggagtggcaccaccatgcctggtccccagcctcccagagcacccaagggggaaagctgtggtgtccctgctacaaag

SEQ ID NO: 804221 - DNA, 120 bp, Artificial Sequence
  ENSG00000285492_2 (sequence is synthesized)
cacaggctcaggaacctggctcagagctgctcctcagtgccagctgctggactggacaagattttaggcaaggcacggccacacaccaggaagagcctggcatccgcagtgaccctcgag

SEQ ID NO: 804222 - DNA, 120 bp, Artificial Sequence
  ENSG00000285492_3 (sequence is synthesized)
cagctgtccctgcagctgggcctgcccctcaagcacgctgagcctgtccttcacagccccatggtgctgacccagggccctgagaccaccaggaggcacctcttcctcttcagggactgg

SEQ ID NO: 804223 - DNA, 120 bp, Artificial Sequence
  ENSG00000285492_4 (sequence is synthesized)
ctggtcattgccaagcagaggtcttccaagagctacagagtcgaacagaagctgcatctatctggcgtgcaggctgtcacctgtgacagagaggaaaggcaggatggggacaaagaccag

SEQ ID NO: 804224 - DNA, 120 bp, Artificial Sequence
  ENSG00000285492_5 (sequence is synthesized)
gatctcactatcagtttaggaaattctctggtcttcatgctggcttctgacccttgtgtcgccgagtttccctcttccggcctcttcttgaagcctcttcatcctctcctgacatccata
